United States Patent Application Publication US 2011/0183924 A1 - sequence listing, part 23

SEQ ID NO: 56369 - DNA, 2074 bp, Homo sapiens
cactctggctgggagcagaaggcagcctcggtctctgggcggcggcggcggccctctctgccctggccgcgctgtgtggtgaccgcaggcccgagacatgagggcggcccgtgctctgctgcccctgctgctgcaggcctgctggacagccgcgcaggatgagccggagaccccgagggccgtggccttccaggactgccccgtggacctgttctttgtgctggacacctctgagagcgtggccctgaggctgaagccctacggggccctcgtggacaaagtcaagtccttcaccaagcgcttcatcgacaacctgagggacaggtactaccgctgtgaccgaaacctggtgtggaacgcaggcgcgctgcactacagtgacgaggtggagatcatccaaggcctcacgcgcatgcctggcggccgcgacgcactcaaaagcagcgtggacgcggtcaagtactttgggaagggcacctacaccgactgcgctatcaagaaggggctggagcagctcctcgtggggggctcccacctgaaggagaataagtacctgattgtggtgaccgacgggcaccccctggagggctacaaggaaccctgtggggggctggaggatgctgtgaacgaggccaagcacctgggcgtcaaagtcttctcggtggccatcacacccgaccacctggagccgcgtctgagcatcatcgccacggaccacacgtaccggcgcaacttcacggcggctgactggggccagagccgcgacgcagaggaggccatcagccagaccatcgacaccatcgtggacatgatcaaaaataacgttgagcaagtgtgctgctccttcgaatgccagcctgcaagaggacctccgggcctccggggcgaccccggctttgagggagaacgaggcaagccggggctcccaggagagaagggagaagccggagatcctggaagacccggggacctcggacctgttgggtaccagggaatgaagggagaaaaagggagccgtggggagaagggctccaggggaccaaagggctacaagggagagaagggcaagcgtggcatcgacggggtggacggcgtgaagggggagatggggtacccaggcctgccaggctgcaagggctcgccgggttttgacggcattcaaggaccccctggccccaagggagaccccggcgcctttggactgaaaggagaaaagggcgagcctggagctgacggggaggccgggagaccaggagctcggggaccatctggagacgaggggccagccggagagcctgggccccccggagagaaaggagaggcgggcgacgaggggaacccaggacctgacggtgcccccggggagcggggtggccctggagagagaggaccacgggggaccccaggcccgcggggaccaagaggagaccctggtgaagctggcacctctgtgctgcatcccaccagcctgagcaagacgccctctcggggcctgtgccgcactagcctccctctcctctgtccccatagctggtttttcccaccaatcctcacctaacagttactttacaattaaactcaaagcaagctcttctcctcagcttggggcagccattggcctctgtctcgttttgggaaaccaaggtcaggaggccgttgcagacataaatctcggcgactcggccccgtctcctgagggtcctgctggtgaccggcctggaccttggccctacagccctggaggccgctgctgaccagcactgaccccgacctcagagagtactcgcaggggcgctggctgcactcaagaccctcgagattaacggtgctaaccccgtctgctcctccctcccgcagagactggggcctggactggacatgagagccccttggtgccacagagggctgtgtcttactagaaacaacgcaaacctctccttcctcagaatagtgatgtgttcgacgttttatcaaaggccccctttctatgttcatgttagttttgctccttctgtgtttttttctgaaccatatccatgttgctgacttttccaaataaaggttttcactcctc

SEQ ID NO: 56370 - DNA, 4161 bp, Homo sapiens
  misc_feature (2783)..(2784): n is a, c, g, or t
  misc_feature (2786)..(2786): n is a, c, g, or t
  misc_feature (2788)..(2789): n is a, c, g, or t
  misc_feature (2795)..(2795): n is a, c, g, or t
  misc_feature (2797)..(2797): n is a, c, g, or t
  misc_feature (2799)..(2799): n is a, c, g, or t
  misc_feature (2802)..(2802): n is a, c, g, or t
  misc_feature (2805)..(2805): n is a, c, g, or t
  misc_feature (2807)..(2807): n is a, c, g, or t
  misc_feature (3353)..(3353): n is a, c, g, or t
cactctggctgggagcagaaggcagcctcggtctctgggcggcggcggcggccctctctgccctggccgcgctgtgtggtgaccgcaggcccgagacatgagggcggcccgtgctctgctgcccctgctgctgcaggcctgctggacagccgcgcaggatgagccggagaccccgagggccgtggccttccaggactgccccgtggacctgttctttgtgctggacacctctgagagcgtggccctgaggctgaagccctacggggccctcgtggacaaagtcaagtccttcaccaagcgcttcatcgacaacctgagggacaggtactaccgctgtgaccgaaacctggtgtggaacgcaggcgcgctgcactacagtgacgaggtggagatcatccaaggcctcacgcgcatgcctggcggccgcgacgcactcaaaagcagcgtggacgcggtcaagtactttgggaagggcacctacaccgactgcgctatcaagaaggggctggagcagctcctcgtggggggctcccacctgaaggagaataagtacctgattgtggtgaccgacgggcaccccctggagggctacaaggaaccctgtggggggctggaggatgctgtgaacgaggccaagcacctgggcgtcaaagtcttctcggtggccatcacacccgaccacctggagccgcgtctgagcatcatcgccacggaccacacgtaccggcgcaacttcacggcggctgactggggccagagccgcgacgcagaggaggccatcagccagaccatcgacaccatcgtggacatgatcaaaaataacgttgagcaagtgtgctgctccttcgaatgccagcctgcaagaggacctccgggcctccggggcgaccccggctttgagggagaacgaggcaagccggggctcccaggagagaagggagaagccggagatcctggaagacccggggacctcggacctgttgggtaccagggaatgaagggagaaaaagggagccgtggggagaagggctccaggggaccaaagggctacaagggagagaagggcaagcgtggcatcgacggggtggacggcgtgaagggggagatggggtacccaggcctgccaggctgcaagggctcgccgggttttgacggcattcaaggaccccctggccccaagggagaccccggcgcctttggactgaaaggagaaaagggcgagcctggagctgacggggaggccgggagaccaggagctcggggaccatctggagacgaggggccagccggagagcctgggccccccggagagaaaggagaggcgggcgacgaggggaacccaggacctgacggtgcccccggggagcggggtggccctggagagagaggaccacgggggaccccaggcccgcggggaccaagaggagaccctggtgaagctggcccgcagggtgatcagggaagagaagggcccgttggtgtccctggagacccgggcgaggctggccctatcggacctaaaggctaccgaggcgatgagggtcccccagggtccgagggtgccagaggagccccaggacctgccggaccccctggagacccggggctgatgggagaaaggggagaagacggccccgctggaaatggcaccgagggcttccccggcttccccgggtatcccgggaacaggggcgctcccgggataaacggcacgaagggctaccccggcctcaagggggacgagggagaagccggggaccccggagacgataacaacgacattgcaccccgaggagtcaaaggagcaaaggggtaccggggtcccgagggcccccagggacccccaggacaccaaggaccgcctgggccggacgaatgcgagattttggacatcatcatgaaaatgtgctcttgctgtgaatgcaagtgcggccccatcgacctcctgttcgtgctggacagctcagagagcattggcctgcagaacttcgagattgccaaggacttcgtcgtcaaggtcatcgaccggctgagccgggacgagctggtcaagttcgagccagggcagtcgtacgcgggtgtggtgcagtacagccacagccagatgcaggagcacgtgagcctgcgcagccccagcatccggaacgtgcaggagctcaaggaagccatcaagagcctgcagtggatggcgggcggcaccttcacgggggaggccctgcagtacacgcgggaccagctgctgccgcccagcccgaacaaccgcatcgccctggtcatcactgacgggcgctcagacactcagagggacaccacaccgctcaacgtgctctgcagccccggcatccaggtggtctccgtgggcatcaaagacgtgtttgacttcatcccaggctcagaccagctcaatgtcatttcttgccaaggcctggcaccatcccagggccggcccggcctctcgctggtcaaggagaactatgcagagctgctggaggatgccttcctgaagaatgtcaccgcccagatctgcatagacaagaagtgtccagattacacctgccccatcacgttctcctccccggctgacatcaccatcctgctggacggctccgccagcgtgggcagccacaactttgacaccaccaagcgcttcgccaagcgcctggccgagcgcttcctcacagcgggcaggacggaccccgcccacgacgtgcgggtggcggtggtgcagtacagcggcacgggccagcagcgcccagagcgggcgtcgctgcagttcctgcagnncnanncggccntngncangcntngatccatggactttatcaacgacgccaccgacgtcaacgatgccctgggctatgtgacccgcttctaccgcgaggcctcgtccggcgctgccaagaagaggctgctgctcttctcagatggcaactcgcagggcgccacgcccgctgccatcgagaaggccgtgcaggaagcccagcgggcaggcatcgagatcttcgtggtggtcgtgggccgccaggtgaatgagccccacatccgcgtcctggtcaccggcaagacggccgagtacgacgtggcctacggcgagagccacctgttccgtgtccccagctaccaggccctgctccgcggtgtcttccaccagacagtctccaggaaggtggcgctgggctagcccaccctgcacgccggcaccaaaccctgtcctcccacccctccccactcatcactaaacagagaaaagcttggaaagccaggacacaacgctgctgcctgctttgtgcagggtcctccggggctcagccctgagttggcatcacctgcgcagggccctctggggctcagcnctgagctagtgtcacctgcacagggccctctgaggctcagccctgagctggcgtcacctgtgcagggccctctggggctcagccctgagctggcctcacctgggttccccaccccgggctctcctgccctgccctcctgcccgccctccctcctgcctgcgcagctccttccctaggcacctctgtgctgcatcccaccagcctgagcaagacgccctctcggggcctgtgccgcactagcctccctctcctctgtccccatagctggtttttcccaccaatcctcacctaacagttactttacaattaaactcaaagcaagctcttctcctcagcttggggcagccattggcctctgtctcgttttgggaaaccaaggtcaggaggccgttgcagacataaatctcggcgactcggccccgtctcctgagggtcctgctggtgaccggcctggaccttggccctacagccctggaggccgctgctgaccagcactgaccccgacctcagagagtactcgcaggggcgctggctgcactcaagaccctcgagattaacggtgctaaccccgtctgctcctccctcccgcagagactggggcctggactggacatgagagccccttggtgccacagagggctgtgtcttactagaaacaacgcaaacctctccttcctcagaatagtgatgtgttcgacgttttatcaaaggccccctttctatgttcatgttagttttgctccttctgtgtttttttctgaaccatatccatgttgctgacttttccaaataaaggttttcactcctc

SEQ ID NO: 56371 - DNA, 373 bp, Homo sapiens
ccgtgcaggaagcccagcgggcaggcatcgagatcttcgtggtggtcgtgggccgccaggtgaatgagccccacatccgcgtcctggtcaccggcaagacggccgagtacgacgtggcctacggcgagagccacctgttccgtgtccccagctaccaggccctgctccgcggtgtcttccaccagacagtctccaggaaggtggcgctgggctagcccaccctgcacgccggcaccaaaccctgtcctcccacccctccccactcatcactaaacagagtaaaatgtgatgcgaattttcccgaccaacctgattcgctagattttttttaaggaaaagcttggaaagccaggacacaacgctgctgcctgct

SEQ ID NO: 56372 - DNA, 439 bp, Homo sapiens
gccgacacggtccgagaagacgacagaaggatgctgtacttagtgctgttgcggtaaaggagtgaagagaagacgggattcagtgaatgttctggaaaatggctagagtgtacctagagagggaaaatttcaatagacagtaggccagttcaagactggatagaggccgggcgcggggcctgtaatcctagcactttgggaggtcgaggcgggtggatcacctgagctcaagagttcgagagcaacctgaccaacatggtgaaacaccgtctctactaaaaatacaaaaattagctaggtgtggtggtgggctcctgtaatcccaggtactcgggaggctgaggcaggagaatcgcttgaacccggaaggcgaaggttgcaatgagccgagatcatgccattgcactccagcctgggcgacttagcgaaactccgtctc

SEQ ID NO: 56373 - DNA, 2060 bp, Homo sapiens
cgagggaaaaattcggctaggacaggctggtgttaccctgagggccgctggccaattggcgcgctcgtctgaatggcgtttggcgcggagcagtgacggctgcgataatagcgaggcagcagtgcagctttcagagggtccgggctcagaggggctatgattcggagggttctgccgcacggcatgggccggggcctcttgacccggaggccaggcacgcgcagaggaggcttttctctggactgggatggaaaggtgtctgagattaagaagaagatcaagtcgatcctgcctggaaggtcctgtgatctactgcaagacaccagccacctgcctcccgagcactcggatgtggtgatcgtgggaggtggggtgcttggcttgtctgtggcctattggctgaagaagctggagagcagacgaggtgctattcgagtgctagtggtggaacgggaccacacgtattcacaggcctccactgggctctcagtaggtgggatttgtcagcagttctcattgcctgagaacatccagctctccctcttttcagccagctttctacggaacatcaatgagtacctggccgtagtcgatgctcctcccctggacctccggttcaacccctcgggctacctcttgctggcttcagaaaaggatgctgcagccatggagagcaacgtgaaagtgcagaggcaggagggagccaaagtttctctgatgtctcctgatcagcttcggaacaagtttccctggataaacacagagggagtggctttggcgtcttatgggatggaggacgaaggttggtttgacccctggtgtctgctccaggggcttcggcgaaaggtccagtccttgggagtccttttctgccagggagaggtgacacgttttgtctcttcatctcaacgcatgttgaccacagatgacaaagcggtggtcttgaaaaggatccatgaagtccatgtgaagatggaccgcagcctggagtaccagcctgtggaatgcgccattgtgatcaacgcagccggagcctggtctgcgcaaatcgcagcactggctggtgttggagaggggccgcctggcaccctgcagggcaccaagctacctgtggagccgaggaaaaggtatgtgtatgtgtggcactgcccccagggaccaggcctagagactccgcttgttgcagacaccagtggagcctattttcgccgggaaggattaggtagcaactacctaggtggtcgtagccccactgagcaggaagaaccggacccggcgaacctggaagtggaccatgatttcttccaggacaaggtgtggccccatttggccctgagggtcccagcttttgagactctgaaggttcagagcgcctgggccggctattacgactacaacacctttgaccagaatggcgtggtgggcccccacccgctagttgtcaacatgtactttgctactggcttcagtggtcacgggctccagcaggcccctggcattgggcgagctgtagcagagatggtactgaagggcaggttccagaccatcgacctgagccccttcctctttacccgcttttacttgggagagaagatccaggagaacaacatcatctgagcatgtgtgctctgcactggctccactggcttgcatcctggctgtgttcacagccttgtttgctgcttccatcttccccagtactgtgccaggccttctccccctccccagtgtcctctcctctcaggcaggccattgcacccatatggctgggcaggcacaggcagtgaggccgaggccaatagcgagtgatgagcgggatcctaggactgatctgtagcccatgctgatgtcacccaccagggcaatccatctggaggcctgagcaccctggcccaggactggcttcatcctggcactgaccaggaaagactgcctctgaccctcttagcagacagagcccaggcatgggagcactctggggcagcctggctcaggtttattgattttcgtctgtttaccctatccattaatcaatacatgtaattaactccttccctcca

SEQ ID NO: 56374 - DNA, 2319 bp, Homo sapiens
cgagggaaaaattcggctaggacaggctggtgttaccctgagggccgctggccaattggcgcgctcgtctgaatggcgtttggcgcggagcagtgacggctgcgataatagcgaggcagcagtgcagctttcagagggtccgggctcagaggggctatgattcggagggttctgccgcacggcatgggccggggcctcttgacccggaggccaggcacgcgcagaggaggcttttctctggactgggatggaaaggtgtctgagattaagaagaagatcaagtcgatcctgcctggaaggtcctgtgatctactgcaagacaccagccacctgcctcccgagcactcggatgtggtgatcgtgggaggtggggtgcttggcttgtctgtggcctattggctgaagaagctggagagcagacgaggtgctattcgagtgctagtggtggaacgggaccacacgtattcacaggcctccactgggctctcagtaggtgggatttgtcagcagttctcattgcctgagaacatccagctctccctcttttcagccagctttctacggaacatcaatgagtacctggccgtagtcgatgctcctcccctggacctccggttcaacccctcgggctacctcttgctggcttcagaaaaggatgctgcagccatggagagcaacgtgaaagtgcagaggcaggagggagccaaagtttctctgatgtctcctgatcagcttcggaacaagtttccctggataaacacagagggagtggctttggcgtcttatgggatggaggacgaaggttggtttgacccctggtgtctgctccaggggcttcggcgaaaggtccagtccttgggagtccttttctgccagggagaggtgacacgttttgtctcttcatctcaacgcatgttgaccacagatgacaaagcggtggtcttgaaaaggatccatgaagtccatgtgaagatggaccgcagcctggagtaccagcctgtggaatgcgccattgtgatcaacgcagccggagcctggtctgcgcaaatcgcagcactggctggtgttggagaggggccgcctggcaccctgcagggcaccaagctacctgtggagccgaggaaaaggtatgtgtatgtgtggcactgcccccagggaccaggcctagagactccgcttgttgcagacaccagtggagcctattttcgccgggaaggattaggtagcaactacctaggtggtcgtagccccactgagcaggaagaaccggacccggcgaacctggaagtggaccatgatttcttccaggacaaggtgtggccccatttggccctgagggtcccagcttttgagactctgaaggtaactggcaagggctggttttcctttttatttttggacattggatgggacagatgacagtggagcacattggtcccctcggacccgtgactgccgtagtccctccatgtcacaactgctaaggaatttcttggacacatcccatcccatagacccctcagcagcaggtagagggtactctgtgctgagccctgaggggagtgaggatggagtgtggctacagccttcccgagaaccccagtgttttgtgcacccgcaggttcagagcgcctgggccggctattacgactacaacacctttgaccagaatggcgtggtgggcccccacccgctagttgtcaacatgtactttgctactggcttcagtggtcacgggctccagcaggcccctggcattgggcgagctgtagcagagatggtactgaagggcaggttccagaccatcgacctgagccccttcctctttacccgcttttacttgggagagaagatccaggagaacaacatcatctgagcatgtgtgctctgcactggctccactggcttgcatcctggctgtgttcacagccttgtttgctgcttccatcttccccagtactgtgccaggccttctccccctccccagtgtcctctcctctcaggcaggccattgcacccatatggctgggcaggcacaggcagtgaggccgaggccaatagcgagtgatgagcgggatcctaggactgatctgtagcccatgctgatgtcacccaccagggcaatccatctggaggcctgagcaccctggcccaggactggcttcatcctggcactgaccaggaaagactgcctctgaccctcttagcagacagagcccaggcatgggagcactctggggcagcctggctcaggtttattgattttcgtctgtttaccctatccattaatcaatacatgtaattaactccttccctcca

SEQ ID NO: 56375 - DNA, 2277 bp, Homo sapiens
cgagggaaaaattcggctaggacaggctggtgttaccctgagggccgctggccaattggcgcgctcgtctgaatggcgtttggcgcggagcagtgacggctgcgataatagcgaggcagcagtgcagctttcagagggtccgggctcagaggggctatgattcggagggttctgccgcacggcatgggccggggcctcttgacccggaggccaggcacgcgcagaggaggcttttctctggtgcttggcacaatgcatgaagagactgatggcatgtggactattcagaaaactgtggcaacactgttgggtgcaaggtgaccttatgagatgggctgacagtggggactgccaactcatgtgtctgtttagctcaccttttcctgtgcccatcctccaaccccccaaccatgtgggaaggaaatgtttggccctctgaccctaactacatcccacagactgggatggaaaggtgtctgagattaagaagaagatcaagtcgatcctgcctggaaggtcctgtgatctactgcaagacaccagccacctgcctcccgagcactcggatgtggtgatcgtgggaggtggggtgcttggcttgtctgtggcctattggctgaagaagctggagagcagacgaggtgctattcgagtgctagtggtggaacgggaccacacgtattcacaggcctccactgggctctcagtaggtgggatttgtcagcagttctcattgcctgagaacatccagctctccctcttttcagccagctttctacggaacatcaatgagtacctggccgtagtcgatgctcctcccctggacctccggttcaacccctcgggctacctcttgctggcttcagaaaaggatgctgcagccatggagagcaacgtgaaagtgcagaggcaggagggagccaaagtttctctgatgtctcctgatcagcttcggaacaagtttccctggataaacacagagggagtggctttggcgtcttatgggatggaggacgaaggttggtttgacccctggtgtctgctccaggggcttcggcgaaaggtccagtccttgggagtccttttctgccagggagaggtgacacgttttgtctcttcatctcaacgcatgttgaccacagatgacaaagcggtggtcttgaaaaggatccatgaagtccatgtgaagatggaccgcagcctggagtaccagcctgtggaatgcgccattgtgatcaacgcagccggagcctggtctgcgcaaatcgcagcactggctggtgttggagaggggccgcctggcaccctgcagggcaccaagctacctgtggagccgaggaaaaggtatgtgtatgtgtggcactgcccccagggaccaggcctagagactccgcttgttgcagacaccagtggagcctattttcgccgggaaggattaggtagcaactacctaggtggtcgtagccccactgagcaggaagaaccggacccggcgaacctggaagtggaccatgatttcttccaggacaaggtgtggccccatttggccctgagggtcccagcttttgagactctgaaggttcagagcgcctgggccggctattacgactacaacacctttgaccagaatggcgtggtgggcccccacccgctagttgtcaacatgtactttgctactggcttcagtggtcacgggctccagcaggcccctggcattgggcgagctgtagcagagatggtactgaagggcaggttccagaccatcgacctgagccccttcctctttacccgcttttacttgggagagaagatccaggagaacaacatcatctgagcatgtgtgctctgcactggctccactggcttgcatcctggctgtgttcacagccttgtttgctgcttccatcttccccagtactgtgccaggccttctccccctccccagtgtcctctcctctcaggcaggccattgcacccatatggctgggcaggcacaggcagtgaggccgaggccaatagcgagtgatgagcgggatcctaggactgatctgtagcccatgctgatgtcacccaccagggcaatccatctggaggcctgagcaccctggcccaggactggcttcatcctggcactgaccaggaaagactgcctctgaccctcttagcagacagagcccaggcatgggagcactctggggcagcctggctcaggtttattgattttcgtctgtttaccctatccattaatcaatacatgtaattaactccttccctcca

SEQ ID NO: 56376 - DNA, 1839 bp, Homo sapiens
cgagggaaaaattcggctaggacaggctggtgttaccctgagggccgctggccaattggcgcgctcgtctgaatggcgtttggcgcggagcagtgacggctgcgataatagcgaggcagcagtgcagctttcagagggtccgggctcagaggggctatgattcggagggttctgccgcacggcatgggccggggcctcttgacccggaggccaggcacgcgcagaggaggcttttctctggtattcacaggcctccactgggctctcagtaggtgggatttgtcagcagttctcattgcctgagaacatccagctctccctcttttcagccagctttctacggaacatcaatgagtacctggccgtagtcgatgctcctcccctggacctccggttcaacccctcgggctacctcttgctggcttcagaaaaggatgctgcagccatggagagcaacgtgaaagtgcagaggcaggagggagccaaagtttctctgatgtctcctgatcagcttcggaacaagtttccctggataaacacagagggagtggctttggcgtcttatgggatggaggacgaaggttggtttgacccctggtgtctgctccaggggcttcggcgaaaggtccagtccttgggagtccttttctgccagggagaggtgacacgttttgtctcttcatctcaacgcatgttgaccacagatgacaaagcggtggtcttgaaaaggatccatgaagtccatgtgaagatggaccgcagcctggagtaccagcctgtggaatgcgccattgtgatcaacgcagccggagcctggtctgcgcaaatcgcagcactggctggtgttggagaggggccgcctggcaccctgcagggcaccaagctacctgtggagccgaggaaaaggtatgtgtatgtgtggcactgcccccagggaccaggcctagagactccgcttgttgcagacaccagtggagcctattttcgccgggaaggattaggtagcaactacctaggtggtcgtagccccactgagcaggaagaaccggacccggcgaacctggaagtggaccatgatttcttccaggacaaggtgtggccccatttggccctgagggtcccagcttttgagactctgaaggttcagagcgcctgggccggctattacgactacaacacctttgaccagaatggcgtggtgggcccccacccgctagttgtcaacatgtactttgctactggcttcagtggtcacgggctccagcaggcccctggcattgggcgagctgtagcagagatggtactgaagggcaggttccagaccatcgacctgagccccttcctctttacccgcttttacttgggagagaagatccaggagaacaacatcatctgagcatgtgtgctctgcactggctccactggcttgcatcctggctgtgttcacagccttgtttgctgcttccatcttccccagtactgtgccaggccttctccccctccccagtgtcctctcctctcaggcaggccattgcacccatatggctgggcaggcacaggcagtgaggccgaggccaatagcgagtgatgagcgggatcctaggactgatctgtagcccatgctgatgtcacccaccagggcaatccatctggaggcctgagcaccctggcccaggactggcttcatcctggcactgaccaggaaagactgcctctgaccctcttagcagacagagcccaggcatgggagcactctggggcagcctggctcaggtttattgattttcgtctgtttaccctatccattaatcaatacatgtaattaactccttccctcca

SEQ ID NO: 56377 - DNA, 1870 bp, Homo sapiens
cgagggaaaaattcggctaggacaggctggtgttaccctgagggccgctggccaattggcgcgctcgtctgaatggcgtttggcgcggagcagtgacggctgcgataatagcgaggcagcagtgcagctttcagagggtccgggctcagaggggctatgattcggagggttctgccgcacggcatgggccggggcctcttgacccggaggccaggcacgcgcagaggaggcttttctctggactgggatggaaaggtgtctgagattaagaagaagatcaagtcgatcctgcctggaaggtcctgtgatctactgcaagacaccagccacctgcctcccgagcactcggatgtggtgatcgtgggaggtggggtgcttggcttgtctgtggcctattggctgaagaagctggagagcagacgaggtgctattcgagtgctagtggtggaacgggaccacacgtattcacaggcctccactgggctctcagtaggtgggatttgtcagcagttctcattgcctgagaacatccagctctccctcttttcagccagctttctacggaacatcaatgagtacctggccgtagtcgatgctcctcccctggacctccggttcaacccctcgggctacctcttgctggcttcagaaaaggatgctgcagccatggagagcaacgtgaaagtgcagaggcaggagggagccaaagtttctctgatgtctcctgatcagcttcggaacaagtttccctggataaacacagagggagtggctttggcgtcttatgggatggaggacgaaggttggtttgacccctggtgtctgctccaggggcttcggcgaaaggtccagtccttgggagtccttttctgccagggagaggtgacacgttttgtctcttcatctcaacgcatgttgaccacagatgacaaagcggtggtcttgaaaaggatccatgaagtccatgtgaagatggaccgcagcctggagtaccagcctgtggaatgcgccattgtgatcaacgcagccggagcctggtctgcgcaaatcgcagcactggctggtgttggagaggggccgcctggcaccctgcagggcaccaagctacctgtggagccgaggaaaaggtatgtgtatgtgtggcactgcccccagggaccaggcctagagactccgcttgttgcagacaccagtggagcctattttcgccgggaaggattaggtagcaactacctaggtggtcgtagccccactgagcaggaagaaccggacccggcgaacctggaagtggaccatgatttcttccaggacaaggtgtggccccatttggccctgagggtcccagcttttgagactctgaaggttcagagcgcctgggccggctattacgactacaacacctttgaccagaatggcgtggtgggcccccacccgctagttgtcaacatgtactttgctactggcttcagtggtcacgggctccagcaggcccctggcattgggcgagctgtagcagagatggtactgaagggcaggttccagaccatcgacctgagccccttcctctttacccgcttttacttgggagagaagatccaggagaacaacatcatctgagcatgtgtgctctgcactggctccactggcttgcatcctggctgtgttcacagccttgtttgctgcttccatcttccccagtactgtgccaggccttctccccctccccagtgtcctctcctctcaggcaggccattgcacccatatggctgggcaggcacaggcagtgaggccgaggccaatagcgagtgatgagcgggatcctaggactgatcttacacatcatcaccagtagatctgtaatacctcacac

SEQ ID NO: 56378 - DNA, 1486 bp, Homo sapiens
cgagggaaaaattcggctaggacaggctggtgttaccctgagggccgctggccaattggcgcgctcgtctgaatggcgtttggcgcggagcagtgacggctgcgataatagcgaggcagcagtgcagctttcagagggtccgggctcagaggggctatgattcggagggttctgccgcacggcatgggccggggcctcttgacccggaggccaggcacgcgcagaggaggcttttctctggactgggatggaaaggtgtctgagattaagaagaagatcaagtcgatcctgcctggaaggtcctgtgatctactgcaagacaccagccacctgcctcccgagcactcggatgtggtgatcgtgggaggtggggtgcttggcttgtctgtggcctattggctgaagaagctggagagcagacgaggtgctattcgagtgctagtggtggaacgggaccacacgtattcacaggcctccactgggctctcagtaggtgggatttgtcagcagttctcattgcctgagaacatccagctctccctcttttcagccagctttctacggaacatcaatgagtacctggccgtagtcgatgctcctcccctggacctccggttcaacccctcgggctacctcttgctggcttcagaaaaggatgctgcagccatggagagcaacgtgaaagtgcagaggcaggagggagccaaagtttctctgatgtctcctgatcagcttcggaacaagtttccctggataaacacagagggagtggctttggcgtcttatgggatggaggacgaaggttggtttgacccctggtgtctgctccaggggcttcggcgaaaggtccagtccttgggagtccttttctgccagggagaggtgacacgttttgtctcttcatctcaacgcatgttgaccacagatgacaaagcggtggtcttgaaaaggatccatgaagtccatgtgaagatggaccgcagcctggagtaccagcctgtggaatgcgccattgtgatcaacgcagccggagcctggtctgcgcaaatcgcagcactggctggtgttggagaggggccgcctggcaccctgcagggcaccaagctacctgtggagccgaggaaaaggtatgtgtatgtgtggcactgcccccagggaccaggcctagagactccgcttgttgcagacaccagtggagcctattttcgccgggaaggattaggtagcaactacctaggtggtcgtagccccactgagcaggaagaaccggacccggcgaacctggaagtggaccatgatttcttccaggacaaggtgtggccccatttggccctgagggtcccagcttttgagactctgaaggttcagagcgcctgggccggctattacgactacaacacctttgaccagaatggcgtggtgggcccccacccgctagttgtcaaaaaccccccaatttggggttttaaacccccctctttttttg

SEQ ID NO: 56379 - DNA, 1221 bp, Homo sapiens
ggggggctgtgtgctgtgttaattgatattagagccccctccagatttgaactgggaccatttctccccatcccctacctgcacagggattgttaaacaagtctgggcctgtccttgtgtcccaggcaatgtaagcgttgtccccacctctcactccagcaggaagaaccggacccggcgaacctggaagtggaccatgatttcttccaggacaaggtgtggccccatttggccctgagggtcccagcttttgagactctgaaggtaactggcaagggctggttttcctttttatttttggacattggatgggacagatgacagtggagcacattggtcccctcggacccgtgactgccgtagtccctccatgtcacaactgctaaggaatttcttggacacatcccatcccatagacccctcagcagcaggtagagggtactctgtgctgagccctgaggggagtgaggatggagtgtggctacagccttcccgagaaccccagtgttttgtgcacccgcaggttcagagcgcctgggccggctattacgactacaacacctttgaccagaatggcgtggtgggcccccacccgctagttgtcaacatgtactttgctactggcttcagtggtcacgggctccagcaggcccctggcattgggcgagctgtagcagagatggtactgaagggcaggttccagaccatcgacctgagccccttcctctttacccgcttttacttgggagagaagatccaggagaacaacatcatctgagcatgtgtgctctgcactggctccactggcttgcatcctggctgtgttcacagccttgtttgctgcttccatcttccccagtactgtgccaggccttctccccctccccagtgtcctctcctctcaggcaggccattgcacccatatggctgggcaggcacaggcagtgaggccgaggccaatagcgagtgatgagcgggatcctaggactgatctgtagcccatgctgatgtcacccaccagggcaatccatctggaggcctgagcaccctggcccaggactggcttcatcctggcactgaccaggaaagactgcctctgaccctcttagcagacagagcccaggcatgggagcactctggggcagcctggctcaggtttattgattttcgtctgtttaccctatccattaatcaatacatgtaattaactccttccctcca

SEQ ID NO: 56380 - DNA, 1548 bp, Homo sapiens
cgagggaaaaattcggctaggacaggctggtgttaccctgagggccgctggccaattggcgcgctcgtctgaatggcgtttggcgcggagcagtgacggctgcgataatagcgaggcagcagtgcagctttcagagggtccgggctcagaggggctatgattcggagggttctgccgcacggcatgggccggggcctcttgacccggaggccaggcacgcgcagaggaggcttttctctggtgcttggcacaatgcatgaagagactgatggcatgtggactattcagaaaactgtggcaacactgttgggtgcaaggtgaccttatgagatgggctgacagtggggactgccaactcatgtgtctgtttagctcaccttttcctgtgcccatcctccaaccccccaaccatgtgggaaggaaatgtttggccctctgaccctaactacatcccacagactgggatggaaaggtgtctgagattaagaagaagatcaagtcgatcctgcctggaaggtcctgtgatctactgcaagacaccagccacctgcctcccgagcactcggatgtggtgatcgtgggaggtggggtgcttggcttgtctgtggcctattggctgaagaagctggagagcagacgaggtgctattcgagtgctagtggtggaacgggaccacacgtattcacaggcctccactgggctctcagtaggtgggatttgtcagcagttctcattgcctgagaacatccagctctccctcttttcagccagctttctacggaacatcaatgagtacctggccgtagtcgatgctcctcccctggacctccggttcaacccctcgggctacctcttgctggcttcagaaaaggatgctgcagccatggagagcaacgtgaaagtgcagaggtgggtgcctggcacagcctcttagctgcttggcagccaaaggtgttgggtgactcctgcaccaggttaggaagcgagaaagtggagttgataagacagatccctgcggtctaggacctcagtgtgtcaggaagaaaatacacagacctgcaatgccctgggagtgctgtaccacagatatggacaaaacactgcgaggtgcttcctaatttgtcagatcatgaaaaccacctggaacacatcccagacctaataaaccagaatctctagggaaggagcccacaaatctgggtttttaacaagaaccttaagtcaggagttagcaaactttttctgtaaagggccagataggtatatattttaggttttgctggccatacagtctctattccaaccactttgctatcacagcatgaaagcagccatagacaaaagtgcaaatgaaggagtgtggctcatttatgaaaacaggcagcaggtcggatttggcaacccctgctctaagtgattctcatggtcaggtgagggtgggcatgtttgtgatgcaatatggccagaggctttatttgtatgtttatttaacaaacacccaagtctcacagtgacatcaattaatatcctaaatgctgtacagatatt

SEQ ID NO: 56381 - DNA, 936 bp, Homo sapiens
cgagggaaaaattcggctaggacaggctggtgttaccctgagggccgctggccaattggcgcgctcgtctgaatggcgtttggcgcggagcagtgacggctgcgataatagcgaggcagcagtgcagctttcagagggtccgggctcagaggggctatgattcggagggttctgccgcacggcatgggccggggcctcttgacccggaggccaggcacgcgcagaggaggcttttctctgggtaaagttgaggacgacagagggtattgtggttctgggttgtccccaacctccgactgtgtgtccttcaggacccgaaaccatggcccacactggcaggacagtgggtcggcttggggaagggggtaagcttacctaccagagcttgtaggggctgtgcaggtgtatggctcccaaggcggcccttttcaggtggcaggtctcacatcattctccatttaagcttacagtcagactgattgataatcggtggcacagatgtgcattaagtcctgcccgtgttcaggatgctgtacttagtgctgttgcggtaaaggagtgaagagaagacgggattcagtgaatgttctggaaaatggctagagtgtacctagagagggaaaatttcaatagacagtaggccagttcaagactggatagaggccgggcgcggggcctgtaatcctagcactttgggaggtcgaggcgggtggatcacctgagctcaagagttcgagagcaacctgaccaacatggtgaaacaccgtctctactaaaaatacaaaaattagctaggtgtggtggtgggctcctgtaatcccaggtactcgggaggctgaggcaggagaatcgcttgaacccggaaggcgaaggttgcaatgagccgagatcatgccattgcactccagcctgggcgacttagcgaaactccgtctc

SEQ ID NO: 56382 - DNA, 642 bp, Homo sapiens
cgagggaaaaattcggctaggacaggctggtgttaccctgagggccgctggccaattggcgcgctcgtctgaatggcgtttggcgcggagcagtgacggctgcgataatagcgaggcagcagtgcagctttcagagggtccgggctcagaggggctatgattcggagggttctgccgcacggcatgggccggggcctcttgacccggaggccaggcacgcgcagaggaggcttttctctgggtaaagttgaggacgacagagggtattgtggttctgggttgtccccaacctccgactgtgtgtccttcaggacccgaaaccatggcccacactggcaggacagtgggtcggcttggggaagggggtaagcttacctaccagagcttgtaggggctgtgcaggtgtatggctcccaaggcggcccttttcaggtggcaggtctcacatcattctccatttaagcttacagtcagactgattgataatcggtggcacagatgtgcattaagtcctgcccgtgttcaggatgctgtacttagtgctgttgcggtaaaggagtgaagagaagacgggattcagtgaatgttctgttttttgagacagagtcttgctctgtcacccaggctggagtgcaatggcac

SEQ ID NO: 56383 - DNA, 819 bp, Homo sapiens
cgagggaaaaattcggctaggacaggctggtgttaccctgagggccgctggccaattggcgcgctcgtctgaatggcgtttggcgcggagcagtgacggctgcgataatagcgaggcagcagtgcagctttcagagggtccgggctcagaggggctatgattcggagggttctgccgcacggcatgggccggggcctcttgacccggaggccaggcacgcgcagaggaggcttttctctgggtaaagttgaggacgacagagggtattgtggttctgggttgtccccaacctccgactgtgtgtccttcaggacccgaaaccatggcccacactggcaggacagtgggtcggcttggggaagggggtaagcttacctaccagagcttgtaggggctgtgcaggtgtatggctcccaaggcggcccttttcaggtggcaggtctcacatcattctccatttaagcttacagtcagactgattgataatcggtggcacagatgtgcattaagtcctgcccgtgttcaggatgctgtacttagtgctgttgcggtaaaggagtgaagagaagacgggattcagtgaatgttctggaaaatggctagagtgtacctagagagggaaaatttcaatagacagtaggccagttcaagactggatagaggccgggcgcttcggccttccaaagtgctgggattactggcgtgaaccaccgcacccagcctgtacttttagtcgagacagggtttcatcatgttggccaggctggtcttgaactcctggcctgaagtgatccgcccgggcccaactggtacggcggg

SEQ ID NO: 56384 - DNA, 581 bp, Homo sapiens
tgaggcttgcttgcagaggggacagcttttttcctgaagatggagactaaggggtgctacacgttgggagtctcggtactccacagccaagctgaaggaggaacacttccctcctgtgtcacgggaactgcccctgggccgtggtagttctctgtccttcatcaggctttgtctctgtggttcagttggttaagatgaccttccccggcttacaagccctagagaggggttggggggcacaggaaatacaatccaagagcagaagtcctcatccctctttgtgagttctctttttcttatcacagggatggaggacgaaggttggtttgacccctggtgtctgctccaggggcttcggcgaaaggtccagtccttgggagtccttttctgccagggagaggtgacacgtgagtctgagcttgtttcctctagcaaccggggcataggcctagactaggtcttatcttctcactcacaagctaagcaagggctggagggggaaaggggtctccctgagagcaggtcctaggcatcttgacctgggctcctcactgatctgcgttgtgacttgtgatctgctt

SEQ ID NO: 56385 - DNA, 1999 bp, Homo sapiens
tgctggtaccgcctccggaagtaacgcggatgtgacggctgcgataatagcgaggcagcagtgcagctttcagagggtccgggctcagaggggctatgattcggagggttctgccgcacggcatgggccggggcctcttgacccggaggccaggcacgcgcagaggaggcttttctctggactgggatggaaaggtgtctgagattaagaagaagatcaagtcgatcctgcctggaaggtcctgtgatctactgcaagacaccagccacctgcctcccgagcactcggatgtggtgatcgtgggaggtggggtgcttggcttgtctgtggcctattggctgaagaagctggagagcagacgaggtgctattcgagtgctagtggtggaacgggaccacacgtattcacaggcctccactgggctctcagtaggtgggatttgtcagcagttctcattgcctgagaacatccagctctccctcttttcagccagctttctacggaacatcaatgagtacctggccgtagtcgatgctcctcccctggacctccggttcaacccctcgggctacctcttgctggcttcagaaaaggatgctgcagccatggagagcaacgtgaaagtgcagaggcaggagggagccaaagtttctctgatgtctcctgatcagcttcggaacaagtttccctggataaacacagagggagtggctttggcgtcttatgggatggaggacgaaggttggtttgacccctggtgtctgctccaggggcttcggcgaaaggtccagtccttgggagtccttttctgccagggagaggtgacacgttttgtctcttcatctcaacgcatgttgaccacagatgacaaagcggtggtcttgaaaaggatccatgaagtccatgtgaagatggaccgcagcctggagtaccagcctgtggaatgcgccattgtgatcaacgcagccggagcctggtctgcgcaaatcgcagcactggctggtgttggagaggggccgcctggcaccctgcagggcaccaagctacctgtggagccgaggaaaaggtatgtgtatgtgtggcactgcccccagggaccaggcctagagactccgcttgttgcagacaccagtggagcctattttcgccgggaaggattaggtagcaactacctaggtggtcgtagccccactgagcaggaagaaccggacccggcgaacctggaagtggaccatgatttcttccaggacaaggtgtggccccatttggccctgagggtcccagcttttgagactctgaaggttcagagcgcctgggccggctattacgactacaacacctttgaccagaatggcgtggtgggcccccacccgctagttgtcaacatgtactttgctactggcttcagtggtcacgggctccagcaggcccctggcattgggcgagctgtagcagagatggtactgaagggcaggttccagaccatcgacctgagccccttcctctttacccgcttttacttgggagagaagatccaggagaacaacatcatctgagcatgtgtgctctgcactggctccactggcttgcatcctggctgtgttcacagccttgtttgctgcttccatcttccccagtactgtgccaggccttctccccctccccagtgtcctctcctctcaggcaggccattgcacccatatggctgggcaggcacaggcagtgaggccgaggccaatagcgagtgatgagcgggatcctaggactgatctgtagcccatgctgatgtcacccaccagggcaatccatctggaggcctgagcaccctggcccaggactggcttcatcctggcactgaccaggaaagactgcctctgaccctcttagcagacagagcccaggcatgggagcactctggggcagcctggctcaggtttattgattttcgtctgtttaccctatccattaatcaatacatgtaattaactccttccctcca

SEQ ID NO: 56386 - DNA, 1898 bp, Homo sapiens
gcagaggaggcttttctctgcgcgtgcctggcctccgggtcaagaggccccggcccatgcagaggaggcttttctctggactgggatggaaaggtgtctgagattaagaagaagatcaagtcgatcctgcctggaaggtcctgtgatctactgcaagacaccagccacctgcctcccgagcactcggatgtggtgatcgtgggaggtggggtgcttggcttgtctgtggcctattggctgaagaagctggagagcagacgaggtgctattcgagtgctagtggtggaacgggaccacacgtattcacaggcctccactgggctctcagtaggtgggatttgtcagcagttctcattgcctgagaacatccagctctccctcttttcagccagctttctacggaacatcaatgagtacctggccgtagtcgatgctcctcccctggacctccggttcaacccctcgggctacctcttgctggcttcagaaaaggatgctgcagccatggagagcaacgtgaaagtgcagaggcaggagggagccaaagtttctctgatgtctcctgatcagcttcggaacaagtttccctggataaacacagagggagtggctttggcgtcttatgggatggaggacgaaggttggtttgacccctggtgtctgctccaggggcttcggcgaaaggtccagtccttgggagtccttttctgccagggagaggtgacacgttttgtctcttcatctcaacgcatgttgaccacagatgacaaagcggtggtcttgaaaaggatccatgaagtccatgtgaagatggaccgcagcctggagtaccagcctgtggaatgcgccattgtgatcaacgcagccggagcctggtctgcgcaaatcgcagcactggctggtgttggagaggggccgcctggcaccctgcagggcaccaagctacctgtggagccgaggaaaaggtatgtgtatgtgtggcactgcccccagggaccaggcctagagactccgcttgttgcagacaccagtggagcctattttcgccgggaaggattaggtagcaactacctaggtggtcgtagccccactgagcaggaagaaccggacccggcgaacctggaagtggaccatgatttcttccaggacaaggtgtggccccatttggccctgagggtcccagcttttgagactctgaaggttcagagcgcctgggccggctattacgactacaacacctttgaccagaatggcgtggtgggcccccacccgctagttgtcaacatgtactttgctactggcttcagtggtcacgggctccagcaggcccctggcattgggcgagctgtagcagagatggtactgaagggcaggttccagaccatcgacctgagccccttcctctttacccgcttttacttgggagagaagatccaggagaacaacatcatctgagcatgtgtgctctgcactggctccactggcttgcatcctggctgtgttcacagccttgtttgctgcttccatcttccccagtactgtgccaggccttctccccctccccagtgtcctctcctctcaggcaggccattgcacccatatggctgggcaggcacaggcagtgaggccgaggccaatagcgagtgatgagcgggatcctaggactgatctgtagcccatgctgatgtcacccaccagggcaatccatctggaggcctgagcaccctggcccaggactggcttcatcctggcactgaccaggaaagactgcctctgaccctcttagcagacagagcccaggcatgggagcactctggggcagcctggctcaggtttattgattttcgtctgtttaccctatccattaatcaatacatgtaattaactccttccctcca

SEQ ID NO: 56387 - DNA, 1808 bp, Homo sapiens
cagactgcggcgggaacaggatgggggctcctcttgaaacattggtggctacaggctctcatgatctctgatgcctggggcctcagcatcttccttggtagcctcttcctcttcatcctcctcttcttcttcctcttggggaggcccccggccagagccgggctcagacgaggtgctattcgagtgctagtggtggaacgggaccacacgtattcacaggcctccactgggctctcagtaggtgggatttgtcagcagttctcattgcctgagaacatccagctctccctcttttcagccagctttctacggaacatcaatgagtacctggccgtagtcgatgctcctcccctggacctccggttcaacccctcgggctacctcttgctggcttcagaaaaggatgctgcagccatggagagcaacgtgaaagtgcagaggcaggagggagccaaagtttctctgatgtctcctgatcagcttcggaacaagtttccctggataaacacagagggagtggctttggcgtcttatgggatggaggacgaaggttggtttgacccctggtgtctgctccaggggcttcggcgaaaggtccagtccttgggagtccttttctgccagggagaggtgacacgttttgtctcttcatctcaacgcatgttgaccacagatgacaaagcggtggtcttgaaaaggatccatgaagtccatgtgaagatggaccgcagcctggagtaccagcctgtggaatgcgccattgtgatcaacgcagccggagcctggtctgcgcaaatcgcagcactggctggtgttggagaggggccgcctggcaccctgcagggcaccaagctacctgtggagccgaggaaaaggtatgtgtatgtgtggcactgcccccagggaccaggcctagagactccgcttgttgcagacaccagtggagcctattttcgccgggaaggattaggtagcaactacctaggtggtcgtagccccactgagcaggaagaaccggacccggcgaacctggaagtggaccatgatttcttccaggacaaggtgtggccccatttggccctgagggtcccagcttttgagactctgaaggttcagagcgcctgggccggctattacgactacaacacctttgaccagaatggcgtggtgggcccccacccgctagttgtcaacatgtactttgctactggcttcagtggtcacgggctccagcaggcccctggcattgggcgagctgtagcagagatggtactgaagggcaggttccagaccatcgacctgagccccttcctctttacccgcttttacttgggagagaagatccaggagaacaacatcatctgagcatgtgtgctctgcactggctccactggcttgcatcctggctgtgttcacagccttgtttgctgcttccatcttccccagtactgtgccaggccttctccccctccccagtgtcctctcctctcaggcaggccattgcacccatatggctgggcaggcacaggcagtgaggccgaggccaatagcgagtgatgagcgggatcctaggactgatctgtagcccatgctgatgtcacccaccagggcaatccatctggaggcctgagcaccctggcccaggactggcttcatcctggcactgaccaggaaagactgcctctgaccctcttagcagacagagcccaggcatgggagcactctggggcagcctggctcaggtttattgattttcgtctgtttaccctatccattaatcaatacatgtaattaactccttccctcca

SEQ ID NO: 56388 - DNA, 1637 bp, Homo sapiens
gatatccgggatgttggggtggttacccctcctttagcccagagtggggagcagcccagctagcaaggtagccagagagcaagaatgggtcagccaactaggagaggggggccctggccttcttcctagtggtggtgccgcaggtctggggcactgagcctggggagctgtgggggaagaaggcaggaaaactctttctggcatccttaagtcagtttctttcaggagcttctgtctgcacacaggagtacctggccgtagtcgatgctcctcccctggacctccggttcaacccctcgggctacctcttgctggcttcagaaaaggatgctgcagccatggagagcaacgtgaaagtgcagagggatggaggacgaaggttggtttgacccctggtgtctgctccaggggcttcggcgaaaggtccagtccttgggagtccttttctgccagggagaggtgacacgttttgtctcttcatctcaacgcatgttgaccacagatgacaaagcggtggtcttgaaaaggatccatgaagtccatgtgaagatggaccgcagcctggagtaccagcctgtggaatgcgccattgtgatcaacgcagccggagcctggtctgcgcaaatcgcagcactggctggtgttggagaggggccgcctggcaccctgcagggcaccaagctacctgtggagccgaggaaaaggtatgtgtatgtgtggcactgcccccagggaccaggcctagagactccgcttgttgcagacaccagtggagcctattttcgccgggaaggattaggtagcaactacctaggtggtcgtagccccactgagcaggaagaaccggacccggcgaacctggaagtggaccatgatttcttccaggacaaggtgtggccccatttggccctgagggtcccagcttttgagactctgaaggttcagagcgcctgggccggctattacgactacaacacctttgaccagaatggcgtggtgggcccccacccgctagttgtcaacatgtactttgctactggcttcagtggtcacgggctccagcaggcccctggcattgggcgagctgtagcagagatggtactgaagggcaggttccagaccatcgacctgagccccttcctctttacccgcttttacttgggagagaagatccaggagaacaacatcatctgagcatgtgtgctctgcactggctccactggcttgcatcctggctgtgttcacagccttgtttgctgcttccatcttccccagtactgtgccaggccttctccccctccccagtgtcctctcctctcaggcaggccattgcacccatatggctgggcaggcacaggcagtgaggccgaggccaatagcgagtgatgagcgggatcctaggactgatctgtagcccatgctgatgtcacccaccagggcaatccatctggaggcctgagcaccctggcccaggactggcttcatcctggcactgaccaggaaagactgcctctgaccctcttagcagacagagcccaggcatgggagcactctggggcagcctggctcaggtttattgattttcgtctgtttaccctatccattaatcaatacatgtaattaactccttccctcca

SEQ ID NO: 56389 - DNA, 937 bp, Homo sapiens
cgagggaaaaattcggctaggacaggctggtgttaccctgagggccgctggccaattggcgcgctcgtctgaatggcgtttggcgcggagcagtgacggctgcgataatagcgaggcagcagtgcagctttcagaggactgggatggaaaggtgtctgagattaagaagaagatcaagtcgatcctgcctggaaggtcctgtgatctactgcaagacaccagccacctgcctcccgagcactcggatgtggtgatcgtgggaggtggggtgcttggcttgtctgtggcctattggctgaagaagctggagagcagacgaggtgctattcgagtgctagtggtggaacgggaccacacgtattcacaggcctccactgggctctcagtaggtgggatttgtcagcagttctcattgcctgagaacatccagctctccctcttttcagccagctttctacggaacatcaatgagtacctggccgtagtcgatgctcctcccctggacctccggttcaacccctcgggctacctcttgctggcttcagaaaaggatgctgcagccatggagagcaacgtgaaagtgcagaggcaggagggagccaaagtttctctgatgtctcctgatcagcttcggaacaagtttccctggataaacacagagggagtggctttggcgtcttatggatcggaggacgaaggtagacagacaccaggaggcaacggcaccaaggagacaacgggcgaagaggccagaccaagggaataccaacgtgcacagggagaaggggacacggtgagcaacccaacgtgctacaagaggaaggagaaccacgagaagcaccacagccgagagacggaaacaggaaaccagaaaagacacggcgaaaaaaggaacggaacaggaagtacaagacggggaaaggcgcaaatggcgaca

SEQ ID NO: 56390 - DNA, 1129 bp, Homo sapiens
cctgcctgacatctgggtagggggtttgtccctggaattctgggacactggctggggtttgaggagagaagccagtacctacctggctgcaggatgaagctggccagtggcttcttggttttgtggctcagccttgggggtggcctggctcagagcgacacgagccctgacacggaggagtcctattcagactggggccttcggcacctccggggaagctttgaatccgtcaatagctacttcgattcttttctggagctgctgggagggaagaatggagtctgtcagtacaggtgccgatatggaaaggcaccaatgcccagacctggctacaagccccaagagcccaatggctgcggctcctatttcctgggtctcaaggtaccagaaagtatggacttgggcattccagcaatgacaaagtgctgcaaccagctggatgtctgttatgacacttgcggtgccaacaaatatcgctgtgatgcaaaattccgatggtgtctccactcgatctgctctgaccttaagcggagtctgggctttgtctccaaagtggaagcctgtgattccctggttgacactgtgttcaacaccgtgtggaccttgggctgccgcccctttatgaatagtcagcgggcagcttgcatctgtgcagaggaggagaaggaagagttatgaggaagaagtgattccttcctggttttgagtgacaccacagctgtcagccttcaagatgtcaagtcttcgagtcagcgtgactcattcgttcttccaacagtttggacaccacaaagcaggagaaagggaacatttttctacagctggaaagtgagtcctatcctttgaggaaatttgaaaaaagacatggagtggtttgaaagctactcttcatttaagactgctctccccaaccaagacacatttgcctggaaattcagttcttagcttaaagactaaaatgcaagcaaaccctgcaattcctggacctgatagttatattcatgagtgaaattgtggggagtccagccatttgggaggcaatgactttctgctggcccatgtttcagttgccagtaagcttctcacatttaataaagtgtactttttagaacatttggaaagagatgaa

SEQ ID NO: 56391 - DNA, 361 bp, Homo sapiens
cactcggtagccagtacctgagttataaatacagtgactcacagaaaataataaattttcattaggctggcctcccccaagttaaatctgtaacatgaaacagccattttaaagtggtgtctaggcagggcatggtggctcacacctgtaatcctaatactttgggaggctgagacaggcagatcacctgaagtcaggggttcaagatcagactggccaacatggtgaaaccctatctctactaaaaatacaaaaattagccggatgtggtggtgggcccctgtaatcccagctacctgggaggctgaggctgcagtgagcggagactgtgtcactgcacgccagcctaggtgacacagtg

SEQ ID NO: 56392 - DNA, 354 bp, Homo sapiens
ggcatggagtcccctggactcagtgctctggctgagggcctccaggatgaagataccctgtgcaaagcctcacacttttgctgttgctgggctcactgtgtgaaattccctcctccctccttccaccttccctatgctgaactgccactcctccatcctccatggccagctaagccaacacctccccacttcctcctgacaacccaggcacagccactgacctgtcccatggctgtcacagccctttcttgggctctcaatggtatcattgtcacctgtgtgctcatgagcctctgccactcaactccaagcacatcaaataaagagctcaaaacatatcggatactcaacaaa

SEQ ID NO: 56393 - DNA, 380 bp, Homo sapiens
agcagctttattcttaccttatattggttggtgtagtggtctggcttctacaacattcccttactgtgatatctaagactcttttcccctagagctgtaattctagggctggaagatctggttcatccaccttctagaagtctgacatctcagcccaggttatgatattatgagaatatttactctgtggctttcttagatactgttaaatactctgtaccagtgttcctctctcctagacaggaagatattctgttcccttgggggcatactgctagtttagtgtggtggttactggagaaaagctagccccagttgtattattatcctttttgcctcactctagttgtagttttcattattatcactatcgccaggtc

SEQ ID NO: 56394 - DNA, 674 bp, Homo sapiens
gtcacatccattagactgtgtagaaaaacagcctgtttcctggcaagagtgacaccatcttgaagcaaaactatcctggggactgatgtttgacccacagcataccgaggtgttctgcagcaaaggtctttaaacaatgctcataacatatataacccctcataaagatgcttatctaacgtccccagtgatcacaatagtctaagagctaactagttgcacttgtctttaccctagaggcttgctaaataaagcatactttctggagggcaagtgcaggggtcgcttctgtttgtctctactaagtatttctttctgagaaattcgattggtcagcctctttggtctcccagcttcctccatctttggaagcaggtttctgtaaattgacaaaaatgtaagcctttgataataagtcaaggatgtagtaaaatgacagttctctgcatttcttgtggaattgtaattattataactatttttgagaaaaattaagcaatatctggtaaaggtgaagatctaaatgttctgtaacccagtacattctggatataagtgtgtacctagattaatgcgtgctcatgtgaacaaaaaaaatatgtgtaagtatgctctttggagcatctttttgtaatagtaaaatattaaatgtaaatgaccaatgtcataaagtt

SEQ ID NO: 56395 - DNA, 1131 bp, Homo sapiens
tagtgtgtaattgaccatcagggataaatgggcttcaaaagtgttaattgtctccttacttacagtgagtttctagagatagccctgtctttcagaaattctctgacatctgcttgcgcaatgttataaccactttcccacactactcccctccagaaatctcattgatatgtggcgaggacacgccttagctatcaccccaatggatgcttctttcattgacccaaatccagaatgtaatggggaactgaatacaagttggatgtctccacccttggaaagcacatcttttgttcttactgaagtagtttaacaccaccagatgatcaagggatcagggtatctttctggtatctttttaatcactgaaggactttgacagcagtaatggtggcattgttgactcttaaatttctgaacgtttcacttaatggcaagtgaagagatatagaatcccccaaagagtgtcaagatgctaacttccaaccctatttttatgtactgaagaggcctcagtgtctcactgaactctaacctttttgtcagtgttcctcaacactggatgcgtattattacataacctgaggagttaaaaaatacaataaccagatgtccaattaaataaaattagaatctggaggaggtagaactcaagcatttacagttttgttttgttttttttttaagacagagtctcgctctgtccccaagtgcagtggcacaatctcggctcactgcaagctccgcttcgtgggttcacgccattctcctgcctcagtctcccgagtagctgggactacaggcgcccgccactacgcccggctaatttttttgtactttttagtagagacagggtttcactgtgttatacaggatggtctcgatctcccgacctcatgatccgcccgcctcggcctctcagagtgctgggattacaggcgtgaggccaccacgcccggcaagcatttacagttttaaatctcccagtcagaataaattcttattgagggccatacctagcctgtcttcatcaaactcatagggtgaatctttgtcaaacctataggagagagatgcaggccatagagatggtcttgctgaagggcttatagctaaattaggtcagatcca

SEQ ID NO: 56396 - DNA, 424 bp, Homo sapiens
ttaaggttcttttatcatcagatatgacacaaagggaaacatcaaaatgcaccgtaaagttaaatcctagttacctttttttgaagctgttggcaaggtttgaccacttggggcatcttctgctgtgagatgacacttgaaaaacacccatcaaagttttcctggtaggaatctctctttactgcgtgtttttttgaaaagctgacagagaatatgctttggctttgacactaatgaagccaccacgcccggcaagcatttacagttttaaatctcccagtcagaataaattcttattgagggccatacctagcctgtcttcatcaaactcatagggtgaatctttgtcaaacctataggagagagatgcaggccatagagatggtcttgctgaagggcttatagctaaattaggtcagatcca

SEQ ID NO: 56397 - DNA, 508 bp, Homo sapiens
gaggcaccagggcacggcggacgctcaccccgtgaccacgatggtgaccctgactgcgggaagaagaaccggacccggggcacagcggggctgcgtgaggatccacaagaactatgctttggcgtttcacccctgttgttacttgtgactcagtttcttcagcctggtggggtgttccctggtgtttcccagtgttctgtgactgtcctgtgaaggccatagggatgggctcaggagggggctccctgaagccagtggacactgccagagtccactgtcctggcaaaaggcagaccctggggccctcgggaaggagggaggtggcagcgggggcagcagcgggagggggagcagatgacgtgccttgccaggaaccccaggaggagggggcctgggacctgtggcctgtggtggctgtttacagtttctctctgtattgtggtttccttctcttcaatagtttcagtatatgtttctcttcaataaatttcattccgtgttccagccg

SEQ ID NO: 56398 - DNA, 1044 bp, Homo sapiens
aaaaaaaattcttctctacccatttgggcttaagacaattcccagaaagtgttttcattatttaaaaaataataatagtaaatgaaagcaattttagaggtggaaaataccttagaatggaatcatttgcattatttgacaaatgagagaagtgacatgacttgcctaaggtcatcctgcaaagttagtggcagagttaggacttgaattccagtcttctaattccttggtcagggcaatttctactgtgttatgctgtctgttagaaataatgacttatggacactttgtctttaagttgtattattgtaaatacccttaaactggccaatagattttagaaaggcaggcatgggagtagatgctgagaattctagccataagaagaaaagtattttaaatcttacagaaatgtttaaacaacccaaaatacatgaataaaaatgacatttctttgtaggacctgccaactaactattcacacacatttatagaggttataaggatcttggctctagaacaaatttttgaaattagatcattttaccatggatgttaacaaaattggaaattttttgtcactgagaaaattatcacaaagcacagtaaatacatatacttaccatacattttgtaaaaaacacattttttaaagaaaatagggatgggtatggtggctcacgtctgtaatcccagcactttgggaggccaaggtgggaggttcacttgagcccaggagttccagaccagtctgggcaacatggcgaaaccccatctctaccaaaaatacaaaaattagatgggcatgttggtacacgcctgtagtcctagctactcaggaggctgaggtgggaggatggtttgagcctgggaggcagaggctgcagtgagccaagattgcactattgcactccaccctgggcaatagagccagatcctgtctcaaaaaataaaaatagactgggcatggtggctcatgcctgtaatcccagcactttgggaggctgaggtgggtggatcacttgaggtcaggagtttgagaac

SEQ ID NO: 56399 - DNA, 337 bp, Homo sapiens
gaagaaaaaaaatactgttatggaacattcatgaattcttcaaaaatgtttattctaggtctattaataagcgatgctgtgttaggaaatagaagcagttgctacagagcttgagtcctaaatgccattttcacatactgaaatgttaaagtattcttacaggattttgctgtcaagattatgctggccttaaaaaataagctgactatcattgtctgctctctggaagtatttggaatacaagaaaagacagacgtgatgcattttaaattttgccggaccagcactatcaatggaatgtgagatgtcttggcaagtatctgtattgccaggtgta

SEQ ID NO: 56400 - DNA, 1502 bp, Homo sapiens
gccccagctatttctggggtcctcaaacgaaacctcccatggccaagtcatacccaacacgggcctgctcccctgttctggcctcagctcggagatgctgagtgacagaggctcagccttcgggtgttcctggcaaaccctcacctccggaggccccacagctcagacctagtccttggttcacatggccccacttccatcctctttttcccttaagactgatttgtcctgggagatcactggatccctcattcaggtggagtgctgcaggacgacactttttccaggggtgacccaggcctgcagggtcccagtgtcacaggcaggccttgcccgagcctccacctgagcccctgctcctcttctcccacagggaggtggaggttacagtgaggtgagttcaggccactgcacttcagcctgggcaacagagtgagattttgtatcgaaaaaaaaaaaaaaaaaaaaacagggtgcaggcagtggaggcaaattagggcatggacgaagctgcctcagtgccacctttctgcccggcactcagatgccattccactaggcccacgaggcctccaaggaaagccatgttcatggccgagaccaagggggttgccctcaaccagctgtcactacgggagctgcagaccatcaggtgcggcccacccccttccccacgctgtctccaggtggcctggcaccctggcccacctcttcctctctttagccccctgttctcaggcgacatgagccgcatgtgggaatacgggcacagcgtggagcagtacagtgccctggatggcactgagcactccagcgtcgactggcagatctgccaggtgcgggcgctactacaggcacagcaggcctaggtcctcccacgcctgcccccaaataaagtgggcgcgagaggaggctgctacgtgtttcctgccccaccctggctcccttgttgctgggctttccagggctggccagtggggacggtcagggactggagaggcagagcggggtcgcctgtaatcgcagcactttggaaaggcaaggtgcgaggatgcttgagaccaggagtttgacaccagcctgggtaacacagggagaccccatctctacccagtaataaaataactagcccagcatggtggcccatgcatatggtctcagctgcttgtaaggctgaggtgagaggatcatttgcgcctaggaattgagactgcggtgagctatgatcacacccctgcattccagcctggacaacagagtgagaccctgtctctaaaaataaaaaataaaatggaagtggagaaaactgggcaaggacactgagagtcatagatgggaagggaagagggggctcctatcacagcctctgccctgtccaggccctgtccccttcaaacagggtatcacagtgacctcctaggccaggagcggcagctcatgcctgtaatcctagcactttgggaggcctgggcacaaagcaagaccccagctactgcattaaa

SEQ ID NO: 56401 - DNA, 775 bp, Homo sapiens
ggaaagaggtttaattgactcacaattccacatggctgtaggtcagggcagtggggttcacaatcatggaggaaggcaaggatgagcgaagtcatgtcttacacggtggcaggcaagagagcatgtgcaggggaactgccctctataaaatcatcagatcttgtgacatatattcactaccacgagaacagcttgggaaagatgcacacccgtgattcgattacctccctccaggtccctctcatatcacacgggaattatgggagctacaattcaagatgagatttgggtggggatacagccaaaccatatcattcatcatctgagggaactgtggtctcagacagctgggcactgagagtgcacgctgccccctagaattccacacctacatcacagagagacagaacagtctcaaaggattcttaaggttaatgtggggagccaaaggaggagatgaattcacagcttgtgccttaccttctggtctaactaaaactacttttgtcctggcccaacaagattcccagactcttttctgggttgcaccaggggtaattcagaaagacaaaaagttattaatgcccctccattccccacagctcctgaggtctaagttgttcattccctgggttttaggttgttgttctccctctgcttccacagaatcagtgtgccccattccagtacctatgatttcacctgtattcttgtcacctcctactttctcctagacattttatctaacagagccaggtgaaacagagacaaggat

SEQ ID NO: 56402 - DNA, 232 bp, Homo sapiens
ccaagcttggtaccgagctcggatccactagtaaaaaaccgccactcgtgctggaattcggcttaccttctggtctaactaaaactacttttgtcctggcccaacaagattcccagactcttttctgggttgcaccaggggtaattcagaaagacaaaaagttattaatgcccctccattccccacagctcctgaggtctaagttgttcattgaaccagtcagcattaacca

SEQ ID NO: 56403 - DNA, 301 bp, Homo sapiens
gctccactttacccaatcaagtattttttcttccacattcaccatataaaattcttcccccaccctccctaagcctctctgttggaactctgagctgcttgcagtctggagctgcctagtttatacatttctgaatgctcaaatatattttctaatgtttcaaagtggctctggtgtaggaggttgttggtggagtgacctgagagtgtacaggaatcgaggccatatgagatctctggactctgcactccattttgctgtgcactcaaaactactctaaaataataatatatctttaaaa

SEQ ID NO: 56404 - DNA, 130 bp, Homo sapiens
tcaataaaacagaaatctgatttctgcaaagtaggccaccttacggtagaaatacatgattaggccccaccaaaaactttgattaggctattatcttctggatcctggatcccctccaaccaaaccaaac

SEQ ID NO: 56405 - DNA, 450 bp, Homo sapiens
gagagagagaaaatgagaattgaactaattaggatgttgagtcttcctgtgtaagagcagcaggaggaaataaagaacagctatgccttttcattttcagtcctgtgctcttctggagtgtgttaaatataaatcttgatttttttaactttatttccagatagtttatcttttttgttggaatcctttcctccactatattttgtaactggttattatttatatataagaaggcttttgatattttaaataattttatatctcattaaattatcttactatttaaaatagtttttcagttctaaatcacaatgagataccacttcacacccagtaggaaggctgtaataaaaaagacgacaatacaagcattggcaaggattggaaccctcattcattgccagtggggatgtaaaatgtgtggcctctttggaaaacagtttggcaatt

SEQ ID NO: 56406 - DNA, 147 bp, Homo sapiens
aaagggtgcagagcgtcagagttccagaagtggctttaaaccaccaaaaggtgcctgttgctggcttttgagcctcggttcacaagtcaggatgtggcctctttgatcctgcacatactgttctgccaacctgacccggctgacatt

SEQ ID NO: 56407 - DNA, 317 bp, Homo sapiens
aaaatgttttattgatattaactcttagattggatatagataaagccataaaacttgacctttcctaatagattacaaaaggtttttgtgtcatattgaaatactcattgcaaacaatcggattggacactaaaccaatgtaatttagttaagaccatataaactcaaacgcttttttttcctttttaatttcctttttttctagtatagtctgaagggaactcaagtacttttcaagctagggttctgttctcagttccagtgtctaagaaacttaaaagtaaattattttttaaggataaaaaggaatagacata

SEQ ID NO: 56408 - DNA, 365 bp, Homo sapiens
ccacctcaagagcaagagagaaaagcaggcggagcattgactaagcacccactctgtgccgggcccttcgcacacaacatcccactgaatccttgtaaacaccatgcaaggctgctctgtgaagcgcattttatagatgaggaagccaaggctcagggggatgatgtgacttgtcacaagctggctggaggggacagagaaagatcttaggcttacttctgtctacccagaacgcaaggctctttctgctcaatgtggactcaggataggaccagggtgagagagattcagatacatttttgtgcccaggggacagtcccagcctctcaagatattggggttgggggggggacttgcctctgagc

SEQ ID NO: 56409 - DNA, 158 bp, Homo sapiens
tgtatatactcagcctccaattcttctttacttgaacctactccaccaagactattcttgtcaagacagccagtgacaccagcattgccaaatccagtagctatttttcagtcctcatcttgcttgacctatcagcagttcttgttacaactgacact

SEQ ID NO: 56410 - DNA, 1413 bp, Homo sapiens
gagtatctggatgtcttggattttcttcccattctgttctgttctgttctcctaataccatctcgttactagacgtaggcattggacgtgacaatcaactgcatttgaactgagaagaagaaatattaaagacacagtcttcagaagaaatggctcaaaggcagcctcactcacctaatcagactttaatttcaatcacaaatgacacagaatcatcaagctctgtggtttctaacgataacacaaataaaggatggagcggggacaactctccaggaatagaagcattgtgtgccatctatattacttatgctgtgatcatttcagtgggcatccttggaaatgctattctcatcaaagtctttttcaagaccaaatccatgcaaacagttccaaatattttcatcaccagcctggcttttggagatcttttacttctgctaacttgtgtgccagtggatgcaactcactaccttgcagaaggatggctgttcggaagaattggttgtaaggtgctctctttcatccggctcacttctgttggtgtgtcagtgttcacattaacaattctcagcgctgacagatacaaggcagttgtgaagccacttgagcgacagccctccaatgccatcctgaagacttgtgtaaaagctggctgcgtctggatcgtgtctatgatatttgctctacctgaggctatattttcaaatgtatacacttttcgagatcccaataaaaatatgacatttgaatcatgtacctcttatcctgtctctaagaagctcttgcaagaaatacattctctgctgtgcttcttagtgttctacattattccactctctattatctctgtctactattccttgattgctaggaccctttacaaaagcaccctgaacatacctactgaggaacaaagccatgcccgtaagcagattgaatcccgaaagagaattgccagaacggtattggtgttggtggctctgtttgccctctgctggttgccaaatcacctcctgtacctctaccattcattcacttctcaaacctatgtagacccctctgccatgcatttcattttcaccattttctctcgggttttggctttcagcaattcttgcgtaaacccctttgctctctactggctgagcaaaagcttccagaagcattttaaagctcagttgttctgttgcaaggcggagcggcctgagcctcctgttgctgacacctctcttaccaccctggctgtgatgggaacggtcccgggcactgggagcatacagatgtctgaaattagtgtgacctcgttcactgggtgtagtgtgaagcaggcagaggacagattctagcttttcaaggaaaaatgctgcttctcctcccagcgtgtgtatccgactctaagctgtgtgcagg

SEQ ID NO: 56411 - DNA, 1422 bp, Homo sapiens
  misc_feature (1)..(1): n is a, c, g, or t
  misc_feature (5)..(7): n is a, c, g, or t
  misc_feature (10)..(10): n is a, c, g, or t
  misc_feature (12)..(12): n is a, c, g, or t
  misc_feature (14)..(14): n is a, c, g, or t
  misc_feature (22)..(22): n is a, c, g, or t
  misc_feature (24)..(24): n is a, c, g, or t
  misc_feature (27)..(27): n is a, c, g, or t
  misc_feature (102)..(102): n is a, c, g, or t
nccgnnncgncngngccggcgncncgngcgggggaagctggcgggctgaggcgccccgctcttctcctctgccccgggcccgcgaggccacgcgtcgccgcncgagagatgatgcaggacgtgtccagctcgccagtctcgccggccgacgacagcctgagcaacagcgaggaagagccagaccggcagcagccgccgagcggcaagcgcgggggacgcaagcggcgcagcagcaggcgcagcgcgggcggcggcgcggggcccggcggagccgcgggtgggggcgtcggaggcggcgacgagccgggcagcccggcccagggcaagcgcggcaagaagtctgcgggctgtggcggcggcggcggcgcgggcggcggcggcggcagcagcagcggcggcgggagtccgcagtcttacgaggagctgcagacgcagcgggtcatggccaacgtgcgggagcgccagcgcacccagtcgctgaacgaggcgttcgccgcgctgcggaagatcatccccacgctgccctcggacaagctgagcaagattcagaccctcaagctggcggccaggtacatcgacttcctctaccaggtcctccagagcgacgagctggactccaagatggcaagctgcagctatgtggctcacgagcggctcagctacgccttctcggtctggaggatggagggggcctggtccatgtccgcgtcccactagcaggcggagccccccaccccctcagcagggccggagacctagatgtcattgtttccagagaaggagaaaatggacagtctagagactctggagctggataactaaaaataaaaatatatgccaaagattttcttggaaattagaagagcaaaatccaaattcaaagaaacagggcgtggggcgcacttttaaaagagaaagcgagacaggcccgtggacagtgattcccagacgggcagcggcaccatcctcacacctctgcattctgatagaagtctgaacagttgtttgtgttttttttttttttttttttgacgaagaatgtttttatttttatttttttcatgcatgcattctcaagaggtcgtgccaatcagccactgaaaggaaaggcatcactatggactttctctattttaaaatggtaacaatcagaggaactataagaacacctttagaaataaaaatactgggatcaaactggcctgcaaaaccatagtcagttaattctttttttcatccttcctctgaggggaaaaacaaaaaaaaacttaaaatacaaaaaacaacattctatttatttattgaggacccatggtaaaatgcaaatagatccggtgtctaaatgcattcatatttttatgattgttttgtaaatatctttgtatatttttctgcaataaataaatataaaaaatttagaga

SEQ ID NO: 56412 - DNA, 1223 bp, Homo sapiens
  misc_feature (1017)..(1017): n is a, c, g, or t
  misc_feature (1181)..(1181): n is a, c, g, or t
  misc_feature (1194)..(1194): n is a, c, g, or t
  misc_feature (1215)..(1215): n is a, c, g, or t
  misc_feature (1221)..(1222): n is a, c, g, or t
ctcggtcacgggggcggcgcgcgcccgggaggtggggtctcattcccccgacttcctcagggaggacccctgccctccgctgccctcggacaagctgagcaagattcagaccctcaagctggcggccaggtacatcgacttcctctaccaggtcctccagagcgacgagctggactccaagatggcaagctgcagctatgtggctcacgagcggctcagctacgccttctcggtctggaggatggagggggcctggtccatgtccgcgtcccactagcaggcggagccccccaccccctcagcagggccggagacctagatgtcattgtttccagagaaggagaaaatggacagtctagagactctggagctggataactaaaaataaaaatatatgccaaagattttcttggaaattagaagagcaaaatccaaattcaaagaaacagggcgtggggcgcacttttaaaagagaaagcgagacaggcccgtggacagtgattcccagacgggcagcggcaccatcctcacacctctgcattctgatagaagtctgaacagttgtttgtgttttttttttttttttttttgacgaagaatgtttttatttttatttttttcatgcatgcattctcaagaggtcgtgccaatcagccactgaaaggaaaggcatcactatggactttctctattttaaaatggtaacaatcagaggaactataagaacacctttagaaataaaaatactgggatcaaactggcctgcaaaaccatagtcagttaattctttttttcatccttcctctgaggggaaaaacaaaaaaaaacttaaaatacaaaaaacaacattctatttatttattgaggacccatggtaaaatgcaaatagatccggtgtctaaatgcattcatatttttatgattgttttgtaaatatctttgtatatttttctgcaataaataaatataaaaaatttagagaaccttagagtttggtctatatttttaaaactaaanattaagttggtggtaaatacctgcttgtttaattctagaggcacccaggagggagggggcactaatataaacaaagcaatgaaaaactcaaataaagcagctactgacaggcacaagcatgttattttaaaagacagctttattattattccagtttggtattnagagggcttagtngcatctcttcatctcttactntctccnnc

SEQ ID NO: 56413 - DNA, 1663 bp, Homo sapiens
  misc_feature (1)..(1): n is a, c, g, or t
  misc_feature (5)..(7): n is a, c, g, or t
  misc_feature (10)..(10): n is a, c, g, or t
  misc_feature (12)..(12): n is a, c, g, or t
  misc_feature (14)..(14): n is a, c, g, or t
  misc_feature (22)..(22): n is a, c, g, or t
  misc_feature (24)..(24): n is a, c, g, or t
  misc_feature (27)..(27): n is a, c, g, or t
  misc_feature (102)..(102): n is a, c, g, or t
  misc_feature (1457)..(1457): n is a, c, g, or t
  misc_feature (1621)..(1621): n is a, c, g, or t
  misc_feature (1634)..(1634): n is a, c, g, or t
  misc_feature (1655)..(1655): n is a, c, g, or t
  misc_feature (1661)..(1662): n is a, c, g, or t
nccgnnncgncngngccggcgncncgngcgggggaagctggcgggctgaggcgccccgctcttctcctctgccccgggcccgcgaggccacgcgtcgccgcncgagagatgatgcaggacgtgtccagctcgccagtctcgccggccgacgacagcctgagcaacagcgaggaagagccagaccggcagcagccgccgagcggcaagcgcgggggacgcaagcggcgcagcagcaggcgcagcgcgggcggcggcgcggggcccggcggagccgcgggtgggggcgtcggaggcggcgacgagccgggcagcccggcccagggcaagcgcggcaagaagtctgcgggctgtggcggcggcggcggcgcgggcggcggcggcggcagcagcagcggcggcgggagtccgcagtcttacgaggagctgcagacgcagcgggtcatggccaacgtgcgggagcgccagcgcacccagtcgctgaacgaggcgttcgccgcgctgcggaagatcatccccacgctgccctcggacaagctgagcaagattcagaccctcaagctggcggccaggtacatcgacttcctctaccaggtcctccagagcgacgagctggactccaagatggcaagctgcagctatgtggctcacgagcggctcagctacgccttctcggtctggaggatggagggggcctggtccatgtccgcgtcccactagcaggcggagccccccaccccctcagcagggccggagacctagatgtcattgtttccagagaaggagaaaatggacagtctagagactctggagctggataactaaaaataaaaatatatgccaaagattttcttggaaattagaagagcaaaatccaaattcaaagaaacagggcgtggggcgcacttttaaaagagaaagcgagacaggcccgtggacagtgattcccagacgggcagcggcaccatcctcacacctctgcattctgatagaagtctgaacagttgtttgtgttttttttttttttttttttgacgaagaatgtttttatttttatttttttcatgcatgcattctcaagaggtcgtgccaatcagccactgaaaggaaaggcatcactatggactttctctattttaaaatggtaacaatcagaggaactataagaacacctttagaaataaaaatactgggatcaaactggcctgcaaaaccatagtcagttaattctttttttcatccttcctctgaggggaaaaacaaaaaaaaacttaaaatacaaaaaacaacattctatttatttattgaggacccatggtaaaatgcaaatagatccggtgtctaaatgcattcatatttttatgattgttttgtaaatatctttgtatatttttctgcaataaataaatataaaaaatttagagaaccttagagtttggtctatatttttaaaactaaanattaagttggtggtaaatacctgcttgtttaattctagaggcacccaggagggagggggcactaatataaacaaagcaatgaaaaactcaaataaagcagctactgacaggcacaagcatgttattttaaaagacagctttattattattccagtttggtattnagagggcttagtngcatctcttcatctcttactntctccnnc

SEQ ID NO: 56414 - DNA, 2270 bp, Homo sapiens
  misc_feature (1)..(1): n is a, c, g, or t
  misc_feature (5)..(7): n is a, c, g, or t
  misc_feature (10)..(10): n is a, c, g, or t
  misc_feature (12)..(12): n is a, c, g, or t
  misc_feature (14)..(14): n is a, c, g, or t
  misc_feature (22)..(22): n is a, c, g, or t
  misc_feature (24)..(24): n is a, c, g, or t
  misc_feature (27)..(27): n is a, c, g, or t
  misc_feature (102)..(102): n is a, c, g, or t
nccgnnncgncngngccggcgncncgngcgggggaagctggcgggctgaggcgccccgctcttctcctctgccccgggcccgcgaggccacgcgtcgccgcncgagagatgatgcaggacgtgtccagctcgccagtctcgccggccgacgacagcctgagcaacagcgaggaagagccagaccggcagcagccgccgagcggcaagcgcgggggacgcaagcggcgcagcagcaggcgcagcgcgggcggcggcgcggggcccggcggagccgcgggtgggggcgtcggaggcggcgacgagccgggcagcccggcccagggcaagcgcggcaagaagtctgcgggctgtggcggcggcggcggcgcgggcggcggcggcggcagcagcagcggcggcgggagtccgcagtcttacgaggagctgcagacgcagcgggtcatggccaacgtgcgggagcgccagcgcacccagtcgctgaacgaggcgttcgccgcgctgcggaagatcatccccacgctgccctcggacaagctgagcaagattcagaccctcaagctggcggccaggtacatcgacttcctctaccaggtcctccagagcgacgagctggactccaagatggcaagctgcagctatgtggctcacgagcggctcagctacgccttctcggtctggaggatggagggggcctggtccatgtccgcgtcccactagcaggcggagccccccaccccctcagcagggccggagacctagatgtcattgtttccagagaaggagaaaatggacagtctagagactctggagctggataactaaaaataaaaatatatgccaaagattttcttggaaattagaagagcaaaatccaaattcaaagaaacagggcgtggggcgcacttttaaaagagaaagcgagacaggcccgtggacagtgattcccagacgggcagcggcaccatcctcacacctctgcattctgatagaagtctgaacagttgtttgtgttttttttttttttttttttgacgaagaatgtttttatttttattttttttccatgtgctgtgctttcctcaagagaggctcgtgtgccaatctcgagccccctgtgataagaggaagaggcctctccacttatgtggaactttctcttcttattttatacaaagtggttacacaatctcgagagaggaaacctattatagaacaccactcttttagaaaataatacaacacatctcccgtgggaatctcacacagcgtggccccgtgtacaaacaccccatatgagctcgagcgtataattctcttatattttctcaatctccttctcccctctgggaggggcggaaaaaacgaagaaatatatacagcgtgatcacgtggtgtgctcaaacaaaaacaaacaaacaaacaaacaaaacaaaaacacaaaaacacaaacaaacaacaacaacacaaaacaacaaacaaacacaaacaaacaaacaataaaacacaaaaatataaccaaataaaacaactacacacagagacacacagagacacaaacacaagatacatatgaataacgacacaaccaacacgacaccagaacgaacaacaggctacatatgacctaatcacaatctacaatgcgacaaaaaataagagcaaacacagaaacaaatctgctatcaatcacaacaacattatcctttacatgtaacaataaatacaacaacaacgagtattctccaatccataatatgtttagatccacgtaccgctaaaatcaacaacatatatgattagtaagcataatcaaaatcaaatactataaaaatatccaacctattcagtatcaatatatacataataaataaatatagaaattcaattgtatcactctccactattacacaaaattatacaggatcaccaagacaactaccaactcctcctttacatatcgtatattgcatcaaaaattaaatcaacaaaccaactcaacgaaaaaagaccacagacacaataaaaaaaaaaacaacaagcaatcacataacaacaagaatcaaaacacaccaaatatatcaactcagtcaaacaaaaaattatcgtcaaacagatcctcgaacacaccagcatccaccctcactctaccatactcttacaactcgactactactaaacgatgatacgcaatagcagaaaccattctgaacaccacacaaaccagcacaacagatccaaaaaacacaagcaggacaattaaatcagacaga

SEQ ID NO: 56415 - DNA, 2106 bp, Homo sapiens
ggagctgtttacccccactctaataggggttcaatataaaaagccggcagagagctgtccaagtcagacgcgcctctgcatctgcgccaggcgaacgggtcctgcgcctcctgcagtcccagctctccaccgccgcgtgcgcctgcagacgctccgctcgctgccttctctcctggcaggcgctgccttttctccccgttaaagggcacttgggctgaaggatcgctttgagatctgaggaacccgcagcgctttgagggacctgaagctgtttttcttcgttttcctttgggttcagtttgaacgggaggtttttgatccctttttttcagaatggattatttgctcatgattttctctctgctgtttgtggcttgccaaggagctccagaaacagcagtcttaggcgctgagctcagcgcggtgggtgagaacggcggggagaaacccactcccagtccaccctggcggctccgccggtccaagcgctgctcctgctcgtccctgatggataaagagtgtgtctacttctgccacctggacatcatttgggtcaacactcccgagcacgttgttccgtatggacttggaagccctaggtccaagagagccttggagaatttacttcccacaaaggcaacagaccgtgagaatagatgccaatgtgctagccaaaaagacaagaagtgctggaatttttgccaagcaggaaaagaactcagggctgaagacattatggagaaagactggaataatcataagaaaggaaaagactgttccaagcttgggaaaaagtgtatttatcagcagttagtgagaggaagaaaaatcagaagaagttcagaggaacacctaagacaaaccaggtcggagaccatgagaaacagcgtcaaatcatcttttcatgatcccaagctgaaaggcaagccctccagagagcgttatgtgacccacaaccgagcacattggtgacagaccttcggggcctgtctgaagccatagcctccacggagagccctgtggccgactctgcactctccaccctggctgggatcagagcaggagcatcctctgctggttcctgactggcaaaggaccagcgtcctcgttcaaaacattccaagaaaggttaaggagttcccccaaccatcttcactggcttccatcagtggtaactgctttggtctcttctttcatctggggatgacaatggacctctcagcagaaacacacagtcacattcgaattcgggtggcatcctccggagagagagagaggaaggagattccacacaggggtggagtttctgacgaaggtcctaagggagtgtttgtgtctgactcaggcgcctggcacatttcagggagaaactccaaagtccacacaaagattttctaaggaatgcacaaattgaaaacacactcaaaagacaaacatgcaagtaaagaaaaaaaaaagaaagacttttgtttaaatttgtaaaatgcaaaactgaatgaaactgttactaccataaatcaggatatgtttcatgaatatgagtctacctcacctatattgcactctggcagaagtatttcccacatttaattattgcctccccaaactcttcccacccctgctgccccttcctccatcccccatactaaatcctagcctcgtagaagtctggtctaatgtgtcagcagtagatataatattttcatggtaatctactagctctgatccataagaaaaaaaagatcattaaatcaggagattccctgtccttgatttttggagacacaatggtatagggttgtttatgaaatatattgaaaagtaagtgtttgttacgctttaaagcagtaaaattattttcctttatataaccggctaatgaaagaggttggattgaattttgatgtacttatttttttatagatatttatattcaaacaatttattccttatatttaccatgttaaatatctgtttgggcaggccatattggtctatgtatttttaaaatatgtatttctaaatgaaattgagaacatgctttgttttgcctgtcaaggtaatgactttagaaaataaatatttttttccttactgtaatgattt

SEQ ID NO: 56416 - DNA, 1733 bp, Homo sapiens
ggagctgtttacccccactctaataggggttcaatataaaaagccggcagagagctgtccaagtcagacgcgcctctgcatctgcgccaggcgaacgggtcctgcgcctcctgcagtcccagctctccaccgccgcgtgcgcctgcagacgctccgctcgctgccttctctcctggcaggcgctgccttttctccccgttaaagggcacttgggctgaaggatcgctttgagatctgaggaacccgcagcgctttgagggacctgaagctgtttttcttcgttttcctttgggttcagtttgaacgggaggtttttgatccctttttttcagaatggattatttgctcatgattttctctctgctgtttgtggcttgccaaggagctccagaaacagcagtcttaggcgctgagctcagcgcggtgggtgagaacggcggggagaaacccactcccagtccaccctggcggctccgccggtccaagcgctgctcctgctcgtccctgatggataaagagtgtgtctacttctgccacctggacatcatttgggtcaacactcccgagcacgttgttccgtatggacttggaagccctaggtccaagagagccttggagaatttacttcccacaaaggcaacagaccgtgagaatagatgccaatgtgctagccaaaaagacaagaagtgctggaatttttgccaagcaggaaaagaactcagggctgaagacattatggagaaagactggaataatcataagaaaggaaaagactgttccaagcttgggaaaaagtgtatttatcagcagttagtgagaggaagaaaaatcagaagaagttcagaggaacacctaagacaaaccaggtcggagaccatgagaaacagcgtcaaatcatcttttcatgatcccaagctgaaaggcaagccctccagagagcgttatgtgacccacaaccgagcacattggtgacagaccttcggggcctgtctgaagccatagcctccacggagagccctgtggccgactctgcactctccaccctggctgggatcagagcaggagcatcctctgctggttcctgactggcaaaggaccagcgtcctcgttcaaaacattccaagaaaggttaaggagttcccccaaccatcttcactggcttccatcagtggtaactgctttggtctcttctttcatctggggatgacaatggacctctcagcagaaacacacagtcacattcgaattcgggtggcatctccatcccccatactaaatcctagcctcgtagaagtctggtctaatgtgtcagcagtagatataatattttcatggtaatctactagctctgatccataagaaaaaaaagatcattaaatcaggagattccctgtccttgatttttggagacacaatggtatagggttgtttatgaaatatattgaaaagtaagtgtttgttacgctttaaagcagtaaaattattttcctttatataaccggctaatgaaagaggttggattgaattttgatgtacttatttttttatagatatttatattcaaacaatttattccttatatttaccatgttaaatatctgtttgggcaggccatattggtctatgtatttttaaaatatgtatttctaaatgaaattgagaacatgctttgttttgcctgtcaaggtaatgactttagaaaataaatatttttttccttactgtaatgattt

SEQ ID NO: 56417 - DNA, 1652 bp, Homo sapiens
ggagctgtttacccccactctaataggggttcaatataaaaagccggcagagagctgtccaagtcagacgcgcctctgcatctgcgccaggcgaacgggtcctgcgcctcctgcagtcccagctctccaccgccgcgtgcgcctgcagacgctccgctcgctgccttctctcctggcaggcgctgccttttctccccgttaaagggcacttgggctgaaggatcgctttgagatctgaggaacccgcagcgctttgagggacctgaagggctgaagacattatggagaaagactggaataatcataagaaaggaaaagactgttccaagcttgggaaaaagtgtatttatcagcagttagtgagaggaagaaaaatcagaagaagttcagaggaacacctaagacaaaccaggtcggagaccatgagaaacagcgtcaaatcatcttttcatgatcccaagctgaaaggcaagccctccagagagcgttatgtgacccacaaccgagcacattggtgacagaccttcggggcctgtctgaagccatagcctccacggagagccctgtggccgactctgcactctccaccctggctgggatcagagcaggagcatcctctgctggttcctgactggcaaaggaccagcgtcctcgttcaaaacattccaagaaaggttaaggagttcccccaaccatcttcactggcttccatcagtggtaactgctttggtctcttctttcatctggggatgacaatggacctctcagcagaaacacacagtcacattcgaattcgggtggcatcctccggagagagagagaggaaggagattccacacaggggtggagtttctgacgaaggtcctaagggagtgtttgtgtctgactcaggcgcctggcacatttcagggagaaactccaaagtccacacaaagattttctaaggaatgcacaaattgaaaacacactcaaaagacaaacatgcaagtaaagaaaaaaaaaagaaagacttttgtttaaatttgtaaaatgcaaaactgaatgaaactgttactaccataaatcaggatatgtttcatgaatatgagtctacctcacctatattgcactctggcagaagtatttcccacatttaattattgcctccccaaactcttcccacccctgctgccccttcctccatcccccatactaaatcctagcctcgtagaagtctggtctaatgtgtcagcagtagatataatattttcatggtaatctactagctctgatccataagaaaaaaaagatcattaaatcaggagattccctgtccttgatttttggagacacaatggtatagggttgtttatgaaatatattgaaaagtaagtgtttgttacgctttaaagcagtaaaattattttcctttatataaccggctaatgaaagaggttggattgaattttgatgtacttatttttttatagatatttatattcaaacaatttattccttatatttaccatgttaaatatctgtttgggcaggccatattggtctatgtatttttaaaatatgtatttctaaatgaaattgagaacatgctttgttttgcctgtcaaggtaatgactttagaaaataaatatttttttccttactgtaatgattt

SEQ ID NO: 56418 - DNA, 347 bp, Homo sapiens
ttgacaaaaaagcaatgttgcttgtgtcaagaagaaactgaactttgtgaagagttgaaatggaattccactgaattagaaaaacttgttttctcctgcctggatacatacagtcagggccattgatgcacaggtgttcctggctgttgttacactttaccctctgaaatgatgctcccaagtgctatgtgatgagctccttgtgtgcccagtggaataggtgtgtccatgtgtcattttaaagactattaattacactaatatagtttctttctctctttggataataggcacgttgttccgtatggacttggaagccctaggtccaagagagccttggagaattt

SEQ ID NO: 56419 - DNA, 1808 bp, Homo sapiens
ccaagttccttgtagaagccagccggattttcaacaggcagcattccacagcatttccctgagcctgcttcaagaggggtgggggaagtcccttttcagcagtcttaggcgctgagctcagcgcggtgggtgagaacggcggggagaaacccactcccagtccaccctggcggctccgccggtccaagcgctgctcctgctcgtccctgatggataaagagtgtgtctacttctgccacctggacatcatttgggtcaacactcccgagcacgttgttccgtatggacttggaagccctaggtccaagagagccttggagaatttacttcccacaaaggcaacagaccgtgagaatagatgccaatgtgctagccaaaaagacaagaagtgctggaatttttgccaagcaggaaaagaactcagggctgaagacattatggagaaagactggaataatcataagaaaggaaaagactgttccaagcttgggaaaaagtgtatttatcagcagttagtgagaggaagaaaaatcagaagaagttcagaggaacacctaagacaaaccaggtcggagaccatgagaaacagcgtcaaatcatcttttcatgatcccaagctgaaaggcaagccctccagagagcgttatgtgacccacaaccgagcacattggtgacagaccttcggggcctgtctgaagccatagcctccacggagagccctgtggccgactctgcactctccaccctggctgggatcagagcaggagcatcctctgctggttcctgactggcaaaggaccagcgtcctcgttcaaaacattccaagaaaggttaaggagttcccccaaccatcttcactggcttccatcagtggtaactgctttggtctcttctttcatctggggatgacaatggacctctcagcagaaacacacagtcacattcgaattcgggtggcatcctccggagagagagagaggaaggagattccacacaggggtggagtttctgacgaaggtcctaagggagtgtttgtgtctgactcaggcgcctggcacatttcagggagaaactccaaagtccacacaaagattttctaaggaatgcacaaattgaaaacacactcaaaagacaaacatgcaagtaaagaaaaaaaaaagaaagacttttgtttaaatttgtaaaatgcaaaactgaatgaaactgttactaccataaatcaggatatgtttcatgaatatgagtctacctcacctatattgcactctggcagaagtatttcccacatttaattattgcctccccaaactcttcccacccctgctgccccttcctccatcccccatactaaatcctagcctcgtagaagtctggtctaatgtgtcagcagtagatataatattttcatggtaatctactagctctgatccataagaaaaaaaagatcattaaatcaggagattccctgtccttgatttttggagacacaatggtatagggttgtttatgaaatatattgaaaagtaagtgtttgttacgctttaaagcagtaaaattattttcctttatataaccggctaatgaaagaggttggattgaattttgatgtacttatttttttatagatatttatattcaaacaatttattccttatatttaccatgttaaatatctgtttgggcaggccatattggtctatgtatttttaaaatatgtatttctaaatgaaattgagaacatgctttgttttgcctgtcaaggtaatgactttagaaaataaatatttttttccttactgtaatgattt

SEQ ID NO: 56420 - DNA, 1853 bp, Homo sapiens
ggagctgtttacccccactctaataggggttcaatataaaaagccggcagagagctgtccaagtcagacgcgcctctgcatctgcgccaggcgaacgggtcctgcgcctcctgcagtcccagctctccaccgccgcgtgcgcctgcagacgctccgctcgctgccttctctcctggcaggcgctgccttttctccccgttaaagggcacttgggctgaaggatcgctttgagatctgaggaacccgcagcgctttgagggacctgaagctgtttttcttcgttttcctttgggttcagtttgaacgggaggtttttgatccctttttttcagaatggattatttgctcatgattttctctctgctgtttgtggcttgccaaggagctccagaaacagcagtcttaggcgctgagctcagcgcggtgggtgagaacggcggggagaaacccactcccagtccaccctggcggctccgccggtccaagcgctgctcctgctcgtccctgatggataaagagtgtgtctacttctgccacctggacatcatttgggtcaacactcccgagcacgttgttccgtatggacttggaagccctaggtccaagagagccttggagaatttacttcccacaaaggcaacagaccgtgagaatagatgccaatgtgctagccaaaaagacaagaagtgctggaatttttgccaagcaggaaaagaactcagggctgaagacattatggagaaagactggaataatcataagaaaggaaaagactgttccaagcttgggaaaaagtgtatttatcagcagttagtgagaggaagaaaaatcagaagaagttcagaggaacacctaagacaaaccaggtcggagaccatgagaaacagcgtcaaatcatcttttcatgatcccaagctgaaaggcaagccctccagagagcgttatgtgacccacaaccgagcacattggtgacagaccttcggggcctgtctgaagccatagcctccacggagagccctgtggccgactctgcactctccaccctggctgggatcagagcaggagcatcctctgctggttcctgactggcaaaggaccagcgtcctcgttcaaaacattccaaagtccacacaaagattttctaaggaatgcacaaattgaaaacacactcaaaagacaaacatgcaagtaaagaaaaaaaaaagaaagacttttgtttaaatttgtaaaatgcaaaactgaatgaaactgttactaccataaatcaggatatgtttcatgaatatgagtctacctcacctatattgcactctggcagaagtatttcccacatttaattattgcctccccaaactcttcccacccctgctgccccttcctccatcccccatactaaatcctagcctcgtagaagtctggtctaatgtgtcagcagtagatataatattttcatggtaatctactagctctgatccataagaaaaaaaagatcattaaatcaggagattccctgtccttgatttttggagacacaatggtatagggttgtttatgaaatatattgaaaagtaagtgtttgttacgctttaaagcagtaaaattattttcctttatataaccggctaatgaaagaggttggattgaattttgatgtacttatttttttatagatatttatattcaaacaatttattccttatatttaccatgttaaatatctgtttgggcaggccatattggtctatgtatttttaaaatatgtatttctaaatgaaattgagaacatgctttgttttgcctgtcaaggtaatgactttagaaaataaatatttttttccttactgtaatgattt

SEQ ID NO: 56421 - DNA, 678 bp, Homo sapiens
ttgtgctgagtgatcttcacacccttccgatttaacacatccagctgaactgatagcccttctctattctagtctacagatcctctgttctatagtgttctttctcttaccccttgacattgatttattcagttaatacgtatcacttttcacctgttattgtttctgcctattaaatatctctccaaattgtcttctgtcataattgtatcctaattggacttcctgtcttcatttttcagtcccttacactgtgacctctgggatctttctaaaaatgaaggttgaatgtctctctccagttttattaaccatgcagtggttccccacagcttcagcatcaaactccttagcttggcatgcaggatgctttgattgccaacccctcacaccatatgctctccatagtaaactaggagtcgatcagctttacagtgttctctccccttctccacaaaaaagtattctctgcacttgaaatgcccttccttccgacttgatcctccaagggtatggttaagtctgatccctcctctggaatgtgttccatgacaccagcatgtcttccttctgccaccagccaccacacacaacatctgaattgatagacttcttcttttccttattcctgtgttgtcctgggcatgaattcaccttagtatgatatcattgcacttg

SEQ ID NO: 56422 - DNA, 431 bp, Homo sapiens
tttgtatttttagtagagagggggtttcaccatgttggcttggatggtctccatcccttgaccttgtgatccacctgcctcagcctcccaaacttctgggattacaggcatgagccaccacacccggcctgcatagttttttataagcaccttctcttttcatcctcccagcaagcttatgggcaggtgctatcattttctctttatagatgggaacactgaaactcagggagattaataacctgtctcaatatcacatagtctgtacctggcaggtttgggtttcagacctcagtctatctcactcagatctcttgttctgggctgggcatggtggctcatgcctgtcatcccagcactttgggaggccaaggcaaaaaggtcagttgaggccaggagttcaagaccagcctgggcaacatagcaagacc

SEQ ID NO: 56423 - DNA, 338 bp, Homo sapiens
agattaacgagatatatccctgacatttgaacatcaaaggtgcttcatgaaggaccttttaaaaggggactgagaagtttgaagtggtcactcatgcttcttcaggagttgggcccttgaaaggaaaagcagcattgcaatagaatagcaccctggttgaattgaccactcccatctttaggcccccaaaaacctttgtacacaactctatgttagcatgttagcacttgctctattaatgccccacccccacccactcccaactaaaactacgttctctgttgcccaggctgaagtgagtggcatgatcgcggctcactgcagcctcgaactcctgg

SEQ ID NO: 56424 - DNA, 292 bp, Homo sapiens
agatacaaggagaagacaaaagcaaacaatgttatggaggtaccgtctttattattcaacaatctgttgagtatggagggcagtgaccagaaaaccccacacacttctaagtcctggaataatcagaagaatagtaccttctgggcatcatttattttagtgtactctgaattatgaaactgcttttcttccccttccccatagagatagagtgtctcattctattgcgtaggctggaaggcagtggtgtgatcacagctcactactactacaacctcccaggctcaagcta

SEQ ID NO: 56425 - DNA, 2077 bp, Homo sapiens
  misc_feature (229)..(229): n is a, c, g, or t
  misc_feature (289)..(289): n is a, c, g, or t
  misc_feature (2067)..(2067): n is a, c, g, or t
  misc_feature (2070)..(2070): n is a, c, g, or t
  misc_feature (2072)..(2073): n is a, c, g, or t
  misc_feature (2075)..(2075): n is a, c, g, or t
cacaaaagaatgaagaacataagaaaaggtaactacatcagtaaatatattgcttttttcttcttatttaaatgctttaaaagagaattgattgtttaaataaaaatatcaatgtaggctacatgcagtggctcacacctataatcccagcactttgggaggctgaggtgggtggatcacttgaggtcagaagttcaagaccagcctggccaacatggtgatctttgtntctattaaaaaatacaaaaataagccaggcgtggtggcgggcacctgtaatccagctacnctaaggctgaggcaagagatcacttgaatccaggaggcagaggctgcagtcagccaaaattactccactgccctccagcctaggcaacagagtgagaatctgtctcaaaaataaaaataaaaataaatcaatgtagtatcagacttatatgtagaaattaaatatttgacaaaataacatgaaattataaggagagaaattaaaatttattattttaaggttcttaatatacaaactagtatattatcagttgaagatagtctgcaataatttaaagctatatactataaacactaaagcaaccattaatatagcaaaattgaaaatatgaagttaatagggcaacaaaggagataaaatgtaattttaagaaatatacaaataattacaaaaagacagcataatagtaaaagagaatgaacagataaaacaattataaaacaaacaccaagctgagagacttaaacctaatcacacgataatcacactaaatgtaaatggtccaaatacccccatcaaaaaggagagactttcaaatagataatgaaaattcaagacctaaccacaaaaaaaacacacttagaatataaagtcacagatagggtaaaagtggaagaatgacaaaagaagagacattcttcaccaagagtcctcggggtttcctgcttcagcagtgcttggacggaacccggcacttgtcccccacccaggccagctgcccatagccagccctccgtcacgtcttcactgcaccctcagaccaccccaaggcccccaccgccgctccagcgccacgcagccaccgccgccgcagcctctccttagtcattgccatgatgactgcatccaactcgcaggtgcgccagaactaccaccaggactcagaggccgccatcaaccgccagatcaacctggagctctacgcctcctactttaacctctccatgtcttactactttgaccgtgatgatgcggctttgaagaactttgccaaatactttcttcaccaatctcatgaggagagggagcatgctgagaaactgatgaaactgcagaaccaacaaggtggctgaattttccttcaggatatcaagaaaccagactgatgactgggatagtgggctgaatgtgatagagtgtgcattacatttggaaaaaaatgtgaatcagtcactactggaactgcacaaactggccactgacaaaaatgacccccatttgtgtgacttcattgagacacattacctgaatgagcaggtgaaagccatcaaagaattgggtgaacgtgaccaacttgcacaagatgggagcacccgaatctggcttggcagaatatctctttgacaagcacaccctgggagaaagtgataatgaaagctaagcctcaggctaatttccccatagctgtggggtgacttccctggtcaccaaggcagtgcatgcatgttggggtttcctttaccttttctataagttgtaccaaaacatccacttaagttcttttgatttgtaccattccttcaaataaagaaatctggtacccccccccaaaaaagaatgacaaaagatagcacatgtgaatacaaataaaaagtaagctactgtggctacattcatgtcagacaaagtaaatttcagagtagagaatattaccagtaataaatgattatttcatagtgataaaggggtcaattcatgaaaaagacataatcctaaacctaatacaacagttcaaaataaatgcagcaaaaactggaaggagaaagaaacagatctcnaantnnantc

SEQ ID NO: 56426 - DNA, 416 bp, Homo sapiens
attagcagaaacttcaggcatgagaaacataccctcagaggcctagaatctatctagtgtctagataatggagatatgaaatacagacacttaaacaactatgtttcccatgttcaaagaggaaatttgcaaaacttgaaagtgttggcaggaaatcagaaactataaaatgtgacaacagcatactttagagtcagtataaattacggtcccgaaaactgcagaattccagaacttaatggtaaagcaagggtttaacagcagaatagaaatagccagagagaactaggaagtaagtcagatgacactacccagaataaggcactgagaggccaaggaatggaaaatgcagaagaaaggatatggtgagaggatctaatatacatttatttggagtaccagggagagagagaagg

SEQ ID NO: 56427 - DNA, 318 bp, Homo sapiens
actgtgtaattgatttctaggtgtaattgattccaattgtgtaattgatttatgtgactgtttatgatggcaagtgtcatcctttagtttccatgtttagaatgcctttgaatattccttggctggccagtctagtggtgatgaatttcattagcatttgtttttctgggaaagcctttatctctccttaatttgtgaagcttagtttggcaggatatgaaattattggctggcattgttttttctttaataaaactaaaaatagtcccccagtcttttctggtttctgctgcaaagtctactgttagtctgatggga

SEQ ID NO: 56428 - DNA, 248 bp, Homo sapiens
tgcttgtttacaggaaggttttgacacctcactcctttttccttgcctgtccattggtttgattttgtgccgatgagactcccattaagaggcattttcctccctgggttatgcctttcttaggtataattcagtcctcttttctctcacctcgtctcctgtcttgccatggccatgatggacatttatatagttgcatcttccccccaaaaatgaagtgaatacaaagaaagagagagagagaggga

SEQ ID NO: 56429 - DNA, 404 bp, Homo sapiens
aaaaaccaatttctctaaagagggaaaaaaataaaaataaataaataaataaatcatcctattctttacagtatgttgtcagttaacttattattcaaaagtgatagcaagctctcctgtttaaaagaatacagtctgtctgtctatgaagaaaacgattgtttcacactgcctctgctttgcagtcctattcagctcagacaatttgcatcaacctgtgactagtgacactgtcacttagtggtgccccagaaagccatgatctcacgtgctcttaatattgaagttcttatttatacatagatgtctctggaatactcatgaattcttacttgaatacaatggtgttttattaatagttattaattaaattttaaaatgctaatacataatttatcaattta

SEQ ID NO: 56430 - DNA, 216 bp, Homo sapiens
cctggtggaccctcagggtctcacacgccaggctgggtgggactcgggagagggactgagaggggtgagatgctacgatacttcacaagtgttcaattatgactttaagttttacccatttagttttgttttatttgacaaattatggttttatatttttattgtaatattgcttttttcaattcattttacatttcaaagtaaaaccatttgcct

SEQ ID NO: 56431 - DNA, 503 bp, Homo sapiens
gaaagagatattaatagtaactactgtggcagatggcattttccataaatgcctacaaaatactttccatctcagctgctcttcagaaatgaccttgccattcctccatcaacagatgaaatctaattccccttcttttgcatctgggctggcctcagggacttacttgggcattggaatgtggcaaaagtgatggtctgggacttccaaggctagttcatacaagctaagtcattctgtgtgagtcttttgggatgttccctcttccaacccagccaccatactgtgagaagcctgaacacttggaaagccatgtgtaggtgctctggctaacagtcccagccaacagcaagcatcaactgcccaccgagtgagctctcctgacatccagcacctttgggccttctgaagactgcagcaccagcccacatctgggaccccaaaaagaatgggaataaactgagcccagttagtatacaaaccaagacagataataataaatg

SEQ ID NO: 56432 - DNA, 429 bp, Homo sapiens
ctactacaatttacttatcagatatctgttctgtgccttgtgaccaggttctatggctatatttcctaggagagacagggtgaaagcacttactctatcttatctggaagcagaactccccatatttacttttttttttttttacttccaaactaattgtataaggccaacattaccctcataccaaaaccagacaaagacacagtgaggaaagaaaactataagccaataactaataaacatcaatgcaaaaataacaaaatactagcaaactgaattcaacaacacgttaaaatggtcattcattataatcaggcgggatgcatccctgggatgcaaagatggttcaacatatgcaagttaataaacatgatgtatcacattggtagaatcaagggcataaaccatatgatcattttaatagatgtc

SEQ ID NO: 56433 - DNA, 491 bp, Homo sapiens
acagctgtgaaaaaataaaaagaaatacttagaaacacatttagtcaaagaggtcaaagatctctacaaggacaactacaaaagactgctgaaagaaattttagatgacacaaacaaacaaaaacatatcccatgctcatggatgggtagaataaatattgtgaaaatgaccatactgccaaaagcaagctatagattcattgcaattcaaaatgccatcatcattcttcacagaactagttaaaacaatcctaaaatccatttggaaccaacaaagggcccacagagacaaagcaataccaagcaaaaataacaaatctgggccaggcacagtggcacacgtctgtaatcccaacactttaggatgccaaggcaggcagatcaagaggtctggagatcgagaccatcctggctcacacggtaaaaccccgtctctactaaaaatacaaaaaattagccgggtgtggtggcatgtacctgcagttccagct

SEQ ID NO: 56434 - DNA, 490 bp, Homo sapiens
gttctgtaaaatgtgggcatggatagatataaagtgcctggtgtccatgcttttgtgaaatcccttcctcttccatgtgaatgggacctgtgactttcttctaacccagagaacacagcaaaaatgatgtgatttatctgagtccattgatgacattgattacgacttcccttcaccacattatttaggactgcgtcgtaggagactgggacacatatccactttgctggcttgatgaagtaaactgctaagttgaggaagcccacatggcaaggaactgtgggcagccttcagccaacaggcagcaaaaagctgagctcctcggagctacagcctcaaggaagttacttctgctaacaacctgaaaaagcttggaagctagtttctctctagtggaatttttagggaagagcatggcccaggcaagataaataatgtaagtggaaaaacctgtcaacaataaaggttttaaaggaaaaaacaaaaaaca

SEQ ID NO: 56435 - DNA, 456 bp, Homo sapiens
agaccaggccagggaagttgggctgttgtcccaggagcagccaagcctggggtgggcagggctgggctgggttgggctaggctgggcagagctgagagagagaagagaattttttgcctctccgctcataaatgcctatattgggcaaggcctctcgtttccttgggcggtgaccaggagtctctccaaatttgccagcctgggttgaattgtctctctgcctggaaagagattgcatccttctagaggatccccctcagtcctcaagggaataagaatggatgctgacccctgcagcctgacctcccagaatggatagagagatgtgagcaaattccatccaagagggtgggccactcattacctctgctaggctaggatgggagccacagcgggggacaactgtttctgggaaccacggctcccttgggttgctgatccatgcagtcactgtac

SEQ ID NO: 56436 - DNA, 442 bp, Homo sapiens
aaacatacattgctgaacacaaatgtaagtttgttcttggcttattaaattttagagaaggactaaatatatttttgcctgttaatacacaaagtaattatgtaacgggaaaacatgtttccaaaaattataaaatggttctcatctataaaatactgattccaaggttttcactaaaaattacagttactaagagttaaagttcttacatatatatatttcagtatacaaagtatacgaaaagtaaggtatgtttctgatgagaaaaattatgagaggaataaaaatgtgttctttattgaaaaaaagagtaattttgtctagtttggagattatttaaaatttgtttcaaaatatggatttagaaagcaaagagaaagaaaccactaagtaggagagcgagagatgtgaagaaagttataggtatgtagatgtatcttag

SEQ ID NO: 56437 - DNA, 1766 bp, Homo sapiens
caacctgcaagaggagcctctggctaaaggtcagttatttcgcaggctggagattaatcacagagctcaagaatatgaaagcaaagagaaacagaaaggagggagaggtggaaaaggaacctgtaacctccattttctctctctgggagccacatatagtgaagaaaaagcatcagggttgggaggtctggtgtggttaggaggtccagtgtgggtggtattctaaatgtcaacataaacggtaagtccacccacttccctctaccagaactttgccctttactgcttctaaaaggatgggtcatagggaataaaagagggagacaggataagaggaaagcaaagacattacctcgccttttccctttaagaccttgggcaagtcacactgcctatcctgggctgcctgacatgctagctgggaattttctgactttccctggcatcactgtagtattacagccagatcataacctgagagctgatgcgcttcctcacctaaaatggaacagacgggagggagggtggaatgctgtttgtgttcaggtatgagtcattaccatgcatcccacttccttgaacctgactcttaattgcatgctttagccaagattcagcaaaaggagagcttgggagtaagtctccattggcagagagcacccatgttgtttgctgctcatttttctacccatgggaaaaagaactcctaacctctggagtcagtagtctggccacgaaaactcatccaagtgacttggggaagagataagattccctggccccaggtggtgcagagaagtgggtggtacctcctggagtccccattccttctattatatgtggttttcatagtggattagaggcttcatggcagtgaagtgccaataagaagaaggtgagatctggagttaaacatgtcttgattttatatcccggccccatcacccaccgctggtgggtgtgaccttgagcaagtcactgaagttgtctggtacctaggatgccacacacacccacccacccacccacacacacatacacacacagagcaaagagtaattgcattttggttctgatgcacatgagagactggcaggtttaaactcctcgatgggccagcaactgttgaaaggctcttcagtttctctttggaataaaaataaacaagttcaaaaagaaaagaaagcaagttgaaaagggacatgtattctttgaggaagcagatttgccttcagtggccaaacaatgagttgtgaggtttttccactggatcatttatacttttttgtatagataacagcagaggataaaactagtaatagtagaaataattaaatgtttactctttaatagtaaataataagtagttaaatatttaagaatagagtcattaattttgtgtgtgtgtatgtgtgtacctaacacagaggcaagggcttcatgtacagtatctttgggggattctaacccggaaaattctaacctcttgatttttttaaaatctttttaagaggcctcctcttactttgttctaatcgcctttgggacatctatgggtctctttgtcagaaaagacccagaagcctgggcttatagtatagaagtggggagaatcccctaccactgtaagcaacgagcattgtttttatttaatgggagtcacattgtgctgtcttgctgcacggatagccaattctctacatcttataacacaataaaccagggaggagaggggaagggaaagtacaagtcccctttggtgaaaa

SEQ ID NO: 56438 - DNA, 449 bp, Homo sapiens
gtaccctaggtctagtaacagcagggagccagctgtaacaaccaggttcctcccctgccttcactagccatccctttccctacaccacacacacacactgagagaaataataaggacaaggttgggggacctggaagaagaactgtatggagaaatgtgctgatagaaaccattgcctcagtggaagaaagcaacaaacccccagcaatccggcagagaggaagctggggaattaatacaccaacatcattcttttctatcctgtctcctattggtgaatacaggaccagaactaggcatacagtttaaagaggccctcgcagtaccctggggtcctcattccttttaccctaatcccagccctgagcaaacccaattaaagctggagggcaaagcagcctgttggaattttgcagggcacagaggaagtctgagagagtagagagcaa

SEQ ID NO: 56439 - DNA, 345 bp, Homo sapiens
gggaaggtggggctccagttctaagtaccgttgtcaccaagtgaacatccttacagatttctagcaaaatgctgctcagacccctttccgaggccgcatggcctaatcgtcctcggagagactgactgactttatcgggtgctcgcggagtgccagacacggctttcattacattcggtccttgtgggggcctgtcaggtgggcggcacagatgctgcagtttcatgggtgacgatattgaagcacagaggagtcaggtcacccgttcaaggtcacacatggagtaggaggcagggccctcaccaccacctcgccaggggcctcattgtgaactcggaaagggcc

SEQ ID NO: 56440 - DNA, 89 bp, Homo sapiens
atgcttaatagcctaccatttgtcaatattacgtggggagcatattaaagccagtaagagatcaatttccccaattttttatcattcat

SEQ ID NO: 56441 - DNA, 521 bp, Homo sapiens
ggaatgtgctgcaaggcgctgcctcgctctggagccagacgagaggccggagcatccgccccaacatggctggctgtgtgagcctcaggaacgctggcagctctgcaagactctctgccatctgcaaaataagtatgaagatatggtttccacaccaatgttaggccttctcaaggagcttagagtgtgtcggtggagagggagaagcccaacgggagatcttattccacctctgcacgtcttcaggacccctgtggaaacatgtgatctctaacagtctctctggggctctgcccacccccagcagtgtcacctcacatcaccgcacaataagaactttctcatcatgaacatagctttctctggagaagctgggaagtgcttaactatgccagaagctggacaattcaggtagaagtgtaaatgttggcctaaccttcaaaggacagaaatagctttctttgaaagttctcaaaggtgtttcagaactctggaaaattttaaatcttaaaataacacta

SEQ ID NO: 56442 - DNA, 311 bp, Homo sapiens
ctcaaaagacaagttttggaaagagttcaaagaaaaaattgaaaaagataatgaaaggtttgggtgatgagatgatgatgaaaggctaaggaaatccaaattctttgttctgaaaagccgagatctgagaggtccctggtttggtggaaggttatcgtatctggtacacatgctccggggaggcttggccaagataaaataagcacaaagggctcaagttagctaccaggagggactttctgacagccatgtactttaaagtttttatttttattcttgaaagcttcaagaaagctgttacctatctgaaa

SEQ ID NO: 56443 - DNA, 1538 bp, Homo sapiens
acagggtttctccatattggttaggctggtcttgaactcctgacctcaggtgatccgcctgccttggcctcccaaagtgctgggagttctccttacttgggttgaataattatcagctcatggctaaacttgcttcatacacagtcaagcgtcgcttaacaacagggatgtgttctgagaaatgtatggttaagcaattctgttgttacgtggacatcgtagagtgcacttggacaaatctagatggtatagcctactacacacctggggtataatggtacagcctgtggctcctaggctacacacctgtacagcatattactgtactgaatactgtaggcaactatagcacagtggtatttgttatctaaacatatctaaacatagcatagaaaaggtacagtaaaaatatggtataaaagacaaaaatggtacacctctatagggcacttaacatgcatggagcttgcaggaccggcagttgctctggtgagtgagtgagtgagtggtgagtgaatgtgaaggcccgggatattactgtatacttctggagacttgatagatgctgtgcacttaggctacgctacgtttgtaccagatagtttccctcttcaataataaattaaccttagcttactgtacctttattaacttgaaattttttttggctttttgactcttttaacaacacttaatgcatacattgtatagctgtctaaaatactttctttgtatccttattctataaggttttttctattcttaaattgtttaatttttttactttttttttgggtggagacaagttctcactacattacccaagttggtcttgaactcctggcctcaagcaatcctcctgtcttggcctcctaaggtgttgggattacaagtgtgagccactgtacctggcctatatttttactttttaaatgtttttgttaaaaacgaagacacaaacacacacattagcctaggccttcacagggtcaggatcatcaatatcactggtctttcgtctccacatcttgtcccactggaaggtctgcaggggcaattacatgcatagagctgtcatctcctattatgataacaaggccttcttctggatacctcctgcaggacctgcctgaggctgtcttacagttaacatttaaaatatatatatatgtagaaggagtacactctaaaccataaaaaacagtaacatggtcatttattatcattatcaaggattatgtattgtacataattgtatgtgctgtacttttgtatgactggcagtgcggtaggttggttcatacaagcatcaccacaaacacacaagtatgcattgctctagggcagtacaacagctaccatgttaccaggtgatagacaatgttcagctctattatcttgtaagatcactgtcatgtgtggtccatctctgaccaaaacgttatgcagtacgtgactgtatcctcatcctcaataatccttggttattattctagaatttgaaataaatggaatcatatcatttactatgtacattt

SEQ ID NO: 56444 - DNA, 405 bp, Homo sapiens
cattttcttattatcctcatttgttgagttttaccaatgaactattggaattatcatgtcatttaaaagaaaatcaaacaatgacagattgtaataaggattacactgaatttatattaatttcaggaaaaaggacatatttacattacctaacaataagctaggccagccttccctttaaattaattaattatacaaatctgttttcagaatcatatttccttggtattggttagcatacattcaataaaatcctactgaaaaatttgtgtttagtataagcaaagtaatttttttttgagacggagtcttgctctgtcacccaggctggaacgcagtggcgtgatctcggctcactgcaagctccgcctcccggtttcataccattctcctgcctcagcctcc

SEQ ID NO: 56445 - DNA, 349 bp, Homo sapiens
agcacttgttggagaaaactccaggagtcaggagcagaagtgagcatgtggatcacctgttggacataatggttctgcagcagtgcacagagggcttacagggcctggcatctgactgtgggagagggacttaacccttaggagggttttaaacttatgtctcctagaaagactaggagtttggatccaacagcagtaagaggcagcgggacctgtctctggtttaattccatcagctcagattcatggctgaggaacactcattccatcccttggtgaaccagggtttgaagtccaaaccttgcagtctcagtttccatgacatggcagatgggacctgatttgccac

SEQ ID NO: 56446 - DNA, 274 bp, Homo sapiens
gagatctaaatgaaatttataagaaaattgtgggttctgcccaagatgacatctaaattgaagaaggtacacagtgagtttaaaggatcaacgagagaaacttttattattcatttgcacaagaagacacattcagtatctggattatccaatatatggaatactttgagttgaaatgattaaagggtaatctttaatcattaattaacaaatcattaattaaacaaaataatatttagcaaattaagcaagtgctaaaggatacatgcaaact

SEQ ID NO: 56447 - DNA, 448 bp, Homo sapiens
tattatcctgtgaccctgccacaaccccctctctgagaaacacccaagaatgatcaataaatactaagagagctcagaggctggcaggatcctccctatgctgaacgctggtcccctgggcccccttatttctttctctatacattgtgtctttttcttttccaagtctctcattccacctaacaagaaacacccacaggtgtggaggggcaacccaccccttcagatttctagcctgaaaaatggaggaacaatgtctgtcatataaagttgctgtaaagataaaaccagctaagaaatgtaaaatactcaacagtgcctgacacaaaataaacacccaattaatggtagcagcaagaaaagagctctcttcaaccaacatcttaccttcagaaattggttaagaagaaatgagtgcttgggaaccttcctgttagagctgggaaca

SEQ ID NO: 56448 - DNA, 381 bp, Homo sapiens
tgcctcccaggttcaagcaattctcctgccttagcctcctgaatagctgggattacaggcatgcaccaccatgcctaatttttgtactgatgccagcactttcttagcaaccccagctggtgtcctagtatgccccctccagtccactgtctctgggcccagttcagcgctaggacttgcttaagagtttcagtccttgtagcctatactgcctttcacgtttatttagagatctagagcactttaaccctcagtggcaaggtttgtgggaacttgagttcggaccactgggattggcaattcccctctggctagggttgctttaaatgctcccttcacgtgtgggcatcagctgagtttggtccagttttcctttctgct

SEQ ID NO: 56449 - DNA, 239 bp, Homo sapiens
gttctaagataacgcgagactagctttatttttttctgtgcttgggcagagctgtgaccagccacctggaacatcatattggattctgactccctttctttctgccccaaattaaagtaccttttctttggtatttcactgaatctttaaagtagtcaatagtaaacaccattttgtaaataaagttgtctcatctggtaactacaaaatacaaatatatctttcagacacgatttcag

SEQ ID NO: 56450 - DNA, 555 bp, Homo sapiens
cctggtccagtcaatctcttgggccctaggtaaatcagataccacctcctcaagcttgtctgtaaaaatcccctgcatttcaccacgagactagaagaccaacttaagagcccctccctctctgcagcagaaagagctttactctttcttttgcctactaaacctccactcttaacctcactccttgtgtgtgtctgcatcctcaatttctccaggtgtggggcaacaaacctctggtattaccccagacaaataacgctgcttcattataatgcattagcatgctaagagacactcccgccagtgccatgacgttttacagaagtcatcctatatggtctagaaagggggaggggactctcagttccaataattacccccctctttcctggaaaactcatgaacagtccacctcttgtttagcacataatcaagaagtaactaagtattatcaatcaagcatcccaagctgctgctatgcgtatggagtagccattatttattcatttactttcttaataaacttgctttcacattactgtatggattcaccct

SEQ ID NO: 56451 - DNA, 383 bp, Homo sapiens
cctccacctcccgggttcaagcaattctcctgtctcagcctcacaggtagctgtgattacaggcacacgccaccatgcctggctaatttttgtatttttagtagagatggtctactaaaaatcaggctggtctcaaactcctgacctcaagtgatccacccgccttggcctcccaaagtacagagattacaggcataagccaccgtgcccagtgccagtttcttatataagctgatttggaggaagaaaagggcctgttgtttgatgactctgtggccccaggccaagccctgtggaagcctggagtatacggccggggtttgtggcacaggcgaggggagccacaggtgaaggtgtgcaggtgcgcaggtgcgcagggctcc

SEQ ID NO: 56452 - DNA, 2351 bp, Homo sapiens
ttaaatatgcctcaaatgtcattccaggaaaccaaggaccttggaaggcttcccactggaaggtcagtggagatagtggaaatcacagaacagtttgcaagtagcaaggaggcagatgaaaagaagaagaagaaagggaagaaataaaatctacattcctacagcatgaaaccaattaccaagggacttattagataggcaataaaaatctggaaactttctctctcagggctgagccaagatggagataaactgatgcactaaaagcaaaccttgaattatttaccatatcaactattataaagttacactattttaaacataatccaaaatgtttccataagcaacttgatctctctcctttattttgaaagtggcagtatcaaaatggaaccattagcagcttgctaatattttgatgcagaaaaggaatctcattattctattttactcacatcatctttccactacaaaagcccatggacaaaatagctacctaaatttgtttcggtaaaaaatttactgtaaaattgaaaaacagcctgaagctactgacattaagtgctgtttgcaggagcaaaccagtgattttctattaattgttaatcatggacagaagattttaggcagctcatttttttctaaagtgattcaaaatagttttgtgtgggaaaaagctcttctgctgattacatatagctataaagattaaaacctagccacctgctcagtttgatcttccccagctcagacctctcccttctgagcagatgatagaggtaagatgatacatgagaacctccaatggctcctgtcatcacatactgtataaaatccaagttcctcttactggctttcaaggatcctcctttaacttcctgttgccttgtctcatcagcaagatcataagtacctacaggtcaagcactgtctctcccttctctttagcttttcccttaggatctagcacattacccagcaaaatgtgagtagcaaggctgaaatgacatctcaataacttcaccaatgattgtaactcagcatcccttctccatcccagctgaaagcctgcttcaccatcctgcaagagatgttttttctttttgttagcatccattcccctttctaatgcagctcccaatgcataatgtgtgttttacttccctctttctgactccatcctcgtcaccagtgaatatttgtaccttctcttaaaatcttcaaaacacacttctaggaagtgctccttgattaatcctctaagcacttaaatgaaagcactttgcttatgcttatttcacatttgctgccacttgcctctttgaaatatgtaaagatacattacaagaaaaatgtacattttctcgtaacttgctattaatttttttctttatatatatatataaagtaatcctaagctaataaaagagtttgccatgacattaaaacatttaatactccataagggaggaggagaaagaaaaacatattttaggaatagcaattagtattgtggttaaaataaacatgaataaaaattttaaaacaaagttttaatgttagcatacaaattttaatggaattactggaatatagttttattctgggtatatagtgagtattatttaaagaagtactgttgaggtttatttttatttcatgaaatcctatgtccacaatttgggatactgagttaaaaagatcccaacatgacaaatccagcatctctgatcattattaaaatagatccaatttgttgccagaaaatggcagactacaacatgaaccaggctacagagaatccaattagaaacatggtctgaaatagatgatgaactgaacctggatatcagtggtatataacaaaaggagaagttgtcagaactataggaaagaaagtgcctttggcagttaaacttttgtactggttcgataagactagggctacaaagaagattactcacaggtcgtaagtccaggccaaccttagacaaaagactgttagaagagcataaagatatactgtccaaggcaagtaatctgtttcctcatctgtaaaacaagaaatgtgggctagttcatctttaaggttcctttcagctccgtctgctataagaaggcatatagcaaagcaatagttccacaaagtgagatcctgcagtgcagtgattagctttccttgctcactacgcagtgattcttggtcatatcaggctggccggggattgagagagagaaattgggttgctccacccctcttcagccaactggcaatggtgatatggaagaatatctctgccaccacacatatagaactaatggaaataaagaaaatagaagtaaattaaggt

SEQ ID NO: 56453 - DNA, 395 bp, Homo sapiens
gggtgcatgactccccaaaagcccaccatgagccattcactgaaattagaaccccagtcccctgatgcaagctggtgctctttctacagcatcacatcatctctttgaggaacaagattattggaaaaaaggcaccaactcgactgggaatttaagatctgggtttgagtaccagttctcaaaagttctgctttccaattacttttccttcattaagtgctgaaagtgaagactacataaaaaagttgtgtgaaagtgcctcataaccaaatttaacacatagtgggtgtttattaataaacgctttttgaatctgaatccctcaggggagtaagatttggctaaggtaatccatgtgaacatattatatcaaagtgtagtgtgatacagaaatg

SEQ ID NO: 56454 - DNA, 874 bp, Homo sapiens
tcttactataaagtaaaaattattgtaggccttctaaggaatttataattcattaaaatacatataataacactaaaaagctaattaatatataatattctagttaaaaattaggcatatatgactatatgcaatagtgtggaaaacaattaggcatggaaattattgttagagtttattatttttcaaaagataatgataaaacacacctgtaaatttaatataattataaattcgtcaaatctcaggatggtaaaaccttaaatataccatttgtaactgacattatgtattctctttcttcttcagaggaaaaccctgaaggaactatgggaaatttcttttttattttatttatttatttatttatttatttatttattgagactaagtctcactctgtcacccaggctggagtgcagtggtgggatctctgctcgcctcaagctccgccccccgggttcatgccgttctcctgcctcagcctccccagtggctgggactgcaggcgcccgccaccacgcctggctaatttttttgtgtttttaagtagagacggggtttcactgtgttgggccatggtctcgatctccctgacctcatgatcctccccgcctcggcctcccaaagtgctgggattacaggcgtgagccaccaaggccggcagaactatggaaatttctaagaaacaaaaacccaaacagtccttcttattcagacttctttgtaaaaccgaccaaaataactctctctttttcttaattgcttgaagtgatactcacattcagttccactagttgtctctaagcagtggtataaccagaataattggagtcccacctgaaagaaaagatggataaatttaactacctta

SEQ ID NO: 56455 - DNA, 359 bp, Homo sapiens
caaggtcatacatgcatcatttcattccgtgctcatgacaactacatgatccaccatctctcccaaacacaggatgaagttaaagttctttatctgcctaaaatccagacccaccaaggagatcttctccatcttattagaccaagatgtaaccacacctgaatggacattttcccaagataatgtctgagttaatccctgctccctgatccattcattctccctcgcaatccctttaacagaattcctcttctctccctgctattttgccaggaaggcatagaagcttctgactctagttggggttttgtggttctccctgtgtatacattaataaagtttgtatgcctttgccctga

SEQ ID NO: 56456 - DNA, 375 bp, Homo sapiens
ccccccgtgtcgctgttccccccgtgtcgctgttccccccgtgtcgctgttccccccgtgtcgctgttccctccgtgtccgtattcctcccgtgtccgtattccttacctgcaccttttcctgcaggtgggactcagggtacttgttcagcacatgtgctttcctcttcgtcttctaggagggagtggttgggtctgggctccctgttcccaagcccacgttgtgttcatggctgtggctgcctgggtgatgagtgtgagtttgcacctgggtttccctgggccttaagcagacagcgtcaccctcagagccatcaccactgtgaatcatttggatctttttccatctgggcataaaattgtatgtgtagacaaa

SEQ ID NO: 56457 - DNA, 635 bp, Homo sapiens
gaatacaggtggggaggagggtgtggcaaatgtgtcaaaaataggaagcaatagaaaaggagctcagtgggtagaaggctaaaagatacaggtggtaagcagtctgtttcagactactttagcacacattaggcaaaagaatttcaaagagcaaggaaaatatgacaaacacaccaagggtcaatcatcaattaattcaatgcaaaaaaggtattgaacacgagtctttgatgcctcttccttcactctaccacctatcctatctaaccaaacccaggttttactcagttctttcttactaatctttcaaatttatctcctcctctacctcttccctaagatactgtactagagactgcagaatatacacaagtttgagggagcaagctctatcattaggacctcccacttgaacagaggaggcaaagacaacataagtatgccaactgaattctttctcttttggcacctaacactttccactttgtattatcttaattcctcatagactctagatctttaaaaatgaggaagactaaaatagacagacgggtgagcactccagggcaaaagtgaccacaaagtaggctcagaggaagggataacagcaagttgttctgtgacaaagagaagat

SEQ ID NO: 56458 - DNA, 323 bp, Homo sapiens
ggcacccccagaatgaagcccagactccaccataatggccctgtatgcccttctatccccttagctgctggtgtgatcatagcctcaaattgctgggctcaagtgatcctcccacctcagcctcccaaagcacagggattacaggtgtgagccaccacgcgcagtctgcaaaataattcttaaacttgaagaggtccctggcaaaaaaagatggatttcatccataggtgacacagcaagaaggccctcaccagatgcagctcctcaatcttggacctcccagcctccagaagcatgagccaaataaatttctgttcattata

SEQ ID NO: 56459 - DNA, 880 bp, Homo sapiens
agatagattataggaattagcttacctgattgcaggggctggcaaatcagaaacctgtagggcaggccagcaggctgagaattctctggcagaagctgaagctacagtccaaaggcaactttttttcttcctcagggaaacctcagttttattattaaggcctttcaactgattggatgacacctacccagattatcaaagatacctcctttaattagacttatctgactatagatgcttacccaactacagaatactttcacagcaacatttagattcatgtttaattggaaactgggtacgatagcctagccaaatttacacataaaaccagtcatcacagtgctccagagagagagagacaaagagaggagaaatttacttatcatcttgagatctaaatgaacagtaagagagacagagtaaaaaagagagagaaacctatcatgttaatatcttaaaaaaagaaaaaatagaggaaaaaaatctttaagaacacttaaccatgtttgttattacatgttttttgagaccagattttatgccatctgtgttaacccccccacataagtctacatcaagtatttggttaaaagtgctcacagcagaatttactgaggatttaatggaagtgttctaaaactggattgttgtaatgcacaactgcacaagtgggtaaatttacaaagaaaaatgtacacataaaatgggtgaactttatggtatataaaaattacagtggtatatagaaattatatgaaaataaaactgctttaaaaagtgacctgaacaacatactatgtttccaaggctgggatgtggtaggtattcttatatgttgctgttctgaatagaagatagtatgacccttgcggatgga

SEQ ID NO: 56460 - DNA, 277 bp, Homo sapiens
aagaaaggttaaactctgtgagttaaacacacacatcactacgcagtgtctgggaacgagtttgtcttgtttttatacgaagatatttccttttctaccattggcatcgaagcgcttgaaatctccacttgcaaattccagaaaaagagtgtttcaaatctgctctgtctaaaggaaggttgaactctgtgagttgcatacacacaacacaaagaagttactgagaaatcttctgtctagcataatatgaagaaatcccgtttccaacgaaggcctc

SEQ ID NO: 56461 - DNA, 266 bp, Homo sapiens
ctgaaaattactcttaaacatggcacataaccatttataaacagttataattatctacctagaaaacactaaaaaataaactcaaaaatgattagagtttataggaaaatttagtcaagtacctagttataaaataaaggaaaaaatcagttattggtcaaaataaaactgaagatgcttataaaataatagtgggtgaaaattctttcataacatagaaatttgtatttattaactttctctaaagatttagtgtgcctagtttt

SEQ ID NO: 56462 - DNA, 322 bp, Homo sapiens
  misc_feature (1)..(3): n is a, c, g, or t
  misc_feature (71)..(72): n is a, c, g, or t
  misc_feature (75)..(75): n is a, c, g, or t
  misc_feature (87)..(87): n is a, c, g, or t
  misc_feature (140)..(140): n is a, c, g, or t
  misc_feature (244)..(244): n is a, c, g, or t
  misc_feature (246)..(246): n is a, c, g, or t
nnngctgtgtgagctgggactggctcgcagccctccgagatggcccagcagtcggacaaggccgtgaagtnntgngccctggagganattcaaagcacaatcatagcaaaagcacctgggtgtacgatttgaccaaattnctggcagagcatcctggtgggaaagaagtcttaagggaataagctggagagatgctactgaaaactttgaggatgtcgggcactctacagatgccagagaattntncaaatcataaatcattggggtttcatctggatgacagataaagttaactaagccttcagaattttttttttttttt

SEQ ID NO: 56463 - DNA, 520 bp, Homo sapiens
ccaaagaaccaaccgtcaacacaaatttcagtctctatgttaagggcagagggaagacaatggggttctgttcaagaggtgaccaaagaccatggacatctgggcaccagcaaggttctgtggaggtttggaacattttggccttgaccaggtcacaatgctcctataaatctttaacaaaacatagttgtttacatatctcccctttaatcccagagttaaattcaaaaaactacatgactgctgtttttatgttttatttcagtgccctaaaattatcctagcctgtgtgcaggaatgggtaaaggctgcttaaacaaaaatggaatttgctgtgttagttctttcgctgtttcactgttacgtcgctagtatcgcctgagagcttgctagaactctcagacccagcccagcatctttagtttatcatgatcctcaggtgatacagatacacattaaagtttgagaagcactgctattctaaaggttctcaatttgcaattcggctaccacctgcatt

SEQ ID NO: 56464 - DNA, 1607 bp, Homo sapiens
ggggaagcagaggggacgatgaggtgcggaggcgttggcagttgacttttgctgatggagcctctctgaagggcaaattcaaagtacagctgggtgctgcagcactgggagtgcgaacttgtggctgtggttatgaaggagcctcgtcagctatgcctttagcccctggtgaagcagtgccagtcacactttgccagtcaaacggagaggcagcagtagtaagaccagaccaaatcaaaccaaaccaagcaaaccacggggaatggaggacctgatgattgatttagcatctttggcatccggccactgctctgcttggccatactgctgccttcaccctcagctgttgcaactcttttggccactttgtgtaactgccctgccaagccctgcttcctggctgtccaaagaaagaagtgtttcctacaggagatcacaacaaaaggatgaaatctggggtgcaggggaagggtagcttctgaagctggaaaataaagaagtaaggaagggagactgtggaatttaccagggagggaaactaatatttcctttcatataagttggtactattctggctttttaccatgatcatatattatattcaaaataaagctcttgtttttgaaacaaaaaaatataaacaaaggaaggaaggatgttcatttatttagataatagatacctagtgaacccctagtagaccttgtactgggtcctggggacactggtgaccaggttccattcctgatctcctggagcaggggacacgaaaagacattaagcaaataattacacatctttttacatcagtacaaatgttgggactttgcaagagttccaccctgaaagcttctgttttcactgaaagagaggaggcaaggtcatttgttcataaaagcaatggaattgagtaggggacttgaaagaaatgatgaggctaggaaaagcagctataggaaagggggcaccagtcagactaagaatatgtaaccagagcacagctgtgcatactttgcttgaatgtctccaagttcaaatccaagaacttgatattttaggttgattctatgtgtaacctatttgtttttaaagagtagagtctttttcttccagcatgtgttagttagccctgtctttatcacatcaccaccaccaattgtcatttgcagaagtatcttcaactcatcataaatttactagtaatagctaactcatgtctatagaactgttaagtgacaagataatatttagattaaaagctatagttgcattcttattagagacttaatcagattttaacatgctcctcacaggggccatttagccctattctgctgggctttggcaagcactgaatgattgccctcctagggcagaggtactgcagccctggttaagcattgaaaagatgatattaccaataagttgactctaattgtaaacaacatatttaaacaattacatcttaattaaattcttataaattataagtgcctcagaactttctttcttaatctcaaatgcatgtttcttaaaatcattcactattttatgagaatatatttgctgaatattagaaaaaagagttaaaaataaaaggcatttct

SEQ ID NO: 56465 - DNA, 314 bp, Homo sapiens
aaggaagaaaaatcctgctgaatccaggagctcttgctgtcccttttgccctcacatgaaacgtctttgtggctcagactcaatgagctatggacctgtggaccctggtggcagtcacacagtgtcaaggattattgcctgctcctccaagcccttcactgtagaatggaagcctgtgattttcctggcatcatgcatgactgagaaggtcagtgtggctaattctgagcttcaacatcaggaaacccgtagttcttcacactgagccgcctcctgcagcacagtcatccttggtaataaagctgatattttca

SEQ ID NO: 56466 - DNA, 357 bp, Homo sapiens
aaggaagaaaaatcctgctgaatccaggagctcttgctgtcccttttgccctcacatgaaacgtctttgtggctcagactcaatgagctatggacctgtggaccctggtggcagtcacacagtgtcaaggagctgagggctgtgccctgccaccgggccacaaagtgtcacagattattgcctgctcctccaagcccttcactgtagaatggaagcctgtgattttcctggcatcatgcatgactgagaaggtcagtgtggctaattctgagcttcaacatcaggaaacccgtagttcttcacactgagccgcctcctgcagcacagtcatccttggtaataaagctgatattttca

SEQ ID NO: 56467 - DNA, 286 bp, Homo sapiens
ttctgcatttccatctgaggtaccgggttcatctcactagggagtgccagacagtgggcacaggacagtgggtgcagcgcaccatgcacgagccgaagcaggattattgcctgctcctccaagcccttcactgtagaatggaagcctgtgattttcctggcatcatgcatgactgagaaggtcagtgtggctaattctgagcttcaacatcaggaaacccgtagttcttcacactgagccgcctcctgcagcacagtcatccttggtaataaagctgatattttca

SEQ ID NO: 56468 - DNA, 915 bp, Homo sapiens
tctaggagctgtcagattaaacccccagacccacaagaaaatccctgaagcttcgttgacttttgctgatggagcctctctgaagggcaaattcaaagtacagctgggtgctgcagcactgggagtgcgaacttgtggctgtggttatgaaggagcctcgtcagctatgcctttagcccctggtgaagcagtgccagtcacactttgccagtcaaacggagaggcagcagtagtaagaccagaccaaatcaaaccaaaccaagcaaaccacggggaatggagattattgcctgctcctccaagcccttcactgtagaatggaagcctgtgattttcctggcatcatgcatgactgagaaggtcagtgtggctaattctgagcttcaacatcaggaaacccgtagttcttcacactgagccgcctcctgcagcacagtcatccttggtaataaagctgatattttcacaaaaacaaacacaaaacaaaaaaaaaaaaaatttttggggcgccggggccctgggaaaaagtttttaaaccacttgttggggcggccgggccccaatggttatggctacacctgggcccacggccggtacccaagagaaccccggggcctaaaaatggggctgggttcctcccaatataaaaaccggcgcggggacaccgggcgcgtttggacacaacccccgagtgggcgtttaggcgcattcgcgggcttccaacgaggccagcgagctattacgcgccccgctgcggggtgggacaaacagagcagcaagacacaagaagaaggaatagacagaccaccccacaaacacaggagaaacagacaatcggacagaagaccaaaaaaagcagacaaagtaagagacagaacaaaaagacacaaatagcaagcacgacaaaaagacaat

SEQ ID NO: 56469 - DNA, 709 bp, Homo sapiens
ggggaagcagaggggacgatgaggtgcggaggcgttggcagttgacttttgctgatggagcctctctgaagggcaaattcaaagtacagctgggtgctgcagcactgggagtgcgaacttgtggctgtggttatgaaggagcctcgtcagctatgcctttagcccctggtgaagcagtgccagtcacactttgccagtcaaacggagaggcagcagtagtaagaccagaccaaatcaaaccaaaccaagcaaaccacggggaatggaggacctgatgattgatttagcatctttggcatccggccactgctctgcttggccatactgctgccttcaccctcagctgttgcaactcttttggccactttgtgtaactgccctgccaagccctgcttcctggctgtccaaagaaagaagtgtttcctacaggagatcacaacaaaaggatgaaatctggggtgcaggggaagggtagcttctgaagctggaaaataaagaagcatgctaattgtcaaataaagtgggctgtgttgtaagtagatgtattaaacaaattccaccgttatatgtgtcaatttgcgataattcattggtaataagtgaagaagtaaatatgtgatgaagaaagtccaaaagaactattaaataccatgttaatgaagatatctatgatgttgcaatgctatatcatcttgataccagtaagtaa

SEQ ID NO: 56470 - DNA, 639 bp, Homo sapiens
  misc_feature (624)..(624): n is a, c, g, or t
  misc_feature (639)..(639): n is a, c, g, or t
ggggaagcagaggggacgatgaggtgcggaggcgttggcagttgacttttgctgatggagcctctctgaagggcaaattcaaagtacagctgggtgctgcagcactgggagtgcgaacttgtggctgtggttatgaaggagcctcgtcagctatgcctttagcccctggtgaagcagtgccagtcacactttgccagtcaaacggagaggcagcagtagtaagaccagaccaaatcaaaccaaaccaagcaaaccacggggaatggaggatatatttggcattaaactcgggacaaaagaagacacaaactttatcttgtggtttgggtcctccaatcctcataaaagtgtggtttcacctgttacctcataaaggtgccattgctgtatgcacatctgaatctgtttacaatttgagaatagagattattgcctgctcctccaagcccttcactgtagaatggaagcctgtgattttcctggcatcatgcatgactgagaaggtcagtgtggctaattctgagcttcaacatcaggaaacccgtagttcttcacactgagccgcctcctgcagcacagtcatccttggtaataaagctgatattttcaaaaaaaaaacaaccnctccaaaaaaaatgn

SEQ ID NO: 56471 - DNA, 303 bp, Homo sapiens
  misc_feature (248)..(248): n is a, c, g, or t
catgtgaaattgaatcccatgagctacacacactactttctgatatttattatcttgctgaagattattgcctgctcctccaagcccttcactgtagaatggaagcctgtgattttcctggcatcatgcatgactgagaaggtcagtgtggctaattctgagcttcaacatcaggaaacccgtagttcttcacactgagccgcctcctgcagcacagtcatccttggtaataaagctgatattttcangatgcggccggaagcctttaattacatcaactgtcagatatcatctctaaacccc

SEQ ID NO: 56472 - DNA, 672 bp, Homo sapiens
gaggtgcggagggtgtggcagttgacttttgctgatggagcctctctgaagggcaaattcaaagtacagctgggtgctgcagcactgggagtgcgaacttgtggctgtggttatgaaggagcctcgtcagctatgcctttagcccctggtgaagcagtgccagtcacactttgccagtcaaacggagaggcagcagtagtaagaccagaccaaatcaaaccaaaccaagcaaaccacggggaatggagacacagagtttcattctgtcacccaggctggagtgcagatgcagtggcatgatgatagtgcactacaacttggaactcctgggctcaagccatcttccctccactgcctccaagtagctggggactacaggtcatgtgagcacacagcataaaggcagctgcccacaagccaggaagagaagcatcatcagaaaccgaccatactggcttcctgatctcagactttcagcctccagaatgattattgcctgctcctccaagcccttcactgtagaatggaagcctgtgattttcctggcatcatgcatgactgagaaggtcagtgtggctaattctgagcttcaacatcaggaaacccgtagttcttcacactgagccgcctcctgcagcacagtcatccttggtaataaagctgatattttca

SEQ ID NO: 56473 - DNA, 560 bp, Homo sapiens
gaggtgcggagggtgtggcagttgacttttgctgatggagcctctctgaagggcaaattcaaagtacagctgggtgctgcagcactgggagtgcgaacttgtggctgtggttatgaaggagcctcgtcagctatgcctttagcccctggtgaagcagtgccagtcacactttgccagtcaaacggagaggcagcagtagtaagaccagaccaaatcaaaccaaaccaagcaaaccacggggaatggagacacagagtttcattctgtcacccaggctggagtgcagatgcagtggcatgatgatagtgcactacaacttggaactcctgggctcaagccatcttccctccactgcctccaagtagctggggactacattattgcctgctcctccaagcccttcactgtagaatggaagcctgtgattttcctggcatcatgcatgactgagaaggtcagtgtggctaattctgagcttcaacatcaggaaacccgtagttcttcacactgagccgcctcctgcagcacagtcatccttggtaataaagctgatattttca

SEQ ID NO: 56474 - DNA, 507 bp, Homo sapiens
agctgctatgcttggagtgtgactctagagggtcgcctctgaggtcactgggagtgcgaacttgtggctgtggttatgaaggagcctcgtcagctatgcctttagcccctggtgaagcagtgccagtcacactttgccagtcaaacggagaggcagcagtagtaagaccagaccaaatcaaaccaaaccaagcaaaccacggggaatggagaggtcatgtgagcacacagcataaaggcagctgcccacaagccaggaagagaagcatcatcagaaaccgaccatactggcttcctgatctcagactttcagcctccagaatgattattgcctgctcctccaagcccttcactgtagaatggaagcctgtgattttcctggcatcatgcatgactgagaaggtcagtgtggctaattctgagcttcaacatcaggaaacccgtagttcttcacactgagccgcctcctgcagcacagtcatccttggtaataaagctgatattttca

SEQ ID NO: 56475 - DNA, 728 bp, Homo sapiens
  misc_feature (673)..(673): n is a, c, g, or t
gaggtgcggagggtgtggcagttgacttttgctgatggagcctctctgaagggcaaattcaaagtacagctgggtgctgcagcactgggagtgcgaacttgtggctgtggttatgaaggagcctcgtcagctatgcctttagcccctggtgaagcagtgccagtcacactttgccagtcaaacggagaggcagcagtagtaagaccagaccaaatcaaaccaaaccaagcaaaccacggggaatggagacacagagtttcattctgtcacccaggctggagtgcagatgcagtggcatgatgatagtgcactacaacttggaactcctgggctcaagccatcttccctccactgcctccaagtagctggggactacaggtcatgtgagcacacagcataaaggcagctgcccacaagccaggaagagaagcatcatcagaaaccgaccatactggcttcctgatctcagactttcagcctccagaatgattattgcctgctcctccaagcccttcactgtagaatggaagcctgtgattttcctggcatcatgcatgactgagaaggtcagtgtggctaattctgagcttcaacatcaggaaacccgtagttcttcacactgagccgcctcctgcagcacagtcatccttggtaataaagctgatattttcangatgcggccggaagcctttaattacatcaactgtcagatatcatctctaaacccc

SEQ ID NO: 56476 - DNA, 243 bp, Homo sapiens
ggttagagtgagggctgtgactgtcctgtcagcccctggattcagcctctttcctaaggattattgcctgctcctccaagcccttcactgtagaatggaagcctgtgattttcctggcatcatgcatgactgagaaggtcagtgtggctaattctgagcttcaacatcaggaaacccgtagttcttcacactgagccgcctcctgcagcacagtcatccttggtaataaagctgatattttca

SEQ ID NO: 56477 - DNA, 1715 bp, Homo sapiens
gaggtgcggagggtgtggcagttgacttttgctgatggagcctctctgaagggcaaattcaaagtacagctgggtgctgcagcactgggagtgcgaacttgtggctgtggttatgaaggagcctcgtcagctatgcctttagcccctggtgaagcagtgccagtcacactttgccagtcaaacggagaggcagcagtagtaagaccagaccaaatcaaaccaaaccaagcaaaccacggggaatggagacacagagtttcattctgtcacccaggctggagtgcagatgcagtggcatgatgatagtgcactacaacttggaactcctgggctcaagccatcttccctccactgcctccaagtagctggggactacgacctgatgattgatttagcatctttggcatccggccactgctctgcttggccatactgctgccttcaccctcagctgttgcaactcttttggccactttgtgtaactgccctgccaagccctgcttcctggctgtccaaagaaagaagtgtttcctacaggagatcacaacaaaaggatgaaatctggggtgcaggggaagggtagcttctgaagctggaaaataaagaagtaaggaagggagactgtggaatttaccagggagggaaactaatatttcctttcatataagttggtactattctggctttttaccatgatcatatattatattcaaaataaagctcttgtttttgaaacaaaaaaatataaacaaaggaaggaaggatgttcatttatttagataatagatacctagtgaacccctagtagaccttgtactgggtcctggggacactggtgaccaggttccattcctgatctcctggagcaggggacacgaaaagacattaagcaaataattacacatctttttacatcagtacaaatgttgggactttgcaagagttccaccctgaaagcttctgttttcactgaaagagaggaggcaaggtcatttgttcataaaagcaatggaattgagtaggggacttgaaagaaatgatgaggctaggaaaagcagctataggaaagggggcaccagtcagactaagaatatgtaaccagagcacagctgtgcatactttgcttgaatgtctccaagttcaaatccaagaacttgatattttaggttgattctatgtgtaacctatttgtttttaaagagtagagtctttttcttccagcatgtgttagttagccctgtctttatcacatcaccaccaccaattgtcatttgcagaagtatcttcaactcatcataaatttactagtaatagctaactcatgtctatagaactgttaagtgacaagataatatttagattaaaagctatagttgcattcttattagagacttaatcagattttaacatgctcctcacaggggccatttagccctattctgctgggctttggcaagcactgaatgattgccctcctagggcagaggtactgcagccctggttaagcattgaaaagatgatattaccaataagttgactctaattgtaaacaacatatttaaacaattacatcttaattaaattcttataaattataagtgcctcagaactttctttcttaatctcaaatgcatgtttcttaaaatcattcactattttatgagaatatatttgctgaatattagaaaaaagagttaaaaataaaaggcatttct

SEQ ID NO: 56478 - DNA, 1744 bp, Homo sapiens
gaggtgcggagggtgtggcagttgacttttgctgatggagcctctctgaagggcaaattcaaagtacagctgggtgctgcagcactgggagtgcgaacttgtggctgtggttatgaaggagcctcgtcagctatgcctttagcccctggtgaagcagtgccagtcacactttgccagtcaaacggagaggcagcagtagtaagaccagaccaaatcaaaccaaaccaagcaaaccacggggaatggaggatatatttggcattaaactcgggacaaaagaagacacaaactttatcttgtggtttgggtcctccaatcctcataaaagtgtggtttcacctgttacctcataaaggtgccattgctgtatgcacatctgaatctgtttacaatttgagaatagaggacctgatgattgatttagcatctttggcatccggccactgctctgcttggccatactgctgccttcaccctcagctgttgcaactcttttggccactttgtgtaactgccctgccaagccctgcttcctggctgtccaaagaaagaagtgtttcctacaggagatcacaacaaaaggatgaaatctggggtgcaggggaagggtagcttctgaagctggaaaataaagaagtaaggaagggagactgtggaatttaccagggagggaaactaatatttcctttcatataagttggtactattctggctttttaccatgatcatatattatattcaaaataaagctcttgtttttgaaacaaaaaaatataaacaaaggaaggaaggatgttcatttatttagataatagatacctagtgaacccctagtagaccttgtactgggtcctggggacactggtgaccaggttccattcctgatctcctggagcaggggacacgaaaagacattaagcaaataattacacatctttttacatcagtacaaatgttgggactttgcaagagttccaccctgaaagcttctgttttcactgaaagagaggaggcaaggtcatttgttcataaaagcaatggaattgagtaggggacttgaaagaaatgatgaggctaggaaaagcagctataggaaagggggcaccagtcagactaagaatatgtaaccagagcacagctgtgcatactttgcttgaatgtctccaagttcaaatccaagaacttgatattttaggttgattctatgtgtaacctatttgtttttaaagagtagagtctttttcttccagcatgtgttagttagccctgtctttatcacatcaccaccaccaattgtcatttgcagaagtatcttcaactcatcataaatttactagtaatagctaactcatgtctatagaactgttaagtgacaagataatatttagattaaaagctatagttgcattcttattagagacttaatcagattttaacatgctcctcacaggggccatttagccctattctgctgggctttggcaagcactgaatgattgccctcctagggcagaggtactgcagccctggttaagcattgaaaagatgatattaccaataagttgactctaattgtaaacaacatatttaaacaattacatcttaattaaattcttataaattataagtgcctcagaactttctttcttaatctcaaatgcatgtttcttaaaatcattcactattttatgagaatatatttgctgaatattagaaaaaagagttaaaaataaaaggcatttct

SEQ ID NO: 56479 - DNA, 471 bp, Homo sapiens
aaggaagaaaaatcctgctgaatccaggagctcttgctgtcccttttgccctcacatgaaacgtctttgtggctcagactcaatgagctatggacctgtggaccctggtggcagtcacacagtgtcaagggatatatttggcattaaactcgggacaaaagaagacacaaactttatcttgtggtttgggtcctccaatcctcataaaagtgtggtttcacctgttacctcataaaggtgccattgctgtatgcacatctgaatctgtttacaatttgagaatagagattattgcctgctcctccaagcccttcactgtagaatggaagcctgtgattttcctggcatcatgcatgactgagaaggtcagtgtggctaattctgagcttcaacatcaggaaacccgtagttcttcacactgagccgcctcctgcagcacagtcatccttggtaataaagctgatattttca

SEQ ID NO: 56480 - DNA, 466 bp, Homo sapiens
tctaggagctgtcagattaaacccccagacccacaagaaaatccctgaagcttcgttgacttttgctgatggagcctctctgaagggcaaattcaaagtacagctgggtgctgcagcactgggagtgcgaacttgtggctgtggttatgaaggagcctcgtcagctatgcctttagcccctggtgaagcagtgccagtcacactttgccagtcaaacggagaggcagcagtagtaagaccagaccaaatcaaaccaaaccaagcaaaccacggggaatggagattattgcctgctcctccaagcccttcactgtagaatggaagcctgtgattttcctggcatcatgcatgactgagaaggtcagtgtggctaattctgagcttcaacatcaggaaacccgtagttcttcacactgagccgcctcctgcagcacagtcatccttggtaataaagctgatattttca

SEQ ID NO: 56481 - DNA, 442 bp, Homo sapiens
tggagtctggttgctggagctgtctgtttgccttgtgagccctccccattggcgcaccctaggaccctgctgacactagtttttttgttgttgttgttttgtttttgagacagggtcttgctctgtcacccaggctggagtgcagtggcaccatcatagctcactgcagccttgaactcccccaggctcaagtgactttcccacctcagcctctggagtagctgggatcataggcacgtaccaccacacccagctaatttttttttctagacgtggagtcttgctatgttgcccaggctggtcttgaactcctggactcaagccatcctcccactttggcctcccagagtgctaggattacaggtatgagccaccacaacctgcctggcactactactaaacagtccctggtagtgtaattggaggcgacggcagaaatgcc

SEQ ID NO: 56482 - DNA, 182 bp, Homo sapiens
agagcttgtccccctatggttcctatggagccccagcccctgcagaccagagcccatggaagcatgtccagcacctgccgagcctccttctccttccctccacagtctgcagcagggctgaagctaagggcagagaaaaatatactctgggcttccccagacacccccacccagcacagcca

SEQ ID NO: 56483 - DNA, 441 bp, Homo sapiens
gctactaagatcaataacaaagatattgccagtctgaggttggacaggcagttgctgggcacatgtccttttaaagtagtattttttgtgtaaggttgcaatggcctttgtgcaaggttttgttttttgcagagtctttttcatgatcagggatacaagtgtgagaactctttcttcatggccttccctggctccatttatcagggttttcttaacattagtgtctccattttgattttcacaactttaacaccatattaaatcctcctaaatacttaactctcttttctagcatagttaattgagttcccttaaatattttaaactacaaatttgatatatctgattctttcaaacactgcaagtgcctgccaaggcagacttaaaaatctgatgaataaaatctttctagccatctaagcaatccctaaaactccaaaa

SEQ ID NO: 56484 - DNA, 294 bp, Homo sapiens
gttgtctcaagacccagccactgggaggctcgctctacgcgatttactctggcccttcctgagccatttgtgcttccaggccacattccccaaaccaagtgtgcgtgtcctcgtctgcctcccggggattctggggcacgttagcctcattcaggtccccagtaaagcaccctgctgaacttatccaacccagagtcgcccgggttaatttgagtagagttttttccttgaaattaagaccctcgggccgggcgtggtggttcacaactgtaaatcccagcaacttttgggagg

SEQ ID NO: 56485 - DNA, 631 bp, Homo sapiens
tagcctcatgtagcatctcccacttctttggacctcatgcttaagcctgcatgaacttcatcccctctaatctgtcatgcccgagtacttacctggaactctcttctccacccacccaaggctggttaacacctctttatccttcagtatgcagctaagatggcccctcctccaggaagccttccctgacttccccatcacatccctgacagggtaaggtatctccccatgggctcccatagtaccccacttttattctatcattagcatttttcatacatattgcctgttttctcagtctgggcaaagaacatgtactcctgtgcctgacacaggtcctggcactttgtcagtgctcaataaatattgccatggggattgctcatcactcacagaaggcttctcagaggccgtaacattttggctggactttgtgagactggcgggcatttgccaggttagcagttttcaaccagggtcatatacgcatcgaaatcacccgcgcaactcttcccaaacatggatgtccagccccgcctgagcacactgaatcagaatctccaaggctgagcctgggcaggtatagttttcataggtttcacaggtgattgcaaatgacagcatgggctaa

SEQ ID NO: 56486 - DNA, 547 bp, Homo sapiens
ccctaatttcaattatttgtactaatttcaaatatttgccctattttcagatattttcaaatatttgccctaatttcaaatatttgccctatttcaatactgtgtctcaatgaatagggaggcccaaggagaaggagagagatgcgagaatggccgattggtggagtagtcagaacacacacatatttatcagttgtttgctgtcttatacgggcgtggctcatggcaccctaaaagaatttaaatagtaacatcaaaggttaatcacagatcgccataacagacataataattaaaaagcttgaaacagtgtgagaattagcaatatgtgacagagacatgaagtgagcgcatggtattggaaaaacagcagacagaattcttcaacacagggttaccacaaacctacattaaaaaaacacactatctgcaaagtgcgataaagcaaagcacagtagaacaaggtatgcctatgcacacagtgtagcaatcagagctggctaggttgtacatagaggtaaaattcatttttttgttggctttttct

SEQ ID NO: 56487 - DNA, 611 bp, Homo sapiens
gtccgacgccaggctctgcgctcggtctcctctgctccacctcctccccgcggggcgtgcagctccgaagctctttggacctagcaggttcggcggccgggaggtgccattcacatcaaatgtagccattttagaggtgtcaaaataaatcagccatatttaataaattccagctctactcttctaccctgtagcccaagaagcagcaacgatggggtcaaaggatcatgcagtatttttcagggaaatgacacagttaattttgaatgaaatgccaaaagctgggtattccagcatattaaatgattttgtggaatctaatttttttgtgattgatggagattccttgcttgtcacatgcctgggtgtaaaatcattcaagtggggacagaatctccactttttctatctggttgaatgctatcttgtggatcttctgagtaacggaggacaattcaccatagttttctttaagatggagtttcgctctttttgcacaggctgaagtgcaatgccgtgatctcggctcactgcaacctccacctcctaggttcaagtgattctactctctcagcctcccaagtagctgggattacaggcgcgtgccacca

SEQ ID NO: 56488 - DNA, 517 bp, Homo sapiens
gtccgacgccaggctctgcgctcggtctcctctgctccacctcctccccgcggggcgtgcagctccgaagctctttggacctagcaggttcggcggccgggaggtgccattcacatcaaatgtagccattttagaggtgtcaaaataaatcagccatatttaataaattccagctctactcttctaccctgtagcccaagaagcagcaacgatggggtcaaaggatcatgcagtatttttcagggaaatgacacagttaattttgaatgaaatgccaaaagctgggtattccagcatattaaatgattttgtggaatctaatttttttgtgattgatggagattccttgcttgtcacatgcctgggtgtaaaatcattcaagtggggacagaatctccactttttctatctggttgaatgctatcttgtggatcttctgagtaacggaggacaattcaccatagttttctttaaggatgctgaatatgcatattttgattttcctgaacttctttca

SEQ ID NO: 56489 - DNA, 299 bp, Homo sapiens
ttgaattgtgtcctccagaaagctgtgttgaagtcctaacccgtggtacctgtgaatgggatcttatttagaaataggatctttgcagatgtaattaagatgtaattgaaaatggggtcatactggagtagagtgggccctttatccaatatgactggcatccatataaaagaagagagacagagagaatgcagtgtgaagacacagatacagagaacaccatgtgactacagaggtaaagattgaagtgctgcacctccaagccaaggaacaccaaggattgccaccaaactatcaga

SEQ ID NO: 56490 - DNA, 792 bp, Homo sapiens
  misc_feature (753)..(753): n is a, c, g, or t
  misc_feature (755)..(756): n is a, c, g, or t
  misc_feature (764)..(764): n is a, c, g, or t
tcttcactagagattgggtggcatctcttttattaattattaacaggccgaaacgtactggacgttaagatgagctgcttgagatgaaatctttctatataatgtgcccacagcaaattttctcttttcccctgtggcttgaggggaatgggatttaatcatttttagaatatgtaattcatataagtaaaagagaggaaacctcccgtgatccgcgctcttaagcacttaaaattatttgggaggaaaaattattaagatttcttatcgacttcttatgttaaaaaatctattctcccccacccccccaaaaaacttttatgctagtcctgcatttcattagccctgtaagtgtgaaacgtcttaaatgccctctgcagttaaagcattttttgtctttaaattataaaattgattttgctatttggaagatgtcaatgccagtctttatccactttgtctaatatactttgtgttgattggaggaaaggcgagaggctgagacattttaaactgctttctcccctaatgaacagtaacgacccaccaaaaaaaaggaaagtacgttttaatattttgatttaaagttgatgtttcctagtacataggcttttgcttttgtaattctacaaagtgaagttccatactgtcccttgcttatagaataataagaatcacacacgctacccccacacttggagtgacctctgtctgccataaaataatagttctactatgtaattttaaatctcnanntatcaaancacacacacacacagacaaagggaaaca

SEQ ID NO: 56491 - DNA, 432 bp, Homo sapiens
tttcctcctatggctgacctcctaattaacatgtgttctctggaaaaacatttcactcaaacaaacttcacctcatgtccctcggtttatatttcccttcacaaacacaggatagataaggaacagtcagagagctcaatctatacaaatacagttatgcatcacttaatgatcaggatacattctgagaaatgtgtcattaggtgattttgtcgtgtgatcacagagcacacttacacaaacctagatgttatagtctattacacacctagggtatactgtatagattattgctcctaggctacaaacctgtacagtatgttactgtagtgaatactggaggcatttgcaacacaatgatatctgtgtacctaaacacagatgtttcatttctttggctctccgatatcctgccagtgcctcacactgggt

SEQ ID NO: 56492 - DNA, 363 bp, Homo sapiens
ttctctttttcttgactgtatgtatctctgaagttttttattttcctttttccttttctcttgtctaaactgatgtttttcttcccttcttttgggaagaaaatactttttttttctattgacgttcattatttaggcattattccattttttttcactttttttctcataagtatatgtttataaatctactttatgtaagcaactttattttctaaagttatatacttttttaattaaataaaatgctcaaggcagcctttctcatattctggggtgcccagcatctatgtcataccttttgtggcctttcaaaattcctatattctgatagtctatctccttatgaatttttgctcaagt

SEQ ID NO: 56493 - DNA, 269 bp, Homo sapiens
gctcccacttccaatccagactagagctgtgaccaccagcccaaaagaacagggtggcactcctgaccagttcagagccagatagccccacattgctcagaccacagtagctcccaagtccaggccagaggaccccacgatagccaatgcccccaagattccagatccatcctccaggggcagctgcttggtccagcttatagtgagctcactccaggacctgacagctcccatggcgacctctccttggatgctcttcccaaagatct

SEQ ID NO: 56494 - DNA, 1060 bp, Homo sapiens
ttttttttcttgagacagggcctcatcctgtcacccaggctggagtgcagtggcatgaacctggttcactgcagccttgacctcctgtgctcaagcagtcctcctgcctcggcctcctgagtagctgggaccataggtgcatgctgccacgcctggctaatttttaaatttttttgtagagacgagatctcactttgttgcccagcctggtctcaaactccaggtcttaagtgatcctccagcttggcctcccaaagtgctgggattacaggcatgagccgttgtgtctggctctaattttcttttgatcattggaattcagggacttttttttccaaccaggatatgccttggtttgtgtttgtatacattaaccctgccttttagtccatgccctttttcagtgttcaggtttaagtattgcttcatttcagaggaagtttcttctgttatttaactatttccttccatcagcaattttctcctccttgtggaacttctagtttttgcaatttaggtctactggatatgtttctcttatgataactgtcattttatatttatgctgtgtctcttgacattatttctttattgatcttccaggttactaattcaggttgcaacagtggttatcctctcctataagtaactgactaaattgtgcaattgggaaatcacattattttagctcagaaattctaattgtgcgttacagttagccctccttacctactagttctgcatctgtggattcaattaactgtggcttaaaaatttaaaaataaaatgaaaatatcaattcaacaattaaaaaataccaataaaagcacaatatagtataacaacagtttacatagcatttacattgtattactataagtaatctagagatgatttaaagtatacggaaagggctgggtgttgtggctcatgcctgtaatcccagcacttttggaggctgaggcaggaggactgtttgagcccaggagatcagtgctgtgatgaaccatgatcatgccactgcactgaagctgggatgacagagcaagacccatttctt

SEQ ID NO: 56495 - DNA, 438 bp, Homo sapiens
gggtcctgagattgtttttacctctgtcctcatcccttctctctggggtcgtggccagatgctccctgctttgggaacattagttatgaagcttgtagggggtttagctccacagggtcagacctgcaggtgcaaacaggccctaggcgaaccccctggaggaaacgttgacattcctgttctgtccagctcacagaacactcttgttcactcccttattgctgtggggaaagacagggaaaaagtgatgggaccactgaggtagtccctggagatgagagagaagggtggcctgtttacatccatcacaggcaggctgggttagggacaacaaagatggtcaggttccaaattttcttgagtcgggactaaagtagcatcttgttagtgtttgctgggttggataaagcagggcttctcaaacctgagtgtgcctca

SEQ ID NO: 56496 - DNA, 521 bp, Homo sapiens
atgttgtccagtttaacatagtcttaagttttcttaaacccaaataatttatgagtagcttattacatctgcagagctaccttattataatagtacatttacatattgtctcttttagagtaaggaccacatgattgctttgctttaatttaccactttttgtattgcatccatataagagtgtcttactagccagatgattccatggcaaatgattctctgggtccaaagatcggaaagtgaaaagcacacagctggaataagcaacaactccactgctagttacagctctccgtaggaccaccaaaacgtattcaagagctctaggattccataagacccagagcaaaatggtgcctctctgtatattattcttaagagtgtgctgggaagtcaatggtccatgggtaggcagggcagctgtaactgggctttttaaaacaaattatgagtttctctctgttgccagtagttaaggaagctgaacttaaaaggtatacttttttccttaaaaaaaaaaa

SEQ ID NO: 56497 - DNA, 1404 bp, Homo sapiens
agcttcttgtcaacattttccactctctacagcaactcttccaaatctttatcgctctctggaggttactttcctcaagcccagtccccacattctcagcacatgacatcacattctactgcagagagaaacaccctcagcttcctgccctctgccctgtcttcctctggtccttcttcctgctaaatgctagccctgccacctactctggcacctgacccccaccagctgcaccctgtgccctctttgccccttatggcccttttccttcagcccaacaccatctccctctcctatcactcctccacccccaaaccaccatttagctcctttctaacaccccaattcctgacacccacggtggtgataataatgcctgccttgtaggatagttgtgaagacagctattcatacatgtttccttcattctctgagacgacctggctcactgtgaacctgacaattcattttctcaggcctctctcccgttactcatttattcattagtcattcatcaaaatactagaagtaacaataatataataatagctaactaatattttaagttctgccctgttctaggcaccatctagacctgccctgtccctcatgtggccactgagcactggacatgtggccactgtgactcaggatctgaattttaaacttcaattcatttaaatttcaaaacaaaagcaatgtaaatattttttcctatcccattaccctgatttgatcattacacattgtatacatatatcaaatatcacacattctccaagagaatatactatgatatagcaataaaaatgcaaaaataaattaaaaataaaattaaaaattcacattaaacacaacgttattgtttcagtaggactacacttcccttggttgaaaattgagtgggctataagtgtaaaatacacagtagactttgaagacttagaaaaaaaacaagaagtgtttttaatgattttctacactgattcattttgaatgatagtatttttaatacaattaaagtattattaaaattaaattctgtttctttttactttttaacatggctaccagaaaatttaagattacatgtgtggcttgcattatatttctattggataaggctgatgaaacattttacttgtattttctgaagccacccccaaaatctcgctaggaaagttcaactattttacaggtgaggaaactgaggctccaagagaccaagtaatttgcccaaggtccaatggtaagtgttggagcctgacttgaatcgaagcagttgacccagagggttctttttttctaagcattttgctcaccaagtgttttgactttaactttgtaaaaatcctactgggtgaggggaaaaaataaaaggaaagaaagaaaaagaaaaaaaaa

SEQ ID NO: 56498 - DNA, 2231 bp, Homo sapiens
ggacgctgacaagatgcatgggtccagagtataaaggaacccaggagcagctgaaggcaggtcagatgaaggctaggtggctggaactgcaaccatggtgcccagcttcctctccctgagcttctcctccttgggcctgtgggcttctgggctgatcttggtcttaggctttctcaagctcatccacctgctgctgcggaggcagacgttggctaaggctatggacaaattcccagggcctcccacccactggctttttggacatgccctcgagatccaggagacggggagcctggacaaagtggtgtcctgggcccaccagttcccgtatgcccacccactctggttcggacagttcattggcttcctgaacatctatgagcctgactatgccaaagctgtgtacagccgtggggaccctaaggcccctgatgtgtatgacttcttcctccagtggattgggagaggcctgctggttcttgaggggcccaagtggttgcagcaccgcaagctgctcacacctggctttcattatgatgtgctgaagccctatgtggccgtgttcactgagtctacacgtatcatgctggacaagtgggaagagaaagctcgggagggtaagtcctttgacatcttctgcgatgtgggtcacatggcgctgaacacactcatgaagtgcacctttggaagaggagacaccggcctgggccacagcagggacagcagctactaccttgcagtcagcgatctcactctgttgatgcagcagcgccttgtgtccttccagtaccataatgacttcatctactggctcaccccacatggccgccgcttcctgcgggcctgccaggtggcccatgaccatacagaccaggtcatcagggagcggaaggcagccctgcaggatgagaaggtgcggaagaagatccagaaccggaggcacctggacttcctggacattctcctgggtgcccgggatgaagatgacatcaaactgtcagatgcagacctccgggctgaagtggacacattcatgtttgaaggccatgacaccaccaccagtggtatctcctggtttctctactgcatggccctgtaccctgagcaccagcatcgttgtagagaggaggtccgcgagatcctaggggaccaggacttcttccagtgggatgatctgggcaaaatgacttatctgaccatgtgcatcaaggagagcttccgcctctacccacctgtgccccaggtgtaccgccagctcagcaagcctgtcacctttgtggatggccggtctctacctgcaggaagcctgatctctatgcatatctatgccctccataggaacagtgctgtatggcccgaccctgaggtctttgactctctgcgcttttccactgagaatgcatccaaacgccatccctttgcctttatgcccttctctgctgggcccaggaactgcattgggcagcagtttgccatgagtgagatgaaggtggtcacagccatgtgcttgctccgctttgagttctctctggacccctcacggctgcccatcaagatgccccagcttgtcctgcgctccaagaatggctttcacctccacctgaagccactgggccctgggtctgggaagtagctctgatgagaatggggtcccagatggctcaggctgtgacctccctgggcaccaccctccccaggctgggtgtggaggagttggggccccctgccttcaggaggcttgtagtttagaagggaagtaggcattaccatagacgactcctagaggacagtgctatgtaaaaatgtgtgtctataaatgtttatcatgcatgtattctagagctcattcatttattcaacaaacatttggtgagcacctatttcgttcgagaaacttcatttatctcctataattggcaaacttaaaaatgcagcagaaacttacattccaaccttagagactcatagtgagcacaaggaaagttttgccctgagattcatggttatggctgggtaccaccaaatagaagaatggcttaggggagtgccccttcactgagatgtgtttctttgttgaactttgtgtgtgtgtgtttagaatataacagacataagaaaaaattacctaaatgaagactgtacaaaataataaataattctgaagcagactctcttgtaaccatcactgaagtcaagaaatatggaatatggtatcactgatggtcttctgc

SEQ ID NO: 56499 - DNA, 1834 bp, Homo sapiens
ggacgctgacaagatgcatgggtccagagtataaaggaacccaggagcagctgaaggcaggtcagatgaaggctaggtggctggaactgcaaccatggtgcccagcttcctctccctgagcttctcctccttgggcctgtgggcttctgggctgatcttggtcttaggctttctcaagctcatccacctgctgctgcggaggcagacgttggctaaggctatggacaaattcccagggcctcccacccactggctttttggacatgccctcgagatccaggagacggggagcctggacaaagtggtgtcctgggcccaccagttcccgtatgcccacccactctggttcggacagttcattggcttcctgaacatctatgagcctgactatgccaaagctgtgtacagccgtggggaccctaaggcccctgatgtgtatgacttcttcctccagtggattgggagaggcctgctggttcttgaggggcccaagtggttgcagcaccgcaagctgctcacacctggctttcattatgatgtgctgaagccctatgtggccgtgttcactgagtctacacgtatcatgctggacaagtgggaagagaaagctcgggagggtaagtcctttgacatcttctgcgatgtgggtcacatggcgctgaacacactcatgaagtgcacctttggaagaggagacaccggcctgggccacagcagggacagcagctactaccttgcagtcagcgatctcactctgttgatgcagcagcgccttgtgtccttccagtaccataatgacttcatctactggctcaccccacatggccgccgcttcctgcgggcctgccaggtggcccatgaccatacagaccaggtcatcagggagcggaaggcagccctgcaggatgagaaggtgcggaagaagatccagaaccggaggcacctggacttcctggacattctcctgggtgcccgggatgaagatgacatcaaactgtcagatgcagacctccgggctgaagtggacacattcatgtttgaaggccatgacaccaccaccagtggtatctcctggtttctctactgcatggccctgtaccctgagcaccagcatcgttgtagagaggaggtccgcgagatcctaggggaccaggacttcttccagtgggatgatctgggcaaaatgacttatctgaccatgtgcatcaaggagagcttccgcctctacccacctgtgccccaggtgtaccgccagctcagcaagcctgtcacctttgtggatggccggtctctacctgcaggaagcctgatctctatgcatatctatgccctccataggaacagtgctgtatggcccgaccctgaggtctttgactctctgcgcttttccactgagaatgcatccaaacgccatccctttgcctttatgcccttctctgctgggcccaggaactgcattgggcagcagtttgccatgagtgagatgaaggtggtcacagccatgtgcttgctccgctttgagttctctctggacccctcacggctgcccatcaagatgccccagcttgtcctgcgctccaagaatggctttcacctccacctgaagccactgggccctgggtctgggaagtagctctgatgagaatggggtcccagatggctcaggctgtgacctccctgggcaccaccctccccaggctgggtgtggaggagttggggccccctgccttcaggaggcttgtagtttagaagggaagtaggcattaccatagacgactcctagaggacagtgctatgtaaaaatgtgtgtctataaatgtttatcatgcatgta

SEQ ID NO: 56500 - DNA, 849 bp, Homo sapiens
ggacgctgacaagatgcatgggtccagagtataaaggaacccaggagcagctgaaggcaggtcagatgaaggctaggtggctggaactgcaaccatggtgcccagcttcctctccctgagcttctcctccttgggcctgtgggcttctgggctgatcttggtcttaggctttctcaagctcatccacctgctgctgcggaggcagacgttggctaaggctatggacaaattcccagggcctcccacccactggctttttggacatgccctcgagatccaggagacggggagcctggacaaagtggtgtcctgggcccaccagttcccgtatgcccacccactctggttcggacagttcattggcttcctgaacatctatgagcctgactatgccaaagctgtgtacagccgtggggaccctaaggcccctgatgtgtatgacttcttcctccagtggattgggagaggcctgctggttcttgaggggcccaagtggttgcagcaccgcaagctgctcacacctggctttcattatgatgtgctgaagccctatgtggccgtgttcactgagtctacacgtatcatgctggtgagctccctgtgccagagtactggaggctgttgcctgctgggctagcccctctccaccctgattttgtcctggggagagtaggtggtgctctgcagtaaggagaatagctgagccccaggcctgttctgcctgcaacagcagtgccaaagccctgctctactgacatgtgccgcaggctgccactgagtcggtgccgatgaatagcgaggtgccgatgaatagcgaagtgccgatgatagcgaggtgccgatgataat

SEQ ID NO: 56501 - DNA, 440 bp, Homo sapiens
cctattcactcaaaactcactgacgcactgtggtcctggatggccttgggttggctggggagataaagctggctgaataacacaatgaggtagactttgagtgggaaatggaatactctcagagttttctattagttgcagcctgtgtttatggtcatgcaaactccacgctttctgggtcctactgaacacaaaaaaattctgatcattatctcctcttgtggcactgcacaaagttctgcacaaagaaaggcatgatgcacttgctctctcagtactgactatatgactgagacagctgtcctatcaaatacacacacagtaaataaagaagatgaagacttccaggccgggcgcggtggctcacgcctgtaatcccagcactttgggaggccgaggcgggcggatcacgaggtcaggagatcgagaccatcccagct

SEQ ID NO: 56502 - DNA, 1758 bp, Homo sapiens
ttggggtccattgcaacccgaggcgagactagagttcccaagcgagaagggaagaggcagtgggtgcacgtggaaggcggacagagggctggaaacaagacgctccagaatcaggagcttcccctcaggaaatagcatcctgtgtccccgcactgcagttgtctggtctctccagcagtttggtacttccggctgctgcaatgcgtgtggtggtgattggagcaggagtcatcgggctgtccaccgccctctgcatccatgagcgctaccactcagtcctgcagccactgcacataaaggtctacgcggaccgcttcaccccactcaccaccaccgacgtggctgccggcctctggcagccctacctttctgaccccaacaacccacaggaggcggactggagccaacagacctttgactatctcctgagccatgtccattctcccaacgctgaaaacctgggcctgttcctaatctcgggctacaacctcttccatgaagccattccggacccttcctggaaggacacagttctgggatttcggaagctgacccccagagagctggatatgttcccagattacggctatggctggttccacacaagcctaattctggagggaaagaactatctacagtggctgactgaaaggttaactgagaggggagtgaagttcttccagcggaaagtggagtcttttgaggaggtggcaagagaaggcgcagacgtgattgtcaactgcactggggtatgggctggggcgctacaacgagaccccctgctgcagccaggccgggggcagatcatgaaggtggacgccccttggatgaagcacttcattctcacccatgacccagagagaggcatctacaattccccgtacatcatcccagggacccagacagttactcttggaggcatcttccagttgggaaactggagtgaactaaacaatatccaggaccacaacaccatttgggaaggctgctgcagactggagcccacactgaagaatgcaagaattattggtgaacgaactggcttccggccagtacgcccccagattcggctagaaagagaacagcttcgcactggaccttcaaacacagaggtcatccacaactatggccatggaggctacgggctcaccatccactggggatgtgccctggaggcagccaagctctttgggagaatcctggaagaaaagaaattgtccagaatgccaccatcccacctctgaagactccagtgactgctgcctccccccacaagaactcccttctcccctcagccaatgaatcaatgtgctccttcataagccattgcttctccctcacttctttcctcaaagaagcatgaggtgagagaaagccacaaagtcagtgcctggagaagggttcagcccaacatggggcccctctcatcactgaaatccctctaccttctctgggtctggcattataaagaacagctgaggctgtcattccatgagtcttcagaagaaaggacagctcagaaaatcaaagaggccaactgcccagagccacagaaaatggaggataattgaggctaagtaacctgattacaagttgtactaacatattaaaggttctgaaaagtcctgcagcaaagacaactatctgatgttgtttaacccagtgcttgctaaacctatctggctatggaactcttttgcccagagcacccatgaatgccatgacacaaatctgagaaaatgctggaacagattttgt

SEQ ID NO: 56503 - DNA, 1386 bp, Homo sapiens
ttggggtccattgcaacccgaggcgagactagagttcccaagcgagaagggaagaggcagtgggtgcacgtggaaggcggacagagggctggaaacaagacgctccagaatcaggagcttcccctcaggaaatagcatcctgtgtccccgcactgcagttgtctggtctctccagcagtttggtacttccggacccttcctggaaggacacagttctgggatttcggaagctgacccccagagagctggatatgttcccagattacggctatggctggttccacacaagcctaattctggagggaaagaactatctacagtggctgactgaaaggttaactgagaggggagtgaagttcttccagcggaaagtggagtcttttgaggaggtggcaagagaaggcgcagacgtgattgtcaactgcactggggtatgggctggggcgctacaacgagaccccctgctgcagccaggccgggggcagatcatgaaggtggacgccccttggatgaagcacttcattctcacccatgacccagagagaggcatctacaattccccgtacatcatcccagggacccagacagttactcttggaggcatcttccagttgggaaactggagtgaactaaacaatatccaggaccacaacaccatttgggaaggctgctgcagactggagcccacactgaagaatgcaagaattattggtgaacgaactggcttccggccagtacgcccccagattcggctagaaagagaacagcttcgcactggaccttcaaacacagaggtcatccacaactatggccatggaggctacgggctcaccatccactggggatgtgccctggaggcagccaagctctttgggagaatcctggaagtgcctccccccacaagaactcccttctcccctcagccaatgaatcaatgtgctccttcataagccattgcttctccctcacttctttcctcaaagaagcatgaggtgagagaaagccacaaagtcagtgcctggagaagggttcagcccaacatggggcccctctcatcactgaaatccctctaccttctctgggtctggcattataaagaacagctgaggctgtcattccatgagtcttcagaagaaaggacagctcagaaaatcaaagaggccaactgcccagagccacagaaaatggaggataattgaggctaagtaacctgattacaagttgtactaacatattaaaggttctgaaaagtcctgcagcaaagacaactatctgatgttgtttaacccagtgcttgctaaacctatctggctatggaactcttttgcccagagcacccatgaatgccatgacacaaatctgagaaaatgctggaacagattttgt

SEQ ID NO: 56504 - DNA, 1440 bp, Homo sapiens
ttggggtccattgcaacccgaggcgagactagagttcccaagcgagaagggaagaggcagtgggtgcacgtggaaggcggacagagggctggaaacaagacgctccagaatcaggagcttcccctcaggaaatagcatcctgtgtccccgcactgcagttgtctggtctctccagcagtttggtacttccggacccttcctggaaggacacagttctgggatttcggaagctgacccccagagagctggatatgttcccagattacggctatggctggttccacacaagcctaattctggagggaaagaactatctacagtggctgactgaaaggttaactgagaggggagtgaagttcttccagcggaaagtggagtcttttgaggaggtggcaagagaaggcgcagacgtgattgtcaactgcactggggtatgggctggggcgctacaacgagaccccctgctgcagccaggccgggggcagatcatgaaggtggacgccccttggatgaagcacttcattctcacccatgacccagagagaggcatctacaattccccgtacatcatcccagggacccagacagttactcttggaggcatcttccagttgggaaactggagtgaactaaacaatatccaggaccacaacaccatttgggaaggctgctgcagactggagcccacactgaagaatgcaagaattattggtgaacgaactggcttccggccagtacgcccccagattcggctagaaagagaacagcttcgcactggaccttcaaacacagaggtcatccacaactatggccatggaggctacgggctcaccatccactggggatgtgccctggaggcagccaagctctttgggagaatcctggaagaaaagaaattgtccagaatgccaccatcccacctctgaagactccagtgactgctgcctccccccacaagaactcccttctcccctcagccaatgaatcaatgtgctccttcataagccattgcttctccctcacttctttcctcaaagaagcatgaggtgagagaaagccacaaagtcagtgcctggagaagggttcagcccaacatggggcccctctcatcactgaaatccctctaccttctctgggtctggcattataaagaacagctgaggctgtcattccatgagtcttcagaagaaaggacagctcagaaaatcaaagaggccaactgcccagagccacagaaaatggaggataattgaggctaagtaacctgattacaagttgtactaacatattaaaggttctgaaaagtcctgcagcaaagacaactatctgatgttgtttaacccagtgcttgctaaacctatctggctatggaactcttttgcccagagcacccatgaatgccatgacacaaatctgagaaaatgctggaacagattttgt

SEQ ID NO: 56505 - DNA, 294 bp, Homo sapiens
acaatgtgtatctttgtgactgcatttaatatataggtcactttaggggacattggtatcttgacagtatagagtttttcggtccatgaacgtgacatatctctgcttttgcttaggatttaaaaatttttctcagcagtattttttagtttttggtgtacaggtcttgcacatatttgttaaatttacccttgagaatatcatgcttttgtattgtgtaacaaatttttaaattttgtttctaattctttattgctagtatatggaaataaagttggttattgtatattgacc

SEQ ID NO: 56506 - DNA, 249 bp, Homo sapiens
cacccccagaagttctgattcagtgggtggcgggtgaggcctgggaacttcatgacgagccccctggcaaggctgctgctgccattttggtgccacactttgggtactatggctttgggcactcccaatccaggtgccatggcatggggagcagtgggtgaaccaaatcctggagcctggactgttccattgggtgcatttctggctggcagatagaggaccacccagctgtgcttgatggggtctaga

SEQ ID NO: 56507 - DNA, 363 bp, Homo sapiens
gaaaacccaggcataaataacaagtcatggtaataatttgtattattcattggttatagcactcttcagctgtaattcattatgcctcttctttagatattgatggtaaaaacaaatgcgataccattcctacaagacatagtcgcccatcataaagaattatatttgtggaaaagacttcaagaaattacaagataggcatctgcagtggagttgaaacaccacactgcccaggacaggcacactgggtcattttctaaccattgagagtatgggtacaaaaataaatatacacatgcagtgttccttctttcactaactacatgctgcacctgtgcacacatagatctgatgacatcttct

SEQ ID NO: 56508 - DNA, 183 bp, Homo sapiens
aattgaattcttaagaagctgtcaaatatggcagtcttttgatgttagtaattttgttttcttctgtgttattggttcaaagtactggccttttccttcatttccagtaattagttgttatagactatcactttttaatgtgagtggaaattagatgatttggttatacttgtgaaaacatgc

SEQ ID NO: 56509 - DNA, 431 bp, Homo sapiens
cctggcgtggtggtgcatgcttgtaatcccagctacttgggaagctaaggtaggaaaatcacttgaacccaggaggcggaggtttggatgagccaaaatagtgccagtgcactccagcccgggcaacaagagacaaactctgtctcaaaaaagaaaaaaaaaaaaaaaagaaaagaaaacggttaagtaattatcagcataatttttatatagctaggtgtcataactgtatttttaattttaccacacaatgttatccttagctgtacctattaggaaggctcagtatccaacacattagtaaaaagctaaagtaatattcaaagctgtagagaaacttaacagcaaggattgagagcataccctcagactgctaccttgttcacatttttactaccattaatctgatacattgctgtgctccacagtgc

SEQ ID NO: 56510 - DNA, 2937 bp, Homo sapiens
ccaatttaagaaattacataatgctttccaaaggcacctacaacttagttttaaattacttgctactggggattacccatggatatccttaataggcaggaagtctgggaattctggtggcctctagggcagtgttctcacagcaccgttccgacagggaccagtgaaagaaaagagacaaagttagaacgtgctggggagcggccatttctaaggccagtctggtttaagtagtcatttctgctgaaaaaacagatgatcctggtggaagaaaaggttgaaggcagctgccctcgggagggctgtgatgctcggcacatcctgcctggcacatacacgtgtctgcaggccacaccgtgcatgtccccagacctgccgcctggcttctggagtgcttcaagcagagcatggtgggtcattgaggagacccaggaatctcatctgagaacccactctctgccggagaaccccatggtgacacattttcatctttctgaccagaggctgtttttttttttttttgagacagtctcattctgttgcccaggctggagtgcagtggcttgatctcggctcactgcaacctcgcctcccgggttcaagcaattctctgccgcagcctccagagtagctgggataacaggtgcccaccaccacaccccactaatttttgtatttgtatttttagtagagatggggtttcgccatgttggtcaggctggtcttggactcctgacctcatgctccacccgcttcggcctcccaaagttctgggattacaggtgtgagccaccgtgcacggccggcctgacctttggaaaagccttgtcactttggacgtttgcgtctttgaagaggcgatgggagcatatcatgactgcctgccaccattgcttttcagactaccacaactcaatcatgctgtccaggacttctggccctgtgttcaccactgggaaaacgtacttcagactggatagcctaaaaaggagcaatgcccttgtaggatgtggagaagggaaaatacggacattaacattaaaagacaccagtgaaattgttaggtctctaggaagttggagcacaaggcttcacgctttaagaccatctgtggttttcagtgaacaagcgctgagcaccagcagcagaaaacaacaacaaaaaaacacctcgtttttaccttgtcttctagacatgaaaaggcagttgcattccactctgcattatgttctacatgttgctttatcagtatatgcttagctgtaagtgacaagtattttttttgaacagaagtttacttagaaataccatgcacttgggggtaccaattaaccgcctgaaaattagcatattgatagttcttagagagaccagatataatctaagaatttatatgaaagatttgtatcattagagccagaaataattttatattaatatataatacagattaacattatatataatatgtacctgtgtcacttctgacatgagcctgtaaacatatattcatatatgtacctgcacatgtacccacctgatgtaggtcttattcctttagtatggacttaaagtacttattcatataccttgtaactaaaaattagaacagctccctagaattatgaacttttaagagtctgactagaaatttgcaacttataaaaaagttacttttaaaaatataagttagggctaggcacagtggctcatgcctataatctcagcacttttgggaggccaagacaggaggatcacttcaggccaggagttcaagatcaaccaacctgggtaacatggccagaccccatctctatttatatatatatatataaaacttagagtttttatcttcccctaaaagaggccgtgatatttgcagcagcctcaaattgctcttaaggggtttaggtgtgcagaagctttcctttccctacccagtaaccatgtgactactaacgtggtatattgatttattttgtttgctgtctgtctcccctgccccactgctggaacagaggctccaagaaaacagggaccttattattcattactgcatccccagtaatgaaagtacttagaaaataattattgaatgaatgaaatctaaactgtgaacctgagggtgtttgtggcagtgtttgttttactgaattgtagaaggacataaccgtgttttcagtgtttctatggaacaaacttgtacattttatttcacttgtgttttgtcttaaaccctactgctggaaacaattttatgtaataagcaatgggcccaaaagtctaggagtttttttgtacttagtgaatttgtatgcaacagagatgctgcagctgatgcctttaaaaggtattcatcatggaagagctgaggcctgtgcttggtgttccagagcccagggttgagcatcctgaaggagccactgcagccgtcactgtccccagagcctgtggagatagagcctgtttgctgctttttcttcccgctcttaagacatggctggagctcagtcttcattgaatgaagtttgctgtggtattgcatagccttgctttcttgaactaaactgtttgcccttcacaagtagttcttctttcaggattagttcgttccaaggaggctcttcagtctcacagataagtagatctctcctgctgtctggacacatttcactcggaaattgaatacaatttgtattcaggctgggaacctgaacacacacttgtgtttttaagcttcccttttttacagtggacaaggacacaaataataaataaatcatccctaatgcccaagaaatgccctggtacttagtaataacaaaataccagtaacttccagttgtttctcactaccttttttcttgagtaggatgataatagaattacaactcttgagggcaacataaatataggtggatatttgtggtatgatat

SEQ ID NO: 56511 - DNA, 2795 bp, Homo sapiens
ccaatttaagaaattacataatgctttccaaaggcacctacaacttagttttaaattacttgctactggggattacccatggatatccttaataggcaggaagtctgggaattctggtggcctctagggcagtgttctcacagcaccgttccgacagggaccagtgaaagaaaagagacaaagttagaacgtgctggggagcggccatttctaaggccagtctggtttaagtagtcatttctgctgaaaaaacagatgatcctggtggaagaaaaggttgaaggcagctgccctcgggagggctgtgatgctcggcacatcctgcctggcacatacacgtgtctgcaggccacaccgtgcatgtccccagacctgccgcctggcttctggagtgcttcaagcagagcatggtgggtcattgaggagacccaggaatctcatctgagaacccactctctgccggagaaccccatggtgacacattttcatctttctgaccagaggctgtttttttttttttttgagacagtctcattctgttgcccaggctggagtgcagtggcttgatctcggctcactgcaacctcgcctcccgggttcaagcaattctctgccgcagcctccagagtagctgggataacaggtgcccaccaccacaccccactaatttttgtatttgtatttttagtagagatggggtttcgccatgttggtcaggctggtcttggactcctgacctcatgctccacccgcttcggcctcccaaagttctgggattacaggtgtgagccaccgtgcacggccggcctgacctttggaaaagccttgtcactttggacgtttgcgtctttgaagaggcgatgggagcatatcatgactgcctgccaccattgcttttcagactaccacaactcaatcatgctgtccaggacttctggccctgtgttcaccactgggaaaacgtacttcagactggatagcctaaaaaggagcaatgcccttgtaggatgtggagaagggaaaatacggacattaacattaaaagacaccagtgaaattgttaggtctctaggaagttggagcacaaggcttcacgctttaagaccatctgtggttttcagtgaacaagcgctgagcaccagcagcagaaaacaacaacaaaaaaacacctcgtttttaccttgtcttctagacatgaaaaggcagttgcattccactctgcattatgttctacatgttgctttatcagtatatgcttagctgtaagtgacaagtattttttttgaacagaagtttacttagaaataccatgcacttgggggtaccaattaaccgcctgaaaattagcatattgatagttcttagagagaccagatataatctaagaatttatatgaaagatttgtatcattagagccagaaataattttatattaatatataatacagattaacattatatataatatgtacctgtgtcacttctgacatgagcctgtaaacatatattcatatatgtacctgcacatgtacccacctgatgtaggtcttattcctttagtatggacttaaagtacttattcatataccttgtaactaaaaattagaacagctccctagaattatgaacttttaagagtctgactagaaatttgcaacttataaaaaagttacttttaaaaatataagttagggctaggcacagtggctcatgcctataatctcagcacttttgggaggccaagacaggaggatcacttcaggccaggagttcaagatcaaccaacctgggtaacatggccagaccccatctctatttatatatatatatataaaacttagagtttttatcttcccctaaaagaggccgtgatatttgcagcagcctcaaattgctcttaaggggtttaggtgtgcagaagctttcctttccctacccagtaaccatgtgactactaacgtggtatattgatttattttgtttgctgtctgtctcccctgccccactgctggaacagaggctccaagaaaacagggaccttattattcattactgcatccccagtaatgaaagtacttagaaaataattattgaatgaatgaaatctaaactgtgaacctgagggtgtttgtggcagtgtttgttttactgaattgtagaaggacataaccgtgttttcagtgtttctatggaacaaacttgtacattttatttcacttgtgttttgtcttaaaccctactgctggaaacaattttatgtaataagcaatgggcccaaaagtctaggagtttttttgtacttagtgaatttgtatgcaacagagatgctgcagctgatgcctttaaaaggtattcatcatggaagagctgaggcctgtgcttggtgttccagagcccagggttgagcatcctgaaggagccactgcagccgtcactgtccccagagcctgtggagatagagcctgtttgctgctttttcttcccgctcttaagacatggctggagctcagtcttcattgaatgaagtttgctgtggtattgcatagccttgctttcttgaactaaactgtttgcccttcacaagtagttcttctttcaggattagttcgttccaaggaggctcttcagtctcacagataagtagatctctcctgctgtctggacacatttcactcggaaattgaatacaatttgtattcaggctgggaacctgaacacacacttgtgtttttaagcttcccttttttacagtggacaaggacacaaataataaataaatcatccctaatgccca

SEQ ID NO: 56512 - DNA, 2123 bp, Homo sapiens
ccaatttaagaaattacataatgctttccaaaggcacctacaacttagttttaaattacttgctactggggattacccatggatatccttaataggcaggaagtctgggaattctggtggcctctagggcagtgttctcacagcaccgttccgacagggaccagtgaaagaaaagagacaaagttagaacgtgctggggagcggccatttctaaggccagtctggtttaagtagtcatttctgctgaaaaaacagatgatcctggtggaagaaaaggttgaaggcagctgccctcgggagggctgtgatgctcggcacatcctgcctggcacatacacgtgtctgcaggccacaccgtgcatgtccccagacctgccgcctggcttctggagtgcttcaagcagagcatggtgggtcattgaggagacccaggaatctcatctgagaacccactctctgccggagaaccccatggtgacacattttcatctttctgaccagaggctgtttttttttttttttgagacagtctcattctgttgcccaggctggagtgcagtggcttgatctcggctcactgcaacctcgcctcccgggttcaagcaattctctgccgcagcctccagagtagctgggataacaggtgcccaccaccacaccccactaatttttgtatttgtatttttagtagagatggggtttcgccatgttggtcaggctggtcttggactcctgacctcatgctccacccgcttcggcctcccaaagttctgggattacaggtgtgagccaccgtgcacggccggcctgacctttggaaaagccttgtcactttggacgtttgcgtctttgaagaggcgatgggagcatatcatgactgcctgccaccattgcttttcagactaccacaactcaatcatgctgtccaggacttctggccctgtgttcaccactgggaaaacgtacttcagactggatagcctaaaaaggagcaatgcccttgtaggatgtggagaagggaaaatacggacattaacattaaaagacaccagtgaaattgttaggtctctaggaagttggagcacaaggcttcacgctttaagaccatctgtggttttcagtgaacaagcgctgagcaccagcagcagaaaacaacaacaaaaaaacacctcgtttttaccttgtcttctagacatgaaaaggcagttgcattccactctgcattatgttctacatgttgctttatcagtatatgcttagctgtaagtgacaagtattttttttgaacagaagtttacttagaaataccatgcacttgggggtaccaattaaccgcctgaaaattagcatattgatagttcttagagagaccagatataatctaagaatttatatgaaagatttgtatcattagagccagaaataattttatattaatatataatacagattaacattatatataatatgtacctgtgtcacttctgacatgagcctgtaaacatatattcatatatgtacctgcacatgtacccacctgatgtaggtcttattcctttagtatggacttaaagtacttattcatataccttgtaactaaaaattagaacagctccctagaattatgaacttttaagagtctgactagaaatttgcaacttataaaaaagttacttttaaaaatataagttagggctaggcacagtggctcatgcctataatctcagcacttttgggaggccaagacaggaggatcacttcaggccaggagttcaagatcaaccaacctgggtaacatggccagaccccatctctatttatatatatatatataaaacttagagtttttatcttcccctaaaagaggccgtgatatttgcagcagcctcaaattgctcttaaggggtttaggtgtgcagaagctttcctttccctacccagtaaccatgtgactactaacgtggtatattgatttattttgtttgctgtctgtctcccctgccccactgctggaacagaggctccaagaaaacagggaccttattattcattactgcatccccagtaatgaaagtacttagaaaataattattgaatgaatgaaatctaaactgtgaacctga

SEQ ID NO: 56513 - DNA, 2540 bp, Homo sapiens
ccaatttaagaaattacataatgctttccaaaggcacctacaacttagttttaaattacttgctactggggattacccatggatatccttaataggcaggaagtctgggaattctggtggcctctagggcagtgttctcacagcaccgttccgacagggaccagtgaaagaaaagagacaaagttagaacgtgctggggagcggccatttctaaggccagtctggtttaagtagtcatttctgctgaaaaaacagatgatcctggtggaagaaaaggttgaaggcagctgccctcgggagggctgtgatgctcggcacatcctgcctggcacatacacgtgtctgcaggccacaccgtgcatgtccccagacctgccgcctggcttctggagtgcttcaagcagagcatggtgggtcattgaggagacccaggaatctcatctgagaacccactctctgccggagaaccccatggtgacacattttcatctttctgaccagaggctgtttttttttttttttgagacagtctcattctgttgcccaggctggagtgcagtggcttgatctcggctcactgcaacctcgcctcccgggttcaagcaattctctgccgcagcctccagagtagctgggataacaggtgcccaccaccacaccccactaatttttgtatttgtatttttagtagagatggggtttcgccatgttggtcaggctggtcttggactcctgacctcatgctccacccgcttcggcctcccaaagttctgggattacaggtgtgagccaccgtgcacggccggcctgacctttggaaaagccttgtcactttggacgtttgcgtctttgaagaggcgatgggagcatatcatgactgcctgccaccattgcttttcagactaccacaactcaatcatgctgtccaggacttctggccctgtgttcaccactgggaaaacgtacttcagactggatagcctaaaaaggagcaatgcccttgtaggatgtggagaagggaaaatacggacattaacattaaaagacaccagtgaaattgttaggtctctaggaagttggagcacaaggcttcacgctttaagaccatctgtggttttcagtgaacaagcgctgagcaccagcagcagaaaacaacaacaaaaaaacacctcgtttttaccttgtcttctagacatgaaaaggcagttgcattccactctgcattatgttctacatgttgctttatcagtatatgcttagctgtaagtgacaagtattttttttgaacagaagtttacttagaaataccatgcacttgggggtaccaattaaccgcctgaaaattagcatattgatagttcttagagagaccagatataatctaagaatttatatgaaagatttgtatcattagagccagaaataattttatattaatatataatacagattaacattatatataatatgtacctgtgtcacttctgacatgagcctgtaaacatatattcatatatgtacctgcacatgtacccacctgatgtaggtcttattcctttagtatggacttaaagtacttattcatataccttgtaactaaaaattagaacagctccctagaattatgaacttttaagagtctgactagaaatttgcaacttataaaaaagttacttttaaaaatataagttagggctaggcacagtggctcatgcctataatctcagcacttttgggaggccaagacaggaggatcacttcaggccaggagttcaagatcaaccaacctgggtaacatggccagaccccatctctatttatatatatatatataaaacttagagtttttatcttcccctaaaagaggccgtgatatttgcagcagcctcaaattgctcttaaggggtttaggtgtgcagaagctttcctttccctacccagtaaccatgtgactactaacgtggtatattgatttattttgtttgctgtctgtctcccctgccccactgctggaacagaggctccaagaaaacagggaccttattattcattactgcatccccagtaatgaaagtacttagaaaataattattgaatgaatgaaatctaaactgtgaacctgagggtgtttgtggcagtgtttgttttactgaattgtagaaggacataaccgtgttttcagtgtttctatggaacaaacttgtacattttatttcacttgtgttttgtcttaaaccctactgctggaaacaattttatgtaataagcaatgggcccaaaagtctaggagtttttttgtacttagtgaatttgtatgcaacagagatgctgcagctgatgcctttaaaaggtattcatcatggaagagctgaggcctgtgcttggtgttccagagcccagggttgagcatcctgaaggagccactgcagccgtcactgtccccagagcctgtggagatagagcctgtttgctgctttttcttcccgctcttaagacatggctggagctcagtcttcattgaatgaagtttgctgtggtat

SEQ ID NO: 56514 - DNA, 2226 bp, Homo sapiens
ccaatttaagaaattacataatgctttccaaaggcacctacaacttagttttaaattacttgctactggggattacccatggatatccttaataggcaggaagtctgggaattctggtggcctctagggcagtgttctcacagcaccgttccgacagggaccagtgaaagaaaagagacaaagttagaacgtgctggggagcggccatttctaaggccagtctggtttaagtagtcatttctgctgaaaaaacagatgatcctggtggaagaaaaggttgaaggcagctgccctcgggagggctgtgatgctcggcacatcctgcctggcacatacacgtgtctgcaggccacaccgtgcatgtccccagacctgccgcctggcttctggagtgcttcaagcagagcatggtgggtcattgaggagacccaggaatctcatctgagaacccactctctgccggagaaccccatggtgacacattttcatctttctgacctttggaaaagccttgtcactttggacgtttgcgtctttgaagaggcgatgggagcatatcatgactgcctgccaccattgcttttcagactaccacaactcaatcatgctgtccaggacttctggccctgtgttcaccactgggaaaacgtacttcagactggatagcctaaaaaggagcaatgcccttgtaggatgtggagaagggaaaatacggacattaacattaaaagacaccagtgaaattgttaggtctctaggaagttggagcacaaggcttcacgctttaagaccatctgtggttttcagtgaacaagcgctgagcaccagcagcagaaaacaacaacaaaaaaacacctcgtttttaccttgtcttctagacatgaaaaggcagttgcattccactctgcattatgttctacatgttgctttatcagtatatgcttagctgtaagtgacaagtattttttttgaacagaagtttacttagaaataccatgcacttgggggtaccaattaaccgcctgaaaattagcatattgatagttcttagagagaccagatataatctaagaatttatatgaaagatttgtatcattagagccagaaataattttatattaatatataatacagattaacattatatataatatgtacctgtgtcacttctgacatgagcctgtaaacatatattcatatatgtacctgcacatgtacccacctgatgtaggtcttattcctttagtatggacttaaagtacttattcatataccttgtaactaaaaattagaacagctccctagaattatgaacttttaagagtctgactagaaatttgcaacttataaaaaagttacttttaaaaatataagttagggctaggcacagtggctcatgcctataatctcagcacttttgggaggccaagacaggaggatcacttcaggccaggagttcaagatcaaccaacctgggtaacatggccagaccccatctctatttatatatatatatataaaacttagagtttttatcttcccctaaaagaggccgtgatatttgcagcagcctcaaattgctcttaaggggtttaggtgtgcagaagctttcctttccctacccagtaaccatgtgactactaacgtggtatattgatttattttgtttgctgtctgtctcccctgccccactgctggaacagaggctccaagaaaacagggaccttattattcattactgcatccccagtaatgaaagtacttagaaaataattattgaatgaatgaaatctaaactgtgaacctgagggtgtttgtggcagtgtttgttttactgaattgtagaaggacataaccgtgttttcagtgtttctatggaacaaacttgtacattttatttcacttgtgttttgtcttaaaccctactgctggaaacaattttatgtaataagcaatgggcccaaaagtctaggagtttttttgtacttagtgaatttgtatgcaacagagatgctgcagctgatgcctttaaaaggtattcatcatggaagagctgaggcctgtgcttggtgttccagagcccagggttgagcatcctgaaggagccactgcagccgtcactgtccccagagcctgtggagatagagcctgtttgctgctttttcttcccgctcttaagacatggctggagctcagtcttcattgaatgaagtttgctgtggtat

SEQ ID NO: 56515 - DNA, 2226 bp, Homo sapiens
tgatgagaatccaagctgcaaactgggcggcttgggcaactgttttcttaaccaccctccacgttgtggcttacgtcttttagcaccgccctcagggcaaaggatggtggtcagaggtaactaccacagtaaaagaaggctatttatgtggtctgtttacagttacccggtttcaacactaagccagctttccgccacgtctcgggcgaacctccggcctgaggtcacagagacgcccgggtggctctcaggagccagcatggcagcctcctcaggacgggtactcaggaatttcgcccgcagggactaacaccacttggacccaggaactccagcttcactccgctttgtgcactgggtggggcggtcgcggtgacgtttcaggcaacgcctctgctgtcagccaataaggagcgggagacgcgtcgggcctgcgctcaatgggccgcgctggtcccgccccactgtgatcgtgagactgcagacccgctaataaaatccaccccaacaatcgctgtgtgccgctttagtgcgctcgccgtcggctctacctgcgtgctttagctccttctcgcctgatccttctgtctctcccaaccccggacacccggcttcgactggttatatcttcggtgttcttttcctctcttcttctttcgcggttcagcatgcaggaaaaagacgcctcctcacaaggtttcctgccacacttccaacatttcgccacgcaggcgatccatgtgggccaggatccagagcaatggacctccagggctgtagtgccccccatctcactgtccaccacgttcaagcaaggggcgcctggccagcactcgggttttgaatatagccgttctggaaatcccactaggaattgccttgaaaaagcagtggcagcactggatggggctaagtactgtttggcctttgcttcaggtttagcagccactgtaactattacccatcttttaaaagcaggagaccaaattatttgtatggatgatgtgtatggaggtacaaacaggtacttcaggcaagtggcatctgaatttggattaaagatttcttttgttgattgttccaaaatcaaattactagaggcagcaattacaccagaaaccaagcgccctttggctctgggagctgatatttctatgtattctgcaacaaaatacatgaatggccacagtgatgttgtaatgggcctggtgtctgttaattgtgaaagccttcataatagacttcgtttcttgcaaaactctcttggagcagttccatctcctattgattgttacctctgcaatcgaggtctgaagactctacatgtccgaatggaaaagcatttcaaaaacggaatggcagttgcccagttcctggaatctaatccttgggtagaaaaggttatttatcctgggctgccctctcatccacagcatgagttggtgaagcgtcagtgtacaggttgtacagggatggtcaccttttatattaagggcactcttcagcatgctgagattttcctcaagaacctaaagctatttactctggccgagagcttgggaggattcgaaagccttgctgagcttccggcaatcatgactcatgcatcagttcttaagaatgacagagatgtccttggaattagtgacacactgattcgactttctgtgggcttagaggatgaggaagacctactggaagatctagatcaagctttgaaggcagcacaccctccaagtggaagtcacagctagtattccagagctgctattagaagctgcttcctgtgaagatcaaatcttcctgagtaattaaatggaccaacaatgagcctttgcaaaattttcaagcggaaattttaaggcacctcattatctttcataactgtaattttcttagggatcatctctgttaaaaagttttctgtatgtcatgttataattacaggtcaattctgttaatatctttttgttaattttgctctatgtttgcctctgaaggaggtgagatttgtgctactttgggagattatgttcttttttcatgtctaagatttattttgatcatgtttataatataatggtaattcatttttgatgttttgtgaagaatttaaatttaaacgaatgttcttaaatcaagtgtgatttttttgcatatcattgaaaagaacattaaaagcaatggtttacacttagttaccataagccgaaaatcaaatacttg

SEQ ID NO: 56516 - DNA, 2262 bp, Homo sapiens
tgatgagaatccaagctgcaaactgggcggcttgggcaactgttttcttaaccaccctccacgttgtggcttacgtcttttagcaccgccctcagggcaaaggatggtggtcagaggtaactaccacagtaaaagaaggctatttatgtggtctgtttacagttacccggtttcaacactaagccagctttccgccacgtctcgggcgaacctccggcctgaggtcacagagacgcccgggtggctctcaggagccagcatggcagcctcctcaggacgggtactcaggaatttcgcccgcagggactaacaccacttggacccaggaactccagcttcactccgctttgtgcactgggtggggcggtcgcggtgacgtttcaggcaacgcctctgctgtcagccaataaggagcgggagacgcgtcgggcctgcgctcaatgggccgcgctggtcccgccccactgtgatcgtgagactgcagacccgctaataaaatccaccccaacaatcgctgtgtgccgctttagtgcgctcgccgtcggctctacctgcgtgctttagctccttctcgcctgatccttctgtctctcccaaccccggacacccggcttcgactggttatatcttcggtgttcttttcctctcttcttctttcgcggttcagcatgcaggaaaaagacgcctcctcacaaggtttcctgccacagttcaagcaaggggcgcctggccagcactcgggttttgaatatagccgttctggaaatcccactaggaattgccttgaaaaagcagtggcagcactggatggggctaagtactgtttggcctttgcttcaggtttagcagccactgtaactattacccatcttttaaaagcaggagaccaaattatttgtatggatgatgtgtatggaggtacaaacaggtacttcaggcaagtggcatctgaatttggattaaagatttcttttgttgattgttccaaaatcaaattactagaggcagcaattacaccagaaaccaagcttgtttggatcgaaacccccacaaaccccacccagaaggtgattgacattgaaggctgtgcacatattgtccataagcatggagacattattttggtcgtggataacacttttatgtcaccatatttccagcgccctttggctctgggagctgatatttctatgtattctgcaacaaaatacatgaatggccacagtgatgttgtaatgggcctggtgtctgttaattgtgaaagccttcataatagacttcgtttcttgcaaaactctcttggagcagttccatctcctattgattgttacctctgcaatcgaggtctgaagactctacatgtccgaatggaaaagcatttcaaaaacggaatggcagttgcccagttcctggaatctaatccttgggtagaaaaggttatttatcctgggctgccctctcatccacagcatgagttggtgaagcgtcagtgtacaggttgtacagggatggtcaccttttatattaagggcactcttcagcatgctgagattttcctcaagaacctaaagctatttactctggccgagagcttgggaggattcgaaagccttgctgagcttccggcaatcatgactcatgcatcagttcttaagaatgacagagatgtccttggaattagtgacacactgattcgactttctgtgggcttagaggatgaggaagacctactggaagatctagatcaagctttgaaggcagcacaccctccaagtggaagtcacagctagtattccagagctgctattagaagctgcttcctgtgaagatcaaatcttcctgagtaattaaatggaccaacaatgagcctttgcaaaattttcaagcggaaattttaaggcacctcattatctttcataactgtaattttcttagggatcatctctgttaaaaagttttctgtatgtcatgttataattacaggtcaattctgttaatatctttttgttaattttgctctatgtttgcctctgaaggaggtgagatttgtgctactttgggagattatgttcttttttcatgtctaagatttattttgatcatgtttataatataatggtaattcatttttgatgttttgtgaagaatttaaatttaaacgaatgttcttaaatcaagtgtgatttttttgcatatcattgaaaagaacattaaaagcaatggtttacacttagttaccataagccgaaaatcaaatacttg

SEQ ID NO: 56517 - DNA, 2095 bp, Homo sapiens
  misc_feature (1493)..(1493): n is a, c, g, or t
  misc_feature (1571)..(1571): n is a, c, g, or t
  misc_feature (1593)..(1593): n is a, c, g, or t
  misc_feature (1719)..(1719): n is a, c, g, or t
  misc_feature (1758)..(1758): n is a, c, g, or t
  misc_feature (1762)..(1762): n is a, c, g, or t
  misc_feature (1767)..(1767): n is a, c, g, or t
  misc_feature (1771)..(1771): n is a, c, g, or t
  misc_feature (1775)..(1776): n is a, c, g, or t
  misc_feature (1796)..(1796): n is a, c, g, or t
  misc_feature (1811)..(1811): n is a, c, g, or t
  misc_feature (1822)..(1824): n is a, c, g, or t
  misc_feature (1840)..(1841): n is a, c, g, or t
  misc_feature (1844)..(1845): n is a, c, g, or t
  misc_feature (1850)..(1850): n is a, c, g, or t
  misc_feature (1854)..(1854): n is a, c, g, or t
  misc_feature (1857)..(1857): n is a, c, g, or t
  misc_feature (1906)..(1906): n is a, c, g, or t
  misc_feature (1915)..(1915): n is a, c, g, or t
  misc_feature (1993)..(1993): n is a, c, g, or t
  misc_feature (2090)..(2090): n is a, c, g, or t
tgatgagaatccaagctgcaaactgggcggcttgggcaactgttttcttaaccaccctccacgttgtggcttacgtcttttagcaccgccctcagggcaaaggatggtggtcagaggtaactaccacagtaaaagaaggctatttatgtggtctgtttacagttacccggtttcaacactaagccagctttccgccacgtctcgggcgaacctccggcctgaggtcacagagacgcccgggtggctctcaggagccagcatggcagcctcctcaggacgggtactcaggaatttcgcccgcagggactaacaccacttggacccaggaactccagcttcactccgctttgtgcactgggtggggcggtcgcggtgacgtttcaggcaacgcctctgctgtcagccaataaggagcgggagacgcgtcgggcctgcgctcaatgggccgcgctggtcccgccccactgtgatcgtgagactgcagacccgctaataaaatccaccccaacaatcgctgtgtgccgctttagtgcgctcgccgtcggctctacctgcgtgctttagctccttctcgcctgatccttctgtctctcccaaccccggacacccggcttcgactggttatatcttcggtgttcttttcctctcttcttctttcgcggttcagcatgcaggaaaaagacgcctcctcacaaggtttcctgccacacttccaacatttcgccacgcaggcgatccatgtgggccaggatccagagcaatggacctccagggctgtagtgccccccatctcactgtccaccacgttcaagcaaggggcgcctggccagcactcggtgagctgggtctgtctggggctgtccacagttgggcggtaaaagagatacggcttatgaatttgaaaggcatgtaagtaatttataatatgacttataaattaggaaggcaaccgaaagatgtttctacactgtaattcttgcagcacagctttgtatcggatggtccagtgatcgtatttcttttgataagcaggactggaaggagccgtttgtccagcttgccatttagatttggcctgaaattcaggtgattttgacaaatttgcaattaaaaatcgaaggtcataacttttttgagttacctttagcagcataaattttaaagatgtagtacggagtcagcttaaaaaatattaagggtctgataacttgactagaattaagattgtttccagtagctgtatgaatagttattgagtacctactatatgccaaatacgtgctcgtatatatcatgtgtattacatgtattgtctcatctaatcctaacaacaaccctagtctgaaccgaattctcattttttcccaaagtgctgggattacaggcatgagtcaccgtgtcctgcccagacatatcaaatttgacaggtattgtataccctttggatctttaggaattaacttttgcctctgtcactcagctttgtatattcngaaatggagataagtatagggaggtcttggaaggaaaattgccagaattcccaaaccatgtaacactcattgagaatnccagacccattatatctaaagngcaagtgaaggaaacagtattgtgaactgggtataaccccttggttcttaactagtacattcttaatctgtgagacccaaaggttgataaacaataatttaagattgtacagtactctaaacgtcngcaaaggtctagatgttatcagtatcactagtttttatncctnccagnagcncccnnttaggttacattgttgtccnctttccagtgtggcntctgtcattgnnnttccactatggcaagnncannaaaangctngcnccattgttatcttcaagtaatgcccataaggagatggaagatatctganacaattaangctttagcttctaggcaagagaaataacgttgcattaaatttcaagtttctttctgctagacttgaatgtgtctagcnactctaatttatgggggcttttggttttttcctattgtactttgtatgtagaattgttttgaaatatcaagcatatttactttgaatttgaactctntctta

SEQ ID NO: 56518 - DNA, 2358 bp, Homo sapiens
tgatgagaatccaagctgcaaactgggcggcttgggcaactgttttcttaaccaccctccacgttgtggcttacgtcttttagcaccgccctcagggcaaaggatggtggtcagaggtaactaccacagtaaaagaaggctatttatgtggtctgtttacagttacccggtttcaacactaagccagctttccgccacgtctcgggcgaacctccggcctgaggtcacagagacgcccgggtggctctcaggagccagcatggcagcctcctcaggacgggtactcaggaatttcgcccgcagggactaacaccacttggacccaggaactccagcttcactccgctttgtgcactgggtggggcggtcgcggtgacgtttcaggcaacgcctctgctgtcagccaataaggagcgggagacgcgtcgggcctgcgctcaatgggccgcgctggtcccgccccactgtgatcgtgagactgcagacccgctaataaaatccaccccaacaatcgctgtgtgccgctttagtgcgctcgccgtcggctctacctgcgtgctttagctccttctcgcctgatccttctgtctctcccaaccccggacacccggcttcgactggttatatcttcggtgttcttttcctctcttcttctttcgcggttcagcatgcaggaaaaagacgcctcctcacaaggtttcctgccacacttccaacatttcgccacgcaggcgatccatgtgggccaggatccagagcaatggacctccagggctgtagtgccccccatctcactgtccaccacgttcaagcaaggggcgcctggccagcactcgggttttgaatatagccgttctggaaatcccactaggaattgccttgaaaaagcagtggcagcactggatggggctaagtactgtttggcctttgcttcaggtttagcagccactgtaactattacccatcttttaaaagcaggagaccaaattatttgtatggatgatgtgtatggaggtacaaacaggtacttcaggcaagtggcatctgaatttggattaaagatttcttttgttgattgttccaaaatcaaattactagaggcagcaattacaccagaaaccaagcttgtttggatcgaaacccccacaaaccccacccagaaggtgattgacattgaaggctgtgcacatattgtccataagcatggagacattattttggtcgtggataacacttttatgtcaccatatttccagcgccctttggctctgggagctgatatttctatgtattctgcaacaaaatacatgaatggccacagtgatgttgtaatgggcctggtgtctgttaattgtgaaagccttcataatagacttcgtttcttgcaaaactctcttggagcagttccatctcctattgattgttacctctgcaatcgaggtctgaagactctacatgtccgaatggaaaagcatttcaaaaacggaatggcagttgcccagttcctggaatctaatccttgggtagaaaaggttatttatcctgggctgccctctcatccacagcatgagttggtgaagcgtcagtgtacaggttgtacagggatggtcaccttttatattaagggcactcttcagcatgctgagattttcctcaagaacctaaagctatttactctggccgagagcttgggaggattcgaaagccttgctgagcttccggcaatcatgactcatgcatcagttcttaagaatgacagagatgtccttggaattagtgacacactgattcgactttctgtgggcttagaggatgaggaagacctactggaagatctagatcaagctttgaaggcagcacaccctccaagtggaagtcacagctagtattccagagctgctattagaagctgcttcctgtgaagatcaaatcttcctgagtaattaaatggaccaacaatgagcctttgcaaaattttcaagcggaaattttaaggcacctcattatctttcataactgtaattttcttagggatcatctctgttaaaaagttttctgtatgtcatgttataattacaggtcaattctgttaatatctttttgttaattttgctctatgtttgcctctgaaggaggtgagatttgtgctactttgggagattatgttcttttttcatgtctaagatttattttgatcatgtttataatataatggtaattcatttttgatgttttgtgaagaatttaaatttaaacgaatgttcttaaatcaagtgtgatttttttgcatatcattgaaaagaacattaaaagcaatggtttacacttagttaccataagccgaaaatcaaatacttg

SEQ ID NO: 56519 - DNA, 2318 bp, Homo sapiens
tgatgagaatccaagctgcaaactgggcggcttgggcaactgttttcttaaccaccctccacgttgtggcttacgtcttttagcaccgccctcagggcaaaggatggtggtcagaggtaactaccacagtaaaagaaggctatttatgtggtctgtttacagttacccggtttcaacactaagccagctttccgccacgtctcgggcgaacctccggcctgaggtcacagagacgcccgggtggctctcaggagccagcatggcagcctcctcaggacgggtactcaggaatttcgcccgcagggactaacaccacttggacccaggaactccagcttcactccgctttgtgcactgggtggggcggtcgcggtgacgtttcaggcaacgcctctgctgtcagccaataaggagcgggagacgcgtcgggcctgcgctcaatgggccgcgctggtcccgccccactgtgatcgtgagactgcagacccgctaataaaatccaccccaacaatcgctgtgtgccgctttagtgcgctcgccgtcggctctacctgcgtgctttagctccttctcgcctgatccttctgtctctcccaaccccggacacccggcttcgactggttatatcttcggtgttcttttcctctcttcttctttcgcggttcagcatgcaggaaaaagacgcctcctcacaaggtttcctgccacacttccaacatttcgccacgcaggcgatccatgtgggccaggatccagagcaatggacctccagggctgtagtgccccccatctcactgtccaccacgttcaagcaaggggcgcctggccagcactcgggttttgaatatagccgttctggaaatcccactaggaattgccttgaaaaagcagtggcagcactggatggggctaagtactgtttggcctttgcttcaggtttagcagccactgtaactattacccatcttttaaaagcaggagaccaaattatttgtatggatgatgtgtatggaggtacaaacaggtacttcaggcaagtggcatctgaatttggattaaagatttcttttgttgattgttccaaaatcaaattactagaggcagcaattacaccagaaaccaagcttgtttggatcgaaacccccacaaaccccacccagaaggtgattgacattgaaggctgtgcacatattgtccataagcatggagacattattttggtcgtggataacacttttatgtcaccatatttccagcgccctttggctctgggagctgatatttctatgtattctgcaacaaaatacatgaatgtgaaagccttcataatagacttcgtttcttgcaaaactctcttggagcagttccatctcctattgattgttacctctgcaatcgaggtctgaagactctacatgtccgaatggaaaagcatttcaaaaacggaatggcagttgcccagttcctggaatctaatccttgggtagaaaaggttatttatcctgggctgccctctcatccacagcatgagttggtgaagcgtcagtgtacaggttgtacagggatggtcaccttttatattaagggcactcttcagcatgctgagattttcctcaagaacctaaagctatttactctggccgagagcttgggaggattcgaaagccttgctgagcttccggcaatcatgactcatgcatcagttcttaagaatgacagagatgtccttggaattagtgacacactgattcgactttctgtgggcttagaggatgaggaagacctactggaagatctagatcaagctttgaaggcagcacaccctccaagtggaagtcacagctagtattccagagctgctattagaagctgcttcctgtgaagatcaaatcttcctgagtaattaaatggaccaacaatgagcctttgcaaaattttcaagcggaaattttaaggcacctcattatctttcataactgtaattttcttagggatcatctctgttaaaaagttttctgtatgtcatgttataattacaggtcaattctgttaatatctttttgttaattttgctctatgtttgcctctgaaggaggtgagatttgtgctactttgggagattatgttcttttttcatgtctaagatttattttgatcatgtttataatataatggtaattcatttttgatgttttgtgaagaatttaaatttaaacgaatgttcttaaatcaagtgtgatttttttgcatatcattgaaaagaacattaaaagcaatggtttacacttagttaccataagccgaaaatcaaatacttg

SEQ ID NO: 56520 - DNA, 1638 bp, Homo sapiens
tgatgagaatccaagctgcaaactgggcggcttgggcaactgttttcttaaccaccctccacgttgtggcttacgtcttttagcaccgccctcagggcaaaggatggtggtcagaggtaactaccacagtaaaagaaggctatttatgtggtctgtttacagttacccggtttcaacactaagccagctttccgccacgtctcgggcgaacctccggcctgaggtcacagagacgcccgggtggctctcaggagccagcatggcagcctcctcaggacgggtactcaggaatttcgcccgcagggactaacaccacttggacccaggaactccagcttcactccgctttgtgcactgggtggggcggtcgcggtgacgtttcaggcaacgcctctgctgtcagccaataaggagcgggagacgcgtcgggcctgcgctcaatgggccgcgctggtcccgccccactgtgatcgtgagactgcagacccgctaataaaatccaccccaacaatcgctgtgtgccgctttagtgcgctcgccgtcggctctacctgcgtgctttagctccttctcgcctgatccttctgtctctcccaaccccggacacccggcttcgactggttatatcttcggtgttcttttcctctcttcttctttcgcggttcagcatgcaggaaaaagacgcctcctcacaaggtttcctgccacacttccaacatttcgccacgcaggcgatccatgtgggccaggatccagagcaatggacctccagggctgtagtgccccccatctcactgtccaccacgttcaagcaaggggcgcctggccagcactcgggttttgaatatagccgttctggaaatcccactaggaattgccttgaaaaagcagtggcagcactggatggggctaagtactgtttggcctttgcttcaggtttagcagccactgtaactattacccatcttttaaaagcaggagaccaaattatttgtatggatgatgtgtatggaggtacaaacaggtacttcaggcaagtggcatctgaatttggattaaagatttcttttgttgattgttccttgtttggatcgaaacccccacaaaccccacccagaaggtgattgacattgaaggctgtgcacatattgtccataagcatggagacattattttggtcgtggataacacttttatgtcaccatatttccagcgccctttggctctgggagctgatatttctatgtattctgcaacaaaatacatgaatggccacagtgatgttgtaatgggcctggtgtctgttaattgtgaaagccttcataatagacttcgtttcttgcaaaactctcttggagcagttccatctcctattgattgttacctctgcaatcgaggtctgaagactctacatgtccgaatggaaaagcatttcaaaaacggaatggcagttgcccagttcctggaatctaatccttggagaaaggtattatctaggtgccttatcacagatagtgtgacgtatgtcagtgacagatgcacttatataggcacttaatgtagattctagactaagtatacttgcaagctgagtcgagctgtactcgatatgcttgctattagagacaagctgataga

SEQ ID NO: 56521 - DNA, 476 bp, Homo sapiens
aattgcgatcttggttggactgacttatcatctgtaagaaatgtcttgattttctacactatcttgactaatttctcctggagttccattcaattatgcccctcttatttcagactatttgtttatgagtacaatatttcctggagtattgaacccttatcatttgaaagttaccctcccagttttcacagtaagtttttattatcaggaaaagaagctgctttcatgttggaaaaagaatcaccatgagtaatgaccagagtattttcagatcaacatcatcatcatccatttactttaagtaccatttgttatttcatttaatccttacaatgactttacaaggtaagaactcttgccaacaatattattttcagtttgtagacaagaaaggtggggtctagaaagttaggtaccctaaccttctcaggattacagagtaagtgctagaaccagaattaaacctcagttgaccc

SEQ ID NO: 56522 - DNA, 388 bp, Homo sapiens
agttttccaagattgagtgacactattgtaatgagaatcttcactggagcatcagaagaactgatttcaagccagttttgttggtcagcacggtcaaaacttcagaagaatcttgtgctctgaggctttccaaagctttgttccccagggcagtaacagcttccagtgttggcagagtctttagtattatcaccagggcagctgcactgtggcctgtagccatctttctcttttagtacgatcccacctgtcagacttcttgaatttgcacttcaaattagagccacaatcaaattatcagtcacgttgtttatttttgtcaccagagaaaggacagagtcctgttcagcagagttgggagccaggtactgatctctcttcagcaagg

SEQ ID NO: 56523 - DNA, 639 bp, Homo sapiens
ttgtgataaggtttgtgaaaagaaaatttatgaaaggaaatttgcatgtgatcaggttggctataattaaaggaaattacttataagtctttctaaagattgagctttgatattaaattatactaatacaaaactaaaattttggttccctatgttagaataaagcaagtttttcatcaactatcaatttgcttttagtaaaattcagaggttctgaatttttaattctgaaatctgtatcttttaaaacttctcagacttatatctcgggaagttccaacttttactgtaccttgctgcatgtgatttgcaggtcacatgtgattgccttctgttttttaatccctgggaaaggtacatctttttgcttggctgggatggtaactctgtccttcaatgtttttatcaattcctgtaacttttgttctggttctaacactgatgttgtggcctgacactgaaatgttttatcttgaaggtgtagaaaagcaatgttttccttcagtataacttgattctgtactcttgggttttctttataggtctgcattgttcagtataaccaggaaacatccatgttgttactaagagtccctactttgtgtccctacacaaggtactagttttcttgtttacatt

SEQ ID NO: 56524 - DNA, 2873 bp, Homo sapiens
ccactctaaggaatgcggtccctttgacaggcgaaaaactgaagttggaaaagacaaagtgatttgttcaaaattgaaatttgaaacttgacatttggtcagtgggccctatgtaggaaaaaacctccaagagagctagggttcctctcagagaggaaagacaggtccttaggtcctcaccctcccgtctccttgcccttgcagttctgggaactggacagattggacaactataacgacacctccctggtggaaaatcatctctgccctgccacagaggggcccctcatggcctccttcaaggccgtgttcgtgcccgtggcctacagcctcatcttcctcctgggcgtgatcggcaacgtcctggtgctggtgatcctggagcggcaccggcagacacgcagttccacggagaccttcctgttccacctggccgtggccgacctcctgctggtcttcatcttgccctttgccgtggccgagggctctgtgggctgggtcctggggaccttcctctgcaaaactgtgattgccctgcacaaagtcaacttctactgcagcagcctgctcctggcctgcatcgccgtggaccgctacctggccattgtccacgccgtccatgcctaccgccaccgccgcctcctctccatccacatcacctgtgggaccatctggctggtgggcttcctccttgccttgccagagattctcttcgccaaagtcagccaaggccatcacaacaactccctgccacgttgcaccttctcccaagagaaccaagcagaaacgcatgcctggttcacctcccgattcctctaccatgtggcgggattcctgctgcccatgctggtgatgggctggtgctacgtgggggtagtgcacaggttgcgccaggcccagcggcgccctcagcggcagaaggcagtcagggtggccatcctggtgacaagcatcttcttcctctgctggtcaccctaccacatcgtcatcttcctggacaccctggcgaggctgaaggccgtggacaatacctgcaagctgaatggctctctccccgtggccatcaccatgtgtgagttcctgggcctggcccactgctgcctcaaccccatgctctacactttcgccggcgtgaagttccgcagtgacctgtcgcggctcctgacgaagctgggctgtaccggccctgcctccctgtgccagctcttccctagctggcgcaggagcagtctctctgagtcagagaatgccacctctctcaccacgttctaggtcccagtgtccccttttattgctgcttttccttggggcaggcagtgatgctggatgctccttccaacaggagctgggatcctaagggctcaccgtggctaagagtgtcctaggagtatcctcatttggggtagctagaggaaccaacccccatttctagaacatccctgccagctcttctgccggccctggggctaggctggagcccagggagcggaaagcagctcaaaggcacagtgaaggctgtccttacccatctgcacccccctgggctgagagaacctcacgcacctcccatcctaatcatccaatgctcaagaaacaacttctacttctgcccttgccaacggagagcgcctgcccctcccagaacacactccatcagcttaggggctgctgacctccacagcttcccctctctcctcctgcccacctgtcaaacaaagccagaagctgagcaccaggggatgagtggaggttaaggctgaggaaaggccagctggcagcagagtgtggccttcggacaactcagtccctaaaaacacagacattctgccaggcccccaagcctgcagtcatcttgaccaagcaggaagctcagactggttgagttcaggtagctgcccctggctctgaccgaaacagcgctgggtccaccccatgtcaccggatcctgggtggtctgcaggcagggctgactctaggtgcccttggaggccagccagtgacctgaggaagcgtgaaggccgagaagcaagaaagaaacccgacagagggaagaaaagagctttcttcccgaaccccaaggagggagatggatcaatcaaacccggcggtcccctccgccaggcgagatggggtggggtggagaactcctagggtggctgggtccaggggatgggaggttgtgggcattgatggggaaggaggctggcttgtcccctcctcactcccttcccataagctatagacccgaggaaactcagagtcggaacggagaaaggtggactggaaggggcccgtgggagtcatctcaaccatcccctccgtggcatcaccttaggcagggaagtgtaagaaacacactgaggcagggaagtccccaggccccaggaagccgtgccctgcccccgtgaggatgtcactcagatggaaccgcaggaagctgctccgtgcttgtttgctcacctggggtgtgggaggcccgtccggcagttctgggtgctccctaccacctccccagcctttgatcaggtggggagtcagggacccctgcccttgtcccactcaagccaagcagccaagctccttgggaggccccactggggaaataacagctgtggctcacgtgagagtgtcttcacggcaggacaacgaggaagccctaagacgtcccttttttctctgagtatctcctcgcaagctgggtaatcgatgggggagtctgaagcagatgcaaagaggcaagaggctggattttgaattttctttttaataaaaaggcacctataaaacaggtcaatacagtacaggcagcacagagacccccggaacaagcctaaaaattgtttcaaaataaaaaccaagaagatgtcttcaca

SEQ ID NO: 56525 - DNA, 878 bp, Homo sapiens
ggtttcctgagtgatgtcggcctgtgtaaggcccgcggggcctccccccgagtcctcgagaagtcgtgggcgaaggcgtcgagattccctgcccttagggggaatccgctctccgggtggcccgtgtctagacccctgctacacgtattcggagtagctcttcccttcggctgcgccctgcgcttttgtccccggccctttgtgttgcgcccctatgtcacggctttttttcggagaccctctttgggccccgggaccggaccttctctggttccggccattgtgtaaggcgaattcgggccttgggcgggcccccgatcggggggaataatttcgaatttttttttttttttttttgtgtgacttctatcaaaacacagaaatacagcacacgcacaaaccagcacaaaagcgcagcgctctatttacagctccggctggcacctgcccacctggccagccgcctgcagggaggggtgggagaggggtcagccacatcagcagggaaaggatacgaagcaggtaaagacagaaggaaaatgggcgggtgcggagaaaccaagagggaggtggagctccagcaatgcggacacgaggagacaggagcagaaggggctgggggagacctgacctgtccttcctctctccccccagattcccatccaggactccaaaagcatagctgaagggggtgtggcgggtgcagggatgcacggaaagaggtaaaatagagaggctccataggaattgggaggagtgggggaggggcagtcctggtggccgaaatggaaccaaccccaatgcaaaatcccccaccccacactgccacttccccctaagctgccagcacatctggtttccacaaatgccactccctc

SEQ ID NO: 56526 - DNA, 4861 bp, Homo sapiens
ccactctaaggaatgcggtccctttgacaggcgaaaaactgaagttggaaaagacaaagtgatttgttcaaaattgaaatttgaaacttgacatttggtcagtgggccctatgtaggaaaaaacctccaagagagctagggttcctctcagagaggaaagacaggtccttaggtcctcaccctcccgtctccttgcccttgcagttctgggaactggacagattggacaactataacgacacctccctggtggaaaatcatctctgccctgccacagaggggcccctcatggcctccttcaaggccgtgttcgtgcccgtggcctacagcctcatcttcctcctgggcgtgatcggcaacgtcctggtgctggtgatcctggagcggcaccggcagacacgcagttccacggagaccttcctgttccacctggccgtggccgacctcctgctggtcttcatcttgccctttgccgtggccgagggctctgtgggctgggtcctggggaccttcctctgcaaaactgtgattgccctgcacaaagtcaacttctactgcagcagcctgctcctggcctgcatcgccgtggaccgctacctggccattgtccacgccgtccatgcctaccgccaccgccgcctcctctccatccacatcacctgtgggaccatctggctggtgggcttcctccttgccttgccagagattctcttcgccaaagtcagccaaggccatcacaacaactccctgccacgttgcaccttctcccaagagaaccaagcagaaacgcatgcctggttcacctcccgattcctctaccatgtggcgggattcctgctgcccatgctggtgatgggctggtgctacgtgggggtagtgcacaggttgcgccaggcccagcggcgccctcagcggcagaaggcagtcagggtggccatcctggtgacaagcatcttcttcctctgctggtcaccctaccacatcgtcatcttcctggacaccctggcgaggctgaaggccgtggacaatacctgcaagctgaatggctctctccccgtggccatcaccatgtgtgagttcctgggcctggcccactgctgcctcaaccccatgctctacactttcgccggcgtgaagttccgcagtgacctgtcgcggctcctgacgaagctgggctgtaccggccctgcctccctgtgccagctcttccctagctggcgcaggagcagtctctctgagtcagagaatgccacctctctcaccacgttctaggtcccagtgtccccttttattgctgcttttccttggggcaggcagtgatgctggatgctccttccaacaggagctgggatcctaagggctcaccgtggctaagagtgtcctaggagtatcctcatttggggtagctagaggaaccaacccccatttctagaacatccctgccagctcttctgccggccctggggctaggctggagcccagggagcggaaagcagctcaaaggcacagtgaaggctgtccttacccatctgcacccccctgggctgagagaacctcacgcacctcccatcctaatcatccaatgctcaagaaacaacttctacttctgcccttgccaacggagagcgcctgcccctcccagaacacactccatcagcttaggggctgctgacctccacagcttcccctctctcctcctgcccacctgtcaaacaaagccagaagctgagcaccaggggatgagtggaggttaaggctgaggaaaggccagctggcagcagagtgtggccttcggacaactcagtccctaaaaacacagacattctgccaggcccccaagcctgcagtcatcttgaccaagcaggaagctcagactggttgagttcaggtagctgcccctggctctgaccgaaacagcgctgggtccaccccatgtcaccggatcctgggtggtctgcaggcagggctgactctaggtgcccttggaggccagccagtgacctgaggaagcgtgaaggccgagaagcaagaaagaaacccgacagagggaagaaaagagctttcttcccgaaccccaaggagggagatggatcaatcaaacccggcggtcccctccgccaggcgagatggggtggggtggagaactcctagggtggctgggtccaggggatgggaggttgtgggcattgatggggaaggaggctggcttgtcccctcctcactcccttcccataagctatagacccgaggaaactcagagtcggaacggagaaaggtggactggaaggggcccgtgggagtcatctcaaccatcccctccgtggcatcaccttaggcagggaagtgtaagaaacacactgaggcagggaagtccccaggccccaggaagccgtgccctgcccccgtgaggatgtcactcagatggaaccgcaggaagctgctccgtgcttgtttgctcacctggggtgtgggaggcccgtccggcagttctgggtgctccctaccacctccccagcctttgatcaggtggggagtcagggacccctgcccttgtcccactcaagccaagcagccaagctccttgggaggccccactggggaaataacagctgtggctcacgtgagagtgtcttcacggcaggacaacgaggaagccctaagacgtcccttttttctctgagtatctcctcgcaagctgggtaatcgatgggggagtctgaagcagatgcaaagaggcaagaggctggattttgaattttctttttaataaaaaggcacctataaaacaggtcaatacagtacaggcagcacagagacccccggaacaagcctaaaaattgtttcaaaataaaaaccaagaagatgtcttcacatattgtatttatatatttatatttatatatatatttatataatggtacaaaatggctgggggtgtggccatggatggagggaagagtaggctggcctgtggcgcgggtgggaggagaggggacggagagggcactcggcccgctgcaatctgacccctctctcctcagggcaggaaacacagagtcagacagtttgggggggtcttgggccaggggtggagggctcaagggcacagggcccaggctgaggcagggcgggcaaagcgcctggcaggatgaagggcaagtggccccccaaacacagaggccctggccatggaccctgggaggtgaccggggtgagtcaggggcctgttgtcagccccagaggaagcgctggacctggccgatggtgggccgagaggacagcaccaggctgggagaagtggggcgagttccctttgtattacagctgccagtgcaagaccaggccctccaggccaggaaggctagggacgggtcctggtagaagacaccctgtctagaatggcccttggtcctggaggtggggcgcaaaaggcctcagccagggaactgccctgccacctcccgaggcaggaaaggaagtgagaaaaggagaagtttttttactcctggggccaaagtagggggacaaacacccagtcgtatatggcttcagctctgaccaaaggcggatagggagctctcctgggtaggagcagggagccaagggggaggcagtggctgtgcctgggtgggcacagacagatctggtacatggccctgagccctgggcagagggacaaccttgccggtgagtgggcaggcagagaggaggcggcaggatgctgtttccccgattccatcctcagggagtggagactggaggggaggtgcactgactcagatgaactgttctcccccttctttgataagaagtaggtggcagcagcctctggaaaagtcagggccctggaggttacctggcccagggctactacagccacaggccccagtggcaccatgccaccccttccatggctccactcaagggggccacacagccaccgcctcttcctcctttccttcatcccaaactgggacaaaagacttcaagttctggctaagatgtagcagcagcggatgcccgggcatccaaagtggaaagccagggccccgtgtcaccggtgtgggcaaacacacatgcacgtgcacacatgttctccctgaatcactcagcagcagacaggctgccgccctgggggtctcagccctgctagggctcaccaggtggaagcctaggtggtctgacctcagtttaggagtgggtcatttacgtcatcttaccatttggggacgagacaggaatggtatcccttagggacccagagacactgcaaacagtgggtggccatgtagggctgcatgtccctgggtccaggggaatggagggagccataacttgaagaaggggggaagggtttcttttatccttttttttttgtgtgacttctatcaaaacacagaaatacagcacacgcacaaaccagcacaaaagcgcagcgctctatttacagctccggctggcacctgcccacctggccagccgcctgcagggaggggtgggagaggggtcagccacatcagcagggaaaggatacgaagcaggtaaagacagaaggaaaatgggcgggtgcggagaaaccaagagggaggtggagctccagcaatgcggacacgaggagacaggagcagaaggggctgggggagacctgacctgtccttcctctctccccccagattcccatccaggactccaaaagcatagctgaagggggtgtggcgggtgcagggatgcacggaaagaggtaaaatagagaggctccataggaattgggaggagtgggggaggggcagtcctggtggccgaaatggaaccaaccccaatgcaaaatcccccaccccacatatttggagttgttttaccc

SEQ ID NO: 56527 - DNA, 1878 bp, Homo sapiens
  misc_feature (48)..(48): n is a, c, g, or t
aaatttaaaaggttaaggacagattacggggaactccctggcaggaanctcagaaatgatctcggcagtgacgccattggcttgagaatgggatgtgggaatggcagggcgggcaaagcgcctggcaggatgaagggcaagtggccccccaaacacagaggccctggccatggaccctgggaggtgaccggggtgagtcaggggcctgttgtcagccccagaggaagcgctggacctggccgatggtgggccgagaggacagcaccaggctgggagaagtggggcgagttccctttgtattacagctgccagtgcaagaccaggccctccaggccaggaaggctagggacgggtcctggtagaagacaccctgtctagaatggcccttggtcctggaggtggggcgcaaaaggcctcagccagggaactgccctgccacctcccgaggcaggaaaggaagtgagaaaaggagaagtttttttactcctggggccaaagtagggggacaaacacccagtcgtatatggcttcagctctgaccaaaggcggatagggagctctcctgggtaggagcagggagccaagggggaggcagtggctgtgcctgggtgggcacagacagatctggtacatggccctgagccctgggcagagggacaaccttgccggtgagtgggcaggcagagaggaggcggcaggatgctgtttccccgattccatcctcagggagtggagactggaggggaggtgcactgactcagatgaactgttctcccccttctttgataagaagtaggtggcagcagcctctggaaaagtcagggccctggaggttacctggcccagggctactacagccacaggccccagtggcaccatgccaccccttccatggctccactcaagggggccacacagccaccgcctcttcctcctttccttcatcccaaactgggacaaaagacttcaagttctggctaagatgtagcagcagcggatgcccgggcatccaaagtggaaagccagggccccgtgtcaccggtgtgggcaaacacacatgcacgtgcacacatgttctccctgaatcactcagcagcagacaggctgccgccctgggggtctcagccctgctagggctcaccaggtggaagcctaggtggtctgacctcagtttaggagtgggtcatttacgtcatcttaccatttggggacgagacaggaatggtatcccttagggacccagagacactgcaaacagtgggtggccatgtagggctgcatgtccctgggtccaggggaatggagggagccataacttgaagaaggggggaagggtttcttttatccttttttttttgtgtgacttctatcaaaacacagaaatacagcacacgcacaaaccagcacaaaagcgcagcgctctatttacagctccggctggcacctgcccacctggccagccgcctgcagggaggggtgggagaggggtcagccacatcagcagggaaaggatacgaagcaggtaaagacagaaggaaaatgggcgggtgcggagaaaccaagagggaggtggagctccagcaatgcggacacgaggagacaggagcagaaggggctgggggagacctgacctgtccttcctctctccccccagattcccatccaggactccaaaagcatagctgaagggggtgtggcgggtgcagggatgcacggaaagaggtaaaatagagaggctccataggaattgggaggagtgggggaggggcagtcctggtggccgaaatggaaccaaccccaatgcaaaatcccccaccccacactgccacttccccctaagctgccagcacatctggtttccacaaatgccactccctc

SEQ ID NO: 56528 - DNA, 2810 bp, Homo sapiens
ctgacggctgccacctctctagaggcacctggcggggagcctctcaacataagacagtgaccagtctggtgactcacagccggcacagccatgaactacccgctaacgctggaaatggacctcgagaacctggaggacctgttctgggaactggacagattggacaactataacgacacctccctggtggaaaatcatctctgccctgccacagaggggcccctcatggcctccttcaaggccgtgttcgtgcccgtggcctacagcctcatcttcctcctgggcgtgatcggcaacgtcctggtgctggtgatcctggagcggcaccggcagacacgcagttccacggagaccttcctgttccacctggccgtggccgacctcctgctggtcttcatcttgccctttgccgtggccgagggctctgtgggctgggtcctggggaccttcctctgcaaaactgtgattgccctgcacaaagtcaacttctactgcagcagcctgctcctggcctgcatcgccgtggaccgctacctggccattgtccacgccgtccatgcctaccgccaccgccgcctcctctccatccacatcacctgtgggaccatctggctggtgggcttcctccttgccttgccagagattctcttcgccaaagtcagccaaggccatcacaacaactccctgccacgttgcaccttctcccaagagaaccaagcagaaacgcatgcctggttcacctcccgattcctctaccatgtggcgggattcctgctgcccatgctggtgatgggctggtgctacgtgggggtagtgcacaggttgcgccaggcccagcggcgccctcagcggcagaaggcagtcagggtggccatcctggtgacaagcatcttcttcctctgctggtcaccctaccacatcgtcatcttcctggacaccctggcgaggctgaaggccgtggacaatacctgcaagctgaatggctctctccccgtggccatcaccatgtgtgagttcctgggcctggcccactgctgcctcaaccccatgctctacactttcgccggcgtgaagttccgcagtgacctgtcgcggctcctgacgaagctgggctgtaccggccctgcctccctgtgccagctcttccctagctggcgcaggagcagtctctctgagtcagagaatgccacctctctcaccacgttctaggtcccagtgtccccttttattgctgcttttccttggggcaggcagtgatgctggatgctccttccaacaggagctgggatcctaagggctcaccgtggctaagagtgtcctaggagtatcctcatttggggtagctagaggaaccaacccccatttctagaacatccctgccagctcttctgccggccctggggctaggctggagcccagggagcggaaagcagctcaaaggcacagtgaaggctgtccttacccatctgcacccccctgggctgagagaacctcacgcacctcccatcctaatcatccaatgctcaagaaacaacttctacttctgcccttgccaacggagagcgcctgcccctcccagaacacactccatcagcttaggggctgctgacctccacagcttcccctctctcctcctgcccacctgtcaaacaaagccagaagctgagcaccaggggatgagtggaggttaaggctgaggaaaggccagctggcagcagagtgtggccttcggacaactcagtccctaaaaacacagacattctgccaggcccccaagcctgcagtcatcttgaccaagcaggaagctcagactggttgagttcaggtagctgcccctggctctgaccgaaacagcgctgggtccaccccatgtcaccggatcctgggtggtctgcaggcagggctgactctaggtgcccttggaggccagccagtgacctgaggaagcgtgaaggccgagaagcaagaaagaaacccgacagagggaagaaaagagctttcttcccgaaccccaaggagggagatggatcaatcaaacccggcggtcccctccgccaggcgagatggggtggggtggagaactcctagggtggctgggtccaggggatgggaggttgtgggcattgatggggaaggaggctggcttgtcccctcctcactcccttcccataagctatagacccgaggaaactcagagtcggaacggagaaaggtggactggaaggggcccgtgggagtcatctcaaccatcccctccgtggcatcaccttaggcagggaagtgtaagaaacacactgaggcagggaagtccccaggccccaggaagccgtgccctgcccccgtgaggatgtcactcagatggaaccgcaggaagctgctccgtgcttgtttgctcacctggggtgtgggaggcccgtccggcagttctgggtgctccctaccacctccccagcctttgatcaggtggggagtcagggacccctgcccttgtcccactcaagccaagcagccaagctccttgggaggccccactggggaaataacagctgtggctcacgtgagagtgtcttcacggcaggacaacgaggaagccctaagacgtcccttttttctctgagtatctcctcgcaagctgggtaatcgatgggggagtctgaagcagatgcaaagaggcaagaggctggattttgaattttctttttaataaaaaggcacctataaaacaggtcaatacagtacaggcagcacagagacccccggaacaagcctaaaaattgtttcaaaataaaaaccaagaagatgtcttcaca

SEQ ID NO: 56529 - DNA, 4897 bp, Homo sapiens
ccactctaaggaatgcggtccctttgacaggcgaaaaactgaagttggaaaagacaaagtgatttgttcaaaattgaaatttgaaacttgacatttggtcagtgggccctatgtaggaaaaaacctccaagagagctagggttcctctcagagaggaaagacaggtccttaggtcctcaccctcccgtctccttgcccttgcagttctgggaactggacagattggacaactataacgacacctccctggtggaaaatcatctctgccctgccacagaggggcccctcatggcctccttcaaggccgtgttcgtgcccgtggcctacagcctcatcttcctcctgggcgtgatcggcaacgtcctggtgctggtgatcctggagcggcaccggcagacacgcagttccacggagaccttcctgttccacctggccgtggccgacctcctgctggtcttcatcttgccctttgccgtggccgagggctctgtgggctgggtcctggggaccttcctctgcaaaactgtgattgccctgcacaaagtcaacttctactgcagcagcctgctcctggcctgcatcgccgtggaccgctacctggccattgtccacgccgtccatgcctaccgccaccgccgcctcctctccatccacatcacctgtgggaccatctggctggtgggcttcctccttgccttgccagagattctcttcgccaaagtcagccaaggccatcacaacaactccctgccacgttgcaccttctcccaagagaaccaagcagaaacgcatgcctggttcacctcccgattcctctaccatgtggcgggattcctgctgcccatgctggtgatgggctggtgctacgtgggggtagtgcacaggttgcgccaggcccagcggcgccctcagcggcagaaggcagtcagggtggccatcctggtgacaagcatcttcttcctctgctggtcaccctaccacatcgtcatcttcctggacaccctggcgaggctgaaggccgtggacaatacctgcaagctgaatggctctctccccgtggccatcaccatgtgtgagttcctgggcctggcccactgctgcctcaaccccatgctctacactttcgccggcgtgaagttccgcagtgacctgtcgcggctcctgacgaagctgggctgtaccggccctgcctccctgtgccagctcttccctagctggcgcaggagcagtctctctgagtcagagaatgccacctctctcaccacgttctaggtcccagtgtccccttttattgctgcttttccttggggcaggcagtgatgctggatgctccttccaacaggagctgggatcctaagggctcaccgtggctaagagtgtcctaggagtatcctcatttggggtagctagaggaaccaacccccatttctagaacatccctgccagctcttctgccggccctggggctaggctggagcccagggagcggaaagcagctcaaaggcacagtgaaggctgtccttacccatctgcacccccctgggctgagagaacctcacgcacctcccatcctaatcatccaatgctcaagaaacaacttctacttctgcccttgccaacggagagcgcctgcccctcccagaacacactccatcagcttaggggctgctgacctccacagcttcccctctctcctcctgcccacctgtcaaacaaagccagaagctgagcaccaggggatgagtggaggttaaggctgaggaaaggccagctggcagcagagtgtggccttcggacaactcagtccctaaaaacacagacattctgccaggcccccaagcctgcagtcatcttgaccaagcaggaagctcagactggttgagttcaggtagctgcccctggctctgaccgaaacagcgctgggtccaccccatgtcaccggatcctgggtggtctgcaggcagggctgactctaggtgcccttggaggccagccagtgacctgaggaagcgtgaaggccgagaagcaagaaagaaacccgacagagggaagaaaagagctttcttcccgaaccccaaggagggagatggatcaatcaaacccggcggtcccctccgccaggcgagatggggtggggtggagaactcctagggtggctgggtccaggggatgggaggttgtgggcattgatggggaaggaggctggcttgtcccctcctcactcccttcccataagctatagacccgaggaaactcagagtcggaacggagaaaggtggactggaaggggcccgtgggagtcatctcaaccatcccctccgtggcatcaccttaggcagggaagtgtaagaaacacactgaggcagggaagtccccaggccccaggaagccgtgccctgcccccgtgaggatgtcactcagatggaaccgcaggaagctgctccgtgcttgtttgctcacctggggtgtgggaggcccgtccggcagttctgggtgctccctaccacctccccagcctttgatcaggtggggagtcagggacccctgcccttgtcccactcaagccaagcagccaagctccttgggaggccccactggggaaataacagctgtggctcacgtgagagtgtcttcacggcaggacaacgaggaagccctaagacgtcccttttttctctgagtatctcctcgcaagctgggtaatcgatgggggagtctgaagcagatgcaaagaggcaagaggctggattttgaattttctttttaataaaaaggcacctataaaacaggtcaatacagtacaggcagcacagagacccccggaacaagcctaaaaattgtttcaaaataaaaaccaagaagatgtcttcacatattgtatttatatatttatatttatatatatatttatataatggtacaaaatggctgggggtgtggccatggatggagggaagagtaggctggcctgtggcgcgggtgggaggagaggggacggagagggcactcggcccgctgcaatctgacccctctctcctcagggcaggaaacacagagtcagacagtttgggggggtcttgggccaggggtggagggctcaagggcacagggcccaggctgaggcagggcgggcaaagcgcctggcaggatgaagggcaagtggccccccaaacacagaggccctggccatggaccctgggaggtgaccggggtgagtcaggggcctgttgtcagccccagaggaagcgctggacctggccgatggtgggccgagaggacagcaccaggctgggagaagtggggcgagttccctttgtattacagctgccagtgcaagaccaggccctccaggccaggaaggctagggacgggtcctggtagaagacaccctgtctagaatggcccttggtcctggaggtggggcgcaaaaggcctcagccagggaactgccctgccacctcccgaggcaggaaaggaagtgagaaaaggagaagtttttttactcctggggccaaagtagggggacaaacacccagtcgtatatggcttcagctctgaccaaaggcggatagggagctctcctgggtaggagcagggagccaagggggaggcagtggctgtgcctgggtgggcacagacagatctggtacatggccctgagccctgggcagagggacaaccttgccggtgagtgggcaggcagagaggaggcggcaggatgctgtttccccgattccatcctcagggagtggagactggaggggaggtgcactgactcagatgaactgttctcccccttctttgataagaagtaggtggcagcagcctctggaaaagtcagggccctggaggttacctggcccagggctactacagccacaggccccagtggcaccatgccaccccttccatggctccactcaagggggccacacagccaccgcctcttcctcctttccttcatcccaaactgggacaaaagacttcaagttctggctaagatgtagcagcagcggatgcccgggcatccaaagtggaaagccagggccccgtgtcaccggtgtgggcaaacacacatgcacgtgcacacatgttctccctgaatcactcagcagcagacaggctgccgccctgggggtctcagccctgctagggctcaccaggtggaagcctaggtggtctgacctcagtttaggagtgggtcatttacgtcatcttaccatttggggacgagacaggaatggtatcccttagggacccagagacactgcaaacagtgggtggccatgtagggctgcatgtccctgggtccaggggaatggagggagccataacttgaagaaggggggaagggtttcttttatccttttttttttgtgtgacttctatcaaaacacagaaatacagcacacgcacaaaccagcacaaaagcgcagcgctctatttacagctccggctggcacctgcccacctggccagccgcctgcagggaggggtgggagaggggtcagccacatcagcagggaaaggatacgaagcaggtaaagacagaaggaaaatgggcgggtgcggagaaaccaagagggaggtggagctccagcaatgcggacacgaggagacaggagcagaaggggctgggggagacctgacctgtccttcctctctccccccagattcccatccaggactccaaaagcatagctgaagggggtgtggcgggtgcagggatgcacggaaagaggtaaaatagagaggctccataggaattgggaggagtgggggaggggcagtcctggtggccgaaatggaaccaaccccaatgcaaaatcccccaccccacactgccacttccccctaagctgccagcacatctggtttccacaaatgccactccctc

SEQ ID NO: 56530 - DNA, 1688 bp, Homo sapiens
tcgacccctgactcaccccggtcacccccagaggaagcgctggacctggccgatggtgggccgagaggacagcaccaggctgggagaagtggggcgagttccctttgtattacagctgccagtgcaagaccaggccctccaggccaggaaggctagggacgggtcctggtagaagacaccctgtctagaatggcccttggtcctggaggtggggcgcaaaaggcctcagccagggaactgccctgccacctcccgaggcaggaaaggaagtgagaaaaggagaagtttttttactcctggggccaaagtagggggacaaacacccagtcgtatatggcttcagctctgaccaaaggcggatagggagctctcctgggtaggagcagggagccaagggggaggcagtggctgtgcctgggtgggcacagacagatctggtacatggccctgagccctgggcagagggacaaccttgccggtgagtgggcaggcagagaggaggcggcaggatgctgtttccccgattccatcctcagggagtggagactggaggggaggtgcactgactcagatgaactgttctcccccttctttgataagaagtaggtggcagcagcctctggaaaagtcagggccctggaggttacctggcccagggctactacagccacaggccccagtggcaccatgccaccccttccatggctccactcaagggggccacacagccaccgcctcttcctcctttccttcatcccaaactgggacaaaagacttcaagttctggctaagatgtagcagcagcggatgcccgggcatccaaagtggaaagccagggccccgtgtcaccggtgtgggcaaacacacatgcacgtgcacacatgttctccctgaatcactcagcagcagacaggctgccgccctgggggtctcagccctgctagggctcaccaggtggaagcctaggtggtctgacctcagtttaggagtgggtcatttacgtcatcttaccatttggggacgagacaggaatggtatcccttagggacccagagacactgcaaacagtgggtggccatgtagggctgcatgtccctgggtccaggggaatggagggagccataacttgaagaaggggggaagggtttcttttatccttttttttttgtgtgacttctatcaaaacacagaaatacagcacacgcacaaaccagcacaaaagcgcagcgctctatttacagctccggctggcacctgcccacctggccagccgcctgcagggaggggtgggagaggggtcagccacatcagcagggaaaggatacgaagcaggtaaagacagaaggaaaatgggcgggtgcggagaaaccaagagggaggtggagctccagcaatgcggacacgaggagacaggagcagaaggggctgggggagacctgacctgtccttcctctctccccccagattcccatccaggactccaaaagcatagctgaagggggtgtggcgggtgcagggatgcacggaaagaggtaaaatagagaggctccataggaattgggaggagtgggggaggggcagtcctggtggccgaaatggaaccaaccccaatgcaaaatcccccaccccacactgccacttccccctaagctgccagcacatctggtttccacaaatgccactccctc

SEQ ID NO: 56531 - DNA, 192 bp, Homo sapiens
acttggatggtgagaaggggccatcatcggaagggcctgaggaggaggacggagaaggcttctccttcaaatacagccccgggaagctgaggggaaaccagtacaagaagatgatgaccaaagaggagctggaggaggagcagagaactgaagaataacgaagttatccttagcgtcctcctaaaggctttt

SEQ ID NO: 56532 - DNA, 325 bp, Homo sapiens
gattgtgaagggtctttaggctgaactacaaattagcacaaaatatatagataaatagtatgtgtcttaaccagaaggatttagtttgacagataagttttactagacgctgtggaaggtgcatggaagtttaagaaatggttcctcaccttgtgccaagtatagtctggttggagagataaacatgtaacatttagtgacaatactagatacatttgttaagtgttgttggagttcagaggaggcaaaggccactgtgtattggtgtgattgaagaagccctctcagaggaggtaagatttaaatgttcttttaatactaccta

SEQ ID NO: 56533 - DNA, 308 bp, Homo sapiens
cataagacaacccgtagagctctttactttgtatatttaggacagttcaaaataaggcttttgaggcttcaacacactccagaaaatccacccaaaactgcacgttttaggttcacagtagattagtttgtcttagagagagaaacattactctccttaacaaggtggaaatttttatttgatttttttcttgatggcctttttcttttggaattttggtcttttaaagaaattaagtatgattttaaaaatctttggtgcctcagctagtttaattttaatacaattaattctggggaaaataattg

SEQ ID NO: 56534 - DNA, 509 bp, Homo sapiens
gcacgatctcagcgcactgcaagctccgcctgccgggttcacgtcattctcctgcctcagcctcctaagtagctgggactacaggcgcccgccatgacgcctggctaactttttgtatttttagtagagacagggtttcactgtgttagccaggatggtctcaatctcctgacctcatgatctgcccgccttggtctcccaaagtgctgggaatacaggtgtgagccactgcacccggccaaaaaaaattgtttttaagtatgattcaggctgaggtgggtggatcacttgagctcaggagttcaagaccagtctgagcaacatggccaaacgccatctctacaaaaaatacaaaacttagccaggtgtggtggtgggcacctgtagtccccagctacttggaagactgaggtggggggatggcttatgcccagggggtggaggttatagtgagccgtgatcatgccactccaccatgtcagtctgggtgacaaggcagaccctgtctc

SEQ ID NO: 56535 - DNA, 4237 bp, Homo sapiens
  misc_feature (2562)..(2562): n is a, c, g, or t
  misc_feature (2898)..(2898): n is a, c, g, or t
  misc_feature (4236)..(4236): n is a, c, g, or t
caccggcgccgcgtcagcccccaggccgcctgcaggtgtgcgctcagaactagcacgtgtgccggacactatttaagggcccgcctctcctggctcacagctgcttgctgctccagccttgccctcccagagctgccggacgctcgcgggtctcggaacgcatcccgccgcgggggcttcggccgtggcatgggcgccgcgggcctgctcggggttttcttggctctcgtcgcaccgggggtcctcgggatttcttgtggctctcctccgcctatcctaaatggccggattagttattattctacccccattgctgttggtaccgtgataaggtacagttgttcaggtaccttccgcctcattggagaaaaaagtctattatgcataactaaagacaaagtggatggaacctgggataaacctgctcctaaatgtgaatatttcaataaatattcttcttgccctgagcccatagtaccaggaggatacaaaattagaggctctacaccctacagacatggtgattctgtgacatttgcctgtaaaaccaacttctccatgaacggaaacaagtctgtttggtgtcaagcaaataatatgtgggggccgacacgactaccaacctgtgtaagtgttttccctctcgagtgtccagcacttcctatgatccacaatggacatcacacaagtgagaatgttggctccattgctccaggattgtctgtgacttacagctgtgaatctggttacttgcttgttggagaaaagatcattaactgtttgtcttcgggaaaatggagtgctgtcccccccacatgtgaagaggcacgctgtaaatctctaggacgatttcccaatgggaaggtaaaggagcctccaattctccgggttggtgtaactgcaaactttttctgtgatgaagggtatcgactgcaaggcccaccttctagtcggtgtgtaattgctggacagggagttgcttggaccaaaatgccagtatgtgaagaaattttttgcccatcacctccccctattctcaatggaagacatataggcaactcactagcaaatgtctcatatggaagcatagtcacttacacttgtgacccggacccagaggaaggagtgaacttcatccttattggagagagcactctccgttgtacagttgatagtcagaagactgggacctggagtggccctgccccacgctgtgaactttctacttctgcggttcagtgtccacatccccagatcctaagaggccgaatggtatctgggcagaaagatcgatatacctataacgacactgtgatatttgcttgcatgtttggcttcaccttgaagggcagcaagcaaatccgatgcaatgcccaaggcacatgggagccatctgcaccagtctgtgaaaaggaatgccaggcccctcctaacatcctcaatgggcaaaaggaagatagacacatggtccgctttgaccctggaacatctataaaatatagctgtaaccctggctatgtgctggtgggagaagaatccatacagtgtacctctgagggggtgtggacaccccctgtaccccaatgcaaagtggcagcgtgtgaagctacaggaaggcaactcttgacaaaaccccagcaccaatttgttagaccagatgtcaactcttcttgtggtgaagggtacaagttaagtgggagtgtttatcaggagtgtcaaggcacaattccttggtttatggagattcgtctttgtaaagaaatcacctgcccaccaccccctgttatctacaatggggcacacaccgggagttccttagaagattttccatatggaaccacggtcacttacacatgtaaccctgggccagaaagaggagtggaattcagcctcattggagagagcaccatccgttgtacaagcaatgatcaagaaagaggcacctggagtggccctgctcccctatgtaaactttccctccttgctgtccagtgctcacatgtccatattgcaaatggatacaagatatctggcaaggaagccccatatttctacaatgacactgtgacattcaagtgttatagtggatttactttgaagggcagtagtcagattcgttgcaaagctgataacacctgggatcctgaaataccagtttgtgaaaaaggctgccagccacctcctgggctccaccatggtcgtcatacaggtggaaatacggtcttctttgtctctgggatgactgtagactacacttgtgaccctggctatttgcttgtgggaaacaaatccattcactgtatgccttcaggaaattggagtccttctgccccacggtgtgaagaaacatgccagcatgtgagacagagtcttcaagaacttccagctggttcacgtgtggagctagttaatacgtcctgccaagatgggtaccagttgactggacatgcttatcagatgtgtcaagatgctgaaaatggaatttggttcaaaaagattccactttgtaaagttattcactgtcaccctccaccagtgattgtcaatgggaagcacacaggnatgatggcagaaaactttctatatggaaatgaagtctcttatgaatgtgaccaaggattctatctcctgggagagaaaaaattgcagtgcagaagtgattctaaaggacatggatcttggagcgggccttccccacagtgcttacgatctcctcctgtgactcgctgccctaatccagaagtcaaacatgggtacaagctcaataaaacacattctgcatattcccacaatgacatagtgtatgttgactgcaatcctggcttcatcatgaatggtagtcgcgtgattaggtgtcatactgataacacatgggtgccaggtgtgccaacttgtatnaaaaaagccttcatagggtgtccacctccgcctaagacccctaacgggaaccatactggtggaaacatagctcgattttctcctggaatgtcaatcctgtacagctgtgaccaaggctacctgctggtgggagaggcactccttctttgcacacatgagggaacctggagccaacctgcccctcattgtaaagaggtaaactgtagctcaccagcagatatggatggaatccagaaagggctggaaccaaggaaaatgtatcagtatggagctgttgtaactctggagtgtgaagatgggtatatgctggaaggcagtccccagagccagtgccaatcggatcaccaatggaaccctcccctggcggtttgcagatcccgttcacttgctcctgtcctttgtggtattgctgcaggtttgatacttcttaccttcttgattgtcattaccttatacgtgatatcaaaacacagagaacgcaattattatacagatacaagccagaaagaagcttttcatttagaagcacgagaagtatattctgttgatccatacaacccagccagctgatcagaagacaaactggtgtgtgcctcattgcttggaattcagcggaatattgattagaaagaaactgctctaatatcagcaagtctctttatatggcctcaagatcaatgaaatgatgtcataagcgatcacttcctatatgcacttattctcaagaagaacatctttatggtaaagatgggagcccagtttcactgccatatactcttcaaggactttctgaagcctcacttatgagatgcctgaagccaggccatggctataaacaattacatggctctaaaaagttttgccctttttaaggaaggcactaaaaagagctgtcctggtatctagacccatcttctttttgaaatcagcatactcaatgttactatctgcttttggttataatgtgtttttaattatctaaagtatgaagcattttctggggttatgatggccttacctttattaggaagtatggttttattttgatagtagcttcctcctctggtggtgttaatcatttcatttttacccttacttggtttgagtttctctcacattactgtatatactttgcctttccataatcactcagtgattgcaatttgcacaagtttttttaaattatgggaatcaagatttaatcctagagatttggtgtacaattcaggctttggatgtttctttagcagttttgtgataagttctagttgcttgtaaaatttcacttaataatgtgtacattagtcattcaataaattgtaattgtaaagaaaacana

SEQ ID NO: 56536 - DNA, 4223 bp, Homo sapiens
  misc_feature (2548)..(2548): n is a, c, g, or t
  misc_feature (2884)..(2884): n is a, c, g, or t
  misc_feature (4222)..(4222): n is a, c, g, or t
acacagctattgaatgaccgtggggagttgaaactaggtccactgagctcaaatttccctaatccatggtacctccccacatgtaactatcatgccactaatatgttattttcatgtgctgaatttgccttttgtttcattattaaaattgattagactcagaacttttggatatattcttttcattattattgtttggtcaagatgatttatgttgatctgtttgctgaggatgaagaaaaaggtaagaatttaggagtttgggagtaagcagggaataaataaactatacatatttctaagtctgtttctgaaaaagttatgtgatctatatttggatattttacctacatttgaatattttctcaccatgatcagtatgcctaccaagttccttttctacttttcagggatttcttgtggctctcctccgcctatcctaaatggccggattagttattattctacccccattgctgttggtaccgtgataaggtacagttgttcaggtaccttccgcctcattggagaaaaaagtctattatgcataactaaagacaaagtggatggaacctgggataaacctgctcctaaatgtgaatatttcaataaatattcttcttgccctgagcccatagtaccaggaggatacaaaattagaggctctacaccctacagacatggtgattctgtgacatttgcctgtaaaaccaacttctccatgaacggaaacaagtctgtttggtgtcaagcaaataatatgtgggggccgacacgactaccaacctgtgtaagtgttttccctctcgagtgtccagcacttcctatgatccacaatggacatcacacaagtgagaatgttggctccattgctccaggattgtctgtgacttacagctgtgaatctggttacttgcttgttggagaaaagatcattaactgtttgtcttcgggaaaatggagtgctgtcccccccacatgtgaagaggcacgctgtaaatctctaggacgatttcccaatgggaaggtaaaggagcctccaattctccgggttggtgtaactgcaaactttttctgtgatgaagggtatcgactgcaaggcccaccttctagtcggtgtgtaattgctggacagggagttgcttggaccaaaatgccagtatgtgaagaaattttttgcccatcacctccccctattctcaatggaagacatataggcaactcactagcaaatgtctcatatggaagcatagtcacttacacttgtgacccggacccagaggaaggagtgaacttcatccttattggagagagcactctccgttgtacagttgatagtcagaagactgggacctggagtggccctgccccacgctgtgaactttctacttctgcggttcagtgtccacatccccagatcctaagaggccgaatggtatctgggcagaaagatcgatatacctataacgacactgtgatatttgcttgcatgtttggcttcaccttgaagggcagcaagcaaatccgatgcaatgcccaaggcacatgggagccatctgcaccagtctgtgaaaaggaatgccaggcccctcctaacatcctcaatgggcaaaaggaagatagacacatggtccgctttgaccctggaacatctataaaatatagctgtaaccctggctatgtgctggtgggagaagaatccatacagtgtacctctgagggggtgtggacaccccctgtaccccaatgcaaagtggcagcgtgtgaagctacaggaaggcaactcttgacaaaaccccagcaccaatttgttagaccagatgtcaactcttcttgtggtgaagggtacaagttaagtgggagtgtttatcaggagtgtcaaggcacaattccttggtttatggagattcgtctttgtaaagaaatcacctgcccaccaccccctgttatctacaatggggcacacaccgggagttccttagaagattttccatatggaaccacggtcacttacacatgtaaccctgggccagaaagaggagtggaattcagcctcattggagagagcaccatccgttgtacaagcaatgatcaagaaagaggcacctggagtggccctgctcccctatgtaaactttccctccttgctgtccagtgctcacatgtccatattgcaaatggatacaagatatctggcaaggaagccccatatttctacaatgacactgtgacattcaagtgttatagtggatttactttgaagggcagtagtcagattcgttgcaaagctgataacacctgggatcctgaaataccagtttgtgaaaaagaaacatgccagcatgtgagacagagtcttcaagaacttccagctggttcacgtgtggagctagttaatacgtcctgccaagatgggtaccagttgactggacatgcttatcagatgtgtcaagatgctgaaaatggaatttggttcaaaaagattccactttgtaaagttattcactgtcaccctccaccagtgattgtcaatgggaagcacacaggnatgatggcagaaaactttctatatggaaatgaagtctcttatgaatgtgaccaaggattctatctcctgggagagaaaaaattgcagtgcagaagtgattctaaaggacatggatcttggagcgggccttccccacagtgcttacgatctcctcctgtgactcgctgccctaatccagaagtcaaacatgggtacaagctcaataaaacacattctgcatattcccacaatgacatagtgtatgttgactgcaatcctggcttcatcatgaatggtagtcgcgtgattaggtgtcatactgataacacatgggtgccaggtgtgccaacttgtatnaaaaaagccttcatagggtgtccacctccgcctaagacccctaacgggaaccatactggtggaaacatagctcgattttctcctggaatgtcaatcctgtacagctgtgaccaaggctacctgctggtgggagaggcactccttctttgcacacatgagggaacctggagccaacctgcccctcattgtaaagaggtaaactgtagctcaccagcagatatggatggaatccagaaagggctggaaccaaggaaaatgtatcagtatggagctgttgtaactctggagtgtgaagatgggtatatgctggaaggcagtccccagagccagtgccaatcggatcaccaatggaaccctcccctggcggtttgcagatcccgttcacttgctcctgtcctttgtggtattgctgcaggtttgatacttcttaccttcttgattgtcattaccttatacgtgatatcaaaacacagagaacgcaattattatacagatacaagccagaaagaagcttttcatttagaagcacgagaagtatattctgttgatccatacaacccagccagctgatcagaagacaaactggtgtgtgcctcattgcttggaattcagcggaatattgattagaaagaaactgctctaatatcagcaagtctctttatatggcctcaagatcaatgaaatgatgtcataagcgatcacttcctatatgcacttattctcaagaagaacatctttatggtaaagatgggagcccagtttcactgccatatactcttcaaggactttctgaagcctcacttatgagatgcctgaagccaggccatggctataaacaattacatggctctaaaaagttttgccctttttaaggaaggcactaaaaagagctgtcctggtatctagacccatcttctttttgaaatcagcatactcaatgttactatctgcttttggttataatgtgtttttaattatctaaagtatgaagcattttctggggttatgatggccttacctttattaggaagtatggttttattttgatagtagcttcctcctctggtggtgttaatcatttcatttttacccttacttggtttgagtttctctcacattactgtatatactttgcctttccataatcactcagtgattgcaatttgcacaagtttttttaaattatgggaatcaagatttaatcctagagatttggtgtacaattcaggctttggatgtttctttagcagttttgtgataagttctagttgcttgtaaaatttcacttaataatgtgtacattagtcattcaataaattgtaattgtaaagaaaacana

SEQ ID NO: 56537 - DNA, 2753 bp, Homo sapiens
  misc_feature (1078)..(1078): n is a, c, g, or t
  misc_feature (1414)..(1414): n is a, c, g, or t
  misc_feature (2752)..(2752): n is a, c, g, or t
tagaggatcccctcacgatgtgggttcgctggtcgtgtctgacgtggggattccgatgtcatgccgtgctacattggcagccactggccccaatgtctgtgaaaaggaatgccaggcccctcctaacatcctcaatgggcaaaaggaagatagacacatggtccgctttgaccctggaacatctataaaatatagctgtaaccctggctatgtgctggtgggagaagaatccatacagtgtacctctgagggggtgtggacaccccctgtaccccaatgcaaagtggcagcgtgtgaagctacaggaaggcaactcttgacaaaaccccagcaccaatttgttagaccagatgtcaactcttcttgtggtgaagggtacaagttaagtgggagtgtttatcaggagtgtcaaggcacaattccttggtttatggagattcgtctttgtaaagaaatcacctgcccaccaccccctgttatctacaatggggcacacaccgggagttccttagaagattttccatatggaaccacggtcacttacacatgtaaccctgggccagaaagaggagtggaattcagcctcattggagagagcaccatccgttgtacaagcaatgatcaagaaagaggcacctggagtggccctgctcccctatgtaaactttccctccttgctgtccagtgctcacatgtccatattgcaaatggatacaagatatctggcaaggaagccccatatttctacaatgacactgtgacattcaagtgttatagtggatttactttgaagggcagtagtcagattcgttgcaaagctgataacacctgggatcctgaaataccagtttgtgaaaaagaaacatgccagcatgtgagacagagtcttcaagaacttccagctggttcacgtgtggagctagttaatacgtcctgccaagatgggtaccagttgactggacatgcttatcagatgtgtcaagatgctgaaaatggaatttggttcaaaaagattccactttgtaaagttattcactgtcaccctccaccagtgattgtcaatgggaagcacacaggnatgatggcagaaaactttctatatggaaatgaagtctcttatgaatgtgaccaaggattctatctcctgggagagaaaaaattgcagtgcagaagtgattctaaaggacatggatcttggagcgggccttccccacagtgcttacgatctcctcctgtgactcgctgccctaatccagaagtcaaacatgggtacaagctcaataaaacacattctgcatattcccacaatgacatagtgtatgttgactgcaatcctggcttcatcatgaatggtagtcgcgtgattaggtgtcatactgataacacatgggtgccaggtgtgccaacttgtatnaaaaaagccttcatagggtgtccacctccgcctaagacccctaacgggaaccatactggtggaaacatagctcgattttctcctggaatgtcaatcctgtacagctgtgaccaaggctacctgctggtgggagaggcactccttctttgcacacatgagggaacctggagccaacctgcccctcattgtaaagaggtaaactgtagctcaccagcagatatggatggaatccagaaagggctggaaccaaggaaaatgtatcagtatggagctgttgtaactctggagtgtgaagatgggtatatgctggaaggcagtccccagagccagtgccaatcggatcaccaatggaaccctcccctggcggtttgcagatcccgttcacttgctcctgtcctttgtggtattgctgcaggtttgatacttcttaccttcttgattgtcattaccttatacgtgatatcaaaacacagagaacgcaattattatacagatacaagccagaaagaagcttttcatttagaagcacgagaagtatattctgttgatccatacaacccagccagctgatcagaagacaaactggtgtgtgcctcattgcttggaattcagcggaatattgattagaaagaaactgctctaatatcagcaagtctctttatatggcctcaagatcaatgaaatgatgtcataagcgatcacttcctatatgcacttattctcaagaagaacatctttatggtaaagatgggagcccagtttcactgccatatactcttcaaggactttctgaagcctcacttatgagatgcctgaagccaggccatggctataaacaattacatggctctaaaaagttttgccctttttaaggaaggcactaaaaagagctgtcctggtatctagacccatcttctttttgaaatcagcatactcaatgttactatctgcttttggttataatgtgtttttaattatctaaagtatgaagcattttctggggttatgatggccttacctttattaggaagtatggttttattttgatagtagcttcctcctctggtggtgttaatcatttcatttttacccttacttggtttgagtttctctcacattactgtatatactttgcctttccataatcactcagtgattgcaatttgcacaagtttttttaaattatgggaatcaagatttaatcctagagatttggtgtacaattcaggctttggatgtttctttagcagttttgtgataagttctagttgcttgtaaaatttcacttaataatgtgtacattagtcattcaataaattgtaattgtaaagaaaacana

SEQ ID NO: 56538 - DNA, 538 bp, Homo sapiens
gtatcgactgcaaggcccaccttctagtcggtgtgtaattgctggacagggagttgcttggaccaaaatgccagtatgtgaaggtaggctaggcaactatggtctgacagcactgcattctcagcttaactaaaagcttttggttcagtcattaccttacagactcttactgaacacagaactcctagagatctttaaggatatgtgcttcaccaaagcatccttattttttgtttcctcaagtaaaatggggttcctaggctttccctcctctgaaagctatgcagaccttctaagtaggtagaccatatgcataaagaaaatagtgtatttggtaaaagaaatcaaaggatcagcagagtacatatactcaggaatgaagcttgagaatcaatcttctaaattatgttgctttagctgccttgactgattcattatagactcggatatcactgtcctaggatagtggtatcaagcagcatctggggcattctttgttttcaatacacctatgatcttgtcatttctttctgcaatt

SEQ ID NO: 56539 - DNA, 4060 bp, Homo sapiens
  misc_feature (2385)..(2385): n is a, c, g, or t
  misc_feature (2721)..(2721): n is a, c, g, or t
  misc_feature (4059)..(4059): n is a, c, g, or t
caccggcgccgcgtcagcccccaggccgcctgcaggtgtgcgctcagaactagcacgtgtgccggacactatttaagggcccgcctctcctggctcacagctgcttgctgctccagccttgccctcccagagctgccggacgctcgcgggtctcggaacgcatcccgccgcgggggcttcggccgtggcatgggcgccgcgggcctgctcggggttttcttggctctcgtcgcaccgggggtcctcgggatttcttgtggctctcctccgcctatcctaaatggccggattagttattattctacccccattgctgttggtaccgtgataaggtacagttgttcaggtaccttccgcctcattggagaaaaaagtctattatgcataactaaagacaaagtggatggaacctgggataaacctgctcctaaatgtgaatatttcaataaatattcttcttgccctgagcccatagtaccaggaggatacaaaattagaggctctacaccctacagacatggtgattctgtgacatttgcctgtaaaaccaacttctccatgaacggaaacaagtctgtttggtgtcaagcaaataatatgtgggggccgacacgactaccaacctgtgtaagtgttttccctctcgagtgtccagcacttcctatgatccacaatggacatcacacaagtgagaatgttggctccattgctccaggattgtctgtgacttacagctgtgaatctggttacttgcttgttggagaaaagatcattaactgtttgtcttcgggaaaatggagtgctgtcccccccacatgtgaagaggcacgctgtaaatctctaggacgatttcccaatgggaaggtaaaggagcctccaattctccgggttggtgtaactgcaaactttttctgtgatgaagggtatcgactgcaaggcccaccttctagtcggtgtgtaattgctggacagggagttgcttggaccaaaatgccagtatgtgaagaaattttttgcccatcacctccccctattctcaatggaagacatataggcaactcactagcaaatgtctcatatggaagcatagtcacttacacttgtgacccggacccagaggaaggagtgaacttcatccttattggagagagcactctccgttgtacagttgatagtcagaagactgggacctggagtggccctgccccacgctgtgaactttctacttctgcggttcagtgtccacatccccagatcctaagaggccgaatggtatctgggcagaaagatcgatatacctataacgacactgtgatatttgcttgcatgtttggcttcaccttgaagggcagcaagcaaatccgatgcaatgcccaaggcacatgggagccatctgcaccagtctgtgaaaaggaatgccaggcccctcctaacatcctcaatgggcaaaaggaagatagacacatggtccgctttgaccctggaacatctataaaatatagctgtaaccctggctatgtgctggtgggagaagaatccatacagtgtacctctgagggggtgtggacaccccctgtaccccaatgcaaagtggcagcgtgtgaagctacaggaaggcaactcttgacaaaaccccagcaccaatttgttagaccagatgtcaactcttcttgtggtgaagggtacaagttaagtgggagtgtttatcaggagtgtcaaggcacaattccttggtttatggagattcgtctttgtaaagaaatcacctgcccaccaccccctgttatctacaatggggcacacaccgggagttccttagaagattttccatatggaaccacggtcacttacacatgtaaccctgggccagaaagaggagtggaattcagcctcattggagagagcaccatccgttgtacaagcaatgatcaagaaagaggcacctggagtggccctgctcccctatgtaaactttccctccttgctgtccagtgctcacatgtccatattgcaaatggatacaagatatctggcaaggaagccccatatttctacaatgacactgtgacattcaagtgttatagtggatttactttgaagggcagtagtcagattcgttgcaaagctgataacacctgggatcctgaaataccagtttgtgaaaaagaaacatgccagcatgtgagacagagtcttcaagaacttccagctggttcacgtgtggagctagttaatacgtcctgccaagatgggtaccagttgactggacatgcttatcagatgtgtcaagatgctgaaaatggaatttggttcaaaaagattccactttgtaaagttattcactgtcaccctccaccagtgattgtcaatgggaagcacacaggnatgatggcagaaaactttctatatggaaatgaagtctcttatgaatgtgaccaaggattctatctcctgggagagaaaaaattgcagtgcagaagtgattctaaaggacatggatcttggagcgggccttccccacagtgcttacgatctcctcctgtgactcgctgccctaatccagaagtcaaacatgggtacaagctcaataaaacacattctgcatattcccacaatgacatagtgtatgttgactgcaatcctggcttcatcatgaatggtagtcgcgtgattaggtgtcatactgataacacatgggtgccaggtgtgccaacttgtatnaaaaaagccttcatagggtgtccacctccgcctaagacccctaacgggaaccatactggtggaaacatagctcgattttctcctggaatgtcaatcctgtacagctgtgaccaaggctacctgctggtgggagaggcactccttctttgcacacatgagggaacctggagccaacctgcccctcattgtaaagaggtaaactgtagctcaccagcagatatggatggaatccagaaagggctggaaccaaggaaaatgtatcagtatggagctgttgtaactctggagtgtgaagatgggtatatgctggaaggcagtccccagagccagtgccaatcggatcaccaatggaaccctcccctggcggtttgcagatcccgttcacttgctcctgtcctttgtggtattgctgcaggtttgatacttcttaccttcttgattgtcattaccttatacgtgatatcaaaacacagagaacgcaattattatacagatacaagccagaaagaagcttttcatttagaagcacgagaagtatattctgttgatccatacaacccagccagctgatcagaagacaaactggtgtgtgcctcattgcttggaattcagcggaatattgattagaaagaaactgctctaatatcagcaagtctctttatatggcctcaagatcaatgaaatgatgtcataagcgatcacttcctatatgcacttattctcaagaagaacatctttatggtaaagatgggagcccagtttcactgccatatactcttcaaggactttctgaagcctcacttatgagatgcctgaagccaggccatggctataaacaattacatggctctaaaaagttttgccctttttaaggaaggcactaaaaagagctgtcctggtatctagacccatcttctttttgaaatcagcatactcaatgttactatctgcttttggttataatgtgtttttaattatctaaagtatgaagcattttctggggttatgatggccttacctttattaggaagtatggttttattttgatagtagcttcctcctctggtggtgttaatcatttcatttttacccttacttggtttgagtttctctcacattactgtatatactttgcctttccataatcactcagtgattgcaatttgcacaagtttttttaaattatgggaatcaagatttaatcctagagatttggtgtacaattcaggctttggatgtttctttagcagttttgtgataagttctagttgcttgtaaaatttcacttaataatgtgtacattagtcattcaataaattgtaattgtaaagaaaacana

SEQ ID NO: 56540 - DNA, 3456 bp, Homo sapiens
  misc_feature (1781)..(1781): n is a, c, g, or t
  misc_feature (2117)..(2117): n is a, c, g, or t
  misc_feature (3455)..(3455): n is a, c, g, or t
gcttttttttcctggtatgtgtgtgtaaagttttccctctcgagtgtccagcacttcctatgatccacaatggacatcacacaagtgagaatgttggctccattgctccaggattgtctgtgacttacagctgtgaatctggttacttgcttgttggagaaaagatcattaactgtttgtcttcgggaaaatggagtgctgtcccccccacatgtgaagaggcacgctgtaaatctctaggacgatttcccaatgggaaggtaaaggagcctccaattctccgggttggtgtaactgcaaactttttctgtgatgaagggtatcgactgcaaggcccaccttctagtcggtgtgtaattgctggacagggagttgcttggaccaaaatgccagtatgtgaagaaattttttgcccatcacctccccctattctcaatggaagacatataggcaactcactagcaaatgtctcatatggaagcatagtcacttacacttgtgacccggacccagaggaaggagtgaacttcatccttattggagagagcactctccgttgtacagttgatagtcagaagactgggacctggagtggccctgccccacgctgtgaactttctacttctgcggttcagtgtccacatccccagatcctaagaggccgaatggtatctgggcagaaagatcgatatacctataacgacactgtgatatttgcttgcatgtttggcttcaccttgaagggcagcaagcaaatccgatgcaatgcccaaggcacatgggagccatctgcaccagtctgtgaaaaggaatgccaggcccctcctaacatcctcaatgggcaaaaggaagatagacacatggtccgctttgaccctggaacatctataaaatatagctgtaaccctggctatgtgctggtgggagaagaatccatacagtgtacctctgagggggtgtggacaccccctgtaccccaatgcaaagtggcagcgtgtgaagctacaggaaggcaactcttgacaaaaccccagcaccaatttgttagaccagatgtcaactcttcttgtggtgaagggtacaagttaagtgggagtgtttatcaggagtgtcaaggcacaattccttggtttatggagattcgtctttgtaaagaaatcacctgcccaccaccccctgttatctacaatggggcacacaccgggagttccttagaagattttccatatggaaccacggtcacttacacatgtaaccctgggccagaaagaggagtggaattcagcctcattggagagagcaccatccgttgtacaagcaatgatcaagaaagaggcacctggagtggccctgctcccctatgtaaactttccctccttgctgtccagtgctcacatgtccatattgcaaatggatacaagatatctggcaaggaagccccatatttctacaatgacactgtgacattcaagtgttatagtggatttactttgaagggcagtagtcagattcgttgcaaagctgataacacctgggatcctgaaataccagtttgtgaaaaagaaacatgccagcatgtgagacagagtcttcaagaacttccagctggttcacgtgtggagctagttaatacgtcctgccaagatgggtaccagttgactggacatgcttatcagatgtgtcaagatgctgaaaatggaatttggttcaaaaagattccactttgtaaagttattcactgtcaccctccaccagtgattgtcaatgggaagcacacaggnatgatggcagaaaactttctatatggaaatgaagtctcttatgaatgtgaccaaggattctatctcctgggagagaaaaaattgcagtgcagaagtgattctaaaggacatggatcttggagcgggccttccccacagtgcttacgatctcctcctgtgactcgctgccctaatccagaagtcaaacatgggtacaagctcaataaaacacattctgcatattcccacaatgacatagtgtatgttgactgcaatcctggcttcatcatgaatggtagtcgcgtgattaggtgtcatactgataacacatgggtgccaggtgtgccaacttgtatnaaaaaagccttcatagggtgtccacctccgcctaagacccctaacgggaaccatactggtggaaacatagctcgattttctcctggaatgtcaatcctgtacagctgtgaccaaggctacctgctggtgggagaggcactccttctttgcacacatgagggaacctggagccaacctgcccctcattgtaaagaggtaaactgtagctcaccagcagatatggatggaatccagaaagggctggaaccaaggaaaatgtatcagtatggagctgttgtaactctggagtgtgaagatgggtatatgctggaaggcagtccccagagccagtgccaatcggatcaccaatggaaccctcccctggcggtttgcagatcccgttcacttgctcctgtcctttgtggtattgctgcaggtttgatacttcttaccttcttgattgtcattaccttatacgtgatatcaaaacacagagaacgcaattattatacagatacaagccagaaagaagcttttcatttagaagcacgagaagtatattctgttgatccatacaacccagccagctgatcagaagacaaactggtgtgtgcctcattgcttggaattcagcggaatattgattagaaagaaactgctctaatatcagcaagtctctttatatggcctcaagatcaatgaaatgatgtcataagcgatcacttcctatatgcacttattctcaagaagaacatctttatggtaaagatgggagcccagtttcactgccatatactcttcaaggactttctgaagcctcacttatgagatgcctgaagccaggccatggctataaacaattacatggctctaaaaagttttgccctttttaaggaaggcactaaaaagagctgtcctggtatctagacccatcttctttttgaaatcagcatactcaatgttactatctgcttttggttataatgtgtttttaattatctaaagtatgaagcattttctggggttatgatggccttacctttattaggaagtatggttttattttgatagtagcttcctcctctggtggtgttaatcatttcatttttacccttacttggtttgagtttctctcacattactgtatatactttgcctttccataatcactcagtgattgcaatttgcacaagtttttttaaattatgggaatcaagatttaatcctagagatttggtgtacaattcaggctttggatgtttctttagcagttttgtgataagttctagttgcttgtaaaatttcacttaataatgtgtacattagtcattcaataaattgtaattgtaaagaaaacana

SEQ ID NO: 56541 - DNA, 4914 bp, Homo sapiens
gagggagagggagaccgggacgagaccggggctgtggtgcggagagaggctgagacggagaagaggagaggcagagagggcgcggggaccgtcagcagcaccttagctacaatcgttcagctattctcggaagagagaagggagagggaggaggccggggcgggagtgggggctgtcaccctcggaccccggcgtgagaggggccgtgcggccggacgtcctcggggtgggcccccagtcggtggccgaagacctacagctcaggcccctgggtcccaaatttccaggctttgcccctcctcctttctcagatacccgggtaacagtcctcatagtccagatatccgggactcgggtcccaacctctctaaacctgggtctctgtttcatagaatttcaaatatcaggttcaggcccctgcgtgcaccagtatccggggttcattccccgggcgttcaaatatcggattcagtctccatcccgttcagatattcggggttcagaccccacaatcagaaatccggaattcggcagctgtcgccctcgacgagggggaggactggaccgcgaggtcagattaggttgtcaccccctcccctccaggggaggcttcccgggcccgcccctcaggaagggcgaaagccgaggaagaggtggcaaggggaaaggtctccttgcccctctccctgcttggcagagccgctggaggaccccaggcggaagcggaggcgctggggcaccatagtgacccctaccaggccaggccccactctcagggcccccaggggccaccatgccagctgggggccgggccgggagcctgaaggacccagatgtggctgagctcttcttcaaggatgacccagaaaagctcttctctgacctccgggaaattggccatggcagctttggagccgtatactttgcccgggatgtccggaatagtgaggtggtggccatcaagaagatgtcctacagtgggaagcagtccaatgagaaatggcaagacatcatcaaggaggtgcggttcttacagaagctccggcatcccaacaccattcagtaccggggctgttacctgagggagcacacggcttggctggtaatggagtattgcctgggctcagcttctgaccttctagaagtgcacaagaaaccccttcaggaggtagagatcgcagctgtgacccacggggcgcttcagggcctggcatatctgcactcccacaacatgatccatagggatgtgaaggctggaaacatcctgctgtcagagccagggttagtgaagctaggggactttggttctgcgtccatcatggcacctgccaactccttcgtgggcaccccatactggatggcacccgaggtgatcctggccatggatgaggggcagtacgatggcaaagtggacgtctggtccttggggataacctgcatcgagctggctgaacggaaaccaccgctctttaacatgaatgcgatgagtgccttataccacattgcacagaacgaatcccccgtgctccagtcaggacactggtctgagtacttccggaattttgtcgactcctgtcttcagaaaatccctcaagacagaccaacctcagaggttctcctgaagcaccgctttgtgctccgggagcggccacccacagtcatcatggacctgatccagaggaccaaggatgccgtgcgggagctggacaacctgcagtaccgcaagatgaagaagatcctgttccaagaggcacccaacggccctggtgccgaggccccagaggaggaagaggaggccgagccctacatgcaccgggccgggactctgaccagcctcgagagtagccactcagtgcccagcatgtccatcagcgcctccagccagagcagctccgtcaacagcctagcagatgcctcagacaacgaggaagaggaggaggaggaggaggaagaggaggaggaggaagaaggccctgaagcccgggagatggccatgatgcaggagggggagcacacagtcacctctcacagctccattatccaccggctgccgggctctgacaacctatatgatgacccctaccagccagagataacccccagccctctccagccgcctgcagccccagctcccacttccaccacctcttctgcccgccgccgggcctactgccgtaaccgagaccactttgccaccatccgaaccgcctccctggtcagccgtcagatccaggagcatgagcaggactctgcgctgcgggagcagctgagcggctataagcggatgcgacgacagcaccagaagcagctgctggccctggagtcacggctgaggggtgaacgggaggagcacagtgcacggctgcagcgggagcttgaggcgcagcgggctggctttggggcagaggcagaaaagctggcccggcggcaccaggccataggtgagaaggaggcacgagctgcccaggccgaggagcggaagttccagcagcacatccttgggcagcagaagaaggagctggctgccctgctggaggcacagaagcggacctacaaacttcgcaaggaacagctgaaggaggagctccaggagaaccccagcactcccaagcgggagaaggccgagtggctgctgcggcagaaggagcagctccagcagtgccaggcggaggaggaagcagggctgctgcggcggcagcgccagtactttgagctgcagtgtcgccagtacaagcgcaagatgttgctggctcggcacagcctggaccaggacctgctgcgggaggacctgaacaagaagcagacccagaaggacttggagtgtgcactgctgcttcggcagcacgaggccacgcgggagctggagctgcggcagctccaggccgtgcagcgcacgcgggctgagctcacccgcctgcagcaccagacggagctgggcaaccagctggagtacaacaagcggcgtgagcaagagttgcggcagaagcatgcggcccaggttcgccagcagcccaagagcctcaaagtacgtgcaggccagcgccccccgggccttccactccccattcctggggctctgggcccacccaacacaggcacccctatagaacagcagccctgctcacctggccaggaggcagtcctggaccaaagaatgcttggcgaggaggaggaagcagttggagagagaaggattctgggaaaggaaggggccactttggagcccaagcagcagaggattctgggggaagaatcaggagcccctagtcccagtccacaaaaacatgggagcctggttgatgaggaagtttggggtctgcctgaggagatagaggagcttagggtgccctcccttgtaccccaggagaggagcattgttggccaggaggaggctgggacatggagcttgtgggggaaggaggatgagagtcttctggatgaggagtttgagcttggctgggtccagggcccagcactgactcccgtccctgaggaggaggaagaagaggaagagggggctccgattgggacccctagggatcctggagatggttgtccttcccccgacatccctcctgaaccccctccaacacacctgaggccctgccctgccagccagctccctggactcctgtcccatggcctcctggccggcctctcctttgcagtggggtcctcctctggcctcctgcccctcctgctgctgctgctgcttccattgctggcagcccagggtgggggtggcctgcaggcagcgctgctggcccttgaggtggggctggtgggtctgggggcctcctacctgctcctttgtacagccctgcacctgccctccagtcttttcctactcctggcccagggtaccgcactgggggccgtcctgggcctgagctggcgccgaggcctcatgggtgttcccctgggccttggagctgcctggctcttagcttggccaggcctagctctacctctggtggctatggcagcggggggcagatgggtgcggcagcagggcccccgggtgcgccggggcatatctcgactctggttgcgggttctgctgcgcctgtcacccatggccttccgggccctgcagggctgtggggctgtgggggaccggggtctgtttgcactgtaccccaaaaccaacaaggatggcttccgcagccgcctgcccgtccctgggccccggcggcgtaatccccgcaccacccaacacccattagctctgttggcaagggtctgggtcctgtgcaagggctggaactggcgtctggcacgggccagccagggtttagcatcccacttgcccccgtgggccatccacacactggccagctggggcctgcttcggggtgaacggcccacccgaatcccccggctactaccacgcagccagcgccagctagggccccctgcctcccgccagccactgccagggactctagccgggcggaggtcacgcacccgccagtcccgggccctgcccccctggaggtagctgactccagcccttccagcccaaatctagagcattgagcactttatctcccacgactcagtgaagtttctccagtccctagtcctctcttttcacccaccttcctcagtttgctcacttaccccaggcccagcccttcggacctctagacaggcagcctcctcagctgtggagtccagcagtcactctgtgttctcctggcgctcctcccctaagttattgctgttcgcccgctgtgtgtgctcatcctcaccctcattgactcaggcctggggccaggggtggtggagggtgggaagagtcatgttttttttctcctctttgattttgtttttctgtctcccttccaacctgtccccttccccccaccaaaaaaagaaaaagacaaacacaaataaaatatctgagcggaa

SEQ ID NO: 56542 - DNA, 3065 bp, Homo sapiens
gagggagagggagaccgggacgagaccggggctgtggtgcggagagaggctgagacggagaagaggagaggcagagagggcgcggggaccgtcagcagcaccttagctacaatcgttcagctattctcggaagagagaagggagagggaggaggccggggcgggagtgggggctgtcaccctcggaccccggcgtgagaggggccgtgcggccggacgtcctcggggtgggcccccagtcggtggccgaagacctacagctcaggcccctgggtcccaaatttccaggctttgcccctcctcctttctcagatacccgggtaacagtcctcatagtccagatatccgggactcgggtcccaacctctctaaacctgggtctctgtttcatagaatttcaaatatcaggttcaggcccctgcgtgcaccagtatccggggttcattccccgggcgttcaaatatcggattcagtctccatcccgttcagatattcggggttcagaccccacaatcagaaatccggaattcggcagctgtcgccctcgacgagggggaggactggaccgcgaggtcagattaggttgtcaccccctcccctccaggggaggcttcccgggcccgcccctcaggaagggcgaaagccgaggaagaggtggcaaggggaaaggtctccttgcccctctccctgcttggcagagccgctggaggaccccaggcggaagcggaggcgctggggcaccatagtgacccctaccaggccaggccccactctcagggcccccaggggccaccatgccagctgggggccgggccgggagcctgaaggacccagatgtggctgagctcttcttcaaggatgacccagaaaagctcttctctgacctccgggaaattggccatggcagctttggagccgtatactttgcccgggatgtccggaatagtgaggtggtggccatcaagaagatgtcctacagtgggaagcagtccaatgagaaatggcaagacatcatcaaggaggtgcggttcttacagaagctccggcatcccaacaccattcagtaccggggctgttacctgagggagcacacggcttggctggtaatggagtattgcctgggctcagcttctgaccttctagaagtgcacaagaaaccccttcaggaggtagagatcgcagctgtgacccacggggcgcttcagggcctggcatatctgcactcccacaacatgatccatagggatgtgaaggctggaaacatcctgctgtcagagccagggttagtgaagctaggggactttggttctgcgtccatcatggcacctgccaactccttcgtgggcaccccatactggatggcacccgaggtgatcctggccatggatgaggggcagtacgatggcaaagtggacgtctggtccttggggataacctgcatcgagctggctgaacggaaaccaccgctctttaacatgaatgcgatgagtgccttataccacattgcacagaacgaatcccccgtgctccagtcaggacactggtctgagtacttccggaattttgtcgactcctgtcttcagaaaatccctcaagacagaccaacctcagaggttctcctgaagcaccgctttgtgctccgggagcggccacccacagtcatcatggacctgatccagaggaccaaggatgccgtgcgggagctggacaacctgcagtaccgcaagatgaagaagatcctgttccaagaggcacccaacggccctggtgccgaggccccagaggaggaagaggaggccgagccctacatgcaccgggccgggactctgaccagcctcgagagtagccactcagtgcccagcatgtccatcagcgcctccagccagagcagctccgtcaacagcctagcagatgcctcagacaacgaggaagaggaggaggaggaggaggaagaggaggaggaggaagaaggccctgaagcccgggagatggccatgatgcaggagggggagcacacagtcacctctcacagctccattatccaccggctgccgggctctgacaacctatatgatgacccctaccagccagagataacccccagccctctccagccgcctgcagccccagctcccacttccaccacctcttctgcccgccgccgggcctactgccgtaaccgagaccactttgccaccatccgaaccgcctccctggtcagccgtcagatccaggagcatgagcaggactctgcgctgcgggagcagctgagcggctataagcggatgcgacgacagcaccagaagcagctgctggccctggagtcacggctgaggggtgaacgggaggagcacagtgcacggctgcagcgggagcttgaggcgcagcgggctggctttggggcagaggcagaaaagctggcccggcggcaccaggccataggtgagaaggaggcacgagctgcccaggccgaggagcggaagttccagcagcacatccttgggcagcagaagaaggagctggctgccctgctggaggcacagaagcggacctacaaacttcgcaaggaacagctgaaggaggagctccaggagaaccccagcactcccaagcgggagaaggccgagtggctgctgcggcagaaggagcagctccagcagtgccaggcggaggaggaagcagggctgctgcggcggcagcgccagtactttgagctgcagtgtcgccagtacaagcgcaagatgttgctggctcggcacagcctggaccaggacctgctgcgggaggacctgaacaagaagcagacccagaaggacttggagtgtgcactgctgcttcggcagcacgaggccacgcgggagctggagctgcggcagctccaggccgtgcagcgcacgcgggctgagctcacccgcctgcagcaccagacggagctgggcaaccagctggagtacaacaagcggcgtgagcaagagttgcggcagaagcatgcggcccaggttcgccagcagcccaagagcctcaaaaaaagaaaaagacaaacacaaataaaatatctgagcggaa

SEQ ID NO: 56543 - DNA, 550 bp, Homo sapiens
gagggagagggagaccgggacgagaccggggctgtggtgcggagagaggctgagacggagaagaggagaggcagagagggcgcggggaccgtcagcagcaccttagctacaatcgttcagctattctcggaagagagaagggagagggaggaggccggggcgggagtgggggctgtcaccctcggaccccggcgtgagaggggccgtgcggccggacgtcctcggggtgggcccccagtcggtggccgaagacctacagctcaggcccctgggtcccaaatttccaggctttgcccctcctcctttctcagatacccgggtaacagtcctcatagtccagatatccgggactcgggtcccaacctctctaaacctgggtctctgtttcatagaatttcaaatatcaggttcaggcccctgcgtgcaccagtatccggggttcattccccgggcgttcaaatatcggattcagtctccatcccgttcagatattcggggttcagaccccacaaaagaaaaagacaaacacaaataaaatatctgagcggaa

SEQ ID NO: 56544 - DNA, 3330 bp, Homo sapiens
aggggagttggcagcagacctcagtgccctcttcccccagcaccgctttgtgctccgggagcggccacccacagtcatcatggacctgatccagaggaccaaggatgccgtgcgggagctggacaacctgcagtaccgcaagatgaagaagatcctgttccaagaggcacccaacggccctggtgccgaggccccagaggaggaagaggaggccgagccctacatgcaccgggccgggactctgaccagcctcgagagtagccactcagtgcccagcatgtccatcagcgcctccagccagagcagctccgtcaacagcctagcagatgcctcagacaacgaggaagaggaggaggaggaggaggaagaggaggaggaggaagaaggccctgaagcccgggagatggccatgatgcaggagggggagcacacagtcacctctcacagctccattatccaccggctgccgggctctgacaacctatatgatgacccctaccagccagagataacccccagccctctccagccgcctgcagccccagctcccacttccaccacctcttctgcccgccgccgggcctactgccgtaaccgagaccactttgccaccatccgaaccgcctccctggtcagccgtcagatccaggagcatgagcaggactctgcgctgcgggagcagctgagcggctataagcggatgcgacgacagcaccagaagcagctgctggccctggagtcacggctgaggggtgaacgggaggagcacagtgcacggctgcagcgggagcttgaggcgcagcgggctggctttggggcagaggcagaaaagctggcccggcggcaccaggccataggtgagaaggaggcacgagctgcccaggccgaggagcggaagttccagcagcacatccttgggcagcagaagaaggagctggctgccctgctggaggcacagaagcggacctacaaacttcgcaaggaacagctgaaggaggagctccaggagaaccccagcactcccaagcgggagaaggccgagtggctgctgcggcagaaggagcagctccagcagtgccaggcggaggaggaagcagggctgctgcggcggcagcgccagtactttgagctgcagtgtcgccagtacaagcgcaagatgttgctggctcggcacagcctggaccaggacctgctgcgggaggacctgaacaagaagcagacccagaaggacttggagtgtgcactgctgcttcggcagcacgaggccacgcgggagctggagctgcggcagctccaggccgtgcagcgcacgcgggctgagctcacccgcctgcagcaccagacggagctgggcaaccagctggagtacaacaagcggcgtgagcaagagttgcggcagaagcatgcggcccaggttcgccagcagcccaagagcctcaaagtacgtgcaggccagcgccccccgggccttccactccccattcctggggctctgggcccacccaacacaggcacccctatagaacagcagccctgctcacctggccaggaggcagtcctggaccaaagaatgcttggcgaggaggaggaagcagttggagagagaaggattctgggaaaggaaggggccactttggagcccaagcagcagaggattctgggggaagaatcaggagcccctagtcccagtccacaaaaacatgggagcctggttgatgaggaagtttggggtctgcctgaggagatagaggagcttagggtgccctcccttgtaccccaggagaggagcattgttggccaggaggaggctgggacatggagcttgtgggggaaggaggatgagagtcttctggatgaggagtttgagcttggctgggtccagggcccagcactgactcccgtccctgaggaggaggaagaagaggaagagggggctccgattgggacccctagggatcctggagatggttgtccttcccccgacatccctcctgaaccccctccaacacacctgaggccctgccctgccagccagctccctggactcctgtcccatggcctcctggccggcctctcctttgcagtggggtcctcctctggcctcctgcccctcctgctgctgctgctgcttccattgctggcagcccagggtgggggtggcctgcaggcagcgctgctggcccttgaggtggggctggtgggtctgggggcctcctacctgctcctttgtacagccctgcacctgccctccagtcttttcctactcctggcccagggtaccgcactgggggccgtcctgggcctgagctggcgccgaggcctcatgggtgttcccctgggccttggagctgcctggctcttagcttggccaggcctagctctacctctggtggctatggcagcggggggcagatgggtgcggcagcagggcccccgggtgcgccggggcatatctcgactctggttgcgggttctgctgcgcctgtcacccatggccttccgggccctgcagggctgtggggctgtgggggaccggggtctgtttgcactgtaccccaaaaccaacaaggatggcttccgcagccgcctgcccgtccctgggccccggcggcgtaatccccgcaccacccaacacccattagctctgttggcaagggtctgggtcctgtgcaagggctggaactggcgtctggcacgggccagccagggtttagcatcccacttgcccccgtgggccatccacacactggccagctggggcctgcttcggggtgaacggcccacccgaatcccccggctactaccacgcagccagcgccagctagggccccctgcctcccgccagccactgccagggactctagccgggcggaggtcacgcacccgccagtcccgggccctgcccccctggaggtagctgactccagcccttccagcccaaatctagagcattgagcactttatctcccacgactcagtgaagtttctccagtccctagtcctctcttttcacccaccttcctcagtttgctcacttaccccaggcccagcccttcggacctctagacaggcagcctcctcagctgtggagtccagcagtcactctgtgttctcctggcgctcctcccctaagttattgctgttcgcccgctgtgtgtgctcatcctcaccctcattgactcaggcctggggccaggggtggtggagggtgggaagagtcatgttttttttctcctctttgattttgtttttctgtctcccttccaacctgtccccttccccccaccaaaaaaagaaaaagacaaacacaaataaaatatctgagcggaa

SEQ ID NO: 56545 - DNA, 3554 bp, Homo sapiens
gagggagagggagaccgggacgagaccggggctgtggtgcggagagaggctgagacggagaagaggagaggcagagagggcgcggggaccgtcagcagcaccttagctacaatcgttcagctattctcggaagagagaagggagagggaggaggccggggcgggagtgggggctgtcaccctcggaccccggcgtgagaggggccgtgcggccggacgtcctcggggtgggcccccagtcggtggccgaagacctacagctcaggcccctgggtcccaaatttccaggctttgcccctcctcctttctcagatacccgggtaacagtcctcatagtccagatatccgggactcgggtcccaacctctctaaacctgggtctctgtttcatagaatttcaaatatcaggttcaggcccctgcgtgcaccagtatccggggttcattccccgggcgttcaaatatcggattcagtctccatcccgttcagatattcggggttcagaccccacaatcagaaatccggaattcggcagctgtcgccctcgacgagggggaggactggaccgcgaggtcagattaggttgtcaccccctcccctccaggggaggcttcccgggcccgcccctcaggaagggcgaaagccgaggaagaggtggcaaggggaaaggtctccttgcccctctccctgcttggcagagccgctggaggaccccaggcggaagcggaggcgctggggcaccatagtgacccctaccaggccaggccccactctcagggcccccaggggccaccatgccagctgggggccgggccgggagcctgaaggacccagatgtggctgagctcttcttcaaggatgacccagaaaagctcttctctgacctccgggaaattggccatggcagctttggagccgtatactttgcccgggatgtccggaatagtgaggtggtggccatcaagaagatgtcctacagtgggaagcagtccaatgagaaatggcaagacatcatcaaggaggtgcggttcttacagaagctccggcatcccaacaccattcagtaccggggctgttacctgagggagcacacggcttggctggtaatggagtattgcctgggctcagcttctgaccttctagaagtgcacaagaaaccccttcaggaggtagagatcgcagctgtgacccacggggcgcttcagggcctggcatatctgcactcccacaacatgatccatagggatgtgaaggctggaaacatcctgctgtcagagccagggttagtgaagctaggggactttggttctgcgtccatcatggcacctgccaactccttcgtgggcaccccatactggatggcacccgaggtgatcctggccatggatgaggggcagtacgatggcaaagtggacgtctggtccttggggataacctgcatcgagctggctgaacggaaaccaccgctctttaacatgaatgcgatgagtgccttataccacattgcacagaacgaatcccccgtgctccagtcaggacactggtctgagtacttccggaattttgtcgactcctgtcttcagaaaatccctcaagacagaccaacctcagaggttctcctgaagcaccgctttgtgctccgggagcggccacccacagtcatcatggacctgatccagaggaccaaggatgccgtgcgggagctggacaacctgcagtaccgcaagatgaagaagatcctgttccaagaggcacccaacggccctggtgccgaggccccagaggaggaagaggaggccgagccctacatgcaccgggccgggactctgaccagcctcgagagtagccactcagtgcccagcatgtccatcagcgcctccagccagagcagctccgtcaacagcctagcagatgcctcagacaacgaggaagaggaggaggaggaggaggaagaggaggaggaggaagaaggccctgaagcccgggagatggccatgatgcaggagggggagcacacagtcacctctcacagctccattatccaccggctgccgggctctgacaacctatatgatgacccctaccagccagagataacccccagccctctccagccgcctgcagccccagctcccacttccaccacctcttctgcccgccgccgggcctactgccgtaaccgagaccactttgccaccatccgaaccgcctccctggtcagccgtcagatccaggagcatgagcaggactctgcgctgcgggagcagctgagcggctataagcggatgcgacgacagcaccagaagcagctgctggccctggagtcacggctgaggggtgaacgggaggagcacagtgcacggctgcagcgggagcttgaggcgcagcgggctggctttggggcagaggcagaaaagctggcccggcggcaccaggccataggtgagaaggaggcacgagctgcccaggccgaggagcggaagttccagcagcacatccttgggcagcagaagaaggagctggctgccctgctggaggcacagaagcggacctacaaacttcgcaaggaacagctgaaggaggagctccaggagaaccccagcactcccaagcgggagaaggccgagtggctgctgcggcagaaggagcagctccagcagtgccaggcggaggaggaagcagggctgctgcggcggcagcgccagtactttgagctgcagtgtcgccagtacaagcgcaagatgttgctggctcggcacagcctggaccaggacctgctgcgggaggacctgaacaagaagcagacccagaaggacttggagtgtgcactgctgcttcggcagcacgaggccacgcgggagctggagctgcggcagctccaggccgtgcagcgcacgcgggctgagctcacccgcctgcagcaccagacggagctgggcaaccagctggagtacaacaagcggcgtgagcaagagttgcggcagaagcatgcggcccaggttcgccagcagcccaagagcctcaaatctaaggagctgcagatcaagaagcagttccaggagacgtgtaagatccagactcggcagtacaaggctctgcgagcacacttgctggagaccacgcccaaagctcagcacaagagcctccttaagcggctcaaggaagagcagacccgcaagctggcgatcttggcggagcagtatgaccagtccatctcagagatgctcagctcacaggcggtgaggcctggggtccagggagggagtgcgctagaggccaggctctgtactttgctttagagaaatggacggtgcagggcatgcacagagctggggcttttttacttgggaaactcacatactctccctctgttcgtgttctccacaatgatttatttcatattctcctcagtggttttattctttctcttagtattttcttaaggtcttgacaaagccatgtgcctattcccaagaaccaccaaggaaaagagtggctattatttttttcctgggcctgagttagttaactggctggatcctctgaacgcagcca

SEQ ID NO: 56546 - DNA, 1523 bp, Homo sapiens
ggagttgcgtgaacctgggaggtggaggtgacacgtgagcctgggatcacaccactgcactccagcctggcaacagatgagtgctgggggtgttggagggaggctggagaagaagaggaagagggggctccgattgggacccctagggatcctggagatggttgtccttcccccgacatccctcctgaaccccctccaacacacctgaggccctgccctgccagccagctccctggactcctgtcccatggcctcctggccggcctctcctttgcagtggggtcctcctctggcctcctgcccctcctgctgctgctgctgcttccattgctggcagcccagggtgggggtggcctgcaggcagcgctgctggcccttgaggtggggctggtgggtctgggggcctcctacctgctcctttgtacagccctgcacctgccctccagtcttttcctactcctggcccagggtaccgcactgggggccgtcctgggcctgagctggcgccgaggcctcatgggtgttcccctgggccttggagctgcctggctcttagcttggccaggcctagctctacctctggtggctatggcagcggggggcagatgggtgcggcagcagggcccccgggtgcgccggggcatatctcgactctggttgcgggttctgctgcgcctgtcacccatggccttccgggccctgcagggctgtggggctgtgggggaccggggtctgtttgcactgtaccccaaaaccaacaaggatggcttccgcagccgcctgcccgtccctgggccccggcggcgtaatccccgcaccacccaacacccattagctctgttggcaagggtctgggtcctgtgcaagggctggaactggcgtctggcacgggccagccagggtttagcatcccacttgcccccgtgggccatccacacactggccagctggggcctgcttcggggtgaacggcccacccgaatcccccggctactaccacgcagccagcgccagctagggccccctgcctcccgccagccactgccagggactctagccgggcggaggtcacgcacccgccagtcccgggccctgcccccctggaggtagctgactccagcccttccagcccaaatctagagcattgagcactttatctcccacgactcagtgaagtttctccagtccctagtcctctcttttcacccaccttcctcagtttgctcacttaccccaggcccagcccttcggacctctagacaggcagcctcctcagctgtggagtccagcagtcactctgtgttctcctggcgctcctcccctaagttattgctgttcgcccgctgtgtgtgctcatcctcaccctcattgactcaggcctggggccaggggtggtggagggtgggaagagtcatgttttttttctcctctttgattttgtttttctgtctcccttccaacctgtccccttccccccaccaaaaaaagaaaaagacaaacacaaataaaatatctgagcggaa

SEQ ID NO: 56547 - DNA, 361 bp, Homo sapiens
tgtccatcagcgcctccagccagagcagctccgtcaacagcctagcagatgcctcagacaacgaggaagaggaggaggaggaggaggaagaggaggaggaggaagaaggccctgaagcccgggagatggccatgatgcaggagggggagcacacagtcacctctcacagctccattatccaccggctgccggtacacagctcacccttgggggacccgagccacctgctctagaactgcctgggtcttcgccctccttccctaagtgcagcactcctctgagtctgattggctgtcctcaggtagctctctttggacccagtggcctctgagccttgggtgttccttctatctccctctag

SEQ ID NO: 56548 - DNA, 4648 bp, Homo sapiens
gagggagagggagaccgggacgagaccggggctgtggtgcggagagaggctgagacggagaagaggagaggcagagagggcgcggggaccgtcagcagcaccttagctacaatcgttcagctattctcggaagagagaagggagagggaggaggccggggcgggagtgggggctgtcaccctcggaccccggcgtgagaggggccgtgcggccggacgtcctcggggtgggcccccagtcggtggccgaagacctacagctcaggcccctgggtcccaaatttccaggctttgcccctcctcctttctcagatacccgggtaacagtcctcatagtccagatatccgggactcgggtcccaacctctctaaacctgggtctctgtttcatagaatttcaaatatcaggttcaggcccctgcgtgcaccagtatccggggttcattccccgggcgttcaaatatcggattcagtctccatcccgttcagatattcggggttcagaccccacaatcagaaatccggaattcggcagctgtcgccctcgacgagggggaggactggaccgcgaggtcagattaggttgtcaccccctcccctccaggggaggcttcccgggcccgcccctcaggaagggcgaaagccgaggaagaggtggcaaggggaaaggtctccttgcccctctccctgcttggcagagccgctggaggaccccaggcggaagcggaggcgctggggcaccatagtgacccctaccaggccaggccccactctcagggcccccaggggccaccatgccagctgggggccgggccgggagcctgaaggacccagatgtggctgagctcttcttcaaggatgacccagaaaagctcttctctgacctccgggaaattggccatggcagctttggagccgtatactttgcccgggatgtccggaatagtgaggtggtggccatcaagaagatgtcctacagtgggaagcagtccaatgagaaatggcaagacatcatcaaggaggtgcggttcttacagaagctccggcatcccaacaccattcagtaccggggctgttacctgagggagcacacggcttggctggtaatggagtattgcctgggctcagcttctgaccttctagaagtgcacaagaaaccccttcaggaggtagagatcgcagctgtgacccacggggcgcttcagggcctggcatatctgcactcccacaacatgatccatagggatgtgaaggctggaaacatcctgctgtcagagccagggttagtgaagctaggggactttggttctgcgtccatcatggcacctgccaactccttcgtgggcaccccatactggatggcacccgaggtgatcctggccatggatgaggggcagtacgatggcaaagtggacgtctggtccttggggataacctgcatcgagctggctgaacggaaaccaccgctctttaacatgaatgcgatgagtgccttataccacattgcacagaacgaatcccccgtgctccagtcaggacactggtctgagtacttccggaattttgtcgactcctgtcttcagaaaatccctcaagacagaccaacctcagaggttctcctgaagcaccgctttgtgctccgggagcggccacccacagtcatcatggacctgatccagaggaccaaggatgccgtgcgggagctggacaacctgcagtaccgcaagatgaagaagatcctgttccaagaggcacccaacggccctggtgccgaggccccagaggaggaagaggaggccgagccctacatgcaccgggccgggactctgaccagcctcgagagtagccactcagtgcccagcatgtccatcagcgcctccagccagagcagctccgtcaacagcctagcagatgcctcagacaacgaggaagaggaggaggaggaggaggaagaggaggaggaggaagaaggccctgaagcccgggagatggccatgatgcaggagggggagcacacagtcacctctcacagctccattatccaccggctgccgggctctgacaacctatatgatgacccctaccagccagagataacccccagccctctccagccgcctgcagccccagctcccacttccaccacctcttctgcccgccgccgggcctactgccgtaaccgagaccactttgccaccatccgaaccgcctccctggtcagccgtcagatccaggagcatgagcaggactctgcgctgcgggagcagctgagcggctataagcggatgcgacgacagcaccagaagcagctgctggccctggagtcacggctgaggggtgaacgggaggagcacagtgcacggctgcagcgggagcttgaggcgcagcgggctggctttggggcagaggcagaaaagctggcccggcggcaccaggccataggtgagaaggaggcacgagctgcccaggccgaggagcggaagttccagcagcacatccttgggcagcagaagaaggagctggctgccctgctggaggcacagaagcggacctacaaacttcgcaaggaacagctgaaggaggagctccaggagaaccccagcactcccaagcgggagaaggccgagtggctgctgcggcagaaggagcagctccagcagtgccaggcggaggaggaagcagggctgctgcggcggcagcgccagtactttgagctgcagtgtcgccagtacaagcgcaagatgttgctggctcggcacagcctggaccaggacctgctgcgggaggacctgaacaagaagcagacccagaaggacttggagtgtgcactgctgcttcggcagcacgaggccacgcgggagctggagctgcggcagctccaggccgtgcagcgcacgcgggctgagctcacccgcctgcagcaccagacggagctgggcaaccagctggagtacaacaagcggcgtgagcaagagttgcggcagaagcatgcggcccaggttcgccagcagcccaagagcctcaaatctaaggagctgcagatcaagaagcagttccaggagacgtgtaagatccagactcggcagtacaaggctctgcgagcacacttgctggagaccacgcccaaagctcagcacaagagcctccttaagcggctcaaggaagagcagacccgcaagctggcgatcttggcggagcagtatgaccagtccatctcagagatgctcagctcacaggcgctgcggcttgatgagacccaggaggcagagttccaggcccttcggcagcagcttcaacaggagctggagctgctcaacgcttaccagagcaagatcaagatccgcacagagagccagcacgagagggagctgcgggagctggagcagagggtcgcgctgcggcgggcactgctggagcagcgggtggaagaggagctgctggccctgcagacaggacgctccgagcgaatccgcagtctgcttgagcggcaggcccgtgagatcgaggccttcgatgcggaaagcatgaggctgggcttctccagcatggctctggggggcatcccggctgaagctgctgcccagggctatcctgctccaccccctgccccagcctggccctcccgtcccgttccccgttctggggcacactggagccatggccctcctccaccaggcatgccccctccagcctggcgtcagccgtctctgctggctcccccaggccccccaaactggctggggccccccacacaaagtgggacaccccgtggcggagccctgctgctgctaagaaacagcccccagcccctgcggcgggcagcctcggggggcagtggcagtgagaatgtgggcccccctgctgccgcggtgcccgggcccctgagccgcagcaccagtgtcgcttcccacatcctcaatggttcttcccacttctattcctgaggtgcagcggggaggagcagatgagctgggcagggcaggggtgggtggagcctgaccctggagggcactgagctggaggcccctgcaagggtaggggacaagatgtaggctccagctcccctcagacctcctcatctcatgagcttcttggggctggccagtggcccagggccagcttggcgatagatgcctcaaggctgcctgggagccccgcctccctaccatggtgccaggggtctccctccgccacctaggaaaggagggagatgtgcgtgtcaaatattcatctagtcccctgggggaggggaagggtgggtctagacatactatattcagagaactatactaccctcacagtgaggccctcagacctgccacagggcagagcaggtctggggcctgaggcagggagaatgagaggccaccttactggcaggaaggatcaggatggggtcttggggtcaggatgcctgggtctcttcccgtaactgtctgacgtcctgtgccgtcttgtcctttatctttttttttttttttttaattgggatcagggctggggcggggaaacaagggaaggaccttggaaggggctgctcccaggcctggggggcagtcgtgggagcccctctcagctgtggggctggcacagagccccaggcaagcttttaataaactgttggttattctaacagatctcaggactca

SEQ ID NO: 56549 - DNA, 4775 bp, Homo sapiens
ctcccttccagtctgtcttaagtactgatgccagagaggtctgcctaagctcagtgctgtcatttcactccctgtttggagccatgagtggccccctgttgccttcaagactgaagccatccccatccttcctcccaccaacctagaggctttgcttcgtaaatgctggccctttccttcatgggctccaccctctgagtgtgtcatgaactcttccacttccttgccttggttcgtattgggtcctctgcccgaggtcagagatttggacgagcccttctcctccatcttcacagtctccatttaccattagatgccaggcccagacagttgatgaaaaatgtaagaaacggacccaagtataagaaaaagctagatctgtccattttatttctagtttttggaagagatgtggatacagagaaatattactctactattgaaaaaaatatatatcagtctgattataaatgtcaactcatactaagtcaatatcagggaagcagtgtggagaaggatgtggcaaactggagattgctgtttccatagaaagagggcagctaatgcttatctccagaccattgttatgcagtaatgtagactccatttcaccagatttaattcttaaggagaaactggaaacttgtattattatttgattattacttttggcagttaattttaaaaatcaccgtttaggccaaaacaacatgacatttgtctgggctacaagggactcttagcgactcttagcttgcacttacctttctaatctcagggctttttacaaagcccttctctgaattccctgaagatatgctagcttgaaggctcactgcatactctcaacttcccagccacttccctgtttccctcttataccagttaatactttgatgttattttttcagtcctatttaatcttttagactggaggttccttgagggtggggcctaattcttgtttttatcttccccatagcaattatcaagttatctgctccctttggcacctaagaaatattagttggggtgataactgaatggctgtccttctgccttcgttactgcttttgtggatgttattttctttgacccctattccacccgtgtgcagtggagaggatgggtgttgtattttacagaggaaggaattaactgagacgcaacaggatgatgggaacttctcaaggtcatgtggcaaggaagtcaaggaattggggtttgaacccaagtcgtctcagttccattccattgtcctctaccccctgccacctctcaccttcttccctttcacctttttctgtagctgaacggaaaccaccgctctttaacatgaatgcgatgagtgccttataccacattgcacagaacgaatcccccgtgctccagtcaggacactggtctgagtacttccggaattttgtcgactcctgtcttcagaaaatccctcaagacagaccaacctcagaggttctcctgaagcaccgctttgtgctccgggagcggccacccacagtcatcatggacctgatccagaggaccaaggatgccgtgcgggagctggacaacctgcagtaccgcaagatgaagaagatcctgttccaagaggcacccaacggccctggtgccgaggccccagaggaggaagaggaggccgagccctacatgcaccgggccgggactctgaccagcctcgagagtagccactcagtgcccagcatgtccatcagcgcctccagccagagcagctccgtcaacagcctagcagatgcctcagacaacgaggaagaggaggaggaggaggaggaagaggaggaggaggaagaaggccctgaagcccgggagatggccatgatgcaggagggggagcacacagtcacctctcacagctccattatccaccggctgccgggctctgacaacctatatgatgacccctaccagccagagataacccccagccctctccagccgcctgcagccccagctcccacttccaccacctcttctgcccgccgccgggcctactgccgtaaccgagaccactttgccaccatccgaaccgcctccctggtcagccgtcagatccaggagcatgagcaggactctgcgctgcgggagcagctgagcggctataagcggatgcgacgacagcaccagaagcagctgctggccctggagtcacggctgaggggtgaacgggaggagcacagtgcacggctgcagcgggagcttgaggcgcagcgggctggctttggggcagaggcagaaaagctggcccggcggcaccaggccataggtgagaaggaggcacgagctgcccaggccgaggagcggaagttccagcagcacatccttgggcagcagaagaaggagctggctgccctgctggaggcacagaagcggacctacaaacttcgcaaggaacagctgaaggaggagctccaggagaaccccagcactcccaagcgggagaaggccgagtggctgctgcggcagaaggagcagctccagcagtgccaggcggaggaggaagcagggctgctgcggcggcagcgccagtactttgagctgcagtgtcgccagtacaagcgcaagatgttgctggctcggcacagcctggaccaggacctgctgcgggaggacctgaacaagaagcagacccagaaggacttggagtgtgcactgctgcttcggcagcacgaggccacgcgggagctggagctgcggcagctccaggccgtgcagcgcacgcgggctgagctcacccgcctgcagcaccagacggagctgggcaaccagctggagtacaacaagcggcgtgagcaagagttgcggcagaagcatgcggcccaggttcgccagcagcccaagagcctcaaagtacgtgcaggccagcgccccccgggccttccactccccattcctggggctctgggcccacccaacacaggcacccctatagaacagcagccctgctcacctggccaggaggcagtcctggaccaaagaatgcttggcgaggaggaggaagcagttggagagagaaggattctgggaaaggaaggggccactttggagcccaagcagcagaggattctgggggaagaatcaggagcccctagtcccagtccacaaaaacatgggagcctggttgatgaggaagtttggggtctgcctgaggagatagaggagcttagggtgccctcccttgtaccccaggagaggagcattgttggccaggaggaggctgggacatggagcttgtgggggaaggaggatgagagtcttctggatgaggagtttgagcttggctgggtccagggcccagcactgactcccgtccctgaggaggaggaagaagaggaagagggggctccgattgggacccctagggatcctggagatggttgtccttcccccgacatccctcctgaaccccctccaacacacctgaggccctgccctgccagccagctccctggactcctgtcccatggcctcctggccggcctctcctttgcagtggggtcctcctctggcctcctgcccctcctgctgctgctgctgcttccattgctggcagcccagggtgggggtggcctgcaggcagcgctgctggcccttgaggtggggctggtgggtctgggggcctcctacctgctcctttgtacagccctgcacctgccctccagtcttttcctactcctggcccagggtaccgcactgggggccgtcctgggcctgagctggcgccgaggcctcatgggtgttcccctgggccttggagctgcctggctcttagcttggccaggcctagctctacctctggtggctatggcagcggggggcagatgggtgcggcagcagggcccccgggtgcgccggggcatatctcgactctggttgcgggttctgctgcgcctgtcacccatggccttccgggccctgcagggctgtggggctgtgggggaccggggtctgtttgcactgtaccccaaaaccaacaaggatggcttccgcagccgcctgcccgtccctgggccccggcggcgtaatccccgcaccacccaacacccattagctctgttggcaagggtctgggtcctgtgcaagggctggaactggcgtctggcacgggccagccagggtttagcatcccacttgcccccgtgggccatccacacactggccagctggggcctgcttcggggtgaacggcccacccgaatcccccggctactaccacgcagccagcgccagctagggccccctgcctcccgccagccactgccagggactctagccgggcggaggtcacgcacccgccagtcccgggccctgcccccctggaggtagctgactccagcccttccagcccaaatctagagcattgagcactttatctcccacgactcagtgaagtttctccagtccctagtcctctcttttcacccaccttcctcagtttgctcacttaccccaggcccagcccttcggacctctagacaggcagcctcctcagctgtggagtccagcagtcactctgtgttctcctggcgctcctcccctaagttattgctgttcgcccgctgtgtgtgctcatcctcaccctcattgactcaggcctggggccaggggtggtggagggtgggaagagtcatgttttttttctcctctttgattttgtttttctgtctcccttccaacctgtccccttccccccaccaaaaaaagaaaaagacaaacacaaataaaatatctgagcggaa

SEQ ID NO: 56550 - DNA, 2173 bp, Homo sapiens
tcacgggaacgcgaccgcgcgccgggacagaagcggcgcgggaggacctgaacaagaagcagacccagaaggacttggagtgtgcactgctgcttcggcagcacgaggccacgcgggagctggagctgcggcagctccaggccgtgcagcgcacgcgggctgagctcacccgcctgcagcaccagacggagctgggcaaccagctggagtacaacaagcggcgtgagcaagagttgcggcagaagcatgcggcccaggttcgccagcagcccaagagcctcaaagtacgtgcaggccagcgccccccgggccttccactccccattcctggggctctgggcccacccaacacaggcacccctatagaacagcagccctgctcacctggccaggaggcagtcctggaccaaagaatgcttggcgaggaggaggaagcagttggagagagaaggattctgggaaaggaaggggccactttggagcccaagcagcagaggattctgggggaagaatcaggagcccctagtcccagtccacaaaaacatgggagcctggttgatgaggaagtttggggtctgcctgaggagatagaggagcttagggtgccctcccttgtaccccaggagaggagcattgttggccaggaggaggctgggacatggagcttgtgggggaaggaggatgagagtcttctggatgaggagtttgagcttggctgggtccagggcccagcactgactcccgtccctgaggaggaggaagaagaggaagagggggctccgattgggacccctagggatcctggagatggttgtccttcccccgacatccctcctgaaccccctccaacacacctgaggccctgccctgccagccagctccctggactcctgtcccatggcctcctggccggcctctcctttgcagtggggtcctcctctggcctcctgcccctcctgctgctgctgctgcttccattgctggcagcccagggtgggggtggcctgcaggcagcgctgctggcccttgaggtggggctggtgggtctgggggcctcctacctgctcctttgtacagccctgcacctgccctccagtcttttcctactcctggcccagggtaccgcactgggggccgtcctgggcctgagctggcgccgaggcctcatgggtgttcccctgggccttggagctgcctggctcttagcttggccaggcctagctctacctctggtggctatggcagcggggggcagatgggtgcggcagcagggcccccgggtgcgccggggcatatctcgactctggttgcgggttctgctgcgcctgtcacccatggccttccgggccctgcagggctgtggggctgtgggggaccggggtctgtttgcactgtaccccaaaaccaacaaggatggcttccgcagccgcctgcccgtccctgggccccggcggcgtaatccccgcaccacccaacacccattagctctgttggcaagggtctgggtcctgtgcaagggctggaactggcgtctggcacgggccagccagggtttagcatcccacttgcccccgtgggccatccacacactggccagctggggcctgcttcggggtgaacggcccacccgaatcccccggctactaccacgcagccagcgccagctagggccccctgcctcccgccagccactgccagggactctagccgggcggaggtcacgcacccgccagtcccgggccctgcccccctggaggtagctgactccagcccttccagcccaaatctagagcattgagcactttatctcccacgactcagtgaagtttctccagtccctagtcctctcttttcacccaccttcctcagtttgctcacttaccccaggcccagcccttcggacctctagacaggcagcctcctcagctgtggagtccagcagtcactctgtgttctcctggcgctcctcccctaagttattgctgttcgcccgctgtgtgtgctcatcctcaccctcattgactcaggcctggggccaggggtggtggagggtgggaagagtcatgttttttttctcctctttgattttgtttttctgtctcccttccaacctgtccccttccccccaccaaaaaaagaaaaagacaaacacaaataaaatatctgagcggaa

SEQ ID NO: 56551 - DNA, 3429 bp, Homo sapiens
gagggagagggagaccgggacgagaccggggctgtggtgcggagagaggctgagacggagaagaggagaggcagagagggcgcggggaccgtcagcagcaccttagctacaatcgttcagctattctcggaagagagaagggagagggaggaggccggggcgggagtgggggctgtcaccctcggaccccggcgtgagaggggccgtgcggccggacgtcctcggggtgggcccccagtcggtggccgaagacctacagctcaggcccctgggtcccaaatttccaggctttgcccctcctcctttctcagatacccgggtaacagtcctcatagtccagatatccgggactcgggtcccaacctctctaaacctgggtctctgtttcatagaatttcaaatatcaggttcaggcccctgcgtgcaccagtatccggggttcattccccgggcgttcaaatatcggattcagtctccatcccgttcagatattcggggttcagaccccacaatcagaaatccggaattcggcagctgtcgccctcgacgagggggaggactggaccgcgaggtcagattaggttgtcaccccctcccctccaggggaggcttcccgggcccgcccctcaggaagggcgaaagccgaggaagaggtggcaaggggaaaggtctccttgcccctctccctgcttggcagagccgctggaggaccccaggcggaagcggaggcgctggggcaccatagtgacccctaccaggccaggccccactctcagggcccccaggggccaccatgccagctgggggccgggccgggagcctgaaggacccagatgtggctgagctcttcttcaaggatgacccagaaaagctcttctctgacctccgggaaattggccatggcagctttggagccgtatactttgcccgggatgtccggaatagtgaggtggtggccatcaagaagatgtcctacagtgggaagcagtccaatgagaaatggcaagacatcatcaaggaggtgcggttcttacagaagctccggcatcccaacaccattcagtaccggggctgttacctgagggagcacacggcttggctggtaatggagtattgcctgggctcagcttctgaccttctagaagtgcacaagaaaccccttcaggaggtagagatcgcagctgtgacccacggggcgcttcagggcctggcatatctgcactcccacaacatgatccatagggatgtgaaggctggaaacatcctgctgtcagagccagggttagtgaagctaggggactttggttctgcgtccatcatggcacctgccaactccttcgtgggcaccccatactggatggcacccgaggtgatcctggccatggatgaggggcagtacgatggcaaagtggacgtctggtccttggggataacctgcatcgagctggctgaacggaaaccaccgctctttaacatgaatgcgatgagtgccttataccacattgcacagaacgaatcccccgtgctccagtcaggacactggtctgagtacttccggaattttgtcgactcctgtcttcagaaaatccctcaagacagaccaacctcagaggttctcctgaagcaccgctttgtgctccgggagcggccacccacagtcatcatggacctgatccagaggaccaaggatgccgtgcgggagctggacaacctgcagtaccgcaagatgaagaagatcctgttccaagaggcacccaacggccctggtgccgaggccccagaggaggaagaggaggccgagccctacatgcaccgggccgggactctgaccagcctcgagagtagccactcagtgcccagcatgtccatcagcgcctccagccagagcagctccgtcaacagcctagcagatgcctcagacaacgaggaagaggaggaggaggaggaggaagaggaggaggaggaagaaggccctgaagcccgggagatggccatgatgcaggagggggagcacacagtcacctctcacagctccattatccaccggctgccgggctctgacaacctatatgatgacccctaccagccagagataacccccagccctctccagccgcctgcagccccagctcccacttccaccacctcttctgcccgccgccgggcctactgccgtaaccgagaccactttgccaccatccgaaccgcctccctggtcagccgtcagatccaggagcatgagcaggactctgcgctgcgggagcagctgagcggctataagcggatgcgacgacagcaccagaagcagctgctggccctggagtcacggctgaggggtgaacgggaggagcacagtgcacggctgcagcgggagcttgaggcgcagcgggctggctttggggcagaggcagaaaagctggcccggcggcaccaggccataggtgagaaggaggcacgagctgcccaggccgaggagcggaagttccagcagcacatccttgggcagcagaagaaggagctggctgccctgctggaggcacagaagcggacctacaaacttcgcaaggaacagctgaaggaggagctccaggagaaccccagcactcccaagcgggagaaggccgagtggctgctgcggcagaaggagcagctccagcagtgccaggcggaggaggaagcagggctgctgcggcggcagcgccagtactttgagctgcagtgtcgccagtacaagcgcaagatgttgctggctcggcacagcctggaccaggacctgctgcgggaggacctgaacaagaagcagacccagaaggacttggagtgtgcactgctgcttcggcagcacgaggccacgcgggagctggagctgcggcagctccaggccgtgcagcgcacgcgggctgagctcacccgcctgcagcaccagacggagctgggcaaccagctggagtacaacaagcggcgtgagcaagagttgcggcagaagcatgcggcccaggttcgccagcagcccaagagcctcaaagtacgtgcaggccagcgccccccgggccttccactccccattcctggggctctgggcccacccaacacaggcacccctatagaacagcagccctgctcacctggccaggaggcagtcctggaccaaagaatgcttggcgaggaggaggaagcagttggagagagaaggattctgggaaaggaaggggccactttggagcccaagcagcagaggattctgggggaagaatcaggagcccctagtcccagtccacaaaaacatgggagcctggttgatgaggaagtttggggtctgcctgaggagatagaggagcttagggtgccctcccttgtaccccaggagaggagcattgttggccaggaggaggctgggacatgagcggtgacaatcatgtggaccgctat

SEQ ID NO: 56552 - DNA, 1712 bp, Homo sapiens
cccctggttgttcctcctcttcctcttcctcctcttcctcctcctcttccccgctgcccccatctccccttgatccgtccactgcatagtctaaggagctgcagatcaagaagcagttccaggagacgtgtaagatccagactcggcagtacaaggctctgcgagcacacttgctggagaccacgcccaaagctcagcacaagagcctccttaagcggctcaaggaagagcagacccgcaagctggcgatcttggcggagcagtatgaccagtccatctcagagatgctcagctcacaggcgctgcggcttgatgagacccaggaggcagagttccaggcccttcggcagcagcttcaacaggagctggagctgctcaacgcttaccagagcaagatcaagatccgcacagagagccagcacgagagggagctgcgggagctggagcagagggtcgcgctgcggcgggcactgctggagcagcgggtggaagaggagctgctggccctgcagacaggacgctccgagcgaatccgcagtctgcttgagcggcaggcccgtgagatcgaggccttcgatgcggaaagcatgaggctgggcttctccagcatggctctggggggcatcccggctgaagctgctgcccagggctatcctgctccaccccctgccccagcctggccctcccgtcccgttccccgttctggggcacactggagccatggccctcctccaccaggcatgccccctccagcctggcgtcagccgtctctgctggctcccccaggccccccaaactggctggggccccccacacaaagtgggacaccccgtggcggagccctgctgctgctaagaaacagcccccagcccctgcggcgggcagcctcggggggcagtggcagtgagaatgtgggcccccctgctgccgcggtgcccgggcccctgagccgcagcaccagtgtcgcttcccacatcctcaatggttcttcccacttctattcctgaggtgcagcggggaggagcagatgagctgggcagggcaggggtgggtggagcctgaccctggagggcactgagctggaggcccctgcaagggtaggggacaagatgtaggctccagctcccctcagacctcctcatctcatgagcttcttggggctggccagtggcccagggccagcttggcgatagatgcctcaaggctgcctgggagccccgcctccctaccatggtgccaggggtctccctccgccacctaggaaaggagggagatgtgcgtgtcaaatattcatctagtcccctgggggaggggaagggtgggtctagacatactatattcagagaactatactaccctcacagtgaggccctcagacctgccacagggcagagcaggtctggggcctgaggcagggagaatgagaggccaccttactggcaggaaggatcaggatggggtcttggggtcaggatgcctgggtctcttcccgtaactgtctgacgtcctgtgccgtcttgtcctttatctttttttttttttttttaattgggatcagggctggggcggggaaacaagggaaggaccttggaaggggctgctcccaggcctggggggcagtcgtgggagcccctctcagctgtggggctggcacagagccccaggcaagcttttaataaactgttggttattctaacagatctcaggactca

SEQ ID NO: 56553 - DNA, 358 bp, Homo sapiens
gttaatctgttatggttcagccccatttctaaaatgggaataactgtagtctttagctaatgaggctactgagaaaaactaagataatgcctccaaaacatgtttcataatacctgtaaggtagagctcaaaagttagcagctattatgtatttttccaacatgtttgattgctgcttctgctcccctgttattgtttggtatacttcatttccagtgatggctggtcactgatgctgaggagccaggcagctagttttaacgtggttgtagctgcctctgttagttaaagctctatgaatgtcacttaagaagagtcctcaaatacggctgtatctttaagacagaacttaacgtgg

SEQ ID NO: 56554 - DNA, 440 bp, Homo sapiens
aaacccaaacaaaagaggctggttggtcttgaggaacttggaaactagactactctacagcctgttaactggtcctcactacccaggaaaagccctcttgttagtaatcggacaattagaacaaccagattctacctctgcctgccttagacagttttggagacagcacacccagttctctttttcttcttctctctccctcctcctcctttttcagaccccatgatgatatgccacttttgtctgggtttttcacttcagagttttttaaaacagatttccctaaccatattgaatcctggagactctttaattgacactgattggtgacagctagtgaggagggagatttcagaacaagaaagtaatgtgtcttgacctagtgtcctctccttttcctggtccccatttcttacttcttgatcctgtctcacttttgc

SEQ ID NO: 56555 - DNA, 639 bp, Homo sapiens
gtcccgttgctggaaggctttcgttaagtacgtgttcagaatttccatgcagaccttgaaagaagagaacacgctcagttatactgaaacccaccaagctgttcacattctgatacttttctgaaaaggctgctgggaacggtgcaaccctgctgtggttgaacccggaggaaagtcgggaggaagtgggccgcctaaggaagccatttccaaggagaagcagccactgtcacctggaagtcagactcattgaagtcatagtacacgttccagccaatcttcccaaacttccttctctcctgcaccacagcatgaaagaacgccagcacgtagaccacctcatcactcactgccatggcctgctggctacaagggcacatctgagctgcagccccacacgctccgcctggcttcgtaccccatgctagagctacattgtccagtgcgatggccgtgaggcacagcacttaaaatgtggctagccccaattgagatgtgctgtaagtgtgaattcacacaggattttgtagacttaataccagaaaaaagcatgtaaaatgtctcaatcatgttcatattgattatacattcaaatgataattttaatatattcatttaaataaaatgttattacaatta

SEQ ID NO: 56556 - DNA, 439 bp, Homo sapiens
gtcccgttgctggaaggctttcgttaagtacgtgttcagaatttccatgcagaccttgaaagaagagaacacgctcagttatactgaaacccaccaagctgttcacattctgatacttttctgaaaaggctgctgggaacggtgcaaccctgctgtggttgaacccggaggaaagtcgggaggaagtgggccgcctaaggaagccatttccaaggagaagcagccactgtcacctggaagtcagactcattgaagtcatagtacacgttccagccaatcttcccaaacttccttctctcctgcaccacagcatgaaagaacgccagcacgtagaccagcggcttgaaggcagggtgcgggcactggtccagcatttcgtgagagatcttgaagtaagtggtgttacaggcgtttgaagggtgttgcaggcgtttgaagg

SEQ ID NO: 56557 - DNA, 444 bp, Homo sapiens
caaccctgctgtggttgaacccggaggaaagtcgggaggaagtgggccgcctaaggaagccatttccaaggagaagcagccactgtcacctggaagtcagactcattgaagtcatagtacacgttccagccaatcttcccaaacttccttctctcctgcaccacagcatgaaagaacgccagcacgtagaccagcggcttgaaggcagggtgcgggcactggtccagcatttcgtgagagatcttgaagtaagttgccctcatgttgagtttcagcccattgggtggctcggtgacaaccttcagaagagaagaaaacacacagtgatggagaccgcaggcccacaagcttggaagagtgtgcacaatgcaggcactgcgctttccttcctctctacggagccatctgtctgagacctccaatagctaaagtctcttgtccagg

SEQ ID NO: 56558 - DNA, 398 bp, Homo sapiens
tcaccctcgcccaataaactaaatactgttttatcctcactttcagaggagaaaatgggggtacagagaaagaagttaaatagcttgttcaaattaagacatattaaatggcagaactggggctttaattcaaacctctgattccagagcctgtgctcctacctttctttttatccagctcatcccaggctaagagtaaaccaggtagtagagattaaataatcctgtaaggtgtgaagtataatgtcccacacaacagagaatttttctgttagatgccatagggggccttttggtttaaaaagtgttaacgggttccaggaagcttaaggtgttgggtgaggtctgatagaattacgaggtacgtttgtgggtgagaaagatgaagttgctttagt

SEQ ID NO: 56559 - DNA, 280 bp, Homo sapiens
  misc_feature (11)..(11): n is a, c, g, or t
aaggatcccgntcactttctacacttccagacctgtgctcctacctttctttttatccagctcatcccaggctaagagtaaaccaggtagtagagattaaataatcctgtaaggtgtgaagtataatgtcccacacaacagagaatttttctgttagatgccatagggggccttttggtttaaaaagtgttaacgggttccaggaagcttaaggtgttgggtgaggtctgatagaattacgaggtacgtttgtgggtgagaaagatgaagttgctttagt

SEQ ID NO: 56560 - DNA, 486 bp, Homo sapiens
  misc_feature (79)..(79): n is a, c, g, or t
  misc_feature (164)..(164): n is a, c, g, or t
  misc_feature (265)..(265): n is a, c, g, or t
  misc_feature (396)..(396): n is a, c, g, or t
  misc_feature (415)..(415): n is a, c, g, or t
  misc_feature (486)..(486): n is a, c, g, or t
ttaaggggaactgacaaattggatgtagctagcgcactctgagggattacgggggatttctgtttgtgtttaaaatggnagataaaagcatatgcttaaccatatggctgtaatgagggagtgatcagtagaagagagatttgttgctggagactgccctaatnaataaatcagcaatatccttgagaaagtgagaggcaaagtacaaaacatacctgtctttccttctaggctgggagctgcttaaacaaagaccatgtttttnttaatcttaaatccctagttcttggcacatagtaggtactgactgaggttttggatgagcacatacacttcacacttaatccatttccagtaccttgttgggtgatgtaccatggggcatagagaagtcanaagacagtgccctgccttnaaaccatgaactcattagctgaggtaacctgaagcagatgagacaggagatgattgggtgtaagtgggagn

SEQ ID NO: 56561 - DNA, 332 bp, Homo sapiens
actgtttaaaaggctccaacactaaggtcctaactgatctggtccctgccttgtcctctcattctacctgtgacactctcctgggccccacccagtgctttaaccattccccgaggatgtcagcatctttcatacccccctcaaccctcaaaccttgccccctggctcagcacaaggaacagtcaggtctcctaggcagtaaatcactccctcctcttgctcccacaattgtaattatatgcttatctgcatcgcaaaactataagctcctctcagcatgggccatgttttgtcatctctgtatctccagcatctggcccgttatctggtac

SEQ ID NO: 56562 - DNA, 210 bp, Homo sapiens
ctgctcttaaagaactcaagttttctttagaactatttaaaaaacaccaaaggaaacctctgaaaatcctgtccatcgttcagtcagtagctgctgtatccagtgtctatcatcgtgaatgtcatggcatgtacagagaaactgaaatgctggatgcaattctaggtggtggtgtaaagtttttgagttggcagaaaataaagaataaaa

SEQ ID NO: 56563 - DNA, 300 bp, Homo sapiens
tctagagtgaccaaccatcctcttgtgcccagaactacaggactttccattttaaaactaggagagtcccacacaaaccaggactgttggtcagtcaccgtaccttcttgctgctagatatgtaattttctttggttttcatcaccggttcccatttctttgaaagtgtttgtaggtcacacactgtgtagtccatgatgaaaagaacaaaagatgtatgaattatggtgtgttgtggtggttcccaaagtagggtccccagaccaccagcagtggcatcatttgagaactccttagaaa

SEQ ID NO: 56564 - DNA, 476 bp, Homo sapiens
gattctaatcaggagaccagtgctcatgtgcacagctttgagtgtgaagatctaaaaattttagttggtaggatgattacagattattttcatcttcctctttacagattattttcatcttcctctttaaacttttgtatatttttcacattttctagaaggaagttttagaaacagaagtgggaaaaaaaacaacttaaaaaaagccccgggccaggcgcagcggctcacacctgtaatcccagcactttgggaggctgaggtgggcggatcacgaggtcaggaaatagagactatcctggccaacacagtgaaaccccgtctctactaaaatgcaaaaaattagccgggcatggtggcgggcgcctgtagtcccagctactcgggaggctgaggcaggggaatcacttgaacccaggaggcggaggctgcagtgagccgagatcacaccactgcactccagcctggcgacagag

SEQ ID NO: 56565 - DNA, 3309 bp, Homo sapiens
agtccagtcctgttacacctcccgcggccgcgcacagcggcaacccgggcgtgcgggggcgcgcgcggtcagggaggggcctgcggaggcgcgaggcccccggaagcgcctttcccggaaggcagggaggcagcgccggcctccggaggcggcctgggcgatggcggcggagttttgtccataacgtgggcaaccgcgcagctggaggatggcctcactcgggcctgccgcagctggggagcaggcgtcgggggctgaggcggagccgggccccgcggggccgccgccgccgccctcaccgtcctctctggggcccctgctccccctgcagcgggaacctctctacaactggcaggcgaccaaggcgtcgctgaaggagcgcttcgccttcctcttcaactcggagctgctgagcgatgtgcgcttcgtactgggcaagggtcgcggcgccgccgccgctgggggcccgcagcgcatccccgcccaccgcttcgtgctggcggccggcagcgccgtctttgacgccatgttcaacggcggcatggccaccacgtcggccgagatcgagctgccggacgtggagcccgcagccttcctggcgctgctgagatttctatattcagatgaagttcaaattggtccagaaacagttatgaccactctttatactgccaagaaatacgcagtcccagccttggaagcacactgtgtagaatttctcaccaaacatcttagggcagataatgcctttatgttacttactcaggctcgattatttgatgaacctcagcttgctagtctttgtctagatacaatagacaaaagcacaatggatgcaataagtgcagaagggtttactgatattgatatagatacactctgtgcagttttagagagagacacactcagtattcgagaaagtcgactttttggagctgttgtacgctgggcagaagcagaatgtcagagacaacaattacctgtgacttttgggaataaacaaaaagttctaggaaaagcactttccttaatccggttcccactgatgacaattgaggaatttgcagcaggtcctgctcaatctggaattttgtcagatcgtgaagtggtaaacctctttcttcattttactgtcaaccctaaaccccgagttgaatacattgaccgaccaagatgctgtctcaggggaaaggaatgctgcatcaatagattccagcaagtagaaagccgctggggttacagtgggacgagtgatcgaatcagattcacagttaatagaaggatctctatagttggatttggcttgtatggatctattcatggccctacagattatcaagtgaatatacagatcattgaatatgagaaaaagcaaaccctgggacagaatgataccggctttagttgtgatgggacagctaacacattcagggtcatgttcaaggaacccatagagatcctgcccaatgtgtgctacacagcatgtgcaacactcaaaggtccagattcccactatggcacaaaaggattgaagaaagtagtgcatgagacacctgctgcaagcaagactgtttttttcttttttagttcccctggcaataataatggcacttcaatagaagatggacaaattccagaaatcatattttatacataatttagcattataatacatcttggctaaataataccatacaatctagtgtcaaaaacataaatggccacaaaaaagtagtttgagtgttatgaatatttaaaattgtaagataagaaacagtttcttagagcagatagaaaaatgcttatttaaatctttgcatgatttaaaaacagattttccattttcttacaactttaagagaaaagaactgggtttaatggtttaaaaaaaagcacagctttttcaccttcatcttgtataatttcatagattggctgacttagggtctttcaatagtttgggaattgaaagattcttgttatatatagctagtttgggtttgtttttgttttaactattttgaaggttaggtgagatgggcaaataggcttaactattttgaaggttggatgaaaagagatgggtcagtattcctacagaattcttattaactcaaataactaaatttcagaaaattaagaagctgactttatatttggtggtttgaagtatcttgttgttagcatttgtaataatgctaaaaaaggcctaataaaatgcccaagaaaatattcagtgcatttatagagaaggatattttgtagtagtatagtaatgtgttatgtagtacagttttaaagctataaatggaattttgtgtaaattcacaaaaatgtgatataaacaggatctaagactggattccctgtcactaaactgcaccactatacctgtctctctgtgtgggggacactgctgatgattcccaagattgagatgatgacggtgatgacgactgggtgaacagccatcacttcaacattgtgataatccttcacagcaagaaaccgaataaaatactaacatttctaacaactgctctgacattgtaaagagatccaacagaatcactcctgctgaaaaatacgctttctgccacctacacatttctatttaggaagtaaaatttgcttcatggtcatgaccccattagtcagtgttacagctgtgttggggataggaagtatatctggcagattgacatttatacacttttttataaagcagattttaaaatatagtaacatccatttttttcccttgaaagtgattctcttataaaaaatgaaagtggagtttaaggtatatcaaatcgttgtggaaggtgattaaaaatcaaaattcttttaaatatcaacttaattttttctaagtaagatacaaaaaattttcatctaaagtaatatttcactttatattgtaaagaaggtaggtatattggtggctgaggtctcttgaaattgctaaagggaaatttttctatggtaatgctcttacggatataaacctcagttaaatggaattatctatgggatgtgtggttctggttaactaaaaattaaccagtaaacactctgtagtaaccattacagaaaatacttctgccttaaaaaatatgatatgccagagatgagttagtgtttcttgacgttggagaccttttaaatgcctcatctgttgtactgaacaattgaaactgcatgcagccataaaagggacaagaaacagaactgtttactaactttgggacatcccctggagtttttaaaaataaataaatatatatatatataaaaaaaactctttta

SEQ ID NO: 56566 - DNA, 546 bp, Homo sapiens
  misc_feature (9)..(9): n is a, c, g, or t
tcagacganccatggttacgcccctgatatagatacactctgtgcagttttagagagagacacactcagtattcgagaaagtcgactttttggagctgttgtacgctgggcagaagcagaatgtcagagacaacaattacctgtgacttttgggaataaacaaaaagttctaggaaaagcactttccttaatccggttcccactgatgacaattgaggaatttgcagcaggtcctgctcaatctggaattttgtcagatcgtgaagtggtaaacctctttcttcattttactgtcaaccctaaaccccgagttgaatacattgaccgaccaagatgctgtctcaggggaaaggaatgctgcatcaatagattccagcaagtagaaagccgctggggttacagtgggacgagtgatcgaatcagattcacagttaatagaaggatctctatagttggatttggcttgtatggatctattcatggccctacagattatcaagtgaatatacaggggcgtaacccatgggatccttgacaagaaccaca

SEQ ID NO: 56567 - DNA, 534 bp, Homo sapiens
taagggctttatattattttctatagtttgctttatttggtttaacttaaatgtaacttgtctcttaaaaattacagatcattgaatatgagaaaaagcaaaccctgggacagaatgataccggctttagttgtgatgggacagctaacacattcagggtcatgttcaaggaacccatagagatcctgcccaatgtgtgctacacagcatgtgcaacactcaaagtaagagtcatgcactatgttccagatggtttcctcttgaatgttgcagaatgtgtgttttagaagctgagagtcactgacagctgagccatttataaagaggggggaaaagaagctgggagctaaaatattccactgccttccgaaaagaagtacttctccccacagctctgttctgaaagaaatagctcttcttaagaagtagccctttgtttcagtaagcagttgaatgtttggcagaaaataaaagttatttttgtaaaatcttttcactattctctaatagctgggctgtacattcagtattttt

SEQ ID NO: 56568 - DNA, 2688 bp, Homo sapiens
ttatgagaccactactttaatgactggggcgaggataataacgccgatcccccagacctctgggaggccgaccaactgttgttaggaatttgctccaccaaacatcttagggccagaataatgcctgttatggttacttactcaggctcgattatttgatgaacctcagcttgctagtctttgtctagatacaatagacaaaagcacaatggatgcaataagtgcagaagggtttactgatattgatatagatacactctgtgcagttttagagagagacacactcagtattcgagaaagtcgactttttggagctgttgtacgctgggcagaagcagaatgtcagagacaacaattacctgtgacttttgggaataaacaaaaagttctaggaaaagcactttccttaatccggttcccactgatgacaattgaggaatttgcagcaggtcctgctcaatctggaattttgtcagatcgtgaagtggtaaacctctttcttcattttactgtcaaccctaaaccccgagttgaatacattgaccgaccaagatgctgtctcaggggaaaggaatgctgcatcaatagattccagcaagtagaaagccgctggggttacagtgggacgagtgatcgaatcagattcacagttaatagaaggatctctatagttggatttggcttgtatggatctattcatggccctacagattatcaagtgaatatacagatcattgaatatgagaaaaagcaaaccctgggacagaatgataccggctttagttgtgatgggacagctaacacattcagggtcatgttcaaggaacccatagagatcctgcccaatgtgtgctacacagcatgtgcaacactcaaaggtccagattcccactatggcacaaaaggattgaagaaagtagtgcatgagacacctgctgcaagcaagactgtttttttcttttttagttcccctggcaataataatggcacttcaatagaagatggacaaattccagaaatcatattttatacataatttagcattataatacatcttggctaaataataccatacaatctagtgtcaaaaacataaatggccacaaaaaagtagtttgagtgttatgaatatttaaaattgtaagataagaaacagtttcttagagcagatagaaaaatgcttatttaaatctttgcatgatttaaaaacagattttccattttcttacaactttaagagaaaagaactgggtttaatggtttaaaaaaaagcacagctttttcaccttcatcttgtataatttcatagattggctgacttagggtctttcaatagtttgggaattgaaagattcttgttatatatagctagtttgggtttgtttttgttttaactattttgaaggttaggtgagatgggcaaataggcttaactattttgaaggttggatgaaaagagatgggtcagtattcctacagaattcttattaactcaaataactaaatttcagaaaattaagaagctgactttatatttggtggtttgaagtatcttgttgttagcatttgtaataatgctaaaaaaggcctaataaaatgcccaagaaaatattcagtgcatttatagagaaggatattttgtagtagtatagtaatgtgttatgtagtacagttttaaagctataaatggaattttgtgtaaattcacaaaaatgtgatataaacaggatctaagactggattccctgtcactaaactgcaccactatacctgtctctctgtgtgggggacactgctgatgattcccaagattgagatgatgacggtgatgacgactgggtgaacagccatcacttcaacattgtgataatccttcacagcaagaaaccgaataaaatactaacatttctaacaactgctctgacattgtaaagagatccaacagaatcactcctgctgaaaaatacgctttctgccacctacacatttctatttaggaagtaaaatttgcttcatggtcatgaccccattagtcagtgttacagctgtgttggggataggaagtatatctggcagattgacatttatacacttttttataaagcagattttaaaatatagtaacatccatttttttcccttgaaagtgattctcttataaaaaatgaaagtggagtttaaggtatatcaaatcgttgtggaaggtgattaaaaatcaaaattcttttaaatatcaacttaattttttctaagtaagatacaaaaaattttcatctaaagtaatatttcactttatattgtaaagaaggtaggtatattggtggctgaggtctcttgaaattgctaaagggaaatttttctatggtaatgctcttacggatataaacctcagttaaatggaattatctatgggatgtgtggttctggttaactaaaaattaaccagtaaacactctgtagtaaccattacagaaaatacttctgccttaaaaaatatgatatgccagagatgagttagtgtttcttgacgttggagaccttttaaatgcctcatctgttgtactgaacaattgaaactgcatgcagccataaaagggacaagaaacagaactgtttactaactttgggacatcccctggagtttttaaaaataaataaatatatatatatataaaaaaaactctttta

SEQ ID NO: 56569 - DNA, 3403 bp, Homo sapiens
agtccagtcctgttacacctcccgcggccgcgcacagcggcaacccgggcgtgcgggggcgcgcgcggtcagggaggggcctgcggaggcgcgaggcccccggaagcgcctttcccggaaggcagggaggcagcgccggcctccggaggcggcctgggcgatggcggcggagttttgtccataacgtgggcaaccgcgcagctggaggatggcctcactcgggcctgccgcagctggggagcaggcgtcgggggctgaggcggagccgggccccgcggggccgccgccgccgccctcaccgtcctctctggggcccctgctccccctgcagcgggaacctctctacaactggcaggcgaccaaggcgtcgctgaaggagcgcttcgccttcctcttcaactcggagctgctgagcgatgtgcgcttcgtactgggcaagggtcgcggcgccgccgccgctgggggcccgcagcgcatccccgcccaccgcttcgtgctggcggccggcagcgccgtctttgacgccatgttcaacggcggcatggccaccacgtcggccgagatcgagctgccggacgtggagcccgcagccttcctggcgctgctgagatttctatattcagatgaagttcaaattggtccagaaacagttatgaccactctttatactgccaagaaatacgcagtcccagccttggaagcacactgtgtagaatttctcaccaaacatcttagggcagataatgcctttatgttacttactcaggctcgattatttgatgaacctcagcttgctagtctttgtctagatacaatagacaaaagcacaatggatgcaataagtgcagaagggtttactgatattgatatagatacactctgtgcagttttagagagagacacactcagtattcgagaaagtcgactttttggagctgttgtacgctgggcagaagcagaatgtcagagacaacaattacctgtgacttttgggaataaacaaaaagttctaggaaaagcactttccttaatccggttcccactgatgacaattgaggaatttgcagcaggtcctgctcaatctggaattttgtcagatcgtgaagtggtaaacctctttcttcattttactgtcaaccctaaaccccgagttgaatacattgaccgaccaagatgctgtctcaggggaaaggaatgctgcatcaatagattccagcaagtagaaagccgctggggttacagtgggacgagtgatcgaatcagattcacagttaatagaaggatctctatagttggatttggcttgtatggatctattcatggccctacagattatcaagtgaatatacagatcattgaatatgagaaaaagcaaaccctgggacagaatgataccggctttagttgtgatgggacagctaacacattcagggtcatgttcaaggaacccatagagatcctgcccaatgtgtgctacacagcatgtgcaacactcaaaggtccagattcccactatggcacaaaaggattgaagaaagtagtgcatgagacacctgctgcaagcaagactgtttttttcttttttagttcccctggcaataataatggcacttcaatagaagatggacaaattccagaaatcatattttatacataatttagcattataatacatcttggctaaataataccatacaatctagtgtcaaaaacataaatggccacaaaaaagtagtttgagtgttatgaatatttaaaattgtaagataagaaacagtttcttagagcagatagaaaaatgcttatttaaatctttgcatgatttaaaaacagattttccattttcttacaactttaagagaaaagaactgggtttaatggtttaaaaaaaagcacagctttttcaccttcatcttgtataatttcatagattggctgacttagggtctttcaatagtttgggaattgaaagattcttgttatatatagctagtttgggtttgtttttgttttaactattttgaaggttaggtgagatgggcaaataggcttaactattttgaaggttggatgaaaagagatgggtcagtattcctacagaattcttattaactcaaataactaaatttcagaaaattaagaagctgactttatatttggtggtttgaagtatcttgttgttagcatttgtaataatgctaaaaaaggcctaataaaatgcccaagaaaatattcagtgcatttatagagaaggatattttgtagtagtatagtaatgtgttatgtagtacagttttaaagctataaatggaattttgtgtaaattcacaaaaatgtgatataaacaggatctaagactggattccctgtcactaaactgcaccactatacctgtctctctgtgtgggggacactgctgatgattcccaagattgagatgatgacggtgatgacgactgggtgaacagccatcacttcaacattgtgataatccttcacagcaagaaaccgaataaaatactaacatttctaacaactgctctgacattgtaaagagatccaacagaatcactcctgctgaaaaatacgctttctgccacctacacatttctatttaggaagtaaaatttgcttcatggtcatgaccccattagtcagtgttacagctgtgttggggataggaagtatatctggcagattgacatttatacacttttttataaagcagattttaaaatatagtaacatccatttttttcccttgaaagtgattctcttataaaaaatgaaagtggagtttaaggtatatcaaatcgttgtggaaggtgattaaaaatcaaaattcttttaaatatcaacttaattttttctaagtaagatacaaaaaattttcatctaaagtaatatttcactttatattgtaaagaaggtaggtatattggtggctgaggtctcttgaaattgctaaagggaaatttttctatggtaatgctcttacggatataaacctcagttaaatggaattatctatgggatgtgtggttctggttaactaaaaattaaccagtaaacactctgtagtaaccattacagaaaatacttctgccttaaaaaatatgatatgccagagatgagttagtgtttcttgacgttggagaccttttaaatgcctcatctgttgtactgaacaattgaaactgcatgcagccataaaagggacaagaaacagaactgtttactaactttgggacatcccctggagtttaaatataattttttttccaagaaaaaaaaaaaaaagttggggcgcgaaagttaaaatttggggggccggaaaaaggagggcagacggcgggggtccaaaacggcggtaacagtggttgaaagagaacgccaggggaaa

SEQ ID NO: 56570 - DNA, 2469 bp, Homo sapiens
  misc_feature (9)..(9): n is a, c, g, or t
tcagacganccatggttacgcccctgatatagatacactctgtgcagttttagagagagacacactcagtattcgagaaagtcgactttttggagctgttgtacgctgggcagaagcagaatgtcagagacaacaattacctgtgacttttgggaataaacaaaaagttctaggaaaagcactttccttaatccggttcccactgatgacaattgaggaatttgcagcaggtcctgctcaatctggaattttgtcagatcgtgaagtggtaaacctctttcttcattttactgtcaaccctaaaccccgagttgaatacattgaccgaccaagatgctgtctcaggggaaaggaatgctgcatcaatagattccagcaagtagaaagccgctggggttacagtgggacgagtgatcgaatcagattcacagttaatagaaggatctctatagttggatttggcttgtatggatctattcatggccctacagattatcaagtgaatatacagatcattgaatatgagaaaaagcaaaccctgggacagaatgataccggctttagttgtgatgggacagctaacacattcagggtcatgttcaaggaacccatagagatcctgcccaatgtgtgctacacagcatgtgcaacactcaaaggtccagattcccactatggcacaaaaggattgaagaaagtagtgcatgagacacctgctgcaagcaagactgtttttttcttttttagttcccctggcaataataatggcacttcaatagaagatggacaaattccagaaatcatattttatacataatttagcattataatacatcttggctaaataataccatacaatctagtgtcaaaaacataaatggccacaaaaaagtagtttgagtgttatgaatatttaaaattgtaagataagaaacagtttcttagagcagatagaaaaatgcttatttaaatctttgcatgatttaaaaacagattttccattttcttacaactttaagagaaaagaactgggtttaatggtttaaaaaaaagcacagctttttcaccttcatcttgtataatttcatagattggctgacttagggtctttcaatagtttgggaattgaaagattcttgttatatatagctagtttgggtttgtttttgttttaactattttgaaggttaggtgagatgggcaaataggcttaactattttgaaggttggatgaaaagagatgggtcagtattcctacagaattcttattaactcaaataactaaatttcagaaaattaagaagctgactttatatttggtggtttgaagtatcttgttgttagcatttgtaataatgctaaaaaaggcctaataaaatgcccaagaaaatattcagtgcatttatagagaaggatattttgtagtagtatagtaatgtgttatgtagtacagttttaaagctataaatggaattttgtgtaaattcacaaaaatgtgatataaacaggatctaagactggattccctgtcactaaactgcaccactatacctgtctctctgtgtgggggacactgctgatgattcccaagattgagatgatgacggtgatgacgactgggtgaacagccatcacttcaacattgtgataatccttcacagcaagaaaccgaataaaatactaacatttctaacaactgctctgacattgtaaagagatccaacagaatcactcctgctgaaaaatacgctttctgccacctacacatttctatttaggaagtaaaatttgcttcatggtcatgaccccattagtcagtgttacagctgtgttggggataggaagtatatctggcagattgacatttatacacttttttataaagcagattttaaaatatagtaacatccatttttttcccttgaaagtgattctcttataaaaaatgaaagtggagtttaaggtatatcaaatcgttgtggaaggtgattaaaaatcaaaattcttttaaatatcaacttaattttttctaagtaagatacaaaaaattttcatctaaagtaatatttcactttatattgtaaagaaggtaggtatattggtggctgaggtctcttgaaattgctaaagggaaatttttctatggtaatgctcttacggatataaacctcagttaaatggaattatctatgggatgtgtggttctggttaactaaaaattaaccagtaaacactctgtagtaaccattacagaaaatacttctgccttaaaaaatatgatatgccagagatgagttagtgtttcttgacgttggagaccttttaaatgcctcatctgttgtactgaacaattgaaactgcatgcagccataaaagggacaagaaacagaactgtttactaactttgggacatcccctggagtttttaaaaataaataaatatatatatatataaaaaaaactctttta

SEQ ID NO: 56571 - DNA, 3422 bp, Homo sapiens
agtccagtcctgttacacctcccgcggccgcgcacagcggcaacccgggcgtgcgggggcgcgcgcggtcagggaggggcctgcggaggcgcgaggcccccggaagcgcctttcccggaaggcagggaggcagcgccggcctccggaggcggcctgggcgatggcggcggagttttgtccataacgtgggcaaccgcgcagctggaggatggcctcactcgggcctgccgcagctggggagcaggcgtcgggggctgaggcggagccgggccccgcggggccgccgccgccgccctcaccgtcctctctggggcccctgctccccctgcagcgggaacctctctacaactggcaggcgaccaaggcgtcgctgaaggagcgcttcgccttcctcttcaactcggagctgctgagcgatgtgcgcttcgtactgggcaagggtcgcggcgccgccgccgctgggggcccgcagcgcatccccgcccaccgcttcgtgctggcggccggcagcgccgtctttgacgccatgttcaacggcggcatggccaccacgtcggccgagatcgagctgccggacgtggagcccgcagccttcctggcgctgctgagatttctatattcagatgaagttcaaattggtccagaaacagttatgaccactctttatactgccaagaaatacgcagtcccagccttggaagcacactgtgtagaatttctcaccaaacatcttagggcagataatgcctttatgttacttactcaggctcgattatttgatgaacctcagcttgctagtctttgtctagatacaatagacaaaagcacaatggatgcaataagtgcagaagggtttactgatattgatatagatacactctgtgcagttttagagagagacacactcagtattcgagaaagtcgactttttggagctgttgtacgctgggcagaagcagaatgtcagagacaacaattacctgtgacttttgggaataaacaaaaagttctaggaaaagcactttccttaatccggttcccactgatgacaattgaggaatttgcagcaggtcctgctcaatctggaattttgtcagatcgtgaagtggtaaacctctttcttcattttactgtcaaccctaaaccccgagttgaatacattgaccgaccaagatgctgtctcaggggaaaggaatgctgcatcaatagattccagcaagtagaaagccgctggggttacagtgggacgagtgatcgaatcaggcaaatataaattatcaaaattgactgaagaagaaaagcctgaatagaccaattaccatggaaggaattaaaagttatcaaagaactgtcccttcacaaggtggtttttacagattcacagttaatagaaggatctctatagttggatttggcttgtatggatctattcatggccctacagattatcaagtgaatatacagatcattgaatatgagaaaaagcaaaccctgggacagaatgataccggctttagttgtgatgggacagctaacacattcagggtcatgttcaaggaacccatagagatcctgcccaatgtgtgctacacagcatgtgcaacactcaaaggtccagattcccactatggcacaaaaggattgaagaaagtagtgcatgagacacctgctgcaagcaagactgtttttttcttttttagttcccctggcaataataatggcacttcaatagaagatggacaaattccagaaatcatattttatacataatttagcattataatacatcttggctaaataataccatacaatctagtgtcaaaaacataaatggccacaaaaaagtagtttgagtgttatgaatatttaaaattgtaagataagaaacagtttcttagagcagatagaaaaatgcttatttaaatctttgcatgatttaaaaacagattttccattttcttacaactttaagagaaaagaactgggtttaatggtttaaaaaaaagcacagctttttcaccttcatcttgtataatttcatagattggctgacttagggtctttcaatagtttgggaattgaaagattcttgttatatatagctagtttgggtttgtttttgttttaactattttgaaggttaggtgagatgggcaaataggcttaactattttgaaggttggatgaaaagagatgggtcagtattcctacagaattcttattaactcaaataactaaatttcagaaaattaagaagctgactttatatttggtggtttgaagtatcttgttgttagcatttgtaataatgctaaaaaaggcctaataaaatgcccaagaaaatattcagtgcatttatagagaaggatattttgtagtagtatagtaatgtgttatgtagtacagttttaaagctataaatggaattttgtgtaaattcacaaaaatgtgatataaacaggatctaagactggattccctgtcactaaactgcaccactatacctgtctctctgtgtgggggacactgctgatgattcccaagattgagatgatgacggtgatgacgactgggtgaacagccatcacttcaacattgtgataatccttcacagcaagaaaccgaataaaatactaacatttctaacaactgctctgacattgtaaagagatccaacagaatcactcctgctgaaaaatacgctttctgccacctacacatttctatttaggaagtaaaatttgcttcatggtcatgaccccattagtcagtgttacagctgtgttggggataggaagtatatctggcagattgacatttatacacttttttataaagcagattttaaaatatagtaacatccatttttttcccttgaaagtgattctcttataaaaaatgaaagtggagtttaaggtatatcaaatcgttgtggaaggtgattaaaaatcaaaattcttttaaatatcaacttaattttttctaagtaagatacaaaaaattttcatctaaagtaatatttcactttatattgtaaagaaggtaggtatattggtggctgaggtctcttgaaattgctaaagggaaatttttctatggtaatgctcttacggatataaacctcagttaaatggaattatctatgggatgtgtggttctggttaactaaaaattaaccagtaaacactctgtagtaaccattacagaaaatacttctgccttaaaaaatatgatatgccagagatgagttagtgtttcttgacgttggagaccttttaaatgcctcatctgttgtactgaacaattgaaactgcatgcagccataaaagggacaagaaacagaactgtttactaactttgggacatcccctggagtttttaaaaataaataaatatatatatatataaaaaaaactctttta

SEQ ID NO: 56572 - DNA, 3221 bp, Homo sapiens
agtccagtcctgttacacctcccgcggccgcgcacagcggcaacccgggcgtgcgggggcgcgcgcggtcagggaggggcctgcggaggcgcgaggcccccggaagcgcctttcccggaaggcagggaggcagcgccggcctccggaggcggcctgggcgatggcggcggagttttgtccataacgtgggcaaccgcgcagctggaggatggcctcactcgggcctgccgcagctggggagcaggcgtcgggggctgaggcggagccgggccccgcggggccgccgccgccgccctcaccgtcctctctggggcccctgctccccctgcagcgggaacctctctacaactggcaggcgaccaaggcgtcgctgaaggagcgcttcgccttcctcttcaactcggagctgctgagcgatgtgcgcttcgtactgggcaagggtcgcggcgccgccgccgctgggggcccgcagcgcatccccgcccaccgcttcgtgctggcggccggcagcgccgtctttgacgccatgttcaacggcggcatggccaccacgtcggccgagatcgagctgccggacgtggagcccgcagccttcctggcgctgctgagatttctatattcagatgaagttcaaattggtccagaaacagttatgaccactctttatactgccaagaaatacgcagtcccagccttggaagcacactgtgtagaatttctcaccaaacatcttagggcagataatgcctttatgttacttactcaggctcgattatttgatgaacctcagcttgctagtctttgtctagatacaatagacaaaagcacaatggatgcaataagtgcagaagggtttactgatattgatatagatacactctgtgcagttttagagagagacacactcagtattcgagaaagtcgactttttggagctgttgtacgctgggcagaagcagaatgtcagagacaacaattacctgtgacttttgggaataaacaaaaagttctaggaaaagcactttccttaatccggttcccactgatgacaattgaggaatttgcagcaggtcctgctcaatctggaattttgtcagatcgtgaagtggtaaacctctttcttcattttactgtcaaccctaaaccccgagttgaatacattgaccgaccaagatgctgtctcaggggaaaggaatgctgcatcaatagattccagcaagtagaaagccgctggggttacagtgggacgagtgatcgaatcagatcattgaatatgagaaaaagcaaaccctgggacagaatgataccggctttagttgtgatgggacagctaacacattcagggtcatgttcaaggaacccatagagatcctgcccaatgtgtgctacacagcatgtgcaacactcaaaggtccagattcccactatggcacaaaaggattgaagaaagtagtgcatgagacacctgctgcaagcaagactgtttttttcttttttagttcccctggcaataataatggcacttcaatagaagatggacaaattccagaaatcatattttatacataatttagcattataatacatcttggctaaataataccatacaatctagtgtcaaaaacataaatggccacaaaaaagtagtttgagtgttatgaatatttaaaattgtaagataagaaacagtttcttagagcagatagaaaaatgcttatttaaatctttgcatgatttaaaaacagattttccattttcttacaactttaagagaaaagaactgggtttaatggtttaaaaaaaagcacagctttttcaccttcatcttgtataatttcatagattggctgacttagggtctttcaatagtttgggaattgaaagattcttgttatatatagctagtttgggtttgtttttgttttaactattttgaaggttaggtgagatgggcaaataggcttaactattttgaaggttggatgaaaagagatgggtcagtattcctacagaattcttattaactcaaataactaaatttcagaaaattaagaagctgactttatatttggtggtttgaagtatcttgttgttagcatttgtaataatgctaaaaaaggcctaataaaatgcccaagaaaatattcagtgcatttatagagaaggatattttgtagtagtatagtaatgtgttatgtagtacagttttaaagctataaatggaattttgtgtaaattcacaaaaatgtgatataaacaggatctaagactggattccctgtcactaaactgcaccactatacctgtctctctgtgtgggggacactgctgatgattcccaagattgagatgatgacggtgatgacgactgggtgaacagccatcacttcaacattgtgataatccttcacagcaagaaaccgaataaaatactaacatttctaacaactgctctgacattgtaaagagatccaacagaatcactcctgctgaaaaatacgctttctgccacctacacatttctatttaggaagtaaaatttgcttcatggtcatgaccccattagtcagtgttacagctgtgttggggataggaagtatatctggcagattgacatttatacacttttttataaagcagattttaaaatatagtaacatccatttttttcccttgaaagtgattctcttataaaaaatgaaagtggagtttaaggtatatcaaatcgttgtggaaggtgattaaaaatcaaaattcttttaaatatcaacttaattttttctaagtaagatacaaaaaattttcatctaaagtaatatttcactttatattgtaaagaaggtaggtatattggtggctgaggtctcttgaaattgctaaagggaaatttttctatggtaatgctcttacggatataaacctcagttaaatggaattatctatgggatgtgtggttctggttaactaaaaattaaccagtaaacactctgtagtaaccattacagaaaatacttctgccttaaaaaatatgatatgccagagatgagttagtgtttcttgacgttggagaccttttaaatgcctcatctgttgtactgaacaattgaaactgcatgcagccataaaagggacaagaaacagaactgtttactaactttgggacatcccctggagtttttaaaaataaataaatatatatatatataaaaaaaactctttta

SEQ ID NO: 56573 - DNA, 2679 bp, Homo sapiens
ctcattcatttgtttttgtttttgttgcatttgcttttgggttcttagtcatgaattctttacctaagccaatgtcttgaagagtttttttgatgctatcttctagaatttttatggtttcttagatttaagtctttgatccatcttgagttgatttttgtataaggtgagaaaggaggattcctggcatccatgaggaatagcatttattcctggatctaagttttgactaattaatgcttttaacattttaattaatgtgtttaacctcaaatggatttattgaaaccttaaaatatatgcaaaaattatatatgctaagatttttttcccctatttttatgttacgtcctctagatttgaatttacgttaagtgaattccaaagttaggaattgaaatcaaattcctttttttaggcttatgtttttatttccacaggtcctgctcaatctggaattttgtcagatcgtgaagtggtaaacctctttcttcattttactgtcaaccctaaaccccgagttgaatacattgaccgaccaagatgctgtctcaggggaaaggaatgctgcatcaatagattccagcaagtagaaagccgctggggttacagtgggacgagtgatcgaatcagattcacagttaatagaaggatctctatagttggatttggcttgtatggatctattcatggccctacagattatcaagtgaatatacagatcattgaatatgagaaaaagcaaaccctgggacagaatgataccggctttagttgtgatgggacagctaacacattcagggtcatgttcaaggaacccatagagatcctgcccaatgtgtgctacacagcatgtgcaacactcaaaggtccagattcccactatggcacaaaaggattgaagaaagtagtgcatgagacacctgctgcaagcaagactgtttttttcttttttagttcccctggcaataataatggcacttcaatagaagatggacaaattccagaaatcatattttatacataatttagcattataatacatcttggctaaataataccatacaatctagtgtcaaaaacataaatggccacaaaaaagtagtttgagtgttatgaatatttaaaattgtaagataagaaacagtttcttagagcagatagaaaaatgcttatttaaatctttgcatgatttaaaaacagattttccattttcttacaactttaagagaaaagaactgggtttaatggtttaaaaaaaagcacagctttttcaccttcatcttgtataatttcatagattggctgacttagggtctttcaatagtttgggaattgaaagattcttgttatatatagctagtttgggtttgtttttgttttaactattttgaaggttaggtgagatgggcaaataggcttaactattttgaaggttggatgaaaagagatgggtcagtattcctacagaattcttattaactcaaataactaaatttcagaaaattaagaagctgactttatatttggtggtttgaagtatcttgttgttagcatttgtaataatgctaaaaaaggcctaataaaatgcccaagaaaatattcagtgcatttatagagaaggatattttgtagtagtatagtaatgtgttatgtagtacagttttaaagctataaatggaattttgtgtaaattcacaaaaatgtgatataaacaggatctaagactggattccctgtcactaaactgcaccactatacctgtctctctgtgtgggggacactgctgatgattcccaagattgagatgatgacggtgatgacgactgggtgaacagccatcacttcaacattgtgataatccttcacagcaagaaaccgaataaaatactaacatttctaacaactgctctgacattgtaaagagatccaacagaatcactcctgctgaaaaatacgctttctgccacctacacatttctatttaggaagtaaaatttgcttcatggtcatgaccccattagtcagtgttacagctgtgttggggataggaagtatatctggcagattgacatttatacacttttttataaagcagattttaaaatatagtaacatccatttttttcccttgaaagtgattctcttataaaaaatgaaagtggagtttaaggtatatcaaatcgttgtggaaggtgattaaaaatcaaaattcttttaaatatcaacttaattttttctaagtaagatacaaaaaattttcatctaaagtaatatttcactttatattgtaaagaaggtaggtatattggtggctgaggtctcttgaaattgctaaagggaaatttttctatggtaatgctcttacggatataaacctcagttaaatggaattatctatgggatgtgtggttctggttaactaaaaattaaccagtaaacactctgtagtaaccattacagaaaatacttctgccttaaaaaatatgatatgccagagatgagttagtgtttcttgacgttggagaccttttaaatgcctcatctgttgtactgaacaattgaaactgcatgcagccataaaagggacaagaaacagaactgtttactaactttgggacatcccctggagtttttaaaaataaataaatatatatatatataaaaaaaactctttta

SEQ ID NO: 56574 - DNA, 3306 bp, Homo sapiens
agtccagtcctgttacacctcccgcggccgcgcacagcggcaacccgggcgtgcgggggcgcgcgcggtcagggaggggcctgcggaggcgcgaggcccccggaagcgcctttcccggaaggcagggaggcagcgccggcctccggaggcggcctgggcgatggcggcggagttttgtccataacgtgggcaaccgcgcagctggaggatggcctcactcgggcctgccgcagctggggagcaggcgtcgggggctgaggcggagccgggccccgcggggccgccgccgccgccctcaccgtcctctctggggcccctgctccccctgcagcgggaacctctctacaactggcaggcgaccaaggcgtcgctgaaggagcgcttcgccttcctcttcaactcggagctgctgagcgatgtgcgcttcgtactgggcaagggtcgcggcgccgccgccgctgggggcccgcagcgcatccccgcccaccgcttcgtgctggcggccggcagcgccgtctttgacgccatgttcaacggcggcatggccaccacgtcggccgagatcgagctgccggacgtggagcccgcagccttcctggcgctgctgagatttctatattcagatgaagttcaaattggtccagaaacagttatgaccactctttatactgccaagaaatacgcagtcccagccttggaagcacactgtgtagaatttctcaccaaacatcttagggcagataatgcctttatgttacttactcaggctcgattatttgatgaacctcagcttgctagtctttgtctagatacaatagacaaaagcacaatggatgcaataagtgcagaagggtttactgatattgatatagatacactctgtgcagttttagagagagacacactcagtattcgagaaagtcgactttttggagctgttgtacgctgggcagaagcagaatgtcagagacaacaattacctgtgacttttgggaataaacaaaaagttctaggaaaagcactttccttaatccggttcccactgatgacaattgaggaatttgcagcaggtcctgctcaatctggaattttgtcagatcgtgaagtggtaaacctctttcttcattttactgtcaaccctaaaccccgagttgaatacattgaccgaccaagatgctgtctcaggggaaaggaatgctgcatcaatagattccagcaagtagaaagccgctggggttacagtgggacgagtgatcgaatcagattcacagttaatagaaggatctctatagttggatttggcttgtatggatctattcatggccctacagattatcaagtgaatatacagatcattgaatatgagaaaaagcaaaccctgggacagaatgataccggctttagttgtgatgggacagctaacacattcagggtcatgttcaaggaacccatagagatcctgcccaatgtgtgctacacagcatgtgcaacactcaaaggtccagattcccactatggcacaaaaggattgaagaaagtagtgcatgagacacctgctgcaagcaagactgtttttttcttttttagttcccctggcaataataatggcacttcaatagaagatggacaaattccagaaatcatattttatacataatttagcattataatacatcttggctaaataataccatacaatctagtgtcaaaaacataaatggccacaaaaaagtagtttgagtgttatgaatatttaaaattgtaagataagaaacagtttcttagagcagatagaaaaatgcttatttaaatctttgcatgatttaaaaacagattttccattttcttacaactttaagagaaaagaactgggtttaatggtttaaaaaaaagcacagctttttcaccttcatcttgtataatttcatagattggctgacttagggtctttcaatagtttgggaattgaaagattcttgttatatatagctagtttgggtttgtttttgttttaactattttgaaggttaggtgagatgggcaaataggcttaactattttgaaggttggatgaaaagagatgggtcagtattcctacagaattcttattaactcaaataactaaatttcagaaaattaagaagctgactttatatttggtggtttgaagtatcttgttgttagcatttgtaataatgctaaaaaaggcctaataaaatgcccaagaaaatattcagtgcatttatagagaaggatattttgtagtagtatagtaatgtgttatgtagtacagttttaaagctataaatggaattttgtgtaaattcacaaaaatgtgatataaacaggatctaagactggattccctgtcactaaactgcaccactatacctgtctctctgtgtgggggacactgctgatgattcccaagattgagatgatgacggtgatgacgactgggtgaacagccatcacttcaacattgtgataatccttcacagcaagaaaccgaataaaatactaacatttctaacaactgctctgacattgtaaagagatccaacagaatcactcctgctgaaaaatacgctttctgccacctacacatttctatttaggaagtaaaatttgcttcatggtcatgaccccattagtcagtgttacagctgtgttggggataggaagtatatctggcagattgacatttatacacttttttataaagcagattttaaaatatagtaacatccatttttttcccttgaaagtgattctcttataaaaaatgaaagtggagtttaaggtatatcaaatcgttgtggaaggtgattaaaaatcaaaattcttttaaatatcaacttaattttttctaagtaagatacaaaaaattttcatctaaagtaatatttcactttatattgtaaagaaggtaggtatattggtggctgaggtctcttgaaattgctaaagggaaatttttctatggtaatgctcttacggatataaacctcagttaaatggaattatctatgggatgtgtggttctggttaactaaaaatacccgtacccctgtgttacactccgaaatactttgccttaaattgttgcgagagaggtagtctgacgccgggacctcaaagctccctgggtcgcacatgaacgtgggccatagggagaacgccgtatcactgggcccccggtgcacaaacttatttattaacacaaggggcacctatcgggcgcaccagttatgcatgtattctcgtcctgcccgcacgacgtaccacatcagtaagatgagaatt

SEQ ID NO: 56575 - DNA, 1808 bp, Homo sapiens
agtccagtcctgttacacctcccgcggccgcgcacagcggcaacccgggcgtgcgggggcgcgcgcggtcagggaggggcctgcggaggcgcgaggcccccggaagcgcctttcccggaaggcagggaggcagcgccggcctccggaggcggcctgggcgatggcggcggagttttgtccataacgtgggcaaccgcgcagctggaggatggcctcactcgggcctgccgcagctggggagcaggcgtcgggggctgaggcggagccgggccccgcggggccgccgccgccgccctcaccgtcctctctggggcccctgctccccctgcagcgggaacctctctacaactggcaggcgaccaaggcgtcgctgaaggagcgcttcgccttcctcttcaactcggagctgctgagcgatgtgcgcttcgtactgggcaagggtcgcggcgccgccgccgctgggggcccgcagcgcatccccgcccaccgcttcgtgctggcggccggcagcgccgtctttgacgccatgttcaacggcggcatggccaccacgtcggccgagatcgagctgccggacgtggagcccgcagccttcctggcgctgctgagatttctatattcagatgaagttcaaattggtccagaaacagttatgaccactctttatactgccaagaaatacgcagtcccagccttggaagcacactgtgtagaatttctcaccaaacatcttagggcagataatgcctttatgttacttactcaggctcgattatttgatgaacctcagcttgctagtctttgtctagatacaatagacaaaagcacaatggatgcaataagtgcagaagggtttactgatattgatatagatacactctgtgcagttttagagagagacacactcagtattcgagaaagtcgactttttggagctgttgtacgctgggcagaagcagaatgtcagagacaacaattacctgtgacttttgggaataaacaaaaagttctaggaaaagcactttccttaatccggttcccactgatgacaattgaggaatttgcagcaggtcctgctcaatctggaattttgtcagatcgtgaagtggtaaacctctttcttcattttactgtcaaccctaaaccccgagttgaatacattgaccgaccaagatgctgtctcaggggaaaggaatgctgcatcaatagattccagcaagtagaaagccgctggggttacagtgggacgagtgatcgaatcagattcacagttaatagaaggatctctatagttggatttggcttgtatggatctattcatggccctacagattatcaagtgaatatacagatcattgaatatgagaaaaagcaaaccctgggacagaatgataccggctttagttgtgatgggacagctaacacattcagggtcatgttcaaggaacccatagagatcctgcccaatgtgtgctacacagcatgtgcaacactcaaagtaagagtcatgcactatgttccagatggtttcctcttgaatgttgcagaatgtgtgttttagaagctgagagtcactgacagctgagccatttataaagaggggggaaaagaagctgggagctaaaatattccactgccttccgaaaagaagtacttctccccacagctctgttctgaaagaaatagctcttcttaagaagtagccctttgtttcagtaagcagttgaatgtttggcagaaaataaaagttatttttgtaaaatcttttcactattctctaatagctgggctgtacattcagtattttt

SEQ ID NO: 56576 - DNA, 1425 bp, Homo sapiens
  misc_feature (1374)..(1374): n is a, c, g, or t
agtccagtcctgttacacctcccgcggccgcgcacagcggcaacccgggcgtgcgggggcgcgcgcggtcagggaggggcctgcggaggcgcgaggcccccggaagcgcctttcccggaaggcagggaggcagcgccggcctccggaggcggcctgggcgatggcggcggagttttgtccataacgtgggcaaccgcgcagctggaggatggcctcactcgggcctgccgcagctggggagcaggcgtcgggggctgaggcggagccgggccccgcggggccgccgccgccgccctcaccgtcctctctggggcccctgctccccctgcagcgggaacctctctacaactggcaggcgaccaaggcgtcgctgaaggagcgcttcgccttcctcttcaactcggagctgctgagcgatgtgcgcttcgtactgggcaagggtcgcggcgccgccgccgctgggggcccgcagcgcatccccgcccaccgcttcgtgctggcggccggcagcgccgtctttgacgccatgttcaacggcggcatggccaccacgtcggccgagatcgagctgccggacgtggagcccgcagccttcctggcgctgctgagatttctatattcagatgaagttcaaattggtccagaaacagttatgaccactctttatactgccaagaaatacgcagtcccagccttggaagcacactgtgtagaatttctcaccaaacatcttagggcagataatgcctttatgttacttactcaggctcgattatttgatgaacctcagcttgctagtctttgtctagatacaatagacaaaagcacaatggatgcaataagtgcagaagggtttactgatattgatatagatacactctgtgcagttttagagagagacacactcagtattcgagaaagtcgactttttggagctgttgtacgctgggcagaagcagaatgtcagagacaacaattacctgtgacttttgggaataaacaaaaagttctaggaaaagcactttccttaatccggttcccactgatgacaattgaggaatttgcagcaggtcctgctcaatctggaattttgtcagatcgtgaagtggtaaacctctttcttcattttactgtcaaccctaaaccccgagttgaatacattgaccgaccaagatgctgtctcaggggaaaggaatgctgcatcaatagattccagcaagtagaaagccgctggggttacagtgggacgagtgatcgaatcagattcacagttaatagaaggatctctatagttggatttggcttgtatggatctattcatggccctacagattatcaagtgaatatacagatcattgatatgagaaaagcaancctggacagaatatacggcttattgatagacgcatatcggatcctctagac

SEQ ID NO: 56577 - DNA, 2323 bp, Homo sapiens
agtccagtcctgttacacctcccgcggccgcgcacagcggcaacccgggcgtgcgggggcgcgcgcggtcagggaggggcctgcggaggcgcgaggcccccggaagcgcctttcccggaaggcagggaggcagcgccggcctccggaggcggcctgggcgatggcggcggagttttgtccataacgtgggcaaccgcgcagctggaggatggcctcactcgggcctgccgcagctggggagcaggcgtcgggggctgaggcggagccgggccccgcggggccgccgccgccgccctcaccgtcctctctggggcccctgctccccctgcagcgggaacctctctacaactggcaggcgaccaaggcgtcgctgaaggagcgcttcgccttcctcttcaactcggagctgctgagcgatgtgcgcttcgtactgggcaagggtcgcggcgccgccgccgctgggggcccgcagcgcatccccgcccaccgcttcgtgctggcggccggcagcgccgtctttgacgccatgttcaacggcggcatggccaccacgtcggccgagatcgagctgccggacgtggagcccgcagccttcctggcgctgctgagatttctatattcagatgaagttcaaattggtccagaaacagttatgaccactctttatactgccaagaaatacgcagtcccagccttggaagcacactgtgtagaatttctcaccaaacatcttagggcagataatgcctttatgttacttactcaggctcgattatttgatgaacctcagcttgctagtctttgtctagatacaatagacaaaagcacaatggatgcaataagtgcagaagggtttactgatattgatatagatacactctgtgcagttttagagagagacacactcagtattcgagaaagtcgactttttggagctgttgtacgctgggcagaagcagaatgtcagagacaacaattacctgtgacttttgggaataaacaaaaagttctaggaaaagcactttccttaatccggttcccactgatgacaattgaggaatttgcagcaggtcctgctcaatctggaattttgtcagatcgtgaagtggtaaacctctttcttcattttactgtcaaccctaaaccccgagttgaatacattgaccgaccaagatgctgtctcaggggaaaggaatgctgcatcaatagattccagcaagtagaaagccgctggggttacagtgggacgagtgatcgaatcagattcacagttaatagaaggatctctatagttggatttggcttgtatggatctattcatggccctacagattatcaagtgaatatacagatcattgaatatgagaaaaagcaaaccctgggacagaatgataccggctttagttgtgatgggacagctaacacattcagggtcatgttcaaggaacccatagagatcctgcccaatgtgtgctacacagcatgtgcaacactcaaaggtccagattcccactatggcacaaaaggattgaagaaagtagtgcatgagacacctgctgcaagcaagactgtttttttcttttttagttcccctggcaataataatggcacttcaatagaagatggacaaattccagaaatcatattttatacataatttagcattataatacatcttggctaaataataccatacaatctagtgtcaaaaacataaatggccacaaaaaagtagtttgagtgttatgaatatttaaaattgtaagataagaaacagtttcttagagcagatagaaaaatgcttatttaaatctttgcatgatttaaaaacagattttccattttcttacaactttaagagaaaagaactgggtttaatggtttaaaaaaaagcacagctttttcaccttcatcttgtataatttcatagattggctgacttagggtctttcaatagtttgggaattgaaagattcttgttatatatagctagtttgggtttgtttttgttttaactattttgaaggttaggtgagatgggcaaataggcttaactattttgaaggttggatgaaaagagatgggtcagtattcctacagaattcttattaactcaaataactaattccgaaattagagtgacttatatgggggtgagtatttgtgtggctgtatatgtaaaggtaataatgcagaaaatcggtttggagatcgggttagggtggacgtaagtaggtgggtccaggtaggtagggcggaagcaatgtcgggggggccagagggggggggtttgaattaaaaggggcggggtggctgtgtgccg

SEQ ID NO: 56578 - DNA, 1382 bp, Homo sapiens
agtccagtcctgttacacctcccgcggccgcgcacagcggcaacccgggcgtgcgggggcgcgcgcggtcagggaggggcctgcggaggcgcgaggcccccggaagcgcctttcccggaaggcagggaggcagcgccggcctccggaggcggcctgggcgatggcggcggagttttgtccataacgtgggcaaccgcgcagctggaggatggcctcactcgggcctgccgcagctggggagcaggcgtcgggggctgaggcggagccgggccccgcggggccgccgccgccgccctcaccgtcctctctggggcccctgctccccctgcagcgggaacctctctacaactggcaggcgaccaaggcgtcgctgaaggagcgcttcgccttcctcttcaactcggagctgctgagcgatgtgcgcttcgtactgggcaagggtcgcggcgccgccgccgctgggggcccgcagcgcatccccgcccaccgcttcgtgctggcggccggcagcgccgtctttgacgccatgttcaacggcggcatggccaccacgtcggccgagatcgagctgccggacgtggagcccgcagccttcctggcgctgctgagatttctatattcagatgaagttcaaattggtccagaaacagttatgaccactctttatactgccaagaaatacgcagtcccagccttggaagcacactgtgtagaatttctcaccaaacatcttagggcagataatgcctttatgttacttactcaggctcgattatttgatgaacctcagcttgctagtctttgtctagatacaatagacaaaagcacaatggatgcaataagtgcagaagggtttactgatattgatatagatacactctgtgcagttttagagagagacacactcagtattcgagaaagtcgactttttggagctgttgtacgctgggcagaagcagaatgtcagagacaacaattacctgtgacttttgggaataaacaaaaagttctaggaaaagcactttccttaatccggttcccactgatgacaattgaggaatttgcagcaggtaagggtataaattcaccaaaatctatttgaaactgttttaatagtctgtcagggcctgggccctggtggctcacacctataatcccagcactttcgagaggccaaggcaggtggatcacttgaggacaggagttcgacaccagccttgtcaacatggtaaaaccccgtctctactaaaagtacaaaaaattaggcatggtggtgggcacctgtaatctcagctactcaggaggctgaggcaggagaatcgcttgaacccaggagacggaggttgcagtgagccgagatcatgccgttgcattccagcccg

SEQ ID NO: 56579 - DNA, 1545 bp, Homo sapiens
gtgttaccccaggctggtctcgaacttctgggctcgagtgattcgcctgcctcaaccttccaaagtgctgggattacaggtgtgaaccaccatgcccggctagcattgtttttaataaccagaaagtaaaaataatccaaatgtccatcaaatgatgattggatacacaagatctggtatacctatttgatgaaatattattcagcaaaaaaaggaatgaagtagtgattcatgttacaatattaataagccttgaaaacatgctaaatgaaagaagccaatcacaaaagaccacatattgtatgattccatttatatgaaatgtctaaaataggcaaatccatagagacagaaagtaaattagcggttgccaggaattgggaatggggagaatgtgaagtgactgactgctaatgggtatggggtttctttctgggatgatgaaaatgttctggaagtagtggtgatagttgcacaactgtgaatatacaaaaatccattgtattatacacttttcaaatgggtgaattttatgataagtgagttatatctcaatttaaaaaaggaaaaatagtttttcagttgactaagttgtgttatctagaaatagcctcaaattataagtttactttttcctttctaatttttatgcttactattatttttcttgtaatagcattagctagtacagtaatccagaaaatgttaaataatttttcatgataatggtgatagtggacttctttgacttgttcctggtcattatagaaatagaaatgcttcttcactaagcatgatgctggcttttggggttggtgtggcatgagacacacacgttttatcacattaagaaaatacctatccctatttctttataatctatggagatttttctttgatctcatattgcgtgatatattaacagattttgtaatatttaactcattttacattcttgaaatgatcctacctggttgtggtgtatacttattttaatattctaacattttacaatttttgcatagttagaaaaattgacatttatttattcttatcataaatgaatagcatgtacagcattgtttgtaatggctcccaaattggaaataatctagatgttcatcaataatagtctgtttaaagaaagtgtggtagagacatagaattaaatacaacgcagacattttaaaaatgagaaatatctatatatattgctatatccaagaatatccaagattatgtgaaaaaagaagatatgcagatgaatattttaaatgagattccatttgtgttaaataatgcccatagtaacagtagaaattatgtatgtttactcctatcactgtgcatgcatagatgatttcccgaaagatattcaaacaattaacagtggttactttagggtaatgctggtttgggggaagcagtggtatgaagggagggagcattcctttttactgtatacctgtatgtaatgtttcaggttttttcttaataagccatcttacctttataataaaaagttaatttttaaaaagttaaagg

SEQ ID NO: 56580 - DNA, 419 bp, Homo sapiens
cattatttgcacaggtattgatttaattggcgttctgaatacaacttggatgagttcatggggtctaagggtctggccaccttggaagaactgggcacacatggcatgagcttcgtgttgggtaccttcagggatgtgttggcagactcagcaggtttcccttttcctggcttctcttgcataacaataacatacatttggaggatgaacaatgtataatagtgataagtgtaagctttttttctaaaatatttggtcattagtgtgaatgcagcatcttggtgggtgggtggagggattgttgttggttcagagcaaatgtccatgaatatgagagaattgaaaataatacaataaaggattttgtacatcccttatcagtggagaagcctggaagatttagctagccctgaatgtgc

SEQ ID NO: 56581 - DNA, 318 bp, Homo sapiens
cggcctcccaaacggaattgttaaacagtacaaatgatcagtgatttcagttctagacagtacttccttggttaagcccatgagtttacctcatgtagccaacagagaatgcaagttttcatctagggcagagcctttaagtcctttgacatccagagtcctctgagccaagcaagaggatcccaaatagccactgaggctcaaggtgagatagatagtgacatattcccttgagctttcggttctcctcagtctcaagagcatgctgatctagccaagggccctcaagcctttccttggtcctaggcctctcaacag

SEQ ID NO: 56582 - DNA, 262 bp, Homo sapiens
tggatgagcagatgttcccaataggaacgcctgtagactgttcagaagaaattgcccaaatgagccagatgagaaggctgagggcagggctgcttttggctctgaggactatagatttatcctctaggtgatgaggggctattaacggctggtgagtctggagaactgaacagtggaagctctattttaagattcacgtggcagtagaggatagaggtgtttggaagcggtgggcagttggcaagctatatgggagacattt

SEQ ID NO: 56583 - DNA, 281 bp, Homo sapiens
  misc_feature (249)..(249): n is a, c, g, or t
gtaataacaggaggttaaaaaaaaaaaaaaacagtcaccaggcttgaatacatacttgagcacacaactggtgttcttctttttctatattatttttcaactttgaaaaaaaattaatcaaaaaattgataaactattaatcataaaaaatacttattttagatcctgcaactaacagaaagtaaaattttaaaaggatatgaggtccagcaatatcacatgaggccagggattcaagaccagcctggncaacatggtgaaaccccatcttttacttaaaa

SEQ ID NO: 56584 - DNA, 525 bp, Homo sapiens
tggcacctgccttctttctccttttatgttatcataagtggcatgtatcaaaccaaacaggctaggggagaataggtctaattgtgacagacttaaaaacaacacattatttggaaagacaagccatgggaaagaaatatggcgtttctatttttttaagataatttagtatgtacaaaagtatccaaatttaaatatagttttcaatggctgatagttttgttttctcacccttcaatatttctagaaaacatccttgcatacaaagcaggatagctaagaaagggctgtaacaaacaaaacttcaagtgtctagcacatactacatctaagaggctaaactctgataggaaaagcactttaaacataattaaaagcttaatgtaaattagtagttgaaattctaggccggtgcggtggctcatgcctgtaatcccagcactgtaggcggccgaggtgggtgaatcacatgaggtcaggagttcaagaccagcctgaccaacatggtgaaaccccatttctact

SEQ ID NO: 56585 - DNA, 566 bp, Homo sapiens
ggacaacagccagcaagacagtaaggacttcagttgcacaaccacagggaaatgaattatgccgacaaccctaaggagtatgaagctgatctgttcctagcccagtgtctccatgaggatgcagtcagtgaacaacatgatttctgctttctgagaccctgaacaccggaccaactgacatacactggactcctggcctatgcaaaacgatctgagccccttttctcctgattaatccactgcaggcctagagccaagctgccctgtttattaaaacgggatacccactacagcgtccactgcagatgcacttcaagatttcaaagacttccagccacaagaagacggcaagtgaagaaaataggagaaagtgaatagatttcaaggcaaagtcttgagaacttcttaagaattgaaagagaccaatctgctgagcttatgaaaagaaagcaacaaaaaactgaatagccaattctaaaggccaaaacagttgagaagagtaaagaggaaagaaggaagaaaaagcaaacatttactttagtaattttaaatgtttgaagattaaa

SEQ ID NO: 56586 - DNA, 1873 bp, Homo sapiens
gtatgctcctgggaaccctagttccacaggataataggtttttcataaagaaacgtagggtgtgtatgtgaaagtggggtgaggttccctggttgagtaggtttggcagacactaaagcgagctacacgatcatctttgctacaggcctctcacaaccttcagcatgccagcatgggtcaggcctcttcacagggccaagaaactcatagcatctcccacattactctcatcacttctccaaggtgcttttgcaagactggaattccttggacaccattggagaagccccgctttttctggaacagcggcaaccaagaggccttgcagccctggaagtgggtcagggcccttggtggtcacctttttctccccagcagctctgcagaggtggcctgcttggcagtgggacatcaggggaccggtcctgctttgagatggcagggtccctgttctgagagctctccagcctgagggcattgagctgaggctccaccctgagctctcctgcagggtggagggcattgtttcccagcacccaggcagtgtcttgctggtgtgtcgtgagtgctggatgtccaagtccctgctggccacggagggctcctgcctctcttcttcagcgccacaaaattacatggaggccagctggtttgtgaggagatgtttattttttaattcttttgtttaccgaacgtttactgagcatctaccctgtgccagccctactcgtacgctctgtctccaaagatgaaaaaggacttctctgccctcaagggaaccccacagtatcttagaggagacaatcatgtcggtgagatggtgtggtgatgaagcctgctgggtatacagctcagggaaagtcatcgatgatggctcaggctcagcctgggcacgccccagaggagagagatggagtggggcctcaaagggcaggtttaggcagaaaagaaaaagggcattccagctggggcatgtgcaaaggcagcacgtaatgtgtaagttctagatcgtcagggaggaagggtcagttgggtgcctgtttttctgtttttagtcctttaaaatgagtagaagcaacctgttaccctggaaagagcactggacatagacctagtgctgcgtgatgttgagcacgtttcttcttccctttgagtcccagtttcccttttggttacagggggatagtagcccccagggatcatgtgaaagtgagaaagcccttttcacactgtggagcggtgcagatgtgggaaacctcaaagatggttgcccattttaaatcctttcatctctcatctctctttcttctctcccttctgccctgacgtagccatggttgggtgggtgaggccagaagaaactgcctccggcaagaggtagcagccgctcaggtggctctgctggcatcggagcccacagaagtgaggagtggccgatggacctgccctccaaatgtgcctgactctgggtcttgctgtcactggatttcctggcatggcagacagaaagaaagatagtttgaccaagtcgtagaagctgatccagcgggtaaaaagggggcagggaactcgtcccttttattcttgcctcagagctgcctgaagacatgggccaggccggaggctggacaactttggataacgctgacctgtacttccaagtaaatgcctcctgaagagcccgggacccttcctgggagaattctgcagccagaatgaaggtgccatcagcaggaggcactgtgaagcaccatcctgtcgctgtccttgtccattcctagcaagttaatcgtgtcttgttaaccagcagttcctgttcaacgtgtaaagagacctgatgttttccctaataaagctgataacagattttgca

SEQ ID NO: 56587 - DNA, 1563 bp, Homo sapiens
gcacttaggctagtacgaggctcgggtgttgatgctgtgttcctcaaaagggaattggcttgtgtagtttcctaccatatcatattttattaaattagaggggccctgacttttaaaacccactggctttctgaagtgttttccagtgaatgactcattcagccagtgcttgttgcatttatgttagctaccaggtgccaagtgtgcagacacaatacagagccttcaggctctcgacaggcaagagaacacctgtaaatagatggtcccgacattgagaggcagcatggtagagtgggcagaccttgtgctctggactcaggttcaaagttcagatgaagctcaatggcctcttagttggagcttagaaccagtatgcccaaagtgctgggtctgcaggaagtacccagtcgatggtaggctgcacagaattctgatctctaccttgagccatgctgagccacaagttggtctccttgggaggtgccatctctcatctgtccctcccccagccatgaaagcccattcccctatgctggctttcagaggctgtcgttaacttactgcccagagcctcgtagttttcttcccctgccctgatggttgggtgttttcctttaaattctctcagccttacactcacagaagccaactttccacaggactgaagacaaagtgtttcatttagctgttactgatagacacctttacaaaggttactaatgtcccagcctttttaaggagacacactcattcatcccctactatgtgctggcagctttacctttgtcatttcatcctcatggccaccctggaggtggcattgtgtaacctcatcttgcacattcgggaaacggatgcttaggagagggaagcagcttgccagttaaacagcccagaaggagcagatctggggtcagaaccggacctggtgggcttgcaagcctgtgccttttccactaactcctatagactcctggagctagaagcacttgtgattcttgttttaatttactgatggcttcaggggttaacagtaggcctagaattgtttgcctctgaaattcatggcccctgacgttatgtgctttgaggttttgtgcctgctttttgctgtggtcctgtttttttcataacaatatactggtatagcttccactcaggtaagtttgattgaacaatgatacacagctgcaccggggggtcaccttttcacaaatgtagacctccatgaactcattggatgaccctggacagagcggggctattcccattttgcagacaggacagcagaggctccagacaatgcctttcctttctttttcactggactcaagtgtccaaggcttttcatcctaggaagtttgtgtgctggttcacaagaggtccctggcaccctttctggggatgtttggatgcggctggtaggcagggaagagaaagggcaccccagcgggggcatgtgtggaggcagcacggaacatgtaggttatagatcgtcagggaggaggggtcagttgggtgcttgtttttctgatttttggtccttgatcacccccttcc

SEQ ID NO: 56588 - DNA, 497 bp, Homo sapiens
  misc_feature (365)..(365): n is a, c, g, or t
  misc_feature (390)..(390): n is a, c, g, or t
  misc_feature (422)..(422): n is a, c, g, or t
tgttcagcagaaattggagaccagcaaaaggcctccatctggaacttccactacctccaagagcacctctccaaccctcacgccctccccctcacccaaagggcacactgcagagtcctcagtgtcttcctcgtcatcccatcggaagtttcaatagcagtgggggctccagcagtggcaccatcacagatgaggatgaactgactggaatccttaagaaattatcacttgagaaatatcagcccatttttgaggaacaagaggtggacatggaagcgttcctcacactgactgacggtgacttgaaggagctgggaattaagacagatgggtccaggcagcaatgtgctattgaaacttctaanactaggcctagttttagaagtttcnatagcacgatcagaagatttggactattccantgataaaacagaagctggtattaaggagcttcagaagagtatggtgcgctggaaaaatactggcaggtagtatca

SEQ ID NO: 56589 - DNA, 1019 bp, Homo sapiens
tgttcagcagaaattggagaccagcaaaaggcctccatctggaacttccactacctccaagagcacctctccaaccctcacgccctccccctcacccaaagggcacactgcagagtcctcagtgtcttcctcgtcatcccatcggaagtttcaatagcagtgggggctccagcagtggcaccatcacagatgaggatgaactgactggaatccttaagaaattatcacttgagaaatatcagcccatttttgaggaacaagaggtggacatggaagcgttcctcacactgactgacggtgacttgaaggagctgggaattaagacagatgggtccaggcagcagattctggcagcgatttctgaactgaacgcaggcaagggacgcgagagacaaattttacaggaaaccattcacaactttcactcttcctttgagagcagtgccagcaacaccagggcccctggcaacagcccctccatggttgggtgggtgaggccagaagaaactgcctccggcaagaggtagcagccgctcaggtggctctgctggcatcggagcccacagaagtgaggagtggccgatggacctgccctccaaatgtgcctgactctgggtcttgctgtcactggatttcctggcatggcagacagaaagaaagatagtttgaccaagtcgtagaagctgatccagcgggtaaaaagggggcagggaactcgtcccttttattcttgcctcagagctgcctgaagacatgggccaggccggaggctggacaactttggataacgctgacctgtacttccaagtaaatgcctcctgaagagcccgggacccttcctgggagaattctgcagccagaatgaaggtgccatcagcaggaggcactgtgaagcaccatcctgtcgctgtccttgtccattcctagcaagttaatcgtgtcttgttaaccagcagttcctgttcaacgtgtaaagagacctgatgttttccctaataaagctgataacagattttgca

SEQ ID NO: 56590 - DNA, 3026 bp, Homo sapiens
tgttcagcagaaattggagaccagcaaaaggcctccatctggaacttccactacctccaagagcacctctccaaccctcacgccctccccctcacccaaagggcacactgcagagtcctcagtgtcttcctcgtcatcccatcggaagtttcaatagcagtgggggctccagcagtggcaccatcacagatgaggatgaactgactggaatccttaagaaattatcacttgagaaatatcagcccatttttgaggaacaagaggtggacatggaagcgttcctcacactgactgacggtgacttgaaggagctgggaattaagacagatgggtccaggcagcagattctggcagcgatttctgaactgaacgcaggcaagggacgcgagagacaaattttacaggaaaccattcacaactttcactcttcctttgagagcagtgccagcaacaccagggcccctggcaacagcccctgtgcgtgatcctccttcccgcagccaccagcgtgagttcttctgaatcccgggaccccttcacgtggccacagccccagccctgcccccgtcacactgctgtgccttagtcatgttgttccctttgctcgggatgcccacttcacgtcgacggcattcattggtagtacttcttgctgcaacaaacttcaacacacagagacagattcccatgtaacagtccagtgggggtgcttctgcttggcaggttggttcacacagtgatgcagggactcagctcctttcatcctgtgctctgccctccccgggagcctcagagtttgcttctggctggcggcaagggaaagggacgatggagaaggcacggctgcttcttacctgccttgctcttaactgacacacatcactcctgctcacgtcctcttggccactggtagtcatgtggccccacctggatgcagaggaggccaggatgtgcagtctccacatagtggcttcccagcaacaacttttgacttagatggggggtatgtattatggtgagaggttagccttcctggcacatcttcccttaaaacttctaacttgcccctcctagtccaagtcacctctcagatgaagtcttttttgaccccctttcagccactgggtcccttagtgctgtgtatgtgactgctgtagcattccactgcacctgctgcatacagcttacattggagatgtgtatgtcaaacgcatttttctttattgcaaagagagtctattatagaaggaaagaagtggaggcctgctgtgtggatcccttcttcttcctagctttcagtttccttatctgcaaagtggaaggtcagaccagatgatgctctggtactccacagtgctcacctgtatcactgcagggctttctgcactgaaagtggaagcagaaggctaatgggtcacattgtgtaaaggtctctggtgctcaaagtttctaggcaaagaagtgaaaatttggaattttgtctacatcctattaatgctgtgttcctcaaaagggaattggcttgtgtagtttcctaccatatcatattttattaaattagaggggccctgacttttaaaacccactggctttctgaagtgttttccagtgaatgactcattcagccagtgcttgttgcatttatgttagctaccaggtgccaagtgtgcagacacaatacagagccttcaggctctcgacaggcaagagaacacctgtaaatagatggtcccgacattgagaggcagcatggtagagtgggcagaccttgtgctctggactcaggttcaaagttcagatgaagctcaatggcctcttagttggagcttagaaccagtatgcccaaagtgctgggtctgcaggaagtacccagtcgatggtaggctgcacagaattctgatctctaccttgagccatgctgagccacaagttggtctccttgggaggtgccatctctcatctgtccctcccccagccatgaaagcccattcccctatgctggctttcagaggctgtcgttaacttactgcccagagcctcgtagttttcttcccctgccctgatggttgggtgttttcctttaaattctctcagccttacactcacagaagccaactttccacaggactgaagacaaagtgtttcatttagctgttactgatagacacctttacaaaggttactaatgtcccagcctttttaaggagacacactcattcatcccctactatgtgctggcagctttacctttgtcatttcatcctcatggccaccctggaggtggcattgtgtaacctcatcttgcacattcgggaaacggatgcttaggagagggaagcagcttgccagttaaacagcccagaaggagcagatctggggtcagaaccggacctggtgggcttgcaagcctgtgccttttccactaactcctatagactcctggagctagaagcacttgtgattcttgttttaatttactgatggcttcaggggttaacagtaggcctagaattgtttgcctctgaaattcatggcccctgacgttatgtgctttgaggttttgtgcctgctttttgctgtggtcctgtttttttcataacaatatactggtatagcttccactcaggtaagtttgattgaacaatgatacacagctgcaccggggggtcaccttttcacaaatgtagacctccatgaactcattggatgaccctggacagagcggggctattcccattttgcagacaggacagcagaggctccagacaatgcctttcctttctttttcactggactcaagtgtccaaggcttttcatcctaggaagtttgtgtgctggttcacaagaggtccctggcaccctttctggggatgtttggatgcggctggtaggcagggaagagaaagggcaccccagcgggggcatgtgtggaggcagcacggaacatgtaggttatagatcgtcagggaggaggggtcagttgggtgcttgtttttctgatttttggtccttgatcacccccttcc

SEQ ID NO: 56591 - DNA, 572 bp, Homo sapiens
aaagagttttttttaaaaaaaggaccctctcccccccccattaagggcccccccgggctttcaccttttaaggcttccgggtcagaatgtgtgtcgggaatttggaaccggataccaatttcaccccagggaccagctattgcggggatttcgaatttaatcggcccctctatagggaatttggcccttaaggcaaagaattcggcacgagggatagtttgaccaagtcgtagaagctgatccagcgggtaaaaagggggcagggaactcgtcccttttattcttgcctcagagctgcctgaagacatgggccaggccggaggctggacaactttggataacgctgacctgtacttccaagtaaatgcctcctgaagagcccgggacccttcctgggagaattctgcagccagaatgaaggtgccatcagcaggaggcactgtgaagcaccatcctgtcgctgtccttgtccattcctagcaagttaatcgtgtcttgttaaccagcagttcctgttcaacgtgtaaagagacctgatgttttccctaataaagctgataacagattttgca

SEQ ID NO: 56592 - DNA, 1073 bp, Homo sapiens
tgttcagcagaaattggagaccagcaaaaggcctccatctggaacttccactacctccaagagcacctctccaaccctcacgccctccccctcacccaaagggcacactgcagagtcctcagtgtcttcctcgtcatcccatcggaagtttcaatagcagtgggggctccagcagtggcaccatcacagatgaggatgaactgactggaatccttaagaaattatcacttgagaaatatcagcccatttttgaggaacaagaggtggacatggaagcgttcctcacactgactgacggtgacttgaaggagctgggaattaagacagatgggtccaggcagcagattctggcagcgatttctgaactgaacgcaggcaagggacgcgagagacaaattttacaggaaaccattcacaactttcactcttcctttgagagcagtgccagcaacaccagggcccctggcaacagcccctgtgcgtgatcctccttcccgcagccaccagcgtgagttcttctgaatcccgggaccccttcacgtggccacagccccagccctgcccccgtcacactgctgtgccttagtcatgttgttccctttgctcgggatgcccacttcacgtcgacggcattcattggtagtacttcttgctgcaacaaacttcaacacacagagacagattcccatgtaacagtccagtgggggtgcttctgcttggcaggttggttcacacagtgatgcagggactcagctcctttcatcctgtgctctgccctccccgggagcctcagagctgcctgaagacatgggccaggccggaggctggacaactttggataacgctgacctgtacttccaagtaaatgcctcctgaagagcccgggacccttcctgggagaattctgcagccagaatgaaggtgccatcagcaggaggcactgtgaagcaccatcctgtcgctgtccttgtccattcctagcaagttaatcgtgtcttgttaaccagcagttcctgttcaacgtgtaaagagacctgatgttttccctaataaagctgataacagattttgca

SEQ ID NO: 56593 - DNA, 1545 bp, Homo sapiens
tgttcagcagaaattggagaccagcaaaaggcctccatctggaacttccactacctccaagagcacctctccaaccctcacgccctccccctcacccaaagggcacactgcagagtcctcagtgtcttcctcgtcatcccatcggaagtttcaatagcagtgggggctccagcagtggcaccatcacagatgaggatgaactgactggaatccttaagaaattatcacttgagaaatatcagcccatttttgaggaacaagaggtggacatggaagcgttcctcacactgactgacggtgacttgaaggagctgggaattaagacagatgggtccaggcagcagattctggcagcgatttctgaactgaacgcaggcaagggacgcgagagacaaattttacaggaaaccattcacaactttcactcttcctttgagagcagtgccagcaacaccagggcccctggcaacagcccctgtgcgtgatcctccttcccgcagccaccagcgtgagttcttctgaatcccgggaccccttcacgtggccacagccccagccctgcccccgtcacactgctgtgccttagtcatgttgttccctttgctcgggatgcccacttcacgtcgacggcattcattggtagtacttcttgctgcaacaaacttcaacacacagagacagattcccatgtaacagtccagtgggggtgcttctgcttggcaggttggttcacacagtgatgcagggactcagctcctttcatcctgtgctctgccctccccgggagcctcagagtttgcttctggctggcggcaagggaaagggacgatggagaaggcacggctgcttcttacctgccttgctcttaactgacacacatcactcctgctcacgtcctcttggccactggtagtcatgtggccccacctggatgcagaggaggccaggatgtgcagtctccacatagtggcttcccagcaacaacttttgacttagatgggggccatggttgggtgggtgaggccagaagaaactgcctccggcaagaggtagcagccgctcaggtggctctgctggcatcggagcccacagaagtgaggagtggccgatggacctgccctccaaatgtgcctgactctgggtcttgctgtcactggatttcctggcatggcagacagaaagaaagatagtttgaccaagtcgtagaagctgatccagcgggtaaaaagggggcagggaactcgtcccttttattcttgcctcagagctgcctgaagacatgggccaggccggaggctggacaactttggataacgctgacctgtacttccaagtaaatgcctcctgaagagcccgggacccttcctgggagaattctgcagccagaatgaaggtgccatcagcaggaggcactgtgaagcaccatcctgtcgctgtccttgtccattcctagcaagttaatcgtgtcttgttaaccagcagttcctgttcaacgtgtaaagagacctgatgttttccctaataaagctgataacagattttgca

SEQ ID NO: 56594 - DNA, 1050 bp, Homo sapiens
tgttcagcagaaattggagaccagcaaaaggcctccatctggaacttccactacctccaagagcacctctccaaccctcacgccctccccctcacccaaagggcacactgcagagtcctcagtgtcttcctcgtcatcccatcggaagtttcaatagcagtgggggctccagcagtggcaccatcacagatgaggatgaactgactggaatccttaagaaattatcacttgagaaatatcagcccatttttgaggaacaagaggtggacatggaagcgttcctcacactgactgacggtgacttgaaggagctgggaattaagacagatgggtccaggcagcagattctggcagcgatttctgaactgaacgcaggcaagggacgcgagagacaaattttacaggaaaccattcacaactttcactcttcctttgagagcagtgccagcaacaccagggcccctggcaacagcccctgtgcgtgatcctccttcccgcagccaccagcccatggttgggtgggtgaggccagaagaaactgcctccggcaagaggtagcagccgctcaggtggctctgctggcatcggagcccacagaagtgaggagtggccgatggacctgccctccaaatgtgcctgactctgggtcttgctgtcactggatttcctggcatggcagacagaaagaaagatagtttgaccaagtcgtagaagctgatccagcgggtaaaaagggggcagggaactcgtcccttttattcttgcctcagagctgcctgaagacatgggccaggccggaggctggacaactttggataacgctgacctgtacttccaagtaaatgcctcctgaagagcccgggacccttcctgggagaattctgcagccagaatgaaggtgccatcagcaggaggcactgtgaagcaccatcctgtcgctgtccttgtccattcctagcaagttaatcgtgtcttgttaaccagcagttcctgttcaacgtgtaaagagacctgatgttttccctaataaagctgataacagattttgca

SEQ ID NO: 56595 - DNA, 529 bp, Homo sapiens
tgttcagcagaaattggagaccagcaaaaggcctccatctggaacttccactacctccaagagcacctctccaaccctcacgccctccccctcacccaaagggcacactgcagagtcctcagtgtcttcctcgtcatcccatcggaagtttcaatagcagtgggggctccagcagtggcaccatcacagatgaggatgaactgactggaatccttaagaaattatcacttgagaaatatcagcccatttttgaggaacaagaggtggacatggaagcgttcctcacactgactgacggtgacttgaaggagctgggaattaagacagatgggtccaggcagcagattctggcagcgatttctgaactgaacgcaggcaagggacgcgagagacaaattttacaggaaaccattcacaactttcactcttcctttgagagcagtgccagcaacgcccgtagggcgtactgctgtccaccaaaaccttgcctcgcccagtgccaggctcaccacaccaacttctaacagca

SEQ ID NO: 56596 - DNA, 334 bp, Homo sapiens
atgcctctggcttgtttgactgcaaaaggtgatgtgcaggggtagaggtagggtactaatttacagtcaccaaaattagtactgatattaatcagtttagttggattaagatgaacaatgtttaatgctttaaggatcattttttgccccaacaggactgtgctatattaaatgacaccgtgcccaaaagctcaaaaattacatagaaagtaaagtacttcttgaatactaaaacagttaagcataaaaggttgtgaattggtccaaagtgatattaacttaaacatttaatcctacgttctatcttagctgtaccctctaaaaatgctaagaa

SEQ ID NO: 56597 - DNA, 506 bp, Homo sapiens
taaggctgaataatattctattgtgtatatataccacattttcttcatccatttatctgtttatgagcacttttgttgtttctatatcttagccaacctcttgacacaatgtagttattctttattagctataggccattaatacagggtttgaataatatgcttctatttgattgctggggctgtgggatttttgcctttgtagctaaatcagcagcaagttaaagtggtgtaggtctgtgaaggattgtaacctcctcttcccccaaacaagggcattgcttgtccaaatatgtgatcattataaatgtgtatatgtctaaatatgtaagtcaccataattgattgactgattgacttctaggaagaccctcacatttattgctagttccagaggcacttctcaaaatgattctcttttctttcaggtgacattcactgtgaactacactttctttccacgaatttgagcagaacagtgttgggaggcagttttcagtgtctgt

SEQ ID NO: 56598 - DNA, 216 bp, Homo sapiens
cctatgtccaatcagtctgttttctcctacttaatagcaccttctcagcttcccttttctttttagtcagtctggatcccattaccatcatttcagtcaccttccagtcccttttactctcacatgtttttgttgtcctgccacacctgctgacaaccccaagccagagtcattccaacctctctcctcccatgctctgacatgatagtagctgcc

SEQ ID NO: 56599 - DNA, 509 bp, Homo sapiens
ttaaaatattttccttctctctttattttttcttaagagatgggtcttcctatgttgcctaggctggcctcgaactcttgggctcaggcggtcctccctcctcagcctgcatcttcttaacacaaaaaccgagaccatgtcactcccaagcttgaaatatgcccctgacctctaggagcagtggaaacccctgacaccaacgccctccacaccaggcccctgcctctcctgccccgttgcctacccaccctgagttctaggcacagggactcacttatcctacacacaccagagcttgcaggcatgacatgccgcctgacgctgcctgggcctaggtagccctgcttctgacccggctgtgggttccttgggccccaggcaggctgcttcactcactcctctgtagctcctttccccagttgaacagtggccatagccctgtcacggacattaagtgattgactcgtgagcacttggaacactgacctggggtgttccgtgctagctct

SEQ ID NO: 56600 - DNA, 3560 bp, Homo sapiens
  misc_feature (1826)..(1826): n is a, c, g, or t
  misc_feature (2017)..(2017): n is a, c, g, or t
attcttatattttgttacatacaacagtatcatctgttttgtcaagtgcagtctacctttaatatctgattgaaaatatagcacaatacagtatcagaaactatactgggtaaggtcctaggataccttcatattgatttcaactctgcctctaactttgggactttggttgggcgcagtggctcatgcctgtaatcccagcactttagggggcctaattttttgtttattttttgtagggatgaagtctcactacctttcccaggctggtctcaaactcttggactcaagggatcttcccacgtgggccttctaaagtgctgggattacaggtgtgagccaccatgcctggcctacatttacataacttattacaatacattgttatagttctattttattagttgttgttaatctcttgctgggcccactttatagattaaactttataataagtatatatgtgtaggaaaaaaacatagtatatacagggtttggtatttctgaggtttcaggcatccattaggggtcctggaatgtatcctgcaaggataaggagggactatagtatgctatttaactttcttttagtaatatgagttgcaagtaaaaattcctggtatagtattattattacaacaagacagtctatgcctgttgaaactggcactttttctttcccaaaactaattttattctttaaggggcatgctatcttgaaaaggagggcaaatagagctgcctgtgaaaaggaataatataaaacggagacccggccgccgtgatgctgtcccggtcccactgtgtcccgggcgttcagccactcgctctctgccttccagaaggggaactgccctctagggagacattccctgcctggggtctccttatgccagggaccaggttaccctaacagcaggaaggttgtcattaacaacagtgtcttcagtgttcgcttcttcagaactacaactgtatgcaagtatgacttggttacagtcaaaaccccagcgtttgcagaacctgtcacagagggagatgtcaggtgggagaaagctgttggagacacagttgcagaagatgaagtggtttgtgagattgaaactgacaagacattggtgcaggttccatcaccagcaaatggcatgattgaagctcttttcgtacctgatgggggaaaagtcgaaggaggcactccgcttttcacactcaggaaaactggtgctgctcctgctaaggccaagccggctgaagctcctgctgctgcagccccaaaagcagaacctatagcagcggcagttcctccccatgcagcacccatacccactcgatgccaccagtgccctcgccctcacaacctccttctagcaaacctgtgtctgcagtaaaacccactgctgtcccaccactagctgagccaggagctggcaaaggtctgcattcagaacatcaggagaaaatgaacaggatgcggcagtgcattgctcagcgtctgaaggaggcccagaatacatgtgccaatgctgacaatttttaatgagattgatgtgagtaacatccagaagatgagggctcggcacaaagaggcttttttgaagaaacataacctcaaactaggcttcatgtcggcatctgtgaaggcctcagcctttgccttgcaggaacagcctgttgtaaacgcagtgattgatgatataaccaaagaggtggtatatagggattatattgacatcagtgttgcagtggccaccccacagggtctggtggttccagtcatcaggaatgtggaagctatgaattatgcagatattgaacagaccatcacngaactgggagagaaggcccgaaagaatgaatttgccattgaagatatggatggtggtaccttcaccattagcaatggaggtgtttttggctcactctttgaacacccattatcaacccccctgtctgccatcctggggatgcatggcatctttgacaagccagtggctataggaggcaaggtagaggtgcngcccatgatgtacgtggcactgacctatgatcaccggctgattgatggcagagaggctgtgactttcctccgcaaaatcaaggcagcggtagaggatcccagagtcctcctctttgatctttaggaggaacccacacaccctacaaattgatcatgcaggaactgaaaaccagtcttctccctgtcccctcatgggtcccaggttagcctggtgacaggcacatgctgttggcctcaagcaaggaagcagagcactatgtaaccagcagtcacagcttttttcttggtgttcctgcctggctctctccctctctgcacctgtctcataccctcgaatatcttaattccttaggcttgagagagagccttaatggatgctcattcatattcctgcctttcttccatcagctctctgcaaagatgattttgcttctccctagtgctggtatactatagagaaacccccgaggaccatgtgattaagttcctatcttttgaaagtttgttctgcagagacatctaggaggatgctgtgcctcccaagctcagagcagcctctgtcctggctgtgcacattctcgattccacttgtatggagggattgaacacaggcaaagaggtgctgctttccttcttcaatggcaccttcattctccattgtcattgacttcaagatgcctcttctacctctaccaggaagcacaggccaggggatctgggtgtgtgaatgggaggagagagcagaggttccctgaggtcacgtgttgtaatcatcatagaaggagagcccaggtctgccctcacgctctccatcataggctcacaccaagaagactcatcttggcacaatctcacacagctggggctgtagcaaccctttcctggttgctgggcctcattctagcaccttgttcttagagcagattctagcacatcatggcagtgaaccaagcgtagtcccgaagaagggccagagcctggtagagattagggaagggaggtctcctctagactcagattgccttgagcttttcaagtaagttgctgtaagcccgtgggctgaggaggcagttcttgttccttcctgcgttatagtggggccttgtctcttcctctgcaggacacagatttggaggacgtggactggggtaggaaaccaccctgagggtgttagtagatagtggtgtaatggatgaggtcatttctaagatgtgttgccggtggatctgggcacaatcattggaattccttggagctactgggattcatggctttgtatccaactgcatccaggcctgaggctgctgacatttgacactagggccagtagagagtgcctttttgtatcttgagccaagaagtgaggcctgggggtggggaggggggaaggggtgggagccaatactgagtgcctgcagcatctactactctgtcttcactattcagaacttgtaactaaagtatttaaagaaactgattttaaatgcaaattaaagggcagatgttctcaaaaaaataaataaataaaatggagatccatatg

SEQ ID NO: 56601 - DNA, 239 bp, Homo sapiens
gaatgggatcagggacctgcttaaaacagcagtctgacctctttttcatagagcagccatgctatgctcagggtctgcccctagttgctttgggcacttgaaacccaaagatggaattgcagctccttttgccctgaagcccagaaagcctgggtatctaaggctctcgggtctctgtttgcgcctgagaaactactctgccaagattccatgtagctctgtgtcagactgaagaccct

SEQ ID NO: 56602 - DNA, 2066 bp, Homo sapiens
tcagtagaggcccggtgttaatcggccgagggggagtaggcagcggcgccgcgtccgctctcgcccgctctcgcccgctcgccagccggctctcctcccgccgcaggacccgcgcgccgcgctcgggggccatgcagcgcctggccatggacctgcggatgttgtcccgggagctctccctctacctggaacaccaagtccgggtggggttcttcggctcgggggtgggcttatcccttatcctgggcttcagcgtcgcttatgccttctactacctgagcagcattgccaagaaaccccagttagtgaccgggggtgagagtttcagccgcttccttcaagaccactgtcccgtggttacagaaacgtactacccgacggtctggtgctgggagggtcgaggacagaccctgcttagacctttcatcacttcgaagcccccggtgcagtacaggaatgaacttattaaaactgcagatggaggacagatttcactggactggtttgataatgataacagtacgtgttatatggatgccagcaccagacctactatcttattgttgcctggcctcacgggaacaagcaaggagtcatatatccttcatatgatccatcttagtgaagaattaggatacagatgtgtggtttttaacaacagaggagtggcgggggagaatctcttgacgccaaggacttattgttgtgctaacactgaagacttggagacagttattcaccatgtacacagcctgtacccttctgctcctttcctggcagcaggggtttcaatgggaggaatgctgcttctaaattacttgggcaaaattgggtccaaaacgcctttgatggcagctgcaactttttccgttggttggaacaccttcgcttgctcagagtcattggaaaaaccactgaactggctactttttaattactatttgacaacctgccttcagtcttcagttaataagcaccgacatatgtttgtaaaacaagttgatatggatcatgtcatgaaggctaaatccatcagagagtttgataagcgattcacttcagtcatgtttggataccaaacaattgatgattattatactgatgccagtccgagtcctagactgaagtcagtaggaattccagtattgtgtctaaattctgtggatgatgttttctcacccagtcatgctattccaatagaaactgctaagcaaaatcctaatgttgctttggtccttacttcttatggaggccatattggttttctggagggaatctggccaagacagtccacttacatggatcgtgtcttcaagcaatttgtgcaagccatggttgagcatggacatgaactctcttaacatgtagttctttgggtgcattttgtctgaaccacaattgtgaaggcagctcagcttagtgcacaaattttaactgttgtatataaagcaaataagccagcagatgggtgaagaggtccagaatgatatgcaaaaactactttttagagaaacaaaacaactttgtagcaacaaattaaatatagtattagattgttacttacgtagattttatttttactatgccttaccaagtacatccttaaacaaagtagtatgtacatgaaattgcacttaaccaaaactattgtgtaaaacaaattttaattcctcagggttttaatttaaactagtatttttttagattatttgttttaggtgatttaatggtactttaataactactaagaaatattggctatttcaatgtaagttataaggtggtacattcctaagggtatttatagttgatgataacatgaaaactgaaataagataaaatacaacgtgctaaatcttttatgtattctaactttaaaagacaagtgcaacaaagttagactgacttctatatgtgctcttttactctgataatattaaattaggactaacttatgttttataatgattataatttacatgcttatttttaaaatagtatatgtggacacatatatatcattatattaaaataaattctaccattttaaattggacctttgtgag

SEQ ID NO: 56603 - DNA, 2506 bp, Homo sapiens
tcagtagaggcccggtgttaatcggccgagggggagtaggcagcggcgccgcgtccgctctcgcccgctctcgcccgctcgccagccggctctcctcccgccgcaggacccgcgcgccgcgctcgggggccatgcagcgcctggccatggacctgcggatgttgtcccgggagctctccctctacctggaacaccaagtccgggtggggttcttcggctcgggggtgggcttatcccttatcctgggcttcagcgtcgcttatgccttctactacctgagcagcattgccaagaaaccccagttagtgaccgggggtgagagtttcagccgcttccttcaagaccactgtcccgtggttacagaaacgtactacccgacggtctggtgctgggagggtcgaggacagaccctgcttagacctttcatcacttcgaagcccccggtgcagtacaggaatgaacttattaaaactgcagatggaggacagatttcactggactggtttgataatgataacagtacgtgttatatggatgccagcaccagacctactatcttattgttgcctggcctcacgggaacaagcaaggagtcatatatccttcatatgatccatcttagtgaagaattaggatacagatgtgtggtttttaacaacagaggagtggcgggggagaatctcttgacgccaaggacttattgttgtgctaacactgaagacttggagacagttattcaccatgtacacagcctgtacccttctgctcctttcctggcagcaggggtttcaatgggagggtaaggttttccctttctaaaataatctctgagagggaagctattttattggctgtctctttgagaggactataagctagctgtatggacactttttaaataaatgtctgattatgtttatcatattttattaaatgcggttgattgaatgaacgaaggaaggaaagaattaattcaggtgaattttaatatttttcttaactacgggtctctgtgactgcggattttgtgagcctgaaggtttgtctgaagcccatgaagtcgattgcatcactcaccggctgccatgttgaccttctgattcctgacgcactcccagccatccctggagctgcgttctgaagctgaacttgtagcatgactttcatcactccagttacagaaataatcacttattgctctctccagctgcagtggccttcaaaattatttttccccagaatgctgcttctaaattacttgggcaaaattgggtccaaaacgcctttgatggcagctgcaactttttccgttggttggaacaccttcgcttgctcagagtcattggaaaaaccactgaactggctactttttaattactatttgacaacctgccttcagtcttcagttaataagcaccgacatatgtttgtaaaacaagttgatatggatcatgtcatgaaggctaaatccatcagagagtttgataagcgattcacttcagtcatgtttggataccaaacaattgatgattattatactgatgccagtccgagtcctagactgaagtcagtaggaattccagtattgtgtctaaattctgtggatgatgttttctcacccagtcatgctattccaatagaaactgctaagcaaaatcctaatgttgctttggtccttacttcttatggaggccatattggttttctggagggaatctggccaagacagtccacttacatggatcgtgtcttcaagcaatttgtgcaagccatggttgagcatggacatgaactctcttaacatgtagttctttgggtgcattttgtctgaaccacaattgtgaaggcagctcagcttagtgcacaaattttaactgttgtatataaagcaaataagccagcagatgggtgaagaggtccagaatgatatgcaaaaactactttttagagaaacaaaacaactttgtagcaacaaattaaatatagtattagattgttacttacgtagattttatttttactatgccttaccaagtacatccttaaacaaagtagtatgtacatgaaattgcacttaaccaaaactattgtgtaaaacaaattttaattcctcagggttttaatttaaactagtatttttttagattatttgttttaggtgatttaatggtactttaataactactaagaaatattggctatttcaatgtaagttataaggtggtacattcctaagggtatttatagttgatgataacatgaaaactgaaataagataaaatacaacgtgctaaatcttttatgtattctaactttaaaagacaagtgcaacaaagttagactgacttctatatgtgctcttttactctgataatattaaattaggactaacttatgttttataatgattataatttacatgcttatttttaaaatagtatatgtggacacatatatatcattatattaaaataaattctaccattttaaattggacctttgtgag

SEQ ID NO: 56604 - DNA, 2336 bp, Homo sapiens
tcagtagaggcccggtgttaatcggccgagggggagtaggcagcggcgccgcgtccgctctcgcccgctctcgcccgctcgccagccggctctcctcccgccgcaggacccgcgcgccgcgctcgggggccatgcagcgcctggccatggacctgcggatgttgtcccgggagctctccctctacctggaacaccaagtccgggtggggttcttcggctcgggggtgggcttatcccttatcctgggcttcagcgtcgcttatgccttctactacctgagcagcattgccaagaaaccccagttagtgaccgggggtgagagtttcagccgcttccttcaagaccactgtcccgtggttacagaaacgtaccaccagacctactatcttattgttgcctggcctcacgggaacaagcaaggagtcatatatccttcatatgatccatcttagtgaagaattaggatacagatgtgtggtttttaacaacagaggagtggcgggggagaatctcttgacgccaaggacttattgttgtgctaacactgaagacttggagacagttattcaccatgtacacagcctgtacccttctgctcctttcctggcagcaggggtttcaatgggagggtaaggttttccctttctaaaataatctctgagagggaagctattttattggctgtctctttgagaggactataagctagctgtatggacactttttaaataaatgtctgattatgtttatcatattttattaaatgcggttgattgaatgaacgaaggaaggaaagaattaattcaggtgaattttaatatttttcttaactacgggtctctgtgactgcggattttgtgagcctgaaggtttgtctgaagcccatgaagtcgattgcatcactcaccggctgccatgttgaccttctgattcctgacgcactcccagccatccctggagctgcgttctgaagctgaacttgtagcatgactttcatcactccagttacagaaataatcacttattgctctctccagctgcagtggccttcaaaattatttttccccagaatgctgcttctaaattacttgggcaaaattgggtccaaaacgcctttgatggcagctgcaactttttccgttggttggaacaccttcgcttgctcagagtcattggaaaaaccactgaactggctactttttaattactatttgacaacctgccttcagtcttcagttaataagcaccgacatatgtttgtaaaacaagttgatatggatcatgtcatgaaggctaaatccatcagagagtttgataagcgattcacttcagtcatgtttggataccaaacaattgatgattattatactgatgccagtccgagtcctagactgaagtcagtaggaattccagtattgtgtctaaattctgtggatgatgttttctcacccagtcatgctattccaatagaaactgctaagcaaaatcctaatgttgctttggtccttacttcttatggaggccatattggttttctggagggaatctggccaagacagtccacttacatggatcgtgtcttcaagcaatttgtgcaagccatggttgagcatggacatgaactctcttaacatgtagttctttgggtgcattttgtctgaaccacaattgtgaaggcagctcagcttagtgcacaaattttaactgttgtatataaagcaaataagccagcagatgggtgaagaggtccagaatgatatgcaaaaactactttttagagaaacaaaacaactttgtagcaacaaattaaatatagtattagattgttacttacgtagattttatttttactatgccttaccaagtacatccttaaacaaagtagtatgtacatgaaattgcacttaaccaaaactattgtgtaaaacaaattttaattcctcagggttttaatttaaactagtatttttttagattatttgttttaggtgatttaatggtactttaataactactaagaaatattggctatttcaatgtaagttataaggtggtacattcctaagggtatttatagttgatgataacatgaaaactgaaataagataaaatacaacgtgctaaatcttttatgtattctaactttaaaagacaagtgcaacaaagttagactgacttctatatgtgctcttttactctgataatattaaattaggactaacttatgttttataatgattataatttacatgcttatttttaaaatagtatatgtggacacatatatatcattatattaaaataaattctaccattttaaattggacctttgtgag

SEQ ID NO: 56605 - DNA, 1907 bp, Homo sapiens
tcagtagaggcccggtgttaatcggccgagggggagtaggcagcggcgccgcgtccgctctcgcccgctctcgcccgctcgccagccggctctcctcccgccgcaggacccgcgcgccgcgctcgggggccatgcagcgcctggccatggacctgcggatgttgtcccgggagctctccctctacctggaacaccaagtccgggtggggttcttcggctcgggggtgggcttatcccttatcctgggcttcagcgtcgcttatgccttctactacctgagcagcattgccaagaaaccccagttagtgaccgggggtgagagtttcagccgcttccttcaagaccactgtcccgtggttacagaaacgtactacccgacggtctggtgctgggagggtcgaggacagaccctgcttagacctttcatcacttcgaagcccccggtgcagtacaggaatgaacttattaaaactgcagatggaggacagatttcactggactggtttgataatgataacagtacgtgttatatggatgccagcaccagacctactatcttattgttgcctggcctcacgggaacaagcaaggagtcatatatccttcatatgatccatcttagtgaagaattaggatacagaatgctgcttctaaattacttgggcaaaattgggtccaaaacgcctttgatggcagctgcaactttttccgttggttggaacaccttcgcttgctcagagtcattggaaaaaccactgaactggctactttttaattactatttgacaacctgccttcagtcttcagttaataagcaccgacatatgtttgtaaaacaagttgatatggatcatgtcatgaaggctaaatccatcagagagtttgataagcgattcacttcagtcatgtttggataccaaacaattgatgattattatactgatgccagtccgagtcctagactgaagtcagtaggaattccagtattgtgtctaaattctgtggatgatgttttctcacccagtcatgctattccaatagaaactgctaagcaaaatcctaatgttgctttggtccttacttcttatggaggccatattggttttctggagggaatctggccaagacagtccacttacatggatcgtgtcttcaagcaatttgtgcaagccatggttgagcatggacatgaactctcttaacatgtagttctttgggtgcattttgtctgaaccacaattgtgaaggcagctcagcttagtgcacaaattttaactgttgtatataaagcaaataagccagcagatgggtgaagaggtccagaatgatatgcaaaaactactttttagagaaacaaaacaactttgtagcaacaaattaaatatagtattagattgttacttacgtagattttatttttactatgccttaccaagtacatccttaaacaaagtagtatgtacatgaaattgcacttaaccaaaactattgtgtaaaacaaattttaattcctcagggttttaatttaaactagtatttttttagattatttgttttaggtgatttaatggtactttaataactactaagaaatattggctatttcaatgtaagttataaggtggtacattcctaagggtatttatagttgatgataacatgaaaactgaaataagataaaatacaacgtgctaaatcttttatgtattctaactttaaaagacaagtgcaacaaagttagactgacttctatatgtgctcttttactctgataatattaaattaggactaacttatgttttataatgattataatttacatgcttatttttaaaatagtatatgtggacacatatatatcattatattaaaataaattctaccattttaaattggacctttgtgag

SEQ ID NO: 56606 - DNA, 2452 bp, Homo sapiens
tcagtagaggcccggtgttaatcggccgagggggagtaggcagcggcgccgcgtccgctctcgcccgctctcgcccgctcgccagccggctctcctcccgccgcaggacccgcgcgccgcgctcgggggccatgcagcgcctggccatggacctgcggatgttgtcccgggagctctccctctacctggaacaccaagtccgggtggggttcttcggctcgggggtgggcttatcccttatcctgggcttcagcgtcgcttatgccttctactacctgagcagcattgccaagaaaccccagttagtgaccgggggtgagagtttcagccgcttccttcaagaccactgtcccgtggttacagaaacgtactacccgacggtctggtgctgggagggtcgaggacagaccctgcttagacctttcatcacttcgaagcccccggtgcagtacaggaatgaacttattaaaactgcagatggaggacagatttcactggactggtttgataatgataacagtacgtgttatatggatgccagcaccagacctactatcttattgttgcctggcctcacgggaacaagcaaggagtcatatatccttcatatgatccatcttagtgaagaattaggatacagatgtgtggtttttaacaacagaggagtggcgggggagaatctcttgacgccaaggacttattgttgtgctaacactgaagacttggagacagttattcaccatgtacacagcctgtacccttctgctcctttcctggcagcaggggtttcaatgggagggtaaggttttccctttctaaaataatctctgagagggaagctattttattggctgtctctttgagaggactataagctagctgtatggacactttttaaataaatgtctgattatgtttatcatattttattaaatgcggttgattgaatgaacgaaggaaggaaagaattaattcaggtgaattttaatatttttcttaactacgggtctctgtgactgcggattttgtgagcctgaaggtttgtctgaagcccatgaagtcgattgcatcactcaccggctgccatgttgaccttctgattcctgacgcactcccagccatccctggagctgcgttctgaagctgaacttgtagcatgactttcatcactccagttacagaaataatcacttattgctctctccagctgcagtggccttcaaaattatttttccccagaatgctgcttctaaattacttgggcaaaattgggtccaaaacgcctttgatggcagctgcaactttttccgttggttggaacaccttcgcttgctcagagtcattggaaaaaccactgaactggctactttttaattactatttgacaacctgccttcagtcttcagttaataagcaccgacatatgtttgtaaaacaagttgatatggatcatgtcatgaaggctaaatccatcagagagtttgataagcgattcacttcagtcatgtttggataccaaacaattgatgattattatactgatgccagtccgagtcctagactgaagtcagtaggaattccagtattgtgtctaaattctgtggatgatgttttctcacccagtcatgctattccaatagaaactgctaagctggagggaatctggccaagacagtccacttacatggatcgtgtcttcaagcaatttgtgcaagccatggttgagcatggacatgaactctcttaacatgtagttctttgggtgcattttgtctgaaccacaattgtgaaggcagctcagcttagtgcacaaattttaactgttgtatataaagcaaataagccagcagatgggtgaagaggtccagaatgatatgcaaaaactactttttagagaaacaaaacaactttgtagcaacaaattaaatatagtattagattgttacttacgtagattttatttttactatgccttaccaagtacatccttaaacaaagtagtatgtacatgaaattgcacttaaccaaaactattgtgtaaaacaaattttaattcctcagggttttaatttaaactagtatttttttagattatttgttttaggtgatttaatggtactttaataactactaagaaatattggctatttcaatgtaagttataaggtggtacattcctaagggtatttatagttgatgataacatgaaaactgaaataagataaaatacaacgtgctaaatcttttatgtattctaactttaaaagacaagtgcaacaaagttagactgacttctatatgtgctcttttactctgataatattaaattaggactaacttatgttttataatgattataatttacatgcttatttttaaaatagtatatgtggacacatatatatcattatattaaaataaattctaccattttaaattggacctttgtgag

SEQ ID NO: 56607 - DNA, 1724 bp, Homo sapiens
tcagtagaggcccggtgttaatcggccgagggggagtaggcagcggcgccgcgtccgctctcgcccgctctcgcccgctcgccagccggctctcctcccgccgcaggacccgcgcgccgcgctcgggggccatgcagcgcctggccatggacctgcggatgttgtcccgggagctctccctctacctggaacaccaagtccgggtggggttcttcggctcgggggtgggcttatcccttatcctgggcttcagcgtcgcttatgccttctactacctgagcagcattgccaagaaaccccagttagtgaccgggggtgagagtttcagccgcttccttcaagaccactgtcccgtggttacagaaacgtactacccgacggtctggtgctgggagggtcgaggacagaccctgcttagacctttcatcacttcgaagcccccggtgcagtacaggaatgaacttattaaaactgcagatggaggacagatttcactggactggtttgataatgataacagtacgtgttatatggatgccagcaccagacctactatcttattgttgcctggcctcacgggaacaagcaaggagtcatatatccttcatatgatccatcttagtgaagaattaggatacaggtaccagtaaaagatttcttttttttcacttgatccattccaaatgaagtacaaatatatctacatgtttgtttcagaaatacttagtacttcttgcatagaaaagcagtcccttaaattattatttttctctgcattctttttttcctctttcttttcaggaagatgcataactgaatcatctcacaagaaatgtcacttagcatagtagacactctgcagatttaggctgagttaatgaatgaaattagaatcatctgagcattgactgagcccttccccccatccccaccccaatggagagtgtgttatggagggagaacagcaattacagacccctgagagagtacacagtggccgtcatgccacattctggggcctggattcactaatcttgtcgccctggctcagctcccaagtgcaaaaaatattcagaatcagcttgtaggttgtccctatttatcaaaggtgatctctgcctcttctgaccacctgagtttgcaggtgcacttggctagtctccagttgttgatgccacagcttttctgagtaaccattattaagctcagtcaccaggtacaatttaattttttgcaagtgattagcaactttgagtttcaagttcagctctagaatcttagagtcattataaaaggtactgcttttttgtgcctcagcttttttttttagctgataattattgtaatggaacactctgtgagttgtatttaaagtagagttgtatcttttgttaaacttgaaacacttgtgtgaaaagctgatggtaagtttaccttaaaaaaataattttaggctggtcacagtggctcatgcctgtaatcccagcactttggaaggcgtaaagccggtggattgcttgagcccaggagttcgagaccagcctgggcaacatggtgagacctagtctacaaaaattagcagggcatggtggcatgcacctatagttccagctactgacaaggctgaggtaggacgatcagttgagcccgggaggtagagactgtagtgaaccatgatcgtgccactggactccagcctggatgacagagtgacaccttgggca

SEQ ID NO: 56608 - DNA, 1667 bp, Homo sapiens
tcagtagaggcccggtgttaatcggccgagggggagtaggcagcggcgccgcgtccgctctcgcccgctctcgcccgctcgccagccggctctcctcccgccgcaggacccgcgcgccgcgctcgggggccatgcagcgcctggccatggacctgcggatgttgtcccgggagctctccctctacctggaacaccaagtccgggtggggttcttcggctcgggggtgggcttatcccttatcctgggcttcagcgtcgcttatgccttctactacctgagcagcattgccaagaaaccccagttagtgaccgggggtgagagtttcagccgcttccttcaagaccactgtcccgtggttacagaaacgtactacccgacggtctggtgctgggagggtcgaggacagaccctgcttagacctttcatcacttcgaagcccccggtgcagtacaggaataacagtacgtgttatatggatgccagcaccagacctactatcttattgttgcctggcctcacgggaacaagcaaggagtcatatatccttcatatgatccatcttagtgaagaattaggatacaggtaccagtaaaagatttcttttttttcacttgatccattccaaatgaagtacaaatatatctacatgtttgtttcagaaatacttagtacttcttgcatagaaaagcagtcccttaaattattatttttctctgcattctttttttcctctttcttttcaggaagatgcataactgaatcatctcacaagaaatgtcacttagcatagtagacactctgcagatttaggctgagttaatgaatgaaattagaatcatctgagcattgactgagcccttccccccatccccaccccaatggagagtgtgttatggagggagaacagcaattacagacccctgagagagtacacagtggccgtcatgccacattctggggcctggattcactaatcttgtcgccctggctcagctcccaagtgcaaaaaatattcagaatcagcttgtaggttgtccctatttatcaaaggtgatctctgcctcttctgaccacctgagtttgcaggtgcacttggctagtctccagttgttgatgccacagcttttctgagtaaccattattaagctcagtcaccaggtacaatttaattttttgcaagtgattagcaactttgagtttcaagttcagctctagaatcttagagtcattataaaaggtactgcttttttgtgcctcagcttttttttttagctgataattattgtaatggaacactctgtgagttgtatttaaagtagagttgtatcttttgttaaacttgaaacacttgtgtgaaaagctgatggtaagtttaccttaaaaaaataattttaggctggtcacagtggctcatgcctgtaatcccagcactttggaaggcgtaaagccggtggattgcttgagcccaggagttcgagaccagcctgggcaacatggtgagacctagtctacaaaaattagcagggcatggtggcatgcacctatagttccagctactgacaaggctgaggtaggacgatcagttgagcccgggaggtagagactgtagtgaaccatgatcgtgccactggactccagcctggatgacagagtgacaccttgggca

SEQ ID NO: 56609 - DNA, 435 bp, Homo sapiens
tgtgtttagaattaaaattaagacatgacttaaaacatgtaaatagtaatgtcttctgaattattcctttcagtgaacttattaaaactgcagatggaggacagatttcactggactggtttgataatgataacagtacgtgttatatggatgccagcaccagacctactatcttattgttgcctggcctcacgggaacaagcaaggagtcatatatccttcatatgatccatcttagtgaagaattaggatacaggtaccagtaaaagatttcttttttttcacttgatccattccaaatgaagtacaaatatatctacatgtttgtttcagaaatacttagtacttcttgcatagaaaagcagtcccttaaattattatttttctctgcattctttttttcctctttcttttcaggaagatgcataactgaat

SEQ ID NO: 56610 - DNA, 639 bp, Homo sapiens
tcgctctagactgtaaccgcacaccatatgtaatcccagcttttctaatttacaaccatgattgcatttagacctggagctgcgttctgaagctgaacttgtagcatgactttcatcactccagttacagaaataatcacttattgctctctccagctgcagtggccttcaaaattatttttccccagaatgctgcttctaaattacttgggcaaaattgggtccaaaacgcctttgatggcagctgcaactttttccgttggttggaacaccttcgcttgctcagagtcattggaaaaaccactgaactggctactttttaattactatttgacaacctgccttcagtcttcagttaataagcaccgacatatgtttgtaaaacaagttgatatggatcatgtcatgaaggctaaatccatcagagagtttgataagcgattcacttcagtcatgtttggataccaaacaattgatgattattatactgatgccagtccgagtcctagactgaagtcagtaggaattccagtattgtgtctaaatgcaatgattgcatttagaccctgaccagtatttaaaaccaaaaggatattctgaaaaatggccaccaatttttttagaagtagcatcccaagc

SEQ ID NO: 56611 - DNA, 1488 bp, Homo sapiens
tcaacatcgttgtgtctgtgtcatacagtatgatccatctatactgaagaattaggatacagatgtgtggtgtaaacaacagaggagtggcgggggagaatctcttgtacgccaaggacttattgttgtgctaacactgaagacttggagacagttattcaccatgtacacagcctgtacccttctgctcctttcctggcagcaggggtttcaatgggaggaatgctgcttctaaattacttgggcaaaattgggtccaaaacgcctttgatggcagctgcaactttttccgttggttggaacaccttcgcttgctcagagtcattggaaaaaccactgaactggctactttttaattactatttgacaacctgccttcagtcttcagttaataagcaccgacatatgtttgtaaaacaagttgatatggatcatgtcatgaaggctaaatccatcagagagtttgataagcgattcacttcagtcatgtttggataccaaacaattgatgattattatactgatgccagtccgagtcctagactgaagtcagtaggaattccagtattgtgtctaaattctgtggatgatgttttctcacccagtcatgctattccaatagaaactgctaagcaaaatcctaatgttgctttggtccttacttcttatggaggccatattggttttctggagggaatctggccaagacagtccacttacatggatcgtgtcttcaagcaatttgtgcaagccatggttgagcatggacatgaactctcttaacatgtagttctttgggtgcattttgtctgaaccacaattgtgaaggcagctcagcttagtgcacaaattttaactgttgtatataaagcaaataagccagcagatgggtgaagaggtccagaatgatatgcaaaaactactttttagagaaacaaaacaactttgtagcaacaaattaaatatagtattagattgttacttacgtagattttatttttactatgccttaccaagtacatccttaaacaaagtagtatgtacatgaaattgcacttaaccaaaactattgtgtaaaacaaattttaattcctcagggttttaatttaaactagtatttttttagattatttgttttaggtgatttaatggtactttaataactactaagaaatattggctatttcaatgtaagttataaggtggtacattcctaagggtatttatagttgatgataacatgaaaactgaaataagataaaatacaacgtgctaaatcttttatgtattctaactttaaaagacaagtgcaacaaagttagactgacttctatatgtgctcttttactctgataatattaaattaggactaacttatgttttataatgattataatttacatgcttatttttaaaatagtatatgtggacacatatatatcattatattaaaataaattctaccattttaaattggacctttgtgag

SEQ ID NO: 56612 - DNA, 1530 bp, Homo sapiens
aagaatgggcaaaacagctttcttttcagaatcaaaatgcagaacaaatggaaaaattatggtattaaccttcacaagtttgagcctccacaaataatgcaaccaagttttacatttttaacagcccttctactgattgcatttagacctggagctgcgttctgaagctgaacttgtagcatgactttcatcactccagttacagaaataatcacttattgctctctccagctgcagtggccttcaaaattatttttccccagaatgctgcttctaaattacttgggcaaaattgggtccaaaacgcctttgatggcagctgcaactttttccgttggttggaacaccttcgcttgctcagagtcattggaaaaaccactgaactggctactttttaattactatttgacaacctgccttcagtcttcagttaataagcaccgacatatgtttgtaaaacaagttgatatggatcatgtcatgaaggctaaatccatcagagagtttgataagcgattcacttcagtcatgtttggataccaaacaattgatgattattatactgatgccagtccgagtcctagactgaagtcagtaggaattccagtattgtgtctaaattctgtggatgatgttttctcacccagtcatgctattccaatagaaactgctaagcaaaatcctaatgttgctttggtccttacttcttatggaggccatattggttttctggagggaatctggccaagacagtccacttacatggatcgtgtcttcaagcaatttgtgcaagccatggttgagcatggacatgaactctcttaacatgtagttctttgggtgcattttgtctgaaccacaattgtgaaggcagctcagcttagtgcacaaattttaactgttgtatataaagcaaataagccagcagatgggtgaagaggtccagaatgatatgcaaaaactactttttagagaaacaaaacaactttgtagcaacaaattaaatatagtattagattgttacttacgtagattttatttttactatgccttaccaagtacatccttaaacaaagtagtatgtacatgaaattgcacttaaccaaaactattgtgtaaaacaaattttaattcctcagggttttaatttaaactagtatttttttagattatttgttttaggtgatttaatggtactttaataactactaagaaatattggctatttcaatgtaagttataaggtggtacattcctaagggtatttatagttgatgataacatgaaaactgaaataagataaaatacaacgtgctaaatcttttatgtattctaactttaaaagacaagtgcaacaaagttagactgacttctatatgtgctcttttactctgataatattaaattaggactaacttatgttttataatgattataatttacatgcttatttttaaaatagtatatgtggacacatatatatcattatattaaaataaattctaccattttaaattggacctttgtgag

SEQ ID NO: 56613 - DNA, 1819 bp, Homo sapiens
tcagtagaggcccggtgttaatcggccgagggggagtaggcagcggcgccgcgtccgctctcgcccgctctcgcccgctcgccagccggctctcctcccgccgcaggacccgcgcgccgcgctcgggggccatgcagcgcctggccatggacctgcggatgttgtcccgggagctctccctctacctggaacaccaagtccgggtggggttcttcggctcgggggtgggcttatcccttatcctgggcttcagcgtcgcttatgccttctactacctgagcagcattgccaagaaaccccagttagtgaccgggggtgagagtttcagccgcttccttcaagaccactgtcccgtggttacagaaacgtactacccgacggtctggtgctgggagggtcgaggacagaccctgcttagacctttcatcacttcgaagcccccggtgcagtacaggaatgaacttattaaaactgcagatggaggacagatttcactggactggtttgataatgataacagtacgtgttatatggatgccagcaccagacctactatcttattgttgcctggcctcacgggaacaagcaaggagtcatatatccttcatatgatccatcttagtgaagaattaggatacagatgtgtggtttttaacaacagaggagtggcgggggagaatctcttgacgccaaggacttattgttgtgctaacactgaagacttggagacagttattcaccatgtacacagcctgtacccttctgctcctttcctggcagcaggggtttcaatgggagggtaaggttttccctttctaaaataatctctgagagggaagctattttattggctgtctctttgagaggactataagctagctgtatggacactttttaaataaatgtctgattatgtttatcatattttattaaatgcggttgattgaatgaacgaaggaaggaaagaattaattcaggtgaattttaatatttttcttaactacgggtctctgtgactgcggattttgtgagcctgaaggtttgtctgaagcccatgaagtcgattgcatcactcaccggctgccatgttgaccttctgattcctgacgcactcccagccatccctggagctgcgttctgaagctgaacttgtagcatgactttcatcactccagttacagaaataatcacttattgctctctccagctgcagtggccttcaaaattatttttccccagaatgctgcttctaaattacttgggcaaaattgggtccaaaacgcctttgatggcagctgcaactttttccgttggttggaacaccttcgcttgctcagagtcattggaaaaaccactgaactggctactttttaattactatttgacaacctgccttcagtcttcagttaataagcaccgacatatgtttgtaaaacaagttgatatggatcatgtcatgaaggctaaatccatcagagagtttgataagcgattcacttcagtcatgtttggataccaaacaattgatgattattatactgatgccagtccgagtcctagactgaagtcagtaggaattccagtattgtgtctaaattctgtggatgatgttttctcacccagtcatggtaatcttagaagctgaaacttacagccttgaccacaatttagaaaatgaaactctgaactttaatatcagtcgacttacatggtgattgttttagcatattttcattggattaaggaagtccagtattcctctacccgtttttatatttcactgccctttttaccaataaaaagttcccaacattttaac

SEQ ID NO: 56614 - DNA, 1707 bp, Homo sapiens
tcagtagaggcccggtgttaatcggccgagggggagtaggcagcggcgccgcgtccgctctcgcccgctctcgcccgctcgccagccggctctcctcccgccgcaggacccgcgcgccgcgctcgggggccatgcagcgcctggccatggacctgcggatgttgtcccgggagctctccctctacctggaacaccaagtccgggtggggttcttcggctcgggggtgggcttatcccttatcctgggcttcagcgtcgcttatgccttctactacctgagcagcattgccaagaaaccccagttagtgaccgggggtgagagtttcagccgcttccttcaagaccactgtcccgtggttacagaaacgtactacccgacggtctggtgctgggagggtcgaggacagaccctgcttagacctttcatcacttcgaagcccccggtgcagtacaggaatgaacttattaaaactgcagatggaggacagatttcactggactggtttgataatgataacagtacgtgttatatggatgccagcaccagacctactatcttattgttgcctggcctcacgggaacaagcaaggagtcatatatccttcatatgatccatcttagtgaagaattaggatacaggtaccagtaaaagatttcttttttttcacttgatccattccaaatgaagtacaaatatatctacatgtttgtttcagaaatacttagtacttcttgcatagaaaagcagtcccttaaattattatttttctctgcattctttttttcctctttcttttcaggaagatgcataactgaatcatctcacaagaaatgtcacttagcatagtagacactctgcagatttaggctgagttaatgaatgaaattagaatcatctgagcattgactgagcccttccccccatccccaccccaatggagagtgtgttatggagggagaacagcaattacagacccctgagagagtacacagtggccgtcatgccacattctggggcctggattcactaatcttgtcgccctggctcagctcccaagtgcaaaaaatattcagaatcagcttgtaggttgtccctatttatcaaaggtgatctctgcctcttctgaccacctgagtttgcaggtgcacttggctagtctccagttgttgatgccacagcttttctgagtaaccattattaagctcagtcaccaggtacaatttaattttttgcaagtgattagcaactttgagtttcaagttcagctctagaatcttagagtcattataaaaggtactgcttttttgtgcctcagcttttttttttagctgataattattgtaatggaacactctgtgagttgtatttaaagtagagttgtatcttttgttaaacttgaaacacttgtgtgaaaagctgatggtaagtttaccttaaaaaaataattttaggctggtcacagtggctcatgcctgtaatcccagcactttggaaggcgtaaagccggtggattgcttgagcccaggagttcgagaccagcctgggcaacatggtgagacctagtctacaaaaattagcagggcatggtggcatgcacctatagttccagctactgacaaggctgaggtaggacgatcatggttcactgcagtctcttacaggcgtgagttaatgctcccagcctggttccatttttttttttttt

SEQ ID NO: 56615 - DNA, 2384 bp, Homo sapiens
  misc_feature (873)..(873): n is a, c, g, or t
  misc_feature (949)..(949): n is a, c, g, or t
  misc_feature (970)..(970): n is a, c, g, or t
  misc_feature (1070)..(1070): n is a, c, g, or t
  misc_feature (1134)..(1134): n is a, c, g, or t
  misc_feature (1264)..(1264): n is a, c, g, or t
  misc_feature (1282)..(1282): n is a, c, g, or t
tgaccaggacttgccaacctgcaacttgccctgagagccaggtatgcgtgtgtgtatctggggagcacgccccaaacatgagcagggacggtgttcccagctatccgagaggtcatgcccaagccaaaaggaaggctctagctcttaaacatgaataagtttattcctttcatttccacagtgtcttatgcttgcttctgttttctccaaggaagtatggtgcccacctactcctccagcctgacgatccatgtgagggttccttgttcccagcccaattctcatgtcccacctttctccactaagaaacagccaaattttggcaagagtcgtggtaggaaaaaaaaacaataattgggcagatgaggatttttcgctttttgactagttctttctctagactttcctgtctttttaaaacttctagtttcccccttgagcgctccctcccagtgggtagaccatggaaggaatgaacaggggatggaagcaggggatgcagtccctattatttcaatagattggaaagatgggcccagaacaattgcgtacggtgttcagtgtaaattgaagatctggagttgcaggattgttgaggcaatttttagttgctttgctccatctaaacacaaggccataggatagtgtgactttgtagcttcatcaccgtatccacatcagaagtacaatgtccacttaatacatatatacacatgtgtatgtatacacatatacacatgtgtacatatgtatgtatacacatatgcacatgtgtacgtatgtatgtatacacatacatatatgtgtacacatatacatatgtatgtatacacatagatatatgtgtacacataaacatatgtatacgcatanacatatgtatgtatacacatacatatatgtgtacacatatacatatgtatgtatacacatacatatatgtgtacanatatacacatatacatatatntgtacacataaatatgtatgtatccatatatgtatatatatacacatgtatagatatacatctatatgtatacctctatatgcacatatacatatatgtntacatatatacatatatgcatacatctataatatatgtatgtgtatatatacacatacagtgtncacttaatatatatatctatcttgtgtgtatgtgtgtgtaaatatacacacacatacacacacgataaaatacagagtctaccacatgatgagcctctgctaggtccttagcaatcaaaccacatgtccngtcctggcccccattctncaactaaacacatgggccagtttaggggtccaggagggcaagaatggtgggtccacgtagaaaccaggtgagggaggagcagtccacagggctggggtgatgggctggtgaagcagtgttccaggaggggaactgccgctcacagggctgtcctggtcgccctcgggatacagccagacttgatccgagtggctcccggggctgaatggggaccgccgggtgcatatcccaggaggcagccttcagctcagtggggaaagcagtttccaaccttagagctgcccaacactagcacagggcacctgagaaaggaggggcccctctgcctttactctgtctcccactagaggcagctggttcctgcagggaactctggtggggggtgagggggtggctggttctcagtgggcaggggtgaccctactggggtcagtgggctggcaatgctggtcttcactaacaagagttgaaaatagccaggaagctaagccctggctcctgggctcctgggcagatgcttaattaggaggaagaaggaaccaaaatcatgaacgcaactggctctctcagggggaggctgtcaccctccaagctcttcttccccttcctcaaatggagattcacactcatccctagttcaggagagccgccattgatgatgaggaaatccgtgtcaaagaagctggaaagactgctattcattgtgagaattttgtttccactgctacattacattgtttcttcttgttttcccttccaatttccagttaagaatctttcacagaaaatttttaattttatcacaaactgcacagatatcacacagctgcacccccatttggtgacacaaagcatacccttctgtgaagattttcactttacgccaaggcatgattgtcactttacgccaaggcaataaatttttacaaattttgtataacaggagctgaattctgggttctcaaatgtgaaatgtggcaaaaaaaaaaaaaaaaaaaaaagatttaattcaagcattttgtcatgtggttcttatttcttcaaccaagtttgtttacagtcactgcctttgaaatacagtcaaatacatctgtttgcttct

SEQ ID NO: 56616 - DNA, 333 bp, Homo sapiens
tactactactaaattcgcggccgcgtcgacatcacaaactgcacagatatcacacagctgcacccccatttggtgacacaaagcatacccttctgtgaagattttcactttacgccaaggcatgattgtcactttacgccaaggcaataaatttttacaaattttgtataacaggagctgaattctgggttctcaaatgtgaaatgtggcaaaaaaaaaaaaaaaaaaaaaagatttaattcaagcattttgtcatgtggttcttatttcttcaaccaagtttgtttacagtcactgcctttgaaatacagtcaaatacatctgtttgcttct

SEQ ID NO: 56617 - DNA, 981 bp, Homo sapiens
ggggggatggatgccggtgacgtgctagcacttgtgtggacatcccagtctgcattatgctgtttaacataaagtgccgacattttgtaccagcaaatacctgcccattccaacccttggtgggagcagacctctactgtcctctgtaacttgctgctattgaggacaagggagtttttctttctttagcgtcttcagtgaaggatacaatacaacaatgcctaatgtatttgactttttagcttgtgtctgtgtgtataggaaaagcctaaaacaagttatttgcatttcagtggttttgtgagacaaagaatgggaaattctgtagcccttctggcttaccctgttgattataaacctagcctcaaaagagattgacaggcatgactcaagtgagtgttcacatatacaagcctgcatgagccctctgtgggtaggtggtcacacttggcatctgcagcattgacgtggccccgctgggtgccttgagcatgccctcttcctgctctgcaatttgaatcaccaccgtgccccttccaccactgttccccatgcaaaagctctgcttccagcagcccccactgaccgctctctgtgtggagcaaagtgctgtcgtgcggtgaccaccaggtgaagagcagcttgtattcagacatctagagaaggttaaatcttagtgtccctgggccaggagcatatcccaaggctcctgcgagccagtggcgaccctgtccactgccgctcttggttcactgctgtgtcctgccccaccctcctctcctcctgcctgttggttccttgacctgcactatgggttagttgagttccttacgatactacggtgaaagccgggtgctagagcccctcttgtttacaagacataatgagggatttgaaatatgtaaaaataaacatgagaagctaaaatgttcttccatcataagcttaaagggaaaaaaactaaaaactttaaaaaaaaaa

SEQ ID NO: 56618 - DNA, 160 bp, Homo sapiens
tacttttttttttttttaagcatcaatgtagtagtactctgggccgaacaggggtcaacgtttaatctacagttatcaccaacatgtatgtacttatgtcggaatcaaaatgtatcaaactgcttattgtgaagagaattatagcagacctgaagggggc

SEQ ID NO: 56619 - DNA, 714 bp, Homo sapiens
taagcatcaatgtagtagtactctgggccgaacaggggtcaacgtttaatctacagttatcaccaacatgtatgtacttatgtcggaatcaaaatgtatcaaactgcttattgtgaagagaattatagcagacctgaagggggcgaaaaaccagatagggtggggggatggatgccggtgacgtgctagcacttgtgtggacatcccagtctgcattatgctgtttaacataaagtgccgacattttgtaccagcaaatacctgcccattccaacccttggtgggagcagacctctactgtcctctgtaacttgctgctattgaggacaagggagtttttctttctttagcgtcttcagtgaaggatacaatacaacaatgcctaatgtatttgactttttagcttgtgtctgtgtgtaggtgggtgggtgggtgtgtataggaaaagcctaaaacaagttatttgcatttcagtggttttgtgagacaaagaatgggaaattctgtagcccttctggcttaccctgttgattataaacctagcctcaaaagagattgacaggcatgactcaagtgagtgttcacatatacaagcctgcatgagccctctgtgggtaggtggtcacacttggcatctgcagcattgacgtggccccgctgggtgccttgagcatgccctcttcctgctctgcaatttgaatcaccaccgtgccc

SEQ ID NO: 56620 - DNA, 321 bp, Homo sapiens
aaaaaaaaaattccaaagaaacagagtaattttgctccttgcctcagccctaagtcatctcccagacaaaaaagcaatcatcattgtcaaatttaaaagggaaaaggaaagacttttatttgaatgaaaagatttttttcagtgtgatagagagggaagactgaaataaacagaatttacaaccttcgcacctttgcaccttcctcttctagcaatatggcaaactaaataacttgcactgaaaacgagttaaaaagctgtatacttttttaaaaaatatattttgtttatgtcattgatctgcacagtttgaatacaaaa

SEQ ID NO: 56621 - DNA, 1162 bp, Homo sapiens
gagagtttgtgaatattattggcatattctaccaaaaaaaaagtgaacaattttatgttccagaaaaatagcaaaggacaccaaacaagattgtgtgcctgctttgcctccaaggctccagctgtttgtgttctccatctcctctcgcctccaaaaaggccactgaccttcaagaaggccaaggtgactgacctggcctggttatcccaacaatctcgttatccatccatcttctttaaccctcacccctcataagccttgttagcctctattaaagtaagctgggattgagtccaaaggctggaattcagtcatagccaaaatatatctagttcctataggcaacatcttgagcagaaaataagcacacaccaatctctgcctttaaaaaaagcatgccaaaaaaaaaaaaaaaacagaaacagcatgcagatgttcattaagaacatggaacagtaatacattcccatgctagctactatatagaactattgtagtgaaaggacagcagctacattaagtagattaataattacagagattgatcatcttcgtctgctgtacagtttttgtttactggaattcatggactctacatcagcaaagcattgtcttgagctagttcctggggtgtggaagtagctttagttttctacaactgaataatgagctcttatttttctcttggaattctgtacatatatagcagtccttcataaaaatactattacctagaaaagcttatgtgacatcatcaaatttcccacagtgatcttttcttactggaagaaaatgtttatggtttgttctatgggggggaaatataccataagatatataattgaataattacaatgatttataataatgaaaaggattgtgtaattgtaaatgtctggtagcatagcatgcactgtgggttgtggaatagaagtgagagccacatcacagatgcttggccatgcagaccagacattgcattggcattgtctgcaggcagctccatgccttctcagatattcaagagccatttgtgattgtgcttcaaagtatgtaatacatagctctaggttcctcctccctccctccctctcttccttccttccttctttccttccttccttccttcctcctttcctttcttccacagtgcccttcttgc

SEQ ID NO: 56622 - DNA, 6023 bp, Homo sapiens
agcggggtaacttagcgtgcttatggaaaacctgatggaatagcattgacccagtttacaaagccatctgaagtgcctgagttgtatttgaaggaatattttttcacctttggcttttagcttagaagttatgactgcacattacaaaggggaatgttcaaacctttatcacaatcccacagagtattgatgaggaaactgaagtttggagcgatcacatcattttcccaaggtaacacaagtggcaagacagccgggaacccctaccccatccccttattcagcacatgaaataaacaaggggcatccaaatcttgcggcaacgcccccgggacatgcatcgtcccctggactctctcaaaccccttatccctctggacagaatgcaggtccaaccacgctggtataccctcaaacccctcagacaatgaattcacaacctcaaacccgttctccgtttttccagaggcctcaaatacagcctcctagagctaccatcccgaacagcagtccttccattcgtcctggtgcacagacacccactgcagtgtaccaggctaatcagcacatcatgatggttaaccatctgcccatgccgtacccagtgccccaggggcctcagtactgtataccacagtaccgtcatagtggccctccttatgttgggcccccccaacaatatccagttcaaccaccggggccaggtcctttttatcctggaccaggacctggggacttccccaatgcttatggaacgcctttttacccaagtcagccggtgtatcagtcagcacctatcatagtgcctacgcagcaacagccgcctccagccaagagagagaaaaaaactataagaattcgggatccaaaccagggaggtaaagacataacagaggagattatgtctggaggtggcagcagaaatcctactccacccataggaagacccacgtccacacctactcctcctcagcagctgcccagccaggtccccgagcacagccctgtggtttatgggactgtggagagcgctcatcttgctgccagcacccctgtcactgcagctagcgaccagaagcaagaggagaagccaaaaccagatccagtgttaaagtctccttccccagtccttaggctagtcctcagtggagagaagaaagaacaagaaggccagacatctgaaactactgcaatagtatccatagcagagcttcctctgcctccatcacctaccactgtttcttctgttgctcgaagtacaattgcagcccccacctcttctgctcttagtagccaaccaatattcaccactgctatagatgacagatgtgaactctcatccccaagagaagacacaattcctatacccagcctcacatcttgcacagaaacatcagaccctttaccaacaaatgaaaatgatgatgatatatgcaagaaaccctgtagtgtagcacctaatgatattccactggtttctagtactaacctaattaatgaaataaatggagttagcgaaaaattatcagccacggagagcattgtggaaatagtaaaacaggaagtattgccattgactcttgaattggagattctcgaaaatcccccagaagaaatgaaactggagtgtatcccagctcccatcaccccttccacagttccttcctttcctccaactcctccaactcctccagcttctcctcctcacactccagtcattgttcctgctgctgccactactgttagttctccgagtgctgccatcacagtccagagagtcctagaggaggacgagagcataagaacttgccttagtgaagatgcaaaagagattcagaacaaaatagaggtagaagcagatgggcaaacagaagagattttggattctcaaaacttaaattcaagaaggagccctgtcccagctcaaatagctataactgtaccaaagacatggaagaaaccaaaagatcggacccgaaccactgaagagatgttagaggcagaattggagcttaaagctgaagaggagctttccattgacaaagtacttgaatctgaacaagataaaatgagccaggggtttcatcctgaaagagacccctctgacctaaaaaaagtgaaagctgtggaagaaaatggagaagaagctgagccagtacgtaatggtgctgagagtgtttctgagggtgaaggaatagatgctaattcaggctccacagatagttctggtgatggggttacatttccatttaaaccagaatcctggaagcctactgatactgaaggtaagaagcagtatgacagggagtttctgctggacttccagttcatgcctgcctgtatacaaaaaccagagggcctgcctcctatcagtgatgtggttcttgacaagatcaaccaacccaaattgccaatgcgaactctggatcctcgaattttgcctcgaggaccagactttacaccagcctttgctgattttggaaggcagacacctggtggaagaggcgtacctttgttgaatgttgggtcacgaagatctcaacctggccaaagaagagaacccagaaagatcatcacagtttctgtaaaagaagatgtacacctgaaaaaggcagaaaatgcctggaagccaagccaaaaacgagacagccaagccgatgatcccgaaaacattaaaacccaggagctttttagaaaagttcgaagtatcttaaataaattgacaccacagatgttcaatcaactgatgaagcaagtgtcaggacttactgttgacacagaggagcggctgaaaggagttattgacctggtctttgagaaggctattgatgaacccagtttctctgtggcttacgcaaacatgtgtcgatgtctagtaacgctgaaagtacccatggcagacaagcctggtaacacagtgaatttccggaagctgctactgaaccgttgccagaaggagtttgaaaaagataaagcagatgatgatgtctttgagaagaagcagaaagaacttgaggctgccagtgctccagaggagaggacaaggcttcatgatgaactggaagaagccaaggacaaagcccggcggagatccattggcaacatcaagtttattggagaactctttaaactcaaaatgctgactgaagccatcatgcatgactgtgtggtgaagctgctaaagaaccatgatgaagaatccctggagtgcctgtgtcgcctgctcaccaccattggcaaagacttggactttgaaaaagcaaagccacgtatggaccagtactttaatcagatggagaaaattgtgaaagaaagaaaaacctcatctaggattcggttcatgcttcaagatgttatagacctaaggctgtgcaattgggtatctcgaagagcagatcaagggcctaaaactatcgaacagattcacaaagaggctaaaatagaagaacaagaagagcaaaggaaggtccagcaactcatgaccaaagagaagagaagaccaggtgtccagagagtggacgaaggtgggtggaacactgtacaaggggccaagaacagtcgggtactggacccctcaaaattcctaaaaatcactaagcctacaattgatgaaaaaattcagctggtacctaaagcacagctaggcagctggggaaaaggcagcagtggtggagcaaaggcaagtgagactgatgccttacggtcaagtgcttccagtttaaacagattctctgccctgcaacctccagcaccctcagggtccacgccatccacgcctgtagagtttgattcccgaaggaccttaactagtcgtggaagtatgggcagggagaagaatgacaagccccttccatctgcaacagctcggccaaatactttcatgaggggtggcagcagtaaagacctgctagacaatcagtctcaagaagagcagcggagagagatgctggagaccgtgaagcagctcacaggaggtgtggatgtggagaggaacagcactgaggctgagcgaaataaaacaagggagtcagcaaaaccagaaatttcagcaatgtcagctcatgacaaggctgcattatcagaagaggaactggagaggaagtcgaaatctatcattgatgaatttctacacattaatgattttaaggaagccatgcagtgtgtggaagagctgaatgcccagggcctactacatgtttttgtgagagtgggagtggagtccaccctggaaaggagccagatcaccagggatcacatgggccaactactctatcagctggtacagtcagaaaaactcagcaaacaggactttttcaaaggtttttcagaaactttggaattggcagatgacatggccattgatattccccatatttggttgtaccttgctgaactggtgacccccatgttaaaagaaggtggaatctccatgagagaacttaccatagaatttagcaaacctttacttcctgttggaagagctggggtcttgctatctgaaatattgcacctactatgcaaacaaatgagccataagaaagtgggagccttatggagggaggctgacctcagctggaaggactttttaccagaaggagaagatgtacataattttcttttggagcagaagttggacttcatagagtctgacagtccctgttcctctgaagcactttcaaagaaagaactgtctgccgaagagctgtataagcgactcgagaaactcattattgaggacaaagcgaatgatgaacagatctttgactgggtagaggctaatctagacgaaatccagatgagttcacctacattccttagagctttaatgactgctgtttgtaaagcagctattatagccgactcttctaccttcagagtggacactgctgttatcaagcagagagtgccgatcttactcaagtacctagactcagatacagagaaggaactgcaagcactttatgcactacaagcatcgatagtaaaacttgatcaacctgccaatttgctgcggatgttttttgattgtctatatgacgaggaggtgatctccgaggatgccttctacaaatgggagagcagcaaggaccctgcagagcagaatgggaagggcgtggctctgaaatctgtcacggcattcttcacgtggctgcgggaagcagaagaggagtctgaggataactaaaacttcaaatacacaaaatgaaacaaaagaaacaatttaagtatttttttaaaaagtttcacgtcttcgccaatcacagtgcagcaaggccaattctcgcagaaacccccacgtgtgcacgagtgggagaggggaaagagaaaaaaaggtgatcatggaggaaaaaggtactggataaaagtaaacttcaaaccttagggcgggagcactaaaaccaaaatacatgtattatttatagaaaatattttctgttttaatcttttctttttaaacaaggactcatacttaaaaaaatgtttagcaaaaaaaaaaaaaagttgagaacttttaatttattttaaggactgcaaatgccagtgtaattttttaatttgcagtttctgtaaacaacttgtataatagaaaagcagagaaataaatttccctccccttcaagatgcacctcatgtttgttttaaggtatagcatttagtccagatttgagaaagtttggggtgaacaaggtaagaaagatttttttttttttggcatcaaatctttctgcctgcctctcagcttgcttcagaaaatttaaaaaatcacaatagtaatcaaaacatacataacattgaaacagaaggaaatgctgtggaccacagaactccaagaattgtttaaaaaaaaaaaagtgctaccctgagaaaagtactcttaatactcttgaaatctttagagcaactttaaggcttgtaaatacatagaacaaatatttaaaaaaacaaaaagaaattgactcagtactatttcttttcactttgaaaatataaagaacaaaataaagacaaacattgcaagttta

SEQ ID NO: 56623 - DNA, 591 bp, Homo sapiens
ctgatctccagaagataattaaaggaacttttatctatgcagtaactttcatatattaaaagtattttatgaaacttgtatgttaaatatggtaaataaaatcagtcttacaggttcttgcaaaacaagtataaatattaatagtttgcctttttgacctagaaatccagccaactaggtttcattttagcttgttattctaattagttcatgtcagagctaatggcctacatttatctgatggatctgtgattgaaataaagtcaaatgtggtgattatcacctttgatatttgacaggtttcccagtttgcacctttaactcacttatatgcctataaatttgctacacagacactcatctgtacatatgtcattttatttaaccttatagataagaattcgggatccaaaccagggaggtaaagacataacagaggagattatgtctggaggtggcagcagaaatcctactccacccataggaagacccacgtccacacctactcctcctcaggtaagacagagtgagctgtaatggatggcactatttgttcactaacctctactgaactcttctttcttctatagc

SEQ ID NO: 56624 - DNA, 493 bp, Homo sapiens
gcactctagcccgggtgacagagcaagaccccagttcattaatttaaaaaaaaaaaaaaagaaagaaaaggaactgtactgattttgagttactggatattgtaataaagttaaatttttaaaaagtagaatataaaccacattaataaccacttctgtaaacttttataaaacatcttgaactagaattgccatgccatattttttcaaaatattatattgttcttgccattttttgacagaccccttatccctctggacagaatgcaggtccaaccacgctggtataccctcaaacccctcagacaatgaattcacaacctcaaacccgttctccggtaagtaagcagaagcttgaaccaaattacattctctacctgtgtttgtgtgtgtagtggcttgggtttctttggcaaatatttttactggattttggaagtttgttccaaagatgatttattattatgactcaggtggtgggggtccgagctaa

SEQ ID NO: 56625 - DNA, 6269 bp, Homo sapiens
agcggggtaacttagcgtgcttatggaaaacctgatggaatagcattgacccagtttacaaagccatctgaagtgcctgagttgtatttgaaggaatattttttcacctttggcttttagcttagaagttatgactgcacattacaaaggggaatgttcaaacctttatcacaatcccacagagtattgatgaggaaactgaagtttggagcgatcacatcattttcccaagaattcctagaggacctgtgcaacaacctcttgaggatcgaatcttcactcccgctgtctcagcagtctacagcacggtaacacaagtggcaagacagccgggaacccctaccccatccccttattcagcacatgaaataaacaaggggcatccaaatcttgcggcaacgcccccgggacatgcatcgtcccctggactctctcaaaccccttatccctctggacagaatgcaggtccaaccacgctggtataccctcaaacccctcagacaatgaattcacaacctcaaacccgttctccgtttgcagcggggcctcgacctccccatcatcagtttttccagaggcctcaaatacagcctcctagagctaccatcccgaacagcagtccttccattcgtcctggtgcacagacacccactgcagtgtaccaggctaatcagcacatcatgatggttaaccatctgcccatgccgtacccagtgccccaggggcctcagtactgtataccacagtaccgtcatagtggccctccttatgttgggcccccccaacaatatccagttcaaccaccggggccaggtcctttttatcctggaccaggacctggggacttccccaatgcttatggaacgcctttttacccaagtcagccggtgtatcagtcagcacctatcatagtgcctacgcagcaacagccgcctccagccaagagagagaaaaaaactataagaattcgggatccaaaccagggaggtaaagacataacagaggagattatgtctggaggtggcagcagaaatcctactccacccataggaagacccacgtccacacctactcctcctcagcagctgcccagccaggtccccgagcacagccctgtggtttatgggactgtggagagcgctcatcttgctgccagcacccctgtcactgcagctagcgaccagaagcaagaggagaagccaaaaccagatccagtgttaaagtctccttccccagtccttaggctagtcctcagtggagagaagaaagaacaagaaggccagacatctgaaactactgcaatagtatccatagcagagcttcctctgcctccatcacctaccactgtttcttctgttgctcgaagtacaattgcagcccccacctcttctgctcttagtagccaaccaatattcaccactgctatagatgacagatgtgaactctcatccccaagagaagacacaattcctatacccagcctcacatcttgcacagaaacatcagaccctttaccaacaaatgaaaatgatgatgatatatgcaagaaaccctgtagtgtagcacctaatgatattccactggtttctagtactaacctaattaatgaaataaatggagttagcgaaaaattatcagccacggagagcattgtggaaatagtaaaacaggaagtattgccattgactcttgaattggagattctcgaaaatcccccagaagaaatgaaactggagtgtatcccagctcccatcaccccttccacagttccttcctttcctccaactcctccaactcctccagcttctcctcctcacactccagtcattgttcctgctgctgccactactgttagttctccgagtgctgccatcacagtccagagagtcctagaggaggacgagagcataagaacttgccttagtgaagatgcaaaagagattcagaacaaaatagaggtagaagcagatgggcaaacagaagagattttggattctcaaaacttaaattcaagaaggagccctgtcccagaaacatcgaatgaatgctgaaattcctagtctggtttcttcagtggtgtgtttgtgttttagtacaacctgcaaaagagttactccattgtctaaaaatgcaaatgagaatttccaaatatacaaaatgcctccaagctcaaatagctataactgtaccaaagacatggaagaaaccaaaagatcggacccgaaccactgaagagatgttagaggcagaattggagcttaaagctgaagaggagctttccattgacaaagtacttgaatctgaacaagataaaatgagccaggggtttcatcctgaaagagacccctctgacctaaaaaaagtgaaagctgtggaagaaaatggagaagaagctgagccagtacgtaatggtgctgagagtgtttctgagggtgaaggaatagatgctaattcaggctccacagatagttctggtgatggggttacatttccatttaaaccagaatcctggaagcctactgatactgaaggtaagaagcagtatgacagggagtttctgctggacttccagttcatgcctgcctgtatacaaaaaccagagggcctgcctcctatcagtgatgtggttcttgacaagatcaaccaacccaaattgccaatgcgaactctggatcctcgaattttgcctcgaggaccagactttacaccagcctttgctgattttggaaggcagacacctggtggaagaggcgtacctttgttgaatgttgggtcacgaagatctcaacctggccaaagaagagaacccagaaagatcatcacagtttctgtaaaagaagatgtacacctgaaaaaggcagaaaatgcctggaagccaagccaaaaacgagacagccaagccgatgatcccgaaaacattaaaacccaggagctttttagaaaagttcgaagtatcttaaataaattgacaccacagatgttcaatcaactgatgaagcaagtgtcaggacttactgttgacacagaggagcggctgaaaggagttattgacctggtctttgagaaggctattgatgaacccagtttctctgtggcttacgcaaacatgtgtcgatgtctagtaacgctgaaagtacccatggcagacaagcctggtaacacagtgaatttccggaagctgctactgaaccgttgccagaaggagtttgaaaaagataaagcagatgatgatgtctttgagaagaagcagaaagaacttgaggctgccagtgctccagaggagaggacaaggcttcatgatgaactggaagaagccaaggacaaagcccggcggagatccattggcaacatcaagtttattggagaactctttaaactcaaaatgctgactgaagccatcatgcatgactgtgtggtgaagctgctaaagaaccatgatgaagaatccctggagtgcctgtgtcgcctgctcaccaccattggcaaagacttggactttgaaaaagcaaagccacgtatggaccagtactttaatcagatggagaaaattgtgaaagaaagaaaaacctcatctaggattcggttcatgcttcaagatgttatagacctaaggctgtgcaattgggtatctcgaagagcagatcaagggcctaaaactatcgaacagattcacaaagaggctaaaatagaagaacaagaagagcaaaggaaggtccagcaactcatgaccaaagagaagagaagaccaggtgtccagagagtggacgaaggtgggtggaacactgtacaaggggccaagaacagtcgggtactggacccctcaaaattcctaaaaatcactaagcctacaattgatgaaaaaattcagctggtacctaaagcacagctaggcagctggggaaaaggcagcagtggtggagcaaaggcaagtgagactgatgccttacggtcaagtgcttccagtttaaacagattctctgccctgcaacctccagcaccctcagggtccacgccatccacgcctgtagagtttgattcccgaaggaccttaactagtcgtggaagtatgggcagggagaagaatgacaagccccttccatctgcaacagctcggccaaatactttcatgaggggtggcagcagtaaagacctgctagacaatcagtctcaagaagagcagcggagagagatgctggagaccgtgaagcagctcacaggaggtgtggatgtggagaggaacagcactgaggctgagcgaaataaaacaagggagtcagcaaaaccagaaatttcagcaatgtcagctcatgacaaggctgcattatcagaagaggaactggagaggaagtcgaaatctatcattgatgaatttctacacattaatgattttaaggaagccatgcagtgtgtggaagagctgaatgcccagggcctactacatgtttttgtgagagtgggagtggagtccaccctggaaaggagccagatcaccagggatcacatgggccaactactctatcagctggtacagtcagaaaaactcagcaaacaggactttttcaaaggtttttcagaaactttggaattggcagatgacatggccattgatattccccatatttggttgtaccttgctgaactggtgacccccatgttaaaagaaggtggaatctccatgagagaacttaccatagaatttagcaaacctttacttcctgttggaagagctggggtcttgctatctgaaatattgcacctactatgcaaacaaatgagccataagaaagtgggagccttatggagggaggctgacctcagctggaaggactttttaccagaaggagaagatgtacataattttcttttggagcagaagttggacttcatagagtctgacagtccctgttcctctgaagcactttcaaagaaagaactgtctgccgaagagctgtataagcgactcgagaaactcattattgaggacaaagcgaatgatgaacagatctttgactgggtagaggctaatctagacgaaatccagatgagttcacctacattccttagagctttaatgactgctgtttgtaaagcagctattatagccgactcttctaccttcagagtggacactgctgttatcaagcagagagtgccgatcttactcaagtacctagactcagatacagagaaggaactgcaagcactttatgcactacaagcatcgatagtaaaacttgatcaacctgccaatttgctgcggatgttttttgattgtctatatgacgaggaggtgatctccgaggatgccttctacaaatgggagagcagcaaggaccctgcagagcagaatgggaagggcgtggctctgaaatctgtcacggcattcttcacgtggctgcgggaagcagaagaggagtctgaggataactaaaacttcaaatacacaaaatgaaacaaaagaaacaatttaagtatttttttaaaaagtttcacgtcttcgccaatcacagtgcagcaaggccaattctcgcagaaacccccacgtgtgcacgagtgggagaggggaaagagaaaaaaaggtgatcatggaggaaaaaggtactggataaaagtaaacttcaaaccttagggcgggagcactaaaaccaaaatacatgtattatttatagaaaatattttctgttttaatcttttctttttaaacaaggactcatacttaaaaaaatgtttagcaaaaaaaaaaaaaagttgagaacttttaatttattttaaggactgcaaatgccagtgtaattttttaatttgcagtttctgtaaacaacttgtataatagaaaagcagagaaataaatttccctccccttcaagatgcacctcatgtttgttttaaggtatagcatttagtccagatttgagaaagtttggggtgaacaaggtaagaaagatttttttttttttggcatcaaatctttctgcctgcctctcagcttgcttcagaaaatttaaaaaatcacaatagtaatcaaaacatacataacattgaaacagaaggaaatgctgtggaccacagaactccaagaattgtttaaaaaaaaaaaagtgctaccctgagaaaagtactcttaatactcttgaaatctttagagcaactttaaggcttgtaaatacatagaacaaatatttaaaaaaacaaaaagaaattgactcagtactatttcttttcactttgaaaatataaagaacaaaataaagacaaacattgcaagttta

SEQ ID NO: 56626 - DNA, 6232 bp, Homo sapiens
ggcggcggcggcagcggtcccccctcctcacccgaacatcagggccctccagactcaggcgccccaacaaattcctagaggacctgtgcaacaacctcttgaggatcgaatcttcactcccgctgtctcagcagtctacagcacggtaacacaagtggcaagacagccgggaacccctaccccatccccttattcagcacatgaaataaacaaggggcatccaaatcttgcggcaacgcccccgggacatgcatcgtcccctggactctctcaaaccccttatccctctggacagaatgcaggtccaaccacgctggtataccctcaaacccctcagacaatgaattcacaacctcaaacccgttctccgtttttttgacagcccagcagaacagtgccaatacattgcacagacaactggaagaggaggaaggttttggaacagactcccgtttacaggtccttggctggaagaggctggataaaatactgcatttttgcagcggggcctcgacctccccatcatcagtttttccagaggcctcaaatacagcctcctagagctaccatcccgaacagcagtccttccattcgtcctggtgcacagacacccactgcagtgtaccaggctaatcagcacatcatgatggttaaccatctgcccatgccgtacccagtgccccaggggcctcagtactgtataccacagtaccgtcatagtggccctccttatgttgggcccccccaacaatatccagttcaaccaccggggccaggtcctttttatcctggaccaggacctggggacttccccaatgcttatggaacgcctttttacccaagtcagccggtgtatcagtcagcacctatcatagtgcctacgcagcaacagccgcctccagccaagagagagaaaaaaactataagaattcgggatccaaaccagggaggtaaagacataacagaggagattatgtctggaggtggcagcagaaatcctactccacccataggaagacccacgtccacacctactcctcctcagcagctgcccagccaggtccccgagcacagccctgtggtttatgggactgtggagagcgctcatcttgctgccagcacccctgtcactgcagctagcgaccagaagcaagaggagaagccaaaaccagatccagtgttaaagtctccttccccagtccttaggctagtcctcagtggagagaagaaagaacaagaaggccagacatctgaaactactgcaatagtatccatagcagagcttcctctgcctccatcacctaccactgtttcttctgttgctcgaagtacaattgcagcccccacctcttctgctcttagtagccaaccaatattcaccactgctatagatgacagatgtgaactctcatccccaagagaagacacaattcctatacccagcctcacatcttgcacagaaacatcagaccctttaccaacaaatgaaaatgatgatgatatatgcaagaaaccctgtagtgtagcacctaatgatattccactggtttctagtactaacctaattaatgaaataaatggagttagcgaaaaattatcagccacggagagcattgtggaaatagtaaaacaggaagtattgccattgactcttgaattggagattctcgaaaatcccccagaagaaatgaaactggagtgtatcccagctcccatcaccccttccacagttccttcctttcctccaactcctccaactcctccagcttctcctcctcacactccagtcattgttcctgctgctgccactactgttagttctccgagtgctgccatcacagtccagagagtcctagaggaggacgagagcataagaacttgccttagtgaagatgcaaaagagattcagaacaaaatagaggtagaagcagatgggcaaacagaagagattttggattctcaaaacttaaattcaagaaggagccctgtcccagaaacatcgaatgaatgctgaaattcctagtctggtttcttcagtggtgtgtttgtgttttagtacaacctgcaaaagagttactccattgtctaaaaatgcaaatgagaatttccaaatatacaaaatgcctccaagctcaaatagctataactgtaccaaagacatggaagaaaccaaaagatcggacccgaaccactgaagagatgttagaggcagaattggagcttaaagctgaagaggagctttccattgacaaagtacttgaatctgaacaagataaaatgagccaggggtttcatcctgaaagagacccctctgacctaaaaaaagtgaaagctgtggaagaaaatggagaagaagctgagccagtacgtaatggtgctgagagtgtttctgagggtgaaggaatagatgctaattcaggctccacagatagttctggtgatggggttacatttccatttaaaccagaatcctggaagcctactgatactgaaggtaagaagcagtatgacagggagtttctgctggacttccagttcatgcctgcctgtatacaaaaaccagagggcctgcctcctatcagtgatgtggttcttgacaagatcaaccaacccaaattgccaatgcgaactctggatcctcgaattttgcctcgaggaccagactttacaccagcctttgctgattttggaaggcagacacctggtggaagaggcgtacctttgttgaatgttgggtcacgaagatctcaacctggccaaagaagagaacccagaaagatcatcacagtttctgtaaaagaagatgtacacctgaaaaaggcagaaaatgcctggaagccaagccaaaaacgagacagccaagccgatgatcccgaaaacattaaaacccaggagctttttagaaaagttcgaagtatcttaaataaattgacaccacagatgttcaatcaactgatgaagcaagtgtcaggacttactgttgacacagaggagcggctgaaaggagttattgacctggtctttgagaaggctattgatgaacccagtttctctgtggcttacgcaaacatgtgtcgatgtctagtaacgctgaaagtacccatggcagacaagcctggtaacacagtgaatttccggaagctgctactgaaccgttgccagaaggagtttgaaaaagataaagcagatgatgatgtctttgagaagaagcagaaagaacttgaggctgccagtgctccagaggagaggacaaggcttcatgatgaactggaagaagccaaggacaaagcccggcggagatccattggcaacatcaagtttattggagaactctttaaactcaaaatgctgactgaagccatcatgcatgactgtgtggtgaagctgctaaagaaccatgatgaagaatccctggagtgcctgtgtcgcctgctcaccaccattggcaaagacttggactttgaaaaagcaaagccacgtatggaccagtactttaatcagatggagaaaattgtgaaagaaagaaaaacctcatctaggattcggttcatgcttcaagatgttatagacctaaggctgtgcaattgggtatctcgaagagcagatcaagggcctaaaactatcgaacagattcacaaagaggctaaaatagaagaacaagaagagcaaaggaaggtccagcaactcatgaccaaagagaagagaagaccaggtgtccagagagtggacgaaggtgggtggaacactgtacaaggggccaagaacagtcgggtactggacccctcaaaattcctaaaaatcactaagcctacaattgatgaaaaaattcagctggtacctaaagcacagctaggcagctggggaaaaggcagcagtggtggagcaaaggcaagtgagactgatgccttacggtcaagtgcttccagtttaaacagattctctgccctgcaacctccagcaccctcagggtccacgccatccacgcctgtagagtttgattcccgaaggaccttaactagtcgtggaagtatgggcagggagaagaatgacaagccccttccatctgcaacagctcggccaaatactttcatgaggggtggcagcagtaaagacctgctagacaatcagtctcaagaagagcagcggagagagatgctggagaccgtgaagcagctcacaggaggtgtggatgtggagaggaacagcactgaggctgagcgaaataaaacaagggagtcagcaaaaccagaaatttcagcaatgtcagctcatgacaaggctgcattatcagaagaggaactggagaggaagtcgaaatctatcattgatgaatttctacacattaatgattttaaggaagccatgcagtgtgtggaagagctgaatgcccagggcctactacatgtttttgtgagagtgggagtggagtccaccctggaaaggagccagatcaccagggatcacatgggccaactactctatcagctggtacagtcagaaaaactcagcaaacaggactttttcaaaggtttttcagaaactttggaattggcagatgacatggccattgatattccccatatttggttgtaccttgctgaactggtgacccccatgttaaaagaaggtggaatctccatgagagaacttaccatagaatttagcaaacctttacttcctgttggaagagctggggtcttgctatctgaaatattgcacctactatgcaaacaaatgagccataagaaagtgggagccttatggagggaggctgacctcagctggaaggactttttaccagaaggagaagatgtacataattttcttttggagcagaagttggacttcatagagtctgacagtccctgttcctctgaagcactttcaaagaaagaactgtctgccgaagagctgtataagcgactcgagaaactcattattgaggacaaagcgaatgatgaacagatctttgactgggtagaggctaatctagacgaaatccagatgagttcacctacattccttagagctttaatgactgctgtttgtaaagcagctattatagccgactcttctaccttcagagtggacactgctgttatcaagcagagagtgccgatcttactcaagtacctagactcagatacagagaaggaactgcaagcactttatgcactacaagcatcgatagtaaaacttgatcaacctgccaatttgctgcggatgttttttgattgtctatatgacgaggaggtgatctccgaggatgccttctacaaatgggagagcagcaaggaccctgcagagcagaatgggaagggcgtggctctgaaatctgtcacggcattcttcacgtggctgcgggaagcagaagaggagtctgaggataactaaaacttcaaatacacaaaatgaaacaaaagaaacaatttaagtatttttttaaaaagtttcacgtcttcgccaatcacagtgcagcaaggccaattctcgcagaaacccccacgtgtgcacgagtgggagaggggaaagagaaaaaaaggtgatcatggaggaaaaaggtactggataaaagtaaacttcaaaccttagggcgggagcactaaaaccaaaatacatgtattatttatagaaaatattttctgttttaatcttttctttttaaacaaggactcatacttaaaaaaatgtttagcaaaaaaaaaaaaaagttgagaacttttaatttattttaaggactgcaaatgccagtgtaattttttaatttgcagtttctgtaaacaacttgtataatagaaaagcagagaaataaatttccctccccttcaagatgcacctcatgtttgttttaaggtatagcatttagtccagatttgagaaagtttggggtgaacaaggtaagaaagatttttttttttttggcatcaaatctttctgcctgcctctcagcttgcttcagaaaatttaaaaaatcacaatagtaatcaaaacatacataacattgaaacagaaggaaatgctgtggaccacagaactccaagaattgtttaaaaaaaaaaaagtgctaccctgagaaaagtactcttaatactcttgaaatctttagagcaactttaaggcttgtaaatacatagaacaaatatttaaaaaaacaaaaagaaattgactcagtactatttcttttcactttgaaaatataaagaacaaaataaagacaaacattgcaagttta

SEQ ID NO: 56627 - DNA, 4626 bp, Homo sapiens
tgtgttcaaccccatgcacaaggtctctgcccatcatttcgaattcctgtagtgtagcacctaatgatattccactggtttctagtactaacctaattaatgaaataaatggagttagcgaaaaattatcagccacggagagcattgtggaaatagtaaaacaggaagtattgccattgactcttgaattggagattctcgaaaatcccccagaagaaatgaaactggagtgtatcccagctcccatcaccccttccacagttccttcctttcctccaactcctccaactcctccagcttctcctcctcacactccagtcattgttcctgctgctgccactactgttagttctccgagtgctgccatcacagtccagagagtcctagaggaggacgagagcataagaacttgccttagtgaagatgcaaaagagattcagaacaaaatagaggtagaagcagatgggcaaacagaagagattttggattctcaaaacttaaattcaagaaggagccctgtcccagctcaaatagctataactgtaccaaagacatggaagaaaccaaaagatcggacccgaaccactgaagagatgttagaggcagaattggagcttaaagctgaagaggagctttccattgacaaagtacttgaatctgaacaagataaaatgagccaggggtttcatcctgaaagagacccctctgacctaaaaaaagtgaaagctgtggaagaaaatggagaagaagctgagccagtacgtaatggtgctgagagtgtttctgagggtgaaggaatagatgctaattcaggctccacagatagttctggtgatggggttacatttccatttaaaccagaatcctggaagcctactgatactgaaggtaagaagcagtatgacagggagtttctgctggacttccagttcatgcctgcctgtatacaaaaaccagagggcctgcctcctatcagtgatgtggttcttgacaagatcaaccaacccaaattgccaatgcgaactctggatcctcgaattttgcctcgaggaccagactttacaccagcctttgctgattttggaaggcagacacctggtggaagaggcgtacctttgttgaatgttgggtcacgaagatctcaacctggccaaagaagagaacccagaaagatcatcacagtttctgtaaaagaagatgtacacctgaaaaaggcagaaaatgcctggaagccaagccaaaaacgagacagccaagccgatgatcccgaaaacattaaaacccaggagctttttagaaaagttcgaagtatcttaaataaattgacaccacagatgttcaatcaactgatgaagcaagtgtcaggacttactgttgacacagaggagcggctgaaaggagttattgacctggtctttgagaaggctattgatgaacccagtttctctgtggcttacgcaaacatgtgtcgatgtctagtaacgctgaaagtacccatggcagacaagcctggtaacacagtgaatttccggaagctgctactgaaccgttgccagaaggagtttgaaaaagataaagcagatgatgatgtctttgagaagaagcagaaagaacttgaggctgccagtgctccagaggagaggacaaggcttcatgatgaactggaagaagccaaggacaaagcccggcggagatccattggcaacatcaagtttattggagaactctttaaactcaaaatgctgactgaagccatcatgcatgactgtgtggtgaagctgctaaagaaccatgatgaagaatccctggagtgcctgtgtcgcctgctcaccaccattggcaaagacttggactttgaaaaagcaaagccacgtatggaccagtactttaatcagatggagaaaattgtgaaagaaagaaaaacctcatctaggattcggttcatgcttcaagatgttatagacctaaggctgtgcaattgggtatctcgaagagcagatcaagggcctaaaactatcgaacagattcacaaagaggctaaaatagaagaacaagaagagcaaaggaaggtccagcaactcatgaccaaagagaagagaagaccaggtgtccagagagtggacgaaggtgggtggaacactgtacaaggggccaagaacagtcgggtactggacccctcaaaattcctaaaaatcactaagcctacaattgatgaaaaaattcagctggtacctaaagcacagctaggcagctggggaaaaggcagcagtggtggagcaaaggcaagtgagactgatgccttacggtcaagtgcttccagtttaaacagattctctgccctgcaacctccagcaccctcagggtccacgccatccacgcctgtagagtttgattcccgaaggaccttaactagtcgtggaagtatgggcagggagaagaatgacaagccccttccatctgcaacagctcggccaaatactttcatgaggggtggcagcagtaaagacctgctagacaatcagtctcaagaagagcagcggagagagatgctggagaccgtgaagcagctcacaggaggtgtggatgtggagaggaacagcactgaggctgagcgaaataaaacaagggagtcagcaaaaccagaaatttcagcaatgtcagctcatgacaaggctgcattatcagaagaggaactggagaggaagtcgaaatctatcattgatgaatttctacacattaatgattttaaggaagccatgcagtgtgtggaagagctgaatgcccagggcctactacatgtttttgtgagagtgggagtggagtccaccctggaaaggagccagatcaccagggatcacatgggccaactactctatcagctggtacagtcagaaaaactcagcaaacaggactttttcaaaggtttttcagaaactttggaattggcagatgacatggccattgatattccccatatttggttgtaccttgctgaactggtgacccccatgttaaaagaaggtggaatctccatgagagaacttaccatagaatttagcaaacctttacttcctgttggaagagctggggtcttgctatctgaaatattgcacctactatgcaaacaaatgagccataagaaagtgggagccttatggagggaggctgacctcagctggaaggactttttaccagaaggagaagatgtacataattttcttttggagcagaagttggacttcatagagtctgacagtccctgttcctctgaagcactttcaaagaaagaactgtctgccgaagagctgtataagcgactcgagaaactcattattgaggacaaagcgaatgatgaacagatctttgactgggtagaggctaatctagacgaaatccagatgagttcacctacattccttagagctttaatgactgctgtttgtaaagcagctattatagccgactcttctaccttcagagtggacactgctgttatcaagcagagagtgccgatcttactcaagtacctagactcagatacagagaaggaactgcaagcactttatgcactacaagcatcgatagtaaaacttgatcaacctgccaatttgctgcggatgttttttgattgtctatatgacgaggaggtgatctccgaggatgccttctacaaatgggagagcagcaaggaccctgcagagcagaatgggaagggcgtggctctgaaatctgtcacggcattcttcacgtggctgcgggaagcagaagaggagtctgaggataactaaaacttcaaatacacaaaatgaaacaaaagaaacaatttaagtatttttttaaaaagtttcacgtcttcgccaatcacagtgcagcaaggccaattctcgcagaaacccccacgtgtgcacgagtgggagaggggaaagagaaaaaaaggtgatcatggaggaaaaaggtactggataaaagtaaacttcaaaccttagggcgggagcactaaaaccaaaatacatgtattatttatagaaaatattttctgttttaatcttttctttttaaacaaggactcatacttaaaaaaatgtttagcaaaaaaaaaaaaaagttgagaacttttaatttattttaaggactgcaaatgccagtgtaattttttaatttgcagtttctgtaaacaacttgtataatagaaaagcagagaaataaatttccctccccttcaagatgcacctcatgtttgttttaaggtatagcatttagtccagatttgagaaagtttggggtgaacaaggtaagaaagatttttttttttttggcatcaaatctttctgcctgcctctcagcttgcttcagaaaatttaaaaaatcacaatagtaatcaaaacatacataacattgaaacagaaggaaatgctgtggaccacagaactccaagaattgtttaaaaaaaaaaaagtgctaccctgagaaaagtactcttaatactcttgaaatctttagagcaactttaaggcttgtaaatacatagaacaaatatttaaaaaaacaaaaagaaattgactcagtactatttcttttcactttgaaaatataaagaacaaaataaagacaaacattgcaagttta

SEQ ID NO: 56628 - DNA, 4327 bp, Homo sapiens
cattctgccattaatctcgtgcttgctgaacatgaagaagaggcagtgtttgagttattttttaattggctactttccttgacttccagaaacatcgaatgaatgctgaaattcctagtctggtttcttcagtggtgtgtttgtgttttagtacaacctgcaaaagagttactccattgtctaaaaatgcaaatgagaatttccaaatatacaaaatgcctccaagctcaaatagctataactgtaccaaagacatggaagaaaccaaaagatcggacccgaaccactgaagagatgttagaggcagaattggagcttaaagctgaagaggagctttccattgacaaagtacttgaatctgaacaagataaaatgagccaggggtttcatcctgaaagagacccctctgacctaaaaaaagtgaaagctgtggaagaaaatggagaagaagctgagccagtacgtaatggtgctgagagtgtttctgagggtgaaggaatagatgctaattcaggctccacagatagttctggtgatggggttacatttccatttaaaccagaatcctggaagcctactgatactgaaggtaagaagcagtatgacagggagtttctgctggacttccagttcatgcctgcctgtatacaaaaaccagagggcctgcctcctatcagtgatgtggttcttgacaagatcaaccaacccaaattgccaatgcgaactctggatcctcgaattttgcctcgaggaccagactttacaccagcctttgctgattttggaaggcagacacctggtggaagaggcgtacctttgttgaatgttgggtcacgaagatctcaacctggccaaagaagagaacccagaaagatcatcacagtttctgtaaaagaagatgtacacctgaaaaaggcagaaaatgcctggaagccaagccaaaaacgagacagccaagccgatgatcccgaaaacattaaaacccaggagctttttagaaaagttcgaagtatcttaaataaattgacaccacagatgttcaatcaactgatgaagcaagtgtcaggacttactgttgacacagaggagcggctgaaaggagttattgacctggtctttgagaaggctattgatgaacccagtttctctgtggcttacgcaaacatgtgtcgatgtctagtaacgctgaaagtacccatggcagacaagcctggtaacacagtgaatttccggaagctgctactgaaccgttgccagaaggagtttgaaaaagataaagcagatgatgatgtctttgagaagaagcagaaagaacttgaggctgccagtgctccagaggagaggacaaggcttcatgatgaactggaagaagccaaggacaaagcccggcggagatccattggcaacatcaagtttattggagaactctttaaactcaaaatgctgactgaagccatcatgcatgactgtgtggtgaagctgctaaagaaccatgatgaagaatccctggagtgcctgtgtcgcctgctcaccaccattggcaaagacttggactttgaaaaagcaaagccacgtatggaccagtactttaatcagatggagaaaattgtgaaagaaagaaaaacctcatctaggattcggttcatgcttcaagatgttatagacctaaggctgtgcaattgggtatctcgaagagcagatcaagggcctaaaactatcgaacagattcacaaagaggctaaaatagaagaacaagaagagcaaaggaaggtccagcaactcatgaccaaagagaagagaagaccaggtgtccagagagtggacgaaggtgggtggaacactgtacaaggggccaagaacagtcgggtactggacccctcaaaattcctaaaaatcactaagcctacaattgatgaaaaaattcagctggtacctaaagcacagctaggcagctggggaaaaggcagcagtggtggagcaaaggcaagtgagactgatgccttacggtcaagtgcttccagtttaaacagattctctgccctgcaacctccagcaccctcagggtccacgccatccacgcctgtagagtttgattcccgaaggaccttaactagtcgtggaagtatgggcagggagaagaatgacaagccccttccatctgcaacagctcggccaaatactttcatgaggggtggcagcagtaaagacctgctagacaatcagtctcaagaagagcagcggagagagatgctggagaccgtgaagcagctcacaggaggtgtggatgtggagaggaacagcactgaggctgagcgaaataaaacaagggagtcagcaaaaccagaaatttcagcaatgtcagctcatgacaaggctgcattatcagaagaggaactggagaggaagtcgaaatctatcattgatgaatttctacacattaatgattttaaggaagccatgcagtgtgtggaagagctgaatgcccagggcctactacatgtttttgtgagagtgggagtggagtccaccctggaaaggagccagatcaccagggatcacatgggccaactactctatcagctggtacagtcagaaaaactcagcaaacaggactttttcaaaggtttttcagaaactttggaattggcagatgacatggccattgatattccccatatttggttgtaccttgctgaactggtgacccccatgttaaaagaaggtggaatctccatgagagaacttaccatagaatttagcaaacctttacttcctgttggaagagctggggtcttgctatctgaaatattgcacctactatgcaaacaaatgagccataagaaagtgggagccttatggagggaggctgacctcagctggaaggactttttaccagaaggagaagatgtacataattttcttttggagcagaagttggacttcatagagtctgacagtccctgttcctctgaagcactttcaaagaaagaactgtctgccgaagagctgtataagcgactcgagaaactcattattgaggacaaagcgaatgatgaacagatctttgactgggtagaggctaatctagacgaaatccagatgagttcacctacattccttagagctttaatgactgctgtttgtaaagcagctattatagccgactcttctaccttcagagtggacactgctgttatcaagcagagagtgccgatcttactcaagtacctagactcagatacagagaaggaactgcaagcactttatgcactacaagcatcgatagtaaaacttgatcaacctgccaatttgctgcggatgttttttgattgtctatatgacgaggaggtgatctccgaggatgccttctacaaatgggagagcagcaaggaccctgcagagcagaatgggaagggcgtggctctgaaatctgtcacggcattcttcacgtggctgcgggaagcagaagaggagtctgaggataactaaaacttcaaatacacaaaatgaaacaaaagaaacaatttaagtatttttttaaaaagtttcacgtcttcgccaatcacagtgcagcaaggccaattctcgcagaaacccccacgtgtgcacgagtgggagaggggaaagagaaaaaaaggtgatcatggaggaaaaaggtactggataaaagtaaacttcaaaccttagggcgggagcactaaaaccaaaatacatgtattatttatagaaaatattttctgttttaatcttttctttttaaacaaggactcatacttaaaaaaatgtttagcaaaaaaaaaaaaaagttgagaacttttaatttattttaaggactgcaaatgccagtgtaattttttaatttgcagtttctgtaaacaacttgtataatagaaaagcagagaaataaatttccctccccttcaagatgcacctcatgtttgttttaaggtatagcatttagtccagatttgagaaagtttggggtgaacaaggtaagaaagatttttttttttttggcatcaaatctttctgcctgcctctcagcttgcttcagaaaatttaaaaaatcacaatagtaatcaaaacatacataacattgaaacagaaggaaatgctgtggaccacagaactccaagaattgtttaaaaaaaaaaaagtgctaccctgagaaaagtactcttaatactcttgaaatctttagagcaactttaaggcttgtaaatacatagaacaaatatttaaaaaaacaaaaagaaattgactcagtactatttcttttcactttgaaaatataaagaacaaaataaagacaaacattgcaagttta

SEQ ID NO: 56629 - DNA, 5837 bp, Homo sapiens
agcggggtaacttagcgtgcttatggaaaacctgatggaatagcattgacccagtttacaaagccatctgaagtgcctgagttgtatttgaaggaatattttttcacctttggcttttagcttagaagttatgactgcacattacaaaggggaatgttcaaacctttatcacaatcccacagagtattgatgaggaaactgaagtttggagcgatcacatcattttcccaagaattcctagaggacctgtgcaacaacctcttgaggatcgaatcttcactcccgctgtctcagcagtctacagcacggtaacacaagtggcaagacagccgggaacccctaccccatccccttattcagcacatgaaataaacaaggggcatccaaatcttgcggcaacgcccccgggacatgcatcgtcccctggactctctcaaaccccttatccctctggacagaatgcaggtccaaccacgctggtataccctcaaacccctcagacaatgaattcacaacctcaaacccgttctccgtttgcagcggggcctcgacctccccatcatcagtttttccagaggcctcaaatacagcctcctagagctaccatcccgaacagcagtccttccattcgtcctggtgcacagacacccactgcagtgtaccaggctaatcagcacatcatgatggttaaccatctgcccatgccgtacccagtgccccaggggcctcagtactgtataccacagtaccgtcatagtggccctccttatgttgggcccccccaacaatatccagttcaaccaccggggccaggtcctttttatcctggaccaggacctggggacttccccaatgcttatggaacgcctttttacccaagtcagccggtgtatcagtcagcacctatcatagtgcctacgcagcaacagccgcctccagccaagagagagaaaaaaactataagaattcgggatccaaaccagggaggtaaagacataacagaggagattatgtctggaggtggcagcagaaatcctactccacccataggaagacccacgtccacacctactcctcctcagcagctgcccagccaggtccccgagcacagccctgtggtttatgggactgtggagagcgctcatcttgctgccagcacccctgtcactgcagctagcgaccagaagcaagaggagaagccaaaaccagatccagtgttaaagtctccttccccagtccttaggctagtcctcagtggagagaagaaagaacaagaaggccagacatctgaaactactgcaatagtatccatagcagagcttcctctgcctccatcacctaccactgtttcttctgttgctcgaagtacaattgcagcccccacctcttctgctcttagtagccaaccaatattcaccactgctatagatgacagatgtgaactctcatccccaagagaagacacaattcctatacccagcctcacatcttgcacagaaacatcagaccctttaccaacaaatgaaaatgatgatgatatatgcaagaaaccctgtagtgtagcacctaatgatattccactggtttctagtactaacctaattaatgaaataaatggagttagcgaaaaattatcagccacggagagcattgtggaaatagtaaaacaggaagtattgccattgactcttgaattggagattctcgaaaatcccccagaagaaatgaaactggagtgtatcccagctcccatcaccccttccacagttccttcctttcctccaactcctccaactcctccagcttctcctcctcacactccagtcattgttcctgctgctgccactactgttagttctccgagtgctgccatcacagtccagagagtcctagaggaggacgagagcataagaacttgccttagtgaagatgcaaaagagattcagaacaaaatagaggtagaagcagatgggcaaacagaagagattttggattctcaaaacttaaattcaagaaggagccctgtcccagaaacatcgaatgaatgctgaaattcctagtctggtttcttcagtggtgtgtttgtgttttagtacaacctgcaaaagagttactccattgtctaaaaatgcaaatgagaatttccaaatatacaaaatgcctccaagctcaaatagctataactgtaccaaagacatggaagaaaccaaaagatcggacccgaaccactgaagagatgttagaggcagaattggagcttaaagctgaagaggagctttccattgacaaagtacttgaatctgaacaagataaaatgagccaggggtttcatcctgaaagagacccctctgacctaaaaaaagtgaaagctgtggaagaaaatggagaagaagctgagccagtacgtaatggtgctgagagtgtttctgagggtgaaggaatagatgctaattcaggctccacagatagttctggtgatggggttacatttccatttaaaccagaatcctggaagcctactgatactgaaggtaagaagcagtatgacagggagtttctgctggacttccagttcatgcctgcctgtatacaaaaaccagagggcctgcctcctatcagtgatgtggttcttgacaagatcaaccaacccaaattgccaatgcgaactctggatcctcgaattttgcctcgaggaccagactttacaccagcctttgctgattttggaaggcagacacctggtggaagaggcgtacctttgttgaatgttgggtcacgaagatctcaacctggccaaagaagagaacccagaaagatcatcacagtttctgtaaaagaagatgtacacctgaaaaaggcagaaaatgcctggaagccaagccaaaaacgagacagccaagccgatgatcccgaaaacattaaaacccaggagctttttagaaaagttcgaagtatcttaaataaattgacaccacagatgttcaatcaactgatgaagcaagtgtcaggacttactgttgacacagaggagcggctgaaaggagttattgacctggtctttgagaaggctattgatgaacccagtttctctgtggcttacgcaaacatgtgtcgatgtctagtaacgctgaaagtacccatggcagacaagcctggtaacacagtgaatttccggaagctgctactgaaccgttgccagaaggagtttgaaaaagataaagcagatgatgatgtctttgagaagaagcagaaagaacttgaggctgccagtgctccagaggagaggacaaggcttcatgatgaactggaagaagccaaggacaaagcccggcggagatccattggcaacatcaagtttattggagaactctttaaactcaaaatgctgactgaagccatcatgcatgactgtgtggtgaagctgctaaagaaccatgatgaagaatccctggagtgcctgtgtcgcctgctcaccaccattggcaaagacttggactttgaaaaagcaaagccacgtatggaccagtactttaatcagatggagaaaattgtgaaagaaagaaaaacctcatctaggattcggttcatgcttcaagatgttatagacctaaggctgtgcaattgggtatctcgaagagcagatcaagggcctaaaactatcgaacagattcacaaagaggctaaaatagaagaacaagaagagcaaaggaaggtccagcaactcatgaccaaagagaagagaagaccaggtgtccagagagtggacgaaggtgggtggaacactgtacaaggggccaagaacagtcgggtactggacccctcaaaattcctaaaaatcactaagcctacaattgatgaaaaaattcagctggtacctaaagcacagctaggcagctggggaaaaggcagcagtggtggagcaaaggcaagtgagactgatgccttacggtcaagtgcttccagtttaaacagattctctgccctgcaacctccagcaccctcagggtccacgccatccacgcctgtagagtttgattcccgaaggaccttaactagtcgtggaagtatgggcagggagaagaatgacaagccccttccatctgcaacagctcggccaaatactttcatgaggggtggcagcagtaaagacctgctagacaatcagtctcaagaagagcagcggagagagatgctggagaccgtgaagcagctcacaggaggtgtggatgtggagaggaacagcactgaggctgagcgaaataaaacaagggagtcagcaaaaccagaaatttcagcaatgtcagctcatgacaaggctgcattatcagaagaggaactggagaggaagtcgaaatctatcattgatgaatttctacacattaatgattttaaggaagccatgcagtgtgtggaagagctgaatgcccagggcctactacatgtttttgtgagagtgggagtggagtccaccctggaaaggagccagatcaccagggatcacatgggccaactactctatcagctggtacagtcagaaaaactcagcaaacaggactttttcaaaggtttttcagaaactttggaattggcagatgacatggccattgatattccccatatttggttgtaccttgctgaactggtgacccccatgttaaaagaaggtggaatctccatgagagaacttaccatagaatttagcaaacctttacttcctgttggaagagctggggtcttgctatctgaaatattgcacctactatgcaaacaaatgagccataagaaagtgggagccttatggagggaggctgacctcagctggaaggactttttaccagaaggagaagatgtacataattttcttttggagcagaagttggacttcatagagtctgacagtccctgttcctctgaagcactttcaaagaaagaactgtctgccgaagagctgtataagcgactcgagaaactcattattgaggacaaagcgaatgatgaacagatctttgactgggtagaggctaatctagacgaaatccagatgagttcacctacattccttagagctttaatgactgctgtttgtaaagcagctattatagccgactcttctaccttcagagtggacactgctgttatcaagcagagagtgccgatcttactcaagtacctagactcagatacagagaaggaactgcaagcactttatgcactacaagcatcgatagtaaaacttgatcaacctgccaatttgctgcggatgttttttgattgtctatatgacgaggaggtgatctccgaggatgccttctacaaatgggagagcagcaaggaccctgcagagcagaatgggaagggcgtggctctgaaatctgtcacggcattcttcacgtggctgcgggaagcagaagaggagtctgaggataactaaaacttcaaatacacaaaatgaaacaaaagaaacaatttaagtatttttttaaaaagtttcacgtcttcgccaatcacagtgcagcaaggccaattctcgcagaaacccccacgtgtgcacgagtgggagaggggaaagagaaaaaaaggtgatcatggaggaaaaaggtactggataaaagtaaacttcaaaccttagggcgggagcactaaaaccaaaatacatgtattatttatagaaaatattttctgttaatcttctttaacaggctctcttaaaatgttggcaaaaaagttggattttttttagggggaagcgggattatgggttgaaatggttaaaggaaatttccccaaggcgtggggaatcaagaagggcggaaatttgttgtcgcggaacacaagta

SEQ ID NO: 56630 - DNA, 6122 bp, Homo sapiens
agcggggtaacttagcgtgcttatggaaaacctgatggaatagcattgacccagtttacaaagccatctgaagtgcctgagttgtatttgaaggaatattttttcacctttggcttttagcttagaagttatgactgcacattacaaaggggaatgttcaaacctttatcacaatcccacagagtattgatgaggaaactgaagtttggagcgatcacatcattttcccaagaattcctagaggacctgtgcaacaacctcttgaggatcgaatcttcactcccgctgtctcagcagtctacagcacggtaacacaagtggcaagacagccgggaacccctaccccatccccttattcagcacatgaaataaacaaggggcatccaaatcttgcggcaacgcccccgggacatgcatcgtcccctggactctctcaaaccccttatccctctggacagaatgcaggtccaaccacgctggtataccctcaaacccctcagacaatgaattcacaacctcaaacccgttctccgtttgcagcggggcctcgacctccccatcatcagtttttccagaggcctcaaatacagcctcctagagctaccatcccgaacagcagtccttccattcgtcctggtgcacagacacccactgcagtgtaccaggctaatcagcacatcatgatggttaaccatctgcccatgccgtacccagtgccccaggggcctcagtactgtataccacagtaccgtcatagtggccctccttatgttgggcccccccaacaatatccagttcaaccaccggggccaggtcctttttatcctggaccaggacctggggacttccccaatgcttatggaacgcctttttacccaagtcagccggtgtatcagtcagcacctatcatagtgcctacgcagcaacagccgcctccagccaagagagagaaaaaaactataagaattcgggatccaaaccagggaggtaaagacataacagaggagattatgtctggaggtggcagcagaaatcctactccacccataggaagacccacgtccacacctactcctcctcagcagctgcccagccaggtccccgagcacagccctgtggtttatgggactgtggagagcgctcatcttgctgccagcacccctgtcactgcagctagcgaccagaagcaagaggagaagccaaaaccagatccagtgttaaagtctccttccccagtccttaggctagtcctcagtggagagaagaaagaacaagaaggccagacatctgaaactactgcaatagtatccatagcagagcttcctctgcctccatcacctaccactgtttcttctgttgctcgaagtacaattgcagcccccacctcttctgctcttagtagccaaccaatattcaccactgctatagatgacagatgtgaactctcatccccaagagaagacacaattcctatacccagcctcacatcttgcacagaaacatcagaccctttaccaacaaatgaaaatgatgatgatatatgcaagaaaccctgtagtgtagcacctaatgatattccactggtttctagtactaacctaattaatgaaataaatggagttagcgaaaaattatcagccacggagagcattgtggaaatagtaaaacaggaagtattgccattgactcttgaattggagattctcgaaaatcccccagaagaaatgaaactggagtgtatcccagctcccatcaccccttccacagttccttcctttcctccaactcctccaactcctccagcttctcctcctcacactccagtcattgttcctgctgctgccactactgttagttctccgagtgctgccatcacagtccagagagtcctagaggaggacgagagcataagaacttgccttagtgaagatgcaaaagagattcagaacaaaatagaggtagaagcagatgggcaaacagaagagattttggattctcaaaacttaaattcaagaaggagccctgtcccagaaacatcgaatgaatgctgaaattcctagtctggtttcttcagtggtgtgtttgtgttttagtacaacctgcaaaagagttactccattgtctaaaaatgcaaatgagaatttccaaatatacaaaatgcctccaagctcaaatagctataactgtaccaaagacatggaagaaaccaaaagatcggacccgaaccactgaagagatgttagaggcagaattggagcttaaagctgaagaggagctttccattgacaaagtacttgaatctgaacaagataaaatgagccaggggtttcatcctgaaagagacccctctgacctaaaaaaagtgaaagctgtggaagaaaatggagaagaagctgagccagtacgtaatggtgctgagagtgtttctgagggtgaaggaatagatgctaattcaggctccacagatagttctggtgatggggttacatttccatttaaaccagaatcctggaagcctactgatactgaaggtaagaagcagtatgacagggagtttctgctggacttccagttcatgcctgcctgtatacaaaaaccagagggcctgcctcctatcagtgatgtggttcttgacaagatcaaccaacccaaattgccaatgcgaactctggatcctcgaattttgcctcgaggaccagactttacaccagcctttgctgattttggaaggcagacacctggtggaagaggcgtacctttgttgaatgttgggtcacgaagatctcaacctggccaaagaagagaacccagaaagatcatcacagtttctgtaaaagaagatgtacacctgaaaaaggcagaaaatgcctggaagccaagccaaaaacgagacagccaagccgatgatcccgaaaacattaaaacccaggagctttttagaaaagttcgaagtatcttaaataaattgacaccacagatgttcaatcaactgatgaagcaagtgtcaggacttactgttgacacagaggagcggctgaaaggagttattgacctggtctttgagaaggctattgatgaacccagtttctctgtggcttacgcaaacatgtgtcgatgtctagtaacgctgaaagtacccatggcagacaagcctggtaacacagtgaatttccggaagctgctactgaaccgttgccagaaggagtttgaaaaagataaagcagatgatgatgtctttgagaagaagcagaaagaacttgaggctgccagtgctccagaggagaggacaaggcttcatgatgaactggaagaagccaaggacaaagcccggcggagatccattggcaacatcaagtttattggagaactctttaaactcaaaatgctgactgaagccatcatgcatgactgtgtggtgaagctgctaaagaaccatgatgaagaatccctggagtgcctgtgtcgcctgctcaccaccattggcaaagacttggactttgaaaaagcaaagccacgtatggaccagtactttaatcagatggagaaaattgtgaaagaaagaaaaacctcatctaggattcggttcatgcttcaagatgttatagacctaaggctgtgcaattgggtatctcgaagagcagatcaagggcctaaaactatcgaacagattcacaaagaggctaaaatagaagaacaagaagagcaaaggaaggtccagcaactcatgaccaaagagaagagaagaccaggtgtccagagagtggacgaaggtgggtggaacactgtacaaggggccaagaacagtcgggtactggacccctcaaaattcctaaaaatcactaagcctacaattgatgaaaaaattcagctggtacctaaagcacagctaggcagctggggaaaaggcagcagtggtggagcaaaggcaagtgagactgatgccttacggtcaagtgcttccagtttaaacagattctctgccctgcaacctccagcaccctcagggtccacgccatccacgcctgtagagtttgattcccgaaggaccttaactagtcgtggaagtatgggcagggagaagaatgacaagccccttccatctgcaacagctcggccaaatactttcatgaggggtggcagcagtaaagacctgctagacaatcagtctcaagaagagcagcggagagagatgctggagaccgtgaagcagctcacaggaggtgtggatgtggagaggaacagcactgaggctgagcgaaataaaacaagggagtcagcaaaaccagaaatttcagcaatgtcagctcatgacaaggctgcattatcagaagaggaactggagaggaagtcgaaatctatcattgatgaatttctacacattaatgattttaaggaagccatgcagtgtgtggaagagctgaatgcccagggcctactacatgtttttgtgagagtgggagtggagtccaccctggaaaggagccagatcaccagggatcacatgggccaactactctatcagctggtacagtcagaaaaactcagcaaacaggactttttcaaaggtttttcagaaactttggaattggcagatgacatggccattgatattccccatatttggttgtaccttgctgaactggtgacccccatgttaaaagaaggtggaatctccatgagagaacttaccatagaatttagcaaacctttacttcctgttggaagagctggggtcttgctatctgaaatattgcacctactatgcaaacaaatgagccataagaaagtgggagccttatggagggaggctgacctcagctggaaggactttttaccagaaggagaagatgtacataattttcttttggagcagaagttggacttcatagagtctgacagtccctgttcctctgaagcactttcaaagaaagaactgtctgccgaagagctgtataagcgactcgagaaactcattattgaggacaaagcgaatgatgaacagatctttgactgggtagaggctaatctagacgaaatccagatgagttcacctacattccttagagctttaatgactgctgtttgtaaagcagctattatagatttgctgcggatgttttttgattgtctatatgacgaggaggtgatctccgaggatgccttctacaaatgggagagcagcaaggaccctgcagagcagaatgggaagggcgtggctctgaaatctgtcacggcattcttcacgtggctgcgggaagcagaagaggagtctgaggataactaaaacttcaaatacacaaaatgaaacaaaagaaacaatttaagtatttttttaaaaagtttcacgtcttcgccaatcacagtgcagcaaggccaattctcgcagaaacccccacgtgtgcacgagtgggagaggggaaagagaaaaaaaggtgatcatggaggaaaaaggtactggataaaagtaaacttcaaaccttagggcgggagcactaaaaccaaaatacatgtattatttatagaaaatattttctgttttaatcttttctttttaaacaaggactcatacttaaaaaaatgtttagcaaaaaaaaaaaaaagttgagaacttttaatttattttaaggactgcaaatgccagtgtaattttttaatttgcagtttctgtaaacaacttgtataatagaaaagcagagaaataaatttccctccccttcaagatgcacctcatgtttgttttaaggtatagcatttagtccagatttgagaaagtttggggtgaacaaggtaagaaagatttttttttttttggcatcaaatctttctgcctgcctctcagcttgcttcagaaaatttaaaaaatcacaatagtaatcaaaacatacataacattgaaacagaaggaaatgctgtggaccacagaactccaagaattgtttaaaaaaaaaaaagtgctaccctgagaaaagtactcttaatactcttgaaatctttagagcaactttaaggcttgtaaatacatagaacaaatatttaaaaaaacaaaaagaaattgactcagtactatttcttttcactttgaaaatataaagaacaaaataaagacaaacattgcaagttta

SEQ ID NO: 56631 - DNA, 1747 bp, Homo sapiens
agggaggaaggagaggtggggtgggcggcgggcccgcaggcttgtttttcagaaactttggaattggcagatgacatggccattgatattccccatatttggttgtaccttgctgaactggtgacccccatgttaaaagaaggtggaatctccatgagagaacttaccatagaatttagcaaacctttacttcctgttggaagagctggggtcttgctatctgaaatattgcacctactatgcaaacaaatgagccataagaaagtgggagccttatggagggaggctgacctcagctggaaggactttttaccagaaggagaagatgtacataattttcttttggagcagaagttggacttcatagagtctgacagtccctgttcctctgaagcactttcaaagaaagaactgtctgccgaagagctgtataagcgactcgagaaactcattattgaggacaaagcgaatgatgaacagatctttgactgggtagaggctaatctagacgaaatccagatgagttcacctacattccttagagctttaatgactgctgtttgtaaagcagctattatagccgactcttctaccttcagagtggacactgctgttatcaagcagagagtgccgatcttactcaagtacctagactcagatacagagaaggaactgcaagcactttatgcactacaagcatcgatagtaaaacttgatcaacctgccaatttgctgcggatgttttttgattgtctatatgacgaggaggtgatctccgaggatgccttctacaaatgggagagcagcaaggaccctgcagagcagaatgggaagggcgtggctctgaaatctgtcacggcattcttcacgtggctgcgggaagcagaagaggagtctgaggataactaaaacttcaaatacacaaaatgaaacaaaagaaacaatttaagtatttttttaaaaagtttcacgtcttcgccaatcacagtgcagcaaggccaattctcgcagaaacccccacgtgtgcacgagtgggagaggggaaagagaaaaaaaggtgatcatggaggaaaaaggtactggataaaagtaaacttcaaaccttagggcgggagcactaaaaccaaaatacatgtattatttatagaaaatattttctgttttaatcttttctttttaaacaaggactcatacttaaaaaaatgtttagcaaaaaaaaaaaaaagttgagaacttttaatttattttaaggactgcaaatgccagtgtaattttttaatttgcagtttctgtaaacaacttgtataatagaaaagcagagaaataaatttccctccccttcaagatgcacctcatgtttgttttaaggtatagcatttagtccagatttgagaaagtttggggtgaacaaggtaagaaagatttttttttttttggcatcaaatctttctgcctgcctctcagcttgcttcagaaaatttaaaaaatcacaatagtaatcaaaacatacataacattgaaacagaaggaaatgctgtggaccacagaactccaagaattgtttaaaaaaaaaaaagtgctaccctgagaaaagtactcttaatactcttgaaatctttagagcaactttaaggcttgtaaatacatagaacaaatatttaaaaaaacaaaaagaaattgactcagtactatttcttttcactttgaaaatataaagaacaaaataaagacaaacattgcaagttta

SEQ ID NO: 56632 - DNA, 1501 bp, Homo sapiens
gactagttctagatcgcgagcggacgctcgcgatctagagctgacctcagctggaaggactttttaccagaaggagaagatgtacataattttcttttggagcagaagttggacttcatagagtctgacagtccctgttcctctgaagcactttcaaagaaagaactgtctgccgaagagctgtataagcgactcgagaaactcattattgaggacaaagcgaatgatgaacagatctttgactgggtagaggctaatctagacgaaatccagatgagttcacctacattccttagagctttaatgactgctgtttgtaaagcagctattatagccgactcttctaccttcagagtggacactgctgttatcaagcagagagtgccgatcttactcaagtacctagactcagatacagagaaggaactgcaagcactttatgcactacaagcatcgatagtaaaacttgatcaacctgccaatttgctgcggatgttttttgattgtctatatgacgaggaggtgatctccgaggatgccttctacaaatgggagagcagcaaggaccctgcagagcagaatgggaagggcgtggctctgaaatctgtcacggcattcttcacgtggctgcgggaagcagaagaggagtctgaggataactaaaacttcaaatacacaaaatgaaacaaaagaaacaatttaagtatttttttaaaaagtttcacgtcttcgccaatcacagtgcagcaaggccaattctcgcagaaacccccacgtgtgcacgagtgggagaggggaaagagaaaaaaaggtgatcatggaggaaaaaggtactggataaaagtaaacttcaaaccttagggcgggagcactaaaaccaaaatacatgtattatttatagaaaatattttctgttttaatcttttctttttaaacaaggactcatacttaaaaaaatgtttagcaaaaaaaaaaaaaagttgagaacttttaatttattttaaggactgcaaatgccagtgtaattttttaatttgcagtttctgtaaacaacttgtataatagaaaagcagagaaataaatttccctccccttcaagatgcacctcatgtttgttttaaggtatagcatttagtccagatttgagaaagtttggggtgaacaaggtaagaaagatttttttttttttggcatcaaatctttctgcctgcctctcagcttgcttcagaaaatttaaaaaatcacaatagtaatcaaaacatacataacattgaaacagaaggaaatgctgtggaccacagaactccaagaattgtttaaaaaaaaaaaagtgctaccctgagaaaagtactcttaatactcttgaaatctttagagcaactttaaggcttgtaaatacatagaacaaatatttaaaaaaacaaaaagaaattgactcagtactatttcttttcactttgaaaatataaagaacaaaataaagacaaacattgcaagttta

SEQ ID NO: 56633 - DNA, 3461 bp, Homo sapiens
agcggggtaacttagcgtgcttatggaaaacctgatggaatagcattgacccagtttacaaagccatctgaagtgcctgagttgtatttgaaggaatattttttcacctttggcttttagcttagaagttatgactgcacattacaaaggggaatgttcaaacctttatcacaatcccacagagtattgatgaggaaactgaagtttggagcgatcacatcattttcccaagaattcctagaggacctgtgcaacaacctcttgaggatcgaatcttcactcccgctgtctcagcagtctacagcacggtaacacaagtggcaagacagccgggaacccctaccccatccccttattcagcacatgaaataaacaaggggcatccaaatcttgcggcaacgcccccgggacatgcatcgtcccctggactctctcaaaccccttatccctctggacagaatgcaggtccaaccacgctggtataccctcaaacccctcagacaatgaattcacaacctcaaacccgttctccgtttgcagcggggcctcgacctccccatcatcagtttttccagaggcctcaaatacagcctcctagagctaccatcccgaacagcagtccttccattcgtcctggtgcacagacacccactgcagtgtaccaggctaatcagcacatcatgatggttaaccatctgcccatgccgtacccagtgccccaggggcctcagtactgtataccacagtaccgtcatagtggccctccttatgttgggcccccccaacaatatccagttcaaccaccggggccaggtcctttttatcctggaccaggacctggggacttccccaatgcttatggaacgcctttttacccaagtcagccggtgtatcagtcagcacctatcatagtgcctacgcagcaacagccgcctccagccaagagagagaaaaaaactataagaattcgggatccaaaccagggaggtaaagacataacagaggagattatgtctggaggtggcagcagaaatcctactccacccataggaagacccacgtccacacctactcctcctcagcagctgcccagccaggtccccgagcacagccctgtggtttatgggactgtggagagcgctcatcttgctgccagcacccctgtcactgcagctagcgaccagaagcaagaggagaagccaaaaccagatccagtgttaaagtctccttccccagtccttaggctagtcctcagtggagagaagaaagaacaagaaggccagacatctgaaactactgcaatagtatccatagcagagcttcctctgcctccatcacctaccactgtttcttctgttgctcgaagtacaattgcagcccccacctcttctgctcttagtagccaaccaatattcaccactgctatagatgacagatgtgaactctcatccccaagagaagacacaattcctatacccagcctcacatcttgcacagaaacatcagaccctttaccaacaaatgaaaatgatgatgatatatgcaagaaaccctgtagtgtagcacctaatgatattccactggtttctagtactaacctaattaatgaaataaatggagttagcgaaaaattatcagccacggagagcattgtggaaatagtaaaacaggaagtattgccattgactcttgaattggagattctcgaaaatcccccagaagaaatgaaactggagtgtatcccagctcccatcaccccttccacagttccttcctttcctccaactcctccaactcctccagcttctcctcctcacactccagtcattgttcctgctgctgccactactgttagttctccgagtgctgccatcacagtccagagagtcctagaggaggacgagagcataagaacttgccttagtgaagatgcaaaagagattcagaacaaaatagaggtagaagcagatgggcaaacagaagagattttggattctcaaaacttaaattcaagaaggagccctgtcccagaaacatcgaatgaatgctgaaattcctagtctggtttcttcagtggtgtgtttgtgttttagtacaacctgcaaaagagttactccattgtctaaaaatgcaaatgagaatttccaaatatacaaaatgcctccaagctcaaatagctataactgtaccaaagacatggaagaaaccaaaagatcggacccgaaccactgaagagatgttagaggcagaattggagcttaaagctgaagaggagctttccattgacaaagtacttgaatctgaacaagataaaatgagccaggggtttcatcctgaaagagacccctctgacctaaaaaaagtgaaagctgtggaagaaaatggagaagaagctgagccagtacgtaatggtgctgagagtgtttctgagggtgaaggaatagatgctaattcaggctccacagatagttctggtgatggggttacatttccatttaaaccagaatcctggaagcctactgatactgaaggtaagaagcagtatgacagggagtttctgctggacttccagttcatgcctgcctgtatacaaaaaccagagggcctgcctcctatcagtgatgtggttcttgacaagatcaaccaacccaaattgccaatgcgaactctggatcctcgaattttgcctcgaggaccagactttacaccagcctttgctgattttggaaggcagacacctggtggaagaggcgtacctttgttgaatgttgggtcacgaagatctcaacctggccaaagaagagaacccagaaagatcatcacagtttctgtaaaagaagatgtacacctgaaaaaggcagaaaatgcctggaagccaagccaaaaacgagacagccaagccgatgatcccgaaaacattaaaacccaggagctttttagaaaagttcgaagtatcttaaataaattgacaccacagatgttcaatcaactgatgaagcaagtgtcaggacttactgttgacacagaggagcggctgaaaggagttattgacctggtctttgagaaggctattgatgaacccagtttctctgtggcttacgcaaacatgtgtcgatgtctagtaacgctgaaagtacccatggcagacaagcctggtaacacagtgaatttccggaagctgctactgaaccgttgccagaaggagtttgaaaaagataaagcagatgatgatgtctttgagaagaagcagaaagaacttgaggctgccagtgctccagaggagaggacaaggcttcatgatgaactggaagaagccaaggacaaagcccggcggagatccattggcaacatcaagtttattggagaactctttaaactcaaaatgctgactgaagccatcatgcatgtgctttatctttttcaaactccttctgcaacggttcagtataccttccaggcgg

SEQ ID NO: 56634 - DNA, 2829 bp, Homo sapiens
agcggggtaacttagcgtgcttatggaaaacctgatggaatagcattgacccagtttacaaagccatctgaagtgcctgagttgtatttgaaggaatattttttcacctttggcttttagcttagaagttatgactgcacattacaaaggggaatgttcaaacctttatcacaatcccacagagtattgatgaggaaactgaagtttggagcgatcacatcattttcccaagaattcctagaggacctgtgcaacaacctcttgaggatcgaatcttcactcccgctgtctcagcagtctacagcacggtaacacaagtggcaagacagccgggaacccctaccccatccccttattcagcacatgaaataaacaaggggcatccaaatcttgcggcaacgcccccgggacatgcatcgtcccctggactctctcaaaccccttatccctctggacagaatgcaggtccaaccacgctggtataccctcaaacccctcagacaatgaattcacaacctcaaacccgttctccgtttgcagcggggcctcgacctccccatcatcagtttttccagaggcctcaaatacagcctcctagagctaccatcccgaacagcagtccttccattcgtcctggtgcacagacacccactgcagtgtaccaggctaatcagcacatcatgatggttaaccatctgcccatgccgtacccagtgccccaggggcctcagtactgtataccacagtaccgtcatagtggccctccttatgttgggcccccccaacaatatccagttcaaccaccggggccaggtcctttttatcctggaccaggacctggggacttccccaatgcttatggaacgcctttttacccaagtcagccggtgtatcagtcagcacctatcatagtgcctacgcagcaacagccgcctccagccaagagagagaaaaaaactataagaattcgggatccaaaccagggaggtaaagacataacagaggagattatgtctggaggtggcagcagaaatcctactccacccataggaagacccacgtccacacctactcctcctcagcagctgcccagccaggtccccgagcacagccctgtggtttatgggactgtggagagcgctcatcttgctgccagcacccctgtcactgcagctagcgaccagaagcaagaggagaagccaaaaccagatccagtgttaaagtctccttccccagtccttaggctagtcctcagtggagagaagaaagaacaagaaggccagacatctgaaactactgcaatagtatccatagcagagcttcctctgcctccatcacctaccactgtttcttctgttgctcgaagtacaattgcagcccccacctcttctgctcttagtagccaaccaatattcaccactgctatagatgacagatgtgaactctcatccccaagagaagacacaattcctatacccagcctcacatcttgcacagaaacatcagaccctttaccaacaaatgaaaatgatgatgatatatgcaagaaaccctgtagtgtagcacctaatgatattccactggtttctagtactaacctaattaatgaaataaatggagttagcgaaaaattatcagccacggagagcattgtggaaatagtaaaacaggaagtattgccattgactcttgaattggagattctcgaaaatcccccagaagaaatgaaactggagtgtatcccagctcccatcaccccttccacagttccttcctttcctccaactcctccaactcctccagcttctcctcctcacactccagtcattgttcctgctgctgccactactgttagttctccgagtgctgccatcacagtccagagagtcctagaggaggacgagagcataagaacttgccttagtgaagatgcaaaagagattcagaacaaaatagaggtagaagcagatgggcaaacagaagagattttggattctcaaaacttaaattcaagaaggagccctgtcccagaaacatcgaatgaatgctgaaattcctagtctggtttcttcagtggtgtgtttgtgttttagtacaacctgcaaaagagttactccattgtctaaaaatgcaaatgagaatttccaaatatacaaaatgcctccaagctcaaatagctataactgtaccaaagacatggaagaaaccaaaagatcggacccgaaccactgaagagatgttagaggcagaattggagcttaaagctgaagaggagctttccattgacaaagtacttgaatctgaacaagataaaatgagccaggggtttcatcctgaaagagacccctctgacctaaaaaaagtgaaagctgtggaagaaaatggagaagaagctgagccagtacgtaatggtgctgagagtgtttctgagggtgaaggaatagatgctaattcaggctccacagatagttctggtgatggggttacatttccatttaaaccagaatcctggaagcctactgatactgaaggtaagaagcagtatgacagggagtttctgctggacttccagttcatgcctgcctgtatacaaaaaccagagggcctgcctcctatcagtgatgtggttcttgacaagatcaaccaacccaaattgccaatgcgaactctggatcctcgaattttgcctcgaggaccagactttacaccagcctttgctgattttggaaggcagacacctggtggaagaggcgtacctatttgcaaagtgcagagcaggcatggattgccaattctggaacagagcaaagccccaacttgccctccact

SEQ ID NO: 56635 - DNA, 1526 bp, Homo sapiens
agcggggtaacttagcgtgcttatggaaaacctgatggaatagcattgacccagtttacaaagccatctgaagtgcctgagttgtatttgaaggaatattttttcacctttggcttttagcttagaagttatgactgcacattacaaaggggaatgttcaaacctttatcacaatcccacagagtattgatgaggaaactgaagtttggagcgatcacatcattttcccaagaattcctagaggacctgtgcaacaacctcttgaggatcgaatcttcactcccgctgtctcagcagtctacagcacggtaacacaagtggcaagacagccgggaacccctaccccatccccttattcagcacatgaaataaacaaggggcatccaaatcttgcggcaacgcccccgggacatgcatcgtcccctggactctctcaaaccccttatccctctggacagaatgcaggtccaaccacgctggtataccctcaaacccctcagacaatgaattcacaacctcaaacccgttctccgtttgcagcggggcctcgacctccccatcatcagtttttccagaggcctcaaatacagcctcctagagctaccatcccgaacagcagtccttccattcgtcctggtgcacagacacccactgcagtgtaccaggctaatcagcacatcatgatggttaaccatctgcccatgccgtacccagtgccccaggggcctcagtactgtataccacagtaccgtcatagtggccctccttatgttgggcccccccaacaatatccagttcaaccaccggggccaggtcctttttatcctggaccaggacctggggacttccccaatgcttatggaacgcctttttacccaagtcagccggtgtatcagtcagcacctatcatagtgcctacgcagcaacagccgcctccagccaagagagagaaaaaaactataagaattcgggatccaaaccagggaggtaaagacataacagaggagattatgtctggaggtggcagcagaaatcctactccacccataggaagacccacgtccacacctactcctcctcagcagctgcccagccaggtccccgagcacagccctgtggtttatgggactgtggagagcgctcatcttgctgccagcacccctgtcactgcagctagcgaccagaagcaagaggagaagccaaaaccagatccagtgttaaagtctccttccccagtccttaggctagtcctcagtggagagaagaaagaacaagaaggccagacatctgaaactactgcaatagtatccatagcagagcttcctctgcctccatcacctaccactgtttcttctgttgctcgaagtacaattgcagcccccacctcttctgctcttagtagccaaccgtggactagtagccaaccgtggactagtagccaaccgtggactagtagccaaccgtggactagtagccaaccgtggactagtggccaaccgtggactagtagccaaccgtggactagt

SEQ ID NO: 56636 - DNA, 777 bp, Homo sapiens
ggcggcggcggcagcggtcccccctcctcacccgaacatcagggccctccagactcaggcgccccaacaaattcctagaggacctgtgcaacaacctcttgaggatcgaatcttcactcccgctgtctcagcagtctacagcacggtaacacaagtggcaagacagccgggaacccctaccccatccccttattcagcacatgaaataaacaaggggcatccaaatcttgcggcaacgcccccgggacatgcatcgtcccctggactctctcaaaccccttatccctctggacagaatgcaggtccaaccacgctggtataccctcaaacccctcagacaatgaattcacaacctcaaacccgttctccgtttttccagaggcctcaaatacagcctcctagagctaccatcccgaacagcagtccttccattcgtcctggtgcacagacacccactgcagtgtaccaggctaatcagcacatcatgatggttaaccatctgcccatgccgtacccagtgccccaggggcctcagtactgtataccacagtaccgtcatagtggccctccttatgttgggcccccccaacaatatccagttcaaccaccggggccaggtcctttttatcctggaccaggacctggggacttccccaatgcttatggaacgcctttttacccaagtcagccggtgtatcagtcagcacctatcatagtgcctacgcagcaacagccgccgtcgacgcggccgcgaatttagtagtagtaggcggccgc

SEQ ID NO: 56637 - DNA, 321 bp, Homo sapiens
ggcggcggcggcagcggtcccccctcctcacccgaacatcagggccctccagactcaggcgccccaacaaattcctagaggacctgtgcaacaacctcttgaggatcgaatcttcactcccgctgtctcagcagtctacagcacggtaacacaagtggcaagacagccgggaacccctaccccatccccttattcagcacatgaaataaacaaggggcatccaaatcttgcggcaacgcccccgggacatgcatcgtcccctggactctctcaaaccccttatccctctggagactcctccctgctgatagagcccacgtt

SEQ ID NO: 56638 - DNA, 238 bp, Homo sapiens
ctataagatacatgagaaactgccataatacagcttttgtaggtattttgtacttttccagtagtaaaaattgctaatttttaaattttaaaaaatgttcagtttatctggcagataaccttattttctgcttttatagtgcaattgggtatctcgaagagcagatcaagggcctaaaactatcgaacagattcacaaagaggctaaaatagaagaacaagaagagcaaaggaaggtc

SEQ ID NO: 56639 - DNA, 428 bp, Homo sapiens
acacctggtggaagaggcgtacctgtaagtgcaagttccctacaactcacttagttagacactggcacagactccatgaaatcctacctcatggcaagacagcagcttttattcgttgattctagtcaagaagaagaagaagaggcaaagactatcctttccatactcatattaaagcagataaagaatacacttgagttctttttacttggcagaagctagtctgcattaatttggtcttgattttttttttccctattttttcaattgaggtgacctgcaaataggtttaaaaatagtgccaaccatggccagggatggtggctcaggtctgtaatgctagcactttgtggggtcaaggcaggaggatcacttgaggtcaggagttcaaggtcagcctgacaacaaagagagaccctgtctctacc

SEQ ID NO: 56640 - DNA, 466 bp, Homo sapiens
attcccagcgtatcagaaaaccattgttttagcctaatggctctaagagtagcccaggagaagctgccatggatgagattggacttctgcgggttccaaagctggtgcttaccgtttcagctgatgtaacttttcagtaaaaatttttgttatcttttgtggcagggaatgctctggaacatgtattaagctttcttttgctttttcatgcagatcaaccaacccaaattgccaatgcgaactctggatcctcgaattttgcctcgaggaccagactttacaccagcctttgctgattttggaaggcagacacctggtggaagaggcgtacctgtaagtgcaagttccctacaactcacttagttagacactggcacagactccatgaaatcctacctcatggcaagacagcagcttttattcgttgattctagtcaagaagaagaagaagaggcaaagactatcc

SEQ ID NO: 56641 - DNA, 413 bp, Homo sapiens
catgtactcttcatctttgaagcaatggggagcaatcataatacagaaaggaacaaaaaagctttaattaggaaagtttatcatgttcctaaatcttgttcattgttattgtagattataaagttacttagtgcgaatctattctaaaacaaaaggtttctgtattctgtttttatctattaaatgtcttgtagctattaaaataatgtaatagcacataatattgtcaaccataatctcactattttaatagtaatttttattatttttactttttttggggggcctcactaatagcaaaaccagaaatttcagcaatgtcagctcatgacaaggctgcattatcagaagaggaactggagaggaagtcgaaatctatcattgatgaatttctacacattaatgattttaag

SEQ ID NO: 56642 - DNA, 478 bp, Homo sapiens
ccttctcttactccaaaacagactttatgtattggataccaagtaaatagtaggtttaagtaaaaaaagaaaagagacaatgtttttggcataccagaataagtctaatatattggtctctgttctgttacctgtaatttagggtaagacattgaaagaattggcccaaggcaatatgtagtctctgatccaagaattattcttaaaacttatttttttttccccagaggagaagccaaaaccagatccagtgttaaagtctccttccccagtccttaggctagtcctcagtggagagaagaaagaacaagaaggccagacatctgaaactactgcaatagtatccatagcagagcttcctctgcctccatcacctaccactgtttcttctgttgctcgaagtacaattgcagcccccacctcttctgctcttagtagccaaccaatattcaccactgctatagatgacagatgtgaa

SEQ ID NO: 56643 - DNA, 855 bp, Homo sapiens
ggagcaggcgcctgtagtcccaacaacttgggaggctgagacaggagaatagcttgaacctgggagacggaggttgcagtgagcttagattgtgccactgcactccagcctgggcaatagagtgaggctctgtctcaaaaaaagaaaaaagaaagaaaattaaagataattctatgttaactccttaaatgtaattcctagttcttctatcacctttagccgactcttctaccttcagagtggacactgctgttatcaagcagagagtgccgatcttactcaagtacctagactcagatacagagaaggaactgcaagcactttatgcactacaagcatcgatagtaaaacttgatcaacctgccagtaagtttatctcatgttacagttaatctaaccaatgagtgagatttatccaagccaggacttagagatgatttagggttcgaacaaaggacaataaaagaatcactaataacacaaactcatataactaactttaataaatttgaatttggccgggtgcagtggcttgcgcctataatcccagcactttgggaggccacggcaggcagatcacttgaggtcaagagttcaagaccagcctggccaacatggtgaaaccctatccctactaaaaatacagaaatggctgagcacggtggctcacacctgtaatcccagcactttgggaggccgaggcagatggatcatgaggtcaggagatcgagaccatcctggctaacacagtgaaaccctgtctctactaaaaatacaaaaaattagctgggtgtggtggcgggcacctgtaatcccagctacttgggaggctgaggcaggagaatcgcttgaacc

SEQ ID NO: 56644 - DNA, 6073 bp, Homo sapiens
ggcggcggcggcagcggtcccccctcctcacccgaacatcagggccctccagactcaggcgccccaacaaattcctagaggacctgtgcaacaacctcttgaggatcgaatcttcactcccgctgtctcagcagtctacagcacggtaacacaagtggcaagacagccgggaacccctaccccatccccttattcagcacatgaaataaacaaggggcatccaaatcttgcggcaacgcccccgggacatgcatcgtcccctggactctctcaaaccccttatccctctggacagaatgcaggtccaaccacgctggtataccctcaaacccctcagacaatgaattcacaacctcaaacccgttctccgtttttccagaggcctcaaatacagcctcctagagctaccatcccgaacagcagtccttccattcgtcctggtgcacagacacccactgcagtgtaccaggctaatcagcacatcatgatggttaaccatctgcccatgccgtacccagtgccccaggggcctcagtactgtataccacagtaccgtcatagtggccctccttatgttgggcccccccaacaatatccagttcaaccaccggggccaggtcctttttatcctggaccaggacctggggacttccccaatgcttatggaacgcctttttacccaagtcagccggtgtatcagtcagcacctatcatagtgcctacgcagcaacagccgcctccagccaagagagagaaaaaaactataagaattcgggatccaaaccagggaggtaaagacataacagaggagattatgtctggaggtggcagcagaaatcctactccacccataggaagacccacgtccacacctactcctcctcagcagctgcccagccaggtccccgagcacagccctgtggtttatgggactgtggagagcgctcatcttgctgccagcacccctgtcactgcagctagcgaccagaagcaagaggagaagccaaaaccagatccagtgttaaagtctccttccccagtccttaggctagtcctcagtggagagaagaaagaacaagaaggccagacatctgaaactactgcaatagtatccatagcagagcttcctctgcctccatcacctaccactgtttcttctgttgctcgaagtacaattgcagcccccacctcttctgctcttagtagccaaccaatattcaccactgctatagatgacagatgtgaactctcatccccaagagaagacacaattcctatacccagcctcacatcttgcacagaaacatcagaccctttaccaacaaatgaaaatgatgatgatatatgcaagaaaccctgtagtgtagcacctaatgatattccactggtttctagtactaacctaattaatgaaataaatggagttagcgaaaaattatcagccacggagagcattgtggaaatagtaaaacaggaagtattgccattgactcttgaattggagattctcgaaaatcccccagaagaaatgaaactggagtgtatcccagctcccatcaccccttccacagttccttcctttcctccaactcctccaactcctccagcttctcctcctcacactccagtcattgttcctgctgctgccactactgttagttctccgagtgctgccatcacagtccagagagtcctagaggaggacgagagcataagaacttgccttagtgaagatgcaaaagagattcagaacaaaatagaggtagaagcagatgggcaaacagaagagattttggattctcaaaacttaaattcaagaaggagccctgtcccagaaacatcgaatgaatgctgaaattcctagtctggtttcttcagtggtgtgtttgtgttttagtacaacctgcaaaagagttactccattgtctaaaaatgcaaatgagaatttccaaatatacaaaatgcctccaagctcaaatagctataactgtaccaaagacatggaagaaaccaaaagatcggacccgaaccactgaagagatgttagaggcagaattggagcttaaagctgaagaggagctttccattgacaaagtacttgaatctgaacaagataaaatgagccaggggtttcatcctgaaagagacccctctgacctaaaaaaagtgaaagctgtggaagaaaatggagaagaagctgagccagtacgtaatggtgctgagagtgtttctgagggtgaaggaatagatgctaattcaggctccacagatagttctggtgatggggttacatttccatttaaaccagaatcctggaagcctactgatactgaaggtaagaagcagtatgacagggagtttctgctggacttccagttcatgcctgcctgtatacaaaaaccagagggcctgcctcctatcagtgatgtggttcttgacaagatcaaccaacccaaattgccaatgcgaactctggatcctcgaattttgcctcgaggaccagactttacaccagcctttgctgattttggaaggcagacacctggtggaagaggcgtacctttgttgaatgttgggtcacgaagatctcaacctggccaaagaagagaacccagaaagatcatcacagtttctgtaaaagaagatgtacacctgaaaaaggcagaaaatgcctggaagccaagccaaaaacgagacagccaagccgatgatcccgaaaacattaaaacccaggagctttttagaaaagttcgaagtatcttaaataaattgacaccacagatgttcaatcaactgatgaagcaagtgtcaggacttactgttgacacagaggagcggctgaaaggagttattgacctggtctttgagaaggctattgatgaacccagtttctctgtggcttacgcaaacatgtgtcgatgtctagtaacgctgaaagtacccatggcagacaagcctggtaacacagtgaatttccggaagctgctactgaaccgttgccagaaggagtttgaaaaagataaagcagatgatgatgtctttgagaagaagcagaaagaacttgaggctgccagtgctccagaggagaggacaaggcttcatgatgaactggaagaagccaaggacaaagcccggcggagatccattggcaacatcaagtttattggagaactctttaaactcaaaatgctgactgaagccatcatgcatgactgtgtggtgaagctgctaaagaaccatgatgaagaatccctggagtgcctgtgtcgcctgctcaccaccattggcaaagacttggactttgaaaaagcaaagccacgtatggaccagtactttaatcagatggagaaaattgtgaaagaaagaaaaacctcatctaggattcggttcatgcttcaagatgttatagacctaaggctgtgcaattgggtatctcgaagagcagatcaagggcctaaaactatcgaacagattcacaaagaggctaaaatagaagaacaagaagagcaaaggaaggtccagcaactcatgaccaaagagaagagaagaccaggtgtccagagagtggacgaaggtgggtggaacactgtacaaggggccaagaacagtcgggtactggacccctcaaaattcctaaaaatcactaagcctacaattgatgaaaaaattcagctggtacctaaagcacagctaggcagctggggaaaaggcagcagtggtggagcaaaggcaagtgagactgatgccttacggtcaagtgcttccagtttaaacagattctctgccctgcaacctccagcaccctcagggtccacgccatccacgcctgtagagtttgattcccgaaggaccttaactagtcgtggaagtatgggcagggagaagaatgacaagccccttccatctgcaacagctcggccaaatactttcatgaggggtggcagcagtaaagacctgctagacaatcagtctcaagaagagcagcggagagagatgctggagaccgtgaagcagctcacaggaggtgtggatgtggagaggaacagcactgaggctgagcgaaataaaacaagggagtcagcaaaaccagaaatttcagcaatgtcagctcatgacaaggctgcattatcagaagaggaactggagaggaagtcgaaatctatcattgatgaatttctacacattaatgattttaaggaagccatgcagtgtgtggaagagctgaatgcccagggcctactacatgtttttgtgagagtgggagtggagtccaccctggaaaggagccagatcaccagggatcacatgggccaactactctatcagctggtacagtcagaaaaactcagcaaacaggactttttcaaaggtttttcagaaactttggaattggcagatgacatggccattgatattccccatatttggttgtaccttgctgaactggtgacccccatgttaaaagaaggtggaatctccatgagagaacttaccatagaatttagcaaacctttacttcctgttggaagagctggggtcttgctatctgaaatattgcacctactatgcaaacaaatgagccataagaaagtgggagccttatggagggaggctgacctcagctggaaggactttttaccagaaggagaagatgtacataattttcttttggagcagaagttggacttcatagagtctgacagtccctgttcctctgaagcactttcaaagaaagaactgtctgccgaagagctgtataagcgactcgagaaactcattattgaggacaaagcgaatgatgaacagatctttgactgggtagaggctaatctagacgaaatccagatgagttcacctacattccttagagctttaatgactgctgtttgtaaagcagctattatagccgactcttctaccttcagagtggacactgctgttatcaagcagagagtgccgatcttactcaagtacctagactcagatacagagaaggaactgcaagcactttatgcactacaagcatcgatagtaaaacttgatcaacctgccaatttgctgcggatgttttttgattgtctatatgacgaggaggtgatctccgaggatgccttctacaaatgggagagcagcaaggaccctgcagagcagaatgggaagggcgtggctctgaaatctgtcacggcattcttcacgtggctgcgggaagcagaagaggagtctgaggataactaaaacttcaaatacacaaaatgaaacaaaagaaacaatttaagtatttttttaaaaagtttcacgtcttcgccaatcacagtgcagcaaggccaattctcgcagaaacccccacgtgtgcacgagtgggagaggggaaagagaaaaaaaggtgatcatggaggaaaaaggtactggataaaagtaaacttcaaaccttagggcgggagcactaaaaccaaaatacatgtattatttatagaaaatattttctgttttaatcttttctttttaaacaaggactcatacttaaaaaaatgtttagcaaaaaaaaaaaaaagttgagaacttttaatttattttaaggactgcaaatgccagtgtaattttttaatttgcagtttctgtaaacaacttgtataatagaaaagcagagaaataaatttccctccccttcaagatgcacctcatgtttgttttaaggtatagcatttagtccagatttgagaaagtttggggtgaacaaggtaagaaagatttttttttttttggcatcaaatctttctgcctgcctctcagcttgcttcagaaaatttaaaaaatcacaatagtaatcaaaacatacataacattgaaacagaaggaaatgctgtggaccacagaactccaagaattgtttaaaaaaaaaaaagtgctaccctgagaaaagtactcttaatactcttgaaatctttagagcaactttaaggcttgtaaatacatagaacaaatatttaaaaaaacaaaaagaaattgactcagtactatttcttttcactttgaaaatataaagaacaaaataaagacaaacattgcaagttta

SEQ ID NO: 56645 - DNA, 6466 bp, Homo sapiens
agcggggtaacttagcgtgcttatggaaaacctgatggaatagcattgacccagtttacaaagccatctgaagtgcctgagttgtatttgaaggaatattttttcacctttggcttttagcttagaagttatgactgcacattacaaaggggaatgttcaaacctttatcacaatcccacagagtattgatgaggaaactgaagtttggagcgatcacatcattttcccaagaattcctagaggacctgtgcaacaacctcttgaggatcgaatcttcactcccgctgtctcagcagtctacagcacggtaacacaagtggcaagacagccgggaacccctaccccatccccttattcagcacatgaaataaacaaggggcatccaaatcttgcggcaacgcccccgggacatgcatcgtcccctggactctctcaaaccccttatccctctggacagaatgcaggtccaaccacgctggtataccctcaaacccctcagacaatgaattcacaacctcaaacccgttctccgtttgcagcggggcctcgacctccccatcatcagtttttccagaggcctcaaatacagcctcctagagctaccatcccgaacagcagtccttccattcgtcctggtgcacagacacccactgcagtgtaccaggctaatcagcacatcatgatggttaaccatctgcccatgccgtacccagtgccccaggggcctcagtactgtataccacagtaccgtcatagtggccctccttatgttgggcccccccaacaatatccagttcaaccaccggggccaggtcctttttatcctggaccaggacctggggacttccccaatgcttatggaacgcctttttacccaagtcagccggtgtatcagtcagcacctatcatagtgcctacgcagcaacagccgcctccagccaagagagagaaaaaaactataagaattcgggatccaaaccagggaggtaaagacataacagaggagattatgtctggaggtggcagcagaaatcctactccacccataggaagacccacgtccacacctactcctcctcagcagctgcccagccaggtccccgagcacagccctgtggtttatgggactgtggagagcgctcatcttgctgccagcacccctgtcactgcagctagcgaccagaagcaagaggagaagccaaaaccagatccagtgttaaagtctccttccccagtccttaggctagtcctcagtggagagaagaaagaacaagaaggccagacatctgaaactactgcaatagtatccatagcagagcttcctctgcctccatcacctaccactgtttcttctgttgctcgaagtacaattgcagcccccacctcttctgctcttagtagccaaccaatattcaccactgctatagatgacagatgtgaactctcatccccaagagaagacacaattcctatacccagcctcacatcttgcacagaaacatcagaccctttaccaacaaatgaaaatgatgatgatatatgcaagaaaccctgtagtgtagcacctaatgatattccactggtttctagtactaacctaattaatgaaataaatggagttagcgaaaaattatcagccacggagagcattgtggaaatagtaaaacaggaagtattgccattgactcttgaattggagattctcgaaaatcccccagaagaaatgaaactggagtgtatcccagctcccatcaccccttccacagttccttcctttcctccaactcctccaactcctccagcttctcctcctcacactccagtcattgttcctgctgctgccactactgttagttctccgagtgctgccatcacagtccagagagtcctagaggaggacgagagcataagaacttgccttagtgaagatgcaaaagagattcagaacaaaatagaggtagaagcagatgggcaaacagaagagattttggattctcaaaacttaaattcaagaaggagccctgtcccagaaacatcgaatgaatgctgaaattcctagtctggtttcttcagtggtgtgtttgtgttttagtacaacctgcaaaagagttactccattgtctaaaaatgcaaatgagaatttccaaatatacaaaatgcctccaagctcaaatagctataactgtaccaaagacatggaagaaaccaaaagatcggacccgaaccactgaagagatgttagaggcagaattggagcttaaagctgaagaggagctttccattgacaaagtacttgaatctgaacaagataaaatgagccaggggtttcatcctgaaagagacccctctgacctaaaaaaagtgaaagctgtggaagaaaatggagaagaagctgagccagtacgtaatggtgctgagagtgtttctgagggtgaaggaatagatgctaattcaggctccacagatagttctggtgatggggttacatttccatttaaaccagaatcctggaagcctactgatactgaaggtaagaagcagtatgacagggagtttctgctggacttccagttcatgcctgcctgtatacaaaaaccagagggcctgcctcctatcagtgatgtggttcttgacaagatcaaccaacccaaattgccaatgcgaactctggatcctcgaattttgcctcgaggaccagactttacaccagcctttgctgattttggaaggcagacacctggtggaagaggcgtacctttgttgaatgttgggtcacgaagatctcaacctggccaaagaagagaacccagaaagatcatcacagtttctgtaaaagaagatgtacacctgaaaaaggcagaaaatgcctggaagccaagccaaaaacgagacagccaagccgatgatcccgaaaacattaaaacccaggagctttttagaaaagttcgaagtatcttaaataaattgacaccacagatgttcaatcaactgatgaagcaagtgtcaggacttactgttgacacagaggagcggctgaaaggagttattgacctggtctttgagaaggctattgatgaacccagtttctctgtggcttacgcaaacatgtgtcgatgtctagtaacgctgaaagtacccatggcagacaagcctggtaacacagtgaatttccggaagctgctactgaaccgttgccagaaggagtttgaaaaagataaagcagatgatgatgtctttgagaagaagcagaaagaacttgaggctgccagtgctccagaggagaggacaaggcttcatgatgaactggaagaagccaaggacaaagcccggcggagatccattggcaacatcaagtttattggagaactctttaaactcaaaatgctgactgaagccatcatgcatgactgtgtggtgaagctgctaaagaaccatgatgaagaatccctggagtgcctgtgtcgcctgctcaccaccattggcaaagacttggactttgaaaaagcaaagccacgtatggaccagtactttaatcagatggagaaaattgtgaaagaaagaaaaacctcatctaggattcggttcatgcttcaagatgttatagacctaaggctgtgcaattgggtatctcgaagagcagatcaagggcctaaaactatcgaacagattcacaaagaggctaaaatagaagaacaagaagagcaaaggaaggtccagcaactcatgaccaaagagaagagaagaccaggtgtccagagagtggacgaaggtgggtggaacactgtacaaggggccaagaacagtcgggtactggacccctcaaaattcctaaaaatcactaagcctacaattgatgaaaaaattcagctggtacctaaagcacagctaggcagctggggaaaaggcagcagtggtggagcaaaggcaagtgagactgatgccttacggtcaagtgcttccagtttaaacagattctctgccctgcaacctccagcaccctcagggtccacgccatccacgcctgtagagtttgattcccgaaggaccttaactagtcgtggaagtatgggcagggagaagaatgacaagccccttccatctgcaacagctcggccaaatactttcatgaggggtggcagcagtaaagacctgctagacaatcagtctcaagaagagcagcggagagagatgctggagaccgtgaagcagctcacaggaggtgtggatgtggagaggaacagcactgaggctgagcgaaataaaacaagggagtcagcaaaaccagaaatttcagcaatgtcagctcatgacaaggctgcattatcagaagaggaactggagaggaagtcgaaatctatcattgatgaatttctacacattaatgattttaaggaagccatgcagtgtgtggaagagctgaatgcccagggcctactacatgtttttgtgagagtgggagtggagtccaccctggaaaggagccagatcaccagggatcacatgggccaactactctatcagctggtacagtcagaaaaactcagcaaacaggactttttcaaaggtttttcagaaactttggaattggcagatgacatggccattgatattccccatatttggttgtaccttgctgaactggtgacccccatgttaaaagaaggtggaatctccatgagagaacttaccatagaatttagcaaacctttacttcctgttggaagagctggggtcttgctatctgaaatattgcacctactatgcaaacaaatgagccataagaaagtgggagccttatggagggaggctgacctcagctggaaggactttttaccagaaggagaagatgtacataattttcttttggagcagaagttggacttcatagagtctgacagtccctgttcctctgaagcactttcaaagaaagaactgtctgccgaagagctgtataagcgactcgagaaactcattattgaggacaaagcgaatgatgaacagatctttgactgggtagaggctaatctagacgaaatccagatgagttcacctacattccttagagctttaatgactgctgtttgtaaagcagctattatagccgactcttctaccttcagagtggacactgctgttatcaagcagagagtgccgatcttactcaagtacctagactcagatacagagaaggaactgcaagcactttatgcactacaagcatcgatagtaaaacttgatcaacctgccaatttgctgcggatgttttttgattgtctatatgacgaggaggtgatctccgaggatgccttctacaaatgggagagcagcaaggaccctgcagagcagaatgggaagggcgtggctctgaaatctgtcacggcattcttcacgtggctgcgggaagcagaagaggagtctgaggataactaaaacttcaaatacacaaaatgaaacaaaagaaacaatttaagtatttttttaaaaagtttcacgtcttcgccaatcacagtgcagcaaggccaattctcgcagaaacccccacgtgtgcacgagtgggagaggggaaagagaaaaaaaggtgatcatggaggaaaaaggtactggataaaagtaaacttcaaaccttagggcgggagcactaaaaccaaaatacatgtattatttatagaaaatattttctgttttaatcttttctttttaaacaaggactcatacttaaaaaaatgtttagcaaaaaaaaaaaaaagttgagaacttttaatttattttaaggactgcaaatgccagtgtaattttttaatttgcagtttctgtaaacaacttgtataatagaaaagcagagaaataaatttccctccccttcaagatgcacctcatgtttgttttaaggtatagcatttagtccagatttgagaaagtttggggtgaacaaggtaagaaagatttttttttttttggcatcaaatctttctgcctgcctctcagcttgcttcagaaaatttaaaaaatcacaatagtaatcaaaacatacataacattgaaacagaaggaaatgctgtggaccacagaactccaagaattgtttaaaaaaaaaaaagtgctaccctgagaaaagtactcttaatactcttgaaatctttagagcaactttaaggcttgtaaatacatagaacaaatatttaaaaaaacaaaaagaaattgactcagtactatttcttttcactttgaaaatataaagaacaaaataaagacaaacattgcaagtttaaaagaaagtaaagtgacttctcctttggacagctgctgcatgtgtgcccattcctgggggtgctgtctggctatttattgtctaattcaaatcactcctgaggggagagagataaaacgagagagagtgagagagtgtgtgtatgtgcgtgtatgcgcacgtatgtgcatgcacatgtatgtatgtatatacaagag

SEQ ID NO: 56646 - DNA, 3973 bp, Homo sapiens
catgtgaataatgcattgtgctgccacatgaggatagttacagtgtcattaggcaataggaacctttcagcttcattatagccttatgggctataatgttgtatatgcagttgtatatgcagtttgttattgatcgaaacatcgttatgcaatgcatgactgtatataatgccctacaaacagtgtctgcctatattcctctttctagaatcctggaagcctactgatactgaaggtaagaagcagtatgacagggagtttctgctggacttccagttcatgcctgcctgtatacaaaaaccagagggcctgcctcctatcagtgatgtggttcttgacaagatcaaccaacccaaattgccaatgcgaactctggatcctcgaattttgcctcgaggaccagactttacaccagcctttgctgattttggaaggcagacacctggtggaagaggcgtacctttgttgaatgttgggtcacgaagatctcaacctggccaaagaagagaacccagaaagatcatcacagtttctgtaaaagaagatgtacacctgaaaaaggcagaaaatgcctggaagccaagccaaaaacgagacagccaagccgatgatcccgaaaacattaaaacccaggagctttttagaaaagttcgaagtatcttaaataaattgacaccacagatgttcaatcaactgatgaagcaagtgtcaggacttactgttgacacagaggagcggctgaaaggagttattgacctggtctttgagaaggctattgatgaacccagtttctctgtggcttacgcaaacatgtgtcgatgtctagtaacgctgaaagtacccatggcagacaagcctggtaacacagtgaatttccggaagctgctactgaaccgttgccagaaggagtttgaaaaagataaagcagatgatgatgtctttgagaagaagcagaaagaacttgaggctgccagtgctccagaggagaggacaaggcttcatgatgaactggaagaagccaaggacaaagcccggcggagatccattggcaacatcaagtttattggagaactctttaaactcaaaatgctgactgaagccatcatgcatgactgtgtggtgaagctgctaaagaaccatgatgaagaatccctggagtgcctgtgtcgcctgctcaccaccattggcaaagacttggactttgaaaaagcaaagccacgtatggaccagtactttaatcagatggagaaaattgtgaaagaaagaaaaacctcatctaggattcggttcatgcttcaagatgttatagacctaaggctgtgcaattgggtatctcgaagagcagatcaagggcctaaaactatcgaacagattcacaaagaggctaaaatagaagaacaagaagagcaaaggaaggtccagcaactcatgaccaaagagaagagaagaccaggtgtccagagagtggacgaaggtgggtggaacactgtacaaggggccaagaacagtcgggtactggacccctcaaaattcctaaaaatcactaagcctacaattgatgaaaaaattcagctggtacctaaagcacagctaggcagctggggaaaaggcagcagtggtggagcaaaggcaagtgagactgatgccttacggtcaagtgcttccagtttaaacagattctctgccctgcaacctccagcaccctcagggtccacgccatccacgcctgtagagtttgattcccgaaggaccttaactagtcgtggaagtatgggcagggagaagaatgacaagccccttccatctgcaacagctcggccaaatactttcatgaggggtggcagcagtaaagacctgctagacaatcagtctcaagaagagcagcggagagagatgctggagaccgtgaagcagctcacaggaggtgtggatgtggagaggaacagcactgaggctgagcgaaataaaacaagggagtcagcaaaaccagaaatttcagcaatgtcagctcatgacaaggctgcattatcagaagaggaactggagaggaagtcgaaatctatcattgatgaatttctacacattaatgattttaaggaagccatgcagtgtgtggaagagctgaatgcccagggcctactacatgtttttgtgagagtgggagtggagtccaccctggaaaggagccagatcaccagggatcacatgggccaactactctatcagctggtacagtcagaaaaactcagcaaacaggactttttcaaaggtttttcagaaactttggaattggcagatgacatggccattgatattccccatatttggttgtaccttgctgaactggtgacccccatgttaaaagaaggtggaatctccatgagagaacttaccatagaatttagcaaacctttacttcctgttggaagagctggggtcttgctatctgaaatattgcacctactatgcaaacaaatgagccataagaaagtgggagccttatggagggaggctgacctcagctggaaggactttttaccagaaggagaagatgtacataattttcttttggagcagaagttggacttcatagagtctgacagtccctgttcctctgaagcactttcaaagaaagaactgtctgccgaagagctgtataagcgactcgagaaactcattattgaggacaaagcgaatgatgaacagatctttgactgggtagaggctaatctagacgaaatccagatgagttcacctacattccttagagctttaatgactgctgtttgtaaagcagctattatagccgactcttctaccttcagagtggacactgctgttatcaagcagagagtgccgatcttactcaagtacctagactcagatacagagaaggaactgcaagcactttatgcactacaagcatcgatagtaaaacttgatcaacctgccaatttgctgcggatgttttttgattgtctatatgacgaggaggtgatctccgaggatgccttctacaaatgggagagcagcaaggaccctgcagagcagaatgggaagggcgtggctctgaaatctgtcacggcattcttcacgtggctgcgggaagcagaagaggagtctgaggataactaaaacttcaaatacacaaaatgaaacaaaagaaacaatttaagtatttttttaaaaagtttcacgtcttcgccaatcacagtgcagcaaggccaattctcgcagaaacccccacgtgtgcacgagtgggagaggggaaagagaaaaaaaggtgatcatggaggaaaaaggtactggataaaagtaaacttcaaaccttagggcgggagcactaaaaccaaaatacatgtattatttatagaaaatattttctgttttaatcttttctttttaaacaaggactcatacttaaaaaaatgtttagcaaaaaaaaaaaaaagttgagaacttttaatttattttaaggactgcaaatgccagtgtaattttttaatttgcagtttctgtaaacaacttgtataatagaaaagcagagaaataaatttccctccccttcaagatgcacctcatgtttgttttaaggtatagcatttagtccagatttgagaaagtttggggtgaacaaggtaagaaagatttttttttttttggcatcaaatctttctgcctgcctctcagcttgcttcagaaaatttaaaaaatcacaatagtaatcaaaacatacataacattgaaacagaaggaaatgctgtggaccacagaactccaagaattgtttaaaaaaaaaaaagtgctaccctgagaaaagtactcttaatactcttgaaatctttagagcaactttaaggcttgtaaatacatagaacaaatatttaaaaaaacaaaaagaaattgactcagtactatttcttttcactttgaaaatataaagaacaaaataaagacaaacattgcaagttta

SEQ ID NO: 56647 - DNA, 5589 bp, Homo sapiens
agcggggtaacttagcgtgcttatggaaaacctgatggaatagcattgacccagtttacaaagccatctgaagtgcctgagttgtatttgaaggaatattttttcacctttggcttttagcttagaagttatgactgcacattacaaaggggaatgttcaaacctttatcacaatcccacagagtattgatgaggaaactgaagtttggagcgatcacatcattttcccaagaattcctagaggacctgtgcaacaacctcttgaggatcgaatcttcactcccgctgtctcagcagtctacagcacggtaacacaagtggcaagacagccgggaacccctaccccatccccttattcagcacatgaaataaacaaggggcatccaaatcttgcggcaacgcccccgggacatgcatcgtcccctggactctctcaaaccccttatccctctggacagaatgcaggtccaaccacgctggtataccctcaaacccctcagacaatgaattcacaacctcaaacccgttctccgtttgcagcggggcctcgacctccccatcatcagtttttccagaggcctcaaatacagcctcctagagctaccatcccgaacagcagtccttccattcgtcctggtgcacagacacccactgcagtgtaccaggctaatcagcacatcatgatggttaaccatctgcccatgccgtacccagtgccccaggggcctcagtactgtataccacagtaccgtcatagtggccctccttatgttgggcccccccaacaatatccagttcaaccaccggggccaggtcctttttatcctggaccaggacctggggacttccccaatgcttatggaacgcctttttacccaagtcagccggtgtatcagtcagcacctatcatagtgcctacgcagcaacagccgcctccagccaagagagagaaaaaaactataagaattcgggatccaaaccagggaggtaaagacataacagaggagattatgtctggaggtggcagcagaaatcctactccacccataggaagacccacgtccacacctactcctcctcagcagctgcccagccaggtccccgagcacagccctgtggtttatgggactgtggagagcgctcatcttgctgccagcacccctgtcactgcagctagcgaccagaagcaagaggagaagccaaaaccagatccagtgttaaagtctccttccccagtccttaggctagtcctcagtggagagaagaaagaacaagaaggccagacatctgaaactactgcaatagtatccatagcagagcttcctctgcctccatcacctaccactgtttcttctgttgctcgaagtacaattgcagcccccacctcttctgctcttagtagccaaccaatattcaccactgctatagatgacagatgtgaactctcatccccaagagaagacacaattcctatacccagcctcacatcttgcacagaaacatcagaccctttaccaacaaatgaaaatgatgatgatatatgcaagaaaccctgtagtgtagcacctaatgatattccactggtttctagtactaacctaattaatgaaataaatggagttagcgaaaaattatcagccacggagagcattgtggaaatagtaaaacaggaagtattgccattgactcttgaattggagattctcgaaaatcccccagaagaaatgaaactggagtgtatcccagctcccatcaccccttccacagttccttcctttcctccaactcctccaactcctccagcttctcctcctcacactccagtcattgttcctgctgctgccactactgttagttctccgagtgctgccatcacagtccagagagtcctagaggaggacgagagcataagaacttgccttagtgaagatgcaaaagagattcagaacaaaatagaggtagaagcagatgggcaaacagaagagattttggattctcaaaacttaaattcaagaaggagccctgtcccagaaacatcgaatgaatgctgaaattcctagtctggtttcttcagtggtgtgtttgtgttttagtacaacctgcaaaagagttactccattgtctaaaaatgcaaatgagaatttccaaatatacaaaatgcctccaagctcaaatagctataactgtaccaaagacatggaagaaaccaaaagatcggacccgaaccactgaagagatgttagaggcagaattggagcttaaagctgaagaggagctttccattgacaaagtacttgaatctgaacaagataaaatgagccaggggtttcatcctgaaagagacccctctgacctaaaaaaagtgaaagctgtggaagaaaatggagaagaagctgagccagtacgtaatggtgctgagagtgtttctgagggtgaaggaatagatgctaattcaggctccacagatagttctggtgatggggttacatttccatttaaaccagaatcctggaagcctactgatactgaaggtaagaagcagtatgacagggagtttctgctggacttccagttcatgcctgcctgtatacaaaaaccagagggcctgcctcctatcagtgatgtggttcttgacaagatcaaccaacccaaattgccaatgcgaactctggatcctcgaattttgcctcgaggaccagactttacaccagcctttgctgattttggaaggcagacacctggtggaagaggcgtacctttgttgaatgttgggtcacgaagatctcaacctggccaaagaagagaacccagaaagatcatcacagtttctgtaaaagaagatgtacacctgaaaaaggcagaaaatgcctggaagccaagccaaaaacgagacagccaagccgatgatcccgaaaacattaaaacccaggagctttttagaaaagttcgaagtatcttaaataaattgacaccacagatgttcaatcaactgatgaagcaagtgtcaggacttactgttgacacagaggagcggctgaaaggagttattgacctggtctttgagaaggctattgatgaacccagtttctctgtggcttacgcaaacatgtgtcgatgtctagtaacgctgaaagtacccatggcagacaagcctggtaacacagtgaatttccggaagctgctactgaaccgttgccagaaggagtttgaaaaagataaagcagatgatgatgtctttgagaagaagcagaaagaacttgaggctgccagtgctccagaggagaggacaaggcttcatgatgaactggaagaagccaaggacaaagcccggcggagatccattggcaacatcaagtttattggagaactctttaaactcaaaatgctgactgaagccatcatgcatgactgtgtggtgaagctgctaaagaaccatgatgaagaatccctggagtgcctgtgtcgcctgctcaccaccattggcaaagacttggactttgaaaaagcaaagccacgtatggaccagtactttaatcagatggagaaaattgtgaaagaaagaaaaacctcatctaggattcggttcatgcttcaagatgttatagacctaaggctgtgcaattgggtatctcgaagagcagatcaagggcctaaaactatcgaacagattcacaaagaggctaaaatagaagaacaagaagagcaaaggaaggtccagcaactcatgaccaaagagaagagaagaccaggtgtccagagagtggacgaaggtgggtggaacactgtacaaggggccaagaacagtcgggtactggacccctcaaaattcctaaaaatcactaagcctacaattgatgaaaaaattcagctggtacctaaagcacagctaggcagctggggaaaaggcagcagtggtggagcaaaggcaagtgagactgatgccttacggtcaagtgcttccagtttaaacagattctctgccctgcaacctccagcaccctcagggtccacgccatccacgcctgtagagtttgattcccgaaggaccttaactagtcgtggaagtatgggcagggagaagaatgacaagccccttccatctgcaacagctcggccaaatactttcatgaggggtggcagcagtaaagacctgctagacaatcagtctcaagaagagcagcggagagagatgctggagaccgtgaagcagctcacaggaggtgtggatgtggagaggaacagcactgaggctgagcgaaataaaacaagggagtcagcaaaaccagaaatttcagcaatgtcagctcatgacaaggctgcattatcagaagaggaactggagaggaagtcgaaatctatcattgatgaatttctacacattaatgattttaaggaagccatgcagtgtgtggaagagctgaatgcccagggcctactacatgtttttgtgagagtgggagtggagtccaccctggaaaggagccagatcaccagggatcacatgggccaactactctatcagctggtacagtcagaaaaactcagcaaacaggactttttcaaaggtttttcagaaactttggaattggcagatgacatggccattgatattccccatatttggttgtaccttgctgaactggtgacccccatgttaaaagaaggtggaatctccatgagagaacttaccatagaatttagcaaacctttacttcctgttggaagagctggggtcttgctatctgaaatattgcacctactatgcaaacaaatgagccataagaaagtgggagccttatggagggaggctgacctcagctggaaggactttttaccagaaggagaagatgtacataattttcttttggagcagaagttggacttcatagagtctgacagtccctgttcctctgaagcactttcaaagaaagaactgtctgccgaagagctgtataagcgactcgagaaactcattattgaggacaaagcgaatgatgaacagatctttgactgggtagaggctaatctagacgaaatccagatgagttcacctacattccttagagctttaatgactgctgtttgtaaagcagctattatagccgactcttctaccttcagagtggacactgctgttatcaagcagagagtgccgatcttactcaagtacctagactcagatacagagaaggaactgcaagcactttatgcactacaagcatcgatagtaaaacttgatcaacctgccaatttgctgcggatgttttttgattgtctatatgacgaggaggtgatctccgaggatgccttctacaaatgggagagcagcaaggaccctgcagagcagaatgggaagggcgtggctctgaaatctgtcacggcattcttcacgtggctgcgggaagcagaagaggagtctgaggataactaaaacttcaaatacacaaaatgaaacaaaagaaacaatttaagtatttttttaaaaagtttcacgtcttcgccaatcacagtgcagcaaggccaattctcgcagaaacccccacgtgtgcacgaatgttcaggtactgagctcgaagttgtatcatgtaa

SEQ ID NO: 56648 - DNA, 2054 bp, Homo sapiens
tctagaggatcccggtattctacaagattatgattttaagtgtaatcatcatctgctttccacatataaaaatcaccttggttatctatagttcaatcttctaaagccttcaggcctctgaaattcttcaaaattcagaagaagtagaaggaagtttttgatgatgagtgaggtggaggaagccatgcagtgtgtggaagagctgaatgcccagggcctactacatgtttttgtgagagtgggagtggagtccaccctggaaaggagccagatcaccagggatcacatgggccaactactctatcagctggtacagtcagaaaaactcagcaaacaggactttttcaaaggtttttcagaaactttggaattggcagatgacatggccattgatattccccatatttggttgtaccttgctgaactggtgacccccatgttaaaagaaggtggaatctccatgagagaacttaccatagaatttagcaaacctttacttcctgttggaagagctggggtcttgctatctgaaatattgcacctactatgcaaacaaatgagccataagaaagtgggagccttatggagggaggctgacctcagctggaaggactttttaccagaaggagaagatgtacataattttcttttggagcagaagttggacttcatagagtctgacagtccctgttcctctgaagcactttcaaagaaagaactgtctgccgaagagctgtataagcgactcgagaaactcattattgaggacaaagcgaatgatgaacagatctttgactgggtagaggctaatctagacgaaatccagatgagttcacctacattccttagagctttaatgactgctgtttgtaaagcagctattatagccgactcttctaccttcagagtggacactgctgttatcaagcagagagtgccgatcttactcaagtacctagactcagatacagagaaggaactgcaagcactttatgcactacaagcatcgatagtaaaacttgatcaacctgccaatttgctgcggatgttttttgattgtctatatgacgaggaggtgatctccgaggatgccttctacaaatgggagagcagcaaggaccctgcagagcagaatgggaagggcgtggctctgaaatctgtcacggcattcttcacgtggctgcgggaagcagaagaggagtctgaggataactaaaacttcaaatacacaaaatgaaacaaaagaaacaatttaagtatttttttaaaaagtttcacgtcttcgccaatcacagtgcagcaaggccaattctcgcagaaacccccacgtgtgcacgagtgggagaggggaaagagaaaaaaaggtgatcatggaggaaaaaggtactggataaaagtaaacttcaaaccttagggcgggagcactaaaaccaaaatacatgtattatttatagaaaatattttctgttttaatcttttctttttaaacaaggactcatacttaaaaaaatgtttagcaaaaaaaaaaaaaagttgagaacttttaatttattttaaggactgcaaatgccagtgtaattttttaatttgcagtttctgtaaacaacttgtataatagaaaagcagagaaataaatttccctccccttcaagatgcacctcatgtttgttttaaggtatagcatttagtccagatttgagaaagtttggggtgaacaaggtaagaaagatttttttttttttggcatcaaatctttctgcctgcctctcagcttgcttcagaaaatttaaaaaatcacaatagtaatcaaaacatacataacattgaaacagaaggaaatgctgtggaccacagaactccaagaattgtttaaaaaaaaaaaagtgctaccctgagaaaagtactcttaatactcttgaaatctttagagcaactttaaggcttgtaaatacatagaacaaatatttaaaaaaacaaaaagaaattgactcagtactatttcttttcactttgaaaatataaagaacaaaataaagacaaacattgcaagttta

SEQ ID NO: 56649 - DNA, 5403 bp, Homo sapiens
agcggggtaacttagcgtgcttatggaaaacctgatggaatagcattgacccagtttacaaagccatctgaagtgcctgagttgtatttgaaggaatattttttcacctttggcttttagcttagaagttatgactgcacattacaaaggggaatgttcaaacctttatcacaatcccacagagtattgatgaggaaactgaagtttggagcgatcacatcattttcccaagaattcctagaggacctgtgcaacaacctcttgaggatcgaatcttcactcccgctgtctcagcagtctacagcacggtaacacaagtggcaagacagccgggaacccctaccccatccccttattcagcacatgaaataaacaaggggcatccaaatcttgcggcaacgcccccgggacatgcatcgtcccctggactctctcaaaccccttatccctctggacagaatgcaggtccaaccacgctggtataccctcaaacccctcagacaatgaattcacaacctcaaacccgttctccgtttgcagcggggcctcgacctccccatcatcagtttttccagaggcctcaaatacagcctcctagagctaccatcccgaacagcagtccttccattcgtcctggtgcacagacacccactgcagtgtaccaggctaatcagcacatcatgatggttaaccatctgcccatgccgtacccagtgccccaggggcctcagtactgtataccacagtaccgtcatagtggccctccttatgttgggcccccccaacaatatccagttcaaccaccggggccaggtcctttttatcctggaccaggacctggggacttccccaatgcttatggaacgcctttttacccaagtcagccggtgtatcagtcagcacctatcatagtgcctacgcagcaacagccgcctccagccaagagagagaaaaaaactataagaattcgggatccaaaccagggaggtaaagacataacagaggagattatgtctggaggtggcagcagaaatcctactccacccataggaagacccacgtccacacctactcctcctcagcagctgcccagccaggtccccgagcacagccctgtggtttatgggactgtggagagcgctcatcttgctgccagcacccctgtcactgcagctagcgaccagaagcaagaggagaagccaaaaccagatccagtgttaaagtctccttccccagtccttaggctagtcctcagtggagagaagaaagaacaagaaggccagacatctgaaactactgcaatagtatccatagcagagcttcctctgcctccatcacctaccactgtttcttctgttgctcgaagtacaattgcagcccccacctcttctgctcttagtagccaaccaatattcaccactgctatagatgacagatgtgaactctcatccccaagagaagacacaattcctatacccagcctcacatcttgcacagaaacatcagaccctttaccaacaaatgaaaatgatgatgatatatgcaagaaaccctgtagtgtagcacctaatgatattccactggtttctagtactaacctaattaatgaaataaatggagttagcgaaaaattatcagccacggagagcattgtggaaatagtaaaacaggaagtattgccattgactcttgaattggagattctcgaaaatcccccagaagaaatgaaactggagtgtatcccagctcccatcaccccttccacagttccttcctttcctccaactcctccaactcctccagcttctcctcctcacactccagtcattgttcctgctgctgccactactgttagttctccgagtgctgccatcacagtccagagagtcctagaggaggacgagagcataagaacttgccttagtgaagatgcaaaagagattcagaacaaaatagaggtagaagcagatgggcaaacagaagagattttggattctcaaaacttaaattcaagaaggagccctgtcccagaaacatcgaatgaatgctgaaattcctagtctggtttcttcagtggtgtgtttgtgttttagtacaacctgcaaaagagttactccattgtctaaaaatgcaaatgagaatttccaaatatacaaaatgcctccaagctcaaatagctataactgtaccaaagacatggaagaaaccaaaagatcggacccgaaccactgaagagatgttagaggcagaattggagcttaaagctgaagaggagctttccattgacaaagtacttgaatctgaacaagataaaatgagccaggggtttcatcctgaaagagacccctctgacctaaaaaaagtgaaagctgtggaagaaaatggagaagaagctgagccagtacgtaatggtgctgagagtgtttctgagggtgaaggaatagatgctaattcaggctccacagatagttctggtgatggggttacatttccatttaaaccagaatcctggaagcctactgatactgaaggtaagaagcagtatgacagggagtttctgctggacttccagttcatgcctgcctgtatacaaaaaccagagggcctgcctcctatcagtgatgtggttcttgacaagatcaaccaacccaaattgccaatgcgaactctggatcctcgaattttgcctcgaggaccagactttacaccagcctttgctgattttggaaggcagacacctggtggaagaggcgtacctttgttgaatgttgggtcacgaagatctcaacctggccaaagaagagaacccagaaagatcatcacagtttctgtaaaagaagatgtacacctgaaaaaggcagaaaatgcctggaagccaagccaaaaacgagacagccaagccgatgatcccgaaaacattaaaacccaggagctttttagaaaagttcgaagtatcttaaataaattgacaccacagatgttcaatcaactgatgaagcaagtgtcaggacttactgttgacacagaggagcggctgaaaggagttattgacctggtctttgagaaggctattgatgaacccagtttctctgtggcttacgcaaacatgtgtcgatgtctagtaacgctgaaagtacccatggcagacaagcctggtaacacagtgaatttccggaagctgctactgaaccgttgccagaaggagtttgaaaaagataaagcagatgatgatgtctttgagaagaagcagaaagaacttgaggctgccagtgctccagaggagaggacaaggcttcatgatgaactggaagaagccaaggacaaagcccggcggagatccattggcaacatcaagtttattggagaactctttaaactcaaaatgctgactgaagccatcatgcatgactgtgtggtgaagctgctaaagaaccatgatgaagaatccctggagtgcctgtgtcgcctgctcaccaccattggcaaagacttggactttgaaaaagcaaagccacgtatggaccagtactttaatcagatggagaaaattgtgaaagaaagaaaaacctcatctaggattcggttcatgcttcaagatgttatagacctaaggctgtgcaattgggtatctcgaagagcagatcaagggcctaaaactatcgaacagattcacaaagaggctaaaatagaagaacaagaagagcaaaggaaggtccagcaactcatgaccaaagagaagagaagaccaggtgtccagagagtggacgaaggtgggtggaacactgtacaaggggccaagaacagtcgggtactggacccctcaaaattcctaaaaatcactaagcctacaattgatgaaaaaattcagctggtacctaaagcacagctaggcagctggggaaaaggcagcagtggtggagcaaaggcaagtgagactgatgccttacggtcaagtgcttccagtttaaacagattctctgccctgcaacctccagcaccctcagggtccacgccatccacgcctgtagagtttgattcccgaaggaccttaactagtcgtggaagtatgggcagggagaagaatgacaagccccttccatctgcaacagctcggccaaatactttcatgaggggtggcagcagtaaagacctgctagacaatcagtctcaagaagagcagcggagagagatgctggagaccgtgaagcagctcacaggaggtgtggatgtggagaggaacagcactgaggctgagcgaaataaaacaagggagtcagcaaaaccagaaatttcagcaatgtcagctcatgacaaggctgcattatcagaagaggaactggagaggaagtcgaaatctatcattgatgaatttctacacattaatgattttaaggaagccatgcagtgtgtggaagagctgaatgcccagggcctactacatgtttttgtgagagtgggagtggagtccaccctggaaaggagccagatcaccagggatcacatgggccaactactctatcagctggtacagtcagaaaaactcagcaaacaggactttttcaaaggtttttcagaaactttggaattggcagatgacatggccattgatattccccatatttggttgtaccttgctgaactggtgacccccatgttaaaagaaggtggaatctccatgagagaacttaccatagaatttagcaaacctttacttcctgttggaagagctggggtcttgctatctgaaatattgcacctactatgcaaacaaatgagccataagaaagtgggagccttatggagggaggctgacctcagctggaaggactttttaccagaaggagaagatgtacataattttcttttggagcagaagttggacttcatagagtctgacagtccctgttcctctgaagcactttcaaagaaagaactgtctgccgaagagctgtataagcgactcgagaaactcattattgaggacaaagcgaatgatgaacagatctttgactgggtagaggctaatctagacgaaatccagatgagttcacctacattccttagagctttaatgactgctgtttgtaaagcagctattataggtaagtaacatttctgaaggcagctcataacatctgaaatccccattatgtcaactactaagtatacagtttgattttacattgttttcaaaacttctcctatgtagctcacttttctgtgcactgtcctttctgtctgtgatgcctggttgtctcaagcgtggagacaaatagctgctccgcctacagagaacccagatctaaccagctaccacatgccttgcatgctccttgggttgtttttcactacgttgcgtgtagctttttctttatcttttcacttctaacattcagggccgcc

SEQ ID NO: 56650 - DNA, 3162 bp, Homo sapiens
agcggggtaacttagcgtgcttatggaaaacctgatggaatagcattgacccagtttacaaagccatctgaagtgcctgagttgtatttgaaggaatattttttcacctttggcttttagcttagaagttatgactgcacattacaaaggggaatgttcaaacctttatcacaatcccacagagtattgatgaggaaactgaagtttggagcgatcacatcattttcccaagaattcctagaggacctgtgcaacaacctcttgaggatcgaatcttcactcccgctgtctcagcagtctacagcacggtaacacaagtggcaagacagccgggaacccctaccccatccccttattcagcacatgaaataaacaaggggcatccaaatcttgcggcaacgcccccgggacatgcatcgtcccctggactctctcaaaccccttatccctctggacagaatgcaggtccaaccacgctggtataccctcaaacccctcagacaatgaattcacaacctcaaacccgttctccgtttgcagcggggcctcgacctccccatcatcagtttttccagaggcctcaaatacagcctcctagagctaccatcccgaacagcagtccttccattcgtcctggtgcacagacacccactgcagtgtaccaggctaatcagcacatcatgatggttaaccatctgcccatgccgtacccagtgccccaggggcctcagtactgtataccacagtaccgtcatagtggccctccttatgttgggcccccccaacaatatccagttcaaccaccggggccaggtcctttttatcctggaccaggacctggggacttccccaatgcttatggaacgcctttttacccaagtcagccggtgtatcagtcagcacctatcatagtgcctacgcagcaacagccgcctccagccaagagagagaaaaaaactataagaattcgggatccaaaccagggaggtaaagacataacagaggagattatgtctggaggtggcagcagaaatcctactccacccataggaagacccacgtccacacctactcctcctcagcagctgcccagccaggtccccgagcacagccctgtggtttatgggactgtggagagcgctcatcttgctgccagcacccctgtcactgcagctagcgaccagaagcaagaggagaagccaaaaccagatccagtgttaaagtctccttccccagtccttaggctagtcctcagtggagagaagaaagaacaagaaggccagacatctgaaactactgcaatagtatccatagcagagcttcctctgcctccatcacctaccactgtttcttctgttgctcgaagtacaattgcagcccccacctcttctgctcttagtagccaaccaatattcaccactgctatagatgacagatgtgaactctcatccccaagagaagacacaattcctatacccagcctcacatcttgcacagaaacatcagaccctttaccaacaaatgaaaatgatgatgatatatgcaagaaaccctgtagtgtagcacctaatgatattccactggtttctagtactaacctaattaatgaaataaatggagttagcgaaaaattatcagccacggagagcattgtggaaatagtaaaacaggaagtattgccattgactcttgaattggagattctcgaaaatcccccagaagaaatgaaactggagtgtatcccagctcccatcaccccttccacagttccttcctttcctccaactcctccaactcctccagcttctcctcctcacactccagtcattgttcctgctgctgccactactgttagttctccgagtgctgccatcacagtccagagagtcctagaggaggacgagagcataagaacttgccttagtgaagatgcaaaagagattcagaacaaaatagaggtagaagcagatgggcaaacagaagagattttggattctcaaaacttaaattcaagaaggagccctgtcccagaaacatcgaatgaatgctgaaattcctagtctggtttcttcagtggtgtgtttgtgttttagtacaacctgcaaaagagttactccattgtctaaaaatgcaaatgagaatttccaaatatacaaaatgcctccaagctcaaatagctataactgtaccaaagacatggaagaaaccaaaagatcggacccgaaccactgaagagatgttagaggcagaattggagcttaaagctgaagaggagctttccattgacaaagtacttgaatctgaacaagataaaatgagccaggggtttcatcctgaaagagacccctctgacctaaaaaaagtgaaagctgtggaagaaaatggagaagaagctgagccagtacgtaatggtgctgagagtgtttctgagggtgaaggaatagatgctaattcaggctccacagatagttctggtgatggggttacatttccatttaaaccagaatcctggaagcctactgatactgaaggtaagaagcagtatgacagggagtttctgctggacttccagttcatgcctgcctgtatacaaaaaccagagggcctgcctcctatcagtgatgtggttcttgacaagatcaaccaacccaaattgccaatgcgaactctggatcctcgaattttgcctcgaggaccagactttacaccagcctttgctgattttggaaggcagacacctggtggaagaggcgtacctgtaagtgcaagttccctacaactcacttagttagacactggcacagactccatgaaatcctacctcatggcaagacagcagcttttattcgttgattctagtcaagaagaagaagaagaggcaaagactatcctttccatactcatattaaagcagataaagaatacacttgagttctttttacttggcagaagctagtctgcattaatttggtcttgattttttttttccctattttttcaattgaggtgacctgcaaataggtttaaaaatagtgccaaccatggccagggatggtggctcaggtctgtaatgctagcactttgtggggtcaaggcaggaggatcacttgaggtcaggagttcaaggtcagcctgacaacaaagagagaccctgtctctacc

SEQ ID NO: 56651 - DNA, 2402 bp, Homo sapiens
agcggggtaacttagcgtgcttatggaaaacctgatggaatagcattgacccagtttacaaagccatctgaagtgcctgagttgtatttgaaggaatattttttcacctttggcttttagcttagaagttatgactgcacattacaaaggggaatgttcaaacctttatcacaatcccacagagtattgatgaggaaactgaagtttggagcgatcacatcattttcccaagaattcctagaggacctgtgcaacaacctcttgaggatcgaatcttcactcccgctgtctcagcagtctacagcacggtaacacaagtggcaagacagccgggaacccctaccccatccccttattcagcacatgaaataaacaaggggcatccaaatcttgcggcaacgcccccgggacatgcatcgtcccctggactctctcaaaccccttatccctctggacagaatgcaggtccaaccacgctggtataccctcaaacccctcagacaatgaattcacaacctcaaacccgttctccgtttgcagcggggcctcgacctccccatcatcagtttttccagaggcctcaaatacagcctcctagagctaccatcccgaacagcagtccttccattcgtcctggtgcacagacacccactgcagtgtaccaggctaatcagcacatcatgatggttaaccatctgcccatgccgtacccagtgccccaggggcctcagtactgtataccacagtaccgtcatagtggccctccttatgttgggcccccccaacaatatccagttcaaccaccggggccaggtcctttttatcctggaccaggacctggggacttccccaatgcttatggaacgcctttttacccaagtcagccggtgtatcagtcagcacctatcatagtgcctacgcagcaacagccgcctccagccaagagagagaaaaaaactataagaattcgggatccaaaccagggaggtaaagacataacagaggagattatgtctggaggtggcagcagaaatcctactccacccataggaagacccacgtccacacctactcctcctcagcagctgcccagccaggtccccgagcacagccctgtggtttatgggactgtggagagcgctcatcttgctgccagcacccctgtcactgcagctagcgaccagaagcaagaggagaagccaaaaccagatccagtgttaaagtctccttccccagtccttaggctagtcctcagtggagagaagaaagaacaagaaggccagacatctgaaactactgcaatagtatccatagcagagcttcctctgcctccatcacctaccactgtttcttctgttgctcgaagtacaattgcagcccccacctcttctgctcttagtagccaaccaatattcaccactgctatagatgacagatgtgaactctcatccccaagagaagacacaattcctatacccagcctcacatcttgcacagaaacatcagaccctttaccaacaaatgaaaatgatgatgatatatgcaagaaaccctgtagtgtagcacctaatgatattccactggtttctagtactaacctaattaatgaaataaatggagttagcgaaaaattatcagccacggagagcattgtggaaatagtaaaacaggaagtattgccattgactcttgaattggagattctcgaaaatcccccagaagaaatgaaactggagtgtatcccagctcccatcaccccttccacagttccttcctttcctccaactcctccaactcctccagcttctcctcctcacactccagtcattgttcctgctgctgccactactgttagttctccgagtgctgccatcacagtccagagagtcctagaggaggacgagagcataagaacttgccttagtgaagatgcaaaagagattcagaacaaaatagaggtagaagcagatgggcaaacagaagagattttggattctcaaaacttaaattcaagaaggagccctgtcccagaaacatcgaatgaatgctgaaattcctagtctggtttcttcagtggtgtgtttgtgttttagtacaacctgcaaaagagttactccattgtctaaaaatgcaaatgagaatttccaaatatacaaaatgcctccaagcttgtattaagagcccaaatgttccctttgaactctgctaatacacagaagagttggatatcatgatctttgccctgaggaatttatcttccaaagaaaggaagctcaaggagttgataccttctgaaatgtttttaataaaatctgggacatgagatggtggaaaatcccttaggataggccgtttgcatgtataatgttgattaaaagtttttgtacccattatgtcattta

SEQ ID NO: 56652 - DNA, 504 bp, Homo sapiens
ggcggcggcggcagcggtcccccctcctcacccgaacatcagggccctccagactcaggcgccccaacaaattcctagaggacctgtgcaacaacctcttgaggatcgaatcttcactcccgctgtctcagcagtctacagcacggtaacacaagtggcaagacagccgggaacccctaccccatccccttattcagcacatgaaataaacaaggggcatccaaatcttgcggcaacgcccccgggacatgcatcgtcccctggactctctcaaaatgcaggtccaaccacgctggtataccctcaaacccctcagacaatgaattcacaacctcaaacccgttctccggtaagtaagcagaagcttgaaccaaattacattctctacctgtgtttgtgtgtgtagtggcttgggtttctttggcaaatatttttactggattttggaagtttgttccaaagatgatttattattatgactcaggtggtgggggtccgagctaa

SEQ ID NO: 56653 - DNA, 261 bp, Homo sapiens
ctgagaaagaagtcaatggtataatacaaataatacatgaaataccaatttaccactcttaagaaattcatgtagtgtgtacatgaggtcatactgaagaatttattccaatcagactgaaataatgcactttatttatccagaagccatctgaaaatttcaactatctagacaaagccctctgggtgattttgatatgcactaaagtttgaaaattaagaatcatgaatctaaaacaaagtcagattagaatataagcaa

SEQ ID NO: 56654 - DNA, 352 bp, Homo sapiens
gaaaatccctgccctctcctggaaaactcataaaccaccccttgtttagcatataatcaagaaataactgtaagtatactcagttgagcagcccacagcactgctgcctatagagtagccattcttttattcctttactttgttaataaatttgcttccactttactgtgtggacacgccctgaattctttcttgcatgaggtccaagaaccttcctttggggtccggattgggacccctttcaggtaacagttacattatcatttatattaactcattatttaatacatcagtaaataaataatttttaaaccatgtgggacattgactgtaacttgcaaacattttagtt

SEQ ID NO: 56655 - DNA, 275 bp, Homo sapiens
gtgagggtttctgagttttctatgataatggcagctaagggcctcctgatttctttttctttcactgaggaagttgtggctgaggggatttcttttggcactggatttggcttgcaggcccactcgcagtttggtgtggcactagtgtctgatgagtggtgcccatggagcagccatggagctgaggcctgaagcacaggcacaaaaggaaggaatatggctctgggctctggggtgtaatggcactagtgtccagtgtgcaggcactctcactg

SEQ ID NO: 56656 - DNA, 276 bp, Homo sapiens
cgggggtgacagagtgagaccctatctcaaataaaaataaaaatagaatacaaggggggataaagatagacttaaaatacgctctctagaaaaaagtaagaaatatggaaagaaatctaatttagaaaaatgcacgcacccacaggcacgcttcacaggactggcaggtggagaggatgtttgttaacagggctggctattttactttaagtgctgcaaacattgcactaatgtttgggtctttgcttttggcaatcacttctcttgttaattttt

SEQ ID NO: 56657 - DNA, 378 bp, Homo sapiens
gcctctgcttccctggcaagctcagtctggataggacaagcttttggttttctcactacgctgcttgcaaagctgaaatcaaccaatggccgcatgtatgtggtcaggacctcctccagggcatccttagtgttaacatagatgagtctcttctgggtgggattgggttcctaagtacacacctggccccaagctcagtagggacaacccaattgtcagttctctctcatattatctacttaattgcaatctcaaaaaggaaaggacgagtgaatcctgcccaccagatgctccaggcatgcgatcgcatcccaagtatactcgttgtctttgctgctttttcttcttctccattagtaaccgaccagtgttttcctg

SEQ ID NO: 56658 - DNA, 324 bp, Homo sapiens
aaggctgatcaggcgtctgccccacccagggcgggtaaggtctgcaagcccccttacccaggggacctggggctgctggagtctcccatccagccacctccctcgactctagtgtggccaggaagctacagcctgccaggttttgggtggacctggttggtgtgggatgaccccctaagcccaaacaggtgtggtatgtggggtgcgtggtggtgggtcacactgcccacagccatcttcacagactccaagggtggcagcaccaggctgtgtccagggaggccagccacaggccagacaggcagcctctggacatgcagacag

SEQ ID NO: 56659 - DNA, 291 bp, Homo sapiens
catttattagcttctagttttaattgtttcccgacttctttccagatatttatctaggaagaaatgtcagttctcactgtgccgcgcagacacaaggggcgggtgcagactgcagaattttaagggctcttctgggcagcaggcaggagggctgtgtcagctcagtctagcaggtgttggctgagcacctactatgtgtcagatggtgttgggtggtgaagggtgacaggaatgactgggacgaggctcccactctgtaggggcctgttatccttgggggtggggtgctag

SEQ ID NO: 56660 - DNA, 186 bp, Homo sapiens
  misc_feature (2)..(3): n is a, c, g, or t
  misc_feature (137)..(137): n is a, c, g, or t
tnnctgaaacaaaagatacaccagaatgtaaaacccaggagggcagagactgttttcccagaacctagaacaactcctggcacataccagatgtaaaatcattgtagaaagaaagaaagaaagaatgaaagaaaggnaggaaggaaggaaggcatgaaacggtgcactattattgtatgccacctt

SEQ ID NO: 56661 - DNA, 375 bp, Homo sapiens
gttagcgcactcaacaggattagaacaatcagtaatggcttacaatataatttttttctaaccaaagggtttaatgcattcattttagttagaatgaaaataattgaggccgggtgcagtggctcacgcctgtaatcccagcactttgcgaggccgaggtgggcggatcacgaggtcaggagatcgagaccatcccgtcagaaatgctatagcagtggaggcacggtggctcacgcctgcaatcccagcactttgggaggccgagatcgcgccactgcgctccaggctgggtgacaaagcgcgactctgtctcaaaaattaaaaaaattacatttttacaaagttaaaaggaatactcagcagccagtggccagt

SEQ ID NO: 56662 - DNA, 252 bp, Homo sapiens
acttttggattagccaaagttttaaggtaaaataaagctaagaggaaaagaaaagatctagggacaaagacaagtagcaagaagtatttaaaaggaaattcaacaaatataaggggacatcaaaaaatttgtgggaaaatggaattaaaaggtaaaaataaaaactataaactttgtttctcaacataaactttatcaagttcaacatattttgtaatcaatgataccagccatttagtccattcctaaagg

SEQ ID NO: 56663 - DNA, 475 bp, Homo sapiens
ttgattttaatgacagggtaattcaagttgtttgataaatttattactatattgtaagagagatctttgaccatttttcttcctttttcttggacatcactttcttccctccccttctctcttttatgtttttatccttgttaaattttatgtttacgttaccatctttcttatactttcccctgatttttctcttttaattcctctttcattctctgcctcttctctttcagctctttctctaattgtgcctattccttgttcataagaagtggagctgttagtggtagaaccactgctcatggttctaccactacaaagtggaaagtagaaatactttgcactttggccactgttgcgtttttgccaaggtaaagttcccctgccattttgaaatagctgaacaagttaaagtaatatgttccaaaaactggaagtgccataaaaaactaaaaataaaaaaaaattgtgacta

SEQ ID NO: 56664 - DNA, 265 bp, Homo sapiens
ttttaaatgagcaaaattaagtttccaaagcaatatgttgcttgtggaaccacagagaaactgttatttatagtgctgatagtcttacaaattagttcaatattttttagaaaagcataaaaattgttcctgaaattatatttagggaatgttatggaaggagaatgatcactctacaaagatactctttgtaacattatgtataatagtgacagattaaaaattaaatgtttaatagtatgctttgatggattatattttatga

SEQ ID NO: 56665 - DNA, 660 bp, Homo sapiens
taggaaaggtattacttttgtttttaaatgcctttcctacactgtgattcttatattgccatctgtcacttgctacataagtaactatttttttccacttaggcatttaatgcatattcatgtttctctgtcctgcttttgagacacttgtcagattagtcccttaggtgtctttatgcagaacactgtttcaagtcgattcggcaatcatatcatcatcctcaaaatcagtacacccatgaacatatttggtttgtacaaggtattttataataagctcagataaaatgtttaaatatatggtggttcatgtagtcatagacaatattaatgagatagagaaaagagattgggtaaattatactttttaaaacagttttaccaattcagatgcagttcacttgggctgtgtggagtttgacttatgtttatggaaagaatgagaaagaaaagatcaaaacctggtataaaaaagagtagtggagaacaagataaaatgaaagtgatagcaaggcttgtaaggtccttatctacagtctggcagtctctttacaggggcctttcaaagcatagttggcttcataaaaattacgtgactacatttagcactatgtgaataagaagagggcaggcttggaggcacttcagatagaatgtgaa

SEQ ID NO: 56666 - DNA, 339 bp, Homo sapiens
gaaaccacaacacaaccagtaccaaatataccaaaaggaactattattttcacctcagtttacaggaagaagaaaatagagaatggattttgttttacctctaatatacacgtttgcttagggtaaagaagtagctttttgcttcccaccatggttaccttctgaggaaggtgataatttccttcttagactggttgttgacactacaataacttctaggtaggagggaagttataaaaataatatgaaattaaataaagaacaataaattaaaagacaagggagggaaatgggaaagcactgaaaaagccatagtgaatgaaaatgacttccaataaa

SEQ ID NO: 56667 - DNA, 500 bp, Homo sapiens
aagtgctgacccaagacagaggccttctaggctgctgaggagaccagtgatgaggacggccccagggtaccggccacctgcttggggaagccaggcaaggttccaaatcgggcctccagcgctgtctcacaaggcacccggccaagggcagaggctgtggggagcccagggcaggcaggggcccctggactgatgaaagccaagggtgtcctgactggaagtttatcacacaccaggtgccgcgctgggcatgactgcatcatctcacagcagtctctgctttaacagacgaggaaacagaggcccaaaagactgacttgcccaggatcacaggggaggcagggtcctcccagaccacccaccacctgcgctgctgagccacacacagttgctacatgacattctctgtgaggcttttttttggggacaggatctcactatgttgtccagactggtcttgaactcctgggcttgagcgatcctcctgcctcagcctccca

SEQ ID NO: 56668 - DNA, 223 bp, Homo sapiens
aaccttgtttgagtgaattagccttgtactctataatgaaacgaggaatcattgagagatacttaggcaacggattttaaatgagtgaataaggaagggaaaaacttcaggaaaatgcagaaaaaagcagcggagattttggaaaaaaaattctaaagcactttctaacgcaaacacattcgattttttatagctaaacaggataacagatcagtctattaag

SEQ ID NO: 56669 - DNA, 826 bp, Homo sapiens
gcaggctggtacaggccagaggtgttaggatccgagcagcgcggcggcggcagggagttgggttggggtgggcatttgatgcgggaggtgggtggtgtgcttgctagctgggcaagaaagcagcagtggacctgccccaaggccacacgtgcctggtcaggctggcttctgatgttcagtcccctgggccgggacagattttttttaacgtcttgaaacttaaactctgtgcttgtaggatactgtaacctttttgtctttttttttttttttttttttaaacctccacctccaggtggctgtgacgtggctcccagggattatacgttatgggtggctgggggctctgggcgggcctggagccagaagggcgacttattttttctctccttatgccaccccagggtggggagggagggaggtttcagactccagtttctccctttgcccttttattcccaagcctccttggccccagtataagtgtggggaactctctgccagcttcctgagttctgcctaaagatggccccccagcactggttggggacaagggccaaattggtgaccaccagtcatgcctaggacctggggcccaaaagccgggcaacctctggctacaggggccattgggtgccctcccagttgagaggggccgctgtttcgccttgtccgtcagtgccagtgcctgtgccagaggtggcgaggtgagtcctccagagcttcctggccgggccctcctcctgcctgttctggctcctctgctcccacgctagctgtcccttttctgattctggtggatcctccctcccctaattaaagtctc

SEQ ID NO: 56670 - DNA, 1178 bp, Homo sapiens
gcacagcccggggcgggaggcggagcttggcggccgagatctccgcgctgcagttagccccgccgagcgccaggagctgcggactgccactctccgcccctacctgagtgccgtgcgggccacattgcaggctgccctctgcctggagaacttctcctcccaggttgtggaacgacacaacaagccggaagtggaagtcaggagtagcaaagagctcctgttacaacctgtgaccatcagcaggaatgagaaggaaaaggttctgattgagggctccatcaactctgtccgggtcagcattgctgtgaaacaggctgatgagatcgagaagattttgtgccacaagttcatgcgcttcatgatgatgcgagcagagaacttctttatccttcgaaggaagcctgtggagcagaagaagatctttacaatccaaggctgctacccggtgatccggtgtctcttgcgccggaggggctgggtggagaagaagatggtccatcgctccaggccccaccctgctgccaccccagaaggatctggatagctcagcgatgggtgacagtgacaccactgaggatgaggatgaagatgaggacgaggagttccagccagtcacaagctgttcggacttcgatgatctcactcgaacactcgatgacctacgctggaacacatgcctctgacatggtgggtctatgctctcaatctccggacttcggcccgtggatttgcataaggttgattgccaactcccttcctccccacgactgctatggcgctggcggggctgagcgatgacaacagcagccttcacttaggacgacacagcgggccaggaaacaggacgcacaacaccagagtcgagggtccccgaataagacgcgagcacgcccgggaggcgtgcgaagaacgcacctacacaaccggcaccaaagggaaacgacaacgacccgcagagaccgagaacagaccccgaaggctgtccactcacccaacgagtagaaaaagtgcccagagggcaaaccagagcgcgcgcacacacgcgcagaagcacccggcacacaagggacccaaccagagggcgccaagcgcgacgaaaacagaagagcagacccagaacgccacactaagcgagaagcacagtcacagagagcccggcacacacacaccgagtcaga

SEQ ID NO: 56671 - DNA, 1455 bp, Homo sapiens
gcacagcccggggcgggaggcggagcttggcggccgagatctccgcgctgcagttagccccgccgagcgccaggagctgcggactgccactctccgcccctacctgagtgccgtgcgggccacattgcaggctgccctctgcctggagaacttctcctcccaggttgtggaacgacacaacaagccggaagtggaagtcaggagtagcaaagagctcctgttacaacctgtgaccatcagcaggaatgagaaggaaaaggttctgattgagggctccatcaactctgtccgggtcagcattgctgtgaaacaggctgatgagatcgagaagattttgtgccacaagttcatgcgcttcatgatgatgcgagcagagaacttctttatccttcgaaggaagcctgtggaggggtatgatatcagctttctgatcaccaacttccacacagagcagatgtacaaacacaagttggtggactttgtgatccacttcatggaggagattgacaaggagatcagtgagatgaagctgtcagtcaatgcccgtgcccgcattgtggctgaagagttccttaagaatttttaaaccatctggctggatctcgtggccttccccctcagactacccatgtctccacgaaggcgtcctggagtcactccccgagcagcgcggcggcggcagggagttgggttggggtgggcatttgatgcgggaggtgggtggtgtgcttgctagctgggcaagaaagcagcagtggacctgccccaaggccacacgtgcctggtcaggctggcttctgatgttcagtcccctgggccgggacagattttttttaacgtcttgaaacttaaactctgtgcttgtaggatactgtaacctttttgtctttttttttttttttttttttaaacctccacctccaggtggctgtgacgtggctcccagggattatacgttatgggtggctgggggctctgggcgggcctggagccagaagggcgacttattttttctctccttatgccaccccagggtggggagggagggaggtttcagactccagtttctccctttgcccttttattcccaagcctccttggccccagtataagtgtggggaactctctgccagcttcctgagttctgcctaaagatggccccccagcactggttggggacaagggccaaattggtgaccaccagtcatgcctaggacctggggcccaaaagccgggcaacctctggctacaggggccattgggtgccctcccagttgagaggggccgctgtttcgccttgtccgtcagtgccagtgcctgtgccagaggtggcgaggtgagtcctccagagcttcctggccgggccctcctcctgcctgttctggctcctctgctcccacgctagctgtcccttttctgattctggtggatcctccctcccctaattaaagtctc

SEQ ID NO: 56672 - DNA, 1360 bp, Homo sapiens
gcacagcccggggcgggaggcggagcttggcggccgagatctccgcgctgcagttagccccgccgagcgccaggagctgcggactgccactctccgcccctacctgagtgccgtgcgggccacattgcaggctgccctctgcctggagaacttctcctcccaggttgtggaacgacacaacaagccggaagtggaagtcaggagtagcaaagagctcctgttacaacctgtgaccatcagcaggaatgagaaggaaaaggttctgattgagggctccatcaactctgtccgggtcagcattgctgtgaaacagggggtatgatatcagctttctgatcaccaacttccacacagagcagatgtacaaacacaagttggtggactttgtgatccacttcatggaggagattgacaaggagatcagtgagatgaagctgtcagtcaatgcccgtgcccgcattgtggctgaagagttccttaagaatttttaaaccatctggctggatctcgtggccttccccctcagactacccatgtctccacgaaggcgtcctggagtcactccccgagcagcgcggcggcggcagggagttgggttggggtgggcatttgatgcgggaggtgggtggtgtgcttgctagctgggcaagaaagcagcagtggacctgccccaaggccacacgtgcctggtcaggctggcttctgatgttcagtcccctgggccgggacagattttttttaacgtcttgaaacttaaactctgtgcttgtaggatactgtaacctttttgtctttttttttttttttttttttaaacctccacctccaggtggctgtgacgtggctcccagggattatacgttatgggtggctgggggctctgggcgggcctggagccagaagggcgacttattttttctctccttatgccaccccagggtggggagggagggaggtttcagactccagtttctccctttgcccttttattcccaagcctccttggccccagtataagtgtggggaactctctgccagcttcctgagttctgcctaaagatggccccccagcactggttggggacaagggccaaattggtgaccaccagtcatgcctaggacctggggcccaaaagccgggcaacctctggctacaggggccattgggtgccctcccagttgagaggggccgctgtttcgccttgtccgtcagtgccagtgcctgtgccagaggtggcgaggtgagtcctccagagcttcctggccgggccctcctcctgcctgttctggctcctctgctcccacgctagctgtcccttttctgattctggtggatcctccctcccctaattaaagtctc

SEQ ID NO: 56673 - DNA, 998 bp, Homo sapiens
gcacagcccggggcgggaggcggagcttggcggccgagatctccgcgctgcagttagccccgccgagcgccaggagctgcggactgccactctccgcccctacctgagtgccgtgcgggccacattgcaggctgccctctgcctggagaacttctcctcccaggttgtggaacgacacaacaagccggaagtggaagtcaggagtagcaaagagctcctgttacaacctgtgaccatcagcaggaatgagaaggaaaaggttctgattgagggctccatcaactctgtccgggtcagcattgctgtgaaacagggggtatgatatcagctttctgatcaccaacttccacacagagcagatgtacaaacacaagttggtggactttgtgatccacttcatggaggagattgacaaggagatcagtgagatgaagctgtcagtcaatgcccgtgcccgcattgtggctgaagagttccttaagaattttaaaccatctggctggatctcgtggcattcccccatcaaaccaaaaaaaacaaaaaaaaaaacaaaaaaaaaaaaaaaaaaaaaagggagagaaaaaacaaaaacaacaaccaccgcaaaaaaaaaaaccaaacaaaaaagaagggggccaggggggtattaataagaggatggcacggtaaaaaaaagagtgcagtggagacacaggcaacagaccaacaaagaacaagaaacaaaaaacagagcggcggaagataagggcagacaaaacaaaacccaaaaataataccagaaagacgagcagcataataccaacggacgcgacatctccgggactacacccagccccctcccaccgcggccccccggaaacacgcgatcgtaccaccaaccctccccgggcaccggcccctaagacccaacccacaccacacccacacgaacaccgacaaaaccaaccccaaacccgcccgcaacacaaaagaaaccccctgccgagaacccctgcgcc

SEQ ID NO: 56674 - DNA, 1417 bp, Homo sapiens
cacttccgtacttccgctttccggcccagccagcgcccgcgatgactgccactctccgcccctacctgagtgccgtgcgggccacattgcaggctgccctctgcctggagaacttctcctcccaggttgtggaacgacacaacaagccggaagtggaagtcaggagtagcaaagagctcctgttacaacctgtgaccatcagcaggaatgagaaggaaaaggttctgattgagggctccatcaactctgtccgggtcagcattgctgtgaaacaggctgatgagatcgagaagattttgtgccacaagttcatgcgcttcatgatgatgcgagcagagaacttctttatccttcgaaggaagcctgtggaggggtatgatatcagctttctgatcaccaacttccacacagagcagatgtacaaacacaagttggtggactttgtgatccacttcatggaggagattgacaaggagatcagtgagatgaagctgtcagtcaatgcccgtgcccgcattgtggctgaagagttccttaagaatttttaaaccatctggctggatctcgtggccttccccctcagactacccatgtctccacgaaggcgtcctggagtcactccccgagcagcgcggcggcggcagggagttgggttggggtgggcatttgatgcgggaggtgggtggtgtgcttgctagctgggcaagaaagcagcagtggacctgccccaaggccacacgtgcctggtcaggctggcttctgatgttcagtcccctgggccgggacagattttttttaacgtcttgaaacttaaactctgtgcttgtaggatactgtaacctttttgtctttttttttttttttttttttaaacctccacctccaggtggctgtgacgtggctcccagggattatacgttatgggtggctgggggctctgggcgggcctggagccagaagggcgacttattttttctctccttatgccaccccagggtggggagggagggaggtttcagactccagtttctccctttgcccttttattcccaagcctccttggccccagtataagtgtggggaactctctgccagcttcctgagttctgcctaaagatggccccccagcactggttggggacaagggccaaattggtgaccaccagtcatgcctaggacctggggcccaaaagccgggcaacctctggctacaggggccattgggtgccctcccagttgagaggggccgctgtttcgccttgtccgtcagtgccagtgcctgtgccagaggtggcgaggtgagtcctccagagcttcctggccgggccctcctcctgcctgttctggctcctctgctcccacgctagctgtcccttttctgattctggtggatcctccctcccctaattaaagtctc

SEQ ID NO: 56675 - DNA, 867 bp, Homo sapiens
gctcatctttgggctagtttcaggcatgggccattggttcacaacctttggtctctaaaatgtgcagggctgtcctaggcagcatgggggaccgttgagggcagaaaacatttcaagggcctggcttggttggaggttcatccagagcttgacacaaaagtaccagaacctgggtccttttccacttggccctctgagtccccaggccccttgcatgagagcccccatgcctaaagaaagcaacctcagttcaccaggcaggacgctggcagggctttctagcagcctccatgccagggcacaagggagctgtggagaagctctcatggctcttaatttttctgccttatctagtgctaggcttagggccggtgcccataggtcacttctgaaagctggctgaattagagcatgaccacaaggtgtcctgggacccaactctgcccctcacagatatgagcacagtggcagctctcaggttcatgcacctccttagagcagtgccaccaggatgcaataataaccaccatgcactgcctcttggttctcttgacagttttaaaccatctggctggatctcgtggccttccccctcagactacccatgtctccacgaaggcgtcctggagtcactccccgagcagcgcggcggcggcagggagttgggttggggtgggcatttgatgcgggaggtgggtggtgtgcttgctagctgggcaagaaagcagcagtggacctgccccaaggccacacgtgcctggtcaggctggcttctgatgttcagtcccctgggccgggacagattttttttaacgtcttgaaacttaaactctgtgcttgtaggatactgtaacctttttgtctttt

SEQ ID NO: 56676 - DNA, 551 bp, Homo sapiens
agagaacagctacaagcttgggtggagtcaccataaacacacccaagctgcgtcctctaacctcaggcaagatcctggtgaaacagcatgacatggcttctggggtggagggtgggggtggaggtcctgctcctagagatgaactctatccagccccttaattggcaggtgtatgtgctgacagtactgaaagctttcctctttaactgatcccacccccacccaaaagtcagcagtggcactggagctgtgggctttggggaagtcacttagctccttaaggtctgtttttagacccttccaaggaagaggccagaacggacattctctgcgatctatatacattgcctgtatccaggaggctacacaccagcaaaccgtgaaggagaatgggacactgggtcatggcctggagttgctgataatttaggtgggatagatacttggtctacttaagctcaatgtaacccagagcccaccatatagttttataggtgctcaattttctatatcgctattaaacttttttctttttttctaaaaaaaaactg

SEQ ID NO: 56677 - DNA, 756 bp, Homo sapiens
acctccttgaaggcttgagggaggttctggtggagcttggctgaatttggatggggtcaaggaagcgaacgtgtagtgccacctcaaactgcatccagagagagcctgcatttttttggctggcttggaaccccccgcccgccaatggattgtgggaattgtagttcagggaccatcggcccgggactgccaacttttagagcatcttcagtgagtgtttacctcatgtcaccagaccttaatctgcagaggctgcaggagccgggtgtgaggctcaggccttgtggacatccgctgccctaccctagcatagacgctcccaaattacaggccccacaccccgctgagggggtttgagggtgagtaattcagcctttgaagctcataaacaaaaggaagccacacaactaggagagtgtccccatccggtgagactttgcagacgacagcgtctcatgccgttgcccaggctggagtgcagtggtgcaatctcgctcactgcaacctccgcctcccgggttcaagcgattctcctgcctcagcctcccaagtagctgggattacaggcgcccgccaccatgcccagctaatttttgtatttttagtagagacaaggtttcactatgttggccaggatggtctcaatctcttgacctcgtgatccacccacctcagcctcccaaagtgttgggattacaggcatgagtcactgtgctggcctatttatttttaatgtattttactttttttaagatg

SEQ ID NO: 56678 - DNA, 1701 bp, Homo sapiens
acctccttgaaggcttgagggaggttctggtggagcttggctgaatttggatggggtcaaggaagcgaacgtgtagtgccacctcaaactgcatccagagagagcctgcatttttttggctggcttggaaccccccgcccgccaatggattgtgggaattgtagttcagggaccatcggcccgggactgccaacttttagagcatcttcagtgagtgtttacctcatgtcaccagaccttaatctgcagaggctgcaggagccgggtgtgaggctcaggccttgtggacatccgctgccctaccctagcatagacgctcccaaattacaggccccacaccccgctgagggggtttgagggtgagtaattcagcctttgaagctcataaacaaaaggaagccacacaactaggagagtgtccccatccggtgagactttgcagacgtgtgtaagctgctgagcacagagctacaggcggaactgagtcgcaccggtcgatctcgagaggtgctggagctggggcaggtgctggatacaggcaagaggaagagacacgtgccttacagcgtttcagagacaaggctggaagaggccttagagaatttatgtgagcggatcctggactatagtgttcacgctgagcgcaagggctcactgagatatgccaagggtcagagtcagaccatggcaacactgaaaggcctagtgcagaagggggtgaaggtggatctggggatccctctggagctttgggatgagcccagcgtggaggtcacatacctcaagaagcagtgtgagaccatgttggaggagtttgaagacattgtgggagactggtacttccaccatcaggagcagcccctacaaaattttctctgtgaaggtcatgtgctcccagctgctgaaactgcatgtctacaggaaacttggactggaaaggagatcacagatggggaagagaaaacagaaggggaggaagagcaggaggaggaggaggaagaggaggaagaggaagggggagacaagatgaccaagacaggaagccaccccaaacttgaccgagaagatctttgacccttgcctttgagcccccaggaggggaagggatcatggagagccctctaaagcctgcactctccctgctccacagctttcagggtgtgtttatgagtgactccacccaagcttgtagctgttctctcccatctaacctcaggcaagatcctggtgaaacagcatgacatggcttctggggtggagggtgggggtggaggtcctgctcctagagatgaactctatccagccccttaattggcaggtgtatgtgctgacagtactgaaagctttcctctttaactgatcccacccccacccaaaagtcagcagtggcactggagctgtgggctttggggaagtcacttagctccttaaggtctgtttttagacccttccaaggaagaggccagaacggacattctctgcgatctatatacattgcctgtatccaggaggctacacaccagcaaaccgtgaaggagaatgggacactgggtcatggcctggagttgctgataatttaggtgggatagatacttggtctacttaagctcaatgtaacccagagcccaccatatagttttataggtgctcaattttctatatcgctattaaacttttttctttttttctaaaaaaaaactg

SEQ ID NO: 56679 - DNA, 1195 bp, Homo sapiens
ctcggctggatttaaggttgccgctagccgcctgggaatttaagggacccacactaccttcccgaagttgaaggcaagcggtgattgtttgtagacggcgctttgtcatgggacctgtgcggttgggaatattgcttttcctttttttggccgtgcacgaggcttgggctgggatgttgaaggaggaggacgatgacacagaacgcttgcccagcaaatgcgaagtgtgtaagctgctgagcacagagctacaggcggaactgagtcgcaccggtcgatctcgagaggtgctggagctggggcaggtgctggatacaggcaagaggaagagacacgtgccttacagcgtttcagagacaaggctggaagaggccttagagaatttatgtgagcggatcctggactatagtgttcacgctgagcgcaagggctcactgagatatgccaagggtcagagtcagaccatggcaacactgaaaggcctagtgcagaagggggtgaaggtggatctggggatccctctggagctttgggatgagcccagcgtggaggtcacatacctcaagaagcagtgtgagaccatgttggaggagtttgaagacattgtgggagactggtacttccaccatcaggagcagcccctacaaaattttctctgtgaaggtcatgtgctcccagctgctgaaactgcatgtctacaggaaacttggactggaaaggagatcacagatggggaagagaaaacagaaggggaggaagagcaggaggaggaggaggaagaggaggaagaggaagggggagacaagatgaccaagacaggaagccaccccaaacttgaccgagaagatctttgacccttgcctttgagcccccaggaggggaagggatcatggagagccctctaaagcctgcactctccctgctccacagctttcaggacccttccaaggaagaggccagaacggacattctctgcgatctatatacattgcctgtatccaggaggctacacaccagcaaaccgtgaaggagaatgggacactgggtcatggcctggagttgctgataatttaggtgggatagatacttggtctacttaagctcaatgtaacccagagcccaccatatagttttataggtgctcaattttctatatcgctattaaacttttttctttttttctaaaaaaaaactg

SEQ ID NO: 56680 - DNA, 1206 bp, Homo sapiens
ctcggctggatttaaggttgccgctagccgcctgggaatttaagggacccacactaccttcccgaagttgaaggcaagcggtgattgtttgtagacggcgctttgtcatgggacctgtgcggttgggaatattgcttttcctttttttggccgtgcacgaggcttgggctgggatgttgaaggaggaggacgatgacacagaacgcttgcccagcaaatgcgaagtgtgtaagctgctgagcacagagctacaggcggaactgagtcgcaccggtcgatctcgagaggtgctggagctggggcaggtgctggatacaggcaagaggaagagacacgtgccttacagcgtttcagagacaaggctggaagaggccttagagaatttatgtgagcggatcctggactatagtgttcacgctgagcgcaagggctcactgagatatgccaagggtcagagtcagaccatggcaacactgaaaggcctagtgcagaagggggtgaaggtggatctggggatccctctggagctttgggatgagcccagcgtggaggtcacatacctcaagaagcagtgtgagaccatgttggaggagtttgaagacattgtgggagactggtacttccaccatcaggagcagcccctacaaaattttctctgtgaaggtcatgtgctcccagctgctgaaactgcatgtctacaggaaacttggactggaaaggagatcacagatggggaagagaaaacagaaggggaggaagagcaggaggaggaggaggaagaggaggaagaggaagggggagacaagatgaccaagacaggaagccaccccaaacttgaccgagaagatctttgacccttgcctttgagcccccaggaggggaagggatcatggagagccctctaaagcctgcactctccctgctccacagctttcagggtgtgtttatgagtgactccacccaagcttgtagctgttctctcccatctaacctcaggcaagatcctggtgaaacagcatgacatggcttctggggtggagggtggtgataaactgccaaatgcctggaccctaaagctttgcaggacactgttgtcaaagactggtcctgatgctggaaagaactggcttcgctgcaggaaatcagggattatcccttaaccgaagtgtctggaatagttttcaagggtaggaatgaaatgcctcc

SEQ ID NO: 56681 - DNA, 1481 bp, Homo sapiens
ctcggctggatttaaggttgccgctagccgcctgggaatttaagggacccacactaccttcccgaagttgaaggcaagcggtgattgtttgtagacggcgctttgtcatgggacctgtgcggttgggaatattgcttttcctttttttggccgtgcacgaggcttgggctgggatgttgaaggaggaggacgatgacacagaacgcttgcccagcaaatgcgaagtgtgtaagctgctgagcacagagctacaggcggaactgagtcgcaccggtcgatctcgagaggtgctggagctggggcaggtgctggatacaggcaagaggaagagacacgtgccttacagcgtttcagagacaaggctggaagaggccttagagaatttatgtgagcggatcctggactatagtgttcacgctgagcgcaagggctcactgagatatgccaagggtcagagtcagaccatggcaacactgaaaggcctagtgcagaagggggtgaaggtggatctggggatccctctggagctttgggatgagcccagcgtggaggtcacatacctcaagaagcagtgtgagaccatgttggaggagtttgaagacattgtgggagactggtacttccaccatcaggagcagcccctacaaaattttctctgtgaaggtcatgtgctcccagctgctgaaactgcatgtctacaggaaacttggactggaaaggagatcacagatggggaagagaaaacagaaggggaggaagagcaggaggaggaggaggaagaggaggaagaggaagggggagacaagatgaccaagacaggaagccaccccaaacttgaccgagaagatctttgacccttgcctttgagcccccaggaggggaagggatcatggagagccctctaaagcctgcactctccctgctccacagctttcagggtgtgtttatgagtgactccacccaagcttgtagctgttctctcccatctaacctcaggcaagatcctggtgaaacagcatgacatggcttctggggtggagggtgggggtggaggtcctgctcctagagatgaactctatccagccccttaattggcaggtgtatgtgctgacagtactgaaagctttcctctttaactgatcccacccccacccaaaagtcagcagtggcactggagctgtgggctttggggaagtcacttagctccttaaggtctgtttttagacccttccaaggaagaggccagaacggacattctctgcgatctatatacattgcctgtatccaggaggctacacaccagcaaaccgtgaaggagaatgggacactgggtcatggcctggagttgctgataatttaggtgggatagatacttggtctacttaagctcaatgtaacccagagcccaccatatagttttataggtgctcaattttctatatcgctattaaacttttttctttttttctaaaaaaaaactg

SEQ ID NO: 56682 - DNA, 1421 bp, Homo sapiens
ggaagattgccacacagctgctaaatggctgagccaggattccaacccagccagtctggctccatagtctgcacttgtatgctctgctgcctcaggtcatctgcagaatgaatggctggtgtgtttgtcttttacctccccccggacgtttctcctccccaccagtgtgtaagctgctgagcacagagctacaggcggaactgagtcgcaccggtcgatctcgagaggtgctggagctggggcaggtgctggatacaggcaagaggaagagacacgtgccttacagcgtttcagagacaaggctggaagaggccttagagaatttatgtgagcggatcctggactatagtgttcacgctgagcgcaagggctcactgagatatgccaagggtcagagtcagaccatggcaacactgaaaggcctagtgcagaagggggtgaaggtggatctggggatccctctggagctttgggatgagcccagcgtggaggtcacatacctcaagaagcagtgtgagaccatgttggaggagtttgaagacattgtgggagactggtacttccaccatcaggagcagcccctacaaaattttctctgtgaaggtcatgtgctcccagctgctgaaactgcatgtctacaggaaacttggactggaaaggagatcacagatggggaagagaaaacagaaggggaggaagagcaggaggaggaggaggaagaggaggaagaggaagggggagacaagatgaccaagacaggaagccaccccaaacttgaccgagaagatctttgacccttgcctttgagcccccaggaggggaagggatcatggagagccctctaaagcctgcactctccctgctccacagctttcagggtgtgtttatgagtgactccacccaagcttgtagctgttctctcccatctaacctcaggcaagatcctggtgaaacagcatgacatggcttctggggtggagggtgggggtggaggtcctgctcctagagatgaactctatccagccccttaattggcaggtgtatgtgctgacagtactgaaagctttcctctttaactgatcccacccccacccaaaagtcagcagtggcactggagctgtgggctttggggaagtcacttagctccttaaggtctgtttttagacccttccaaggaagaggccagaacggacattctctgcgatctatatacattgcctgtatccaggaggctacacaccagcaaaccgtgaaggagaatgggacactgggtcatggcctggagttgctgataatttaggtgggatagatacttggtctacttaagctcaatgtaacccagagcccaccatatagttttataggtgctcaattttctatatcgctattaaacttttttctttttttctaaaaaaaaactg

SEQ ID NO: 56683 - DNA, 1010 bp, Homo sapiens
ctcggctggatttaaggttgccgctagccgcctgggaatttaagggacccacactaccttcccgaagttgaaggcaagcggtgattgtttgtagacggcgctttgtcatgggacctgtgcggttgggaatattgcttttcctttttttggccgtgcacgaggcttgggctgggatgttgaaggaggaggacgatgacacagaacgcttgcccagcaaatgcgaagtgtgtaagctgctgagcacagagctacaggcggaactgagtcgcaccggtcgatctcgagaggtgctggagctggggcaggtgctggatacaggcaagaggaagagacacgtgccttacagcgtttcagagacaaggctggaagaggccttagagaatttatgtgagcggatcctggactatagtgttcacgctgagcgcaagggctcactgagatatgccaagggtcagagtcagaccatggcaacactgaaaggcctagtgcagaagggggtgaaggtggatctggggatccctctggagctttgggatgagcccagcgtggaggtcacatacctcaagaagcaggtaggataagacactgcaccatccagggaggtgagaagggaacctgagaggggagctaggttctagggtttgactataggggatgtctacccctaagcatggggaagggggcagagtgaggactgtgccattgattaaagtgggtccaggagcggtggggtgcggtggctcacacctgtaatcccagcaatttgggaggctgaggcaggtggatcacctgaggtcataagttcgagaccagcctggccaacaaggcaaaaccccgtctttaataaaaacacaaaagttagctgggcgtggtggtgcacgcctgtgatcccagctacttgggaggctgaggcaagagaattgcttgaatccaggaggtggaggttgccatgagccaagatcgcaccattgcactccagccagggcgacagagcaagactccatcttaaa

SEQ ID NO: 56684 - DNA, 448 bp, Homo sapiens
attttcgggggccacccgaagggggttaacccattttgacccctgaagagcactcccatctctgccccctgacctcagagagcagcctccgacctcctgacctctgaccctggccagcactctagctcctgacctttgacccgagggccacctcaaccccagcttctgacgtgtccaggacagagcatccctggattctgttcagggtgggaagtagtactgctagtcatggtctcaccccgagctgacccctctgcctgggctttgtgccaccctctcccttgccaaagaagaaactctccccccaaatcctccaacctctggggccacagccctgcccctccagttccttggcagttctcccccaaaccaggtctgtacaggtgttctttattttacatgagggctactttccaaccaaataaagtcaatttttctaagaaaaagt

SEQ ID NO: 56685 - DNA, 2522 bp, Homo sapiens
aaattccggcgacagcaggggcaaaacaggagctgattcgagctggcagagctgggccatggaaccggtagagacctggacccccggaaaggtcttgacgactccctgcaggactatccctttgaggactggcagctgcctggcaagaacctgctccagctctgcccccaaagcctcgaggctctggctgtgcggtctctgggacaccaggagctcatcctgggcggggtggaacagctccaggccctgagctccaggctacagacagagaacctgcaaagcctgacagagggacttctgggggcaacccatgacttccagagcatagtccaaggctgcctgggggactgtgccaagacccctattgatgtcctctgtgcagctgtggagctgttgcatgaagctgacgccctcctcttctggctcagcaggtacctcttctcccacttaaatgatttctcagcatgccaggagatccgagacttgttggaggagctgagccaggtcttgcatgaggatggtccagcggctgagaaggagggcacagtcctgaggatctgcagccacgtggctgggatctgccacaacatcctggtctgctgccccaaggagctgctggaacagaaggccgtgctcgagcaggtgcagctggacagtccattgggcctagaaattcacaccaccagcaattgccagcactttgtgtcccaagtggacacccaggttcccactgactcccgactgcagatccagcctggagacgaggttgtccagatcaacgagcaggtggtggtgggatggccccgtaagaacatggtgagggaactgctgcgggagccagccggactcagcttagtgctgaagaagatcccgataccggagacccccccacagacgccccctcaggtcctggactccccgcaccagaggagcccatcactgtctctggccccactgtctcccagggccccatctgaagacgtctttgcctttgacctgtcttcaaaccccagtcccggacccagccctgcctggacagactctgcctcccttggccctgagcccctgcccatccccccggaacccccagccatactcccagcaggggtagcagggactccagggctccctgaatcccctgacaagagtcctgttggtcggaagaaatcaaaaggcctggcgacccggctgagccgccggcgggtgtcatgccgtgagctgggccggccggactgtgacggctggctcctgttgcgaaaggcaccgggcggcttcatgggcccgcgctggcgccgccgctggtttgtgctcaagggacacacgctctactggtaccgccagccccaggatgagaaggctgagggcctcatcaatgtctccaactatagtctggaaagtggacatgatcagaagaagaaatatgtgtttcagctcacccatgatgtgtacaaacccttcatcttcgctgctgataccctgacagatctgagcatgtgggtgcgtcatctcattacctgcatctccaagtaccagtctccaggccgggcccccccaccccgagaggaagactgctacagtgagaccgaagcagaggacccggacgatgaggctgggtcccactcagcctcgcccagccctgctcaagctgggagtcccctccatggagacacatcacctgcagccacccccacacagcgcagcccacggacctcctttggctctctgacagacagcagtgaagaggcactggaaggaatggtacgggggctgaggcagggtggcgtgtccctcctaggccagccacagcccctgacccaggaacagtggcggagctctttcatgcggcgcaaccgagaccctcagctcaatgagcgagtgcaccgtgtgcgggcgctacagagcacactcaaggcaaagctgcaggagctgcaggtcctagaagaagtgctgggtgaccctgagctgacaggagagaagttccgccagtggaaggagcagaaccgggagctgtactcagagggcctgggggcctggggagtggcacaggctgaaggcagctcccacatcttgacctctgactccacagaacagtccccccactccctgccctctgaccctgaagagcactcccatctctgccccctgacctcagagagcagcctccgacctcctgacctctgaccctggccagcactctagctcctgacctttgacccgagggccacctcaaccccagcttctgacgtgtccaggacagagcatccctggattctgttcagggtgggaagtagtactgctagtcatggtctcaccccgagctgacccctctgcctgggctttgtgccaccctctcccttgccaaagaagaaactctccccccaaatcctccaacctctggggccacagccctgcccctccagttccttggcagttctcccccaaaccaggtctgtacaggtgttctttattttacatgagggctactttccaaccaaataaagtcaatttttctaagaaaaagt

SEQ ID NO: 56686 - DNA, 1353 bp, Homo sapiens
aagggtgatggggtagcagtgggaggtgtggcaagtggctggggcgcccagaatccagcctctctgggctgtgggtgggcacgcccaggctgagtgatgctcctccactacctggcagtgtgtttcagctcacccatgatgtgtacaaacccttcatcttcgctgctgataccctgacagatctgagcatgtgggtgcgtcatctcattacctgcatctccaagtaccagtctccaggccgggcccccccaccccgagaggaaggtaggtgtctcgcagggttgagtgggaggaaccctcacctgagcctgtgcctttcctgggatgggggctaggaactcaaatgccctaggccactccctggcctcccaaaaacccactgctgctcctcaccccagactgctacagtgagaccgaagcagaggacccggacgatgaggctgggtcccactcagcctcgcccagccctgctcaagctgggagtcccctccatggagacacatcacctgcagccacccccacacagcgcagcccacggacctcctttggctctctgacagacagcagtgaagaggcactggaaggaatggtacgggggctgaggcagggtggcgtgtccctcctaggccagccacagcccctgacccaggaacagtggcggagctctttcatgcggcgcaaccgagaccctcagctcaatgagcgagtgcaccgtgtgcgggcgctacagagcacactcaaggcaaagctgcaggagctgcaggtcctagaagaagtgctgggtgaccctgagctgacaggagagaagttccgccagtggaaggagcagaaccgggagctgtactcagagggcctgggggcctggggagtggcacaggctgaaggcagctcccacatcttgacctctgactccacagaacagtccccccactccctgccctctgaccctgaagagcactcccatctctgccccctgacctcagagagcagcctccgacctcctgacctctgaccctggccagcactctagctcctgacctttgacccgagggccacctcaaccccagcttctgacgtgtccaggacagagcatccctggattctgttcagggtgggaagtagtactgctagtcatggtctcaccccgagctgacccctctgcctgggctttgtgccaccctctcccttgccaaagaagaaactctccccccaaatcctccaacctctggggccacagccctgcccctccagttccttggcagttctcccccaaaccaggtctgtacaggtgttctttattttacatgagggctactttccaaccaaataaagtcaatttttctaagaaaaagt

SEQ ID NO: 56687 - DNA, 2504 bp, Homo sapiens
aaattccggcgacagcaggggcaaaacaggagctgattcgagctggcagagctgggccatggaaccggtagagacctggacccccggaaaggtggcaacttggctgagaggtcttgacgactccctgcaggactatccctttgaggactggcagctgcctggcaagaacctgctccagctctgcccccaaagcctcgaggctctggctgtgcggtctctgggacaccaggagctcatcctgggcggggtggaacagctccaggccctgagctccaggctacagacagagaacctgcaaagcctgacagagggacttctgggggcaacccatgacttccagagcatagtccaaggctgcctgggggactgtgccaagacccctattgatgtcctctgtgcagctgtggagctgttgcatgaagctgacgccctcctcttctggctcagcaggtacctcttctcccacttaaatgatttctcagcatgccaggagatccgagacttgttggaggagctgagccaggtcttgcatgaggatggtccagcggctgagaaggagggcacagtcctgaggatctgcagccacgtggctgggatctgccacaacatcctggtctgctgccccaaggagctgctggaacagaaggccgtgctcgagcaggtgcagctggacagtccattgggcctagaaattcacaccaccagcaattgccagcactttgtgtcccaagtggacacccaggttcccactgactcccgactgcagatccagcctggagacgaggttgtccagatcaacgagcaggtggtggtgggatggccccgtaagaacatggtgagggaactgctgcgggagccagccggactcagcttagtgctgaagaagatcccgataccggagacccccccacagacgccccctcaggtcctggactccccgcaccagaggagcccatcactgtctctggccccactgtctcccagggccccatctgaagacgtctttgcctttgacctgtcttcaaaccccagtcccggacccagccctgcctggacagactctgcctcccttggccctgagcccctgcccatccccccggaacccccagccatactcccagcaggggtagcagggactccagggctccctgaatcccctgacaagagtcctgttggtcggaagaaatcaaaaggcctggcgacccggctgagccgccggcgggtgtcatgccgtgagctgggccggccggactgtgacggctggctcctgttgcgaaaggcaccgggcggcttcatgggcccgcgctggcgccgccgctggtttgtgctcaagggacacacgctctactggtaccgccagccccaggatgagaaggctgagggcctcatcaatgtctccaactatagtctggaaagtggacatgatcagaagaagaaatatgtgtttcagctcacccatgatgtgtacaaacccttcatcttcgctgctgataccctgacagatctgagcatgtgggtgcgtcatctcattacctgcatctccaagtaccagtctccaggccgggcccccccaccccgagaggaagactgctacagtgagaccgaagcagaggacccggacgatgaggctgggtcccactcagcctcgcccagccctgctcaagctgggagtcccctccatggagacacatcacctgcagccacccccacacagcgcagcccacggacctcctttggctctctgacagacagcagtgaagaggcactggaaggaatggtacgggggctgaggcagggtggcgtgtccctcctaggccagccacagcccctgacccaggaacagtggcggagctctttcatgcggcgcaaccgagaccctcagctcaatgagcgagtgcaccgtgtgcgggcgctacagagcacactcaaggcaaagctgcaggagctgcaggtcctagaagaagtgctgggtgaccctgagctgacaggagagaagttccgccagtggaaggagcagaaccgggagctgtactcagagggcctgggggcctggggagtggcacaggctgaaggcagctcccacatcttgacctctgacctgaagagcactcccatctctgccccctgacctcagagagcagcctccgacctcctgacctctgaccctggccagcactctagctcctgacctttgacccgagggccacctcaaccccagcttctgacgtgtccaggacagagcatccctggattctgttcagggtgggaagtagtactgctagtcatggtctcaccccgagctgacccctctgcctgggctttgtgccaccctctcccttgccaaagaagaaactctccccccaaatcctccaacctctggggccacagccctgcccctccagttccttggcagttctcccccaaaccaggtctgtacaggtgttctttattttacatgagggctactttccaaccaaataaagtcaatttttctaagaaaaagt

SEQ ID NO: 56688 - DNA, 391 bp, Homo sapiens
tgtgccactccccaggcccccaggccctctgagtacagctcccggttctgctccttccactggcggaacttctctcctgtcagctcagggccacctcaaccccagcttctgacgtgtccaggacagagcatccctggattctgttcagggtgggaagtagtactgctagtcatggtctcaccccgagctgacccctctgcctgggctttgtgccaccctctcccttgccaaagaagaaactctccccccaaatcctccaacctctggggccacagccctgcccctccagttccttggcagttctcccccaaaccaggtctgtacaggtgttctttattttacatgagggctactttccaaccaaataaagtcaatttttctaagaaaaagt

SEQ ID NO: 56689 - DNA, 414 bp, Homo sapiens
cagaacagcctgggtgtcagagttgtcattagggttagactagagggaaaagagctttgcaggcatgaagaaccatcccaaaaggtcctgacacctctgcttccccgagctgagccttactctccctccaggtcttgacgactccctgcaggactatccctttgaggactggcagctgcctggcaagaacctgctccagctctgcccccaaagcctcgaggctctggctgtgcggtctctgggacaccaggagctcatcctgggcggggtggaacagctccaggccctggtgagtgaatgctggtcacactggctgcagcttccaccaacctggggggtgtgatggggggctggctgctgccagggaggtgacttgccctctttctggcacagagctccaggctacagacagag

SEQ ID NO: 56690 - DNA, 466 bp, Homo sapiens
ggtaggggcgatcgggctcaggctacatagcccgctcccctcccccagtgcagccacgtggctgggatctgccacaacatcctggtctgctgccccaaggagctgctggaacagaaggccgtgctcgagcaggtgcagctggacagtccattggtgagccctgccctcccacctctcacttctgaccccttggcagccttgtctgggccctgaaatagggtccaggatcccacagaaccctgtgctgccatggctggaaagccttttttgtacagatgctaaaatggaggcccagaggattggccagggtctcccgttgctctgcacctccccagtcctgaggggccacgcgggtgtggcctcaggtagtgtgttccagccttgggatggagacggggcaggggcttgggggcagttaggagaaagggagaggatgtgacctttcttggtttaatctttgaccagt

SEQ ID NO: 56691 - DNA, 2541 bp, Homo sapiens
aaattccggcgacagcaggggcaaaacaggagctgattcgagctggcagagctgggccatggaaccggtagagacctggacccccggaaaggtggcaacttggctgagaggtcttgacgactccctgcaggactatccctttgaggactggcagctgcctggcaagaacctgctccagctctgcccccaaagcctcgaggctctggctgtgcggtctctgggacaccaggagctcatcctgggcggggtggaacagctccaggccctgagctccaggctacagacagagaacctgcaaagcctgacagagggacttctgggggcaacccatgacttccagagcatagtccaaggctgcctgggggactgtgccaagacccctattgatgtcctctgtgcagctgtggagctgttgcatgaagctgacgccctcctcttctggctcagcaggtacctcttctcccacttaaatgatttctcagcatgccaggagatccgagacttgttggaggagctgagccaggtcttgcatgaggatggtccagcggctgagaaggagggcacagtcctgaggatctgcagccacgtggctgggatctgccacaacatcctggtctgctgccccaaggagctgctggaacagaaggccgtgctcgagcaggtgcagctggacagtccattgggcctagaaattcacaccaccagcaattgccagcactttgtgtcccaagtggacacccaggttcccactgactcccgactgcagatccagcctggagacgaggttgtccagatcaacgagcaggtggtggtgggatggccccgtaagaacatggtgagggaactgctgcgggagccagccggactcagcttagtgctgaagaagatcccgataccggagacccccccacagacgccccctcaggtcctggactccccgcaccagaggagcccatcactgtctctggccccactgtctcccagggccccatctgaagacgtctttgcctttgacctgtcttcaaaccccagtcccggacccagccctgcctggacagactctgcctcccttggccctgagcccctgcccatccccccggaacccccagccatactcccagcaggggtagcagggactccagggctccctgaatcccctgacaagagtcctgttggtcggaagaaatcaaaaggcctggcgacccggctgagccgccggcgggtgtcatgccgtgagctgggccggccggactgtgacggctggctcctgttgcgaaaggcaccgggcggcttcatgggcccgcgctggcgccgccgctggtttgtgctcaagggacacacgctctactggtaccgccagccccaggatgagaaggctgagggcctcatcaatgtctccaactatagtctggaaagtggacatgatcagaagaagaaatatgtgtttcagctcacccatgatgtgtacaaacccttcatcttcgctgctgataccctgacagatctgagcatgtgggtgcgtcatctcattacctgcatctccaagtaccagtctccaggccgggcccccccaccccgagaggaagactgctacagtgagaccgaagcagaggacccggacgatgaggctgggtcccactcagcctcgcccagccctgctcaagctgggagtcccctccatggagacacatcacctgcagccacccccacacagcgcagcccacggacctcctttggctctctgacagacagcagtgaagaggcactggaaggaatggtacgggggctgaggcagggtggcgtgtccctcctaggccagccacagcccctgacccaggaacagtggcggagctctttcatgcggcgcaaccgagaccctcagctcaatgagcgagtgcaccgtgtgcgggcgctacagagcacactcaaggcaaagctgcaggagctgcaggtcctagaagaagtgctgggtgaccctgagctgacaggagagaagttccgccagtggaaggagcagaaccgggagctgtactcagagggcctgggggcctggggagtggcacaggctgaaggcagctcccacatcttgacctctgactccacagaacagtccccccactccctgccctctgaccctgaagagcactcccatctctgccccctgacctcagagagcagcctccgacctcctgacctctgaccctggccagcactctagctcctgacctttgacccgagggccacctcaaccccagcttctgacgtgtccaggacagagcatccctggattctgttcagggtgggaagtagtactgctagtcatggtctcaccccgagctgacccctctgcctgggctttgtgccaccctctcccttgccaaagaagaaactctccccccaaatcctccaacctctggggccacagccctgcccctccagttccttggcagttctcccccaaaccaggtctgtacaggtgttctttattttacatgagggctactttccaaccaaataaagtcaatttttctaagaaaaagt

SEQ ID NO: 56692 - DNA, 2562 bp, Homo sapiens
aaattccggcgacagcaggggcaaaacaggagctgattcgagctggcagagctgggccatggaaccggtagagacctggacccccggaaaggtggcaacttggctgagaggtcttgacgactccctgcaggactatccctttgaggactggcagctgcctggcaagaacctgctccagctctgcccccaaagcctcgaggctctggctgtgcggtctctgggacaccaggagctcatcctgggcggggtggaacagctccaggccctgagctccaggctacagacagagaacctgcaaagcctgacagagggacttctgggggcaacccatgacttccagagcatagtccaaggctgcctgggggactgtgccaagacccctattgatgtcctctgtgcagctgtggagctgttgcatgaagctgacgccctcctcttctggctcagcaggtacctcttctcccacttaaatgatttctcagcatgccaggagatccgagacttgttggaggagctgagccaggtcttgcatgaggatggtccagcggctgagaaggagggcacagtcctgaggatctgcagccacgtggctgggatctgccacaacatcctggtctgctgccccaaggagctgctggaacagaaggccgtgctcgagcaggtgcagctggacagtccattgggcctagaaattcacaccaccagcaattgccagcactttgtgtcccaagtggacacccaggttcccactgactcccgactgcagatccagcctggagacgaggttgtccagatcaacgagcaggtggtggtgcgtgaggagagggacatggtgggatggccccgtaagaacatggtgagggaactgctgcgggagccagccggactcagcttagtgctgaagaagatcccgataccggagacccccccacagacgccccctcaggtcctggactccccgcaccagaggagcccatcactgtctctggccccactgtctcccagggccccatctgaagacgtctttgcctttgacctgtcttcaaaccccagtcccggacccagccctgcctggacagactctgcctcccttggccctgagcccctgcccatccccccggaacccccagccatactcccagcaggggtagcagggactccagggctccctgaatcccctgacaagagtcctgttggtcggaagaaatcaaaaggcctggcgacccggctgagccgccggcgggtgtcatgccgtgagctgggccggccggactgtgacggctggctcctgttgcgaaaggcaccgggcggcttcatgggcccgcgctggcgccgccgctggtttgtgctcaagggacacacgctctactggtaccgccagccccaggatgagaaggctgagggcctcatcaatgtctccaactatagtctggaaagtggacatgatcagaagaagaaatatgtgtttcagctcacccatgatgtgtacaaacccttcatcttcgctgctgataccctgacagatctgagcatgtgggtgcgtcatctcattacctgcatctccaagtaccagtctccaggccgggcccccccaccccgagaggaagactgctacagtgagaccgaagcagaggacccggacgatgaggctgggtcccactcagcctcgcccagccctgctcaagctgggagtcccctccatggagacacatcacctgcagccacccccacacagcgcagcccacggacctcctttggctctctgacagacagcagtgaagaggcactggaaggaatggtacgggggctgaggcagggtggcgtgtccctcctaggccagccacagcccctgacccaggaacagtggcggagctctttcatgcggcgcaaccgagaccctcagctcaatgagcgagtgcaccgtgtgcgggcgctacagagcacactcaaggcaaagctgcaggagctgcaggtcctagaagaagtgctgggtgaccctgagctgacaggagagaagttccgccagtggaaggagcagaaccgggagctgtactcagagggcctgggggcctggggagtggcacaggctgaaggcagctcccacatcttgacctctgactccacagaacagtccccccactccctgccctctgaccctgaagagcactcccatctctgccccctgacctcagagagcagcctccgacctcctgacctctgaccctggccagcactctagctcctgacctttgacccgagggccacctcaaccccagcttctgacgtgtccaggacagagcatccctggattctgttcagggtgggaagtagtactgctagtcatggtctcaccccgagctgacccctctgcctgggctttgtgccaccctctcccttgccaaagaagaaactctccccccaaatcctccaacctctggggccacagccctgcccctccagttccttggcagttctcccccaaaccaggtctgtacaggtgttctttattttacatgagggctactttccaaccaaataaagtcaatttttctaagaaaaagt

SEQ ID NO: 56693 - DNA, 1122 bp, Homo sapiens
acctgggtcgttataaggtcgtgtgtttcagctcacccatgatgtgtacaaacccttcatcttcgctgctgataccctgacagatctgagcatgtgggtgcgtcatctcattacctgcatctccaagtaccagtctccaggccgggcccccccaccccgagaggaagactgctacagtgagaccgaagcagaggacccggacgatgaggctgggtcccactcagcctcgcccagccctgctcaagctgggagtcccctccatggagacacatcacctgcagccacccccacacagcgcagcccacggacctcctttggctctctgacagacagcagtgaagaggcactggaaggaatggtacgggggctgaggcagggtggcgtgtccctcctaggccagccacagcccctgacccaggaacagtggcggagctctttcatgcggcgcaaccgagaccctcagctcaatgagcgagtgcaccgtgtgcgggcgctacagagcacactcaaggcaaagctgcaggagctgcaggtcctagaagaagtgctgggtgaccctgagctgacaggagagaagttccgccagtggaaggagcagaaccgggagctgtactcagagggcctgggggcctggggagtggcacaggctgaaggcagctcccacatcttgacctctgactccacagaacagtccccccactccctgccctctgaccctgaagagcactcccatctctgccccctgacctcagagagcagcctccgacctcctgacctctgaccctggccagcactctagctcctgacctttgacccgagggccacctcaaccccagcttctgacgtgtccaggacagagcatccctggattctgttcagggtgggaagtagtactgctagtcatggtctcaccccgagctgacccctctgcctgggctttgtgccaccctctcccttgccaaagaagaaactctccccccaaatcctccaacctctggggccacagccctgcccctccagttccttggcagttctcccccaaaccaggtctgtacaggtgttctttattttacatgagggctactttccaaccaaataaagtcaatttttctaagaaaaagt

SEQ ID NO: 56694 - DNA, 943 bp, Homo sapiens
  misc_feature (8)..(8): n is a, c, g, or t
ggcacggncacgtgaccaagagccgcctagagcacaagtcctgctagtcgcctccgtctgggtaccagccccctattactctgcaggcgtgtgaagaaagaaggaaactagctcggaccgtgcaggtttgtaggtctgttggcctgtaggtttcggcacaagtttcagcgagagaaggagaaaactgccttggttggaaccttgcagattcatcacaagagagctacaagagcctggaagaagctgaagactgctaccctccatccttactcaccctggacctgagagacctcttcaatcagaaatggaaacagagagattctcctggaaacccctgccccataaacggccctctcgaacacaatgggacggaatccacccacaacgcgcttggtttgcagatgtcaaagaatctgcagagggtgctactgaagatccagccttagccaatcaccacctcattgggtgaaagttccagggctcaatccaggaccacactcttattggccaggcaggggctcccacagagctttgagtaacttcttggttgtgcagtctgcaggcaatgttggcattgtaaattcctcccttgcagcctccttcatgtggtgaggggatcacttcagctgcctgctgtggacaaagaacatcaaattacagcatcacgagtgctattgttgcctgtggtggtctccctgtccaagcgggaccgctttgcagagaccagaggcatatcgcggcttgagctgaaaatgcatttgttgcagcttaggttgaattatttttcgtttgctctttcttctacacgcgcctgatggatagtgaacctattcatcaaaaaagtgcactgctcttctgtctattgtaccgacttaacctcttccacccaagtccgcatctgtgtgtatcatcaataaagttgtgtgctttgattggcaaaaaa

SEQ ID NO: 56695 - DNA, 982 bp, Homo sapiens
  misc_feature (8)..(8): n is a, c, g, or t
  misc_feature (953)..(953): n is a, c, g, or t
  misc_feature (956)..(956): n is a, c, g, or t
  misc_feature (960)..(960): n is a, c, g, or t
  misc_feature (963)..(963): n is a, c, g, or t
ggcacggncacgtgaccaagagccgcctagagcacaagtcctgctagtcgcctccgtctgggtaccagccccctattactctgcaggcgtgtgaagaaagaaggaaactagctcggaccgtgcaggtttgtaggtctgttggcctgtaggtttcggcacaagtttcagcgagagaaggagaaaactgccttggttggaaccttgcagattcatcacaagagagctacaagagcctggaagaagctgaagactgctaccctccatccttactcaccctggacctgagagacctcttcaatcagaaatggaaacagagagattctcctggaaacccctgccccataaacggccctctcgaacacaatgggacggaatccacccacaacgcgcttggtttgcagatgtcaaagaatctgcagagggtgctactgaagatccagccttagccaatcaccacctcattgggtgaaagttccagggctcaatccaggaccacactcttattggccaggcaggggctcccacagagctttgagtaacttcttggttgtgcagtctgcaggcaatgttggcattgtaaattcctcccttgcagcctccttcatgtggtgaggggatcacttcagctgcctgctgtggacaaagaacatcaaattacagcatcacgagtgctattgttgcctgtggtggtctccctgtccaagcgggaccgctttgcagagaccagaggcatatcgcggcttgagctgaaaatgcatttgttgcagcttaggttgaattatttttcgtttgctctttcttctacacgcgcctgatggatagtgaacctattcatcaaaaaagtgcactgctcttctgtctattgtaccgacttaacctcttccacccaagtccgcatctgtgtgtatcatcaataaagttgtgtgctttgattggcaaaaaaaaaaaacacnacncaanaanaacccaccgaaaaaaaacc

SEQ ID NO: 56696 - DNA, 974 bp, Homo sapiens
  misc_feature (8)..(8): n is a, c, g, or t
  misc_feature (899)..(899): n is a, c, g, or t
  misc_feature (906)..(907): n is a, c, g, or t
  misc_feature (915)..(915): n is a, c, g, or t
ggcacggncacgtgaccaagagccgcctagagcacaagtcctgctagtcgcctccgtctgggtaccagccccctattactctgcaggcgtgtgaagaaagaaggaaactagctcggaccgtgcaggtttgtaggtctgttggcctgtaggtttcggcacaagtttcagcgagagaaggagaaaactgccttggttggaaccttgcagattcatcacaagagagctacaagagcctggaagaagctgaagactgctaccctccatccttactcaccctggacctgagagacctcttcaatcagaaatggaaacagagagattctcctggaaacccctgccccataaacggccctctcgaacacaatgggacggaatccacccacaacgcgcttggtttgcagatgtcaaagaatctgcagagggtgctactgaagatccagccttagccaatcaccacctcattgggtgaaagttccagggctcaatccaggaccacactcttattggccaggcaggggctcccacagagctttgagtaacttcttggttgtgcagtctgcaggcaatgttggcattgtaaattcctcccttgcagcctccttcatgtggtgaggggatcacttcagctgcctgctgtggacaaagaacatcaaattacagcatcacgagtgctattgttgcctgtggtggtctccctgtccaagcgggaccgctttgcagagaccagaggcatatcgcggcttgagctgaaaatgcatttgttgcagcttaggttgaattatttttcgtttgctctttcttctacacgcgcctgatggatagtgaacctattcatcaaaaaagtgcactgctcttctgtctattgtaccgacttaacctcttccacccaagtcgttggngttctcnnactggggntgtgggcaaaaaaaggggggggaaaccccgggcccccaccttttaaggcccagtaaagg

SEQ ID NO: 56697 - DNA, 1211 bp, Homo sapiens
  misc_feature (8)..(8): n is a, c, g, or t
ggcacggncacgtgaccaagagccgcctagagcacaagtcctgctagtcgcctccgtctgggtaccagccccctattactctgcaggcgtgtgaagaaagaaggaaactagctcggaccgtgcaggtcggtgcgagggtgggcgctgcttgagaggaggtatgggtggaagagggccaagaacgccacagatccgagttcaggccgatcacagctgggtccctttctcgcctactttctaaatactgctacccacccccaccccaccccgtgctcattttagtagagagaagtggcgggtttcgggtgggggtgaggggagtgaatggcgtttccagagactccgagaaaagaaaggttctagtgtcccgggtgctggtccgtccaccaagcactccgtcccctcggtcccttgtctgtttgcaggtttgtaggtctgttggcctgtaggtttcggcacaagtttcagcgagagaaggagaaaactgccttggttggaaccttgcaggtcagtgtgaaggtgggattagcccaggaccatgggtgggggtggcggaggaggggggctgggatatgagagggccaggtccgagtcgccctctcctggccccttctttctccacacccactcccatttcagtgcagggaaaggggtgtggcggcctttgctggggaaatggcggacgacaagtggggcggaggaggcctgcgtccggaaagtcagtagagtatgagaaatattttaaactcaagtgtctaaaattcacaaaaacagaaattgggacctgtgtcctcagttcatccactacactttcatttctccattgccgcctacctgtctttgcatttgtccttctgccagactctatcctctatcaccgtggagggaccactgacaacagaagacaagggaaaacgaaggaatttatctgactttggtagaggttaatgagagaaactgcccttaatctttgggggtggaggtctggtgtaggagactacctgagaggtactcacactgtcaccctcctagctatcatagcagagacccatctcctgcccttccctgtggacccaggaagagaaatgggggctcctgaggtcgatagaggaagacagaaaagaaaagaacaaagaaattgtatcctgttaatctgcctttatcaccaactcgaaatccaccctgtctgtgaggcacaaagccaaacatag

SEQ ID NO: 56698 - DNA, 1942 bp, Homo sapiens
  misc_feature (8)..(8): n is a, c, g, or t
ggcacggncacgtgaccaagagccgcctagagcacaagtcctgctagtcgcctccgtctgggtaccagccccctattactctgcaggcgtgtgaagaaagaaggaaactagctcggaccgtgcaggtttgtaggtctgttggcctgtaggtttcggcacaagtttcagcgagagaaggagaaaactgccttggttggaaccttgcagtgcagggaaaggggtgtggcggcctttgctggggaaatggcggacgacaagtggggcggaggaggcctgcgtccggaaagtcagtagaattcatcacaagagagctacaagagcctggaagaagctgaagactgctaccctccatccttactcaccctggacctgagagacctcttcaatcaggtggagcaaggccctctcctgtcctgccccaaggctggcacagacttgagcatgggccgggctcgggaagtgggttggatggcggcaggactgatgattggggctggtgcctgctactgcgtttacaaactgaccataggaagagatgacagtgagaagctggaggaggagggggaagaggagtgggacgatgaccaggagctggatgaggaggagcctgatatttggtttgattttgaaactatggctcggccctggactgaggatggggattggactgaacctggggccccaggtggcactgaggacaggccctcagggggaggcaaggccaaccgagcacacccaataaaacagcggccattcccctatgaacataaaaatacttggagtgctcaaaattgtaaaaatggcagttgtgttctggacctctccaagtgtcttttcattcagggaaaactgttgtttgccgagcccaaggatgcgggctttccatttagccaggatatcaatagccatttggccagcctctcaatggctagaaacacgagccccactccagaccccactgttagagaggctttgtgtgccccggataacttaaatgcgagtattgaaagtcagggccagattaagatgtacatcaatgaagtgtgtcgggagactgtgtcacgttgctgcaactcatttctgcagcaggccggattaaatttgttaataagcatgacagttattaataacatgcttgccaagtccgcttcagacttgaagtttcctttgatatcagagggaagtggatgtgctaaggttcaggttttgaaaccgctgatgggtttgtctgaaaagccagtcttggcgggggagttagtcggtgcccagatgctcttctcattcatgtccctctttatcagaaatggaaacagagagattctcctggaaacccctgccccataaacggccctctcgaacacaatgggacggaatccacccacaacgcgcttggtttgcagatgtcaaagaatctgcagagggtgctactgaagatccagccttagccaatcaccacctcattgggtgaaagttccagggctcaatccaggaccacactcttattggccaggcaggggctcccacagagctttgagtaacttcttggttgtgcagtctgcaggcaatgttggcattgtaaattcctcccttgcagcctccttcatgtggtgaggggatcacttcagctgcctgctgtggacaaagaacatcaaattacagcatcacgagtgctattgttgcctgtggtggtctccctgtccaagcgggaccgctttgcagagaccagaggcatatcgcggcttgagctgaaaatgcatttgttgcagcttaggttgaattatttttcgtttgctctttcttctacacgcgcctgatggatagtgaacctattcatcaaaaaagtgcactgctcttctgtctattgtaccgacttaacctcttccacccaagtccgcatctgtgtgtatcatcaataaagttgtgtgctttgattggcaaaaaa

SEQ ID NO: 56699 - DNA, 2374 bp, Homo sapiens
  misc_feature (8)..(8): n is a, c, g, or t
ggcacggncacgtgaccaagagccgcctagagcacaagtcctgctagtcgcctccgtctgggtaccagccccctattactctgcaggcgtgtgaagaaagaaggaaactagctcggaccgtgcaggtcggtgcgagggtgggcgctgcttgagaggaggtatgggtggaagagggccaagaacgccacagatccgagttcaggccgatcacagctgggtccctttctcgcctactttctaaatactgctacccacccccaccccaccccgtgctcattttagtagagagaagtggcgggtttcgggtgggggtgaggggagtgaatggcgtttccagagactccgagaaaagaaaggttctagtgtcccgggtgctggtccgtccaccaagcactccgtcccctcggtcccttgtctgtttgcaggtttgtaggtctgttggcctgtaggtttcggcacaagtttcagcgagagaaggagaaaactgccttggttggaaccttgcaggtcagtgtgaaggtgggattagcccaggaccatgggtgggggtggcggaggaggggggctgggatatgagagggccaggtccgagtcgccctctcctggccccttctttctccacacccactcccatttcagtgcagggaaaggggtgtggcggcctttgctggggaaatggcggacgacaagtggggcggaggaggcctgcgtccggaaagtcagtagaattcatcacaagagagctacaagagcctggaagaagctgaagactgctaccctccatccttactcaccctggacctgagagacctcttcaatcaggtggagcaaggccctctcctgtcctgccccaaggctggcacagacttgagcatgggccgggctcgggaagtgggttggatggcggcaggactgatgattggggctggtgcctgctactgcgtttacaaactgaccataggaagagatgacagtgagaagctggaggaggagggggaagaggagtgggacgatgaccaggagctggatgaggaggagcctgatatttggtttgattttgaaactatggctcggccctggactgaggatggggattggactgaacctggggccccaggtggcactgaggacaggccctcagggggaggcaaggccaaccgagcacacccaataaaacagcggccattcccctatgaacataaaaatacttggagtgctcaaaattgtaaaaatggcagttgtgttctggacctctccaagtgtcttttcattcagggaaaactgttgtttgccgagcccaaggatgcgggctttccatttagccaggatatcaatagccatttggccagcctctcaatggctagaaacacgagccccactccagaccccactgttagagaggctttgtgtgccccggataacttaaatgcgagtattgaaagtcagggccagattaagatgtacatcaatgaagtgtgtcgggagactgtgtcacgttgctgcaactcatttctgcagcaggccggattaaatttgttaataagcatgacagttattaataacatgcttgccaagtccgcttcagacttgaagtttcctttgatatcagagggaagtggatgtgctaaggttcaggttttgaaaccgctgatgggtttgtctgaaaagccagtcttggcgggggagttagtcggtgcccagatgctcttctcattcatgtccctctttatcagaaatggaaacagagagattctcctggaaacccctgccccataaacggccctctcgaacacaatgggacggaatccacccacaacgcgcttggtttgcagatgtcaaagaatctgcagagggtgctactgaagatccagccttagccaatcaccacctcattgggtgaaagttccagggctcaatccaggaccacactcttattggccaggcaggggctcccacagagctttgagtaacttcttggttgtgcagtctgcaggcaatgttggcattgtaaattcctcccttgcagcctccttcatgtggtgaggggatcacttcagctgcctgctgtggacaaagaacatcaaattacagcatcacgagtgctattgttgcctgtggtggtctccctgtccaagcgggaccgctttgcagagaccagaggcatatcgcggcttgagctgaaaatgcatttgttgcagcttaggttgaattatttttcgtttgctctttcttctacacgcgcctgatggatagtgaacctattcatcaaaaaagtgcactgctcttctgtctattgtaccgacttaacctcttccacccaagtccgcatctgtgtgtatcatcaataaagttgtgtgctttgattggcaaaaaa

SEQ ID NO: 56700 - DNA, 1862 bp, Homo sapiens
  misc_feature (8)..(8): n is a, c, g, or t
ggcacggncacgtgaccaagagccgcctagagcacaagtcctgctagtcgcctccgtctgggtaccagccccctattactctgcaggcgtgtgaagaaagaaggaaactagctcggaccgtgcaggtttgtaggtctgttggcctgtaggtttcggcacaagtttcagcgagagaaggagaaaactgccttggttggaaccttgcagattcatcacaagagagctacaagagcctggaagaagctgaagactgctaccctccatccttactcaccctggacctgagagacctcttcaatcaggtggagcaaggccctctcctgtcctgccccaaggctggcacagacttgagcatgggccgggctcgggaagtgggttggatggcggcaggactgatgattggggctggtgcctgctactgcgtttacaaactgaccataggaagagatgacagtgagaagctggaggaggagggggaagaggagtgggacgatgaccaggagctggatgaggtcttattactgtggtgatagatgcacaacgcgcgagaagcgcgacaaggcagctacagaaacaaacacactggcctgaacgggggccagtgcctgaagaaccccggggagcaggcacgaaacacaaaaacagcgcacaaaacacacatacacagcggccattcccctatgaacataaaaatacttggagtgctcaaaattgtaaaaatggcagttgtgttctggacctctccaagtgtcttttcattcagggaaaactgttgtttgccgagcccaaggatgcgggctttccatttagccaggatatcaatagccatttggccagcctctcaatggctagaaacacgagccccactccagaccccactgttagagaggctttgtgtgccccggataacttaaatgcgagtattgaaagtcagggccagattaagatgtacatcaatgaagtgtgtcgggagactgtgtcacgttgctgcaactcatttctgcagcaggccggattaaatttgttaataagcatgacagttattaataacatgcttgccaagtccgcttcagacttgaagtttcctttgatatcagagggaagtggatgtgctaaggttcaggttttgaaaccgctgatgggtttgtctgaaaagccagtcttggcgggggagttagtcggtgcccagatgctcttctcattcatgtccctctttatcagaaatggaaacagagagattctcctggaaacccctgccccataaacggccctctcgaacacaatgggacggaatccacccacaacgcgcttggtttgcagatgtcaaagaatctgcagagggtgctactgaagatccagccttagccaatcaccacctcattgggtgaaagttccagggctcaatccaggaccacactcttattggccaggcaggggctcccacagagctttgagtaacttcttggttgtgcagtctgcaggcaatgttggcattgtaaattcctcccttgcagcctccttcatgtggtgaggggatcacttcagctgcctgctgtggacaaagaacatcaaattacagcatcacgagtgctattgttgcctgtggtggtctccctgtccaagcgggaccgctttgcagagaccagaggcatatcgcggcttgagctgaaaatgcatttgttgcagcttaggttgaattatttttcgtttgctctttcttctacacgcgcctgatggatagtgaacctattcatcaaaaaagtgcactgctcttctgtctattgtaccgacttaacctcttccacccaagtccgcatctgtgtgtatcatcaataaagttgtgtgctttgattggcaaaaaa

SEQ ID NO: 56701 - DNA, 1031 bp, Homo sapiens
  misc_feature (8)..(8): n is a, c, g, or t
ggcacggncacgtgaccaagagccgcctagagcacaagtcctgctagtcgcctccgtctgggtaccagccccctattactctgcaggcgtgtgaagaaagaaggaaactagctcggaccgtgcaggtttgtaggtctgttggcctgtaggtttcggcacaagtttcagcgagagaaggagaaaactgccttggttggaaccttgcagtgcagggaaaggggtgtggcggcctttgctggggaaatggcggacgacaagtggggcggaggaggcctgcgtccggaaagtcagtagaattcatcacaagagagctacaagagcctggaagaagctgaagactgctaccctccatccttactcaccctggacctgagagacctcttcaatcagaaatggaaacagagagattctcctggaaacccctgccccataaacggccctctcgaacacaatgggacggaatccacccacaacgcgcttggtttgcagatgtcaaagaatctgcagagggtgctactgaagatccagccttagccaatcaccacctcattgggtgaaagttccagggctcaatccaggaccacactcttattggccaggcaggggctcccacagagctttgagtaacttcttggttgtgcagtctgcaggcaatgttggcattgtaaattcctcccttgcagcctccttcatgtggtgaggggatcacttcagctgcctgctgtggacaaagaacatcaaattacagcatcacgagtgctattgttgcctgtggtggtctccctgtccaagcgggaccgctttgcagagaccagaggcatatcgcggcttgagctgaaaatgcatttgttgcagcttaggttgaattatttttcgtttgctctttcttctacacgcgcctgatggatagtgaacctattcatcaaaaaagtgcactgctcttctgtctattgtaccgacttaacctcttccacccaagtccgcatctgtgtgtatcatcaataaagttgtgtgctttgattggcaaaaaa

SEQ ID NO: 56702 - DNA, 889 bp, Homo sapiens
  misc_feature (8)..(8): n is a, c, g, or t
ggcacggncacgtgaccaagagccgcctagagcacaagtcctgctagtcgcctccgtctgggtaccagccccctattactctgcaggcgtgtgaagaaagaaggaaactagctcggaccgtgcaggtttgtaggtctgttggcctgtaggtttcggcacaagtttcagcgagagaaggagtggaagaagctgaagactgctaccctccatccttactcaccctggacctgagagacctcttcaatcagaaatggaaacagagagattctcctggaaacccctgccccataaacggccctctcgaacacaatgggacggaatccacccacaacgcgcttggtttgcagatgtcaaagaatctgcagagggtgctactgaagatccagccttagccaatcaccacctcattgggtgaaagttccagggctcaatccaggaccacactcttattggccaggcaggggctcccacagagctttgagtaacttcttggttgtgcagtctgcaggcaatgttggcattgtaaattcctcccttgcagcctccttcatgtggtgaggggatcacttcagctgcctgctgtggacaaagaacatcaaattacagcatcacgagtgctattgttgcctgtggtggtctccctgtccaagcgggaccgctttgcagagaccagaggcatatcgcggcttgagctgaaaatgcatttgttgcagcttaggttgaattatttttcgtttgctctttcttctacacgcgcctgatggatagtgaacctattcatcaaaaaagtgcactgctcttctgtctattgtaccgacttaacctcttccacccaagtccgcatctgtgtgtatcatcaataaagttgtgtgctttgattggcaaaaaa

SEQ ID NO: 56703 - DNA, 1170 bp, Homo sapiens
  misc_feature (8)..(8): n is a, c, g, or t
ggcacggncacgtgaccaagagccgcctagagcacaagtcctgctagtcgcctccgtctgggtaccagccccctattactctgcaggcgtgtgaagaaagaaggaaactagctcggaccgtgcaggtcggtgcgagggtgggcgctgcttgagaggaggtatgggtggaagagggccaagaacgccacagatccgagttcaggccgatcacagctgggtccctttctcgcctactttctaaatactgctacccacccccaccccaccccgtgctcattttagtagagagaagtggcgggtttcgggtgggggtgaggggagtgaatggcgtttccagagactccgagaaaagaaaggttctagtgtcccgggtgctggtccgtccaccaagcactccgtcccctcggtcccttgtctgtttgcaggtttgtaggtctgttggcctgtaggtttcggcacaagtttcagcgagagaaggagaaaactgccttggttggaaccttgcaggtcagtgtgaaggtgggattagcccaggaccatgggtgggggtggcggaggaggggggctgggatatgagagggccaggtccgagtcgccctctcctggccccttctttctccacacccactcccatttcagtgcagggaaaggggtgtggcggcctttgctggggaaatggcggacgacaagtggggcggaggaggcctgcgtccggaaagtcagtagaattcatcacaagagagctacaagagcctggaagaagctgaagactgctaccctccatccttactcaccctggacctgagagacctcttcaatcagcctccttcatgtggtgaggggatcacttcagctgcctgctgtggacaaagaacatcaaattacagcatcacgagtgctattgttgcctgtggtggtctccctgtccaagcgggaccgctttgcagagaccagaggcatatcgcggcttgagctgaaaatgcatttgttgcagcttaggttgaattatttttcgtttgctctttcttctacacgcgcctgatggatagtgaacctattcatcaaaaaagtgcactgctcttctgtctattgtaccgacttaacctcttccacccaagtccgcatctgtgtgtatcatcaataaagttgtgtgctttgattggcaaaaaa

SEQ ID NO: 56704 - DNA, 1854 bp, Homo sapiens
  misc_feature (8)..(8): n is a, c, g, or t
ggcacggncacgtgaccaagagccgcctagagcacaagtcctgctagtcgcctccgtctgggtaccagccccctattactctgcaggcgtgtgaagaaagaaggaaactagctcggaccgtgcaggtttgtaggtctgttggcctgtaggtttcggcacaagtttcagcgagagaaggagaaaactgccttggttggaaccttgcagattcatcacaagagagctacaagagcctggaagaagctgaagactgctaccctccatccttactcaccctggacctgagagacctcttcaatcaggtggagcaaggccctctcctgtcctgccccaaggctggcacagacttgagcatgggccgggctcgggaagtgggttggatggcggcaggactgatgattggggctggtgcctgctactgcgtttacaaactgaccataggaagagatgacagtgagaagctggaggaggagggggaagaggagtgggacgatgaccaggagctggatgaggaggagcctgatatttggtttgattttgaaactatggctcggccctggactgaggatggggattggactgaacctggggccccaggtggcactgaggacaggccctcagggggaggcaaggccaaccgagcacacccaataaaacagcggccattcccctatgaacataaaaatacttggagtgctcaaaattgtaaaaatggcagttgtgttctggacctctccaagtgtcttttcattcagggaaaactgttgtttgccgagcccaaggatgcgggctttccatttagccaggatatcaatagccatttggccagcctctcaatggctagaaacacgagccccactccagaccccactgttagagaggctttgtgtgccccggataacttaaatgcgagtattgaaagtcagggccagattaagatgtacatcaatgaagtgtgtcgggagactgtgtcacgttgctgcaactcatttctgcagcaggccggattaaatttgttaataagcatgacagttattaataacatgcttgccaagtccgcttcagacttgaagtttcctttgatatcagagggaagtggatgtgctaaggttcaggttttgaaaccgctgatgggtttgtctgaaaagccagtcttggcgggggagttagtcggtgcccagatgctcttctcattcatgtccctctttatcagaaatggaaacagagagattctcctggaaacccctgccccataaacggccctctcgaacacaatgggacggaatccacccacaacgcgcttggtttgcagatgtcaaagaatctgcagagggtgctactgaagatccagccttagccaatcaccacctcattgggtgaaagttccagggctcaatccaggaccacactcttattggccaggcaggggctcccacagagctttgagtaacttcttggttgtgcagtctgcaggcaatgttggcattgtaaattcctcccttgcagcctccttcatgtggtgaggggatcacttcagctgcctgctgtggacaaagaacatcaaattacagcatcacgagtgctattgttgcctgtggtggtctccctgtccaagcgggaccgctttgcagagaccagaggcatatcgcggcttgagctgaaaatgcatttgttgcagcttaggttgaattatttttcgtttgctctttcttctacacgcgcctgatggatagtgaacctattcatcaaaaaagtgcactgctcttctgtctattgtaccgacttaacctcttccacccaagtccgcatctgtgtgtatcatcaataaagttgtgtgctttgattggcaaaaaa

SEQ ID NO: 56705 - DNA, 911 bp, Homo sapiens
  misc_feature (8)..(8): n is a, c, g, or t
ggcacggncacgtgaccaagagccgcctagagcacaagtcctgctagtcgcctccgtctgggtaccagccccctattactctgcaggcgtgtgaagaaagaaggaaactagctcggaccgtgcaggtttgtaggtctgttggcctgtaggtttcggcacaagtttcagcgagagaaggagaaaactgccttggttggaaccttgcaggtcagtgtgaaggtgggattagcccaggaccatgggtgggggtggcggaggaggggggctgggatatgagagggccaggtccgagtcgccctctcctggccccttctttctccacacccactcccatttcagtgcagggaaaggggtgtggcggcctttgctggggaaatggcggacgacaagtggggcggaggaggcctgcgtccggaaagtcagtagagtatgagaaatattttaaactcaagtgtctaaaattcacaaaaacagaaattgggacctgtgtcctcagttcatccactacactttcatttctccattgccgcctacctgtctttgcatttgtccttctgccagactctatcctctatcaccgtggagggaccactgacaacagaagacaagggaaaacgaaggaatttatctgactttggtagaggttaatgagagaaactgcccttaatctttgggggtggaggtctggtgtaggagactacctgagaggtactcacactgtcaccctcctagctatcatagcagagacccatctcctgcccttccctgtggacccaggaagagaaatgggggctcctgaggtcgatagaggaagacagaaaagaaaagaacaaagaaattgtatcctgttaatctgcctttatcaccaactcgaaatccaccctgtctgtgaggcacaaagccaaacatag

SEQ ID NO: 56706 - DNA, 1772 bp, Homo sapiens
  misc_feature (8)..(8): n is a, c, g, or t
ggcacggncacgtgaccaagagccgcctagagcacaagtcctgctagtcgcctccgtctgggtaccagccccctattactctgcaggcgtgtgaagaaagaaggaaactagctcggaccgtgcagattcatcacaagagagctacaagagcctggaagaagctgaagactgctaccctccatccttactcaccctggacctgagagacctcttcaatcaggtggagcaaggccctctcctgtcctgccccaaggctggcacagacttgagcatgggccgggctcgggaagtgggttggatggcggcaggactgatgattggggctggtgcctgctactgcgtttacaaactgaccataggaagagatgacagtgagaagctggaggaggagggggaagaggagtgggacgatgaccaggagctggatgaggaggagcctgatatttggtttgattttgaaactatggctcggccctggactgaggatggggattggactgaacctggggccccaggtggcactgaggacaggccctcagggggaggcaaggccaaccgagcacacccaataaaacagcggccattcccctatgaacataaaaatacttggagtgctcaaaattgtaaaaatggcagttgtgttctggacctctccaagtgtcttttcattcagggaaaactgttgtttgccgagcccaaggatgcgggctttccatttagccaggatatcaatagccatttggccagcctctcaatggctagaaacacgagccccactccagaccccactgttagagaggctttgtgtgccccggataacttaaatgcgagtattgaaagtcagggccagattaagatgtacatcaatgaagtgtgtcgggagactgtgtcacgttgctgcaactcatttctgcagcaggccggattaaatttgttaataagcatgacagttattaataacatgcttgccaagtccgcttcagacttgaagtttcctttgatatcagagggaagtggatgtgctaaggttcaggttttgaaaccgctgatgggtttgtctgaaaagccagtcttggcgggggagttagtcggtgcccagatgctcttctcattcatgtccctctttatcagaaatggaaacagagagattctcctggaaacccctgccccataaacggccctctcgaacacaatgggacggaatccacccacaacgcgcttggtttgcagatgtcaaagaatctgcagagggtgctactgaagatccagccttagccaatcaccacctcattgggtgaaagttccagggctcaatccaggaccacactcttattggccaggcaggggctcccacagagctttgagtaacttcttggttgtgcagtctgcaggcaatgttggcattgtaaattcctcccttgcagcctccttcatgtggtgaggggatcacttcagctgcctgctgtggacaaagaacatcaaattacagcatcacgagtgctattgttgcctgtggtggtctccctgtccaagcgggaccgctttgcagagaccagaggcatatcgcggcttgagctgaaaatgcatttgttgcagcttaggttgaattatttttcgtttgctctttcttctacacgcgcctgatggatagtgaacctattcatcaaaaaagtgcactgctcttctgtctattgtaccgacttaacctcttccacccaagtccgcatctgtgtgtatcatcaataaagttgtgtgctttgattggcaaaaaa

SEQ ID NO: 56707 - DNA, 2318 bp, Homo sapiens
  misc_feature (8)..(8): n is a, c, g, or t
ggcacggncacgtgaccaagagccgcctagagcacaagtcctgctagtcgcctccgtctgggtaccagccccctattactctgcaggcgtgtgaagaaagaaggaaactagctcggaccgtgcaggtttgtaggtctgttggcctgtaggtttcggcacaagtttcagcgagagaaggagaaaactgccttggttggaaccttgcagattcatcacaagagagctacaagagcctggaagaagctgaagactgctaccctccatccttactcaccctggacctgagagacctcttcaatcaggtggagcaaggccctctcctgtcctgccccaaggctggcacagacttgagcatgggccgggctcgggaagtgggttggatggcggcaggactgatgattggggctggtgcctgctactgcgtttacaaactgaccataggaagagatgacagtgagaagctggaggaggagggggaagaggagtgggacgatgaccaggagctggatgaggaggagcctgatatttggtttgattttgaaactatggctcggccctggactgaggatggggattggactgaacctggggccccaggtggcactgaggacaggccctcagggggaggcaaggccaaccgagcacacccaataaaacagcggccattcccctatgaacataaaaatacttggagtgctcaaaattgtaaaaatggcagttgtgttctggacctctccaagtgtcttttcattcagggaaaactgttgtttgccgagcccaaggatgcgggctttccatttagccaggatatcaatagccatttggccagcctctcaatggctagaaacacgagccccactccagaccccactgttagagaggctttgtgtgccccggataacttaaatgcgagtattgaaagtcagggccagattaagatgtacatcaatgaagtgtgtcgggagactgtgtcacgttgctgcaactcatttctgcagcaggccggattaaatttgttaataagcatgacagttattaataacatgcttgccaagtccgcttcagacttgaagtttcctttgatatcagagggaagtggatgtgctaaggttcaggttttgaaaccgctgatgggtttgtctgaaaagccagtcttggcgggggagttagtcggtgcccagatgctcttctcattcatgtccctctttatcagaaatggaaacagagagattctcctggaaacccctgccccataaacggccctctcgaacacaatgggacggaatccacccacaacgcgcttggtttgcagatgtcaaagaatctgcagagggtgctactgaagatccagccttagccaatcaccacctcattgggtgaaagttccagggctcaatccaggaccacactcttattggccaggcaggggctcccacagagctttgagtaacttcttggttgtgcagtctgcaggcaatgttggcattgtaaattcctcccttgcagcctccttcatgtggtgaggggatcacttcagctgcctgctgtggacaaagaacatcaaattacagcatcacgagtgctattgttgcctgtggtggtctccctgtccaagcgggaccgctttgcagagaccagaggcatatcgcggcttgagctgaaaatgcatttgttgcagcttaggttgaattatttttcgtttgctctttcttctacacccaatgctgacggcagcagccgaatgtcatccttatctggcggcgggggcggcggcggcgggggcagcggtggcggcggcggcggcggcggcgggaagaggtggcagccgggggggctgtggcggtcgcggccccggtcgtggcccggcccgcgcccgagtactccctcgtcgtcgtcctcctcatcgtcctcgtcggccgcctccacctcctcctcctcctccaaccaatatgactggtgttctcataagaggaagaaattttgacacagacatatatacagggaaatccatgtgaagacacatggagaaaacagccatctacaagatgaggagagagggctcagaagaaaccaaccctgctgacaccctgatcttggacttctggcctttagaatcataacaaaatccatttttattgttgaagccacccactctgtgatacactgctatggcagccctagcaaactaaaacagtgagtaaagagtatatgggtatactctatagcctatattgcaacttatttaaaatcctgaaattatttccaaacaaaaaagtgaattcctactgaacacattttgcacaccaggcattgtacag

SEQ ID NO: 56708 - DNA, 389 bp, Homo sapiens
cagagatcagaagatttttagggcagtaaaactattctgtatgataccataatgttacagatatgtcattatatatttgtcaaaattcacagaaggtacaacacagagtgaaccctatggattttggttgataatgatatgtcaatgttggtttattgattatatcaaatttaccataccaactggggctgttaatggtggaggagggagtatgtggaaactctcagtactttttgctcaatttttctgtgaatctagcactcttctaaaaaatcaagtctaataattacaaaacaaaagcaaaaaccatgtggtattggcatagggatagacatatagatcaattaatagaataaataaactgatacacttatgctctattgattttc

SEQ ID NO: 56709 - DNA, 954 bp, Homo sapiens
ttgaacccatgagttcaagaccagtctgggcaacatagcgagactccacctctaaaaatatatataagaataaaaaattttttttaaatgaagcatagtaagtacataaaccaataacatagtcactcactatgactatgaagtattatgtactgtatgtaattgtacgtgctgtgcatttatacagctggcagcacaataggtttgtgtacaccaagcatcaccacaaagatttgggtaatgcattccattgccctaacggggctacaacatcactaggcaataggaatctttcaggtccgttgttgtcttctgggacttctgtcatatatgtggtctgcctttgaccaaaatgttgttatgcagtgcgtgactatacccactatatgttcaagttctaaattggattctgggaagctgattaaagagaaaataatgtgtagtctattggaagaggtagataaacaatttttaagtgaaataattgctaatttttaacctctgtggaggcactgaactgatcattgaaagctctattttacttactaaagatatggtagcttataaaaattacttatagtaaatggacatgaaaaggtcatttgcttacatctctaaattcattttgatggaaaaatagtggaaaaatgtttgcagatacccttttgtttgtttgtttttttcataatagataattgccactaaaattgaagaatggccaggtccgttggctcatgcctgtaatcccagcactttgggaggccaaggcgggtggattacttaagctcaggagttcaagattaacctggccaacatggcaaaaccccgtctctactaaaaatacaaaaaattagccaggtgtggtggtgcacacgcctgttgtcccagctacttgggtgactgaggcatgagaatcacatgagcctgggaggcggaggttgcagtgagctgaga

SEQ ID NO: 56710 - DNA, 1404 bp, Homo sapiens
agcggggcggtctcagcgcgcctgcgccgagcggccctgcgcgcagtgaggcagtggcgggggaaggcaccggtggggccgacgggcgggttgaaggagggaagcgggcgagcgaagtcccagtgcgcgccgcggcagcccgggcaccctccccttccgggcgtgagtcgctgtgaaaagagctgaagcgagcggactcgcaccggcagcgaggcgccgctcccgccgcctcagcccggccttcctcggctccggcgctccggtcgcggggcccgggttcctcggcacaccccgctccagccgcccccagagcctgtccccagcccttcggaagccccggcgccagcccgggccctcggcagggaggatgacggagctgcagtcggcactgctactgcgaagacagctggcagaactcaacaaaaatccagtggaaggcttttctgcaggtttaatagatgacaatgatctctaccgatgggaagtccttattattggccctccagatacactttatgaaggtggtgtttttaaggctcatcttactttcccaaaagattatcccctccgacctcctaaaatgaaattcattacagaaatctggcacccaaatgttgataaaaatggtgatgtgtgcatttctattcttcatgagcctggggaagataagtatggttatgaaaagccagaggaacgctggctccctatccacactgtggaaaccatcatgattagtgtcatttctatgctggcagaccctaatggagactcacctgctaatgttgatgctgcgaaagaatggagggaagatagaaatggagaatttaaaagaaaagttgcccgctgtgtaagaaaaagccaagagactgcttttgagtgacatttatttagcagctagtaacttcacttatttcagggtctccaattgagaaacatggcactgtttttcctgcactctacccacctattgctggacttctgttgtacaagttggcaaacactggctggaactgggctgcaataaaacatgccagttatcaatgctgacaagagcctaacaagtgccaacttacagatgattacgcattttgaattctaatgaactgttttaaccttcaggaagaattgtaaagacctgtacatagcacaacatgatccggataatatatatactgttcatgtacatccacaaatacaccttgtaccaaataatgctttcttgtagtagaataagaatcgtgtaaattctaagagattttagcaggttttctttcctattcattgtttcttatcagtttaaaaggattcctttaagcatgtcagatgaaaagcaattaggattaaaagtttccatttaatttcccttaaacccttgaggcttcattaaactcttttcacttacta

SEQ ID NO: 56711 - DNA, 4219 bp, Homo sapiens
agcggggcggtctcagcgcgcctgcgccgagcggccctgcgcgcagtgaggcagtggcgggggaaggcaccggtggggccgacgggcgggttgaaggagggaagcgggcgagcgaagtcccagtgcgcgccgcggcagcccgggcaccctccccttccgggcgtgagtcgctgtgaaaagagctgaagcgagcggactcgcaccggcagcgaggcgccgctcccgccgcctcagcccggccttcctcggctccggcgctccggtcgcggggcccgggttcctcggcacaccccgctccagccgcccccagagcctgtccccagcccttcggaagccccggcgccagcccgggccctcggcagggaggatgacggagctgcagtcggcactgctactgcgaagacagctggcagaactcaacaaaaatccagtggaaggcttttctgcaggtttaatagatgacaatgatctctaccgatgggaagtccttattattggccctccagatacactttatgaaggtggtgtttttaaggctcatcttactttcccaaaagattatcccctccgacctcctaaaatgaaattcattacagaaatctggcacccaaatgttgataaaaatggtgatgtgtgcatttctattcttcatgagcctggggaagataagtatggttatgaaaagccagaggaacgctggctccctatccacactgtggaaaccatcatgattagtgtcatttctatgctggcagaccctaatggagactcacctgctaatgttgatgctgcgaaagaatggagggaagatagaaatggagaatttaaaagaaaagttgcccgctgtgtaagaaaaagccaagagactgcttttgagtgacatttatttagcagctagtaacttcacttatttcagggtctccaattgagaaacatggcactgtttttcctgcactctacccacctattgctggacttctgttgtacaagttggcaaacactggctggaactgggctgcaataaaacatgccagttatcaatgctgacaagagcctaacaagtgccaacttacagatgattacgcattttgaattctaatgaactgttttaaccttcaggaagaattgtaaagacctgtacatagcacaacatgatccggataatatatatactgttcatgtacatccacaaatacaccttgtaccaaataatgctttcttgtagtagaataagaatcgtgtaaattctaagagattttagcaggttttctttcctattcattgtttcttatcagtttaaaaggattcctttaagcatgtcagatgaaaagcaattaggattaaaagtttccatttaatttcccttaaacccttgaggcttcattaaactcttttcacttactaaacttttgtatcttctttgttttgacacactcccctttgcttttatctcttacctgccagaatgttctcaaatgatttagttcaaatactgaaatacttaatgagcaattacttgatttttaatgatgacttcgaaggagtcatcactaggtgctttgtcctttttgtattctagttgcacccacctcttggattggatatagcaataacatttattggccgttgtgagctcttgatcccagtcattacccctgagaactaaaaatagatggttcttaattcaacttactgaaaatttccccaaacaatagcaaatctgacttttccctcttcagttgcctggtattaaggttggataaatgaagcatgcacagctacaggctttctacttaacttctgggtttgctattacaaatcctatttactctcatacccttctccttagtccttcatatttctctgcctctattcttctatactgcagatttttctcacctattgtacaaagaaattgcgatgtatattttcatgtaatttgattttggaattctgtcaccttatgtagtgagttcttccaaaatataattttttttcaataattgtcaagttgttggcttttattgtattgaatgaaggctataatactgagtgccagagaagtggtttaggaaaatctcaggttgattccttatgcaaatgaacttttaatacttgaaaatcacatggccatggcagtatatgtatttggttctatctagattcttctgtgaatctaaaagcattacaggggtaaatgctttgctatttgacgtatagatcccgtcactaacaatagtacacttggatgtgattaatgtttgagcttcaatatatttcatatcatacagttttctaaaacaacttcagcaaatggtaaaatgaacatgtgcagtgttaaaggcaggccttaggctccttcatgtttgttgtgaggttgtgtgtgggaagtagtctttggcttataagggatagaacttgagacagtagcagatgggacatggtgtttgattgtgagaatcagtgagaattcgtgcatctctgctctgtggggtttggagaaatgctttggcagaagagtgaaagaactcctgccaagagcccagacctctacaaacgttgtatgtccttttttaagcagaaataaaatggttgaggatgtagtcacagtagagagtgatttttttctaagtccctgtcctctactctgaagcgttataaaaacctgtaaacattatacaaacccacaaaccttatagaaactcgtaagtgtgttgtgactggaaattgattcattagaacccagttttctttaagaactttgtgacttggtttttttttttccttttccaaagactgtaaaaatagttgccccaaaatgtcagcactgcacaccctccagggacttggaatacaatcctttttacttttttttttttttttttaaagaaacggggtctctctgtcacccaggctggagtgcagtggcaacgatcatagctaactgcagctttgacctcctgggctcaagtgatcctcctgcctcagcctcctgagtagctaggactacaggtgtatgccaccatgcctggctaatacaaaaaaattcttttaagagatgggatccctcccttttaaaatcagaacttgttcacatggtggttgcttgtggcaaaacggagttcaaattttgctctcctattgctataattctgctagcaatctgttgaggtgaaacttgggatctgactcttcagcaagcagcaaatgacctagtaactcagggacaactatttttgaactttaagtgccactttaatgcagttagtttgataaaaccatgtgggttttttttttagggctagctctacgggagtggaagtgagagccaggcatgagtgcgtctccacatgcttttccacctgccctgagtgtgttacatactgaaacaggcctacatagatgttacaacttcccttcctctgtcggagatgtcatctgtgcctttctcagtgttcatctgataatgtaaatttaaatgcctctacatttgatacgaaacccacattcaggtgacactgaacgaggtggcttttgtcccaccagtgcctcatcagtgtgaggcgattcctctctgctttaggaaaatgatttttccccctaaacttgtgccaaccatcaacaacatctccatagatcttatggattgtagaactgttggctgtttcctaaatttattccaagttctcgtagaggcatatagatttcagtctgtgcttgtatgggatagatgatctgagtggctttctggcctcttttttgagtttaaaatccatatgaggttgacttgtcatactaaggtaacatgtttgtgaggttattccactagtactgtgatcacgtgggtgtcagtatctttaacggccttcattcttggttgtgagattttatttgatatgcccactcaccctcgacgaatctgcccgctttgggctgtggtgcctgtgtatctttgcccgtctggtctccagttggtggaattaccttttttgtactgccacttctcagcatctttgaaatttgacataatgttgcttcatttcagtttttttagttctgtaatttgttgattgtatttaactatgtgagttctgttgtgatgtttactgtattgtaaagcacctcattcatgtgatgagtgctctataaatcaataaatgatgacttagaggctgtatcacgagctattttggttttaggatgcaggtctcaaaagcaa

SEQ ID NO: 56712 - DNA, 4151 bp, Homo sapiens
agcggggcggtctcagcgcgcctgcgccgagcggccctgcgcgcagtgaggcagtggcgggggaaggcaccggtggggccgacgggcgggttgaaggagggaagcgggcgagcgaagtcccagtgcgcgccgcggcagcccgggcaccctccccttccgggcgtgagtcgctgtgaaaagagctgaagcgagcggactcgcaccggcagcgaggcgccgctcccgccgcctcagcccggccttcctcggctccggcgctccggtcgcggggcccgggttcctcggcacaccccgctccagccgcccccagagcctgtccccagcccttcggaagccccggcgccagcccgggccctcggcagggaggatgacggagctgcagtcggcactgctactgcgaagacagctggcagaactcaacaaaaatccagtggaaggcttttctgcaggtttaatagatgacaatgatctctaccgatgggaagtccttattattggccctccagatacactttatgaaggtggtgtttttaaggctcatcttactttcccaaaagattatcccctccgacctcctaaaatgaaattcattacagaaatctggcacccaaatgttgataaaaatggtgatgtgtgcatttctattcttcatgagcctggggaagataagtatggttatgaaaagccagaggaacgctggctccctatccacactgtggaaaccatcatgattagtgtcatttctatgctggcagaccctaatggagactcacctgctaatgttgatgctgcgaaagaatggagggaagatagaaatggagaatttaaaagaaaagttgcccgctgtgtaagaaaaagccaagagactgcttttgagtgacatttatttagcagctagtaacttcacttatttcagggtctccaattgagaaacatggcactgtttttcctgcactctacccacctattgctggacttctgttgtacaagttggcaaacactggctggaactgggctgcaataaaacatgccagttatcaatgctgacaagagcctaacaagtgccaacttacagatgattacgcattttgaattctaatgaactgttttaaccttcaggaagaattgtaaagacctgtacatagcacaacatgatccggataatatatatactgttcatgtacatccacaaatacaccttgtaccaaataatgctttcttgtagtagaataagaatcgtgtaaattctaagagattttagcaggttttctttcctattcattgtttcttatcagtttaaaaggattcctttaagcatgtcagatgaaaagcaattaggattaaaagtttccatttaatttcccttaaacccttgaggcttcattaaactcttttcacttactaaacttttgtatcttctttgttttgacacactcccctttgcttttatctcttacctgccagaatgttctcaaatgatttagttcaaatactgaaatacttaatgagcaattacttgatttttaatgatgacttcgaaggagtcatcactaggtgctttgtcctttttgtattctagttgcacccacctcttggattggatatagcaataacatttattggccgttgtgagctcttgatcccagtcattacccctgagaactaaaaatagatggttcttaattcaacttactgaaaatttccccaaacaatagcaaatctgacttttccctcttcagttgcctggtattaaggttggataaatgaagcatgcacagctacaggctttctacttaacttctgggtttgctattacaaatcctatttactctcatacccttctccttagtccttcatatttctctgcctctattcttctatactgcagatttttctcacctattgtacaaagaaattgcgatgtatattttcatgtaatttgattttggaattctgtcaccttatgtagtgagttcttccaaaatataattttttttcaataattgtcaagttgttggcttttattgtattgaatgaaggctataatactgagtgccagagaagtggtttaggaaaatctcaggttgattccttatgcaaatgaacttttaatacttgaaaatcacatggccatggcagtatatgtatttggttctatctagattcttctgtgaatctaaaagcattacaggggtaaatgctttgctatttgacgtatagatcccgtcactaacaatagtacacttggatgtgattaatgtttgagcttcaatatatttcatatcatacagttttctaaaacaacttcagcaaatggtaaaatgaacatgtgcagtgttaaaggcaggccttaggctccttcatgtttgttgtgaggttgtgtgtgggaagtagtctttggcttataagggatagaacttgagacagtagcagatgggacatggtgtttgattgtgagaatcagtgagaattcgtgcatctctgctctgtggggtttggagaaatgctttggcagaagagtgaaagaactcctgccaagagcccagacctctacaaacgttgtatgtccttttttaagcagaaataaaatggttgaggatgtagtcacagtagagagtgatttttttctaagtccctgtcctctactctgaagcgttataaaaacctgtaaacattatacaaacccacaaaccttatagaaactcgtaagtgtgttgtgactggaaattgattcattagaacccagttttctttaagaactttgtgacttggtttttttttttccttttccaaagactgtaaaaatagttgccccaaaatgtcagcactgcacaccctccagggacttggaatacaatcctttttacttttttttttttttttttaaagaaacggggtctctctgtcacccaggctggagtgcagtggcaacgatcatagctaactgcagctttgacctcctgggctcaagtgatcctcctgcctcagcctcctgagtagctaggactacaggtgtatgccaccatgcctggctaatacaaaaaaattcttttaagagatgggatccctcccttttaaaatcagaacttgttcacatggtggttgcttgtggcaaaacggagttcaaattttgctctcctattgctataattctgctagcaatctgttgaggtgaaacttgggatctgactcttcagcaagcagcaaatgacctagtaactcagggacaactatttttgaactttaagtgccactttaatgcagttagtttgataaaaccatgtgggttttttttttagggctagctctacgggagtggaagtgagagccaggcatgagtgcgtctccacatgcttttccacctgccctgagtgtgttacatactgaaacaggcctacatagatgttacaacttcccttcctctgtcggagatgtcatctgtgcctttctcagtgttcatctgataatgtaaatttaaatgcctctacatttgatacgaaacccacattcaggtgacactgaacgaggtggcttttgtcccaccagtgcctcatcagtgtgaggcgattcctctctgctttaggaaaatgatttttccccctaaacttgtgccaaccatcaacaacatctccatagatcttatggattgtagaactgttggctgtttcctaaatttattccaagttctcgtagaggcatatagatttcagtctgtgcttgtatgggatagatgatctgagtggctttctggcctcttttttgagtttaaaatccatatgaggttgacttgtcatactaaggtaacatgtttgtgagattttatttgatatgcccactcaccctcgacgaatctgcccgctttgggctgtggtgcctgtgtatctttgcccgtctggtctccagttggtggaattaccttttttgtactgccacttctcagcatctttgaaatttgacataatgttgcttcatttcagtttttttagttctgtaatttgttgattgtatttaactatgtgagttctgttgtgatgtttactgtattgtaaagcacctcattcatgtgatgagtgctctataaatcaataaatgatgacttagaggctgtatcacgagctattttggttttaggatgcaggtctcaaaagcaa

SEQ ID NO: 56713 - DNA, 3820 bp, Homo sapiens
  misc_feature (3804)..(3804): n is a, c, g, or t
agcggggcggtctcagcgcgcctgcgccgagcggccctgcgcgcagtgaggcagtggcgggggaaggcaccggtggggccgacgggcgggttgaaggagggaagcgggcgagcgaagtcccagtgcgcgccgcggcagcccgggcaccctccccttccgggcgtgagtcgctgtgaaaagagctgaagcgagcggactcgcaccggcagcgaggcgccgctcccgccgcctcagcccggccttcctcggctccggcgctccggtcgcggggcccgggttcctcggcacaccccgctccagccgcccccagagcctgtccccagcccttcggaagccccggcgccagcccgggccctcggcagggaggatgacggagctgcagtcggcactgctactgcgaagacagctggcagaactcaacaaaaatccagtggaaggcttttctgcaggtttaatagatgacaatgatctctaccgatgggaagtccttattattggccctccagatacactttatgaaggtggtgtttttaaggctcatcttactttcccaaaagattatcccctccgacctcctaaaatgaaattcattacagaaatctggcacccaaatgttgataaaaatggtgatgtgtgcatttctattcttcatgagcctggggaagataagtatggttatgaaaagccagaggaacgctggctccctatccacactgtggaaaccatcatgattagtgtcatttctatgctggcagaccctaatggagactcacctgctaatgttgatgctgcgaaagaatggagggaagatagaaatggagaatttaaaagaaaagttgcccgctgtgtaagaaaaagccaagagactgcttttgagtgacatttatttagcagctagtaacttcacttatttcagggtctccaattgagaaacatggcactgtttttcctgcactctacccacctattgctggacttctgttgtacaagttggcaaacactggctggaactgggctgcaataaaacatgccagttatcaatgctgacaagagcctaacaagtgccaacttacagatgattacgcattttgaattctaatgaactgttttaaccttcaggaagaattgtaaagacctgtacatagcacaacatgatccggataatatatatactgttcatgtacatccacaaatacaccttgtaccaaataatgctttcttgtagtagaataagaatcgtgtaaattctaagagattttagcaggttttctttcctattcattgtttcttatcagtttaaaaggattcctttaagcatgtcagatgaaaagcaattaggattaaaagtttccatttaatttcccttaaacccttgaggcttcattaaactcttttcacttactaaacttttgtatcttctttgttttgacacactcccctttgcttttatctcttacctgccagaatgttctcaaatgatttagttcaaatactgaaatacttaatgagcaattacttgatttttaatgatgacttcgaaggagtcatcactaggtgctttgtcctttttgtattctagttgcacccacctcttggattggatatagcaataacatttattggccgttgtgagctcttgatcccagtcattacccctgagaactaaaaatagatggttcttaattcaacttactgaaaatttccccaaacaatagcaaatctgacttttccctcttcagttgcctggtattaaggttggataaatgaagcatgcacagctacaggctttctacttaacttctgggtttgctattacaaatcctatttactctcatacccttctccttagtccttcatatttctctgcctctattcttctatactgcagatttttctcacctattgtacaaagaaattgcgatgtatattttcatgtaatttgattttggaattctgtcaccttatgtagtgagttcttccaaaatataattttttttcaataattgtcaagttgttggcttttattgtattgaatgaaggctataatactgagtgccagagaagtggtttaggaaaatctcaggttgattccttatgcaaatgaacttttaatacttgaaaatcacatggccatggcagtatatgtatttggttctatctagattcttctgtgaatctaaaagcattacaggggtaaatgctttgctatttgacgtatagatcccgtcactaacaatagtacacttggatgtgattaatgtttgagcttcaatatatttcatatcatacagttttctaaaacaacttcagcaaatggtaaaatgaacatgtgcagtgttaaaggcaggccttaggctccttcatgtttgttgtgaggttgtgtgtgggaagtagtctttggcttataagggatagaacttgagacagtagcagatgggacatggtgtttgattgtgagaatcagtgagaattcgtgcatctctgctctgtggggtttggagaaatgctttggcagaagagtgaaagaactcctgccaagagcccagacctctacaaacgttgtatgtccttttttaagcagaaataaaatggttgaggatgtagtcacagtagagagtgatttttttctaagtccctgtcctctactctgaagcgttataaaaacctgtaaacattatacaaacccacaaaccttatagaaactcgtaagtgtgttgtgactggaaattgattcattagaacccagttttctttaagaactttgtgacttggtttttttttttccttttccaaagactgtaaaaatagttgccccaaaatgtcagcactgcacaccctccagggacttggaatacaatcctttttacttttttttttttttttttaaagaaacggggtctctctgtcacccaggctggagtgcagtggcaacgatcatagctaactgcagctttgacctcctgggctcaagtgatcctcctgcctcagcctcctgagtagctaggactacaggtgtatgccaccatgcctggctaatacaaaaaaattcttttaagagatgggatccctcccttttaaaatcagaacttgttcacatggtggttgcttgtggcaaaacggagttcaaattttgctctcctattgctataattctgctagcaatctgttgaggtgaaacttgggatctgactcttcagcaagcagcaaatgacctagtaactcagggacaactatttttgaactttaagtgccactttaatgcagttagtttgataaaaccatgtgggttttttttttagggctagctctacgggagtggaagtgagagccaggcatgagtgcgtctccacatgcttttccacctgccctgagtgtgttacatactgaaacaggcctacatagatgttacaacttcccttcctctgtcggagatgtcatctgtgcctttctcagtgttcatctgataatgtaaatttaaatgcctctacatttgatacgaaacccacattcaggtgacactgaacgaggtggcttttgtcccaccagtgcctcatcagtgtgaggcgattcctctctgctttaggaaaatgatttttccccctaaacttgtgccaaccatcaacaacatctccatagatcttatggattgtagaactgttggctgtttcctaaatttattccaagttctcgtagaggcatatagatttcagtctgtgcttgtatgggatagatgatctgagtggctttctggcctcttttttgagtttaaaatccatatgaggttgacttgtcataagctgtttncctgggggatcctctg

SEQ ID NO: 56714 - DNA, 3470 bp, Homo sapiens
agcggggcggtctcagcgcgcctgcgccgagcggccctgcgcgcagtgaggcagtggcgggggaaggcaccggtggggccgacgggcgggttgaaggagggaagcgggcgagcgaagtcccagtgcgcgccgcggcagcccgggcaccctccccttccgggcgtgagtcgctgtgaaaagagctgaagcgagcggactcgcaccggcagcgaggcgccgctcccgccgcctcagcccggccttcctcggctccggcgctccggtcgcggggcccgggttcctcggcacaccccgctccagccgcccccagagcctgtccccagcccttcggaagccccggcgccagcccgggccctcggcagggaggatgacggagctgcagtcggcactgctactgcgaagacagctggcagaactcaacaaaaatccagtggaaggcttttctgcaggtttaatagatgacaatgatctctaccgatgggaagtccttattattggccctccagatacactttatgaaggtggtgtttttaaggctcatcttactttcccaaaagattatcccctccgacctcctaaaatgaaattcattacagaaatctggcacccaaatgttgataaaaatggtgatgtgtgcatttctattcttcatgagcctggggaagataagtatggttatgaaaagccagaggaacgctggctccctatccacactgtggaaaccatcatgattagtgtcatttctatgctggcagaccctaatggagactcacctgctaatgttgatgctgcgaaagaatggagggaagatagaaatggagaatttaaaagaaaagttgcccgctgtgtaagaaaaagccaagagactgcttttgagtgacatttatttagcagctagtaacttcacttatttcagggtctccaattgagaaacatggcactgtttttcctgcactctacccacctattgctggacttctgttgtacaagttggcaaacactggctggaactgggctgcaataaaacatgccagttatcaatgctgacaagagcctaacaagtgccaacttacagatgattacgcattttgaattctaatgaactgttttaaccttcaggaagaattgtaaagacctgtacatagcacaacatgatccggataatatatatactgttcatgtacatccacaaatacaccttgtaccaaataatgctttcttgtagtagaataagaatcgtgtaaattctaagagattttagcaggttttctttcctattcattgtttcttatcagtttaaaaggattcctttaagcatgtcagatgaaaagcaattaggattaaaagtttccatttaatttcccttaaacccttgaggcttcattaaactcttttcacttactaaacttttgtatcttctttgttttgacacactcccctttgcttttatctcttacctgccagaatgttctcaaatgatttagttcaaatactgaaatacttaatgagcaattacttgatttttaatgatgacttcgaaggagtcatcactaggtgctttgtcctttttgtattctagttgcacccacctcttggattggatatagcaataacatttattggccgttgtgagctcttgatcccagtcattacccctgagaactaaaaatagatggttcttaattcaacttactgaaaatttccccaaacaatagcaaatctgacttttccctcttcagttgcctggtattaaggttggataaatgaagcatgcacagctacaggctttctacttaacttctgggtttgctattacaaatcctatttactctcatacccttctccttagtccttcatatttctctgcctctattcttctatactgcagatttttctcacctattgtacaaagaaattgcgatgtatattttcatgtaatttgattttggaattctgtcaccttatgtagtgagttcttccaaaatataattttttttcaataattgtcaagttgttggcttttattgtattgaatgaaggctataatactgagtgccagagaagtggtttaggaaaatctcaggttgattccttatgcaaatgaacttttaatacttgaaaatcacatggccatggcagtatatgtatttggttctatctagattcttctgtgaatctaaaagcattacaggggtaaatgctttgctatttgacgtatagatcccgtcactaacaatagtacacttggatgtgattaatgtttgagcttcaatatatttcatatcatacagttttctaaaacaacttcagcaaatggtaaaatgaacatgtgcagtgttaaaggcaggccttaggctccttcatgtttgttgtgaggttgtgtgtgggaagtagtctttggcttataagggatagaacttgagacagtagcagatgggacatggtgtttgattgtgagaatcagtgagaattcgtgcatctctgctctgtggggtttggagaaatgctttggcagaagagtgaaagaactcctgccaagagcccagacctctacaaacgttgtatgtccttttttaagcagaaataaaatggttgaggatgtagtcacagtagagagtgatttttttctaagtccctgtcctctactctgaagcgttataaaaacctgtaaacattatacaaacccacaaaccttatagaaactcgtaagtgtgttgtgactggaaattgattcattagaacccagttttctttaagaactttgtgacttggtttttttttttccttttccaaagactgtaaaaatagttgccccaaaatgtcagcactgcacaccctccagggacttggaatacaatcctttttacttttttttttttttttttaaagaaacggggtctctctgtcacccaggctggagtgcagtggcaacgatcatagctaactgcagctttgaccctccgtgaggcaggaaaatagtttgaacccgggaggttggaggttgcagtgagtcgaaatcgtgccacgggacttccagccggggtgacagagcgagactcccttttaaaaaaaaaaaaaacacaaaacacaaccctctcttctttccccgggcttgtgttacaagaattccccatttttgaaagggttttatcaaaaatttccccacgtggtttcttgggggaagccaccttcttttcaccaacaaagtttggggcgtttcaaccgggctggtataactcacggggtttttcttataccagttaccaagagcgtgtaaaaggccccttctcctggttggtgggggagtcttcctctaaatatgttatgtcgggaagtggcatgcggtacaccactggaagtagggggggaacttacacgaataagacccggaaactgtaacttcttaaaaagtcctttaaggtccattaaaaagttggcccgtgaatgttaaaggagtcggagctagtggt

SEQ ID NO: 56715 - DNA, 3935 bp, Homo sapiens
agaggtgaatggtactttgagaaaggcagttgcactggacggattgtatagagcctgaagaatggaaggagagcagcaagtgagataaggaatgaagacaatcttaaagtgtaccgtgaaggggtgttgagaaatggtgcagtaactggagggcttgtgggcttcatttgtaactcaacaaaaatccagtggaaggcttttctgcaggtttaatagatgacaatgatctctaccgatgggaagtccttattattggccctccagatacactttatgaaggtggtgtttttaaggctcatcttactttcccaaaagattatcccctccgacctcctaaaatgaaattcattacagaaatctggcacccaaatgttgataaaaatggtgatgtgtgcatttctattcttcatgagcctggggaagataagtatggttatgaaaagccagaggaacgctggctccctatccacactgtggaaaccatcatgattagtgtcatttctatgctggcagaccctaatggagactcacctgctaatgttgatgctgcgaaagaatggagggaagatagaaatggagaatttaaaagaaaagttgcccgctgtgtaagaaaaagccaagagactgcttttgagtgacatttatttagcagctagtaacttcacttatttcagggtctccaattgagaaacatggcactgtttttcctgcactctacccacctattgctggacttctgttgtacaagttggcaaacactggctggaactgggctgcaataaaacatgccagttatcaatgctgacaagagcctaacaagtgccaacttacagatgattacgcattttgaattctaatgaactgttttaaccttcaggaagaattgtaaagacctgtacatagcacaacatgatccggataatatatatactgttcatgtacatccacaaatacaccttgtaccaaataatgctttcttgtagtagaataagaatcgtgtaaattctaagagattttagcaggttttctttcctattcattgtttcttatcagtttaaaaggattcctttaagcatgtcagatgaaaagcaattaggattaaaagtttccatttaatttcccttaaacccttgaggcttcattaaactcttttcacttactaaacttttgtatcttctttgttttgacacactcccctttgcttttatctcttacctgccagaatgttctcaaatgatttagttcaaatactgaaatacttaatgagcaattacttgatttttaatgatgacttcgaaggagtcatcactaggtgctttgtcctttttgtattctagttgcacccacctcttggattggatatagcaataacatttattggccgttgtgagctcttgatcccagtcattacccctgagaactaaaaatagatggttcttaattcaacttactgaaaatttccccaaacaatagcaaatctgacttttccctcttcagttgcctggtattaaggttggataaatgaagcatgcacagctacaggctttctacttaacttctgggtttgctattacaaatcctatttactctcatacccttctccttagtccttcatatttctctgcctctattcttctatactgcagatttttctcacctattgtacaaagaaattgcgatgtatattttcatgtaatttgattttggaattctgtcaccttatgtagtgagttcttccaaaatataattttttttcaataattgtcaagttgttggcttttattgtattgaatgaaggctataatactgagtgccagagaagtggtttaggaaaatctcaggttgattccttatgcaaatgaacttttaatacttgaaaatcacatggccatggcagtatatgtatttggttctatctagattcttctgtgaatctaaaagcattacaggggtaaatgctttgctatttgacgtatagatcccgtcactaacaatagtacacttggatgtgattaatgtttgagcttcaatatatttcatatcatacagttttctaaaacaacttcagcaaatggtaaaatgaacatgtgcagtgttaaaggcaggccttaggctccttcatgtttgttgtgaggttgtgtgtgggaagtagtctttggcttataagggatagaacttgagacagtagcagatgggacatggtgtttgattgtgagaatcagtgagaattcgtgcatctctgctctgtggggtttggagaaatgctttggcagaagagtgaaagaactcctgccaagagcccagacctctacaaacgttgtatgtccttttttaagcagaaataaaatggttgaggatgtagtcacagtagagagtgatttttttctaagtccctgtcctctactctgaagcgttataaaaacctgtaaacattatacaaacccacaaaccttatagaaactcgtaagtgtgttgtgactggaaattgattcattagaacccagttttctttaagaactttgtgacttggtttttttttttccttttccaaagactgtaaaaatagttgccccaaaatgtcagcactgcacaccctccagggacttggaatacaatcctttttacttttttttttttttttttaaagaaacggggtctctctgtcacccaggctggagtgcagtggcaacgatcatagctaactgcagctttgacctcctgggctcaagtgatcctcctgcctcagcctcctgagtagctaggactacaggtgtatgccaccatgcctggctaatacaaaaaaattcttttaagagatgggatccctcccttttaaaatcagaacttgttcacatggtggttgcttgtggcaaaacggagttcaaattttgctctcctattgctataattctgctagcaatctgttgaggtgaaacttgggatctgactcttcagcaagcagcaaatgacctagtaactcagggacaactatttttgaactttaagtgccactttaatgcagttagtttgataaaaccatgtgggttttttttttagggctagctctacgggagtggaagtgagagccaggcatgagtgcgtctccacatgcttttccacctgccctgagtgtgttacatactgaaacaggcctacatagatgttacaacttcccttcctctgtcggagatgtcatctgtgcctttctcagtgttcatctgataatgtaaatttaaatgcctctacatttgatacgaaacccacattcaggtgacactgaacgaggtggcttttgtcccaccagtgcctcatcagtgtgaggcgattcctctctgctttaggaaaatgatttttccccctaaacttgtgccaaccatcaacaacatctccatagatcttatggattgtagaactgttggctgtttcctaaatttattccaagttctcgtagaggcatatagatttcagtctgtgcttgtatgggatagatgatctgagtggctttctggcctcttttttgagtttaaaatccatatgaggttgacttgtcatactaaggtaacatgtttgtgaggttattccactagtactgtgatcacgtgggtgtcagtatctttaacggccttcattcttggttgtgagattttatttgatatgcccactcaccctcgacgaatctgcccgctttgggctgtggtgcctgtgtatctttgcccgtctggtctccagttggtggaattaccttttttgtactgccacttctcagcatctttgaaatttgacataatgttgcttcatttcagtttttttagttctgtaatttgttgattgtatttaactatgtgagttctgttgtgatgtttactgtattgtaaagcacctcattcatgtgatgagtgctctataaatcaataaatgatgacttagaggctgta

SEQ ID NO: 56716 - DNA, 3876 bp, Homo sapiens
ggagcggcgtcagtgaggtgtcagaggaggcaaaccagaatgctgtggcctttaagccaagtgaagaaagcttcaagggaagagagatcagctgtgtcaaaaaagagttgggaactcaacaaaaatccagtggaaggcttttctgcaggtttaatagatgacaatgatctctaccgatgggaagtccttattattggccctccagatacactttatgaaggtggtgtttttaaggctcatcttactttcccaaaagattatcccctccgacctcctaaaatgaaattcattacagaaatctggcacccaaatgttgataaaaatggtgatgtgtgcatttctattcttcatgagcctggggaagataagtatggttatgaaaagccagaggaacgctggctccctatccacactgtggaaaccatcatgattagtgtcatttctatgctggcagaccctaatggagactcacctgctaatgttgatgctgcgaaagaatggagggaagatagaaatggagaatttaaaagaaaagttgcccgctgtgtaagaaaaagccaagagactgcttttgagtgacatttatttagcagctagtaacttcacttatttcagggtctccaattgagaaacatggcactgtttttcctgcactctacccacctattgctggacttctgttgtacaagttggcaaacactggctggaactgggctgcaataaaacatgccagttatcaatgctgacaagagcctaacaagtgccaacttacagatgattacgcattttgaattctaatgaactgttttaaccttcaggaagaattgtaaagacctgtacatagcacaacatgatccggataatatatatactgttcatgtacatccacaaatacaccttgtaccaaataatgctttcttgtagtagaataagaatcgtgtaaattctaagagattttagcaggttttctttcctattcattgtttcttatcagtttaaaaggattcctttaagcatgtcagatgaaaagcaattaggattaaaagtttccatttaatttcccttaaacccttgaggcttcattaaactcttttcacttactaaacttttgtatcttctttgttttgacacactcccctttgcttttatctcttacctgccagaatgttctcaaatgatttagttcaaatactgaaatacttaatgagcaattacttgatttttaatgatgacttcgaaggagtcatcactaggtgctttgtcctttttgtattctagttgcacccacctcttggattggatatagcaataacatttattggccgttgtgagctcttgatcccagtcattacccctgagaactaaaaatagatggttcttaattcaacttactgaaaatttccccaaacaatagcaaatctgacttttccctcttcagttgcctggtattaaggttggataaatgaagcatgcacagctacaggctttctacttaacttctgggtttgctattacaaatcctatttactctcatacccttctccttagtccttcatatttctctgcctctattcttctatactgcagatttttctcacctattgtacaaagaaattgcgatgtatattttcatgtaatttgattttggaattctgtcaccttatgtagtgagttcttccaaaatataattttttttcaataattgtcaagttgttggcttttattgtattgaatgaaggctataatactgagtgccagagaagtggtttaggaaaatctcaggttgattccttatgcaaatgaacttttaatacttgaaaatcacatggccatggcagtatatgtatttggttctatctagattcttctgtgaatctaaaagcattacaggggtaaatgctttgctatttgacgtatagatcccgtcactaacaatagtacacttggatgtgattaatgtttgagcttcaatatatttcatatcatacagttttctaaaacaacttcagcaaatggtaaaatgaacatgtgcagtgttaaaggcaggccttaggctccttcatgtttgttgtgaggttgtgtgtgggaagtagtctttggcttataagggatagaacttgagacagtagcagatgggacatggtgtttgattgtgagaatcagtgagaattcgtgcatctctgctctgtggggtttggagaaatgctttggcagaagagtgaaagaactcctgccaagagcccagacctctacaaacgttgtatgtccttttttaagcagaaataaaatggttgaggatgtagtcacagtagagagtgatttttttctaagtccctgtcctctactctgaagcgttataaaaacctgtaaacattatacaaacccacaaaccttatagaaactcgtaagtgtgttgtgactggaaattgattcattagaacccagttttctttaagaactttgtgacttggtttttttttttccttttccaaagactgtaaaaatagttgccccaaaatgtcagcactgcacaccctccagggacttggaatacaatcctttttacttttttttttttttttttaaagaaacggggtctctctgtcacccaggctggagtgcagtggcaacgatcatagctaactgcagctttgacctcctgggctcaagtgatcctcctgcctcagcctcctgagtagctaggactacaggtgtatgccaccatgcctggctaatacaaaaaaattcttttaagagatgggatccctcccttttaaaatcagaacttgttcacatggtggttgcttgtggcaaaacggagttcaaattttgctctcctattgctataattctgctagcaatctgttgaggtgaaacttgggatctgactcttcagcaagcagcaaatgacctagtaactcagggacaactatttttgaactttaagtgccactttaatgcagttagtttgataaaaccatgtgggttttttttttagggctagctctacgggagtggaagtgagagccaggcatgagtgcgtctccacatgcttttccacctgccctgagtgtgttacatactgaaacaggcctacatagatgttacaacttcccttcctctgtcggagatgtcatctgtgcctttctcagtgttcatctgataatgtaaatttaaatgcctctacatttgatacgaaacccacattcaggtgacactgaacgaggtggcttttgtcccaccagtgcctcatcagtgtgaggcgattcctctctgctttaggaaaatgatttttccccctaaacttgtgccaaccatcaacaacatctccatagatcttatggattgtagaactgttggctgtttcctaaatttattccaagttctcgtagaggcatatagatttcagtctgtgcttgtatgggatagatgatctgagtggctttctggcctcttttttgagtttaaaatccatatgaggttgacttgtcatactaaggtaacatgtttgtgaggttattccactagtactgtgatcacgtgggtgtcagtatctttaacggccttcattcttggttgtgagattttatttgatatgcccactcaccctcgacgaatctgcccgctttgggctgtggtgcctgtgtatctttgcccgtctggtctccagttggtggaattaccttttttgtactgccacttctcagcatctttgaaatttgacataatgttgcttcatttcagtttttttagttctgtaatttgttgattgtatttaactatgtgagttctgttgtgatgtttactgtattgtaaagcacctcattcatgtgatgagtgctctataaatcaataaatgatgacttagaggctgta

SEQ ID NO: 56717 - DNA, 4074 bp, Homo sapiens
agcggggcggtctcagcgcgcctgcgccgagcggccctgcgcgcagtgaggcagtggcgggggaaggcaccggtggggccgacgggcgggttgaaggagggaagcgggcgagcgaagtcccagtgcgcgccgcggcagcccgggcaccctccccttccgggcgtgagtcgctgtgaaaagagctgaagcgagcggactcgcaccggcagcgaggcgccgctcccgccgcctcagcccggccttcctcggctccggcgctccggtcgcggggcccgggttcctcggcacaccccgctccagccgcccccagagcctgtccccagcccttcggaagccccggcgccagcccgggccctcggcagggaggatgacggagctgcagtcggcactgctactgcgaagacagctggcagtgaaggtggtgtttttaaggctcatcttactttcccaaaagattatcccctccgacctcctaaaatgaaattcattacagaaatctggcacccaaatgttgataaaaatggtgatgtgtgcatttctattcttcatgagcctggggaagataagtatggttatgaaaagccagaggaacgctggctccctatccacactgtggaaaccatcatgattagtgtcatttctatgctggcagaccctaatggagactcacctgctaatgttgatgctgcgaaagaatggagggaagatagaaatggagaatttaaaagaaaagttgcccgctgtgtaagaaaaagccaagagactgcttttgagtgacatttatttagcagctagtaacttcacttatttcagggtctccaattgagaaacatggcactgtttttcctgcactctacccacctattgctggacttctgttgtacaagttggcaaacactggctggaactgggctgcaataaaacatgccagttatcaatgctgacaagagcctaacaagtgccaacttacagatgattacgcattttgaattctaatgaactgttttaaccttcaggaagaattgtaaagacctgtacatagcacaacatgatccggataatatatatactgttcatgtacatccacaaatacaccttgtaccaaataatgctttcttgtagtagaataagaatcgtgtaaattctaagagattttagcaggttttctttcctattcattgtttcttatcagtttaaaaggattcctttaagcatgtcagatgaaaagcaattaggattaaaagtttccatttaatttcccttaaacccttgaggcttcattaaactcttttcacttactaaacttttgtatcttctttgttttgacacactcccctttgcttttatctcttacctgccagaatgttctcaaatgatttagttcaaatactgaaatacttaatgagcaattacttgatttttaatgatgacttcgaaggagtcatcactaggtgctttgtcctttttgtattctagttgcacccacctcttggattggatatagcaataacatttattggccgttgtgagctcttgatcccagtcattacccctgagaactaaaaatagatggttcttaattcaacttactgaaaatttccccaaacaatagcaaatctgacttttccctcttcagttgcctggtattaaggttggataaatgaagcatgcacagctacaggctttctacttaacttctgggtttgctattacaaatcctatttactctcatacccttctccttagtccttcatatttctctgcctctattcttctatactgcagatttttctcacctattgtacaaagaaattgcgatgtatattttcatgtaatttgattttggaattctgtcaccttatgtagtgagttcttccaaaatataattttttttcaataattgtcaagttgttggcttttattgtattgaatgaaggctataatactgagtgccagagaagtggtttaggaaaatctcaggttgattccttatgcaaatgaacttttaatacttgaaaatcacatggccatggcagtatatgtatttggttctatctagattcttctgtgaatctaaaagcattacaggggtaaatgctttgctatttgacgtatagatcccgtcactaacaatagtacacttggatgtgattaatgtttgagcttcaatatatttcatatcatacagttttctaaaacaacttcagcaaatggtaaaatgaacatgtgcagtgttaaaggcaggccttaggctccttcatgtttgttgtgaggttgtgtgtgggaagtagtctttggcttataagggatagaacttgagacagtagcagatgggacatggtgtttgattgtgagaatcagtgagaattcgtgcatctctgctctgtggggtttggagaaatgctttggcagaagagtgaaagaactcctgccaagagcccagacctctacaaacgttgtatgtccttttttaagcagaaataaaatggttgaggatgtagtcacagtagagagtgatttttttctaagtccctgtcctctactctgaagcgttataaaaacctgtaaacattatacaaacccacaaaccttatagaaactcgtaagtgtgttgtgactggaaattgattcattagaacccagttttctttaagaactttgtgacttggtttttttttttccttttccaaagactgtaaaaatagttgccccaaaatgtcagcactgcacaccctccagggacttggaatacaatcctttttacttttttttttttttttttaaagaaacggggtctctctgtcacccaggctggagtgcagtggcaacgatcatagctaactgcagctttgacctcctgggctcaagtgatcctcctgcctcagcctcctgagtagctaggactacaggtgtatgccaccatgcctggctaatacaaaaaaattcttttaagagatgggatccctcccttttaaaatcagaacttgttcacatggtggttgcttgtggcaaaacggagttcaaattttgctctcctattgctataattctgctagcaatctgttgaggtgaaacttgggatctgactcttcagcaagcagcaaatgacctagtaactcagggacaactatttttgaactttaagtgccactttaatgcagttagtttgataaaaccatgtgggttttttttttagggctagctctacgggagtggaagtgagagccaggcatgagtgcgtctccacatgcttttccacctgccctgagtgtgttacatactgaaacaggcctacatagatgttacaacttcccttcctctgtcggagatgtcatctgtgcctttctcagtgttcatctgataatgtaaatttaaatgcctctacatttgatacgaaacccacattcaggtgacactgaacgaggtggcttttgtcccaccagtgcctcatcagtgtgaggcgattcctctctgctttaggaaaatgatttttccccctaaacttgtgccaaccatcaacaacatctccatagatcttatggattgtagaactgttggctgtttcctaaatttattccaagttctcgtagaggcatatagatttcagtctgtgcttgtatgggatagatgatctgagtggctttctggcctcttttttgagtttaaaatccatatgaggttgacttgtcatactaaggtaacatgtttgtgaggttattccactagtactgtgatcacgtgggtgtcagtatctttaacggccttcattcttggttgtgagattttatttgatatgcccactcaccctcgacgaatctgcccgctttgggctgtggtgcctgtgtatctttgcccgtctggtctccagttggtggaattaccttttttgtactgccacttctcagcatctttgaaatttgacataatgttgcttcatttcagtttttttagttctgtaatttgttgattgtatttaactatgtgagttctgttgtgatgtttactgtattgtaaagcacctcattcatgtgatgagtgctctataaatcaataaatgatgacttagaggctgta

SEQ ID NO: 56718 - DNA, 3900 bp, Homo sapiens
agcggggcggtctcagcgcgcctgcgccgagcggccctgcgcgcagtgaggcagtggcgggggaaggcaccggtggggccgacgggcgggttgaaggagggaagcgggcgagcgaagtcccagtgcgcgccgcggcagcccgggcaccctccccttccgggcgtgagtcgctgtgaaaagagctgaagcgagcggactcgcaccggcagcgaggcgccgctcccgccgcctcagcccggccttcctcggctccggcgctccggtcgcggggcccgggttcctcggcacaccccgctccagccgcccccagagcctgtccccagcccttcggaagccccggcgccagcccgggccctcggcagggaggatgacggagctgcagtcggcactgctactgcgaagacagctggcagaactcaacaaaaatccagtggaaggcttttctgcaggtttaatagatgacaatgatctctaccgatgggaagtccttattattggccctccagatacactttaaaagaatggagggaagatagaaatggagaatttaaaagaaaagttgcccgctgtgtaagaaaaagccaagagactgcttttgagtgacatttatttagcagctagtaacttcacttatttcagggtctccaattgagaaacatggcactgtttttcctgcactctacccacctattgctggacttctgttgtacaagttggcaaacactggctggaactgggctgcaataaaacatgccagttatcaatgctgacaagagcctaacaagtgccaacttacagatgattacgcattttgaattctaatgaactgttttaaccttcaggaagaattgtaaagacctgtacatagcacaacatgatccggataatatatatactgttcatgtacatccacaaatacaccttgtaccaaataatgctttcttgtagtagaataagaatcgtgtaaattctaagagattttagcaggttttctttcctattcattgtttcttatcagtttaaaaggattcctttaagcatgtcagatgaaaagcaattaggattaaaagtttccatttaatttcccttaaacccttgaggcttcattaaactcttttcacttactaaacttttgtatcttctttgttttgacacactcccctttgcttttatctcttacctgccagaatgttctcaaatgatttagttcaaatactgaaatacttaatgagcaattacttgatttttaatgatgacttcgaaggagtcatcactaggtgctttgtcctttttgtattctagttgcacccacctcttggattggatatagcaataacatttattggccgttgtgagctcttgatcccagtcattacccctgagaactaaaaatagatggttcttaattcaacttactgaaaatttccccaaacaatagcaaatctgacttttccctcttcagttgcctggtattaaggttggataaatgaagcatgcacagctacaggctttctacttaacttctgggtttgctattacaaatcctatttactctcatacccttctccttagtccttcatatttctctgcctctattcttctatactgcagatttttctcacctattgtacaaagaaattgcgatgtatattttcatgtaatttgattttggaattctgtcaccttatgtagtgagttcttccaaaatataattttttttcaataattgtcaagttgttggcttttattgtattgaatgaaggctataatactgagtgccagagaagtggtttaggaaaatctcaggttgattccttatgcaaatgaacttttaatacttgaaaatcacatggccatggcagtatatgtatttggttctatctagattcttctgtgaatctaaaagcattacaggggtaaatgctttgctatttgacgtatagatcccgtcactaacaatagtacacttggatgtgattaatgtttgagcttcaatatatttcatatcatacagttttctaaaacaacttcagcaaatggtaaaatgaacatgtgcagtgttaaaggcaggccttaggctccttcatgtttgttgtgaggttgtgtgtgggaagtagtctttggcttataagggatagaacttgagacagtagcagatgggacatggtgtttgattgtgagaatcagtgagaattcgtgcatctctgctctgtggggtttggagaaatgctttggcagaagagtgaaagaactcctgccaagagcccagacctctacaaacgttgtatgtccttttttaagcagaaataaaatggttgaggatgtagtcacagtagagagtgatttttttctaagtccctgtcctctactctgaagcgttataaaaacctgtaaacattatacaaacccacaaaccttatagaaactcgtaagtgtgttgtgactggaaattgattcattagaacccagttttctttaagaactttgtgacttggtttttttttttccttttccaaagactgtaaaaatagttgccccaaaatgtcagcactgcacaccctccagggacttggaatacaatcctttttacttttttttttttttttttaaagaaacggggtctctctgtcacccaggctggagtgcagtggcaacgatcatagctaactgcagctttgacctcctgggctcaagtgatcctcctgcctcagcctcctgagtagctaggactacaggtgtatgccaccatgcctggctaatacaaaaaaattcttttaagagatgggatccctcccttttaaaatcagaacttgttcacatggtggttgcttgtggcaaaacggagttcaaattttgctctcctattgctataattctgctagcaatctgttgaggtgaaacttgggatctgactcttcagcaagcagcaaatgacctagtaactcagggacaactatttttgaactttaagtgccactttaatgcagttagtttgataaaaccatgtgggttttttttttagggctagctctacgggagtggaagtgagagccaggcatgagtgcgtctccacatgcttttccacctgccctgagtgtgttacatactgaaacaggcctacatagatgttacaacttcccttcctctgtcggagatgtcatctgtgcctttctcagtgttcatctgataatgtaaatttaaatgcctctacatttgatacgaaacccacattcaggtgacactgaacgaggtggcttttgtcccaccagtgcctcatcagtgtgaggcgattcctctctgctttaggaaaatgatttttccccctaaacttgtgccaaccatcaacaacatctccatagatcttatggattgtagaactgttggctgtttcctaaatttattccaagttctcgtagaggcatatagatttcagtctgtgcttgtatgggatagatgatctgagtggctttctggcctcttttttgagtttaaaatccatatgaggttgacttgtcatactaaggtaacatgtttgtgaggttattccactagtactgtgatcacgtgggtgtcagtatctttaacggccttcattcttggttgtgagattttatttgatatgcccactcaccctcgacgaatctgcccgctttgggctgtggtgcctgtgtatctttgcccgtctggtctccagttggtggaattaccttttttgtactgccacttctcagcatctttgaaatttgacataatgttgcttcatttcagtttttttagttctgtaatttgttgattgtatttaactatgtgagttctgttgtgatgtttactgtattgtaaagcacctcattcatgtgatgagtgctctataaatcaataaatgatgacttagaggctgta

SEQ ID NO: 56719 - DNA, 3412 bp, Homo sapiens
ctactactactaaattcgcggcccgtcgaaagaatggagggaagatagaaatggagaatttaaaagaaaagttgcccgctgtgtaagaaaaagccaagagactgcttttgagtgacatttatttagcagctagtaacttcacttatttcagggtctccaattgagaaacatggcactgtttttcctgcactctacccacctattgctggacttctgttgtacaagttggcaaacactggctggaactgggctgcaataaaacatgccagttatcaatgctgacaagagcctaacaagtgccaacttacagatgattacgcattttgaattctaatgaactgttttaaccttcaggaagaattgtaaagacctgtacatagcacaacatgatccggataatatatatactgttcatgtacatccacaaatacaccttgtaccaaataatgctttcttgtagtagaataagaatcgtgtaaattctaagagattttagcaggttttctttcctattcattgtttcttatcagtttaaaaggattcctttaagcatgtcagatgaaaagcaattaggattaaaagtttccatttaatttcccttaaacccttgaggcttcattaaactcttttcacttactaaacttttgtatcttctttgttttgacacactcccctttgcttttatctcttacctgccagaatgttctcaaatgatttagttcaaatactgaaatacttaatgagcaattacttgatttttaatgatgacttcgaaggagtcatcactaggtgctttgtcctttttgtattctagttgcacccacctcttggattggatatagcaataacatttattggccgttgtgagctcttgatcccagtcattacccctgagaactaaaaatagatggttcttaattcaacttactgaaaatttccccaaacaatagcaaatctgacttttccctcttcagttgcctggtattaaggttggataaatgaagcatgcacagctacaggctttctacttaacttctgggtttgctattacaaatcctatttactctcatacccttctccttagtccttcatatttctctgcctctattcttctatactgcagatttttctcacctattgtacaaagaaattgcgatgtatattttcatgtaatttgattttggaattctgtcaccttatgtagtgagttcttccaaaatataattttttttcaataattgtcaagttgttggcttttattgtattgaatgaaggctataatactgagtgccagagaagtggtttaggaaaatctcaggttgattccttatgcaaatgaacttttaatacttgaaaatcacatggccatggcagtatatgtatttggttctatctagattcttctgtgaatctaaaagcattacaggggtaaatgctttgctatttgacgtatagatcccgtcactaacaatagtacacttggatgtgattaatgtttgagcttcaatatatttcatatcatacagttttctaaaacaacttcagcaaatggtaaaatgaacatgtgcagtgttaaaggcaggccttaggctccttcatgtttgttgtgaggttgtgtgtgggaagtagtctttggcttataagggatagaacttgagacagtagcagatgggacatggtgtttgattgtgagaatcagtgagaattcgtgcatctctgctctgtggggtttggagaaatgctttggcagaagagtgaaagaactcctgccaagagcccagacctctacaaacgttgtatgtccttttttaagcagaaataaaatggttgaggatgtagtcacagtagagagtgatttttttctaagtccctgtcctctactctgaagcgttataaaaacctgtaaacattatacaaacccacaaaccttatagaaactcgtaagtgtgttgtgactggaaattgattcattagaacccagttttctttaagaactttgtgacttggtttttttttttccttttccaaagactgtaaaaatagttgccccaaaatgtcagcactgcacaccctccagggacttggaatacaatcctttttacttttttttttttttttttaaagaaacggggtctctctgtcacccaggctggagtgcagtggcaacgatcatagctaactgcagctttgacctcctgggctcaagtgatcctcctgcctcagcctcctgagtagctaggactacaggtgtatgccaccatgcctggctaatacaaaaaaattcttttaagagatgggatccctcccttttaaaatcagaacttgttcacatggtggttgcttgtggcaaaacggagttcaaattttgctctcctattgctataattctgctagcaatctgttgaggtgaaacttgggatctgactcttcagcaagcagcaaatgacctagtaactcagggacaactatttttgaactttaagtgccactttaatgcagttagtttgataaaaccatgtgggttttttttttagggctagctctacgggagtggaagtgagagccaggcatgagtgcgtctccacatgcttttccacctgccctgagtgtgttacatactgaaacaggcctacatagatgttacaacttcccttcctctgtcggagatgtcatctgtgcctttctcagtgttcatctgataatgtaaatttaaatgcctctacatttgatacgaaacccacattcaggtgacactgaacgaggtggcttttgtcccaccagtgcctcatcagtgtgaggcgattcctctctgctttaggaaaatgatttttccccctaaacttgtgccaaccatcaacaacatctccatagatcttatggattgtagaactgttggctgtttcctaaatttattccaagttctcgtagaggcatatagatttcagtctgtgcttgtatgggatagatgatctgagtggctttctggcctcttttttgagtttaaaatccatatgaggttgacttgtcatactaaggtaacatgtttgtgaggttattccactagtactgtgatcacgtgggtgtcagtatctttaacggccttcattcttggttgtgagattttatttgatatgcccactcaccctcgacgaatctgcccgctttgggctgtggtgcctgtgtatctttgcccgtctggtctccagttggtggaattaccttttttgtactgccacttctcagcatctttgaaatttgacataatgttgcttcatttcagtttttttagttctgtaatttgttgattgtatttaactatgtgagttctgttgtgatgtttactgtattgtaaagcacctcattcatgtgatgagtgctctataaatcaataaatgatgacttagaggctgta

SEQ ID NO: 56720 - DNA, 2027 bp, Homo sapiens
agcggggcggtctcagcgcgcctgcgccgagcggccctgcgcgcagtgaggcagtggcgggggaaggcaccggtggggccgacgggcgggttgaaggagggaagcgggcgagcgaagtcccagtgcgcgccgcggcagcccgggcaccctccccttccgggcgtgagtcgctgtgaaaagagctgaagcgagcggactcgcaccggcagcgaggcgccgctcccgccgcctcagcccggccttcctcggctccggcgctccggtcgcggggcccgggttcctcggcacaccccgctccagccgcccccagagcctgtccccagcccttcggaagccccggcgccagcccgggccctcggcagggaggatgacggagctgcagtcggcactgctactgcgaagacagctggcagaactcaacaaaaatccagtggaaggcttttctgcaggtttaatagatgacaatgatctctaccgatgggaagtccttattattggccctccagatacactttatgaaggtggtgtttttaaggctcatcttactttcccaaaagattatcccctccgacctcctaaaatgaaattcattacagaaatctggcacccaaatgttgataaaaatggtgatgtgtgcatttctattcttcatgagcctggggaagataagtatggttatgaaaagccagaggaacgctggctccctatccacactgtggaaaccatcatgattagtgtcatttctatgctggcagaccctaatggagactcacctgctaatgttgatgctgcgaaagaatggagggaagatagaaatggagaatttaaaagaaaagttgcccgctgtgtaagaaaaagccaagagactgcttttgagtgacatttatttagcagctagtaacttcacttatttcagggtctccaattgagaaacatggcactgtttttcctgcactctacccacctattgctggacttctgttgtacaagttggcaaacactggctggaactgggctgcaataaaacatgccagttatcaatgctgacaagagcctaacaagtgccaacttacagatgattacgcattttgaattctaatgaactgttttaaccttcaggaagaattgtaaagacctgtacatagcacaacatgatccggataatatatatactgttcatgtacatccacaaatacaccttgtaccaaataatgctttcttgtagtagaataagaatcgtgtaaattctaagagattttagcaggttttctttcctattcattgtttcttatcagtttaaaaggattcctttaagcatgtcagatgaaaagcaattaggattaaaagtttccatttaatttcccttaaacccttgaggcttcattaaactcttttcacttactaaacttttgtatcttctttgttttgacacactcccctttgcttttatctcttacctgccagaatgttctcaaatgatttagttcaaatactgaaatacttaatgagcaattacttgatttttaatgatgacttcgaaggagtcatcactaggtgctttgtcctttttgtattctagttgcacccacctcttggattggatatagcaataacatttattggccgttgtgagctcttgatcccagtcattacccctgagaactaaaaatagatggttcttaattcaacttactgaaaatttccccaaacaatagcaaatctgacttttccctcttcagttgcctggtattaaggttggataaatgaagcatgcacagctacaggctttctacttaacttctgggtttgctattacaaatcctatttactctcatacccttctccttagtccttcatatttctctgcctctattcttctatactgcagatttttctcacctattgtacaaagaaattgcgatgtatattttcatgtaatttgattttggaattctgtcaccttatgtagtgagttcttccaaaatataattatttttttactcctctgttttttttttttctctttt

SEQ ID NO: 56721 - DNA, 2020 bp, Homo sapiens
agcggggcggtctcagcgcgcctgcgccgagcggccctgcgcgcagtgaggcagtggcgggggaaggcaccggtggggccgacgggcgggttgaaggagggaagcgggcgagcgaagtcccagtgcgcgccgcggcagcccgggcaccctccccttccgggcgtgagtcgctgtgaaaagagctgaagcgagcggactcgcaccggcagcgaggcgccgctcccgccgcctcagcccggccttcctcggctccggcgctccggtcgcggggcccgggttcctcggcacaccccgctccagccgcccccagagcctgtccccagcccttcggaagccccggcgccagcccgggccctcggcagggaggatgacggagctgcagtcggcactgctactgcgaagacagctggcagaactcaacaaaaatccagtggaaggcttttctgcaggtttaatagatgacaatgatctctaccgatgggaagtccttattattggccctccagatacactttatgaaggtggtgtttttaaggctcatcttactttcccaaaagattatcccctccgacctcctaaaatgaaattcattacagaaatctggcacccaaatgttgataaaaatggtgatgtgtgcatttctattcttcatgagcctggggaagataagtatggttatgaaaagccagaggaacgctggctccctatccacactgtggaaaccatcatgattagtgtcatttctatgctggcagaccctaatggagactcacctgctaatgttgatgctgcgaaagaatggagggaagatagaaatggagaatttaaaagaaaagttgcccgctgtgtaagaaaaagccaagagactgcttttgagtgacatttatttagcagctagtaacttcacttatttcagggtctccaattgagaaacatggcactgtttttcctgcactctacccacctattgctggacttctgttgtacaagttggcaaacactggctggaactgggctgcaataaaacatgccagttatcaatgctgacaagagcctaacaagtgccaacttacagatgattacgcattttgaattctaatgaactgttttaaccttcaggaagaattgtaaagacctgtacatagcacaacatgatccggataatatatatactgttcatgtacatccacaaatacaccttgtaccaaataatgctttcttgtagtagaataagaatcgtgtaaattctaagagattttagcaggttttctttcctattcattgtttcttatcagtttaaaaggattcctttaagcatgtcagatgaaaagcaattaggattaaaagtttccatttaatttcccttaaacccttgaggcttcattaaactcttttcacttactaaacttttgtatcttctttgttttgacacactcccctttgcttttatctcttacctgccagaatgttctcaaatgatttagttcaaatactgaaatacttaatgagcaattacttgatttttaatgatgacttcgaaggagtcatcactaggtgctttgtcctttttgtattctagttgcacccacctcttggattggatatagcaataacatttattggccgttgtgagctcttgatcccagtcattacccctgagaactaaaaatagatggttcttaattcaacttactgaaaatttccccaaacaatagcaaatctgacttttccctcttcagttgcctggtattaaggttggataaatgaagcatgcacagctacaggctttctacttaacttctgggtttgctattacaaatcctatttactctcatacccttctccttagtccttcatatttctctgcctctattcttctatactgcagatttttctcacctattgtacaaagaaattgcgatgtatattttcatgtaatttgattttggaattctgtcaccttatgtagtgagttcttccaaaatataatttttaaataaacggtgcttgtggggagcgg

SEQ ID NO: 56722 - DNA, 3234 bp, Homo sapiens
cggacgcgtgggtcgacccacgcgtccgtggacttctgttgtacaagttggcaaacactggctggaactgggctgcaataaaacatgccagttatcaatgctgacaagagcctaacaagtgccaacttacagatgattacgcattttgaattctaatgaactgttttaaccttcaggaagaattgtaaagacctgtacatagcacaacatgatccggataatatatatactgttcatgtacatccacaaatacaccttgtaccaaataatgctttcttgtagtagaataagaatcgtgtaaattctaagagattttagcaggttttctttcctattcattgtttcttatcagtttaaaaggattcctttaagcatgtcagatgaaaagcaattaggattaaaagtttccatttaatttcccttaaacccttgaggcttcattaaactcttttcacttactaaacttttgtatcttctttgttttgacacactcccctttgcttttatctcttacctgccagaatgttctcaaatgatttagttcaaatactgaaatacttaatgagcaattacttgatttttaatgatgacttcgaaggagtcatcactaggtgctttgtcctttttgtattctagttgcacccacctcttggattggatatagcaataacatttattggccgttgtgagctcttgatcccagtcattacccctgagaactaaaaatagatggttcttaattcaacttactgaaaatttccccaaacaatagcaaatctgacttttccctcttcagttgcctggtattaaggttggataaatgaagcatgcacagctacaggctttctacttaacttctgggtttgctattacaaatcctatttactctcatacccttctccttagtccttcatatttctctgcctctattcttctatactgcagatttttctcacctattgtacaaagaaattgcgatgtatattttcatgtaatttgattttggaattctgtcaccttatgtagtgagttcttccaaaatataattttttttcaataattgtcaagttgttggcttttattgtattgaatgaaggctataatactgagtgccagagaagtggtttaggaaaatctcaggttgattccttatgcaaatgaacttttaatacttgaaaatcacatggccatggcagtatatgtatttggttctatctagattcttctgtgaatctaaaagcattacaggggtaaatgctttgctatttgacgtatagatcccgtcactaacaatagtacacttggatgtgattaatgtttgagcttcaatatatttcatatcatacagttttctaaaacaacttcagcaaatggtaaaatgaacatgtgcagtgttaaaggcaggccttaggctccttcatgtttgttgtgaggttgtgtgtgggaagtagtctttggcttataagggatagaacttgagacagtagcagatgggacatggtgtttgattgtgagaatcagtgagaattcgtgcatctctgctctgtggggtttggagaaatgctttggcagaagagtgaaagaactcctgccaagagcccagacctctacaaacgttgtatgtccttttttaagcagaaataaaatggttgaggatgtagtcacagtagagagtgatttttttctaagtccctgtcctctactctgaagcgttataaaaacctgtaaacattatacaaacccacaaaccttatagaaactcgtaagtgtgttgtgactggaaattgattcattagaacccagttttctttaagaactttgtgacttggtttttttttttccttttccaaagactgtaaaaatagttgccccaaaatgtcagcactgcacaccctccagggacttggaatacaatcctttttacttttttttttttttttttaaagaaacggggtctctctgtcacccaggctggagtgcagtggcaacgatcatagctaactgcagctttgacctcctgggctcaagtgatcctcctgcctcagcctcctgagtagctaggactacaggtgtatgccaccatgcctggctaatacaaaaaaattcttttaagagatgggatccctcccttttaaaatcagaacttgttcacatggtggttgcttgtggcaaaacggagttcaaattttgctctcctattgctataattctgctagcaatctgttgaggtgaaacttgggatctgactcttcagcaagcagcaaatgacctagtaactcagggacaactatttttgaactttaagtgccactttaatgcagttagtttgataaaaccatgtgggttttttttttagggctagctctacgggagtggaagtgagagccaggcatgagtgcgtctccacatgcttttccacctgccctgagtgtgttacatactgaaacaggcctacatagatgttacaacttcccttcctctgtcggagatgtcatctgtgcctttctcagtgttcatctgataatgtaaatttaaatgcctctacatttgatacgaaacccacattcaggtgacactgaacgaggtggcttttgtcccaccagtgcctcatcagtgtgaggcgattcctctctgctttaggaaaatgatttttccccctaaacttgtgccaaccatcaacaacatctccatagatcttatggattgtagaactgttggctgtttcctaaatttattccaagttctcgtagaggcatatagatttcagtctgtgcttgtatgggatagatgatctgagtggctttctggcctcttttttgagtttaaaatccatatgaggttgacttgtcatactaaggtaacatgtttgtgaggttattccactagtactgtgatcacgtgggtgtcagtatctttaacggccttcattcttggttgtgagattttatttgatatgcccactcaccctcgacgaatctgcccgctttgggctgtggtgcctgtgtatctttgcccgtctggtctccagttggtggaattaccttttttgtactgccacttctcagcatctttgaaatttgacataatgttgcttcatttcagtttttttagttctgtaatttgttgattgtatttaactatgtgagttctgttgtgatgtttactgtattgtaaagcacctcattcatgtgatgagtgctctataaatcaataaatgatgacttagaggctgta

SEQ ID NO: 56723 - DNA, 684 bp, Homo sapiens
caagttctgtaatttatctactggatgcaaattatgtgcttaaatgtattgattaaacttttctttttccacagaactcaacaaaaatccagtggaaggcttttctgcaggtttaatagatgacaatgatctctaccgatgggaagtccttattattggccctccagatacactttagtaagtataatggaactgacatcttcaaaatggagctcttttaatacactgaattaaaaactattttggcaggctgggcacggtggctcacacctgtaatcccagcactttgggaggccaaggcgggccgatcatgaggtcaggagttcgagaccagcctggccaatgtagtgaaaccccatctctactaaaaatacaaaaattagctgggtgtggtggcatgcacctgtagtcccagctactcaggaggctgaggcaggagaatcacttgaactcaggaggcagagattgcagtgagctgagaccacgccattgcactccagcctgggtgacagagtgagactccatctcaaaacaaaacaaagcaaaaccacaaatattttggcaaactgacatgaaattattttttaaggagcaggagaaatggctgtattcaatatcctttgtactgaatttgatcatggaagagtttttgtgttttgcttgaagctctaatgtctaagacct

SEQ ID NO: 56724 - DNA, 240 bp, Homo sapiens
tgtgtgcatttctattcttcatgagcctggggaagataagtatggttatgaaaagccagaggaacgctggctccctatccacactgtggaaaccatcatgattagtgtcatttctatgctggcagaccctaatggagactcacctgctaatgttgatgctgcggtaaggtggtcacacgtcttcccttcccttcactttcccttgtaataaaacctgaactatagttagtatgtatgtaa

SEQ ID NO: 56725 - DNA, 4177 bp, Homo sapiens
agcggggcggtctcagcgcgcctgcgccgagcggccctgcgcgcagtgaggcagtggcgggggaaggcaccggtggggccgacgggcgggttgaaggagggaagcgggcgagcgaagtcccagtgcgcgccgcggcagcccgggcaccctccccttccgggcgtgagtcgctgtgaaaagagctgaagcgagcggactcgcaccggcagcgaggcgccgctcccgccgcctcagcccggccttcctcggctccggcgctccggtcgcggggcccgggttcctcggcacaccccgctccagccgcccccagagcctgtccccagcccttcggaagccccggcgccagcccgggccctcggcagggaggatgacggagctgcagtcggcactgctactgcgaagacagctggcagaactcaacaaaaatccagtggaaggcttttctgcaggtttaatagatgacaatgatctctaccgatgggaagtccttattattggccctccagatacactttatgaaggtggtgtttttaaggctcatcttactttcccaaaagattatcccctccgacctcctaaaatgaaattcattacagaaatctggcacccaaatgttgataaaaatggtgatgtgtgcatttctattcttcatgagcctggggaagataagtatggttatgaaaagccagaggaacgctggctccctatccacactgtggaaaccatcatgattagtgtcatttctatgctggcagaccctaatggagactcacctgctaatgttgatgctgcgaaagaatggagggaagatagaaatggagaatttaaaagaaaagttgcccgctgtgtaagaaaaagccaagagactgcttttgagtgacatttatttagcagctagtaacttcacttatttcagggtctccaattgagaaacatggcactgtttttcctgcactctacccacctattgctggacttctgttgtacaagttggcaaacactggctggaactgggctgcaataaaacatgccagttatcaatgctgacaagagcctaacaagtgccaacttacagatgattacgcattttgaattctaatgaactgttttaaccttcaggaagaattgtaaagacctgtacatagcacaacatgatccggataatatatatactgttcatgtacatccacaaatacaccttgtaccaaataatgctttcttgtagtagaataagaatcgtgtaaattctaagagattttagcaggttttctttcctattcattgtttcttatcagtttaaaaggattcctttaagcatgtcagatgaaaagcaattaggattaaaagtttccatttaatttcccttaaacccttgaggcttcattaaactcttttcacttactaaacttttgtatcttctttgttttgacacactcccctttgcttttatctcttacctgccagaatgttctcaaatgatttagttcaaatactgaaatacttaatgagcaattacttgatttttaatgatgacttcgaaggagtcatcactaggtgctttgtcctttttgtattctagttgcacccacctcttggattggatatagcaataacatttattggccgttgtgagctcttgatcccagtcattacccctgagaactaaaaatagatggttcttaattcaacttactgaaaatttccccaaacaatagcaaatctgacttttccctcttcagttgcctggtattaaggttggataaatgaagcatgcacagctacaggctttctacttaacttctgggtttgctattacaaatcctatttactctcatacccttctccttagtccttcatatttctctgcctctattcttctatactgcagatttttctcacctattgtacaaagaaattgcgatgtatattttcatgtaatttgattttggaattctgtcaccttatgtagtgagttcttccaaaatataattttttttcaataattgtcaagttgttggcttttattgtattgaatgaaggctataatactgagtgccagagaagtggtttaggaaaatctcaggttgattccttatgcaaatgaacttttaatacttgaaaatcacatggccatggcagtatatgtatttggttctatctagattcttctgtgaatctaaaagcattacaggggtaaatgctttgctatttgacgtatagatcccgtcactaacaatagtacacttggatgtgattaatgtttgagcttcaatatatttcatatcatacagttttctaaaacaacttcagcaaatggtaaaatgaacatgtgcagtgttaaaggcaggccttaggctccttcatgtttgttgtgaggttgtgtgtgggaagtagtctttggcttataagggatagaacttgagacagtagcagatgggacatggtgtttgattgtgagaatcagtgagaattcgtgcatctctgctctgtggggtttggagaaatgctttggcagaagagtgaaagaactcctgccaagagcccagacctctacaaacgttgtatgtccttttttaagcagaaataaaatggttgaggatgtagtcacagtagagagtgatttttttctaagtccctgtcctctactctgaagcgttataaaaacctgtaaacattatacaaacccacaaaccttatagaaactcgtaagtgtgttgtgactggaaattgattcattagaacccagttttctttaagaactttgtgacttggtttttttttttccttttccaaagactgtaaaaatagttgccccaaaatgtcagcactgcacaccctccagggacttggaatacaatcctttttacttttttttttttttttttaaagaaacggggtctctctgtcacccaggctggagtgcagtggcaacgatcatagctaactgcagctttgacctcctgggctcaagtgatcctcctgcctcagcctcctgagtagctaggactacaggtgtatgccaccatgcctggctaatacaaaaaaattcttttaagagatgggatccctcccttttaaaatcagaacttgttcacatggtggttgcttgtggcaaaacggagttcaaattttgctctcctattgctataattctgctagcaatctgttgaggtgaaacttgggatctgactcttcagcaagcagcaaatgacctagtaactcagggacaactatttttgaactttaagtgccactttaatgcagttagtttgataaaaccatgtgggttttttttttagggctagctctacgggagtggaagtgagagccaggcatgagtgcgtctccacatgcttttccacctgccctgagtgtgttacatactgaaacaggcctacatagatgttacaacttcccttcctctgtcggagatgtcatctgtgcctttctcagtgttcatctgataatgtaaatttaaatgcctctacatttgatacgaaacccacattcaggtgacactgaacgaggtggcttttgtcccaccagtgcctcatcagtgtgaggcgattcctctctgctttaggaaaatgatttttccccctaaacttgtgccaaccatcaacaacatctccatagatcttatggattgtagaactgttggctgtttcctaaatttattccaagttctcgtagaggcatatagatttcagtctgtgcttgtatgggatagatgatctgagtggctttctggcctcttttttgagtttaaaatccatatgaggttgacttgtcatactaaggtaacatgtttgtgaggttattccactagtactgtgatcacgtgggtgtcagtatctttaacggccttcattcttggttgtgagattttatttgatatgcccactcaccctcgacgaatctgcccgctttgggctgtggtgcctgtgtatctttgcccgtctggtctccagttggtggaattaccttttttgtactgccacttctcagcatctttgaaatttgacataatgttgcttcatttcagtttttttagttctgtaatttgttgattgtatttaactatgtgagttctgttgtgatgtttactgtattgtaaagcacctcattcatgtgatgagtgctctataaatcaataaatgatgacttagaggctgta

SEQ ID NO: 56726 - DNA, 4123 bp, Homo sapiens
agcggggcggtctcagcgcgcctgcgccgagcggccctgcgcgcagtgaggcagtggcgggggaaggcaccggtggggccgacgggcgggttgaaggagggaagcgggcgagcgaagtcccagtgcgcgccgcggcagcccgggcaccctccccttccgggcgtgagtcgctgtgaaaagagctgaagcgagcggactcgcaccggcagcgaggcgccgctcccgccgcctcagcccggccttcctcggctccggcgctccggtcgcggggcccgggttcctcggcacaccccgctccagccgcccccagagcctgtccccagcccttcggaagccccggcgccagcccgggccctcggcagggaggatgacggagctgcagtcggcactgctactgcgaagacagctggcagaactcaacaaaaatccagtggaaggcttttctgcaggtttaatagatgacaatgatctctaccgatgggaagtccttattattggccctccagatacactttatgaaggtggtgtttttaaggctcatcttactttcccaaaagattatcccctccgacctcctaaaatgaaattcattacagaaatctggcacccaaatgttgataaaaatggtgatgtgtgcatttctattcttcatgagcctggggaagataagtatggttatgaaaagccagaggaacgctggctccctatccacactgtggaaaccatcatgattagtgtcatttctatgctggcagaccctaatggagactcacctgctaatgttgatgctgcgaaagaatggagggaagatagaaatggagaatttaaaagaaaagttgcccgctgtgtaagaaaaagccaagagactgcttttgagtgacatttatttagcagctagtaacttcacttatttcagggtctccaattgagaaacatggcactgtttttcctgcactctacccacctattgctggacttctgttgtacaagttggcaaacactggctggaactgggctgcaataaaacatgccagttatcaatgctgacaagagcctaacaagtgccaacttacagatgattacgcattttgaattctaatgaactgttttaaccttcaggaagaattgtaaagacctgtacatagcacaacatgatccggataatatatatactgttcatgtacatccacaaatacaccttgtaccaaataatgctttcttgtagtagaataagaatcgtgtaaattctaagagattttagcaggttttctttcctattcattgtttcttatcagtttaaaaggattcctttaagcatgtcagatgaaaagcaattaggattaaaagtttccatttaatttcccttaaacccttgaggcttcattaaactcttttcacttactaaacttttgtatcttctttgttttgacacactcccctttgcttttatctcttacctgccagaatgttctcaaatgatttagttcaaatactgaaatacttaatgagcaattacttgatttttaatgatgacttcgaaggagtcatcactaggtgctttgtcctttttgtattctagttgcacccacctcttggattggatatagcaataacatttattggccgttgtgagctcttgatcccagtcattacccctgagaactaaaaatagatggttcttaattcaacttactgaaaatttccccaaacaatagcaaatctgacttttccctcttcagttgcctggtattaaggttggataaatgaagcatgcacagctacaggctttctacttaacttctgggtttgctattacaaatcctatttactctcatacccttctccttagtccttcatatttctctgcctctattcttctatactgcagatttttctcacctattgtacaaagaaattgcgatgtatattttcatgtaatttgattttggaattctgtcaccttatgtagtgagttcttccaaaatataattttttttcaataattgtcaagttgttggcttttattgtattgaatgaaggctataatactgagtgccagagaagtggtttaggaaaatctcaggttgattccttatgcaaatgaacttttaatacttgaaaatcacatggccatggcagtatatgtatttggttctatctagattcttctgtgaatctaaaagcattacaggggtaaatgctttgctatttgacgtatagatcccgtcactaacaatagtacacttggatgtgattaatgtttgagcttcaatatatttcatatcatacagttttctaaaacaacttcagcaaatggtaaaatgaacatgtgcagtgttaaaggcaggccttaggctccttcatgtttgttgtgaggttgtgtgtgggaagtagtctttggcttataagggatagaacttgagacagtagcagatgggacatggtgtttgattgtgagaatcagtgagaattcgtgcatctctgctctgtggggtttggagaaatgctttggcagaagagtgaaagaactcctgccaagagcccagacctctacaaacgttgtatgtccttttttaagcagaaataaaatggttgaggatgtagtcacagtagagagtgatttttttctaagtccctgtcctctactctgaagcgttataaaaacctgtaaacattatacaaacccacaaaccttatagaaactcgtaagtgtgttgtgactggaaattgattcattagaacccagttttctttaagaactttgtgacttggtttttttttttccttttccaaagactgtaaaaatagttgccccaaaatgtcagcactgcacaccctccagggacttggaatacaatcctttttacttttttttttttttttttaaagaaacggggtctctctgtcacccaggctggagtgcagtggcaacgatcatagctaactgcagctttgacctcctgggctcaagtgatcctcctgcctcagcctcctgagtagctaggactacaggtgtatgccaccatgcctggctaatacaaaaaaattcttttaagagatgggatccctcccttttaaaatcagaacttgttcacatggtggttgcttgtggcaaaacggagttcaaattttgctctcctattgctataattctgctagcaatctgttgaggtgaaacttgggatctgactcttcagcaagcagcaaatgacctagtaactcagggacaactatttttgaactttaagtgccactttaatgcagttagtttgataaaaccatgtgggttttttttttagggctagctctacgggagtggaagtgagagccaggcatgagtgcgtctccacatgcttttccacctgccctgagtgtgttacatactgaaacaggcctacatagatgttacaacttcccttcctctgtcggagatgtcatctgtgcctttctcagtgttcatctgataatgtaaatttaaatgcctctacatttgatacgaaacccacattcaggtgacactgaacgaggtggcttttgtcccaccagtgcctcatcagtgtgaggcgattcctctctgctttaggcttatggattgtagaactgttggctgtttcctaaatttattccaagttctcgtagaggcatatagatttcagtctgtgcttgtatgggatagatgatctgagtggctttctggcctcttttttgagtttaaaatccatatgaggttgacttgtcatactaaggtaacatgtttgtgaggttattccactagtactgtgatcacgtgggtgtcagtatctttaacggccttcattcttggttgtgagattttatttgatatgcccactcaccctcgacgaatctgcccgctttgggctgtggtgcctgtgtatctttgcccgtctggtctccagttggtggaattaccttttttgtactgccacttctcagcatctttgaaatttgacataatgttgcttcatttcagtttttttagttctgtaatttgttgattgtatttaactatgtgagttctgttgtgatgtttactgtattgtaaagcacctcattcatgtgatgagtgctctataaatcaataaatgatgacttagaggctgta

SEQ ID NO: 56727 - DNA, 3858 bp, Homo sapiens
agcggggcggtctcagcgcgcctgcgccgagcggccctgcgcgcagtgaggcagtggcgggggaaggcaccggtggggccgacgggcgggttgaaggagggaagcgggcgagcgaagtcccagtgcgcgccgcggcagcccgggcaccctccccttccgggcgtgagtcgctgtgaaaagagctgaagcgagcggactcgcaccggcagcgaggcgccgctcccgccgcctcagcccggccttcctcggctccggcgctccggtcgcggggcccgggttcctcggcacaccccgctccagccgcccccagagcctgtccccagcccttcggaagccccggcgccagcccgggccctcggcagggaggatgacggagctgcagtcggcactgctactgcgaagacagctggcagaactcaacaaaaatccagtggaaggcttttctgcaggtttaatagatgacaatgatctctaccgatgggaagtccttattattggccctccagatacactttatgaaggtggtgtttttaaggctcatcttactttcccaaaagattatcccctccgacctcctaaaatgaaattcattacagaaatctggcacccaaatgttgataaaaatggtgatgtgtgcatttctattcttcatgagcctggggaagataagtatggttatgaaaagccagaggaacgctggctccctatccacactgtggaaaccatcatgattagtgtcatttctatgctggcagaccctaatggagactcacctgctaatgttgatgctgcgaaagaatggagggaagatagaaatggagaatttaaaagaaaagttgcccgctgtgtaagaaaaagccaagagactgcttttgagtgacatttatttagcagctagtaacttcacttatttcagggtctccaattgagaaacatggcactgtttttcctgcactctacccacctattgctggacttctgttgtacaagttggcaaacactggctggaactgggctgcaataaaacatgccagttatcaatgctgacaagagcctaacaagtgccaacttacagatgattacgcattttgaattctaatgaactgttttaaccttcaggaagaattgtaaagacctgtacatagcacaacatgatccggataatatatatactgttcatgtacatccacaaatacaccttgtaccaaataatgctttcttgtagtagaataagaatcgtgtaaattctaagagattttagcaggttttctttcctattcattgtttcttatcagtttaaaaggattcctttaagcatgtcagatgaaaagcaattaggattaaaagtttccatttaatttcccttaaacccttgaggcttcattaaactcttttcacttactaaacttttgtatcttctttgttttgacacactcccctttgcttttatctcttacctgccagaatgttctcaaatgatttagttcaaatactgaaatacttaatgagcaattacttgatttttaatgatgacttcgaaggagtcatcactaggtgctttgtcctttttgtattctagttgcacccacctcttggattggatatagcaataacatttattggccgttgtgagctcttgatcccagtcattacccctgagaactaaaaatagatggttcttaattcaacttactgaaaatttccccaaacaatagcaaatctgacttttccctcttcagttgcctggtattaaggttggataaatgaagcatgcacagctacaggctttctacttaacttctgggtttgctattacaaatcctatttactctcatacccttctccttagtccttcatatttctctgcctctattcttctatactgcagatttttctcacctattgtacaaagaaattgcgatgtatattttcatgtaatttgattttggaattctgtcaccttatgtagtgagttcttccaaaatataattttttttcaataattgtcaagttgttggcttttattgtattgaatgaaggctataatactgagtgccagagaagtggtttaggaaaatctcaggttgattccttatgcaaatgaacttttaatacttgaaaatcacatggccatggcagtatatgtatttggttctatctagattcttctgtgaatctaaaagcattacaggggtaaatgctttgctatttgacgtatagatcccgtcactaacaatagtacacttggatgtgattaatgtttgagcttcaatatatttcatatcatacagttttctaaaacaacttcagcaaatggtaaaatgaacatgtgcagtgttaaaggcaggccttaggctccttcatgtttgttgtgaggttgtgtgtgggaagtagtctttggcttataagggatagaacttgagacagtagcagatgggacatggtgtttgattgtgagaatcagtgagaattcgtgcatctctgctctgtggggtttggagaaatgctttggcagaagagtgaaagaactcctgccaagagcccagacctctacaaacgttgtatgtccttttttaagcagaaataaaatggttgaggatgtagtcacagtagagagtgatttttttctaagtccctgtcctctactctgaagcgttataaaaacctgtaaacattatacaaacccacaaaccttatagaaactcgtaagtgtgttgtgactggaaattgattcattagaacccagttttctttaagaactttgtgacttggtttttttttttccttttccaaagactgtaaaaatagttgccccaaaatgtcagcactgcacaccctccagggacttggaatacaatcctttttacttttttttttttttttttaaagaaacggggtctctctgtcacccaggctggagtgcagtggcaacgatcatagctaactgcagctttgacctcctgggctcaagtgatcctcctgcctcagcctcctgagtagctaggactacaggtgtatgccaccatgcctggctaatacaaaaaaattcttttaagagatgggatccctcccttttaaaatcagaacttgttcacatggtggttgcttgtggcaaaacggagttcaaattttgctctcctattgctataattctgctagcaatctgttgaggtgaaacttgggatctgactcttcagcaagcagcaaatgacctagtaactcagggacaactatttttgaactttaagtgccactttaatgcagttagtttgataaaaccatgtgggttttttttttagggctagctctacgggagtggaagtgagagccaggcatgagtgcgtctccacatgcttttccacctgccctgagtgtgttacatactgaaacaggcctacatagatgttacaacttcccttcctctgtcggagatgtcatctgtgcctttctcagtgttcatctgataatgtaaatttaaatgcctctacatttgatacgaaacccacattcaggtgacactgaacgaggtggcttttgtcccaccagtgcctcatcagtgtgaggcgattcctctctgctttaggaaaatgatttttccccctaaacttgtgccaaccatcaacaacatctccatagatcttatggattgtagaactgttggctgtttcctaaatttattccaagttctcgtagaggcatatagatttcagtctgtgcttgtatgggatagatgatctgagtggctttctggcctcttttttgagtttaaaatccatatgaggttgacttgtcatgtggaataacctcacaaacatgttaccttagtatgacaagtcaatctcatatggattttaaact

SEQ ID NO: 56728 - DNA, 3795 bp, Homo sapiens
attagccttcctccttcgctgcagctcctctaactcaacaaaaatccagtggaaggcttttctgcaggtttaatagatgacaatgatctctaccgatgggaagtccttattattggccctccagatacactttatgaaggtggtgtttttaaggctcatcttactttcccaaaagattatcccctccgacctcctaaaatgaaattcattacagaaatctggcacccaaatgttgataaaaatggtgatgtgtgcatttctattcttcatgagcctggggaagataagtatggttatgaaaagccagaggaacgctggctccctatccacactgtggaaaccatcatgattagtgtcatttctatgctggcagaccctaatggagactcacctgctaatgttgatgctgcgaaagaatggagggaagatagaaatggagaatttaaaagaaaagttgcccgctgtgtaagaaaaagccaagagactgcttttgagtgacatttatttagcagctagtaacttcacttatttcagggtctccaattgagaaacatggcactgtttttcctgcactctacccacctattgctggacttctgttgtacaagttggcaaacactggctggaactgggctgcaataaaacatgccagttatcaatgctgacaagagcctaacaagtgccaacttacagatgattacgcattttgaattctaatgaactgttttaaccttcaggaagaattgtaaagacctgtacatagcacaacatgatccggataatatatatactgttcatgtacatccacaaatacaccttgtaccaaataatgctttcttgtagtagaataagaatcgtgtaaattctaagagattttagcaggttttctttcctattcattgtttcttatcagtttaaaaggattcctttaagcatgtcagatgaaaagcaattaggattaaaagtttccatttaatttcccttaaacccttgaggcttcattaaactcttttcacttactaaacttttgtatcttctttgttttgacacactcccctttgcttttatctcttacctgccagaatgttctcaaatgatttagttcaaatactgaaatacttaatgagcaattacttgatttttaatgatgacttcgaaggagtcatcactaggtgctttgtcctttttgtattctagttgcacccacctcttggattggatatagcaataacatttattggccgttgtgagctcttgatcccagtcattacccctgagaactaaaaatagatggttcttaattcaacttactgaaaatttccccaaacaatagcaaatctgacttttccctcttcagttgcctggtattaaggttggataaatgaagcatgcacagctacaggctttctacttaacttctgggtttgctattacaaatcctatttactctcatacccttctccttagtccttcatatttctctgcctctattcttctatactgcagatttttctcacctattgtacaaagaaattgcgatgtatattttcatgtaatttgattttggaattctgtcaccttatgtagtgagttcttccaaaatataattttttttcaataattgtcaagttgttggcttttattgtattgaatgaaggctataatactgagtgccagagaagtggtttaggaaaatctcaggttgattccttatgcaaatgaacttttaatacttgaaaatcacatggccatggcagtatatgtatttggttctatctagattcttctgtgaatctaaaagcattacaggggtaaatgctttgctatttgacgtatagatcccgtcactaacaatagtacacttggatgtgattaatgtttgagcttcaatatatttcatatcatacagttttctaaaacaacttcagcaaatggtaaaatgaacatgtgcagtgttaaaggcaggccttaggctccttcatgtttgttgtgaggttgtgtgtgggaagtagtctttggcttataagggatagaacttgagacagtagcagatgggacatggtgtttgattgtgagaatcagtgagaattcgtgcatctctgctctgtggggtttggagaaatgctttggcagaagagtgaaagaactcctgccaagagcccagacctctacaaacgttgtatgtccttttttaagcagaaataaaatggttgaggatgtagtcacagtagagagtgatttttttctaagtccctgtcctctactctgaagcgttataaaaacctgtaaacattatacaaacccacaaaccttatagaaactcgtaagtgtgttgtgactggaaattgattcattagaacccagttttctttaagaactttgtgacttggtttttttttttccttttccaaagactgtaaaaatagttgccccaaaatgtcagcactgcacaccctccagggacttggaatacaatcctttttacttttttttttttttttttaaagaaacggggtctctctgtcacccaggctggagtgcagtggcaacgatcatagctaactgcagctttgacctcctgggctcaagtgatcctcctgcctcagcctcctgagtagctaggactacaggtgtatgccaccatgcctggctaatacaaaaaaattcttttaagagatgggatccctcccttttaaaatcagaacttgttcacatggtggttgcttgtggcaaaacggagttcaaattttgctctcctattgctataattctgctagcaatctgttgaggtgaaacttgggatctgactcttcagcaagcagcaaatgacctagtaactcagggacaactatttttgaactttaagtgccactttaatgcagttagtttgataaaaccatgtgggttttttttttagggctagctctacgggagtggaagtgagagccaggcatgagtgcgtctccacatgcttttccacctgccctgagtgtgttacatactgaaacaggcctacatagatgttacaacttcccttcctctgtcggagatgtcatctgtgcctttctcagtgttcatctgataatgtaaatttaaatgcctctacatttgatacgaaacccacattcaggtgacactgaacgaggtggcttttgtcccaccagtgcctcatcagtgtgaggcgattcctctctgctttaggaaaatgatttttccccctaaacttgtgccaaccatcaacaacatctccatagatcttatggattgtagaactgttggctgtttcctaaatttattccaagttctcgtagaggcatatagatttcagtctgtgcttgtatgggatagatgatctgagtggctttctggcctcttttttgagtttaaaatccatatgaggttgacttgtcatactaaggtaacatgtttgtgaggttattccactagtactgtgatcacgtgggtgtcagtatctttaacggccttcattcttggttgtgagattttatttgatatgcccactcaccctcgacgaatctgcccgctttgggctgtggtgcctgtgtatctttgcccgtctggtctccagttggtggaattaccttttttgtactgccacttctcagcatctttgaaatttgacataatgttgcttcatttcagtttttttagttctgtaatttgttgattgtatttaactatgtgagttctgttgtgatgtttactgtattgtaaagcacctcattcatgtgatgagtgctctataaatcaataaatgatgacttagaggctgta

SEQ ID NO: 56729 - DNA, 4079 bp, Homo sapiens
agcggggcggtctcagcgcgcctgcgccgagcggccctgcgcgcagtgaggcagtggcgggggaaggcaccggtggggccgacgggcgggttgaaggagggaagcgggcgagcgaagtcccagtgcgcgccgcggcagcccgggcaccctccccttccgggcgtgagtcgctgtgaaaagagctgaagcgagcggactcgcaccggcagcgaggcgccgctcccgccgcctcagcccggccttcctcggctccggcgctccggtcgcggggcccgggttcctcggcacaccccgctccagccgcccccagagcctgtccccagcccttcggaagccccggcgccagcccgggccctcggcagggaggatgacggagctgcagtcggcactgctactgcgaagacagctggcagaactcaacaaaaatccagtggaaggcttttctgcaggtttaatagatgacaatgatctctaccgatgggaagtccttattattggccctccagatacactttattgataaaaatggtgatgtgtgcatttctattcttcatgagcctggggaagataagtatggttatgaaaagccagaggaacgctggctccctatccacactgtggaaaccatcatgattagtgtcatttctatgctggcagaccctaatggagactcacctgctaatgttgatgctgcgaaagaatggagggaagatagaaatggagaatttaaaagaaaagttgcccgctgtgtaagaaaaagccaagagactgcttttgagtgacatttatttagcagctagtaacttcacttatttcagggtctccaattgagaaacatggcactgtttttcctgcactctacccacctattgctggacttctgttgtacaagttggcaaacactggctggaactgggctgcaataaaacatgccagttatcaatgctgacaagagcctaacaagtgccaacttacagatgattacgcattttgaattctaatgaactgttttaaccttcaggaagaattgtaaagacctgtacatagcacaacatgatccggataatatatatactgttcatgtacatccacaaatacaccttgtaccaaataatgctttcttgtagtagaataagaatcgtgtaaattctaagagattttagcaggttttctttcctattcattgtttcttatcagtttaaaaggattcctttaagcatgtcagatgaaaagcaattaggattaaaagtttccatttaatttcccttaaacccttgaggcttcattaaactcttttcacttactaaacttttgtatcttctttgttttgacacactcccctttgcttttatctcttacctgccagaatgttctcaaatgatttagttcaaatactgaaatacttaatgagcaattacttgatttttaatgatgacttcgaaggagtcatcactaggtgctttgtcctttttgtattctagttgcacccacctcttggattggatatagcaataacatttattggccgttgtgagctcttgatcccagtcattacccctgagaactaaaaatagatggttcttaattcaacttactgaaaatttccccaaacaatagcaaatctgacttttccctcttcagttgcctggtattaaggttggataaatgaagcatgcacagctacaggctttctacttaacttctgggtttgctattacaaatcctatttactctcatacccttctccttagtccttcatatttctctgcctctattcttctatactgcagatttttctcacctattgtacaaagaaattgcgatgtatattttcatgtaatttgattttggaattctgtcaccttatgtagtgagttcttccaaaatataattttttttcaataattgtcaagttgttggcttttattgtattgaatgaaggctataatactgagtgccagagaagtggtttaggaaaatctcaggttgattccttatgcaaatgaacttttaatacttgaaaatcacatggccatggcagtatatgtatttggttctatctagattcttctgtgaatctaaaagcattacaggggtaaatgctttgctatttgacgtatagatcccgtcactaacaatagtacacttggatgtgattaatgtttgagcttcaatatatttcatatcatacagttttctaaaacaacttcagcaaatggtaaaatgaacatgtgcagtgttaaaggcaggccttaggctccttcatgtttgttgtgaggttgtgtgtgggaagtagtctttggcttataagggatagaacttgagacagtagcagatgggacatggtgtttgattgtgagaatcagtgagaattcgtgcatctctgctctgtggggtttggagaaatgctttggcagaagagtgaaagaactcctgccaagagcccagacctctacaaacgttgtatgtccttttttaagcagaaataaaatggttgaggatgtagtcacagtagagagtgatttttttctaagtccctgtcctctactctgaagcgttataaaaacctgtaaacattatacaaacccacaaaccttatagaaactcgtaagtgtgttgtgactggaaattgattcattagaacccagttttctttaagaactttgtgacttggtttttttttttccttttccaaagactgtaaaaatagttgccccaaaatgtcagcactgcacaccctccagggacttggaatacaatcctttttacttttttttttttttttttaaagaaacggggtctctctgtcacccaggctggagtgcagtggcaacgatcatagctaactgcagctttgacctcctgggctcaagtgatcctcctgcctcagcctcctgagtagctaggactacaggtgtatgccaccatgcctggctaatacaaaaaaattcttttaagagatgggatccctcccttttaaaatcagaacttgttcacatggtggttgcttgtggcaaaacggagttcaaattttgctctcctattgctataattctgctagcaatctgttgaggtgaaacttgggatctgactcttcagcaagcagcaaatgacctagtaactcagggacaactatttttgaactttaagtgccactttaatgcagttagtttgataaaaccatgtgggttttttttttagggctagctctacgggagtggaagtgagagccaggcatgagtgcgtctccacatgcttttccacctgccctgagtgtgttacatactgaaacaggcctacatagatgttacaacttcccttcctctgtcggagatgtcatctgtgcctttctcagtgttcatctgataatgtaaatttaaatgcctctacatttgatacgaaacccacattcaggtgacactgaacgaggtggcttttgtcccaccagtgcctcatcagtgtgaggcgattcctctctgctttaggaaaatgatttttccccctaaacttgtgccaaccatcaacaacatctccatagatcttatggattgtagaactgttggctgtttcctaaatttattccaagttctcgtagaggcatatagatttcagtctgtgcttgtatgggatagatgatctgagtggctttctggcctcttttttgagtttaaaatccatatgaggttgacttgtcatactaaggtaacatgtttgtgaggttattccactagtactgtgatcacgtgggtgtcagtatctttaacggccttcattcttggttgtgagattttatttgatatgcccactcaccctcgacgaatctgcccgctttgggctgtggtgcctgtgtatctttgcccgtctggtctccagttggtggaattaccttttttgtactgccacttctcagcatctttgaaatttgacataatgttgcttcatttcagtttttttagttctgtaatttgttgattgtatttaactatgtgagttctgttgtgatgtttactgtattgtaaagcacctcattcatgtgatgagtgctctataaatcaataaatgatgacttagaggctgta

SEQ ID NO: 56730 - DNA, 469 bp, Homo sapiens
attgagtggttttattttaagtggtggaaaaaatgatgagaatctcctccagatgacagctccggaagtgtcgtgcctgaacccctctcacagtctggcgggcgcagagtctgtgagcggccaggaggccacctgctcgactggcccgtcctctccatgtgccagatgcagcccagcatgacactgccctcagctcaaaaacagcacagctactctgtgtgcaggaaaaaactgccagtgacttcaccaggatttgagaacggtccgtacgttcacactaagctgagacagcgcaggttagaagatagcgcggggaagtattcacacttcagatacgaccatcacggccacatggctaaggcccacaccctcccggggtgaaataactacagcagaagaatggggcgctaaccacctccacgggcattttaaataaaacccaaagttgttttgtttttttaaaaaaaaa

SEQ ID NO: 56731 - DNA, 1363 bp, Homo sapiens
gaattcagtaagctaaaatccaaagtaagcctctgatgataattggctcttattttatccatacggtcccaaagaacatctgctgtctttggcgcagggccatatatttgtggtttcaggtgcccctaaagtgtctataggagcctataaacaaagcctataaactgtgttgtaggaaagacagcacatattgttacaggctcatacaaagaaaatatatgtagtgtttcagtctagttcttaccttcctaagtagagtccttacacatgtgtaagggagataggtattgagaaagggagagtgggaatgtgaagtgatgcataacatgcaacttagtaggaattttgacctgtgttgggcacagcttgacaagcttgtgtgtgtgtatcaccacataccctcacttcccccttccctacctctttctccttactgacttcaagggagagcatataaatgacatcaaggggtatgaaaagccacttaactgcagacttgtaggcagcaactcaccctcaagaggaagtcttcaggctctagaaacatctttaacttcggcttctgcaccataagcctcagactcaatgccaccctgcagctgtgccagatcactttgtgccctgcaggtgctgctgttgactgttctgggttcctccaccaatggacaaactaagagaaacatagggaaaaggaaatgtagagatctgttccttgcacctgttgctgcttctgctatacctgtatctgggagaaagactggcttggtgctcctggggctggagagtgccattataacaacaaatccaagtggaggggtcacagagagggggcacttcacatttgctgggcattctgctgggcactttactaaagctttacagatcatattcacaatggctttatgagagaggtacaattaccttcaatttacaattgagagaactgagaaaaatattcacgaccactaatagatcactttttaccccagctgtaagtgtagacagtgacttgtacactgaactgcgctgcgtgtatgtgaagtcaacctttgtacttcatcccagaaacatccacaatttggagttggtctcagcaggaccccattgcagcaaagacgaagtaatgtaagccactgcttctgtcgtatcgcctcatcagggaagccctctacctccatccccatctgcattcatttcctccagtctcacagatcctttctgatattcaggccaggacacccacagataattctattctctcttgcagagccactctgtaagatgggagaaaaaatctgcctggacccagatgctcccagaatcaataaaattgtacagaaaatgttgaaagttgatgaattcc

SEQ ID NO: 56732 - DNA, 959 bp, Homo sapiens
ggactttagtagccatgaaggtcctcatccttgcctgcctggtggctcttgctcttgcaagggagaccatagaaagcctgtcaagcagtgaggaatctattacagaatacaagcagaaagttgagaaggttaaacatgaggaccagcagcaaggagaggatgaacaccaggataaaatctacccctctttccagccacagcctctgatctatccattcgttgaacctatcccctatggttttcttccacaaaacattctgcctcttgctcagcctgctgtggtgctgcctgtccctcagcctgaaataatggaagtccctaaagctaaagacactgtctacactaagggcagagtgatgcctgtccttaaatctccaacgatacccttttttgaccctcaaatcccaaaactcactgatcttgaaaatctgcatcttcctctgcctctgctccagcccttgatgcagcaggtccctcagcctattcctcagactcttgcacttccccctcagcccctgtggtctgttcctcagcccaaagtcctgcctatcccccagcaagtggtgccctaccctcagagagctgtgcctgttcaagcccttctgctcaaccaagaacttctacttaaccccacccaccagatctaccctgtgactcagccacttgccccagttcataaccccattagtgtctaagaagatttcaaagttaattttccctccttatttttgaattgactgagactggaaatatgatgccttttccgtctttgtatcacgttaccccaaattaagtatgtttgaatgagtttatatggaaaaaatgaactttgtccctttatttattttatatattatgtcattcatttatttgaaatttgactcatgaactatttacattttccaaatcttaattcaactagtaccacagaagttcaatactcatttggaaatgctaca

SEQ ID NO: 56733 - DNA, 3270 bp, Homo sapiens
gaagtgcgagagagctgagagccaggactcagtgctgagcttggtgtcccaccgccacaaggaggcagggaagaaacccactagtcccagctcctggggtggcacagacattgcaactggccctgcctgtgggtcctaggggcccttggctaccaggaggctaagaacactgctcatgaatgacagtgagccctgaaagctctgggggtgtcacccagtcccacaagcctgcatcccctgcagtggagatgggctcagctcctggacgtgccacagacagaaagcataacatacactcgccaggaagagcctttgcctgactcagggcagctcagagtgtggggcagaaggtgaccagccagctcagggcaggagatgcagagcacagccaattacctgtggcacacagatgacctgctggggcagggggccactgccagtgtgtacaaggcccgcaacaagaaatccggagagctggttgctgtgaaggtcttcaacactaccagctacctgcggccccgcgaggtgcaggtgagggagtttgaggtcctgcggaagctgaaccaccagaacatcgtcaagctctttgcggtggaggagacgggcggaagccggcagaaggtactggtgatggagtactgctccagtgggagcctgctgagtgtgctggagagccctgagaatgcctttgggctgcctgaggatgagttcctggtggtgctgcgctgtgtggtggccggcatgaaccacctgcgggagaacggcattgtgcatcgcgacatcaagccggggaacatcatgcgcctcgtaggggaggaggggcagagcatctacaagctgacagacttcggcgctgcccgggagctggatgatgatgagaagttcgtctcggtctatgggactgaggagtacctgcatcccgacatgtatgagcgggcggtgcttcgaaagccccagcaaaaagcgttcggggtgactgtggatctctggagcattggagtgaccttgtaccatgcagccactggcagcctgcccttcatcccctttggtgggccacggcggaacaaggagatcatgtaccggatcaccacggagaagccggctggggccattgcaggtgcccagaggcgggagaacgggcccctggagtggagctacaccctccccatcacctgccagctgtcactggggctgcagagccagctggtgcccatcctggccaacatcctggaggtggagcaggccaagtgctggggcttcgaccagttctttgcggagaccagtgacatcctgcagcgagttgtcgtccatgtcttctccctgtcccaggcagtcctgcaccacatctatatccatgcccacaacacgatagccattttccaggaggccgtgcacaagcagaccagtgtggccccccgacaccaggagtacctctttgagggtcacctctgtgtcctcgagcccagcgtctcagcacagcacatcgcccacacgacggcaagcagccccctgaccctcttcagcacagccatccctaaggggctggccttcagggaccctgctctggacgtccccaagttcgtccccaaagtggacctgcaggcggattacaacactgccaagggcgtgttgggcgccggctaccaggccctgcggctggcacgggccctgctggatgggcaggagctaatgtttcgggggctgcactgggtcatggaggtgctccaggccacatgcagacggactctggaagtggcaaggacatccctcctctacctcagcagcagcctgggaactgagaggttcagcagcgtggctggaacgcctgagatccaggaactgaaggcggctgcagaactgaggtccaggctgcggactctagcggaggtcctctccagatgctcccaaaatatcacggagacccaggagagcctgagcagcctgaaccgggagctggtgaagagccgggatcaggtacatgaggacagaagcatccagcagattcagtgctgtttggacaagatgaacttcatctacaaacagttcaagaagtctaggatgaggccagggcttggctacaacgaggagcagattcacaagctggataaggtgaatttcagtcatttagccaaaagactcctgcaggtgttccaggaggagtgcgtgcagaagtatcaagcgtccttagtcacacacggcaagaggatgagggtggtgcacgagaccaggaaccacctgcgcctggttggctgttctgtggctgcctgtaacacagaagcccagggggtccaggagagtctcagcaagctcctggaagagctatctcaccagctccttcaggaccgagcaaagggggctcaggcctcgccgcctcccatagctccttaccccagccctacacgaaaggacctgcttctccacatgcaagagctctgcgaggggatgaagctgctggcatctgacctcctggacaacaaccgcatcatcgaacggctaaatagagtcccagcacctcctgatgtctgagctccatggggcacatgaggcatcctgaagcattagaatgattccaacactgctcttctgcaccatgagaccaacccagggcaagatcccatcccatcacatcagcctacctccctcctggctgctggccaggatgtcgccagcattaccttccactgcctttctccctgggaagcagcacagctgagactgggcaccaggccacctctgttgggacccacaggaaagagtgtggcagcaactgcctggctgacctttctatcttctctaggctcaggtactgctcctccatgcccatggctgggccgtggggagaagaagctctcatacgccttcccactccctctggtttataggacttcactccctagccaacaggagaggaggcctcctggggtttccccagggcagtaggtcaaacgacctcatcacagtcttccttcctcttcaagcgtttcatgttgaacacagctctctccgctcccttgtgatttctgagggtcaccactgccagcctcaggcaacatagagagcctcctgttctttctatgcttggtctgactgagcctaaagttgagaaaatgggtggccaaggccagtgccagtgtcttggggcccctttggctctccctcactctctgaggctccagctggtcctgggacatgcagccaggactgtgagtctgggcaggtccaaggcctgcaccttcaagaagtggaataaatgtggcctttgcttctgtt

SEQ ID NO: 56734 - DNA, 764 bp, Homo sapiens
gaagtgcgagagagctgagagccaggactcagtgctgagcttggtgtcccaccgccacaaggaggcagggaagaaacccactagtcccagctcctggggtggcacagacattgcaactggccctgcctgtgggtcctaggggcccttggctaccaggaggctaagaacactgctcatgaatgacagtgagccctgaaagctctgggggtgtcacccagtcccacaagcctgcatcccctgcagtggagatgggctcagctcctggacgtgccacagacagaaagcataacatacactcgccaggaagagcctttgcctgactcagggcagctcagagtgtgggaaatccggagagctggttgctgtgaaggtcttcaacactaccagctacctgcggccccgcgaggtgcaggtgagggagtttgaggtcctgcggaagctgaaccaccagaacatcgtcaagctctttgcggtggaggagacgggcggaagccggcagaaggtactggtgatggagtactgctccagtgggagcctgctgagtgtgctggagagccctgagaatgcctttgggctgcctgaggatgagttcctggtggtgctgcgctgtgtgggtgagcccctccctgtccctgcctccaccctcagaccagcggcaggcctgggacagatgctgacaggactcaggtgtctgactcctgctaatcattccatttaaaattccaacttaaaaattaaacctaaaaaagattgtacaccaatgt

SEQ ID NO: 56735 - DNA, 2849 bp, Homo sapiens
atcgcttaccgtacagttgcgaaggcggaggttaaacccactagtcccagctcctggggtggcacagacattgcaactggccctgcctgtgggtcctaggggcccttggctaccaggaggctaagaacactgctcatgaatgacagtgagccctgaaagctctgggggtgtcacccagtcccacaagcctgcatcccctgcagtggagatgggctcagctcctggacgtgccacagacagaaagcataacatacactcgccaggaagagcctttgcctgaggatgagttcctggtggtgctgcgctgtgtggtggccggcatgaaccacctgcgggagaacggcattgtgcatcgcgacatcaagccggggaacatcatgcgcctcgtaggggaggaggggcagagcatctacaagctgacagacttcggcgctgcccgggagctggatgatgatgagaagttcgtctcggtctatgggactgaggagtacctgcatcccgacatgtatgagcgggcggtgcttcgaaagccccagcaaaaagcgttcggggtgactgtggatctctggagcattggagtgaccttgtaccatgcagccactggcagcctgcccttcatcccctttggtgggccacggcggaacaaggagatcatgtaccggatcaccacggagaagccggctggggccattgcaggtgcccagaggcgggagaacgggcccctggagtggagctacaccctccccatcacctgccagctgtcactggggctgcagagccagctggtgcccatcctggccaacatcctggaggtggagcaggccaagtgctggggcttcgaccagttctttgcggagaccagtgacatcctgcagcgagttgtcgtccatgtcttctccctgtcccaggcagtcctgcaccacatctatatccatgcccacaacacgatagccattttccaggaggccgtgcacaagcagaccagtgtggccccccgacaccaggagtacctctttgagggtcacctctgtgtcctcgagcccagcgtctcagcacagcacatcgcccacacgacggcaagcagccccctgaccctcttcagcacagccatccctaaggggctggccttcagggaccctgctctggacgtccccaagttcgtccccaaagtggacctgcaggcggattacaacactgccaagggcgtgttgggcgccggctaccaggccctgcggctggcacgggccctgctggatgggcaggagctaatgtttcgggggctgcactgggtcatggaggtgctccaggccacatgcagacggactctggaagtggcaaggacatccctcctctacctcagcagcagcctgggaactgagaggttcagcagcgtggctggaacgcctgagatccaggaactgaaggcggctgcagaactgaggtccaggctgcggactctagcggaggtcctctccagatgctcccaaaatatcacggagacccaggagagcctgagcagcctgaaccgggagctggtgaagagccgggatcaggtacatgaggacagaagcatccagcagattcagtgctgtttggacaagatgaacttcatctacaaacagttcaagaagtctaggatgaggccagggcttggctacaacgaggagcagattcacaagctggataaggtgaatttcagtcatttagccaaaagactcctgcaggtgttccaggaggagtgcgtgcagaagtatcaagcgtccttagtcacacacggcaagaggatgagggtggtgcacgagaccaggaaccacctgcgcctggttggctgttctgtggctgcctgtaacacagaagcccagggggtccaggagagtctcagcaagctcctggaagagctatctcaccagctccttcaggaccgagcaaagggggctcaggcctcgccgcctcccatagctccttaccccagccctacacgaaaggacctgcttctccacatgcaagagctctgcgaggggatgaagctgctggcatctgacctcctggacaacaaccgcatcatcgaacggctaaatagagtcccagcacctcctgatgtctgagctccatggggcacatgaggcatcctgaagcattagaatgattccaacactgctcttctgcaccatgagaccaacccagggcaagatcccatcccatcacatcagcctacctccctcctggctgctggccaggatgtcgccagcattaccttccactgcctttctccctgggaagcagcacagctgagactgggcaccaggccacctctgttgggacccacaggaaagagtgtggcagcaactgcctggctgacctttctatcttctctaggctcaggtactgctcctccatgcccatggctgggccgtggggagaagaagctctcatacgccttcccactccctctggtttataggacttcactccctagccaacaggagaggaggcctcctggggtttccccagggcagtaggtcaaacgacctcatcacagtcttccttcctcttcaagcgtttcatgttgaacacagctctctccgctcccttgtgatttctgagggtcaccactgccagcctcaggcaacatagagagcctcctgttctttctatgcttggtctgactgagcctaaagttgagaaaatgggtggccaaggccagtgccagtgtcttggggcccctttggctctccctcactctctgaggctccagctggtcctgggacatgcagccaggactgtgagtctgggcaggtccaaggcctgcaccttcaagaagtggaataaatgtggcctttgcttctgtt

SEQ ID NO: 56736 - DNA, 913 bp, Homo sapiens
tgagggtgctacaaggggagagctgaggacttgaatggctcagtgttcttgaaagctaattgtgctgggccctggagtgtggtctgcaggcctctccaacaggtgggcactgctagcctgtaccttttcttgtaggctaaatagagtcccagcacctcctgatgtctgagctccatggggcacatgaggcatcctgaagcattagaatgattccaacactgctcttctgcaccatgagaccaacccagggcaagatcccatcccatcacatcagcctacctccctcctggctgctggccaggatgtcgccagcattaccttccactgcctttctccctgggaagcagcacagctgagactgggcaccaggccacctctgttgggacccacaggaaagagtgtggcagcaactgcctggctgacctttctatcttctctaggctcaggtactgctcctccatgcccatggctgggccgtggggagaagaagctctcatacgccttcccactccctctggtttataggacttcactccctagccaacaggagaggaggcctcctggggtttccccagggcagtaggtcaaacgacctcatcacagtcttccttcctcttcaagcgtttcatgttgaacacagctctctccgctcccttgtgatttctgagggtcaccactgccagcctcaggcaacatagagagcctcctgttctttctatgcttggtctgactgagcctaaagttgagaaaatgggtggccaaggccagtgccagtgtcttggggcccctttggctctccctcactctctgaggctccagctggtcctgggacatgcagccaggactgtgagtctgggcaggtccaaggcctgcaccttcaagaagtggaataaatgtggcctttgcttctgtt

SEQ ID NO: 56737 - DNA, 1215 bp, Homo sapiens
gaagtgcgagagagctgagagccaggactcagtgctgagcttggtgtcccaccgccacaaggaggcagggaagaaacccactagtcccagctcctggggtggcacagacattgcaactggccctgcctgtgggtcctaggggcccttggctaccaggaggctaagaacactgctcatgaatgacagtgagccctgaaagctctgggggtgtcacccagtcccacaagcctgcatcccctgcagtggagatgggctcagctcctggacgtgccacagacagaaagcataacatacactcgccaggaagagcctttgcctgactcagggcagctcagagtgtggggcagaaggtgaccagccagctcagggcaggagatgcagagcacagccaattacctgtggcacacagatgacctgctggggcagggggccactgccagtgtgtacaaggcccgcaacaagaaatccggagagctggttgctgtgaaggtcttcaacactaccagctacctgcggccccgcgaggtgcaggtgagggagtttgaggtcctgcggaagctgaaccaccagaacatcgtcaagctctttgcggtggaggagacgggcggaagccggcagaaggtactggtgatggagtactgctccagtgggagcctgctgagtgtgctggagagccctgagaatgcctttgggctgcctgaggatgagttcctggtggtgctgcgctgtgtggtggccggcatgaaccacctgcgggagaacggcattgtgcatcgcgacatcaagccggggaacatcatgcgcctcgtaggggaggaggggcagagcatctacaagctgacagacttcggcgctgcccgggagctggatgatgatgagaagttcgtctcggtctatgggactgaggagtacctgcatcccgacatgtatgagcgggcggtgcttcgaaagccccagcaaaaagcgttcggggtgactgtggatctctggagcattggagtgaccttgtaccatgcagccactggcagagcatctacaagctgacagacttcggcgctgcccgggagctggatgatgatgagaagttcgtctcggtctatgggactgaggagtacctgcatcccgacatgtatgaccgggcggtgcttcgaaagccccagcagaaagcgttcggggtaactgtggatctctggagcacttggagtcgcttgtcgt

SEQ ID NO: 56738 - DNA, 883 bp, Homo sapiens
gaagtgcgagagagctgagagccaggactcagtgctgagcttggtgtcccaccgccacaaggaggcagggaagaaacccactagtcccagctcctggggtggcacagacattgcaactggccctgcctgtgggtcctaggggcccttggctaccaggaggctaagaacactgctcatgaatgacagtgagccctgaaagctctgggggtgtcacccagtcccacaagcctgcatcccctgcagtggagatgggctcagctcctggacgtgccacagacagaaagcataacatacactcgccaggaagagcctttgcctgactcagggcagctcagagtgtggggcagaaggtgaccagccagctcagggcaggagatgcagagcacagccaattacctgtggcacacagatgacctgctggggcagggggccactgccagtgtgtacaaggcccgcaacaagaaatccggagagctggttgctgtgaaggtcttcaacactaccagctacctgcggccccgcgaggtgcaggtgagggagtttgaggtcctgcggaagctgaaccaccagaacatcgtcaagctctttgcggtggaggagacgggcggaagccggcagaaggtactggtgatggagtactgctccagtgggagcctgctgagtgtgctggagagccctgagaatgcctttgggctgcctgaggatgagttcctggtggtgctgcgctgtgtgggtgagcccctccctgtccctgcctccaccctcagaccagcggcaggcctgggacagatgctgacaggactcaggtgtctgactcctgctaatcattccatttaaaattccaacttaaaaattaaacctaaaaaagattgtacaccaatgt

SEQ ID NO: 56739 - DNA, 462 bp, Homo sapiens
atcgcttaccgtacagttgcgaaggcggaggttaaacccactagtcccagctcctggggtggcacagacattgcaactggccctgcctgtgggtcctaggggcccttggctaccaggaggctaagaacactgctcatgaatgacagtgagccctgaaagctctgggggtgtcacccagtcccacaagcctgcatcccctgcagtggagatgggctcagctcctggacgtgccacagacagaaagcataacatacactcgccaggaagagcctttgcctgaggatgagttcctggtggtgctgcgctgtgtgggtgagcccctccctgtccctgcctccaccctcagaccagcggcaggcctgggacagatgctgacaggactcaggtgtctgactcctgctaatcattccatttaaaattccaacttaaaaattaaacctaaaaaagattgtacaccaatgt

SEQ ID NO: 56740 - DNA, 282 bp, Homo sapiens
agggggtccaggagagtctcagcaaggtgggcatggcagaaggattctaggtgctctggggatgcaggctggggcgcttgttacccatgtcttcccctcctccagcactccccctacccagccacacataagctggctactaattgctgaccaaagtatggcttccctgcagctcctggaagagctatctcaccagctccttcaggaccgagcaaagggggctcaggcctcgccgcctcccatagctccttaccccagccctacacgaaaggacctgcttct

SEQ ID NO: 56741 - DNA, 2808 bp, Homo sapiens
gaagtgcgagagagctgagagccaggactcagtgctgagcttggtgtcccaccgccacaaggaggcagggaagaaacccactagtcccagctcctggggtggcacagacattgcaactggccctgcctgtgggtcctaggggcccttggctaccaggaggctaagaacactgctcatgaatgacagtgagccctgaaagctctgggggtgtcacccagtcccacaagcctgcatcccctgcagtggagatgggctcagctcctggacgtgccacagacagaaagcataacatacactcgccaggaagagcctttgcctgactcagggcagctcagagtgtggggcagaaggtgaccagccagctcagggcaggagatgcagagcacagccaattacctgtggcacacagatgacctgctggggcagggggccactgccagtgtgtacaaggcccgcaacaagaaatccggagagctggttgctgtgaaggtcttcaacactaccagctacctgcggccccgcgaggtgcaggtgagggagtttgaggtcctgcggaagctgaaccaccagaacatcgtcaagctctttgcggtggaggagacgggcggaagccggcagaaggtactggtgatggagtactgctccagtgggagcctgctgagtgtgctggagagccctgagaatgcctttgggctgcctgaggatgagttcctggtggtgctgcgctgtgtggtggccggcatgaaccacctgcgggagaacggcattgtgcatcgcgacatcaagccggggaacatcatgcgcctcgtaggggaggaggggcagagcatctacaagctgacagacttcggcgctgcccgggagctggatgatgatgagaagttcgtctcggtctatgggactgaggagtacctgcatcccgacatgtatgagcgggcggtgcttcgaaagccccagcaaaaagcgttcggggtgactgtggatctctggagcattggagtgaccttgtaccatgcagccactggcagcctgcccttcatcccctttggtgggccacggcggaacaaggagatcatgtaccggatcaccacggagaagccggctggggccattgcaggtgcccagaggcgggagaacgggcccctggagtggagctacaccctccccatcacctgccagctgtcactggggctgcagagccagctggtgcccatcctggccaacatcctggaggtggagcaggccaagtgctggggcttcgaccagttctttgcggagaccagtgacatcctgcagcgagttgtcgtccatgtcttctccctgtcccaggcagtcctgcaccacatctatatccatgcccacaacacgatagccattttccaggaggccgtgcacaagcagaccagtgtggccccccgacaccaggagtacctctttgagggtcacctctgtgtcctcgagcccagcgtctcagcacagcacatcgcccacacgacggcaagcagccccctgaccctcttcagcacagccatccctaaggggctggccttcagggaccctgctctggacgtccccaagttcgtccccaaagtggacctgcaggcggattacaacactgccaagggcgtgttgggcgccggctaccaggccctgcggctggcacgggccctgctggatgggcaggagctaatgtttcgggggctgcactgggtcatggaggtgctccaggccacatgcagacggactctggaagtggcaaggacatccctcctctacctcagcagcagcctgggaactgagaggttcagcagcgtggctggaacgcctgagatccaggaactgaaggcggctgcagaactgaggtccaggctgcggactctagcggaggtcctctccagatgctcccaaaatatcacggagacccaggagagcctgagcagcctgaaccgggagctggtgaagagccgggatcaggtacatgaggacagaagcatccagcagattcagtgctgtttggacaagatgaacttcatctacaaacagttcaagaagtctaggatgaggccagggcttggctacaacgaggagcagattcacaagctggataaggtgaatttcagtcatttagccaaaagactcctgcaggtgttccaggaggagtgcgtgcagaagtatcaagcgtccttagtcacacacggcaagaggatgagggtggtgcacgagaccaggaaccacctgcgcctggttggctgttctgtggctgcctgtaacacagaagcccagggggtccaggagagtctcagcaagctcctggaagagctatctcaccagctccttcaggaccgagcaaagggggctcaggcctcgccgcctcccatagctccttaccccagccctacacgaaaggacctgcttctccacatgcaagagctctgcgaggggatgaagctgctggcatctgacctcctggacaacaaccgcatcatcgaacggctaaatagagtcccagcacctcctgatgtctgagctccatggggcacatgaggcatcctgaagcattagaatgattccaacactgctcttctgcaccatgagaccaacccagggcaagatcccatcccatcacatcagcctacctccctcctggctgctggccaggatgtcgccagcattaccttccactgccttttctccctcactctctgaggctccagctggtcctgggacatgcagccaggactgtgagtctgggcaggtccaaggcctgcaccttcaagaagtggaataaatgtggcctttgcttctgtt

SEQ ID NO: 56742 - DNA, 2067 bp, Homo sapiens
gaagtgcgagagagctgagagccaggactcagtgctgagcttggtgtcccaccgccacaaggaggcagggaagaaacccactagtcccagctcctggggtggcacagacattgcaactggccctgcctgtgggtcctaggggcccttggctaccaggaggctaagaacactgctcatgaatgacagtgagccctgaaagctctgggggtgtcacccagtcccacaagcctgcatcccctgcagtggagatgggctcagctcctggacgtgccacagacagaaagcataacatacactcgccaggaagagcctttgcctgactcagggcagctcagagtgtggggcagaaggtgaccagccagctcagggcaggagatgcagagcacagccaattacctgtggcacacagatgacctgctggggcagggggccactgccagtgtgtacaaggcccgcaacaagaaatccggagagctggttgctgtgaaggtcttcaacactaccagctacctgcggccccgcgaggtgcaggtgagggagtttgaggtcctgcggaagctgaaccaccagaacatcgtcaagctctttgcggtggaggagacgggcggaagccggcagaaggtactggtgatggagtactgctccagtgggagcctgctgagtgtgctggagagccctgagaatgcctttgggctgcctgaggatgagttcctggtggtgctgcgctgtgtggtggccggcatgaaccacctgcgggagaacggcattgtgcatcgcgacatcaagccggggaacatcatgcgcctcgtaggggaggaggggcagagcatctacaagctgacagacttcggcgctgcccgggagctggatgatgatgagaagttcgtctcggtctatgggactgaggagtacctgcatcccgacatgtatgagcgggcggtgcttcgaaagccccagcaaaaagcgttcggggtgactgtggatctctggagcattggagtgaccttgtaccatgcagccactggcagcctgcccttcatcccctttggtgggccacggcggaacaaggagatcatgtaccggatcaccacggagaagccggctggggccattgcaggtgcccagaggcgggagaacgggcccctggagtggagctacaccctccccatcacctgccagctgtcactggggctgcagagccagctggtgcccatcctggccaacatcctggaggtggagcaggccaagtgctggggcttcgaccagttctttgcggagaccagtgacatcctgcagcgagttgtcgtccatgtcttctccctgtcccaggcagtcctgcaccacatctatatccatgcccacaacacgatagccattttccaggaggccgtgcacaagcagaccagtgtggccccccgacaccaggagtacctctttgagggtcacctctgtgtcctcgagcccagcgtctcagcacagcacatcgcccacacgacggcaagcagccccctgaccctcttcagcacagccatccctaaggggctggccttcagggaccctgctctggacgtccccaagttcgtccccaaagtggacctgcaggcggattacaacactgccaagggcgtgttgggcgccggctaccaggccctgcggctggcacgggccctgctggatgggcaggagctaatgtttcgggggctgcactgggtcatggaggtgctccaggccacatgcagacggactctggaagtggcaaggacatccctcctctacctcagcagcagcctgggaactgagaggtgaagagcctgaggcctggagagctaaaggactaacccaaggtcatgcagatagcaaatgccaggactaggactcgaacccatgtctcctgactccctgtggagatgtattgggtccagcctcaccctcttctgccgtcaaatttcccatgccttaaaatccatgaggaccggaatccatgaggaccccggaatccatgaggaccccggaatccatgaggaccccggaatccatgaggaccccggaatccatgaggaccccgga

SEQ ID NO: 56743 - DNA, 445 bp, Homo sapiens
tctgctccccaccacggctgtgtctaggatagccattttccaggaggccgtgcacaagcagaccagtgtggccccccgacaccaggagtacctctttgagggtcacctctgtgtcctcgagcccagcgtctcagcacagcacatcgcccacacgacggcaagcagccccctgaccctcttcagcacagccatccctaaggggctggccttcagggaccgtgagtagagccacctgggctggatctttctcctccccacattttcctctgagacaggagtttgcaatccaggccattggttacttttctttgtgggtgtttctttggggccacagggagcaggaggcagatgtgggttctaattctgcagacgcctctgagatgccacatgacgtgggctggtggcttgacctccctggggcttactggcatcctcagagctgtgg

SEQ ID NO: 56744 - DNA, 382 bp, Homo sapiens
atgagaagggctgaggcatttgagtatgggataaatacacctatgaacagggcaatattttcttcagagtggaagaaaaatagtagtattatacatgacatgtagaatttattttcacttattaaaaaatatgtgataaaacaacctcaattccacagttcatcttcatctatatttaatagcattaaatcatatcacttcctttaagaagcaatttgaaaaaaaaaatcccaactgaggcacacaacatgctcaatgtctgatatttcagtgaattcttggtcattgagtatttttcttaaaaccttcaaataatcacttgttaagacgtcttagaagctatctggagaagaagaaggtacttgttggaaaggtcacatag

SEQ ID NO: 56745 - DNA, 215 bp, Homo sapiens
gtaaacaaatcaattaacatgattatcccagacctttcttttcttactggaaaaaagagggcattaaactggatgatgacaataacaccataactacaagcttttataaaagtcctttatatacagtgttaatacagtgaaagatcaaccttattgaaagaggtctggcttctgccctcagctactgggaaacaatcactaggcctctggcatgt

SEQ ID NO: 56746 - DNA, 543 bp, Homo sapiens
gtgaatgaagtacttcatccaacaagtttttaaaaagctgggttttttaaaaataatgattacatgagaaatatgaggatttctcttgatgtaaaaagtttagttgacgcagagtagcaagtgaaaagcccttttatcttgtacccttttttctgcccccaccactgccccaagctctattggtagtttgatataaaacctttcatatcctcacttttgcatttattttgtgtatacatggagggggaggcatttacataaattgaatatagttattattctgtaacttactactttcatatcctcatttctgcacttattttatatatacatgggggggaggcatttacataaattgaatatagttgttattcaataacttaccttttcgcttattacatagaccttacaagctatgatcctgctctccttgtgtctatgacccaggtgggaagacacatcatctacaaggaaataattaagccacagcactgaccaatgtatcattcagagctaaaataagtgatactaacaccagggttt

SEQ ID NO: 56747 - DNA, 933 bp, Homo sapiens
acggcttccacatcaaggccagtgaagagcagaaatcagactggacccagatccacgctctccatccatttcctaatcctgtagctttcttgtatgctatctcctctagttacaaaagtctcatcccttgcatttctgcctcctgaaaccatatccacgttcatacccagttcaaatactactcttcaatttagctttgtctgtttatcctaataagcagttatctgtctcttcctatgaattcttatagcacttagttgtatagttctaatgatacttttatactgctttgtgttacatatgtaaatatacacatgtaaatgttagttacagagctactgtttctcagcttcaaagtcgccctctatactctgctttgtgaccctggggttgggactctgcgacccacattttttcctttgtagatggcttattaggctctgccaataaaggggtggtacaaagggcctagaaagctgtaagaggaagacgggacactcttctgtttgcttgctagttttgtttttgtttcctattgctgccagtgttgatcggcagctcttcttcaggtcatttgcagttcattatagtagccatagcagactccagtttgtagtttttctgacacagaaccagaatcatcatgcctctaagaaacgtcagcaccagccagccagcacccgcttttcagagtactgggccccagccctatggggttcttgctctcagctaaagatatcagtacctgcctgaggagcatacccttctgagaggttagagttttggctcccttcctccaagcttcttcccttctttgttctcccagttctacaagtagtatctgcttcttgcagttggtacctccataatacctaacttcctttgcatacctagttaacaattatttacattaaattctcttgttaaaaaaat

SEQ ID NO: 56748 - DNA, 336 bp, Homo sapiens
taaatctctatgtgtactttgcatttttactaaatgtactccaaggtgagccttgacacgtcaatggtaggaaaagattgcatactaaaccaaaacacgtaaaagcatggatctacttttaccatcgtgtttaaaatgtgagtcatgtagtgttagtctgctgtgaagttagcattgccaggatgaatcttctacagaaattgttacatttctggtttaatataaattaagaatttttctggtagtgcgtgaatgtttgtttcctgtctccttgcagattactagaacctttatttaggattccatcttgacttatttataatgttgttttgagtc

SEQ ID NO: 56749 - DNA, 118 bp, Homo sapiens
aggaagccgtcctctgaggaagtgatggttaagctgaaatctgaaataaaaacggagacaaacagttaaagaggtgagggaagatcatcaaggagattcaatggcatgtttgaagacc

SEQ ID NO: 56750 - DNA, 1047 bp, Homo sapiens
ggagcccgccagcaggtccaggtcagtaagttggtacaaagtggcgtaaccgtaggcagaaatccaggctgtcccatgtccattcacccttgcgattccgcgatcgcgagtagtgcccatgggccaggcctcttcgcaaattctgacaagggagtatagcgttacggtcacccaactcttgagctttggtgcactcctggggtttctcaggttatctggtgcatctgcctggacctcgtctagtttttgaccccttgatagacgcacctcggccagttgcctctggggctttcattatctttgtagttcttttttctctttttttgtatgtcttatgtgttcatttttttatcattgaatttattttattttaaagttatctatgtacaccaagtaaatacacacagggggttgcgcagtttggtttgtcttccacgctggcatgcaacattttggcagatgtgagtgggcaggccaggtgccccttgcagtgaccctggctctgaaagggatgcggtgaaggtggggagcaggaggaggaggaggatgtagtgtgaagcttctggtgaagggtttgcgtgtgtgttgtttcttttttatgtaagtgaattatatttcccttacatcttgctaaagagaaggctgctccctctgtgtcatctctctcctcatctgcgctacaccctcacatttccttatgtgtttttaaaagaaccatgtggtggcaacattacataaaaccccctggattcttaagtgccctgctgacagcaaatattagcctaagtccacaggcccacaggaaccttccttccaccctagtgggtctggagacagcatggcttgtctaccccaccgttgccctcttttccatgagttgcagctttagtgcagaggagccagattggacccccttcctcagaacaatggttttcaaactactccacagaatcctcagggtctcttaggactgttcaagggctcatttgctgaggagcctttgaacagtcagtcctaagagacgctgagacttcttccaccaaaaaa

SEQ ID NO: 56751 - DNA, 737 bp, Homo sapiens
ccagtctctttgaaattcctctattgaatctttgaatcttttaaataaagatcaaatttctctgcactgacttcagacaggagttctaacggagggcacgtggctcatgcacactgcgtgtttctccatcatcttttatagcggcaaccccacttccccagttgtttactttgagggcaatttccgtatcagtccaataggtacttgagagagagaagcccttttataaaatttagcttaggattaagccaaaaataccaccatgtgggggaagattcctgttccaaacactacctgtgtgtgtatccatgcacaaggctctcggcttccaactgccacgggggagttcacggcaaataccgtccattcccaagaagccagcattgatcactgtcgagcactgaggagattggaaacagggcgcagttgttattttagaagcaaactactccctttcctactgcctttcctaaggactctcttgtagttgggctttcctggggctatttcagttcttttgggccctctgaccaaaaaaaagttcatttaaattttcttttttcaaattttcaaatgacatttggagaaaagaggaggggagctgaggtaggacagtgtttgcctcaaagtaaaccactgaggagagtgggggtgccactataaaagatgatggagaaatacacccaagtgtgcactaatgagaatccacatcttcccccaaatccatatagaagagt

SEQ ID NO: 56752 - DNA, 249 bp, Homo sapiens
acaaggaatccatctgctgccattcccccaatccgctctgtcccagtctccaggctgcgaggggggccagtgtggtgtctgatgacgctgtaagtcatcctcagggacagctccaaaggtttagcatcacgtttgatccaaatgttcagaacgtctcacagatgggtgtcatttctgaaaacctgtaactgtaggctaaaattttctgatttagtttaaaaaaggaataaaaaagaataagcaaagaaa

SEQ ID NO: 56753 - DNA, 375 bp, Homo sapiens
ctcccgtaactttaaagaacagacatttgttcaaattcctaaatatgtttcaagaagactctattttcaattattcttacatttttgtggtatgtatgtgtgtcttttcctgagtaaagcatataaaattaattcatatatatttttatatatgaaattcctctggcttagttcctttgaagcactttttctcttttgtccatctcttttttgctttatacatttgctctcttactcttttgtcaacataaatcatttctcagattgggttcacataagcacttatgattgcaaaatgctacttgctagaatgaccactttggttgcctactgacctgggacaaggtagagcaaggcccaagattgacatttcac

SEQ ID NO: 56754 - DNA, 295 bp, Homo sapiens
ccgggcgtggtggcgcatgcctgtagtcccaactactcgggaggcagaagcaggagaatcgcttgaacctgggaggcggaggttgcggtgagccgagatagcgccactgcactccagcctgggtaacaagggggaaactccgtctcaaatacaaaaaaaaattatctccaattgtgttcctaaaacggtatttttgcacattagatttattaacatcatcataaacacggtgaaaccaaaatactggtaagatggggcggcgcttaaatcgatagtctacggagttacagaaaag

SEQ ID NO: 56755 - DNA, 369 bp, Homo sapiens
gccagattgtcttccttgcgagcccctgaccccggctactcttcaccagacacggccggctttggcccacaacacagccgccccacccctggatccttcaccttagcagtagcagtagctctgggtggagttgccagaggcagctgacaggccctctgccactgctgccacccccagggctagggagggaacaaagagcctgcttgctgtgcttgcacatccagcatgccacagctgcactacggagaggaggtcagacagtccccccaacaagcccccgatccctctgctctccaccagggagggccctgggcttgcgcccacagcacaaacgtcccatcccgggctgatcattctggttggcagcgg

SEQ ID NO: 56756 - DNA, 2079 bp, Homo sapiens
gaaggattctatttctatatgttgaaatgtgctgaagatgatactaatgaagagcagacaacattcacaaacagtcaaacatcaacagaagatccaggggattccactccctttgaagactctgaagaattttgtttcagtgcagaagcaaatagttttgatggtgatgatgaatttgacacctataatgaagatgatgaagaagatgagtctgagacaggctactggattacatgctgccctacttgtgatgtggatatcaacacttgggtaccattctattcaactgagctcaacaaacccgccatgatctactgctctcatggggatgggcactgggtccatgctcagtgcatggatctggcagaacgcacactcatccatctgtcagcaggaagcaacaagtattactgcaatgagcatgtggagatagcaagagctctacacactccccaaagagtcctacccttaaaaaagcctccaatgaaatccctccgtaaaaaaggttctggaaaaatcttgactcctgccaagaaatcctttcttagaaggttgtttgattagttttgcaaaagcctttcagattcaggtgtatggaatttttgaatctatttttaaaatcataacattgattttaaaaatacatttttgtttatttaaaatgcctatgttttcttttagttacatgaattaagggccagaaaaaagtgtttataatgcaatgataaataaagtcattctagaccctatacattttgaaaatattttacccaaatactcaatttactaatttattcttcactgaggatttctgatctgattttttattcaacaaaccttaaacacccagaagcagtaataatcatcgaggtatgtttatatttattatataagtcttggtaacaaataacctataaagtgtttatgacaaatttagccaataaagaaattaacacccaaaagaattaaattgattattttgtgcaacataacaattcggcagttggccaaaacttaaaagcaagatctactacatcccacattagtgttctttatataccttcaagcaaccctttggattatgcccatgaacaagttagtttctcatagctttacagatgtagatataaatataaatatatgtatacatatagatagataatgttctccactgacacaaaagaagaaataaataatctacatcaagtttgacatgttttcctgaattacttgtatgcattttctttaaggatttcccctccccattatatgatgcatgaatgatgtgccaaagtcagtcatttgaactaattatttgtgagaattttcatggaaaactggagcccattgctacttagtactctggaaaaaggaagtgagtaagaatacaataagaaaggaccaccaaataaatctcatggagaagaataatattatttcccaaaataatgtaagtttaaagaatttcatgacatttacaggcagaagatttaaatggaggaaaagaaatgtatttgtgtgagtgtgtgtgtgtgtgtgtgtgtgtgtgtagttaacatgtggagattgctgccagtgaatattataaaatcagtgatcttgccaaggtctaattagacactcgctaggatgaaactagttaaaatgactgttaattttaagggttcaagacatcagttgataactagatgaccttagaaacaaatgtctttcctcctgaaatattttccggaaaaaaaaattttctggaaaaaccttatcttaagagcttcagccacagttacagtgaagactcttactcctcactgaaagtctacagtgtgtaaggtacaactaacaaatttacgggaaacatgaattatgcaagagatgaaacgctggagtacaagttcttctgctgaaagttccatgtccccagatactgaaattaactttgataaactgaatcatattcactctgtttcaataatgttgctcgctgaatattcctgttgaacaattgttgcacattgatttgatcttttgttgtttccatcacctatataaaaataataaaatataaaaatcttctatttatat

SEQ ID NO: 56757 - DNA, 357 bp, Homo sapiens
actcaggttgtcatatatgctattgagaatagatttgtggtaaacatagaagtgtgggtatctttttgaaatcatgatttctttgtctttgggtagttacccagtagtgggattggtagaataaaggccagtactgtttctcattttttggaaagtctccatactgtttcccctctctctctctcttttttccttttttaactatactttaagttctgggatacatgtgcagaatgtgcaggtttgtcacataggtatacataggccatagtggtttgctgcacccaccaactcatcatctacaataggtatttctcctaatgctaacccctccagccccccactccccaacagtct

SEQ ID NO: 56758 - DNA, 130 bp, Homo sapiens
gcgggactggctggctctgcccagtgcaccatataacagcacggacaaaactacacaaatcccagctgggtacagtggctcacgcctgttttcccagcattgttcgaggctgcggtgggaggatcacttg

SEQ ID NO: 56759 - DNA, 579 bp, Homo sapiens
ccgccatggtgttccagggaaaccagcttccgagctgtacttcagagccctctgcaaacagtgctacctagacaaggtggggtcagaggctctcagataagcagaacttgcagggcttgtgacaggtatataacctagtccttaagccctgtgggattttacagcgctctgacggagtaactcgatggctaaacacggggagtaaagacagaaccatcccagcactcagggctccaccctccgagtaagcgagcttcccactccacatccttagcaacgctggcttcatcttccagaacggggcatgagaaaaccgacagaccagaattcttcacaaaagccgccttcacacagccaagagcataattccattaatatgccattttatagcccctcagtcatttcagatacaaactcagttactttcacatctattttaaacccacaaacaattcctcattggggatgaaatataaacaacaacaaaacccgctccagttatttagaaaatcagacactctattcttggcaaaggagatctacttaaaatacataaataaataaacatctaaaaataat

SEQ ID NO: 56760 - DNA, 647 bp, Homo sapiens
gagagtgagaagtctctagaaaatgaaacactcaataaggaggaagattgccactctccaacttctaaacctcccaaacctgatcagcccctaaaggtaatgccagcccctccaccaaaggagaatgcttgggtgaagcgaagttctaaccctcctgctcgatctcagagctcagacacagagcagcaatcccctacaagtggtgggggaaaagtagctccagctcaaccatctgaggaaggaccaggaaggaaagatgaaaataaagtagatgggatgaatgtcccaaaaggccaaactgggaactctagccgtggtccaggagactgagggaacagagaccactggaaggagtcagataggaaagatggcaaaaaggatcaagactccagatctgcacctgagccaaagaaacctgaggaaaatccagcttccaagttcagttctgcaagcaagtatgctgctctctctgttgatggtgaagatgaaaatgagggagaagattatgccgaatagacctctacatcctgtgcttttctcctagtttctctccaccctggaacattcgagagcaaatcaaaacctctatccagacaagacaaaataaaactcaccatctcctgaagacctttcttacctttttttta

SEQ ID NO: 56761 - DNA, 833 bp, Homo sapiens
gattagctgccccagcagaatcaatgttgtctgggtgatgaacttatggttggattagccaatcttcctataaagcctccatagctggatccactatcagcataactaatatttgttatccatttagtgtacaacattgaacttgaaacagccaagggtaaatagtaactaaagttaacatgccattatacatgcaatttacaacttagaggagtacttaaagaaatacaaggaaaagctttccctctgccaacatggcggcctcagcaaaaaagaagaataagaaggggaagactatctccctaacagactttctggctgaggatgggggtactggtggaggaagcacctatgtttccaaaccagtcagctgggctgatgaaacggatgacctggaaggagatgtttcgaccacttggcacagtaacgatgacgatgtgtatagggcgcctccaattgaccgttccatccttcccactgctccacgggctgctcgggaacccaatatcgaccggagccgtcttcccaaatcgccaccctacactgcttttctaggaaacctaccctatgatgttacagaagagtcaattaaggaattctttcgaggaaaatccagcttccaagttcagttctgcaagcaagtatgctgctctctctgttgatggtgaagatgaaaatgagggagaagattatgccgaatagacctctacatcctgtgcttttctcctagtttctctccaccctggaacattcgagagcaaatcaaaacctctatccagacaagacaaaataaaactcaccatctcctgaagacctttcttacctttttttta

SEQ ID NO: 56762 - DNA, 203 bp, Homo sapiens
gaagtggggtgggggtggatgggggatggaggaagggccaggtgtggggcctgggaggaagcaaaggcttctgaagccaggaagcctggaatcagatgcaggtggggacaatgagtggctggatccccgagagtgtgtgcataaaagagcaaacgttgcaccaacagcctctgcgtgcctggtctctttctctgtgcgtgtgt

SEQ ID NO: 56763 - DNA, 343 bp, Homo sapiens
atcatttcataagcagacctttagtagacctggattagagttgccttcaggccccggactggaaccttggttttctgacttgcattatttcttctaccacactaatattctgttatttgaggcaaccacaattgcatattctgtctgcatgtgtgtgagtgtgtgtgtgtgagagagaaggaaaactagcaacagccatcctacactcctcttatcataacatatgtgtttcaatatttactttattatgagttttacaccttctgaaccagtgtacttaatacaaaagtaggaaaattcatctggaatgaaaaaaacaacagctacaacaaaaagtcacttt

SEQ ID NO: 56764 - DNA, 2754 bp, Homo sapiens
gtggagctgctgacacaaacagtcattagcagacaacccttttgcaacaaagtatgctttaaaatgtaaactgtggagccattttccttgcgttgtccagaaggaacttcgtcctgcgtgagcctggattaatcatgagagagctcgtcaacattccactggtacatattcttactctggttgccttcagcggaactgagaaacttccaaaagctcctgtcatcaccactcctcttgaaacagtggatgccttagttgaagaagtggctactttcatgtgtgcagtggaatcctacccccagcctgagatttcctggactagaaataaaattctcattaaactctttgacacccggtacagcatccgggagaatgggcagctcctcaccatcctgagtgtggaagacagtgatgatggcatttactgctgcacggccaacaatggtgtgggaggagctgtggagagttgtggagccctgcaagtgaagatgaaacctaaaataactcgtcctcccataaatgtgaaaataatagagggattaaaagcagtcctaccatgtactacaatgggtaatcccaaaccatcagtgtcttggataaagggagacagccctctcagggaaaattcccgaattgcagttcttgaatctgggagcttgaggattcataacgtacaaaaggaagatgcaggacagtatcgatgtgtggcaaaaaacagcctcgggacagcatattccaaagtggtgaagctggaagttgaggtttttgccaggatcctgcgggctcctgaatcccacaatgtcacctttggctcctttgtgaccctgcactgtacagcaacaggcattcctgtccccaccatcacctggattgaaaacggaaatgctgtttcttctgggtccattcaagagagtgtgaaagaccgagtgattgactcaagactgcagctgtttatcaccaagccaggactctacacatgcatagctaccaataagcatggggagaagttcagtactgccaaggctgcagccaccatcagcatagcagaatggagtaaaccacagaaagataacaaaggctactgcgcccagtacagaggggaggtgtgtaatgcagtcctggcaaaagatgctcttgtttttctcaacacctcctatgcggaccctgaggaggcccaagagctactggtccacacggcctggaatgaactgaaagtagtgagcccagtctgccggccagctgctgaggctttgttgtgtaaccacatcttccaggagtgcagtcctggagtagtgcctactcctattcccatttgcagagagtactgcttggcagtaaaggagctcttctgcgcaaaagaatggctggtaatggaagagaagacccacagaggactctacagatccgagatgcatttgctgtccgtgccagaatgcagcaagcttcccagcatgcattgggaccccacggcctgtgccagactgccacatctagattataacaaagaaaacctaaaaacattcccaccaatgacgtcctcaaagccaagtgtggacattccaaatctgccttcctcctcctcttcttccttctctgtctcacctacatactccatgactgtaataatctccatcatgtccagctttgcaatatttgtgcttcttaccataactactctctattgctgccgaagaagaaaacaatggaaaaataagaaaagagaatcagcagcagtaaccctcaccacactgccttctgagctcttactagatagacttcatcccaaccccatgtaccagaggatgccgctccttctgaaccccaaattgctcagcctggagtatccaaggaataacattgaatatgtgagagacatcggagagggagcgtttggaagggtgtttcaagcaagggcaccaggcttacttccctatgaacctttcactatggtggcagtaaagatgctcaaagaagaagcctcggcagatatgcaagcggactttcagagggaggcagccctcatggcagaatttgacaaccctaacattgtgaagctattaggagtgtgtgctgtcgggaagccaatgtgcctgctctttgaatacatggcctatggtgacctcaatgagttcctccgcagcatgtcccctcacaccgtgtgcagcctcagtcacagtgacttgtctatgagggctcaggtctccagccctgggcccccacccctctcctgtgctgagcagctttgcattgccaggcaggtggcagctggcatggcttacctctcagaacgtaagtttgttcaccgagatttagccaccaggaactgcctggtgggcgagaacatggtggtgaaaattgccgactttggcctctccaggaacatctactcagcagactactacaaagctaatgaaaacgacgctatccctatccgttggatgccaccagagtccattttttataaccgctacactacagagtctgatgtgtgggcctatggcgtggtcctctgggagatcttctcctatggcctgcagccctactatgggatggcccatgaggaggtcatttactacgtgcgagatggcaacatcctctcctgccctgagaactgccccgtggagctgtacaatctcatgcgtctatgttggagcaagctgcctgcagacagacccagtttcaccagtattcaccgaattctggaacgcatgtgtgagagggcagagggaactgtgagtgtctaaggttgaagac

SEQ ID NO: 56765 - DNA, 945 bp, Homo sapiens
gtggagctgctgacacaaacagtcattagcagacaacccttttgcaacaaagtatgctttaaaatgtaaactgtggagccattttccttgcgttgtccagaaggaacttcgtcctgcgtgagcctggattaatcatgagagagctcgtcaacattccactggtacatattcttactctggttgccttcagcggaactgagaaacttccaaaagctcctgtcatcaccactcctcttgaaacagtggatgccttagttgaagaagtggctactttcatgtgtgcagtggaatcctacccccagcctgagatttcctggactagaaataaaattctcattaaactctttgacacccggtacagcatccgggagaatgggcagctcctcaccatcctgagtgtggaagacagtgatgatggcatttactgctgcacggccaacaatggtgtgggaggagctgtggagagttgtggagccctgcaagtgaagatgaaacctaaaataactcgtcctcccataaatgtgaaaataatagagggattaaaagcagtcctaccatgtactacaatgggtaatcccaaaccatcagtgtcttggataaagggagacagccctctcagggaaaattcccgaattgcagttcttgaatctgggagcttgaggattcataacgtacaaaaggaagatgcaggacagtatcgatgtgtggcaaaaaacagcctcgggacagcatattccaaagtggtgaagctggaagttgaggctttattgaggtgaagttgaaactaatctgcacacatgtaatatgtagaatgagttaacttcaccatcgagacaatgaagatattcacagccttcaacagatttggatgccccttggtaatcccttctatctgtccatgttctccaacctccccaaattccagataaacaattatctactttc

SEQ ID NO: 56766 - DNA, 878 bp, Homo sapiens
gtggagctgctgacacaaacagtcattagcagacaacccttttgcaacaaagtatgctttaaaatgtaaactgtggagccattttccttgcgttgtccagaaggaacttcgtcctgcgtgagcctggattaatcatgagagagctcgtcaacattccactggtacatattcttactctggttgccttcagcggaactgagaaacttccaaaagctcctgtcatcaccactcctcttgaaacagtggatgccttagttgaagaagtggctactttcatgtgtgcagtggaatcctacccccagcctgagatttcctggactagaaataaaattctcattaaactctttgacacccggtacagcatccgggagaatgggcagctcctcaccatcctgagtgtggaagacagtgatgatggcatttactgctgcacggccaacaatggtgtgggaggagctgtggagagttgtggagccctgcaagtgaagatgaaacctaaaataactcgtcctcccataaatgtgaaaataatagagggattaaaagcagtcctaccatgtactacaatgggtaatcccaaaccatcagtgtcttggataaagggagacagccctctcagggaaaattcccgaattgcagttcttgaatctgggagcttgaggattcataacgtacaaaaggaagatgcaggacagtatcgatgtgtggcaaaaaacagcctcgggacagcatattccaaagtggtgaagctggaagttgagggtgctaaaggcattcacacccagtttgtggcttctgccctccagctaagatcgttccttagctgtccccaaatatgagaatgaatatacaatgataaaacaaaaataaatcaacca

SEQ ID NO: 56767 - DNA, 1223 bp, Homo sapiens
ccctacccattagccccaagatcatagaaaaatcttccaagctggaaactggttgacaatgatcctgactttcagtaggtgtgttttttaaactctgtatacctttttcctctacctgtgttgttatttgaatatgaagttgggagaagacatatcagagattcccaatctaatacgttttaaatttgacgtttttttcccttagactagcattaattgtgtttcacaacaaaacgagatagcatttcatctcacgggacagtacactagatttcatgaggtctcatattatttacagtaaaaagtttctttcataaacgcgcttttttcaagaacaatttaccatgatgatgtcttgaaaacacagaatttaggctctgccacaaatttgctttaacatgtaatgattcatcaagttttgttctccatatactattttagagagtactgcttggcagtaaaggagctcttctgcgcaaaagaatggctggtaatggaagagaagacccacagaggactctacagatccgagatgcatttgctgtccgtgccagaatgcagcaagcttcccagcatgcattgggaccccacggcctgtgccagactgccacatctagagaatcagcagcagtaaccctcaccacactgccttctgagctcttactagatagacttcatcccaaccccatgtaccagaggatgccgctccttctgaaccccaaattgctcagcctggagtatccaaggaataacattgaatatgtgagagacatcggagagggagcgtttggaagggtgtttcaagcaagggcaccaggcttacttccctatgaacctttcactatggtggcagtaaagatgctcaaagaagaagcctcggcagatatgcaagcggactttcagagggaggcagccctcatggcagaatttgacaaccctaacattgtgaagctattaggtatgaaaatacaagtgaggatatgtatttcatcagaaaacagaggctttccaagtttttctccccttgttcgtgctttttccttttctccttgatcagtgagacgtttcagttccttttcaaatttagcttcttcaccttggtctatcccaaccctataggacattcatggcttaatggattatccctctttaaattcatcacttcaatttgtctctgtctttgctgcctcctatttataaaaatgtttaaaatgtccccattg

SEQ ID NO: 56768 - DNA, 1721 bp, Homo sapiens
gagttcagtttttagatgaattaacttctcatttgtctcctaatattttcatttttcatcttctttcatgatttgttcttctgtttgtaaactgacagtaaatgtatataaaagctcagctctagacaatcctgatgtcaagtgtaattatgtgaaaatattttatttgataatttccatgatttatgtcaggtcatagataatatgattcagtataaatggcaccagcccaagatctacatttatcccagaaaaaaaaaaacctatttcctctctctgagtctcatctttaaaattctattattctataagctggatttaccttacaactagacccttactgaactttataaatatataaccagggagaacctgatacataaatatattcttatcatgaaatttattttactgattgcttaaatacaaaaaattgcttcttaaaggtttgagaattgaatgaaataattattctttacttacagcattcccaccaatgacgtcctcaaagccaagtgtggacattccaaatctgccttcctcctcctcttcttccttctctgtctcacctacatactccatgactgtaataatctccatcatgtccagctttgcaatatttgtgcttcttaccataactactctctattgctgccgaagaagaaaacaatggaaaaataagaaaagagaatcagcagcagtaaccctcaccacactgccttctgagctcttactagatagacttcatcccaaccccatgtaccagaggatgccgctccttctgaaccccaaattgctcagcctggagtatccaaggaataacattgaatatgtgagagacatcggagagggagcgtttggaagggtgtttcaagcaagggcaccaggcttacttccctatgaacctttcactatggtggcagtaaagatgctcaaagaagaagcctcggcagatatgcaagcggactttcagagggaggcagccctcatggcagaatttgacaaccctaacattgtgaagctattaggagtgtgtgctgtcgggaagccaatgtgcctgctctttgaatacatggcctatggtgacctcaatgagttcctccgcagcatgtcccctcacaccgtgtgcagcctcagtcacagtgacttgtctatgagggctcaggtctccagccctgggcccccacccctctcctgtgctgagcagctttgcattgccaggcaggtggcagctggcatggcttacctctcagaacgtaagtttgttcaccgagatttagccaccaggaactgcctggtgggcgagaacatggtggtgaaaattgccgactttggcctctccaggaacatctactcagcagactactacaaagctaatgaaaacgacgctatccctatccgttggatgccaccagagtccattttttataaccgctacactacagagtctgatgtgtgggcctatggcgtggtcctctgggagatcttctcctatggcctgcagccctactatgggatggcccatgaggaggtcatttactacgtgcgagatggcaacatcctctcctgccctgagaactgccccgtggagctgtacaatctcatgcgtctatgttggagcaagctgcctgcagacagacccagtttcaccagtattcaccgaattctggaacgcatgtgtgagagggcagagggaactgtgagtgtctaaggttgaagac

SEQ ID NO: 56769 - DNA, 1022 bp, Homo sapiens
gtggagctgctgacacaaacagtcattagcagacaacccttttgcaacaaagtatgctttaaaatgtaaactgtggagccattttccttgcgttgtccagaaggaacttcgtcctgcgtgagcctggattaatcatgagagagctcgtcaacattccactggtacatattcttactctggttgccttcagcggaactgagaaacttccaaaagctcctgtcatcaccactcctcttgaaacagtggatgccttagttgaagaagtggctactttcatgtgtgcagtggaatcctacccccagcctgagatttcctggactagaaataaaattctcattaaactctttgacacccggtacagcatccgggagaatgggcagctcctcaccatcctgagtgtggaagacagtgatgatggcatttactgctgcacggccaacaatggtgtgggaggagctgtggagagttgtggagccctgcaagtgaagatgaaacctaaaataactcgtcctcccataaatgtgaaaataatagagggattaaaagcagtcctaccatgtactacaatgggtaatcccaaaccatcagtgtcttggataaagggagacagccctctcagggggacctccctggctggcttagcctgtttgagacatcttttggagcagcacagccctctgcatctcagccaaatccttcatcatgccattgtctacactctgctctgcaacctcagaagctaggtctccctgtctgtccctactgtggccctgtggctggcctgctgaattccaactcagctccttcagtactcctcacagggcctgaagcaacttctagatcactttcaaggcatacagaattcaggagagatttgggcttgctaactcagttctgctgtctgcccaaccttgtcatgctaccattttcacattaatgttgccatccatgttggggtaagggatccctgtggggtgttttacttatagcatcctaaataagaagttagaaaaactcaaaaa

SEQ ID NO: 56770 - DNA, 198 bp, Homo sapiens
attgaatgtttactatgtaccaagcaatgttctaggttttggagatatatcagttaaacaatactatttcatgtctttatgggagttacatgccaacaaaggagaaacagataaaaaaataacaaaaataataaagaggtccatgttatagttgttcaaaagttaaaatatgtggaaaaaggtgacaaaaacaaacac

SEQ ID NO: 56771 - DNA, 261 bp, Homo sapiens
tgctcaagcaatcctcccactcagcctcccaagtagctgggactgcaggcgcatgccaccatgcccaactcagttagcaattttttaatccctagttttctggtgtgtaaagtaggaatagaaaagaatttatgtcatttgaggatttaacaaaatagtacatgtaaataaggctgttgggggctgggcatggtggctgacgcctgtaatcccaatactttgagaggccaaggtgggcagattactcgagcccaggagttc

SEQ ID NO: 56772 - DNA, 581 bp, Homo sapiens
ctgcaaactggaccagaacacgcatgctggcttacctcacccctagcatctcattgccccaggtgatgcttctctgcccttgctcttatttataacctcacactggggcccaccaagcaattcaattaattccctttctcgttgggcttggcatcaccacaggtgccatgatgggaatagccagcattggcacttactcctgaacctaccacagcctgtctctggaattggcccaagggatagaaacgactagttgctgtaacagagttacagtggcaagtcagttctctcgcagctatagttctcaaacatggtagaggtcttgacatgctggctgcagctcagggaggaacttggctgtgcttggagaagagtgctgatttgggttaagagatcagggcaggctcaggagcacatttgagatctcataaactaggcttctcacctttgggaaggggctactggggtgtcacctggttctgattctcatggctcctccccttcctgggacccctgacctctatcttccttcttctcttttctgggtcttgcttcttgaatctactaagtaagtttatttt

SEQ ID NO: 56773 - DNA, 451 bp, Homo sapiens
gcatacctatgtcctgcactagctatccacaaaggtcacattcattcaaacactactgagaactatggttttaccattacagttcccatccctagtgctgtcatcctcagaagaacctgatccctttagaaacaggaacaaaaagtctcaaagaatgtaccataagtatagtatatctgcaacatttacttctatttatttaagggttccagggaagaatcaagaaagagccattcagtttatacttttatcctgggctagcaaagtaccttaaaaaggaaccattaaattgaggctttgaatcaagttattctaataagttgcttgaaggtatattatgaaaataaatggcggggcacagtggctcacacttgtaatttcaacactttcagaagtcgaggtgggagaactgcttgagcccaggagttcaagaccaacctggccaacatag

SEQ ID NO: 56774 - DNA, 2684 bp, Homo sapiens
acatggatgggtgcaaaaaagagctgccccgcttgcaagagccggaggaggacgaggattgttacatccttaatgttcagtcaagcagtgatgacaccagtgggtcttctgtggccagaagagctccgaagagacaggcgagttgcatccttaatgtccagtcaaggagtggtgacaccagtgggtcttctgtggccagaagagctccgaagagacaggcgagctccgtggtagtgattgactctgattctgatgaggaatgtcacacccatgaagagaagaaagctaagttattggaaataaacagcgacgatgagagtccggagtgttgtcatgtgaagcctgccatccaggaacctccaatagttattagtgatgatgacaatgacgatgacaacggtaatgatttggaagttcccgacgacaacagtgatgattcagaagctcccgacgacaacagtgatgattcggaagctcctgacgacaacagtgatgattcggaagctcccgacgacaacagtgatgattcggaagctcccgacgacaatagtgatgattcggatgttcccgacgacaacagtgatgattcatccgacgacaacagtgatgattcatccgacgacaacagtgatgattcggatgttcccgacgacaagagtgatgattcggatgttcccgacgacagcagtgatgattcggatgttcccgacgacagcagtgatgattcggaagctcccgacgacagcagtgatgattcggaagctcccgacgacagcagtgatgattcggaagctcccgacgacagcagtgatgattcggaagctcccgacgacagcagtgatgattcggaagcttccgacgacagcagtgatgattcggaagcttccgacgacagcagtgatgattcggaagctcccgacgacaagagtgatgattcggatgttcccgaagacaagagtgatgattcggatgttcccgatgacaatagtgatgatttggaagttcctgtgccagcagaagatttgtgtaatgaaggccaaattgcttcagatgaagaagagctggttgaggctgctgctgctgtctcccagcatgattcatctgatgatgctggtgagcaggatcttggtgagaatctcagcaaaccaccaagtgatcctgaggctaaccctgaagtttcagagagaaagctgccaactgaggaagagcctgcacctgtggtggaacaatcagggaaaaggaagtcaaaaaccaaaactattgtggagccaccgaggaaaaggcagacaaagaccaaaaatatagtggagccaccaaggaaaaggcagacaaagaccaaaaatatagtggagccactgaggaagaggaaggcgaaaaccaaaaatgtatctgtgacacctggacataagaagcgtgggccttcaaagaagaaacccggtgcagcaaaagttgaaaaacgcaagactaggactcctaaatgcaaagtccctggatgtttcttgcaagaccttgaaaagtcaaagaaatactctggaaaaaatttaaagcgaaataaggatgaattggttcagagaatctacgacctgtttaacagatccgtctgtgataaaaagctgccagagaaactacgcataggctggaataacaagatggtgaaaactgctggcttatgcagcactggtgagatgtggtacccaaagtggcggcgctttgccaagatccagattggcttgaaagtctgcgactctgcagaccgaatccgggataccttgatccatgaaatgtgccatgctgcctcctggctgattgatggtatccatgattctcatggtgacgcatggaagtattatgccaggaaatccaacaggatacacccggagctgcccagggtcacccgttgccataactataagattaactacaaggtccattatgaatgtactggatgcaaaacgaggattggctgctacaccaaatcgttggacaccagccgcttcatctgtgccaaatgcaaggggtctctggtcatggtgccattaactcagaaagatgggacccgtattgtgccccacgtgtgaccatttgctgtgtatgtgcagaagtattatagaaaaattatgcaggagatggctaggattagccttggggatgtgatgaaaacacttggcaggaattacaaggcaatgaagaattcttaaggttatcttagagtatattaatgtgagctatatcctttactggtaagaagttttagaaaagtttgttttgtgaagttaggaatattagaatttaggtactgttaagtaagtaatgttagaatttaagattcatgttattaacgatgattgaccttaaatagggactctattgctaaccattctgtgcccttgacagggtatttctgaagcccttgggatctaccttgggtcttacttgagttccatatttttcacatgtagaacaaaatgcaaaagaaaagtgagttttcaagagtggcaggttgagagaggagaatgctggaaagaggacaagtttgagaggcaacacttaaacactagggctactgtggcatctatgtagacaggaaagacaaacgtgtttcataaaattcgttgttgatggtattgattgaaactatctgagccatgtaatcaaaaaataaaagttttctgcatcttgattgt

SEQ ID NO: 56775 - DNA, 2032 bp, Homo sapiens
acatggatgggtgcaaaaaagagctgccccgcttgcaagagccggaggaggacgaggattgttacatccttaatgttcagtcaagcagtgatgacaccagtgggtcttctgtggccagaagagctccgaagagacaggcgagttgcatccttaatgtccagtcaaggagtggtgacaccagtgggtcttctgtggccagaagagctccgaagagacaggcgagctccgtggtagtgattgactctgattctgatgaggaatgtcacacccatgaagagaagaaagctaagttattggaaataaacagcgacgatgagagtccggagtgttgtcatgtgaagcctgccatccaggaacctccaatagttattagtgatgatgacaatgacgatgacaacggtaatgatttggaagttcccgacgacaacagtgatgattcagaagctcccgacgacaacagtgatgattcggaagctcctgacgacaacagtgatgattcggaagctcccgacgacaacagtgatgattcggaagctcccgacgacaatagtgatgattcggatgttcccgacgacaacagtgatgattcatccgacgacaacagtgatgattcatccgacgacaacagtgatgattcggatgttcccgacgacaagagtgatgattcggatgttcccgacgacagcagtgatgattcggatgttcccgacgacagcagtgatgattcggaagctcccgacgacagcagtgatgattcggaagctcccgacgacagcagtgatgattcggaagctcccgacgacagcagtgatgattcggaagctcccgacgacagcagtgatgattcggaagcttccgacgacagcagtgatgattcggaagcttccgacgacagcagtgatgattcggaagctcccgacgacaagagtgatgattcggatgttcccgaagacaagagtgatgattcggatgttcccgatgacaatagtgatgatttggaagttcctgtgccagcagaagatttgtgtaatgaaggccaaattgcttcagatgaagaagagctggttgaggctgctgctgctgtctcccagcatgattcatctgatgatgctggtgagcaggatcttggtgagaatctcagcaaaccaccaagtgatcctgaggctaaccctgaagtttcagagagaaagctgccaactgaggaagagcctgcacctgtggtggaacaatcagggaaaaggaagtcaaaaaccaaaactattgtggagccaccgaggaaaaggcagacaaagaccaaaaatatagtggagccaccaaggaaaaggcagacaaagaccaaaaatatagtggagccactgaggaagaggaaggcgaaaaccaaaaatgtatctgtgacacctggacataagaagcgtgggccttcaaagaagaaacccggtgcagcaaaagttgaaaaacgcaagactaggactcctaaatgcaaagtccctggatgtttcttgcaagaccttgaaaagtcaaagaaatactctggaaaaaatttaaagcgaaataaggatgaattggttcagagaatctacgacctgtttaacagatccgtctgtgataaaaagctgccagagaaactacgcataggctggaataacaagatggtgaaaactgctggcttatgcagcactggtgagatgtggtacccaaagtggcggcgctttgccaagatccagattggcttgaaagtctgcgactctgcagaccgaatccgggataccttgatccatgaaatgtgccatgctgcctcctggctgattgatggtatccatgattctcatggtgacgcatggaagtattatgccaggaaatccaacaggatacacccggagctgcccagggtcacccgttgccataactataagattaactacaaggtccattatgaatgtactggatgcaaaacgaggtaagactcttctcagacttttcccagttacgttttgctggggcctccaagtggctcttcagtgattttataagt

SEQ ID NO: 56776 - DNA, 306 bp, Homo sapiens
gaaaatccccatgcacctaaccaccagccacactatagttgggtgagctggaaggtgtgagcatctgtaggtcctcagcccatgaagatgccctgcctgcctggtggtgggagacacagtggcctttatcacattctccataattggatatgagggaagcatgggaccgtgacccctggagggactgcagggattgcccacgccagtcatctcactgtacagctggagaaactgaagccaggacaaggagtgggccaaggttccatagtgagcaggggatgctctgtctgcctggtgcacaaccct

SEQ ID NO: 56777 - DNA, 734 bp, Homo sapiens
gttacagggtgcctggtatacaactttgggagttcccacaggtcctggcttagagatgaatatttctttctcagagaagtttgcaatttttgttagaatcataaacttccatttttgtatctatttagtctcccaaaattctgtagccaagttagattagaagtaggctttgtaaataaaaagagcgatttcaacccaaagtaagttctctaattctctctagtgaaagtctataattagtatagttgcacatgtgtatgtgtacgtattcaaatactgaatgctgttacaaaaatatcactgtatatattcgtagtattcaatcttagggtatagaccattttcttcaaatgaagttttacttgcaaattcacaggtaagaggagagaggacatagtctggttgaagaggggaaccataaatttacctcttccttgcacacctatctctgcagaatttctagagctctgtgttgcatagtttgaaaactgttgatctatagaatttcgatgaaatttttagcatctcttttcaaagtctgatgatttattcatacattatgactgataagacaagcttgtacttctgacattataaattaagtggaaagtatagtttcatatggctaaaggaagaaaatactgtcaagtgacattgatttgtgaatttagaatgataaaatctggttttattgtgagttaatctctcagtagaacatacctttaggaatgttt

SEQ ID NO: 56778 - DNA, 805 bp, Homo sapiens
tacttcttaaaatcttgagcgtcccctgacctaggaagacgaactctttcatctgagttcattgtgagccctagagagctgtgtgactatatcatcgtcatagccgtcattggactataaacgcattacaactccatctaacgtacctcattactcccaggaatattgggtgttagatcttgcaacacagcataaaacaatttatgttaaagaaggagcattatatcctaggcacttgagacaacctcaaaggtgatgttaccctatgaacagataggtggtacagtcaccgtagaaattcaagacagggatatagcaggtgatggcgattcatggattcagagtgggctagggactccactttattgttcgtgtatttctgagctgctaaccagcaaacctcacccataagcttaggtcaggatcatctgtcctcgggatgccatagagcctggtttcagaagcagaacaatcatgctaattaaaatgtcgtgttctggcctacagcagacaacagctggttttagattaagaaatctttttaaagaaacacatcttactggcctatagagaagacgaacttgaactggccctggcccaagtgcacactgagccactggctttgcccccaggggcctaactgggatgggcctgcttggaatgccagggctggaaatacttttttattttgctgattaacattacatagttgttaaaatgtttatctcatgtattttaccaaccctcacacatttaggtataaacctccttttctgggagaattaaagagaaaaacagcaacttt

SEQ ID NO: 56779 - DNA, 375 bp, Homo sapiens
actcttaagaaaagatcttttctgctggagttgctacaaaaacagactcatgaaaggttatcctgccacaaccagggaatcgcctccgtgaatgaatccaacagggagcacagcacagccagaagactgccaccaagacttaatggcatgatcggaacctcctgctccagatttccctggagctagttccacaatctgacttttcaacattatgagccaattaattcccctttatgactaagctggtcactcagaaccaacaagacctaaaatatggtgagctcagtattttaaggcaccgacactttagaagtgggctgtctgctctttgtgttaacaaggcaatatgaacacttcaaaccttttaagtcaaaa

SEQ ID NO: 56780 - DNA, 2875 bp, Homo sapiens
caaggctctgttcagttgttcttatctacatcctagaatcgggggtttcagctcactgctccttttcttttttttctttctctcccccgcccacccccccaaaaataattgatttgctttacaatcatccacactgtgttttgtggatctttaattatatataacaatagtagtcattttaaatatatattctgaaatctttgcaaattttaacagaagagtcgaagctctgcgagacccaatatttgccaataagaatggttatgataattagcaccatggagcctcaggtgtcaaatggtccgacatccaatacaagcaatggaccctccagcaacaacagaaactgtccttctcccatgcaaacaggggcaaccacagatgacagcaaaaccaacctcatcgtcaactatttaccccagaatatgacccaagaagaattcaggagtctcttcgggagcattggtgaaatagaatcctgcaaacttgtgagagacaaaattacaggacagagtttagggtatggatttgttaactatattgatccaaaggatgcagagaaagccatcaacactttaaatggactcagactccagaccaaaaccataaaggtctcatatgcccgtccgagctctgcctcaatcagggatgctaacctctatgttagcggccttcccaaaaccatgacccagaaggaactggagcaacttttctcgcaatacggccgtatcatcacctcacgaatcctggttgatcaagtcacaggagtgtccagaggggtgggattcatccgctttgataagaggattgaggcagaagaagccatcaaagggctgaatggccagaagcccagcggtgctacggaaccgattactgtgaagtttgccaacaaccccagccagaagtccagccaggccctgctctcccagctctaccagtcccctaaccggcgctacccaggtccacttcaccaccaggctcagaggttcaggctggacaatttgcttaatatggcctatggcgtaaagagactgatgtctggaccagtccccccttctgcttgttcccccaggttctccccaattaccattgatggaatgacaagccttgtgggaatgaacatccctggtcacacaggaactgggtggtgcatctttgtctacaacctgtcccccgattccgatgagagtgtcctctggcagctctttggcccctttggagcagtgaacaacgtaaaggtgattcgtgacttcaacaccaacaagtgcaagggattcggctttgtcaccatgaccaactatgatgaggcggccatggccatcgccagcctcaacgggtaccgcctgggagacagagtgttgcaagtttcctttaaaaccaacaaagcccacaagtcctgaatttcccattcttacttactaaaatatatatagaaatatatacgaacaaaacacacgcgcgcacacacacacatacacgaaagagagagaaacaaacttttcaaggcttatattcaaccatggactttataagccagtgttgcctaagtattaaaacattggattatcctgaggtgtaccaggaaaggattttataatgcttagaaaaaaagaaaaaaaaaaaacaaaaaatacctttgatgcattgaatgttctttcatagctgtcgttgttgaatataatatacatagatagcgatgtgcagggatttttacccagccagctaactttactaccttccttgaaggtggatctttttaagatgaccattcgctcatttgaagaagaaaaacaaaaaacaaaaaaaataataaaaataaaacaatttttacaaagtaatgggattcaaagaaaggaaaaaaagatttttcttttttgtcaaaatatcgatccaatcagattggtaaaaacccccacacaaattaaagaggaataataaaaattgcaaaaataaaaaaaaacttttgcaaatttttttatttttccttctttcttttatatcatgtgaactaaaacagtcttctgttaggggatgggggcaagggggatacctgatgacattaacaatttaataacattaacattgttgccaaagaggtggtctctttgctgaaaatgggtttcaagaaaaatctatttttataaaatataaagaatttttacaagagaatctggatttgagaaaaaaatattttgactggctaatttaggggaaattgacaactttgtcgcgttcatactgcactggtaactttttagagatcaagatgtgtgttttaaactggattcgtagactgttttttgaaggatgggctataaacagatgatcttcatatcttttcatagcatgtaataataattaaaaaacaattattaattactaggggaaaggagtgttcgttctacccagggtaccacagttccccacagtcaaaacccaaaagcaaggagatgagttgaaagacagtttttctttaagtcatcagtatgggatgtcagcagaacaaaaattaaaaagattaattttccttttgatctaaaacttccttagtttgagcagtaggtgctacaaaattatttacatatcttagtatcatagttaaatgtaatgtgtttaggagaggaaaacaaaagatacatttgctttaaattcattaagaaattttcaaattcactttgtagcccatgctgatagaattgggctgtgttggtacatttgaaacactgtttatgttgcttgaaacacttatttatttaatcgccgatgtgatgatgcctatggccgagatcaaatatagctagattggctagactacttatttgtttacttaaactatgggaagaagcatattattgtgtcattctgttgtgtgtgt

SEQ ID NO: 56781 - DNA, 2833 bp, Homo sapiens
caaggctctgttcagttgttcttatctacatcctagaatcgggggtttcagctcactgctccttttcttttttttctttctctcccccgcccacccccccaaaaataattgatttgctttacaatcatccacactgtgttttgtggatctttaattatatataacaatagtagtcattttaaatatatattctgaaatctttgcaaattttaacagaagagtcgaagctctgcgagacccaatatttgccaataagaatggttatgataattagcaccatggagcctcaggtgtcaaatggtccgacatccaatacaagcaatggaccctccagcaacaacagaaactgtccttctcccatgcaaacaggggcaaccacagatgacagcaaaaccaacctcatcgtcaactatttaccccagaatatgacccaagaagaattcaggagtctcttcgggagcattggtgaaatagaatcctgcaaacttgtgagagacaaaattacaggacagagtttagggtatggatttgttaactatattgatccaaaggatgcagagaaagccatcaacactttaaatggactcagactccagaccaaaaccataaaggtctcatatgcccgtccgagctctgcctcaatcagggatgctaacctctatgttagcggccttcccaaaaccatgacccagaaggaactggagcaacttttctcgcaatacggccgtatcatcacctcacgaatcctggttgatcaagtcacaggagtgtccagaggggtgggattcatccgctttgataagaggattgaggcagaagaagccatcaaagggctgaatggccagaagcccagcggtgctacggaaccgattactgtgaagtttgccaacaaccccagccagaagtccagccaggccctgctctcccagctctaccagtcccctaaccggcgctacccaggtccacttcaccaccaggctcagaggttcaggctggacaatttgcttaatatggcctatggcgtaaagaggttctccccaattaccattgatggaatgacaagccttgtgggaatgaacatccctggtcacacaggaactgggtggtgcatctttgtctacaacctgtcccccgattccgatgagagtgtcctctggcagctctttggcccctttggagcagtgaacaacgtaaaggtgattcgtgacttcaacaccaacaagtgcaagggattcggctttgtcaccatgaccaactatgatgaggcggccatggccatcgccagcctcaacgggtaccgcctgggagacagagtgttgcaagtttcctttaaaaccaacaaagcccacaagtcctgaatttcccattcttacttactaaaatatatatagaaatatatacgaacaaaacacacgcgcgcacacacacacatacacgaaagagagagaaacaaacttttcaaggcttatattcaaccatggactttataagccagtgttgcctaagtattaaaacattggattatcctgaggtgtaccaggaaaggattttataatgcttagaaaaaaagaaaaaaaaaaaacaaaaaatacctttgatgcattgaatgttctttcatagctgtcgttgttgaatataatatacatagatagcgatgtgcagggatttttacccagccagctaactttactaccttccttgaaggtggatctttttaagatgaccattcgctcatttgaagaagaaaaacaaaaaacaaaaaaaataataaaaataaaacaatttttacaaagtaatgggattcaaagaaaggaaaaaaagatttttcttttttgtcaaaatatcgatccaatcagattggtaaaaacccccacacaaattaaagaggaataataaaaattgcaaaaataaaaaaaaacttttgcaaatttttttatttttccttctttcttttatatcatgtgaactaaaacagtcttctgttaggggatgggggcaagggggatacctgatgacattaacaatttaataacattaacattgttgccaaagaggtggtctctttgctgaaaatgggtttcaagaaaaatctatttttataaaatataaagaatttttacaagagaatctggatttgagaaaaaaatattttgactggctaatttaggggaaattgacaactttgtcgcgttcatactgcactggtaactttttagagatcaagatgtgtgttttaaactggattcgtagactgttttttgaaggatgggctataaacagatgatcttcatatcttttcatagcatgtaataataattaaaaaacaattattaattactaggggaaaggagtgttcgttctacccagggtaccacagttccccacagtcaaaacccaaaagcaaggagatgagttgaaagacagtttttctttaagtcatcagtatgggatgtcagcagaacaaaaattaaaaagattaattttccttttgatctaaaacttccttagtttgagcagtaggtgctacaaaattatttacatatcttagtatcatagttaaatgtaatgtgtttaggagaggaaaacaaaagatacatttgctttaaattcattaagaaattttcaaattcactttgtagcccatgctgatagaattgggctgtgttggtacatttgaaacactgtttatgttgcttgaaacacttatttatttaatcgccgatgtgatgatgcctatggccgagatcaaatatagctagattggctagactacttatttgtttacttaaactatgggaagaagcatattattgtgtcattctgttgtgtgtgt

SEQ ID NO: 56782 - DNA, 2658 bp, Homo sapiens
gtctgacttggagttttgtgctgttgcacgtgaatgctctggaactgccctaatcgactgaaaatgagccggctacagtcatatggaacagataattagcaccatggagcctcaggtgtcaaatggtccgacatccaatacaagcaatggaccctccagcaacaacagaaactgtccttctcccatgcaaacaggggcaaccacagatgacagcaaaaccaacctcatcgtcaactatttaccccagaatatgacccaagaagaattcaggagtctcttcgggagcattggtgaaatagaatcctgcaaacttgtgagagacaaaattacaggacagagtttagggtatggatttgttaactatattgatccaaaggatgcagagaaagccatcaacactttaaatggactcagactccagaccaaaaccataaaggtctcatatgcccgtccgagctctgcctcaatcagggatgctaacctctatgttagcggccttcccaaaaccatgacccagaaggaactggagcaacttttctcgcaatacggccgtatcatcacctcacgaatcctggttgatcaagtcacaggagtgtccagaggggtgggattcatccgctttgataagaggattgaggcagaagaagccatcaaagggctgaatggccagaagcccagcggtgctacggaaccgattactgtgaagtttgccaacaaccccagccagaagtccagccaggccctgctctcccagctctaccagtcccctaaccggcgctacccaggtccacttcaccaccaggctcagaggttcaggctggacaatttgcttaatatggcctatggcgtaaagaggttctccccaattaccattgatggaatgacaagccttgtgggaatgaacatccctggtcacacaggaactgggtggtgcatctttgtctacaacctgtcccccgattccgatgagagtgtcctctggcagctctttggcccctttggagcagtgaacaacgtaaaggtgattcgtgacttcaacaccaacaagtgcaagggattcggctttgtcaccatgaccaactatgatgaggcggccatggccatcgccagcctcaacgggtaccgcctgggagacagagtgttgcaagtttcctttaaaaccaacaaagcccacaagtcctgaatttcccattcttacttactaaaatatatatagaaatatatacgaacaaaacacacgcgcgcacacacacacatacacgaaagagagagaaacaaacttttcaaggcttatattcaaccatggactttataagccagtgttgcctaagtattaaaacattggattatcctgaggtgtaccaggaaaggattttataatgcttagaaaaaaagaaaaaaaaaaaacaaaaaatacctttgatgcattgaatgttctttcatagctgtcgttgttgaatataatatacatagatagcgatgtgcagggatttttacccagccagctaactttactaccttccttgaaggtggatctttttaagatgaccattcgctcatttgaagaagaaaaacaaaaaacaaaaaaaataataaaaataaaacaatttttacaaagtaatgggattcaaagaaaggaaaaaaagatttttcttttttgtcaaaatatcgatccaatcagattggtaaaaacccccacacaaattaaagaggaataataaaaattgcaaaaataaaaaaaaacttttgcaaatttttttatttttccttctttcttttatatcatgtgaactaaaacagtcttctgttaggggatgggggcaagggggatacctgatgacattaacaatttaataacattaacattgttgccaaagaggtggtctctttgctgaaaatgggtttcaagaaaaatctatttttataaaatataaagaatttttacaagagaatctggatttgagaaaaaaatattttgactggctaatttaggggaaattgacaactttgtcgcgttcatactgcactggtaactttttagagatcaagatgtgtgttttaaactggattcgtagactgttttttgaaggatgggctataaacagatgatcttcatatcttttcatagcatgtaataataattaaaaaacaattattaattactaggggaaaggagtgttcgttctacccagggtaccacagttccccacagtcaaaacccaaaagcaaggagatgagttgaaagacagtttttctttaagtcatcagtatgggatgtcagcagaacaaaaattaaaaagattaattttccttttgatctaaaacttccttagtttgagcagtaggtgctacaaaattatttacatatcttagtatcatagttaaatgtaatgtgtttaggagaggaaaacaaaagatacatttgctttaaattcattaagaaattttcaaattcactttgtagcccatgctgatagaattgggctgtgttggtacatttgaaacactgtttatgttgcttgaaacacttatttatttaatcgccgatgtgatgatgcctatggccgagatcaaatatagctagattggctagactacttatttgtttacttaaactatgggaagaagcatattattgtgtcattctgttgtgtgtgt

SEQ ID NO: 56783 - DNA, 2936 bp, Homo sapiens
ggggactgcgcagtcaaaacggcaaagagagtgatttatttgggcttcagtaaatgctgcatcttgtatttcaaagagtttcctgtcatgacctcataaaaaagaggaggcggcttgtatgtgtagcagtgcctggcgtgttgagttgttgcttccttctctgggcagcagctctgtaagaaggaatgtcagcttttacataacgttcctttccgcttttgacacactgtgtgagggtccatcttcttctgatcacagatggagtggaatggcttgaagatgccttctagaatcctaaagttgacctgaagccaagaagaaaattctggtgatgggagaagtggagccacttaaattacttacatgatgataattagcaccatggagcctcaggtgtcaaatggtccgacatccaatacaagcaatggaccctccagcaacaacagaaactgtccttctcccatgcaaacaggggcaaccacagatgacagcaaaaccaacctcatcgtcaactatttaccccagaatatgacccaagaagaattcaggagtctcttcgggagcattggtgaaatagaatcctgcaaacttgtgagagacaaaattacaggacagagtttagggtatggatttgttaactatattgatccaaaggatgcagagaaagccatcaacactttaaatggactcagactccagaccaaaaccataaaggtctcatatgcccgtccgagctctgcctcaatcagggatgctaacctctatgttagcggccttcccaaaaccatgacccagaaggaactggagcaacttttctcgcaatacggccgtatcatcacctcacgaatcctggttgatcaagtcacaggagtgtccagaggggtgggattcatccgctttgataagaggattgaggcagaagaagccatcaaagggctgaatggccagaagcccagcggtgctacggaaccgattactgtgaagtttgccaacaaccccagccagaagtccagccaggccctgctctcccagctctaccagtcccctaaccggcgctacccaggtccacttcaccaccaggctcagaggttcaggctggacaatttgcttaatatggcctatggcgtaaagaggttctccccaattaccattgatggaatgacaagccttgtgggaatgaacatccctggtcacacaggaactgggtggtgcatctttgtctacaacctgtcccccgattccgatgagagtgtcctctggcagctctttggcccctttggagcagtgaacaacgtaaaggtgattcgtgacttcaacaccaacaagtgcaagggattcggctttgtcaccatgaccaactatgatgaggcggccatggccatcgccagcctcaacgggtaccgcctgggagacagagtgttgcaagtttcctttaaaaccaacaaagcccacaagtcctgaatttcccattcttacttactaaaatatatatagaaatatatacgaacaaaacacacgcgcgcacacacacacatacacgaaagagagagaaacaaacttttcaaggcttatattcaaccatggactttataagccagtgttgcctaagtattaaaacattggattatcctgaggtgtaccaggaaaggattttataatgcttagaaaaaaagaaaaaaaaaaaacaaaaaatacctttgatgcattgaatgttctttcatagctgtcgttgttgaatataatatacatagatagcgatgtgcagggatttttacccagccagctaactttactaccttccttgaaggtggatctttttaagatgaccattcgctcatttgaagaagaaaaacaaaaaacaaaaaaaataataaaaataaaacaatttttacaaagtaatgggattcaaagaaaggaaaaaaagatttttcttttttgtcaaaatatcgatccaatcagattggtaaaaacccccacacaaattaaagaggaataataaaaattgcaaaaataaaaaaaaacttttgcaaatttttttatttttccttctttcttttatatcatgtgaactaaaacagtcttctgttaggggatgggggcaagggggatacctgatgacattaacaatttaataacattaacattgttgccaaagaggtggtctctttgctgaaaatgggtttcaagaaaaatctatttttataaaatataaagaatttttacaagagaatctggatttgagaaaaaaatattttgactggctaatttaggggaaattgacaactttgtcgcgttcatactgcactggtaactttttagagatcaagatgtgtgttttaaactggattcgtagactgttttttgaaggatgggctataaacagatgatcttcatatcttttcatagcatgtaataataattaaaaaacaattattaattactaggggaaaggagtgttcgttctacccagggtaccacagttccccacagtcaaaacccaaaagcaaggagatgagttgaaagacagtttttctttaagtcatcagtatgggatgtcagcagaacaaaaattaaaaagattaattttccttttgatctaaaacttccttagtttgagcagtaggtgctacaaaattatttacatatcttagtatcatagttaaatgtaatgtgtttaggagaggaaaacaaaagatacatttgctttaaattcattaagaaattttcaaattcactttgtagcccatgctgatagaattgggctgtgttggtacatttgaaacactgtttatgttgcttgaaacacttatttatttaatcgccgatgtgatgatgcctatggccgagatcaaatatagctagattggctagactacttatttgtttacttaaactatgggaagaagcatattattgtgtcattctgttgtgtgtgt

SEQ ID NO: 56784 - DNA, 2625 bp, Homo sapiens
cagcctccgcagcctcgggccggatcgcccggcggggaagatgcgcctcaagaaccagataattagcaccatggagcctcaggtgtcaaatggtccgacatccaatacaagcaatggaccctccagcaacaacagaaactgtccttctcccatgcaaacaggggcaaccacagatgacagcaaaaccaacctcatcgtcaactatttaccccagaatatgacccaagaagaattcaggagtctcttcgggagcattggtgaaatagaatcctgcaaacttgtgagagacaaaattacaggacagagtttagggtatggatttgttaactatattgatccaaaggatgcagagaaagccatcaacactttaaatggactcagactccagaccaaaaccataaaggtctcatatgcccgtccgagctctgcctcaatcagggatgctaacctctatgttagcggccttcccaaaaccatgacccagaaggaactggagcaacttttctcgcaatacggccgtatcatcacctcacgaatcctggttgatcaagtcacaggagtgtccagaggggtgggattcatccgctttgataagaggattgaggcagaagaagccatcaaagggctgaatggccagaagcccagcggtgctacggaaccgattactgtgaagtttgccaacaaccccagccagaagtccagccaggccctgctctcccagctctaccagtcccctaaccggcgctacccaggtccacttcaccaccaggctcagaggttcaggctggacaatttgcttaatatggcctatggcgtaaagaggttctccccaattaccattgatggaatgacaagccttgtgggaatgaacatccctggtcacacaggaactgggtggtgcatctttgtctacaacctgtcccccgattccgatgagagtgtcctctggcagctctttggcccctttggagcagtgaacaacgtaaaggtgattcgtgacttcaacaccaacaagtgcaagggattcggctttgtcaccatgaccaactatgatgaggcggccatggccatcgccagcctcaacgggtaccgcctgggagacagagtgttgcaagtttcctttaaaaccaacaaagcccacaagtcctgaatttcccattcttacttactaaaatatatatagaaatatatacgaacaaaacacacgcgcgcacacacacacatacacgaaagagagagaaacaaacttttcaaggcttatattcaaccatggactttataagccagtgttgcctaagtattaaaacattggattatcctgaggtgtaccaggaaaggattttataatgcttagaaaaaaagaaaaaaaaaaaacaaaaaatacctttgatgcattgaatgttctttcatagctgtcgttgttgaatataatatacatagatagcgatgtgcagggatttttacccagccagctaactttactaccttccttgaaggtggatctttttaagatgaccattcgctcatttgaagaagaaaaacaaaaaacaaaaaaaataataaaaataaaacaatttttacaaagtaatgggattcaaagaaaggaaaaaaagatttttcttttttgtcaaaatatcgatccaatcagattggtaaaaacccccacacaaattaaagaggaataataaaaattgcaaaaataaaaaaaaacttttgcaaatttttttatttttccttctttcttttatatcatgtgaactaaaacagtcttctgttaggggatgggggcaagggggatacctgatgacattaacaatttaataacattaacattgttgccaaagaggtggtctctttgctgaaaatgggtttcaagaaaaatctatttttataaaatataaagaatttttacaagagaatctggatttgagaaaaaaatattttgactggctaatttaggggaaattgacaactttgtcgcgttcatactgcactggtaactttttagagatcaagatgtgtgttttaaactggattcgtagactgttttttgaaggatgggctataaacagatgatcttcatatcttttcatagcatgtaataataattaaaaaacaattattaattactaggggaaaggagtgttcgttctacccagggtaccacagttccccacagtcaaaacccaaaagcaaggagatgagttgaaagacagtttttctttaagtcatcagtatgggatgtcagcagaacaaaaattaaaaagattaattttccttttgatctaaaacttccttagtttgagcagtaggtgctacaaaattatttacatatcttagtatcatagttaaatgtaatgtgtttaggagaggaaaacaaaagatacatttgctttaaattcattaagaaattttcaaattcactttgtagcccatgctgatagaattgggctgtgttggtacatttgaaacactgtttatgttgcttgaaacacttatttatttaatcgccgatgtgatgatgcctatggccgagatcaaatatagctagattggctagactacttatttgtttacttaaactatgggaagaagcatattattgtgtcattctgttgtgtgtgt

SEQ ID NO: 56785 - DNA, 1847 bp, Homo sapiens
caaggctctgttcagttgttcttatctacatcctagaatcgggggtttcagctcactgctccttttcttttttttctttctctcccccgcccacccccccaaaaataattgatttgctttacaatcatccacactgtgttttgtggatctttaattatatataacaatagtagtcattttaaatatatattctgaaatctttgcaaattttaacagaagagtcgaagctctgcgagacccaatatttgccaataagaatggttatgataattagcaccatggagcctcaggtgtcaaatggtccgacatccaatacaagcaatggaccctccagcaacaacagaaactgtccttctcccatgcaaacaggggcaaccacagatgacagcaaaaccaacctcatcgtcaactatttaccccagaatatgacccaagaagaattcaggagtctcttcgggagcattggtgaaatagaatcctgcaaacttgtgagagacaaaattacaggacagagtttagggtatggatttgttaactatattgatccaaaggatgcagagaaagccatcaacactttaaatggactcagactccagaccaaaaccataaaggtctcatatgcccgtccgagctctgcctcaatcagggatgctaacctctatgttagcggccttcccaaaaccatgacccagaaggaactggagcaacttttctcgcaatacggccgtatcatcacctcacgaatcctggttgatcaagtcacaggagtgtccagaggggtgggattcatccgctttgataagaggattgaggcagaagaagccatcaaagggctgaatggccagaagcccagcggtgctacggaaccgattactgtgaagtttgccaacaaccccagccagaagtccagccaggccctgctctcccagctctaccagtcccctaaccggcgctacccaggtccacttcaccaccaggctcagaggttcaggctggacaatttgcttaatatggcctatggcgtaaagagactgatgtctggaccagtccccccttctgcttgttcccccaggttctccccaattaccattgatggaatgacaagccttgtgggaatgaacatccctggtcacacaggaactgggtggtgcatctttgtctacaacctgtcccccgattccgatgagagtgtcctctggcagctctttggcccctttggagcagtgaacaacgtaaaggtgattcgtgacttcaacaccaacaagtgcaagggattcggctttgtcaccatgaccaactatgatgaggcggccatggccatcgccagcctcaacgggtaccgcctgggagacagagtgttgcaagtttcctttaaaaccaacaaagcccacaagtcctgaatttcccattcttacttactaaaatatatatagaaatatatacgaacaaaacacacgcgcgcacacacacacatacacgaaagagagagaaacaaacttttcaaggcttatattcaaccatggactttataagccagtgttgcctaagtattaaaacattggattatcctgaggtgtaccaggaaaggattttataatgcttagaaaaaaagaaaaaaaaaaaacaaaaaatacctttgatgcattgaatgttctttcatagctgtcgttgttgaatataatatacatagatagcgatgtgcagggatttttacccagccagctaactttactaccttccttgaaggtggatctttttaagatgaccattcgctcatttgaagaagaaacaaatacatctatacagccaaacacaccacatagtgaatgattccattgggggtcgcg

SEQ ID NO: 56786 - DNA, 2669 bp, Homo sapiens
caacctttgggatgtgtgcatggtggcaaggggctgactgatatgagattacttcttttaagggaaattgtcattaatgagtcaagaaactgctcatttatgataattagcaccatggagcctcaggtgtcaaatggtccgacatccaatacaagcaatggaccctccagcaacaacagaaactgtccttctcccatgcaaacaggggcaaccacagatgacagcaaaaccaacctcatcgtcaactatttaccccagaatatgacccaagaagaattcaggagtctcttcgggagcattggtgaaatagaatcctgcaaacttgtgagagacaaaattacaggacagagtttagggtatggatttgttaactatattgatccaaaggatgcagagaaagccatcaacactttaaatggactcagactccagaccaaaaccataaaggtctcatatgcccgtccgagctctgcctcaatcagggatgctaacctctatgttagcggccttcccaaaaccatgacccagaaggaactggagcaacttttctcgcaatacggccgtatcatcacctcacgaatcctggttgatcaagtcacaggagtgtccagaggggtgggattcatccgctttgataagaggattgaggcagaagaagccatcaaagggctgaatggccagaagcccagcggtgctacggaaccgattactgtgaagtttgccaacaaccccagccagaagtccagccaggccctgctctcccagctctaccagtcccctaaccggcgctacccaggtccacttcaccaccaggctcagaggttcaggctggacaatttgcttaatatggcctatggcgtaaagaggttctccccaattaccattgatggaatgacaagccttgtgggaatgaacatccctggtcacacaggaactgggtggtgcatctttgtctacaacctgtcccccgattccgatgagagtgtcctctggcagctctttggcccctttggagcagtgaacaacgtaaaggtgattcgtgacttcaacaccaacaagtgcaagggattcggctttgtcaccatgaccaactatgatgaggcggccatggccatcgccagcctcaacgggtaccgcctgggagacagagtgttgcaagtttcctttaaaaccaacaaagcccacaagtcctgaatttcccattcttacttactaaaatatatatagaaatatatacgaacaaaacacacgcgcgcacacacacacatacacgaaagagagagaaacaaacttttcaaggcttatattcaaccatggactttataagccagtgttgcctaagtattaaaacattggattatcctgaggtgtaccaggaaaggattttataatgcttagaaaaaaagaaaaaaaaaaaacaaaaaatacctttgatgcattgaatgttctttcatagctgtcgttgttgaatataatatacatagatagcgatgtgcagggatttttacccagccagctaactttactaccttccttgaaggtggatctttttaagatgaccattcgctcatttgaagaagaaaaacaaaaaacaaaaaaaataataaaaataaaacaatttttacaaagtaatgggattcaaagaaaggaaaaaaagatttttcttttttgtcaaaatatcgatccaatcagattggtaaaaacccccacacaaattaaagaggaataataaaaattgcaaaaataaaaaaaaacttttgcaaatttttttatttttccttctttcttttatatcatgtgaactaaaacagtcttctgttaggggatgggggcaagggggatacctgatgacattaacaatttaataacattaacattgttgccaaagaggtggtctctttgctgaaaatgggtttcaagaaaaatctatttttataaaatataaagaatttttacaagagaatctggatttgagaaaaaaatattttgactggctaatttaggggaaattgacaactttgtcgcgttcatactgcactggtaactttttagagatcaagatgtgtgttttaaactggattcgtagactgttttttgaaggatgggctataaacagatgatcttcatatcttttcatagcatgtaataataattaaaaaacaattattaattactaggggaaaggagtgttcgttctacccagggtaccacagttccccacagtcaaaacccaaaagcaaggagatgagttgaaagacagtttttctttaagtcatcagtatgggatgtcagcagaacaaaaattaaaaagattaattttccttttgatctaaaacttccttagtttgagcagtaggtgctacaaaattatttacatatcttagtatcatagttaaatgtaatgtgtttaggagaggaaaacaaaagatacatttgctttaaattcattaagaaattttcaaattcactttgtagcccatgctgatagaattgggctgtgttggtacatttgaaacactgtttatgttgcttgaaacacttatttatttaatcgccgatgtgatgatgcctatggccgagatcaaatatagctagattggctagactacttatttgtttacttaaactatgggaagaagcatattattgtgtcattctgttgtgtgtgt

SEQ ID NO: 56787 - DNA, 2849 bp, Homo sapiens
ggggactgcgcagtcaaaacggcaaagagagtgatttatttgggcttcagtaaatgctgcatcttgtatttcaaagagtttcctgtcatgacctcataaaaaagaggaggcggcttgtatgtgtagcagtgcctggcgtgttgagttgttgcttccttctctgggcagcagctctgtaagaaggaatgtcagcttttacataacgttcctttccgcttttgacacactgtgtgagggtccatcttcttctgatcacagatggagtggaatggcttgaagatgataattagcaccatggagcctcaggtgtcaaatggtccgacatccaatacaagcaatggaccctccagcaacaacagaaactgtccttctcccatgcaaacaggggcaaccacagatgacagcaaaaccaacctcatcgtcaactatttaccccagaatatgacccaagaagaattcaggagtctcttcgggagcattggtgaaatagaatcctgcaaacttgtgagagacaaaattacaggacagagtttagggtatggatttgttaactatattgatccaaaggatgcagagaaagccatcaacactttaaatggactcagactccagaccaaaaccataaaggtctcatatgcccgtccgagctctgcctcaatcagggatgctaacctctatgttagcggccttcccaaaaccatgacccagaaggaactggagcaacttttctcgcaatacggccgtatcatcacctcacgaatcctggttgatcaagtcacaggagtgtccagaggggtgggattcatccgctttgataagaggattgaggcagaagaagccatcaaagggctgaatggccagaagcccagcggtgctacggaaccgattactgtgaagtttgccaacaaccccagccagaagtccagccaggccctgctctcccagctctaccagtcccctaaccggcgctacccaggtccacttcaccaccaggctcagaggttcaggctggacaatttgcttaatatggcctatggcgtaaagaggttctccccaattaccattgatggaatgacaagccttgtgggaatgaacatccctggtcacacaggaactgggtggtgcatctttgtctacaacctgtcccccgattccgatgagagtgtcctctggcagctctttggcccctttggagcagtgaacaacgtaaaggtgattcgtgacttcaacaccaacaagtgcaagggattcggctttgtcaccatgaccaactatgatgaggcggccatggccatcgccagcctcaacgggtaccgcctgggagacagagtgttgcaagtttcctttaaaaccaacaaagcccacaagtcctgaatttcccattcttacttactaaaatatatatagaaatatatacgaacaaaacacacgcgcgcacacacacacatacacgaaagagagagaaacaaacttttcaaggcttatattcaaccatggactttataagccagtgttgcctaagtattaaaacattggattatcctgaggtgtaccaggaaaggattttataatgcttagaaaaaaagaaaaaaaaaaaacaaaaaatacctttgatgcattgaatgttctttcatagctgtcgttgttgaatataatatacatagatagcgatgtgcagggatttttacccagccagctaactttactaccttccttgaaggtggatctttttaagatgaccattcgctcatttgaagaagaaaaacaaaaaacaaaaaaaataataaaaataaaacaatttttacaaagtaatgggattcaaagaaaggaaaaaaagatttttcttttttgtcaaaatatcgatccaatcagattggtaaaaacccccacacaaattaaagaggaataataaaaattgcaaaaataaaaaaaaacttttgcaaatttttttatttttccttctttcttttatatcatgtgaactaaaacagtcttctgttaggggatgggggcaagggggatacctgatgacattaacaatttaataacattaacattgttgccaaagaggtggtctctttgctgaaaatgggtttcaagaaaaatctatttttataaaatataaagaatttttacaagagaatctggatttgagaaaaaaatattttgactggctaatttaggggaaattgacaactttgtcgcgttcatactgcactggtaactttttagagatcaagatgtgtgttttaaactggattcgtagactgttttttgaaggatgggctataaacagatgatcttcatatcttttcatagcatgtaataataattaaaaaacaattattaattactaggggaaaggagtgttcgttctacccagggtaccacagttccccacagtcaaaacccaaaagcaaggagatgagttgaaagacagtttttctttaagtcatcagtatgggatgtcagcagaacaaaaattaaaaagattaattttccttttgatctaaaacttccttagtttgagcagtaggtgctacaaaattatttacatatcttagtatcatagttaaatgtaatgtgtttaggagaggaaaacaaaagatacatttgctttaaattcattaagaaattttcaaattcactttgtagcccatgctgatagaattgggctgtgttggtacatttgaaacactgtttatgttgcttgaaacacttatttatttaatcgccgatgtgatgatgcctatggccgagatcaaatatagctagattggctagactacttatttgtttacttaaactatgggaagaagcatattattgtgtcattctgttgtgtgtgt

SEQ ID NO: 56788 - DNA, 1167 bp, Homo sapiens
ggggactgcgcagtcaaaacggcaaagagagtgatttatttgggcttcagtaaatgctgcatcttgtatttcaaagagtttcctgtcatgacctcataaaaaagaggaggcggcttgtatgtgtagcagtgcctggcgtgttgagttgttgcttccttctctgggcagcagctctgtaagaaggaatgtcagcttttacataacgttcctttccgcttttgacacactgtgtgagggtccatcttcttctgatcacagatggagtggaatggcttgaagatgataattagcaccatggagcctcaggtgtcaaatggtccgacatccaatacaagcaatggaccctccagcaacaacagaaactgtccttctcccatgcaaacaggggcaaccacagatgacagcaaaaccaacctcatcgtcaactatttaccccagaatatgacccaagaagaattcaggagtctcttcgggagcattggtgaaatagaatcctgcaaacttgtgagagacaaaattacaggacagagtttagggtatggatttgttaactatattgatccaaaggatgcagagaaagccatcaacactttaaatggactcagactccagaccaaaaccataaaggtctcatatgcccgtccgagctctgcctcaatcagggatgctaacctctatgttagcggccttcccaaaaccatgacccagaaggaactggagcaacttttctcgcaatacggccgtatcatcacctcacgaatcctggttgatcaagtcacaggagtgtccagaggggtgggattcatccgctttgataagaggattgaggcagaagaagccatcaaagggctgaatggccagaagcccagcggtgctacggaaccgattactgtgaagtttgccaacaaccccagccagaagtccagccaggccctgctctcccagctctaccagtcccctaaccggcgctacccaggtccacttcaccaccaggctcagaggttcaggctggacaatttgcttaatatggcctatggcgtaaagaggtaattaaaactccacagattgccagatgtccatgttggcacagactggggctagaattttttttttttaattcactaactttactttaaaagaaaaaaattcttcctttttcttccacca

SEQ ID NO: 56789 - DNA, 309 bp, Homo sapiens
gtgggggatacatttgaagcccagagcatctaataaactaagaaaaatgaataataaaatatttgaataaaaaccaaattatatgtaatgttgatgactaaaatgtaaaatgacccaagcatgacatgttttatcactttatatgtatattttatcactttatatatagtgataaatacatatcattttatatatacacatgtacacacatatgtgtgtgtatatatgtgtgtgtgtgtgtatatatatatatgaaagcttgttacaaaaagattaaaagtgaattttgtgaaagtttaacacaatgta

SEQ ID NO: 56790 - DNA, 162 bp, Homo sapiens
gatgagatttcaattcctctgggtccgaagcatctccacatgacccaggcagagatgcagaaagaggctcaccaaagacaggccgacatgcaagaaattgccctttggcgcacagggcacattcgtgacaacacactcacacggacacacacacagagaaag

SEQ ID NO: 56791 - DNA, 217 bp, Homo sapiens
tcgaattcaagcttctaacgatgtacggggacatgtaaaggctttttggttaagacctcacttttaaaactgccttaagtataaatagtacctttggaatatatttagttcatcatttgagctgccttcatactggtttcctcagccttccttcagcctgtaatattttcagcccactgtttaccttgtctcaataaaaggtttctaatgccaaata

SEQ ID NO: 56792 - DNA, 287 bp, Homo sapiens
ctagaggatcccccaaaagtgcactcttctatatctaccaaggataagaatgtaatgatgtctgctagaactttgattcacctcttccgaacactgaatcctcagatgctgcagaagaaattccggggtaagcctacagaggcctccatagaagcaagagtacaagaatatggagaattagatgctaaagattacattccaggagcagaagttctggaagttgagaaagaagagaatgctgaaaatgatgaagatgggatggggaatgaccatgctgctagacggat

SEQ ID NO: 56793 - DNA, 336 bp, Homo sapiens
tagttttagaagtttcaatagcacctagttttagaagtttcaatagcacctaatcctacacatccaatgtggagagattttcaaattgcaaccaaataaacccagcaaagaactagcagagctggtgatgtttatggcacagattagtcactgctacccagagtacctaagtaattttcctcaagaggtgaaagatcttctctcctgcaatcataccgtattggatccagatctgcgaatgacattttgcaaagctttgatcttgctgagaaataagaatctcatcaatccatcaagcctgctcaacttctaactagtctactgactcccactatg

SEQ ID NO: 56794 - DNA, 3004 bp, Homo sapiens
catacccggaaacacgagtccaagctgcagctggcagggattgcggggtgccggccgtctgagtttttttaaaactgctcgccgcgaagtctgtctgcagccaaaatgtccaacagaaacaacaacaagcttcccagcaacctgccgcagttacagaatctaatcaagcgagacccgccggcctacatcgaggagtttctacagcagtataatcactacaaatccaatgtggagattttcaaattgcaaccaaataaacccagcaaagaactagcagagctggtgatgtttatggcacagattagtcactgctacccagagtacctaagtaattttcctcaagaggtgaaagatcttctctcctgcaatcataccgtattggatccagatctgcgaatgacattttgcaaagctttgatcttgctgagaaataagaatctcatcaatccatcaagcctgctagaactcttctttgaactttttcgttgccatgataaacttctgcgaaagactttatacacacatattgtgactgatatcaagaatataaatgcaaaacacaagaacaataaagtgaatgtagtattgcaaaatttcatgtacaccatgttaagagatagcaatgcaaccgcagccaagatgtctttagatgtaatgattgaactctacagaaggaacatctggaatgatgcaaaaactgtcaatgttatcacaactgcatgtttctctaaggtcaccaagatattagttgccgctttgacattctttcttgggaaagatgaagatgaaaaacaggacagtgactccgaatctgaggatgatggaccaacagcaagagacctgctagtacaatatgctacagggaagaaaagttccaaaaacaagaaaaagttggaaaaggcaatgaaagtgctcaagaaacaaaaaaagaagaaaaaaccagaggtgtttaacttttcagccattcacttgattcatgatccccaagattttgcggaaaaactactaaagcagcttgagtgctgtaaggagaggtttgaagtgaagatgatgctcatgaaccttatctccagattggtgggaattcatgagcttttcctcttcaatttctatccctttttgcaaaggtttctgcagccccaccaaagagaagtaaccaagatccttctgtttgctgcacaagcatctcatcacctagtacccccagagattattcaatcattgcttatgactgtggcaaacaattttgttaccgacaagaactctggagaagtcatgacagtaggaatcaatgctataaaggagataacagctcgatgtcctctggccatgactgaagaacttctccaagacctggctcagtataaaacacacaaggataagaatgtaatgatgtctgctagaactttgattcacctcttccgaacactgaatcctcagatgctgcagaagaaattccggggtaagcctacagaggcctccatagaagcaagagtacaagaatatggagaattagatgctaaagattacattccaggagcagaagttctggaagttgagaaagaagagaatgctgaaaatgatgaagatggatgggaaagtaccagtctcagtgaggaggaggatgctgatggtgaatggattgatgtgcaacactcttccgatgaagaacagcaagaaatctccaagaagctgaacagcatgcccatggaggagcggaaggccaaagctgcagccatcagcactagccgagttttaactcaggaagacttccagaaaatccgcatggcccaaatgagaaaagaacttgatgctgcccccgggaaatcccagaagaggaaatacattgaaatagacagtgatgaagagcccaggggtgaattactttctcttcgggacattgaacgccttcataaaaagccaaagtctgacaaagagacaagactagcaactgcaatggctggaaagacagaccgaaaagaatttgtgaggaagaaaaccaaaacaaatccattttccagttcgacaaataaagagaagaaaaaacagaagaactttatgatgatgcggtatagccagaatgtccggtcaaaaaataagcgttccttccgagaaaaacagttggcactacgagatgcacttttgaaaaagagaaaaagaatgaagtaacttcctggcaagttttccattcctagaagaatgctaagtttgtgtccttgctctgaaaattggtaaatcaagcatgtttgtttacattaaaaagtccagacacactgtattgtgaaaactgctgaacatgtggcagcaattttgtgtttttattttggagacggctaatggtaggaatgttaatgtaaatagtggtggtaatgtaaaatcatttcatttatcattcatgcaaaaaaaagtatgtattgagtgcctattcattgtcactgtagatgcaaaacgaatgagctgtaaccccttcactcaaggcattgacagcttagctgtgagggtggacacacatatgtgtatttacagtgcagtgtaaatagttctgtagtagaggttaactccatatttctgtgaggtcactgaggccttatggactaactctgtgaggataggagttatatattcttataagacaaaacaaaacaggacaatgttacaagagtaagaggttcttacttgtacataggctttcctgctgaaaacaggcccctgctgtacagattttgggtacataatttagctcttttagtcaatccaagagatttaagtgacccccccccccccgtgttttttttgtttttgtttttgttttgaatgccatgtaaaggctttttggttaagacctcacttttaaaactgccttaagtataaatagtacctttggaatatatttagttcatcatttgagctgccttcatactggtttcctcagccttccttcagcctgtaatattttcagcccactgtttaccttgtctcaataaaaggtttctaatgccaaata

SEQ ID NO: 56795 - DNA, 3048 bp, Homo sapiens
catacccggaaacacgagtccaagctgcagctggcagggattgcggggtgccggccgtctgagtttttttaaaactgctcgccgcgaagtctgtctgcagccaaaatgtccaacagaaacaacaacaagcttcccagcaacctgccgcagttacagaatctaatcaagcgagacccgccggcctacatcgaggagtttctacagcagtataatcactacaaatccaatgtggagattttcaaattgcaaccaaataaacccagcaaagaactagcagagctggtgatgtttatggcacaggagagaaagagagcaacttcagaagagcctttgctttgttacagattagtcactgctacccagagtacctaagtaattttcctcaagaggtgaaagatcttctctcctgcaatcataccgtattggatccagatctgcgaatgacattttgcaaagctttgatcttgctgagaaataagaatctcatcaatccatcaagcctgctagaactcttctttgaactttttcgttgccatgataaacttctgcgaaagactttatacacacatattgtgactgatatcaagaatataaatgcaaaacacaagaacaataaagtgaatgtagtattgcaaaatttcatgtacaccatgttaagagatagcaatgcaaccgcagccaagatgtctttagatgtaatgattgaactctacagaaggaacatctggaatgatgcaaaaactgtcaatgttatcacaactgcatgtttctctaaggtcaccaagatattagttgccgctttgacattctttcttgggaaagatgaagatgaaaaacaggacagtgactccgaatctgaggatgatggaccaacagcaagagacctgctagtacaatatgctacagggaagaaaagttccaaaaacaagaaaaagttggaaaaggcaatgaaagtgctcaagaaacaaaaaaagaagaaaaaaccagaggtgtttaacttttcagccattcacttgattcatgatccccaagattttgcggaaaaactactaaagcagcttgagtgctgtaaggagaggtttgaagtgaagatgatgctcatgaaccttatctccagattggtgggaattcatgagcttttcctcttcaatttctatccctttttgcaaaggtttctgcagccccaccaaagagaagtaaccaagatccttctgtttgctgcacaagcatctcatcacctagtacccccagagattattcaatcattgcttatgactgtggcaaacaattttgttaccgacaagaactctggagaagtcatgacagtaggaatcaatgctataaaggagataacagctcgatgtcctctggccatgactgaagaacttctccaagacctggctcagtataaaacacacaaggataagaatgtaatgatgtctgctagaactttgattcacctcttccgaacactgaatcctcagatgctgcagaagaaattccggggtaagcctacagaggcctccatagaagcaagagtacaagaatatggagaattagatgctaaagattacattccaggagcagaagttctggaagttgagaaagaagagaatgctgaaaatgatgaagatggatgggaaagtaccagtctcagtgaggaggaggatgctgatggtgaatggattgatgtgcaacactcttccgatgaagaacagcaagaaatctccaagaagctgaacagcatgcccatggaggagcggaaggccaaagctgcagccatcagcactagccgagttttaactcaggaagacttccagaaaatccgcatggcccaaatgagaaaagaacttgatgctgcccccgggaaatcccagaagaggaaatacattgaaatagacagtgatgaagagcccaggggtgaattactttctcttcgggacattgaacgccttcataaaaagccaaagtctgacaaagagacaagactagcaactgcaatggctggaaagacagaccgaaaagaatttgtgaggaagaaaaccaaaacaaatccattttccagttcgacaaataaagagaagaaaaaacagaagaactttatgatgatgcggtatagccagaatgtccggtcaaaaaataagcgttccttccgagaaaaacagttggcactacgagatgcacttttgaaaaagagaaaaagaatgaagtaacttcctggcaagttttccattcctagaagaatgctaagtttgtgtccttgctctgaaaattggtaaatcaagcatgtttgtttacattaaaaagtccagacacactgtattgtgaaaactgctgaacatgtggcagcaattttgtgtttttattttggagacggctaatggtaggaatgttaatgtaaatagtggtggtaatgtaaaatcatttcatttatcattcatgcaaaaaaaagtatgtattgagtgcctattcattgtcactgtagatgcaaaacgaatgagctgtaaccccttcactcaaggcattgacagcttagctgtgagggtggacacacatatgtgtatttacagtgcagtgtaaatagttctgtagtagaggttaactccatatttctgtgaggtcactgaggccttatggactaactctgtgaggataggagttatatattcttataagacaaaacaaaacaggacaatgttacaagagtaagaggttcttacttgtacataggctttcctgctgaaaacaggcccctgctgtacagattttgggtacataatttagctcttttagtcaatccaagagatttaagtgacccccccccccccgtgttttttttgtttttgtttttgttttgaatgccatgtaaaggctttttggttaagacctcacttttaaaactgccttaagtataaatagtacctttggaatatatttagttcatcatttgagctgccttcatactggtttcctcagccttccttcagcctgtaatattttcagcccactgtttaccttgtctcaataaaaggtttctaatgccaaata

SEQ ID NO: 56796 - DNA, 3033 bp, Homo sapiens
catacccggaaacacgagtccaagctgcagctggcagggattgcggggtgccggccgtctgagtttttttaaaactgctcgccgcgaagtctgtctgcagccaaaatgtccaacagaaacaacaacaagcttcccagcaacctgccgcagttacagaatctaatcaagcgagacccgccggcctacatcgaggagtttctacagcagtataatcactacaaatccaatgtggagattttcaaattgcaaccaaataaacccagcaaagaactagcagagctggtgatgtttatggcacagattagtcactgctacccagagtacctaagtaattttcctcaagaggtgaaagatcttctctcctgcaatcataccgtattggatccagatctgcgaatgacattttgcaaagctttgatcttgctgagaaataagaatctcatcaatccatcaagcctgctagaactcttctttgaactttttcgttgccatgataaacttctgcgaaagactttatacacacatattgtgactgatatcaagaatataaatgcaaaacacaagaacaataaagtgaatgtagtattgcaaaatttcatgtacaccatgttaagagatagcaatgcaaccgcagccaagatgtctttagatgtaatgattgaactctacagaaggaacatctggaatgatgcaaaaactgtcaatgttatcacaactgcatgtttctctaaggtcaccaagatattagttgccgctttgacattctttcttgggaaagatgaagatgaaaaacaggacagtgactccgaatctgaggatgatggaccaacagcaagagacctgctagtacaatatgctacagggaagaaaagttccaaaaacaagaaaaagttggaaaaggcaatgaaagtgctcaagaaacaaaaaaagaagaaaaaaccagaggtgtttaacttttcagccattcacttgattcatgatccccaagattttgcggaaaaactactaaagcagcttgagtgctgtaaggagaggtttgaagtgaagatgatgctcatgaaccttatctccagattggtgggaattcatgagcttttcctcttcaatttctatccctttttgcaaaggtttctgcagccccaccaaagagaagtaaccaagatccttctgtttgctgcacaagcatctcatcacctagtacccccagagattattcaatcattgcttatgactgtggcaaacaattttgttaccgacaagaactctggagaagtcatgacagtaggaatcaatgctataaaggagataacagctcgatgtcctctggccatgactgaagaacttctccaagacctggctcagtataaaacacacaaggataagaatgtaatgatgtctgctagaactttgattcacctcttccgaacactgaatcctcagatgctgcagaagaaattccggggtaagcctacagaggcctccatagaagcaagagtacaagaatatggagaattagatgctaaagattacattccaggagcagaagttctggaagttgagaaagaagagaatgctgaaaatgatgaagatggatgggaaagtaccagtctcagtgaggaggaggatgctgatggtgaatggattgatgtgcaacactcttccgatgaagaacagcaagaaatctccaagaagctgaacagcatgcccatggaggagcggaaggccaaagctgcagccatcagcactagccgagttttaactcaggaagacttccagaaaatccgcatggcccaaatgagaaaagaacttgatgctgcccccgggaaatcccagaagaggaaatacattgaaatagacagtgatgaagagcccaggggtgaattactttctcttcgggacattgaacgccttcataaaaagccaaagtctgacaaagagacaagactagcaactgcaatggctggaaagacagaccgaaaagaatttgtgaggaagaaaaccaaaacaaatccattttccagttcgacaaataaagagaagaaaaaacagaagaactttatgatgatgcggtatagccagaatgtccggtcaaaaaataagcgttccttccgagaaaaacagttggcactacgagatgcacttttgaaaaagagaaaaagaatgaagtaacttcctggcaagttttccattcctagaagaatgctaagtttgtgtccttgctctgaaaattggtaaatcaagcatgtttgtttacattaaaaagtccagacacactgtattgtgaaaactgctgaacatgtggcagcaattttgtgtttttattttggagacggctaatggtaggaatgttaatgtaaatagtggtggtaatgtaaaatcatttcatttatcattcatgcaaaaaaaagtatgtattgagtgcctattcattgtcactgtagatgcaaaacgaatgagctgtaaccccttcactcaaggcattgacagcttagctgtgagggtggacacacatatgtgtatttacagtgcagtgtaaatagttctgtagtagaggttaactccatatttctgtgaggtcactgaggccttatggactaactctgtgaggataggagttatatattcttataagacaaaacaaaacaggacaatgttacaagagtaagaggttcttacttgtacataggctttcctgctgaaaacaggcccctgctgtacagattttgggtacataatttagctcttttagtcaatccaagagatttaagtgacccccccccccccgtgttttttttgtttttgtttttgttttgaatgccatgtaaaggctttttggttaagacctcacttttaaaactgccttaagtataaatagtacctttggaatatatttagttcatcatttgagctgccttcatactggtttcctcagccttccttcagcctgtaatattttcagcccactgtttaccttgtctcaataaaaggtttctaatgccaaataaaaaaacacaaagcataaaaacaaaacgg

SEQ ID NO: 56797 - DNA, 2586 bp, Homo sapiens
ttgactagcttcttacgtcattaaaaattctttaaatagtctgtcttaatggctgcaaattttgtcgtaagtctgggctaaaatctgatgaaatgttttacctgtggttaagtaatttagcaactcgtatctttttaaaatattacaactgggaattctagtacgtcacaaacatttgttatatcatttattttgtgccattgtctgtgctatgaaatacagtagaatgaaaatttacttcaaagcattcattgtcttcccccaggaatgatgcaaaaactgtcaatgttatcacaactgcatgtttctctaaggtcaccaagatattagttgccgctttgacattctttcttgggaaagatgaagatgaaaaacaggacagtgactccgaatctgaggatgatggaccaacagcaagagacctgctagtacaatatgctacagggaagaaaagttccaaaaacaagaaaaagttggaaaaggcaatgaaagtgctcaagaaacaaaaaaagaagaaaaaaccagaggtgtttaacttttcagccattcacttgattcatgatccccaagattttgcggaaaaactactaaagcagcttgagtgctgtaaggagaggtttgaagtgaagatgatgctcatgaaccttatctccagattggtgggaattcatgagcttttcctcttcaatttctatccctttttgcaaaggtttctgcagccccaccaaagagaagtaaccaagatccttctgtttgctgcacaagcatctcatcacctagtacccccagagattattcaatcattgcttatgactgtggcaaacaattttgttaccgacaagaactctggagaagtcatgacagtaggaatcaatgctataaaggagataacagctcgatgtcctctggccatgactgaagaacttctccaagacctggctcagtataaaacacacaaggataagaatgtaatgatgtctgctagaactttgattcacctcttccgaacactgaatcctcagatgctgcagaagaaattccggggtaagcctacagaggcctccatagaagcaagagtacaagaatatggagaattagatgctaaagattacattccaggagcagaagttctggaagttgagaaagaagagaatgctgaaaatgatgaagatggatgggaaagtaccagtctcagtgaggaggaggatgctgatggtgaatggattgatgtgcaacactcttccgatgaagaacagcaagaaatctccaagaagctgaacagcatgcccatggaggagcggaaggccaaagctgcagccatcagcactagccgagttttaactcaggaagacttccagaaaatccgcatggcccaaatgagaaaagaacttgatgctgcccccgggaaatcccagaagaggaaatacattgaaatagacagtgatgaagagcccaggggtgaattactttctcttcgggacattgaacgccttcataaaaagccaaagtctgacaaagagacaagactagcaactgcaatggctggaaagacagaccgaaaagaatttgtgaggaagaaaaccaaaacaaatccattttccagttcgacaaataaagagaagaaaaaacagaagaactttatgatgatgcggtatagccagaatgtccggtcaaaaaataagcgttccttccgagaaaaacagttggcactacgagatgcacttttgaaaaagagaaaaagaatgaagtaacttcctggcaagttttccattcctagaagaatgctaagtttgtgtccttgctctgaaaattggtaaatcaagcatgtttgtttacattaaaaagtccagacacactgtattgtgaaaactgctgaacatgtggcagcaattttgtgtttttattttggagacggctaatggtaggaatgttaatgtaaatagtggtggtaatgtaaaatcatttcatttatcattcatgcaaaaaaaagtatgtattgagtgcctattcattgtcactgtagatgcaaaacgaatgagctgtaaccccttcactcaaggcattgacagcttagctgtgagggtggacacacatatgtgtatttacagtgcagtgtaaatagttctgtagtagaggttaactccatatttctgtgaggtcactgaggccttatggactaactctgtgaggataggagttatatattcttataagacaaaacaaaacaggacaatgttacaagagtaagaggttcttacttgtacataggctttcctgctgaaaacaggcccctgctgtacagattttgggtacataatttagctcttttagtcaatccaagagatttaagtgacccccccccccccgtgttttttttgtttttgtttttgttttgaatgccatgtaaaggctttttggttaagacctcacttttaaaactgccttaagtataaatagtacctttggaatatatttagttcatcatttgagctgccttcatactggtttcctcagccttccttcagcctgtaatattttcagcccactgtttaccttgtctcaataaaaggtttctaatgccaaata

SEQ ID NO: 56798 - DNA, 2356 bp, Homo sapiens
catacccggaaacacgagtccaagctgcagctggcagggattgcggggtgccggccgtctgagtttttttaaaactgctcgccgcgaagtctgtctgcagccaaaatgtccaacagaaacaacaacaagcttcccagcaacctgccgcagttacagaatctaatcaagcgagacccgccggcctacatcgaggagtttctacagcagtataatcactacaaatccaatgtggagattttcaaattgcaaccaaataaacccagcaaagaactagcagagctggtgatgtttatggcacagattagtcactgctacccagagtacctaagtaattttcctcaagaggtgaaagatcttctctcctgcaatcataccgtattggatccagatctgcgaatgacattttgcaaagctttgatcttgctgagaaataagaatctcatcaatccatcaagcctgctagaactcttctttgaactttttcgttgccatgataaacttctgcgaaagactttatacacacatattgtgactgatatcaagaatataaatgcaaaacacaagaacaataaagtgaatgtagtattgcaaaatttcatgtacaccatgttaagagatagcaatgcaaccgcagccaagatgtctttagatgtaatgattgaactctacagaaggaacatctggaatgatgcaaaaactgtcaatgttatcacaactgcatgtttctctaaggtcaccaagatattagttgccgctttgacattctttcttgggaaagatgaagatgaaaaacaggacagtgactccgaatctgaggatgatggaccaacagcaagagacctgctagtacaataatatggagaattagatgctaaagattacattccaggagcagaagttctggaagttgagaaagaagagaatgctgaaaatgatgaagatggatgggaaagtaccagtctcagtgaggaggaggatgctgatggtgaatggattgatgtgcaacactcttccgatgaagaacagcaagaaatctccaagaagctgaacagcatgcccatggaggagcggaaggccaaagctgcagccatcagcactagccgagttttaactcaggaagacttccagaaaatccgcatggcccaaatgagaaaagaacttgatgctgcccccgggaaatcccagaagaggaaatacattgaaatagacagtgatgaagagcccaggggtgaattactttctcttcgggacattgaacgccttcataaaaagccaaagtctgacaaagagacaagactagcaactgcaatggctggaaagacagaccgaaaagaatttgtgaggaagaaaaccaaaacaaatccattttccagttcgacaaataaagagaagaaaaaacagaagaactttatgatgatgcggtatagccagaatgtccggtcaaaaaataagcgttccttccgagaaaaacagttggcactacgagatgcacttttgaaaaagagaaaaagaatgaagtaacttcctggcaagttttccattcctagaagaatgctaagtttgtgtccttgctctgaaaattggtaaatcaagcatgtttgtttacattaaaaagtccagacacactgtattgtgaaaactgctgaacatgtggcagcaattttgtgtttttattttggagacggctaatggtaggaatgttaatgtaaatagtggtggtaatgtaaaatcatttcatttatcattcatgcaaaaaaaagtatgtattgagtgcctattcattgtcactgtagatgcaaaacgaatgagctgtaaccccttcactcaaggcattgacagcttagctgtgagggtggacacacatatgtgtatttacagtgcagtgtaaatagttctgtagtagaggttaactccatatttctgtgaggtcactgaggccttatggactaactctgtgaggataggagttatatattcttataagacaaaacaaaacaggacaatgttacaagagtaagaggttcttacttgtacataggctttcctgctgaaaacaggcccctgctgtacagattttgggtacataatttagctcttttagtcaatccaagagatttaagtgacccccccccccccgtgttttttttgtttttgtttttgttttgaatgccatgtaaaggctttttggttaagacctcacttttaaaactgccttaagtataaatagtacctttggaatatatttagttcatcatttgagctgccttcatactggtttcctcagccttccttcagcctgtaatattttcagcccactgtttaccttgtctcaataaaaggtttctaatgccaaata

SEQ ID NO: 56799 - DNA, 1622 bp, Homo sapiens
catacccggaaacacgagtccaagctgcagctggcagggattgcggggtgccggccgtctgagtttttttaaaactgctcgccgcgaagtctgtctgcagccaaaatgtccaacagaaacaacaacaagcttcccagcaacctgccgcagttacagaatctaatcaagcgagacccgccggcctacatcgaggagtttctacagcagtataatcactacaaatccaatgtggagattttcaaattgcaaccaaataaacccagcaaagaactagcagagctggtgatgtttatggcacagattagtcactgctacccagagtacctaagtaattttcctcaagaggtgaaagatcttctctcctgcaatcataccgtattggatccagatctgcgaatgacattttgcaaagctttgatcttgctgagaaataagaatctcatcaatccatcaagcctgctagaactcttctttgaactttttcgttgccatgataaacttctgcgaaagactttatacacacatattgtgactgatatcaagaatataaatgcaaaacacaagaacaataaagtgaatgtagtattgcaaaatttcatgtacaccatgttaagagatagcaatgcaaccgcagccaagatgtctttagatgtaatgattgaactctacagaaggaacatctggaatgatgcaaaaactgtcaatgttatcacaactgcatgtttctctaaggtcaccaagatattagttgccgctttgacattctttcttgggaaagatgaagatgaaaaacaggacagtgactccgaatctgaggatgatggaccaacagcaagagacctgctagtacaatatgctacagggaagaaaagttccaaaaacaagaaaaagttggaaaaggcaatgaaagtgctcaagaaacaaaaaaagaagaaaaaaccagaggtgtttaacttttcagccattcacttgattcatgatccccaagattttgcggaaaaactactaaagcagcttgagtgctgtaaggagaggtttgaagtgaagatgatgctcatgaaccttatctccagattggtgggaattcatgagcttttcctcttcaatttctatccctttttgcaaaggtttctgcagccccaccaaagagaagtaaccaagatccttctgtttgctgcacaagcatctcatcacctagtacccccagagattattcaatcattgcttatgactgtggcaaacaattttgttaccgacaagaactctggagaagtcatgacagtaggaatcaatgctataaaggagataacagctcgatgtcctctggccatgactgaagaacttctccaagacctggctcagtataaaacacacaaggataagaatgtaatgatgtctgctagaactttgattcacctcttccgaacactgaatcctcagatgctgcagaagaaattccggggtaagcctacagaggcctccatagaagcaagagtacaagaatatggagaattagatgctaaagattacattccaggagcagaagttctggaagttgagaaagaagagaatgctgaaaatgatgaagatgggatggggaatgaccatgctgctagacggat

SEQ ID NO: 56800 - DNA, 1201 bp, Homo sapiens
catacccggaaacacgagtccaagctgcagctggcagggattgcggggtgccggccgtctgagtttttttaaaactgctcgccgcgaagtctgtctgcagccaaaatgtccaacagaaacaacaacaagcttcccagcaacctgccgcagttacagaatctaatcaagcgagacccgccggcctacatcgaggagtttctacagcagtataatcactacaaatccaatgtggagattttcaaattgcaaccaaataaacccagcaaagaactagcagagctggtgatgtttatggcacagattagtcactgctacccagagtacctaagtaattttcctcaagaggtgaaagatcttctctcctgcaatcataccgtattggatccagatctgcgaatgacattttgcaaagctttgatcttgctgagaaataagaatctcatcaatccatcaagcctgctagaactcttctttgaactttttcgttgccatgataaacttctgcgaaaggtaaagggcaaaacaaatatttccctgcatcttccttgaggcgacataaaattttgttgtctcttgaattatcgatgctttacattgttaataataactttaacaggaaaaagcaaccattgtgtgcatgctatatggtgttaatagccatatttattgagtgcatactttgtgccaggcaccattctcagagctttgtgtatttactcatttactcacaaagccctatgagagagggatcctcattattattattcttactttgcagatgaaagggctgaggttaaagagagatagagtaacttgcccactctcacactgcttcttagtggtgggattggatataagcccaggctctggttccagaacccaagccttttactactgcaccatactggctggctaaatcaggacattggtactcacagctataactgacccactcccccacaaaaaacttttttgttgttattaacattttcccatgattttgcatttgcttatataagactagaagctgaagatttatgaaagaaatttaagatggaaaaacttggctggacactgtggctcacacctacaataccagcattttgggaggctgaggtgggaggatcacttgaggccaggagtttgagaccagcctgggcaacacagcaagaccactgctgtatttaaagaaaaaaggaaa

SEQ ID NO: 56801 - DNA, 1031 bp, Homo sapiens
catacccggaaacacgagtccaagctgcagctggcagggattgcggggtgccggccgtctgagtttttttaaaactgctcgccgcgaagtctgtctgcagccaaaatgtccaacagaaacaacaacaagcttcccagcaacctgccgcagttacagaatctaatcaagcgagacccgccggcctacatcgaggagtttctacagcagtataatcactacaaatccaatgtggagattttcaaattgcaaccaaataaacccagcaaagaactagcagagctggtgatgtttatggcacagattagtcactgctacccagagtacctaagtaattttcctcaagaggtgaaagatcttctctcctgcaatcataccgtattggatccagatctgcgaatgacattttgcaaagctttgatcttgctgagaaataagaatctcatcaatccatcaagcctgctagaactcttctttgaactttttcgttgccatgataaacttctgcgaaagactttatacacacatattgtgactgatatcaagaatataaatgcaaaacacaagaacaataaagtgaatgtagtattgcaaaatttcatgtacaccatgttaagagatagcaatgcaaccgcagccaagatgtctttagatgtaatgattgaactctacagaaggaacatctggtagtgtatatatatttgtctcttgagaagtagactcttttttcatttgtaattaatacagagcacatatacaaatacttttcttgagcttgagctctttaatatacttatgtcatagatttaagttggaagtaaaaatagaggcaattcaaatgactaatgacattggttatcatttcttgagcagctactgaggtcgggcactttgacatgacctcacttagaacaacttgagaacagaagatgtagcttatctggaattatccccattttataagtaatgacatggaagttcttagagttagtaaaagtttagctattaagaggcagagctgaaattcagaccca

SEQ ID NO: 56802 - DNA, 361 bp, Homo sapiens
tttctacagcagtataatcactacaaatccaatgtggagattttcaaattgcaaccaaataaacccagcaaagaactagcagagctggtgatgtttatggcacaggtaagaatataattgcttaaataaagaccagtattaacacacagtttgccgaatgttttttcactaatactcaaccttattccactctggaatgggaacttaattaaaatatttttctaactttccctttttgcaaattttattttctccctatcatgagttagagaatgtcactagatctttttgcataactaaccaggacaaaactttaagactattttttttcttcaaattcatcataaaagcaggtactaaa

SEQ ID NO: 56803 - DNA, 228 bp, Homo sapiens
ttccagttcgacaaataaagagaagaaaaaacagaagaactttatgatgatgcggtatagccagaatgtccggtcaaaaaataagcgttccttccgagaaaaacaggtgagttccacttgaagcttgggtggcaagaacagcactgtaattccaagacagctttacatttgagacggacttgcgccttctgaagactgggcattattgtgtgtgtcttgggagcattg

SEQ ID NO: 56804 - DNA, 477 bp, Homo sapiens
acttagaggcgcctggtcgggaagggcctggtcagctgcgtccggcggaggcagctgctgacccagctgtggactgtgccgggggcgggggacggaggggcaggagccctgggctccccgtggcgggggctgtatcatggaccacctcggggcgtccctctggccccaggtcggctccctttgtctcctgctcgctggggccgcctgggcgcccccgcctaacctcccggaccccaagttcgagagcaaagcggccttgctggcggcccgggggcccgaagagcttctgtgcttcaccgagcggttggaggacttggtgtgtttctgggaggaagcggcgagcgctggggtgggcccgggcaactacagcttctcctaccagctcgagtgagtccgatccggcgggtgcctccaagggcggagggagggggtggggcagagctccctggaggtcgtagcctcgtatgtcccctgctg

SEQ ID NO: 56805 - DNA, 2086 bp, Homo sapiens
acttagaggcgcctggtcgggaagggcctggtcagctgcgtccggcggaggcagctgctgacccagctgtggactgtgccgggggcgggggacggaggggcaggagccctgggctccccgtggcgggggctgtatcatggaccacctcggggcgtccctctggccccaggtcggctccctttgtctcctgctcgctggggccgcctgggcgcccccgcctaacctcccggaccccaagttcgagagcaaagcggccttgctggcggcccgggggcccgaagagcttctgtgcttcaccgagcggttggaggacttggtgtgtttctgggaggaagcggcgagcgctggggtgggcccgggcaactacagcttctcctaccagctcgaggatgagccatggaagctgtgtcgcctgcaccaggctcccacggctcgtggtgcggtgcgcttctggtgttcgctgcctacagccgacacgtcgagcttcgtgcccctagagttgcgcgtcacagcagcctccggcgctccgcgatatcaccgtgtcatccacatcaatgaagtagtgctcctagacgcccccgtggggctggtggcgcggttggctgacgagagcggccacgtagtgttgcgctggctcccgccgcctgagacacccatgacgtctcacatccgctacgaggtggacgtctcggccggcaacggcgcagggagcgtacagagggtggagatcctggagggccgcaccgagtgtgtgctgagcaacctgcggggccggacgcgctacaccttcgccgtccgcgcgcgtatggctgagccgagcttcggcggcttctggagcgcctggtcggagcctgtgtcgctgctgacgcctagcgacctggaccccctcatcctgacgctctccctcatcctcgtggtcatcctggtgctgctgaccgtgctcgcgctgctctcccaccgccgggctctgaagcagaagatctggcctggcatcccgagcccagagagcgagtttgaaggcctcttcaccacccacaagggtaacttccagctgtggctgtaccagaatgatggctgcctgtggtggagcccctgcacccccttcacggaggacccacctgcttccctggaagtcctctcagagcgctgctgggggacgatgcaggcagtggagccggggacagatgatgagggccccctgctggagccagtgggcagtgagcatgcccaggatacctatctggtgctggacaaatggttgctgccccggaacccgcccagtgaggacctcccagggcctggtggcagtgtggacatagtggccatggatgaaggctcagaagcatcctcctgctcatctgctttggcctcgaagcccagcccagagggagcctctgctgccagctttgagtacactatcctggaccccagctcccagctcttgcgtccatggacactgtgccctgagctgccccctaccccaccccacctaaagtacctgtaccttgtggtatctgactctggcatctcaactgactacagctcaggggactcccagggagcccaagggggcttatccgatggcccctactccaacccttatgagaacagccttatcccagccgctgagcctctgccccccagctatgtggcttgctcttaggacaccaggctgcagatgatcagggatccaatatgactcagagaaccagtgcagactcaagacttatggaacagggatggcgaggcctctctcaggagcaggggcattgctgattttgtctgcccaatccatcctgctcaggaaaccacaaccttgcagtatttttaaatatgtatagtttttttttgtatctatatatatatatacacatatgtatgtaagtttttctaccatgatttctacaaacaccctttaagtcccatcttcccctgggcataggccatagggatagaagttaaagttcttgagcttattcagaagctggatctgcaatctgaatgctactcataacataacaaaatagtatgttaaacagctcttaaatcttactggcttaccacattaaatgatttctctctccta

SEQ ID NO: 56806 - DNA, 2639 bp, Homo sapiens
acttagaggcgcctggtcgggaagggcctggtcagctgcgtccggcggaggcagctgctgacccagctgtggactgtgccgggggcgggggacggaggggcaggagccctgggctccccgtggcgggggctgtatcatggaccacctcggggcgtccctctggccccaggtcggctccctttgtctcctgctcgctggggccgcctgggcgcccccgcctaacctcccggaccccaagttcgagagcaaagcggccttgctggcggcccgggggcccgaagagcttctgtgcttcaccgagcggttggaggacttggtgtgtttctgggaggaagcggcgagcgctggggtgggcccgggcaactacagcttctcctaccagctcgaggatgagccatggaagctgtgtcgcctgcaccaggctcccacggctcgtggtgcggtgcgcttctggtgttcgctgcctacagccgacacgtcgagcttcgtgcccctagagttgcgcgtcacagcagcctccggcgctccgcgatatcaccgtgtcatccacatcaatgaagtagtgctcctagacgcccccgtggggctggtggcgcggttggctgacgagagcggccacgtagtgttgcgctggctcccgccgcctgagacacccatgacgtctcacatccgctacgaggtggacgtctcggccggcaacggcgcagggagcgtacagaggggcaccgttttcctttcccctgattggctcagttccaccagggcccgcccccacgtcatctatttttgtctgctacgcgtccctcgccctgattccgcccccaggtggagatcctggagggccgcaccgagtgtgtgctgagcaacctgcggggccggacgcgctacaccttcgccgtccgcgcgcgtatggctgagccgagcttcggcggcttctggagcgcctggtcggagcctgtgtcgctgctgacgcctagcggtgaggccccaggcgggggtgtaggaggagccagggcgaatcacggggcaagcccaccgccctgacctcctccccgcctcttagacctggaccccctcatcctgacgctctccctcatcctcgtggtcatcctggtgctgctgaccgtgctcgcgctgctctcccaccgccgggctctgaagcagaagatctggcctggcatcccgagcccagagagcgagtttgaaggcctcttcaccacccacaagggtaacttccagctgtggctgtaccagaatgatggctgcctgtggtggagcccctgcacccccttcacggaggacccacctgcttccctggaagtcctctcagagcgctgctgggggacgatgcaggcagtggagccggggacagatgatgagggccccctgctggagccagtgggcagtgagcatgcccaggatacctatctggtgctggacaaatggttgctgccccggaacccgcccagtgaggacctcccagggcctggtggcagtgtggacatagtggccatggatgaaggctcagaagcatcctcctgctcatctgctttggcctcgaagcccagcccagagggagcctctgctgccagctttgagtacactatcctggaccccagctcccagctcttgcgtccatggacactgtgccctgagctgccccctaccccaccccacctaaagtacctgtaccttgtggtatctgactctggcatctcaactgactacagctcaggggactcccagggagcccaagggggcttatccgatggcccctactccaacccttatgagaacagccttatcccagccgctgagcctctgccccccagctatgtggcttgctcttaggacaccaggctgcagatgatcagggatccaatatgactcagagaaccagtgcagactcaagacttatggaacagggatggcgaggcctctctcaggagcaggggcattgctgattttgtctgcccaatccatcctgctcaggaaaccacaaccttgcagtatttttaaatatgtatagtttttttttgtatctatatatatatatacacatatgtatgtaagtttttctaccatgatttctacaaacaccctttaagtcccatcttcccctgggcataggccatagggatagaagttaaagttcttgagcttattcagaagctggatctgcaatctgaatgctactcataacataacaaaatagtatgttaaacagctcttaaatcttactggcttaccacattaaatgatttctctctcctaactcagctcaaatgggcagccatccatgggatgagtcagaggttcagactcttccagtctgtagctctaccttctcttagggtacttagatggatcccctgttctacaaactgccagtcagcaagggaagaaaaagggcagcaatgaccctcaatgggccatttgagggatctggcctggaaatgggcttcctctcttcttctcacacctcactggctggaaacagtcacatgaccccagtcacatgaaaggccaggaaacttagtttagctgtacacccaggaagggcaaagctgtttaagggccactagctagtctctgccactaataataataaaagtaattctgaatcagccatgttctaa

SEQ ID NO: 56807 - DNA, 2546 bp, Homo sapiens
acttagaggcgcctggtcgggaagggcctggtcagctgcgtccggcggaggcagctgctgacccagctgtggactgtgccgggggcgggggacggaggggcaggagccctgggctccccgtggcgggggctgtatcatggaccacctcggggcgtccctctggccccaggtcggctccctttgtctcctgctcgctggggccgcctgggcgcccccgcctaacctcccggaccccaagttcgagagcaaagcggccttgctggcggcccgggggcccgaagagcttctgtgcttcaccgagcggttggaggacttggtgtgtttctgggaggaagcggcgagcgctggggtgggcccgggcaactacagcttctcctaccagctcgaggatgagccatggaagctgtgtcgcctgcaccaggctcccacggctcgtggtgcggtgcgcttctggtgttcgctgcctacagccgacacgtcgagcttcgtgcccctagagttgcgcgtcacagcagcctccggcgctccgcgatatcaccgtgtcatccacatcaatgaagtagtgctcctagacgcccccgtggggctggtggcgcggttggctgacgagagcggccacgtagtgttgcgctggctcccgccgcctgagacacccatgacgtctcacatccgctacgaggtggacgtctcggccggcaacggcgcagggagcgtacagagggtggagatcctggagggccgcaccgagtgtgtgctgagcaacctgcggggccggacgcgctacaccttcgccgtccgcgcgcgtatggctgagccgagcttcggcggcttctggagcgcctggtcggagcctgtgtcgctgctgacgcctagcgacctggaccccctcatcctgacgctctccctcatcctcgtggtcatcctggtgctgctgaccgtgctcgcgctgctctcccaccgccgggctctgaagcagaagatctggcctggcatcccgagcccagagagcgagtttgaaggcctcttcaccacccacaagggtaacttccaggtaggtggcctggttgtcccctcagtgcctgggcttccctgcttcttgcagccaaactgcaggcctctctgagcaggttggtgctatttcttcagctgtggctgtaccagaatgatggctgcctgtggtggagcccctgcacccccttcacggaggacccacctgcttccctggaagtcctctcagagcgctgctgggggacgatgcaggcagtggagccggggacagatgatgagggccccctgctggagccagtgggcagtgagcatgcccaggatacctatctggtgctggacaaatggttgctgccccggaacccgcccagtgaggacctcccagggcctggtggcagtgtggacatagtggccatggatgaaggctcagaagcatcctcctgctcatctgctttggcctcgaagcccagcccagagggagcctctgctgccagctttgagtacactatcctggaccccagctcccagctcttgcgtccatggacactgtgccctgagctgccccctaccccaccccacctaaagtacctgtaccttgtggtatctgactctggcatctcaactgactacagctcaggggactcccagggagcccaagggggcttatccgatggcccctactccaacccttatgagaacagccttatcccagccgctgagcctctgccccccagctatgtggcttgctcttaggacaccaggctgcagatgatcagggatccaatatgactcagagaaccagtgcagactcaagacttatggaacagggatggcgaggcctctctcaggagcaggggcattgctgattttgtctgcccaatccatcctgctcaggaaaccacaaccttgcagtatttttaaatatgtatagtttttttttgtatctatatatatatatacacatatgtatgtaagtttttctaccatgatttctacaaacaccctttaagtcccatcttcccctgggcataggccatagggatagaagttaaagttcttgagcttattcagaagctggatctgcaatctgaatgctactcataacataacaaaatagtatgttaaacagctcttaaatcttactggcttaccacattaaatgatttctctctcctaactcagctcaaatgggcagccatccatgggatgagtcagaggttcagactcttccagtctgtagctctaccttctcttagggtacttagatggatcccctgttctacaaactgccagtcagcaagggaagaaaaagggcagcaatgaccctcaatgggccatttgagggatctggcctggaaatgggcttcctctcttcttctcacacctcactggctggaaacagtcacatgaccccagtcacatgaaaggccaggaaacttagtttagctgtacacccaggaagggcaaagctgtttaagggccactagctagtctctgccactaataataataaaagtaattctgaatcagccatgttctaa

SEQ ID NO: 56808 - DNA, 2658 bp, Homo sapiens
acttagaggcgcctggtcgggaagggcctggtcagctgcgtccggcggaggcagctgctgacccagctgtggactgtgccgggggcgggggacggaggggcaggagccctgggctccccgtggcgggggctgtatcatggaccacctcggggcgtccctctggccccaggtcggctccctttgtctcctgctcgctggggccgcctgggcgcccccgcctaacctcccggaccccaagttcgagagcaaagcggccttgctggcggcccgggggcccgaagagcttctgtgcttcaccgagcggttggaggacttggtgtgtttctgggaggaagcggcgagcgctggggtgggcccgggcaactacagcttctcctaccagctcgaggatgagccatggaagctgtgtcgcctgcaccaggctcccacggctcgtggtgcggtgcgcttctggtgttcgctgcctacagccgacacgtcgagcttcgtgcccctagagttgcgcgtcacagcagcctccggcgctccgcgatatcaccgtgtcatccacatcaatgaagtagtgctcctagacgcccccgtggggctggtggcgcggttggctgacgagagcggccacgtagtgttgcgctggctcccgccgcctgagacacccatgacgtctcacatccgctacgaggtggacgtctcggccggcaacggcgcagggagcgtacagaggggcaccgttttcctttcccctgattggctcagttccaccagggcccgcccccacgtcatctatttttgtctgctacgcgtccctcgccctgattccgcccccaggtggagatcctggagggccgcaccgagtgtgtgctgagcaacctgcggggccggacgcgctacaccttcgccgtccgcgcgcgtatggctgagccgagcttcggcggcttctggagcgcctggtcggagcctgtgtcgctgctgacgcctagcggtgaggccccaggcgggggtgtaggaggagccagggcgaatcacggggcaagcccaccgccctgacctcctccccgcctcttagacctggaccccctcatcctgacgctctccctcatcctcgtggtcatcctggtgctgctgaccgtgctcgcgctgctctcccaccgccgggctctgaagcagaagatctggcctggcatcccgagcccagagagcgagtttgaaggcctcttcaccacccacaagggtaacttccaggttggtgctatttcttcagctgtggctgtaccagaatgatggctgcctgtggtggagcccctgcacccccttcacggaggacccacctgcttccctggaagtcctctcagagcgctgctgggggacgatgcaggcagtggagccggggacagatgatgagggccccctgctggagccagtgggcagtgagcatgcccaggatacctatctggtgctggacaaatggttgctgccccggaacccgcccagtgaggacctcccagggcctggtggcagtgtggacatagtggccatggatgaaggctcagaagcatcctcctgctcatctgctttggcctcgaagcccagcccagagggagcctctgctgccagctttgagtacactatcctggaccccagctcccagctcttgcgtccatggacactgtgccctgagctgccccctaccccaccccacctaaagtacctgtaccttgtggtatctgactctggcatctcaactgactacagctcaggggactcccagggagcccaagggggcttatccgatggcccctactccaacccttatgagaacagccttatcccagccgctgagcctctgccccccagctatgtggcttgctcttaggacaccaggctgcagatgatcagggatccaatatgactcagagaaccagtgcagactcaagacttatggaacagggatggcgaggcctctctcaggagcaggggcattgctgattttgtctgcccaatccatcctgctcaggaaaccacaaccttgcagtatttttaaatatgtatagtttttttttgtatctatatatatatatacacatatgtatgtaagtttttctaccatgatttctacaaacaccctttaagtcccatcttcccctgggcataggccatagggatagaagttaaagttcttgagcttattcagaagctggatctgcaatctgaatgctactcataacataacaaaatagtatgttaaacagctcttaaatcttactggcttaccacattaaatgatttctctctcctaactcagctcaaatgggcagccatccatgggatgagtcagaggttcagactcttccagtctgtagctctaccttctcttagggtacttagatggatcccctgttctacaaactgccagtcagcaagggaagaaaaagggcagcaatgaccctcaatgggccatttgagggatctggcctggaaatgggcttcctctcttcttctcacacctcactggctggaaacagtcacatgaccccagtcacatgaaaggccaggaaacttagtttagctgtacacccaggaagggcaaagctgtttaagggccactagctagtctctgccactaataataataaaagtaattctgaatcagccatgttctaa

SEQ ID NO: 56809 - DNA, 1981 bp, Homo sapiens
tattttattttttttagagatgggggtctcactatgtttcctaggctggtcttgaactcctgggttcaaatgatcctcccacctcagcctcccaaagtactgggattatagtgctggtgtaaaccactgcacctggccatggccaggattaaagggagaatgaccaaggtatattgaactcctatgcacccttcaataccctgttccatttacccttttgtagggccttgctgatgcttcagccaaaacccctgtcccctggccctgatgtactcctctgcctccattgtgatcacagggaccaagtgtatctgtgcctctatgactgggagtggagggggaattggtgagtattcaatgagtcatatctatgtaactatttatattggtttcaacagggctctgaagcagaagatctggcctggcatcccgagcccagagagcgagtttgaaggcctcttcaccacccacaagggtaacttccaggtaggtggcctggttgtcccctcagtgcctgggcttccctgcttcttgcagccaaactgcaggcctctctgagcaggttggtgctatttcttcagctgtggctgtaccagaatgatggctgcctgtggtggagcccctgcacccccttcacggaggacccacctgcttccctggaagtcctctcagagcgctgctgggggacgatgcaggcagtggagccggggacagatgatgagggccccctgctggagccagtgggcagtgagcatgcccaggatacctatctggtgctggacaaatggttgctgccccggaacccgcccagtgaggacctcccagggcctggtggcagtgtggacatagtggccatggatgaaggctcagaagcatcctcctgctcatctgctttggcctcgaagcccagcccagagggagcctctgctgccagctttgagtacactatcctggaccccagctcccagctcttgcgtccatggacactgtgccctgagctgccccctaccccaccccacctaaagtacctgtaccttgtggtatctgactctggcatctcaactgactacagctcaggggactcccagggagcccaagggggcttatccgatggcccctactccaacccttatgagaacagccttatcccagccgctgagcctctgccccccagctatgtggcttgctcttaggacaccaggctgcagatgatcagggatccaatatgactcagagaaccagtgcagactcaagacttatggaacagggatggcgaggcctctctcaggagcaggggcattgctgattttgtctgcccaatccatcctgctcaggaaaccacaaccttgcagtatttttaaatatgtatagtttttttttgtatctatatatatatatacacatatgtatgtaagtttttctaccatgatttctacaaacaccctttaagtcccatcttcccctgggcataggccatagggatagaagttaaagttcttgagcttattcagaagctggatctgcaatctgaatgctactcataacataacaaaatagtatgttaaacagctcttaaatcttactggcttaccacattaaatgatttctctctcctaactcagctcaaatgggcagccatccatgggatgagtcagaggttcagactcttccagtctgtagctctaccttctcttagggtacttagatggatcccctgttctacaaactgccagtcagcaagggaagaaaaagggcagcaatgaccctcaatgggccatttgagggatctggcctggaaatgggcttcctctcttcttctcacacctcactggctggaaacagtcacatgaccccagtcacatgaaaggccaggaaacttagtttagctgtacacccaggaagggcaaagctgtttaagggccactagctagtctctgccactaataataataaaagtaattctgaatcagccatgttctaa

SEQ ID NO: 56810 - DNA, 391 bp, Homo sapiens
ctgacgagagcggccacgtagtgttgcgctggctcccgccgcctgagacacccatgacgtctcacatccgctacgaggtggacgtctcggccggcaacggcgcagggagcgtacagagggtgaggccagcccctacggcccagcccccaaagctccactgactacggcccagccacgcctctcgaggtcgcgcccggtgccgctttcagggccggtccgtaacatcccacatcccattaccctggtgctgaagaccgttccacgcccacagacacaccccctttcctaatgtcctcgcaagcctgttgaaccccaacttcttctccctccggcccgtaaccctagacccctttagcgcccgggtccctctacgagtgctagcccagatatt

SEQ ID NO: 56811 - DNA, 2451 bp, Homo sapiens
acttagaggcgcctggtcgggaagggcctggtcagctgcgtccggcggaggcagctgctgacccagctgtggactgtgccgggggcgggggacggaggggcaggagccctgggctccccgtggcgggggctgtatcatggaccacctcggggcgtccctctggccccaggtcggctccctttgtctcctgctcgctggggccgcctgggcgcccccgcctaacctcccggaccccaagttcgagagcaaagcggccttgctggcggcccgggggcccgaagagcttctgtgcttcaccgagcggttggaggacttggtgtgtttctgggaggaagcggcgagcgctggggtgggcccgggcaactacagcttctcctaccagctcgaggatgagccatggaagctgtgtcgcctgcaccaggctcccacggctcgtggtgcggtgcgcttctggtgttcgctgcctacagccgacacgtcgagcttcgtgcccctagagttgcgcgtcacagcagcctccggcgctccgcgatatcaccgtgtcatccacatcaatgaagtagtgctcctagacgcccccgtggggctggtggcgcggttggctgacgagagcggccacgtagtgttgcgctggctcccgccgcctgagacacccatgacgtctcacatccgctacgaggtggacgtctcggccggcaacggcgcagggagcgtacagagggtggagatcctggagggccgcaccgagtgtgtgctgagcaacctgcggggccggacgcgctacaccttcgccgtccgcgcgcgtatggctgagccgagcttcggcggcttctggagcgcctggtcggagcctgtgtcgctgctgacgcctagcgacctggaccccctcatcctgacgctctccctcatcctcgtggtcatcctggtgctgctgaccgtgctcgcgctgctctcccaccgccgggctctgaagcagaagatctggcctggcatcccgagcccagagagcgagtttgaaggcctcttcaccacccacaagggtaacttccagctgtggctgtaccagaatgatggctgcctgtggtggagcccctgcacccccttcacggaggacccacctgcttccctggaagtcctctcagagcgctgctgggggacgatgcaggcagtggagccggggacagatgatgagggccccctgctggagccagtgggcagtgagcatgcccaggatacctatctggtgctggacaaatggttgctgccccggaacccgcccagtgaggacctcccagggcctggtggcagtgtggacatagtggccatggatgaaggctcagaagcatcctcctgctcatctgctttggcctcgaagcccagcccagagggagcctctgctgccagctttgagtacactatcctggaccccagctcccagctcttgcgtccatggacactgtgccctgagctgccccctaccccaccccacctaaagtacctgtaccttgtggtatctgactctggcatctcaactgactacagctcaggggactcccagggagcccaagggggcttatccgatggcccctactccaacccttatgagaacagccttatcccagccgctgagcctctgccccccagctatgtggcttgctcttaggacaccaggctgcagatgatcagggatccaatatgactcagagaaccagtgcagactcaagacttatggaacagggatggcgaggcctctctcaggagcaggggcattgctgattttgtctgcccaatccatcctgctcaggaaaccacaaccttgcagtatttttaaatatgtatagtttttttttgtatctatatatatatatacacatatgtatgtaagtttttctaccatgatttctacaaacaccctttaagtcccatcttcccctgggcataggccatagggatagaagttaaagttcttgagcttattcagaagctggatctgcaatctgaatgctactcataacataacaaaatagtatgttaaacagctcttaaatcttactggcttaccacattaaatgatttctctctcctaactcagctcaaatgggcagccatccatgggatgagtcagaggttcagactcttccagtctgtagctctaccttctcttagggtacttagatggatcccctgttctacaaactgccagtcagcaagggaagaaaaagggcagcaatgaccctcaatgggccatttgagggatctggcctggaaatgggcttcctctcttcttctcacacctcactggctggaaacagtcacatgaccccagtcacatgaaaggccaggaaacttagtttagctgtacacccaggaagggcaaagctgtttaagggccactagctagtctctgccactaataataataaaagtaattctgaatcagccatgttctaa

SEQ ID NO: 56812 - DNA, 2555 bp, Homo sapiens
acttagaggcgcctggtcgggaagggcctggtcagctgcgtccggcggaggcagctgctgacccagctgtggactgtgccgggggcgggggacggaggggcaggagccctgggctccccgtggcgggggctgtatcatggaccacctcggggcgtccctctggccccaggtcggctccctttgtctcctgctcgctggggccgcctgggcgcccccgcctaacctcccggaccccaagttcgagagcaaagcggccttgctggcggcccgggggcccgaagagcttctgtgcttcaccgagcggttggaggacttggtgtgtttctgggaggaagcggcgagcgctggggtgggcccgggcaactacagcttctcctaccagctcgaggatgagccatggaagctgtgtcgcctgcaccaggctcccacggctcgtggtgcggtgcgcttctggtgttcgctgcctacagccgacacgtcgagcttcgtgcccctagagttgcgcgtcacagcagcctccggcgctccgcgatatcaccgtgtcatccacatcaatgaagtagtgctcctagacgcccccgtggggctggtggcgcggttggctgacgagagcggccacgtagtgttgcgctggctcccgccgcctgagacacccatgacgtctcacatccgctacgaggtggacgtctcggccggcaacggcgcagggagcgtacagaggggcaccgttttcctttcccctgattggctcagttccaccagggcccgcccccacgtcatctatttttgtctgctacgcgtccctcgccctgattccgcccccaggtggagatcctggagggccgcaccgagtgtgtgctgagcaacctgcggggccggacgcgctacaccttcgccgtccgcgcgcgtatggctgagccgagcttcggcggcttctggagcgcctggtcggagcctgtgtcgctgctgacgcctagcgacctggaccccctcatcctgacgctctccctcatcctcgtggtcatcctggtgctgctgaccgtgctcgcgctgctctcccaccgccgggctctgaagcagaagatctggcctggcatcccgagcccagagagcgagtttgaaggcctcttcaccacccacaagggtaacttccagctgtggctgtaccagaatgatggctgcctgtggtggagcccctgcacccccttcacggaggacccacctgcttccctggaagtcctctcagagcgctgctgggggacgatgcaggcagtggagccggggacagatgatgagggccccctgctggagccagtgggcagtgagcatgcccaggatacctatctggtgctggacaaatggttgctgccccggaacccgcccagtgaggacctcccagggcctggtggcagtgtggacatagtggccatggatgaaggctcagaagcatcctcctgctcatctgctttggcctcgaagcccagcccagagggagcctctgctgccagctttgagtacactatcctggaccccagctcccagctcttgcgtccatggacactgtgccctgagctgccccctaccccaccccacctaaagtacctgtaccttgtggtatctgactctggcatctcaactgactacagctcaggggactcccagggagcccaagggggcttatccgatggcccctactccaacccttatgagaacagccttatcccagccgctgagcctctgccccccagctatgtggcttgctcttaggacaccaggctgcagatgatcagggatccaatatgactcagagaaccagtgcagactcaagacttatggaacagggatggcgaggcctctctcaggagcaggggcattgctgattttgtctgcccaatccatcctgctcaggaaaccacaaccttgcagtatttttaaatatgtatagtttttttttgtatctatatatatatatacacatatgtatgtaagtttttctaccatgatttctacaaacaccctttaagtcccatcttcccctgggcataggccatagggatagaagttaaagttcttgagcttattcagaagctggatctgcaatctgaatgctactcataacataacaaaatagtatgttaaacagctcttaaatcttactggcttaccacattaaatgatttctctctcctaactcagctcaaatgggcagccatccatgggatgagtcagaggttcagactcttccagtctgtagctctaccttctcttagggtacttagatggatcccctgttctacaaactgccagtcagcaagggaagaaaaagggcagcaatgaccctcaatgggccatttgagggatctggcctggaaatgggcttcctctcttcttctcacacctcactggctggaaacagtcacatgaccccagtcacatgaaaggccaggaaacttagtttagctgtacacccaggaagggcaaagctgtttaagggccactagctagtctctgccactaataataataaaagtaattctgaatcagccatgttctaa

SEQ ID NO: 56813 - DNA, 2734 bp, Homo sapiens
acttagaggcgcctggtcgggaagggcctggtcagctgcgtccggcggaggcagctgctgacccagctgtggactgtgccgggggcgggggacggaggggcaggagccctgggctccccgtggcgggggctgtatcatggaccacctcggggcgtccctctggccccaggtcggctccctttgtctcctgctcgctggggccgcctgggcgcccccgcctaacctcccggaccccaagttcgagagcaaagcggccttgctggcggcccgggggcccgaagagcttctgtgcttcaccgagcggttggaggacttggtgtgtttctgggaggaagcggcgagcgctggggtgggcccgggcaactacagcttctcctaccagctcgaggatgagccatggaagctgtgtcgcctgcaccaggctcccacggctcgtggtgcggtgcgcttctggtgttcgctgcctacagccgacacgtcgagcttcgtgcccctagagttgcgcgtcacagcagcctccggcgctccgcgatatcaccgtgtcatccacatcaatgaagtagtgctcctagacgcccccgtggggctggtggcgcggttggctgacgagagcggccacgtagtgttgcgctggctcccgccgcctgagacacccatgacgtctcacatccgctacgaggtggacgtctcggccggcaacggcgcagggagcgtacagaggggcaccgttttcctttcccctgattggctcagttccaccagggcccgcccccacgtcatctatttttgtctgctacgcgtccctcgccctgattccgcccccaggtggagatcctggagggccgcaccgagtgtgtgctgagcaacctgcggggccggacgcgctacaccttcgccgtccgcgcgcgtatggctgagccgagcttcggcggcttctggagcgcctggtcggagcctgtgtcgctgctgacgcctagcggtgaggccccaggcgggggtgtaggaggagccagggcgaatcacggggcaagcccaccgccctgacctcctccccgcctcttagacctggaccccctcatcctgacgctctccctcatcctcgtggtcatcctggtgctgctgaccgtgctcgcgctgctctcccaccgccgggctctgaagcagaagatctggcctggcatcccgagcccagagagcgagtttgaaggcctcttcaccacccacaagggtaacttccaggtaggtggcctggttgtcccctcagtgcctgggcttccctgcttcttgcagccaaactgcaggcctctctgagcaggttggtgctatttcttcagctgtggctgtaccagaatgatggctgcctgtggtggagcccctgcacccccttcacggaggacccacctgcttccctggaagtcctctcagagcgctgctgggggacgatgcaggcagtggagccggggacagatgatgagggccccctgctggagccagtgggcagtgagcatgcccaggatacctatctggtgctggacaaatggttgctgccccggaacccgcccagtgaggacctcccagggcctggtggcagtgtggacatagtggccatggatgaaggctcagaagcatcctcctgctcatctgctttggcctcgaagcccagcccagagggagcctctgctgccagctttgagtacactatcctggaccccagctcccagctcttgcgtccatggacactgtgccctgagctgccccctaccccaccccacctaaagtacctgtaccttgtggtatctgactctggcatctcaactgactacagctcaggggactcccagggagcccaagggggcttatccgatggcccctactccaacccttatgagaacagccttatcccagccgctgagcctctgccccccagctatgtggcttgctcttaggacaccaggctgcagatgatcagggatccaatatgactcagagaaccagtgcagactcaagacttatggaacagggatggcgaggcctctctcaggagcaggggcattgctgattttgtctgcccaatccatcctgctcaggaaaccacaaccttgcagtatttttaaatatgtatagtttttttttgtatctatatatatatatacacatatgtatgtaagtttttctaccatgatttctacaaacaccctttaagtcccatcttcccctgggcataggccatagggatagaagttaaagttcttgagcttattcagaagctggatctgcaatctgaatgctactcataacataacaaaatagtatgttaaacagctcttaaatcttactggcttaccacattaaatgatttctctctcctaactcagctcaaatgggcagccatccatgggatgagtcagaggttcagactcttccagtctgtagctctaccttctcttagggtacttagatggatcccctgttctacaaactgccagtcagcaagggaagaaaaagggcagcaatgaccctcaatgggccatttgagggatctggcctggaaatgggcttcctctcttcttctcacacctcactggctggaaacagtcacatgaccccagtcacatgaaaggccaggaaacttagtttagctgtacacccaggaagggcaaagctgtttaagggccactagctagtctctgccactaataataataaaagtaattctgaatcagccatgttctaa

SEQ ID NO: 56814 - DNA, 1886 bp, Homo sapiens
tattttattttttttagagatgggggtctcactatgtttcctaggctggtcttgaactcctgggttcaaatgatcctcccacctcagcctcccaaagtactgggattatagtgctggtgtaaaccactgcacctggccatggccaggattaaagggagaatgaccaaggtatattgaactcctatgcacccttcaataccctgttccatttacccttttgtagggccttgctgatgcttcagccaaaacccctgtcccctggccctgatgtactcctctgcctccattgtgatcacagggaccaagtgtatctgtgcctctatgactgggagtggagggggaattggtgagtattcaatgagtcatatctatgtaactatttatattggtttcaacagggctctgaagcagaagatctggcctggcatcccgagcccagagagcgagtttgaaggcctcttcaccacccacaagggtaacttccagctgtggctgtaccagaatgatggctgcctgtggtggagcccctgcacccccttcacggaggacccacctgcttccctggaagtcctctcagagcgctgctgggggacgatgcaggcagtggagccggggacagatgatgagggccccctgctggagccagtgggcagtgagcatgcccaggatacctatctggtgctggacaaatggttgctgccccggaacccgcccagtgaggacctcccagggcctggtggcagtgtggacatagtggccatggatgaaggctcagaagcatcctcctgctcatctgctttggcctcgaagcccagcccagagggagcctctgctgccagctttgagtacactatcctggaccccagctcccagctcttgcgtccatggacactgtgccctgagctgccccctaccccaccccacctaaagtacctgtaccttgtggtatctgactctggcatctcaactgactacagctcaggggactcccagggagcccaagggggcttatccgatggcccctactccaacccttatgagaacagccttatcccagccgctgagcctctgccccccagctatgtggcttgctcttaggacaccaggctgcagatgatcagggatccaatatgactcagagaaccagtgcagactcaagacttatggaacagggatggcgaggcctctctcaggagcaggggcattgctgattttgtctgcccaatccatcctgctcaggaaaccacaaccttgcagtatttttaaatatgtatagtttttttttgtatctatatatatatatacacatatgtatgtaagtttttctaccatgatttctacaaacaccctttaagtcccatcttcccctgggcataggccatagggatagaagttaaagttcttgagcttattcagaagctggatctgcaatctgaatgctactcataacataacaaaatagtatgttaaacagctcttaaatcttactggcttaccacattaaatgatttctctctcctaactcagctcaaatgggcagccatccatgggatgagtcagaggttcagactcttccagtctgtagctctaccttctcttagggtacttagatggatcccctgttctacaaactgccagtcagcaagggaagaaaaagggcagcaatgaccctcaatgggccatttgagggatctggcctggaaatgggcttcctctcttcttctcacacctcactggctggaaacagtcacatgaccccagtcacatgaaaggccaggaaacttagtttagctgtacacccaggaagggcaaagctgtttaagggccactagctagtctctgccactaataataataaaagtaattctgaatcagccatgttctaa

SEQ ID NO: 56815 - DNA, 1983 bp, Homo sapiens
acttagaggcgcctggtcgggaagggcctggtcagctgcgtccggcggaggcagctgctgacccagctgtggactgtgccgggggcgggggacggaggggcaggagccctgggctccccgtggcgggggctgtatcatggaccacctcggggcgtccctctggccccaggtcggctccctttgtctcctgctcgctggggccgcctgggcgcccccgcctaacctcccggaccccaagttcgagagcaaagcggccttgctggcggcccgggggcccgaagagcttctgtgcttcaccgagcggttggaggacttggtgtgtttctgggaggaagcggcgagcgctggggtgggcccgggcaactacagcttctcctaccagctcgaggatgagccatggaagctgtgtcgcctgcaccaggctcccacggctcgtggtgcggtgcgcttctggtgttcgctgcctacagccgacacgtcgagcttcgtgcccctagagttgcgcgtcacagcagcctccggcgctccgcgatatcaccgtgtcatccacatcaatgaagtagtgctcctagacgcccccgtggggctggtggcgcggttggctgacgagagcggccacgtagtgttgcgctggctcccgccgcctgagacacccatgacgtctcacatccgctacgaggtggacgtctcggccggcaacggcgcagggagcgtacagagggtggagatcctggagggccgcaccgagtgtgtgctgagcaacctgcggggccggacgcgctacaccttcgccgtccgcgcgcgtatggctgagccgagcttcggcggcttctggagcgcctggtcggagcctgtgtcgctgctgacgcctagcgacctggaccccctcatcctgacgctctccctcatcctcgtggtcatcctggtgctgctgaccgtgctcgcgctgctctcccaccgccgggctctgaagcagaagatctggcctggcatcccgagcccagagagcgagtttgaaggcctcttcaccacccacaagggtaacttccagctgtggctgtaccagaatgatggctgcctgtggtggagcccctgcacccccttcacggaggacccacctgcttccctggaagtcctctcagagcgctgctgggggacgatgcaggcagtggagccggggacagatgatgagggccccctgctggagccagtgggcagtgagcatgcccaggatacctatctggtgctggacaaatggttgctgccccggaacccgcccagtgaggacctcccagggcctggtggcagtgtggacatagtggccatggatgaaggctcagaagcatcctcctgctcatctgctttggcctcgaagcccagcccagagggagcctctgctgccagctttgagtacactatcctggaccccagctcccagctcttgcgtccatggacactgtgccctgagctgccccctaccccaccccacctaaagtacctgtaccttgtggtatctgactctggcatctcaactgactacactatgtggcttgctcttaggacaccaggctgcagatgatcagggatccaatatgactcagagaaccagtgcagactcaagacttatggaacagggatggcgaggcctctctcaggagcaggggcattgctgattttgtctgcccaatccatcctgctcaggaaaccacaaccttgcagtatttttaaatatgtatagtttttttttgtatctatatatatatatacacatatgtatgtaagtttttctaccatgatttctacaaacaccctttaagtcccatcttcccctgggcataggccatagggatagaagttaaagttcttgagcttattcagaagctggatctgcaatctgaatgctactcataacataacaaaatagtatgttaaacagctcttaaatcttactggcttaccacattaaatgatttctctctccta

SEQ ID NO: 56816 - DNA, 702 bp, Homo sapiens
aagtcggcactagcctggaaaacaaacacaaacactgggttctccctccaccacagtaaactatgccatgtcagatacagagatagagatttaaaagggcctcaaattcttcacagctcatcttatcaaggatagcacctgtctctccacccctgaatctaggtgggccttttttgaccaatagaatgtggcaaacatggtgttaggtgagttctggggcctaggcagcccctcactcttcctcttggcacagtgcaggcaagacagacagacgagagctcatgagagagacacgcaactggcagtcagcaccagagccccgacacctgtcaatggaggccgttccagaccctccgcccacccaagcctcctggtgggctgcagcgacctggagttgaactccagggagcccagcgcaacagcctgttcccagcccagcccaaaccaaaggtctgtgagcaaagaagcggttttttgtttgtttgtttgttttttaaagacaaggtctccctctatccccctggctgaagtgcggtggtgcaaacacaactcaccgcagcctcagctccggggctcaagcgatcctccagcctcagtctcccaagtagctgctgaggcaggagaatggcaggaacctgggaggtggagcttgcagtgagctgagatcgcaccactgcactccacagagccagatgccgtctc

SEQ ID NO: 56817 - DNA, 387 bp, Homo sapiens
aaaaatacttactcattaataggagatataaattaaagagatgcttaggaataggagaattccaactaaaaatttttaagccacacaaaaatctttcctttaaaaaagtgttcatcactcattcatgatttgacctttgaaagttgctatttgtttcatatacactaatgatttaacagttctctagggtcttaaattagtaaaccattaccagacttgcaagtgtaatgggtcagaattcctactcctgttttattggtaaggaaccaaaactatattaaatttaaatatatcatagtcataggtttttagtgctgacaccaatgtggctaaacctagtactctgaggctcatatattgaaagccatgagtactcagaatctaatt

SEQ ID NO: 56818 - DNA, 255 bp, Homo sapiens
ctcctaatctgatgggtaagggaggcaaatgtgtaaacaattaaaatccagttgagatgatggaggagtttgagcataacaaagagggaggggctatgtgtgttcatgcggctgggtgtgtgggtgcaattccttagatatttacagatgcggcttctgtgccaggcctttctgtgtgctgtgccctcagccaggaatgcctggttctgctggctaacctcacatcatgtctgtccctgcgatctccaccatagg

SEQ ID NO: 56819 - DNA, 319 bp, Homo sapiens
aatatcattactaatgtttggaggttccccaccccaaggatttccctttccatttctatcaagtttcagcagatccttttctgaagtttaagtaagacaagcggcttgcctgttccatatcaatttgacttggaatttagaagctaacccttcctcctcttcctcttcattttccttactttactagcctcatctcccttgttttactttcttctcaagttctttttttccatgctttaagtattaatttaaaagctcccctttcctatgctctaagaaaaaagaatagcagaaggaacagaagacaggtttagaaggg

SEQ ID NO: 56820 - DNA, 327 bp, Homo sapiens
aaaagacagggtcctcactctgttgcccaggctggtcttgaactcctggactcaagggatcctcccgccttggcctcccaaagtgttaggattacaagcgtgagccaccgcacctggccctttaagttgaattcattttgttgtttgatggggcaagggtgtgaaagaaatttccgattacatatagaggagctgagaaatacttcttttttgtttttttgagagacaggttttgctcttgttgcccagtgcagtgatgtgaacatagctcactgtaaccttgaattccttcctgggctcaagcgatcctcctacgtctcagcctct

SEQ ID NO: 56821 - DNA, 347 bp, Homo sapiens
ggcaatgaatcatgcaaaatactggagaattttgattgcgagctcagcatcaggtagaagtgtaaaattaattctgaaacattaatgtaaactgtgtctgcatgaatatagagatagcaccagaatagcagcactgaaggaaatagtctcattgtactctcttagattatattatgaaatttgtgcttaattctggatataacattttaaaagcagtagagagtggcaaacggaaacagattagaataacaagaatagtaaattttatgtggttatgaaatatgaagaaaagttgaaaaaatggctgcctatgccagaataaaattaaggcatgacaataactgtca

SEQ ID NO: 56822 - DNA, 362 bp, Homo sapiens
tttggtggttgcatttatagatgatctatgtgtagcagcatcagaaaagggacaggttgtcgttcccttcaccactcctgccttggactacaaaaccctggaccaaaccatcaccagctgtctcctggacatagaacagttttcaactactgtccccaaatctattcttgccctcctggaccctctactgtgctgcagctagtatgatcagaaaagacagggaagagttaccagtccccaggaaaagctgtggctgtaggaaagggctctctgccaggagcccctgagtggaatcaatgaaggagtaggcctgcagtagaatgaatgaatgaatgaatgaataaagaataaataccgcagcc

SEQ ID NO: 56823 - DNA, 871 bp, Homo sapiens
aggagattctttttgtcttgtttttgtcatggagtctgcactccagcctaggtgacaagaatgagactccgtcttaaaacaaaaacaacatatttgttcacttttgaaccctgtggtgtcttttaactttgttaagggcccttggttagcaaaattatgaaagtttaggaaatttggctattgagtatattaagtacaactacaaaatcctctgagttctccaggaagcctaaaccttgagcagtatcttattcaagtggagtatatatcttcaagaatacagatttttaaggtaagtagtttttcgtctttgcatctcctaagaccattgttaacaaccttgatattaaacgaagaagtgaatgtaaacctccttttgaacatattttttataaagaaatattttgttaattggagtaagtagtattgttatgaaatcactgtgtaattgttaattgtaaactgcaatgtctattttgtgttgtaacaatgttgccataaaatagctttgctaaatgtgaaatgactttaatcccttttgtcttcaatatacttcataaaggaggaaatgatgatttacacaatttgtcatgaagcttccgtgtttatgagaaattccaagaagtaagagccaagaggacagatattatcagaatatgggacataagaaattgcatatagtgtcaagggtttctatataacaacttaatttatttcccttgcatatatagtaggggttaacattttgctcaatgttaacgggggacataatggacataaaacattggatagctttttatttaaatgagctaaaggtgtgcgtatacacatgcacttataaaattaaagtcatatatgtatatacaaaaga

SEQ ID NO: 56824 - DNA, 1036 bp, Homo sapiens
ctgacatacttgttgctaattttgagatctgggcaacaactgtgtaggctgttctttcaacctctttcttcttacttctttacttttccttcagagaggagaaagccacccctgtgctatagccaccgctccaattctgactctagctaggtcatgaaacagactgagctattattgcatcaacacataaatcctgtcatttgggtattattctttagagaactagagattacctagctgcaacctaagtttcctgaattagaatcatttgagcagcatcatcttattggctcattaacatatttgtgaccaggcacagtggcgcatgcctgtaatcccagcactttgggaggccgaggcgggcggatctcttgaggtcgggagtttgagaccagcgtggccaacatggtgaaaccccatttctactaaaaatgtaaaaattggctgggcttggtggcgcgcgcctgtggtcccagctactcggaaggctgaggtgtgagaatcacttaaacccgggagatggaggttgcagtgagcagagattgcgccactgcactccagcctaggtgacaagaatgagactccgtcttaaaacaaaaacaacatatttgttcacttttgaaccctgtggtgtcttttaactttgttaagggcccttggttagcaaaattatgaaagtttaggaaatttggctattgagtatattaagtacaactacaaaatcctctgagttctccaggaagcctaaaccttgagcagtatcttattcaagtggagtatatatcttcaagaatacagatttttaaggtaagtagtttttcgtctttgcatctcctaagaccattgttaacaaccttgatattaaacgaagaagtgaatgtaaacctccttttgaacatattttttataaagaaatattttgttaattggagtaagtagtattgttatgaaatcactgtgtaattgttaattgtaaactgcaatgtctattttgtgttgtaacaatgttgccataaaatagctttgctaaatgtga

SEQ ID NO: 56825 - DNA, 521 bp, Homo sapiens
aggagattctttttgtcttgtttttgtcatggagtctgcactccagcctaggtgacaagaatgagactccgtcttaaaacaaaaacaacatatttgttcacttttgaaccctgtggtgtcttttaactttgttaagggcccttggttagcaaaattatgaaagtttaggaaatttggctattgagtatattaagtacaactacaaaatcctctgagttctccaggaagcctaaaccttgagcagtatcttattcaagtggagtatatatcttcaagaatacagatttttaaggtaagtagtttttcgtctttgcatctcctaagaccattgttaacaaccttgatattaaacgaagaagtgaatgtaaacctccttttgaacatattttttataaagaaatattttgttaattggagtaagtagtattgttatgaaatcactgtgtaattgttaattgtaaactgcaatgtctattttgtgttgtaacaatgttgccataaaatagctttgctaaatgtga

SEQ ID NO: 56826 - DNA, 1386 bp, Homo sapiens
ctgacatacttgttgctaattttgagatctgggcaacaactgtgtaggctgttctttcaacctctttcttcttacttctttacttttccttcagagaggagaaagccacccctgtgctatagccaccgctccaattctgactctagctaggtcatgaaacagactgagctattattgcatcaacacataaatcctgtcatttgggtattattctttagagaactagagattacctagctgcaacctaagtttcctgaattagaatcatttgagcagcatcatcttattggctcattaacatatttgtgaccaggcacagtggcgcatgcctgtaatcccagcactttgggaggccgaggcgggcggatctcttgaggtcgggagtttgagaccagcgtggccaacatggtgaaaccccatttctactaaaaatgtaaaaattggctgggcttggtggcgcgcgcctgtggtcccagctactcggaaggctgaggtgtgagaatcacttaaacccgggagatggaggttgcagtgagcagagattgcgccactgcactccagcctaggtgacaagaatgagactccgtcttaaaacaaaaacaacatatttgttcacttttgaaccctgtggtgtcttttaactttgttaagggcccttggttagcaaaattatgaaagtttaggaaatttggctattgagtatattaagtacaactacaaaatcctctgagttctccaggaagcctaaaccttgagcagtatcttattcaagtggagtatatatcttcaagaatacagatttttaaggtaagtagtttttcgtctttgcatctcctaagaccattgttaacaaccttgatattaaacgaagaagtgaatgtaaacctccttttgaacatattttttataaagaaatattttgttaattggagtaagtagtattgttatgaaatcactgtgtaattgttaattgtaaactgcaatgtctattttgtgttgtaacaatgttgccataaaatagctttgctaaatgtgaaatgactttaatcccttttgtcttcaatatacttcataaaggaggaaatgatgatttacacaatttgtcatgaagcttccgtgtttatgagaaattccaagaagtaagagccaagaggacagatattatcagaatatgggacataagaaattgcatatagtgtcaagggtttctatataacaacttaatttatttcccttgcatatatagtaggggttaacattttgctcaatgttaacgggggacataatggacataaaacattggatagctttttatttaaatgagctaaaggtgtgcgtatacacatgcacttataaaattaaagtcatatatgtatatacaaaaga

SEQ ID NO: 56827 - DNA, 169 bp, Homo sapiens
cagattcagagtaagggcctgcttcctcacagacagctttgttctcactgtaaccttatatggcagaaggagcagaaagaaggggcatatgcaatctctatgcaatctcttttataaggacactaatctcagggggattctgtcttcttgacttaatcacctcccaaag

SEQ ID NO: 56828 - DNA, 314 bp, Homo sapiens
aaaaatggttatgacagagcagataatcagaatgagtcagggtagagtaggaaatcagagtgagtcagggtggagaagagtcagggtggagtaggtaatcggaaaaggttgctttacgtggaagttaagtttaaaagcagaaggcaaagaattgaacatacatattaattctttgaagagaaatttataactcatatttaataacttcctcctcttgcatttttccttatagctttttctttaactcctttaacatgtcttggcttagttgttctgcctgattttccaaaagaaggagcttctctggttaaggt

SEQ ID NO: 56829 - DNA, 540 bp, Homo sapiens
ctccgttagactaagctccgcgaggggtgagaaagttgttccgtccactcgtcctccggggctagcaggacatattctgtattaaatgagtagatgacagaaaccccgtgagagaaagagtgagccgagccagtggttctctaagtgtggctccaggaccagcggaccagcagctcagcatcgcctgaggatttgttagaaatgcaaattctctgacttggttgggggacccagcaatccgggtttgaaagaactgtccaaggggggattcctgtgcacactgaagtttgagaaccaccgaaggcggcaaatcccctgctgttgggtgagtgtgcactgtggcagctttggtgacctgtaagaggaaccatggatgagcaaaccccaccttcaaatgtagcaaagggcagagagagggtggacacgtcacccagacccccaaaaggggcccagacgtgttgttcggcgagctggccactggagggcagtgtggccacgtccatcgtgctgcctccgagggcttccgggggagagcggccg

SEQ ID NO: 56830 - DNA, 2832 bp, Homo sapiens
cctctctgtgaattccgtacggcttccggtggcgggacgcggggccgcgcacgcgggaaaagcttccccggtgtccccccatccccctccccgcgccccccccgcgtccccccagcgcgcccacctctcgcgccggggccctcgcgaggccgcagcctgaggagattcccaacctgctgagcatccgcacacccactcaggagttggggcccagctcccagtttacttggtttcccttgtgcagcctggggctctgcccaggccaccacaggcaggggtcgacatggcagagacactggagttcaacgacgtctatcaggaggtgaaaggttccatgaatgatggtcgactgaggttgagccgtcagggcatcatcttcaagaatagcaagacaggcaaagtggacaacatccaggctggggagttaacagaaggtatctggcgccgtgttgctctgggccatggacttaaactgcttacaaagaatggccatgtctacaagtatgatggcttccgagaatcggagtttgagaaactctctgatttcttcaaaactcactatcgccttgagctaatggagaaggacctttgtgtgaagggctggaactgggggacagtgaaatttggtgggcagctgctttcctttgacattggtgaccagccagtctttgagatacccctcagcaatgtgtcccagtgcaccacaggcaagaatgaggtgacactggaattccaccaaaacgatgacgcagaggtgtctctcatggaggtgcgcttctacgtcccacccacccaggaggatggtgtggaccctgttgaggcctttgcccagaatgtgttgtcaaaggcggatgtaatccaggccacgggagatgccatctgcatcttccgggagctgcagtgtctgactcctcgtggtcgttatgacattcggatctaccccacctttctgcacctgcatggcaagacctttgactacaagatcccctacaccacagtactgcgtctgtttttgttaccccacaaggaccagcgccagatgttctttgtgatcagcctggatcccccaatcaagcaaggccaaactcgctaccacttcctgatcctcctcttctccaaggacgaggacatttcgttgactctgaacatgaacgaggaagaagtggagaagcgctttgagggtcggctcaccaagaacatgtcaggatccctctatgagatggtcagccgggtcatgaaagcactggtaaaccgcaagatcacagtgccaggcaacttccaagggcactcaggggcccagtgcattacctgttcctacaaggcaagctcaggactgctctacccgctggagcggggcttcatctacgtccacaagccacctgtgcacatccgcttcgatgagatctcctttgtcaactttgctcgtggtaccactactactcgttcctttgactttgaaattgagaccaagcagggcactcagtataccttcagcagcattgagagggaggagtacgggaaactgtttgattttgtcaacgcgaaaaagctcaacatcaaaaaccgaggattgaaagagggcatgaacccaagctacgatgaatatgctgactctgatgaggaccagcatgatgcctacttggagaggatgaaggaggaaggcaagatccgggaggagaatgccaatgacagcagcgatgactcaggagaagaaaccgatgagtcattcaacccaggtgaagaggaggaagatgtggcagaggagtttgacagcaacgcctctgccagctcctccagtaatgagggtgacagtgaccgggatgagaagaagcggaaacagctcaaaaaggccaagatggccaaggaccgcaagagccgcaagaagcctgtggaggtgaagaagggcaaagaccccaatgcccccaagaggcccatgtctgcatacatgctgtggctcaatgccagccgagagaagatcaagtcagaccatcctggcatcagcatcacggatctttccaagaaggcaggcgagatctggaagggaatgtccaaagagaagaaagaggagtgggatcgcaaggctgaggatgccaggagggactatgaaaaagccatgaaagaatatgaagggggccgaggcgagtcttctaagagggacaagtcaaagaagaagaagaaagtaaaggtaaagatggaaaagaaatccacgccctctaggggctcatcatccaagtcgtcctcaaggcagctaagcgagagcttcaagagcaaagagtttgtgtctagtgatgagagctcttcgggagagaacaagagcaaaaagaagaggaggaggagcgaggactctgaagaagaagaactagccagtactccccccagctcagaggactcagcgtcaggatccgatgagtagaaacggaggaaggttctctttgcgcttgccttctcacaccccccgactccccacccatattttggtaccagtttctcctcatgaaatgcagtccctggattctgtgccatctgaacatgctctcctgttggtgtgtatgtcactagggcagtggggagacgtcttaactctgctgcttcccaaggatggctgtttataatttggggagagatagggtgggaggcagggcaatgcaggatccaaatcctcatcttactttcccgaccttaaggatgtagctgctgcttgtcctgttcaagttgctggagcaggggtcatgtgaggccaggcctgtagctcctacctggggcctatttctactttcattttgtatttctggtctgtgaaaatgatttaataaagggaactgactttggaaa

SEQ ID NO: 56831 - DNA, 975 bp, Homo sapiens
tggcgtccctggtctaggcggagaaccccttgggcgatgagtgagaacctcgacaacgagggcccgaagcccatggagagctgtggccaggagagcagcagtgccctgagctgccctaccgtctcggtgccccctgcagccccggcagccctggaggaggtggagaaagagggcgctggggcggctacagggccggggcctcagcccgggctctacagctacatcagggatgacttgtttacctctgagatctttaaactggagctgcagaacgtgcctcgccacgccagcttcagcgacgtccggcgcttcctgggccgctttggtctgcagccccacaaagagaagaaagaggagtgggatcgcaaggctgaggatgccaggagggactatgaaaaagccatgaaagaatatgaagggggccgaggcgagtcttctaagagggacaagtcaaagaagaagaagaaagtaaaggtaaagatggaaaagaaatccacgccctctaggggctcatcatccaagtcgtcctcaaggcagctaagcgagagcttcaagagcaaagagtttgtgtctagtgatgagagctcttcgggagagaacaagagcaaaaagaagaggaggaggagcgaggactctgaagaagaagaactagccagtactccccccagctcagaggactcagcgtcaggatccgatgagtagaaacggaggaaggttctctttgcgcttgccttctcacaccccccgactccccacccatattttggtaccagtttctcctcatgaaatgcagatccaaatcctcatcttactttcccgaccttaaggatgtagctgctgcttgtcctgttcaagttgctggagcaggggtcatgtgaggccaggcctgtagctcctacctggggcctatttctactttcattttgtatttctggtctgtgaaaatgatttaataaagggaactgactttggaaa

SEQ ID NO: 56832 - DNA, 313 bp, Homo sapiens
aagtgatctaaataatttatttgggaaaatgtatgggttctgtgggaaatagctgaaggcatttgggttcttatgtaggtgaagaagggcaaagaccccaatgcccccaagaggcccatgtctgcatacatgctgtggctcaatgccagccgagagaagatcaagtcagaccatcctggcatcagcatcacggatctttccaagaaggcaggcgagatctatgagtcaagggtcttccaaggctttcgataatgaaatcaggattgactgtccttcccgcagccgggggagtggaaacctgagcctggagagt

SEQ ID NO: 56833 - DNA, 3321 bp, Homo sapiens
cctctctgtgaattccgtacggcttccggtggcgggacgcggggccgcgcacgcgggaaaagcttccccggtgtccccccatccccctccccgcgccccccccgcgtccccccagcgcgcccacctctcgcgccggggccctcgcgaggccgcagcctgaggaggtaggtggtggtcgtccccggtcccaggaaggcaggggccccgctcccccacgggaccctcgacatggaccattccgcgttcgcaaccgcggggagcgggcgaatccattatgtggggcgggggtgaaccgtgggtctggggccgcggggtggtgggagcggtgcgagggaaaccctgcactctgagctggattgggtcgcgtgcgatgtgcgggctcctggcagaccctggggttccgctgctcgttgccatggctcccgccggagcggccagagcgggcgtcgggttgggtgtcagcggtattccgggcccggttctccacccaggcctggacctggaccctcgggcactgcagcgtccgtctgtaggtttccaggcagaggaaatcctgagacatccaggcgcagctgggagttgctacctggctccatccgtgagcacagcgaggtgctgtctttcatgcttatctgtcttcctcttgaattcagattcccaacctgctgagcatccgcacacccactcaggagttggggcccagctcccagtttacttggtttcccttgtgcagcctggggctctgcccaggccaccacaggcaggggtcgacatggcagagacactggagttcaacgacgtctatcaggaggtgaaaggttccatgaatgatggtcgactgaggttgagccgtcagggcatcatcttcaagaatagcaagacaggcaaagtggacaacatccaggctggggagttaacagaaggtatctggcgccgtgttgctctgggccatggacttaaactgcttacaaagaatggccatgtctacaagtatgatggcttccgagaatcggagtttgagaaactctctgatttcttcaaaactcactatcgccttgagctaatggagaaggacctttgtgtgaagggctggaactgggggacagtgaaatttggtgggcagctgctttcctttgacattggtgaccagccagtctttgagatacccctcagcaatgtgtcccagtgcaccacaggcaagaatgaggtgacactggaattccaccaaaacgatgacgcagaggtgtctctcatggaggtgcgcttctacgtcccacccacccaggaggatggtgtggaccctgttgaggcctttgcccagaatgtgttgtcaaaggcggatgtaatccaggccacgggagatgccatctgcatcttccgggagctgcagtgtctgactcctcgtggtcgttatgacattcggatctaccccacctttctgcacctgcatggcaagacctttgactacaagatcccctacaccacagtactgcgtctgtttttgttaccccacaaggaccagcgccagatgttctttgtgatcagcctggatcccccaatcaagcaaggccaaactcgctaccacttcctgatcctcctcttctccaaggacgaggacatttcgttgactctgaacatgaacgaggaagaagtggagaagcgctttgagggtcggctcaccaagaacatgtcaggatccctctatgagatggtcagccgggtcatgaaagcactggtaaaccgcaagatcacagtgccaggcaacttccaagggcactcaggggcccagtgcattacctgttcctacaaggcaagctcaggactgctctacccgctggagcggggcttcatctacgtccacaagccacctgtgcacatccgcttcgatgagatctcctttgtcaactttgctcgtggtaccactactactcgttcctttgactttgaaattgagaccaagcagggcactcagtataccttcagcagcattgagagggaggagtacgggaaactgtttgattttgtcaacgcgaaaaagctcaacatcaaaaaccgaggattgaaagagggcatgaacccaagctacgatgaatatgctgactctgatgaggaccagcatgatgcctacttggagaggatgaaggaggaaggcaagatccgggaggagaatgccaatgacagcagcgatgactcaggagaagaaaccgatgagtcattcaacccaggtgaagaggaggaagatgtggcagaggagtttgacagcaacgcctctgccagctcctccagtaatgagggtgacagtgaccgggatgagaagaagcggaaacagctcaaaaaggccaagatggccaaggaccgcaagagccgcaagaagcctgtggaggtgaagaagggcaaagaccccaatgcccccaagaggcccatgtctgcatacatgctgtggctcaatgccagccgagagaagatcaagtcagaccatcctggcatcagcatcacggatctttccaagaaggcaggcgagatctggaagggaatgtccaaagagaagaaagaggagtgggatcgcaaggctgaggatgccaggagggactatgaaaaagccatgaaagaatatgaagggggccgaggcgagtcttctaagagggacaagtcaaagaagaagaagaaagtaaaggtaaagatggaaaagaaatccacgccctctaggggctcatcatccaagtcgtcctcaaggcagctaagcgagagcttcaagagcaaagagtttgtgtctagtgatgagagctcttcgggagagaacaagagcaaaaagaagaggaggaggagcgaggactctgaagaagaagaactagccagtactccccccagctcagaggactcagcgtcaggatccgatgagtagaaacggaggaaggttctctttgcgcttgccttctcacaccccccgactccccacccatattttggtaccagtttctcctcatgaaatgcagtccctggattctgtgccatctgaacatgctctcctgttggtgtgtatgtcactagggcagtggggagacgtcttaactctgctgcttcccaaggatggctgtttataatttggggagagatagggtgggaggcagggcaatgcaggatccaaatcctcatcttactttcccgaccttaaggatgtagctgctgcttgtcctgttcaagttgctggagcaggggtcatgtgaggccaggcctgtagctcctacctggggcctatttctactttcattttgtatttctggtctgtgaaaatgatttaataaagggaactgactttggaaa

SEQ ID NO: 56834 - DNA, 3244 bp, Homo sapiens
  misc_feature (2843)..(2843): n is a, c, g, or t
  misc_feature (2848)..(2848): n is a, c, g, or t
  misc_feature (2850)..(2851): n is a, c, g, or t
cctctctgtgaattccgtacggcttccggtggcgggacgcggggccgcgcacgcgggaaaagcttccccggtgtccccccatccccctccccgcgccccccccgcgtccccccagcgcgcccacctctcgcgccggggccctcgcgaggccgcagcctgaggagattcccaacctgctgagcatccgcacacccactcaggagttggggcccagctcccagtttacttggtttcccttgtgcagcctggggctctgcccaggccaccacaggcaggggtcgacatggcagagacactggagttcaacgacgtctatcaggaggtgaaaggttccatgaatgatggtcgactgaggttgagccgtcagggcatcatcttcaagaatagcaagacaggcaaagtggacaacatccaggctggggagttaacagaaggtatctggcgccgtgttgctctgggccatggacttaaactgcttacaaagaatggccatgtctacaagtatgatggcttccgagaatcggagtttgagaaactctctgatttcttcaaaactcactatcgccttgagctaatggagaaggacctttgtgtgaagggctggaactgggggacagtgaaatttggtgggcagctgctttcctttgacattggtgaccagccagtctttgagatacccctcagcaatgtgtcccagtgcaccacaggcaagaatgaggtgacactggaattccaccaaaacgatgacgcagaggtgtctctcatggaggtgcgcttctacgtcccacccacccaggaggatggtgtggaccctgttgaggcctttgcccagaatgtgttgtcaaaggcggatgtaatccaggccacgggagatgccatctgcatcttccgggagctgcagtgtctgactcctcgtggtcgttatgacattcggatctaccccacctttctgcacctgcatggcaagacctttgactacaagatcccctacaccacagtactgcgtctgtttttgttaccccacaaggaccagcgccagatgttctttgtgatcagcctggatcccccaatcaagcaaggccaaactcgctaccacttcctgatcctcctcttctccaaggacgaggacatttcgttgactctgaacatgaacgaggaagaagtggagaagcgctttgagggtcggctcaccaagaacatgtcaggatccctctatgagatggtcagccgggtcatgaaagcactggtaaaccgcaagatcacagtgccaggcaacttccaagggcactcaggggcccagtgcattacctgttcctacaaggcaagctcaggactgctctacccgctggagcggggcttcatctacgtccacaagccacctgtgcacatccgcttcgatgagatctcctttgtcaactttgctcgtggtaccactactactcgttcctttgactttgaaattgagaccaagcagggcactcagtataccttcagcagcattgagagggaggagtacgggaaactgtttgattttgtcaacgcgaaaaagctcaacatcaaaaaccgaggattgaaagagggcatgaacccaagctacgatgaatatgctgactctgatgaggaccagcatgatgcctacttggagaggatgaaggaggaaggcaagatccgggaggagaatgccaatgacagcagcgatgactcaggagaagaaaccgatgagtcattcaacccaggtgaagaggaggaagatgtggcagaggagtttgacagcaacgcctctgccagctcctccagtaatgagggtgacagtgaccgggatgagaagaagcggaaacagctcaaaaaggccaagatggccaaggaccgcaagagccgcaagaagcctgtggaggtgaagaagggcaaagaccccaatgcccccaagaggcccatgtctgcatacatgctgtggctcaatgccagccgagagaagatcaagtcagaccatcctggcatcagcatcacggatctttccaagaaggcaggcgagatctggaagggaatgtccaaagagaagaaagaggagtgggatcgcaaggctgaggatgccaggagggactatgaaaaagccatgaaagaatatgaagggggccgaggcgagtcttctaagagggacaagtcaaagaagaagaagaaagtaaaggtaaagatggaaaagaaatccacgccctctaggggctcatcatccaagtcgtcctcaaggcagctaagcgagagcttcaagagcaaagagtttgtgtctagtgatgagagctcttcgggagagaacaagagcaaaaagaagaggaggaggagcgaggactctgaagaagaagaactagccagtactccccccagctcagaggactcagcgtcaggatccgatgagtagaaacggaggaaggttctctttgcgcttgccttctcacaccccccgactccccacccatattttggtaccagtttctcctcatgaaatgcagtccctggattctgtgccatctgaacatgctctcctgttggtgtgtatgtcactagggcagtggggagacgtcttaactctgctgcttcccaaggatggctgtttataatttggggagagatagggtgggaggcagggcaatgcaggatccaaatcctcatcttactttcccgaccttaaggatgtagctgctgcttgtcctgttcaagttgctggagcaggggtcatgtgaggccaggcctgtagctcctacctggggcctatttctactttcattttgtatttctggtctgtgaaaatgatttaataaagggaactgactttggaaaaaaaaaaaacnaacancnncacaaacaacgaaacacacacaacgacaaaaaaaccacacagacaacgaaaaacagaaaaaacctacaagaacaacacaacagcaggcgacaaacgaaaaaagcccagggaagaagactccaacacaaaccaccgacatgacaaaaagacacacaaagaagaaacacaaggaacacagaacaccgacagacaagaccacgcgggcgaaaacggcctcacccaccgccacgaggagagcgacaacacacagccggggcgcaacaaatggagcagccacaccacagagacaagcaacgcgacacgggacacaaacccagggcagacacggacaaaccagcccggacccgggggaacgaaggcgcagaagacaaaaatcgaggcaaaaacacacca

SEQ ID NO: 56835 - DNA, 2935 bp, Homo sapiens
cctctctgtgaattccgtacggcttccggtggcgggacgcggggccgcgcacgcgggaaaagcttccccggtgtccccccatccccctccccgcgccccccccgcgtccccccagcgcgcccacctctcgcgccggggccctcgcgaggccgcagcctgaggagattcccaacctgctgagcatccgcacacccactcaggagttggggcccagctcccagtttacttggtttcccttgtgcagcctggggctctgcccaggccaccacaggcaggggtcgacatggcagagacactggagttcaacgacgtctatcaggaggtgaaaggttccatgaatgatggtcgactgaggttgagccgtcagggcatcatcttcaagaatagcaagacaggcaaagtggacaacatccaggctggggagttaacagaaggtatctggcgccgtgttgctctgggccatggacttaaactgcttacaaagaatggccatgtctacaagtatgatggcttccgagaatcggagtttgagaaactctctgatttcttcaaaactcactatcgccttgagctaatggagaaggacctttgtgtgaagggctggaactgggggacagtgaaatttggtgggcagctgctttcctttgacattggtgaccagccagtctttgagatacccctcagcaatgtgtcccagtgcaccacaggcaagaatgaggtgacactggaattccaccaaaacgatgacgcagaggtgtctctcatggaggtgcgcttctacgtcccacccacccaggaggatggtgtggaccctgttgaggtgaggcttcccctggttgccttggcagcagatggtgctgagcaggcattggctggcctgggagcagggcctgctgcttggctaccaatatgtgcttttgcaggcctttgcccagaatgtgttgtcaaaggcggatgtaatccaggccacgggagatgccatctgcatcttccgggagctgcagtgtctgactcctcgtggtcgttatgacattcggatctaccccacctttctgcacctgcatggcaagacctttgactacaagatcccctacaccacagtactgcgtctgtttttgttaccccacaaggaccagcgccagatgttctttgtgatcagcctggatcccccaatcaagcaaggccaaactcgctaccacttcctgatcctcctcttctccaaggacgaggacatttcgttgactctgaacatgaacgaggaagaagtggagaagcgctttgagggtcggctcaccaagaacatgtcaggatccctctatgagatggtcagccgggtcatgaaagcactggtaaaccgcaagatcacagtgccaggcaacttccaagggcactcaggggcccagtgcattacctgttcctacaaggcaagctcaggactgctctacccgctggagcggggcttcatctacgtccacaagccacctgtgcacatccgcttcgatgagatctcctttgtcaactttgctcgtggtaccactactactcgttcctttgactttgaaattgagaccaagcagggcactcagtataccttcagcagcattgagagggaggagtacgggaaactgtttgattttgtcaacgcgaaaaagctcaacatcaaaaaccgaggattgaaagagggcatgaacccaagctacgatgaatatgctgactctgatgaggaccagcatgatgcctacttggagaggatgaaggaggaaggcaagatccgggaggagaatgccaatgacagcagcgatgactcaggagaagaaaccgatgagtcattcaacccaggtgaagaggaggaagatgtggcagaggagtttgacagcaacgcctctgccagctcctccagtaatgagggtgacagtgaccgggatgagaagaagcggaaacagctcaaaaaggccaagatggccaaggaccgcaagagccgcaagaagcctgtggaggtgaagaagggcaaagaccccaatgcccccaagaggcccatgtctgcatacatgctgtggctcaatgccagccgagagaagatcaagtcagaccatcctggcatcagcatcacggatctttccaagaaggcaggcgagatctggaagggaatgtccaaagagaagaaagaggagtgggatcgcaaggctgaggatgccaggagggactatgaaaaagccatgaaagaatatgaagggggccgaggcgagtcttctaagagggacaagtcaaagaagaagaagaaagtaaaggtaaagatggaaaagaaatccacgccctctaggggctcatcatccaagtcgtcctcaaggcagctaagcgagagcttcaagagcaaagagtttgtgtctagtgatgagagctcttcgggagagaacaagagcaaaaagaagaggaggaggagcgaggactctgaagaagaagaactagccagtactccccccagctcagaggactcagcgtcaggatccgatgagtagaaacggaggaaggttctctttgcgcttgccttctcacaccccccgactccccacccatattttggtaccagtttctcctcatgaaatgcagtccctggattctgtgccatctgaacatgctctcctgttggtgtgtatgtcactagggcagtggggagacgtcttaactctgctgcttcccaaggatggctgtttataatttggggagagatagggtgggaggcagggcaatgcaggatccaaatcctcatcttactttcccgaccttaaggatgtagctgctgcttgtcctgttcaagttgctggagcaggggtcatgtgaggccaggcctgtagctcctacctggggcctatttctactttcattttgtatttctggtctgtgaaaatgatttaataaagggaactgactttggaaa

SEQ ID NO: 56836 - DNA, 3368 bp, Homo sapiens
cctctctgtgaattccgtacggcttccggtggcgggacgcggggccgcgcacgcgggaaaagcttccccggtgtccccccatccccctccccgcgccccccccgcgtccccccagcgcgcccacctctcgcgccggggccctcgcgaggccgcagcctgaggagattcccaacctgctgagcatccgcacacccactcaggagttggggcccagctcccagtttacttggtttcccttgtgcagcctggggctctgcccaggccaccacaggcaggggtcgacatggcagagacactggagttcaacgacgtctatcaggaggtgaaaggttccatgaatgatggtcgactgaggttgagccgtcagggcatcatcttcaagaatagcaagacaggcaaagtggacaacatccaggctggggagttaacagaaggtatctggcgccgtgttgctctgggccatggacttaaactgcttacaaagaatggccatgtctacaagtatgatggcttccgagaatcggagtttgagaaactctctgatttcttcaaaactcactatcgccttgagctaatggagaaggacctttgtgtgaagggctggaactgggggacagtgaaatttggtgggcagctgctttcctttgacattggtgaccagccagtctttgagatacccctcagcaatgtgtcccagtgcaccacaggcaagaatgaggtgacactggaattccaccaaaacgatgacgcagaggtgtctctcatggaggtgcgcttctacgtcccacccacccaggaggatggtgtggaccctgttgaggcctttgcccagaatgtgttgtcaaaggcggatgtaatccaggccacgggagatgccatctgcatcttccgggagctgcagtgtctgactcctcgtggtcgttatgacattcggatctaccccacctttctgcacctgcatggcaagacctttgactacaagatcccctacaccacagtactgcgtctgtttttgttaccccacaaggaccagcgccagatgttctttgtgatcagcctggatcccccaatcaagcaaggccaaactcgctaccacttcctgatcctcctcttctccaaggacgaggacatttcgttgactctgaacatgaacgaggaagaagtggagaagcgctttgagggtcggctcaccaagaacatgtcaggatccctctatgagatggtcagccgggtcatgaaagcactggtaaaccgcaagatcacagtgccaggcaacttccaagggcactcaggggcccagtgcattacctgttcctacaaggcaagctcaggactgctctacccgctggagcggggcttcatctacgtccacaagccacctgtgcacatccgcttcgatgagatctcctttgtcaactttgctcgtggtaccactactactcgttcctttgactttgaaattgagaccaagcagggcactcagtataccttcagcagcattgagagggaggagtacgggaaactgtttgattttgtcaacgcgaaaaagctcaacatcaaaaaccgaggattgaaagagggcatgaacccaagctacgatgaatatgctgactctgatgaggaccagcatgatgcctacttggagaggatgaaggaggaaggcaagatccgggaggagaatgccaatgacagcagcgatgactcaggagaagaaaccgatgagtcattcaacccaggtgaagaggaggaagatgtggcagaggagtttgacagcaacgcctctgccagctcctccagtaatgagggtgacagtgaccgggatgagaagaagcggaaacagctcaaaaaggccaagatggccaaggaccgcaagagccgcaagaagcctgtggaggtgaagaagggcaaagaccccaatgcccccaagaggcccatgtctgcatacatgctgtggctcaatgccagccgagagaagatcaagtcagaccatcctggcatcagcatcacggatctttccaagaaggcaggcgagatctggaagggaatgtccaaagagaagaaagaggagtgggatcgcaaggctgaggatgccaggagggactatgaaaaagccatgaaagaatatgaagggggccgaggcgagtcttctaagaggtgagtgtcgagaacatggcccagtcactgatttttgtggcagacttttttttttttaacaggccgaagttgagcattggaaagttaaagacagcagagatgcttctgactgcagtagggtagtgcttctcaaacctgggtaggccattgcccaagtatgggtgacacaatagggcattcaagtcactggggaaatatggcctcttttcctggaccattttatttgaaggtatgggggaacgaaaaaaatactattatggagtgcagtgcacagtttgcatgaactctaaaagataaagcaagaaatatcaagtaggttttgcacattgggctgctttaggctgtgccctctgattcttctggtgtactcatgatactctcccttggtgccctccaggctgacgcagctatttacgttcagagtgaaatgggctgtgtggctgggattgggaaaggccttgttaaagctgggagaggtttggtcatggtgacaggggacctgaaggcccagctcctcttccctcttgccaatacagggacaagtcaaagaagaagaagaaagtaaaggtaaagatggaaaagaaatccacgccctctaggggctcatcatccaagtcgtcctcaaggcagctaagcgagagcttcaagagcaaagagtttgtgtctagtgatgagagctcttcgggagagaacaagagcaaaaagaagaggaggaggagcgaggactctgaagaagaagaactagccagtactccccccagctcagaggactcagcgtcaggatccgatgagtagaaacggaggaaggttctctttgcgcttgccttctcacaccccccgactccccacccatattttggtaccagtttctcctcatgaaatgcagtccctggattctgtgccatctgaacatgctctcctgttggtgtgtatgtcactagggcagtggggagacgtcttaactctgctgcttcccaaggatggctgtttataatttggggagagatagggtgggaggcagggcaatgcaggatccaaatcctcatcttactttcccgaccttaaggatgtagctgctgcttgtcctgttcaagttgctggagcaggggtcatgtgaggccaggcctgtagctcctacctggggcctatttctactttcattttgtatttctggtctgtgaaaatgatttaataaagggaactgactttggaaa

SEQ ID NO: 56837 - DNA, 2686 bp, Homo sapiens
cctctctgtgaattccgtacggcttccggtggcgggacgcggggccgcgcacgcgggaaaagcttccccggtgtccccccatccccctccccgcgccccccccgcgtccccccagcgcgcccacctctcgcgccggggccctcgcgaggccgcagcctgaggagattcccaacctgctgagcatccgcacacccactcaggagttggggcccagctcccagtttacttggtttcccttgtgcagcctggggctctgcccaggccaccacaggcaggggtcgacatggcagagacactggagttcaacgacgtctatcaggaggtgaaaggttccatgaatgatggtcgactgaggttgagccgtcagggcatcatcttcaagaatagcaagacaggcaaagtggacaacatccaggctggggagttaacagaaggtatctggcgccgtgttgctctgggccatggacttaaactgcttacaaagaatggccatgtctacaagtatgatggcttccgagaatcggagtttgagaaactctctgatttcttcaaaactcactatcgccttgagctaatggagaaggacctttgtgtgaagggctggaactgggggacagtgaaatttggtgggcagctgctttcctttgacattggtgaccagccagtctttgagatacccctcagcaatgtgtcccagtgcaccacaggcaagaatgaggtgacactggaattccaccaaaacgatgacgcagaggtgtctctcatggaggtgcgcttctacgtcccacccacccaggaggatggtgtggaccctgttgaggcctttgcccagaatgtgttgtcaaaggcggatgtaatccaggccacgggagatgccatctgcatcttccgggagctgcagtgtctgactcctcgtggtcgttatgacattcggatctaccccacctttctgcacctgcatggcaagacctttgactacaagatcccctacaccacagtactgcgtctgtttttgttaccccacaaggaccagcgccagatgttctttgtgatcagcctggatcccccaatcaagcaaggccaaactcgctaccacttcctgatcctcctcttctccaaggacgaggacatttcgttgactctgaacatgaacgaggaagaagtggagaagcgctttgagggtcggctcaccaagaacatgtcaggatccctctatgagatggtcagccgggtcatgaaagcactggtaaaccgcaagatcacagtgccaggcaacttccaagggcactcaggggcccagtgcattacctgttcctacaaggcaagctcaggactgctctacccgctggagcggggcttcatctacgtccacaagccacctgtgcacatccgcttcgatgagatctcctttgtcaactttgctcgtggtaccactactactcgttcctttgactttgaaattgagaccaagcagggcactcagtataccttcagcagcattgagagggaggagtacgggaaactgtttgattttgtcaacgcgaaaaagctcaacatcaaaaaccgaggattgaaagagggcatgaacccaagctacgatgaatatgctgactctgatgaggaccagcatgatgcctacttggagaggatgaaggaggaaggcaagatccgggaggagaatgccaatgacagcagcgatgactcaggagaagaaaccgatgagtcattcaacccaggtgaagaggaggaagatgtggcagaggagtttgacagcaacgcctctgccagctcctccagtaatgagggtgacagtgaccgggatgagaagaagcggaaacagctcaaaaaggccaagatggccaaggaccgcaagagccgcaagaagcctgtggaggtgaagaagggcaaagaccccaatgcccccaagaggcccatgtctgcatacatgctgtggctcaatgccagccgagagaagatcaagtcagaccatcctggcatcagcatcacggatctttccaagaaggcaggcgagatctggaagggaatgtccaaagagaagaaagaggagtgggatcgcaaggctgaggatgccaggagggactatgaaaaagccatgaaagaatatgaagggggccgaggcgagtcttctaagagggacaagtcaaagaagaagaagaaagtaaaggtaaagatggaaaagaaatccacgccctctaggggctcatcatccaagtcgtcctcaaggcagctaagcgagagcttcaagagcaaagagtttgtgtctagtgatgagagctcttcgggagagaacaagagcaaaaagaagaggaggaggagcgaggactctgaagaagaagaactagccagtactccccccagctcagaggactcagcgtcaggatccgatgagtagaaacggaggaaggttctctttgcgcttgccttctcacaccccccgactccccacccatattttggtaccagtttctcctcatgaaatgcagatccaaatcctcatcttactttcccgaccttaaggatgtagctgctgcttgtcctgttcaagttgctggagcaggggtcatgtgaggccaggcctgtagctcctacctggggcctatttctactttcattttgtatttctggtctgtgaaaatgatttaataaagggaactgactttggaaa

SEQ ID NO: 56838 - DNA, 2501 bp, Homo sapiens
cctctctgtgaattccgtacggcttccggtggcgggacgcggggccgcgcacgcgggaaaagcttccccggtgtccccccatccccctccccgcgccccccccgcgtccccccagcgcgcccacctctcgcgccggggccctcgcgaggccgcagcctgaggagattcccaacctgctgagcatccgcacacccactcaggagttggggcccagctcccagtttacttggtttcccttgtgcagcctggggctctgcccaggccaccacaggcaggggtcgacatggcagagacactggagttcaacgacgtctatcaggaggtgaaaggttccatgaatgatggtcgactgaggttgagccgtcagggcatcatcttcaagaatagcaagacaggcaaagtggacaacatccaggctggggagttaacagaaggtatctggcgccgtgttgctctgggccatggacttaaactgcttacaaagaatggccatgtctacaagtatgatggcttccgagaatcggagtttgagaaactctctgatttcttcaaaactcactatcgccttgagctaatggagaaggacctttgtgtgaagggctggaactgggggacagtgaaatttggtgggcagctgctttcctttgacattggtgaccagccagtctttgagatacccctcagcaatgtgtcccagtgcaccacaggcaagaatgaggtgacactggaattccaccaaaacgatgacgcagaggtgtctctcatggaggtgcgcttctacgtcccacccacccaggaggatggtgtggaccctgttgaggcctttgcccagaatgtgttgtcaaaggcggatgtaatccaggccacgggagatgccatctgcatcttccgggagctgcagtgtctgactcctcgtggtcgttatgacattcggatctaccccacctttctgcacctgcatggcaagacctttgactacaagatcccctacaccacagtactgcgtctgtttttgttaccccacaaggaccagcgccagatgttctttgtgatcagcctggatcccccaatcaagcaaggccaaactcgctaccacttcctgatcctcctcttctccaaggacgaggacatttcgttgactctgaacatgaacgaggaagaagtggagaagcgctttgagggtcggctcaccaagaacatgtcaggatccctctatgagatggtcagccgggtcatgaaagcactggtaaaccgcaagatcacagtgccaggcaacttccaagggcactcaggggcccagtgcattacctgttcctacaaggcaagctcaggactgctctacccgctggagcggggcttcatctacgtccacaagccacctgtgcacatccgcttcgatgagatctcctttgtcaactttgctcgtggtaccactactactcgttcctttgactttgaaattgagaccaagcagggcactcagtataccttcagcagcattgagagggaggagtacgggaaactgtttgattttgtcaacgcgaaaaagctcaacatcaaaaaccgaggattgaaagagggcatgaacccaagctacgatgaatatgctgactctgatgaggaccagcatgatgcctacttggagaggatgaaggaggaaggcaagatccgggaggagaatgccaatgacagcagcgatgactcaggagaagaaaccgatgagtcattcaacccaggtgaagaggaggaagatgtggcagaggagtttgacagcaacgcctctgccagctcctccagtaatgagggtgacagtgaccgggatgagaagaagcggaaacagctcaaaaaggccaagatggccaaggaccgcaagagccgcaagaagcctgtggaggtgaagaagggcaaagaccccaatgcccccaagaggcccatgtctgcatacatgctgtggctcaatgccagccgagagaagatcaagtcagaccatcctggcatcagcatcacggatctttccaagaaggcaggcgagatctggaagggaatgtccaaagagaagaaagaggagtgggatcgcaaggctgaggatgccaggagggactatgaaaaagccatgaaagaatatgaagggggccgaggcgagtcttctaagagggacaagtcaaagaagaagaagaaagtaaaggtaaagatggaaaagaaatccacgccctctaggggctcatcatccaagtcgtcctcaaggcagctaagcgagagcttcaagagcaaagagtttgtgtctagtgatgagagctcttcgggagagaacaagagcaaaaagaagaggaggaggagcgaggactctgaagaagaagaactagccagtactccccccagctcagaggactcagcgtcaggatccgatgagtagaaacggaggaaggttctctttgcgcttgccttctcacaccccccgactccccaggcagcaatgtgctattgaaacttctaaaactagg

SEQ ID NO: 56839 - DNA, 2170 bp, Homo sapiens
  misc_feature (2146)..(2146): n is a, c, g, or t
cctctctgtgaattccgtacggcttccggtggcgggacgcggggccgcgcacgcgggaaaagcttccccggtgtccccccatccccctccccgcgccccccccgcgtccccccagcgcgcccacctctcgcgccggggccctcgcgaggccgcagcctgaggagattcccaacctgctgagcatccgcacacccactcaggagttggggcccagctcccagtttacttggtttcccttgtgcagcctggggctctgcccaggccaccacaggcaggggtcgacatggcagagacactggagttcaacgacgtctatcaggaggtgaaaggttccatgaatgatggtcgactgaggttgagccgtcagggcatcatcttcaagaatagcaagacaggcaaagtggacaacatccaggctggggagttaacagaaggtatctggcgccgtgttgctctgggccatggacttaaactgcttacaaagaatggccatgtctacaagtatgatggcttccgagaatcggagtttgagaaactctctgatttcttcaaaactcactatcgccttgagctaatggagaaggacctttgtgtgaagggctggaactgggggacagtgaaatttggtgggcagctgctttcctttgacattggtgaccagccagtctttgagatacccctcagcaatgtgtcccagtgcaccacaggcaagaatgaggtgacactggaattccaccaaaacgatgacgcagaggtgtctctcatggaggtgcgcttctacgtcccacccacccaggaggatggtgtggaccctgttgaggcctttgcccagaatgtgttgtcaaaggcggatgtaatccaggccacgggagatgccatctgcatcttccgggagctgcagtgtctgactcctcgtggtcgttatgacattcggatctaccccacctttctgcacctgcatggcaagacctttgactacaagatcccctacaccacagtactgcgtctgtttttgttaccccacaaggaccagcgccagatgttctttgtgatcagcctggatcccccaatcaagcaaggccaaactcgctaccacttcctgatcctcctcttctccaaggacgaggacatttcgttgactctgaacatgaacgaggaagaagtggagaagcgctttgagggtcggctcaccaagaacatgtcaggatccctctatgagatggtcagccgggtcatgaaagcactggtaaaccgcaagatcacagtgccaggcaacttccaagggcactcaggggcccagtgcattacctgttcctacaaggcaagctcaggactgctctacccgctggagcggggcttcatctacgtccacaagccacctgtgcacatccgcttcgatgagatctcctttgtcaactttgctcgtggtaccactactactcgttcctttgactttgaaattgagaccaagcagggcactcagtataccttcagcagcattgagagggaggagtacgggaaactgtttgattttgtcaacgcgaaaaagctcaacatcaaaaaccgaggattgaaagagggcatgaacccaagctacgatgaatatgctgactctgatgaggaccagcatgatgcctacttggagaggatgaaggaggaaggcaagatccgggaggagaatgccaatgacagcagcgatgactcaggagaagaaaccgatgagtcattcaacccaggtgaagaggaggaagatgtggcagaggagtttgacagcaacgcctctgccagctcctccagtaatgagggtgacagtgaccgggatgagaagaagcggaaacagctcaaaaaggccaagatggccaaggaccgcaagagccgcaagaagcctgtggaggtgaagaagggcaaagaccccaatgcccccaagaggcccatgtctgcatacatgctgtggctcaatgccagccgagagaagatcaagtcagaccatcctggcatcagcatcacggatctttccaagaaggcaggcgagatctggaagggaatgtccaaagagaagaaagaggagtgggatcgcaaggctgaggatgccaggagggactatgaaaaagccatggagataggaataataaacggcgcgggggcncagggcaggttcttcatacagggg

SEQ ID NO: 56840 - DNA, 1434 bp, Homo sapiens
gaagtggatttgggccatgttccaggcatgaatgaggcagtgtttctgccagtggtgtcctggggatggactaggacctggtttggccatgcccagggagatccgctgaagctcattgatttgtttttcattcattaattccaatcaagtaaccaattgctgtggctgggtctggagagggcatggctgaagccaccacagtgaatgggagaaagcagtgttggggattggtggtggatactgtcctctggtcttcctcccttgccccttttgggtgggtatctttggatttgtcttcctcctgtcctgaggccgtggggtcctgtcttccctcctcaagtctaagcctggcttgttctctggcaggtttgacagcaacgcctctgccagctcctccagtaatgagggtgacagtgaccgggatgagaagaagcggaaacagctcaaaaaggccaagatggccaaggaccgcaagagccgcaagaagcctgtggaggtgaagaagggcaaagaccccaatgcccccaagaggcccatgtctgcatacatgctgtggctcaatgccagccgagagaagatcaagtcagaccatcctggcatcagcatcacggatctttccaagaaggcaggcgagatctggaagggaatgtccaaagagaagaaagaggagtgggatcgcaaggctgaggatgccaggagggactatgaaaaagccatgaaagaatatgaagggggccgaggcgagtcttctaagagggacaagtcaaagaagaagaagaaagtaaaggtaaagatggaaaagaaatccacgccctctaggggctcatcatccaagtcgtcctcaaggcagctaagcgagagcttcaagagcaaagagtttgtgtctagtgatgagagctcttcgggagagaacaagagcaaaaagaagaggaggaggagcgaggactctgaagaagaagaactagccagtactccccccagctcagaggactcagcgtcaggatccgatgagtagaaacggaggaaggttctctttgcgcttgccttctcacaccccccgactccccacccatattttggtaccagtttctcctcatgaaatgcagtccctggattctgtgccatctgaacatgctctcctgttggtgtgtatgtcactagggcagtggggagacgtcttaactctgctgcttcccaaggatggctgtttataatttggggagagatagggtgggaggcagggcaatgcaggatccaaatcctcatcttactttcccgaccttaaggatgtagctgctgcttgtcctgttcaagttgctggagcaggggtcatgtgaggccaggcctgtagctcctacctggggcctatttctactttcattttgtatttctggtctgtgaaaatgatttaataaagggaactgactttggaaa

SEQ ID NO: 56841 - DNA, 2312 bp, Homo sapiens
cctctctgtgaattccgtacggcttccggtggcgggacgcggggccgcgcacgcgggaaaagcttccccggtgtccccccatccccctccccgcgccccccccgcgtccccccagcgcgcccacctctcgcgccggggccctcgcgaggccgcagcctgaggagattcccaacctgctgagcatccgcacacccactcaggagttggggcccagctcccagtttacttggtttcccttgtgcagcctggggctctgcccaggccaccacaggcaggggtcgacatggcagagacactggagttcaacgacgtctatcaggaggtgaaaggttccatgaatgatggtcgactgaggttgagccgtcagggcatcatcttcaagaatagcaagacaggcaaagtggacaacatccaggctggggagttaacagaaggtatctggcgccgtgttgctctgggccatggacttaaactgcttacaaagaatggccatgtctacaagtatgatggcttccgagaatcggagtttgagaaactctctgatttcttcaaaactcactatcgccttgagctaatggagaaggacctttgtgtgaagggctggaactgggggacagtgaaatttggtgggcagctgctttcctttgacattggtgaccagccagtctttgagatacccctcagcaatgtgtcccagtgcaccacaggcaagaatgaggtgacactggaattccaccaaaacgatgacgcagaggtgtctctcatggaggtgcgcttctacgtcccacccacccaggaggatggtgtggaccctgttgaggcctttgcccagaatgtgttgtcaaaggcggatgtaatccaggccacgggagatgccatctgcatcttccgggagctgcagtgtctgactcctcgtggtcgttatgacattcggatctaccccacctttctgcacctgcatggcaagacctttgactacaagatcccctacaccacagtactgcgtctgtttttgttaccccacaaggaccagcgccagatgttctttgtgatcagcctggatcccccaatcaagcaaggccaaactcgctaccacttcctgatcctcctcttctccaaggacgaggacatttcgttgactctgaacatgaacgaggaagaagtggagaagcgctttgagggtcggctcaccaagaacatgtcaggatccctctatgagatggtcagccgggtcatgaaagcactggtaaaccgcaagatcacagtgccaggcaacttccaagggcactcaggggcccagtgcattacctgttcctacaaggcaagctcaggactgctctacccgctggagcggggcttcatctacgtccacaagccacctgtgcacatccgcttcgatgagatctcctttgtcaactttgctcgtggtaccactactactcgttcctttgactttgaaattgagaccaagcagggcactcagtataccttcagcagcattgagagggaggagtacgggaaactgtttgattttgtcaacgcgaaaaagctcaacatcaaaaaccgaggattgaaagagggcatgaacccaagctacgatgaatatgctgactctgatgaggaccagcatgatgcctacttggagaggatgaaggaggaaggcaagatccgggaggagaatgccaatgacagcagcgatgactcaggagaagaaaccgatgagtcattcaacccaggtgaagaggaggaagatgtggcagaggagtgagttttggtggtaccttgtggggataagatggtgacccataagcttaagggaccagaagatttctggacatttctcaggtcccagcattagctactgacccagaatgggagagtgacctccaatgaggtgatatacgaaaatgttttggaaattgtcaagggctttgtaagtgcaagacatattttgaagtcggaaaagtatagtgggatctatggccataccgccctgaatgtgccagttggggctggttcgtagttggatgaggagagaatgggaatgagctggtgcttgccacttacttgctgggggttgtcgagtaagtcattgaatctcaatttcctcatcagtagaaatgcagtagtacccctgctaaattggttaagactttttgttagcagtgtcagaaatgtgattcactctcactttaaaagggaacatataaaagggaatttcataagttcatattactgcggagtctggggatttaattggcttcagacactactggattcaggcgctcaaatctatttcttccgatttcctt

SEQ ID NO: 56842 - DNA, 959 bp, Homo sapiens
  misc_feature (7)..(7): n is a, c, g, or t
  misc_feature (11)..(11): n is a, c, g, or t
aattcgnggcngcgtcgacaagtgaagaagggcaaagaccccaatgcccccaagaggcccatgtctgcatacatgctgtggctcaatgccagccgagagaagatcaagtcagaccatcctggcatcagcatcacggatctttccaagaaggcaggcgagatctggaagggaatgtccaaagagaagaaagaggagtgggatcgcaaggctgaggatgccaggagggactatgaaaaagccatgaaagaatatgaagggggccgaggcgagtcttctaagagggacaagtcaaagaagaagaagaaagtaaaggtaaagatggaaaagaaatccacgccctctaggggctcatcatccaagtcgtcctcaaggcagctaagcgagagcttcaagagcaaagagtttgtgtctagtgatgagagctcttcgggagagaacaagagcaaaaagaagaggaggaggagcgaggactctgaagaagaagaactagccagtactccccccagctcagaggactcagcgtcaggatccgatgagtagaaacggaggaaggttctctttgcgcttgccttctcacaccccccgactccccacccatattttggtaccagtttctcctcatgaaatgcagtccctggattctgtgccatctgaacatgctctcctgttggtgtgtatgtcactagggcagtggggagacgtcttaactctgctgcttcccaaggatggctgtttataatttggggagagatagggtgggaggcagggcaatgcaggatccaaatcctcatcttactttcccgaccttaaggatgtagctgctgcttgtcctgttcaagttgctggagcaggggtcatgtgaggccaggcctgtagctcctacctggggcctatttctactttcattttgtatttctggtctgtgaaaatgatttaataaagggaactgactttggaaa

SEQ ID NO: 56843 - DNA, 1121 bp, Homo sapiens
tggcgtccctggtctaggcggagaaccccttgggcgatgagtgagaacctcgacaacgagggcccgaagcccatggagagctgtggccaggagagcagcagtgccctgagctgccctaccgtctcggtgccccctgcagccccggcagccctggaggaggtggagaaagagggcgctggggcggctacagggccggggcctcagcccgggctctacagctacatcagggatgacttgtttacctctgagatctttaaactggagctgcagaacgtgcctcgccacgccagcttcagcgacgtccggcgcttcctgggccgctttggtctgcagccccacaaagagaagaaagaggagtgggatcgcaaggctgaggatgccaggagggactatgaaaaagccatgaaagaatatgaagggggccgaggcgagtcttctaagagggacaagtcaaagaagaagaagaaagtaaaggtaaagatggaaaagaaatccacgccctctaggggctcatcatccaagtcgtcctcaaggcagctaagcgagagcttcaagagcaaagagtttgtgtctagtgatgagagctcttcgggagagaacaagagcaaaaagaagaggaggaggagcgaggactctgaagaagaagaactagccagtactccccccagctcagaggactcagcgtcaggatccgatgagtagaaacggaggaaggttctctttgcgcttgccttctcacaccccccgactccccacccatattttggtaccagtttctcctcatgaaatgcagtccctggattctgtgccatctgaacatgctctcctgttggtgtgtatgtcactagggcagtggggagacgtcttaactctgctgcttcccaaggatggctgtttataatttggggagagatagggtgggaggcagggcaatgcaggatccaaatcctcatcttactttcccgaccttaaggatgtagctgctgcttgtcctgttcaagttgctggagcaggggtcatgtgaggccaggcctgtagctcctacctggggcctatttctactttcattttgtatttctggtctgtgaaaatgatttaataaagggaactgactttggaaa

SEQ ID NO: 56844 - DNA, 1533 bp, Homo sapiens
cctctctgtgaattccgtacggcttccggtggcgggacgcggggccgcgcacgcgggaaaagcttccccggtgtccccccatccccctccccgcgccccccccgcgtccccccagcgcgcccacctctcgcgccggggccctcgcgaggccgcagcctgaggagattcccaacctgctgagcatccgcacacccactcaggagttggggcccagctcccagtttacttggtttcccttgtgcagcctggggctctgcccaggccaccacaggcaggggtcgacatggcagagacactggagttcaacgacgtctatcaggaggtgaaaggttccatgaatgatggtcgactgaggttgagccgtcagggcatcatcttcaagaatagcaagacaggcaaagtggacaacatccaggctggggagttaacagaaggtatctggcgccgtgttgctctgggccatggacttaaactgcttacaaagaatggccatgtctacaagtatgatggcttccgagaatcggagtttgagaaactctctgatttcttcaaaactcactatcgccttgagctaatggagaaggacctttgtgtgaagggctggaactgggggacagtgaaatttggtgggcagctgctttcctttgacattggtgaccagccagtctttgagatacccctcagcaatgtgtcccagtgcaccacaggcaagaatgaggtgacactggaattccaccaaaacgatgacgcagaggtgtctctcatggaggtgcgcttctacgtcccacccacccaggaggatggtgtggaccctgttgaggcctttgcccagaatgtgttgtcaaaggcggatgtaatccaggccacgggagatgccatctgcatcttccgggagctgcagtgtctgactcctcgtggtcgttatgacattcggatctaccccacctttctgcacctgcatggcaagacctttgactacaagatcccctacaccacagtactgcgtctgtttttgttaccccacaaggaccagcgccagatgttctttgtgatcagcctggatcccccaatcaagcaaggccaaactcgctaccacttcctgatcctcctcttctccaaggacgaggacatttcgttgactctgaacatgaacgaggaagaagtggagaagcgctttgagggtcggctcaccaagaacatgtcaggatccctctatgagatggtcagccgggtcatgaaagcactggtaaaccgcaagatcacagtgccaggcaacttccaagggcactcaggggcccagtgcattacctgttcctacaaggcaagctcaggactgctctacccgctggagcggggcttcatctacgtccacaagccacctgtgcacatccgcttcgatgagatctcctttgtcaactttgctcgtggtaccactactactcgttatgttcagagtcaacgaaatgtcctcgtccttggagaagaggagatcaggaagtggtagcgagtatggcatagcactgtttgattaaa

SEQ ID NO: 56845 - DNA, 1010 bp, Homo sapiens
  misc_feature (949)..(949): n is a, c, g, or t
cctctctgtgaattccgtacggcttccggtggcgggacgcggggccgcgcacgcgggaaaagcttccccggtgtccccccatccccctccccgcgccccccccgcgtccccccagcgcgcccacctctcgcgccggggccctcgcgaggccgcagcctgaggagattcccaacctgctgagcatccgcacacccactcaggagttggggcccagctcccagtttacttggtttcccttgtgcagcctggggctctgcccaggccaccacaggcaggggtcgacatggcagagacactggagttcaacgacgtctatcaggaggtgaaaggttccatgaatgatggtcgactgaggttgagccgtcagggcatcatcttcaagaatagcaagacaggcaaagtggacaacatccaggctggggagttaacagaaggtatctggcgccgtgttgctctgggccatggacttaaactgcttacaaagaatggccatgtctacaagtatgatggcttccgagaatcggagtttgagaaactctctgatttcttcaaaactcactatcgccttgagctaatggagaaggacctttgtgtgaagggctggaactgggggacagtgaaatttggtgggcagctgctttcctttgacattggtgaccagccagtctttgagatacccctcagcaatgtgtcccagtgcaccacaggcaagaatgaggtgacactggaattccaccaaaacgatgacgcagaggtgtctctcatggaggtgcgcttctacgtcccacccacccaggaggatggtgtggaccctgttgaggcctttgcccagaatgtgttgtcaaaggcggatgtaatccaggccacgggagatgccatctgcatcttccgggagctgcagtgtctgactcctcgtggtcgttatgacattcggatcttgtagtcaagntcttgccatgcaggtgcagaaaggtgggcctcggccgattaaccccggctctactgagcca

SEQ ID NO: 56846 - DNA, 494 bp, Homo sapiens
gcactacctctctggtaacatggtgcatgtcccctcacagggaggagtacgggaaactgtttgattttgtcaacgcgaaaaagctcaacatcaaaaaccgaggattgaaagaggtacttctgtgtggggaggatgagaccctctcctggtctttctataggggagaaaggggtggagattttttccggcttctttttcactctttcttctcttcttacccttatagaaaaaagaggtgcgtgtgaccctttccccctcctggtgcaggtttcctctgcatgaccttagaccagtctatgcagcccctcaggagcccccagtggggctgggagagggaggggcttggggcttggactaacccagttggcaggaagtacttgggcataggccctgcacgttggctgtgtgtggacaatccagccccaggtcttctgggagctgctgctctgacttgacaggcatgggggtgtgcttttgagtgtgcagggattctg

SEQ ID NO: 56847 - DNA, 567 bp, Homo sapiens
gcgcctctgtcagaacagctcagtgaggtttacttagtcgaggacatgagcactcgtgtcgctgctgctagatacgccctttgcctctgctgaggttggcactaaccaggctccctgcaccctctgtcaggcactcaggggcccagtgcattacctgttcctacaaggcaagctcaggactgctctacccgctggagcggggcttcatctacgtccacaagccacctgtgcacatccgcttcgatgagatctcctttgtcaactttgctcgtggtaccactactactcgttcctttgactttgaaattgagaccaagcagggcactcagtataccttcagcagcattgagaggtgagaacctccacctgtcacttcctgggcatcctggtcccgagccagctttgtctaggaaggctggcgtggcctggggcactctccaaccctagagcagaatttttcttttgctacatcaggatttggtccttttccctggagtgctcagactttagaaacctctccattgctttctttctggtcattaaaaaaacaaaacaaaacaaaacaaa

SEQ ID NO: 56848 - DNA, 2227 bp, Homo sapiens
cggtaccccctggctctgaacttaggcagctgctttcctttgacattggtgaccagccagtctttgagatacccctcagcaatgtgtcccagtgcaccacaggcaagaatgaggtgacactggaattccaccaaaacgatgacgcagaggtgtctctcatggaggtgcgcttctacgtcccacccacccaggaggatggtgtggaccctgttgaggcctttgcccagaatgtgttgtcaaaggcggatgtaatccaggccacgggagatgccatctgcatcttccgggagctgcagtgtctgactcctcgtggtcgttatgacattcggatctaccccacctttctgcacctgcatggcaagacctttgactacaagatcccctacaccacagtactgcgtctgtttttgttaccccacaaggaccagcgccagatgttctttgtgatcagcctggatcccccaatcaagcaaggccaaactcgctaccacttcctgatcctcctcttctccaaggacgaggacatttcgttgactctgaacatgaacgaggaagaagtggagaagcgctttgagggtcggctcaccaagaacatgtcaggatccctctatgagatggtcagccgggtcatgaaagcactggtaaaccgcaagatcacagtgccaggcaacttccaagggcactcaggggcccagtgcattacctgttcctacaaggcaagctcaggactgctctacccgctggagcggggcttcatctacgtccacaagccacctgtgcacatccgcttcgatgagatctcctttgtcaactttgctcgtggtaccactactactcgttcctttgactttgaaattgagaccaagcagggcactcagtataccttcagcagcattgagagggaggagtacgggaaactgtttgattttgtcaacgcgaaaaagctcaacatcaaaaaccgaggattgaaagagggcatgaacccaagctacgatgaatatgctgactctgatgaggaccagcatgatgcctacttggagaggatgaaggaggaaggcaagatccgggaggagaatgccaatgacagcagcgatgactcaggagaagaaaccgatgagtcattcaacccaggtgaagaggaggaagatgtggcagaggagtttgacagcaacgcctctgccagctcctccagtaatgagggtgacagtgaccgggatgagaagaagcggaaacagctcaaaaaggccaagatggccaaggaccgcaagagccgcaagaagcctgtggaggtgaagaagggcaaagaccccaatgcccccaagaggcccatgtctgcatacatgctgtggctcaatgccagccgagagaagatcaagtcagaccatcctggcatcagcatcacggatctttccaagaaggcaggcgagatctggaagggaatgtccaaagagaagaaagaggagtgggatcgcaaggctgaggatgccaggagggactatgaaaaagccatgaaagaatatgaagggggccgaggcgagtcttctaagagggacaagtcaaagaagaagaagaaagtaaaggtaaagatggaaaagaaatccacgccctctaggggctcatcatccaagtcgtcctcaaggcagctaagcgagagcttcaagagcaaagagtttgtgtctagtgatgagagctcttcgggagagaacaagagcaaaaagaagaggaggaggagcgaggactctgaagaagaagaactagccagtactccccccagctcagaggactcagcgtcaggatccgatgagtagaaacggaggaaggttctctttgcgcttgccttctcacaccccccgactccccacccatattttggtaccagtttctcctcatgaaatgcagtccctggattctgtgccatctgaacatgctctcctgttggtgtgtatgtcactagggcagtggggagacgtcttaactctgctgcttcccaaggatggctgtttataatttggggagagatagggtgggaggcagggcaatgcaggatccaaatcctcatcttactttcccgaccttaaggatgtagctgctgcttgtcctgttcaagttgctggagcaggggtcatgtgaggccaggcctgtagctcctacctggggcctatttctactttcattttgtatttctggtctgtgaaaatgatttaataaagggaactgactttggaaa

SEQ ID NO: 56849 - DNA, 3253 bp, Homo sapiens
cctctctgtgaattccgtacggcttccggtggcgggacgcggggccgcgcacgcgggaaaagcttccccggtgtccccccatccccctccccgcgccccccccgcgtccccccagcgcgcccacctctcgcgccggggccctcgcgaggccgcagcctgaggagattcccaacctgctgagcatccgcacacccactcaggagttggggcccagctcccagtttacttggtttcccttgtgcagcctggggctctgcccaggccaccacaggcaggggtcgacatggcagagacactggagttcaacgacgtctatcaggaggtgaaaggttccatgaatgatggtcgactgaggttgagccgtcagggcatcatcttcaagaatagcaagacaggcaaagtggacaacatccaggctggggagttaacagaaggtatctggcgccgtgttgctctgggccatggacttaaactgcttacaaagaatggccatgtctacaagtatgatggcttccgagaatcggagtttgagaaactctctgatttcttcaaaactcactatcgccttgagctaatggagaaggacctttgtgtgaagggctggaactgggggacagtgaaatttggtgggcagctgctttcctttgacattggtgaccagccagtctttgagatacccctcagcaatgtgtcccagtgcaccacaggcaagaatgaggtgacactggaattccaccaaaacgatgacgcagaggtgtctctcatggaggtgcgcttctacgtcccacccacccaggaggatggtgtggaccctgttgaggcctttgcccagaatgtgttgtcaaaggcggatgtaatccaggccacgggagatgccatctgcatcttccgggagctgcagtgtctgactcctcgtggtcgttatgacattcggatctaccccacctttctgcacctgcatggcaagacctttgactacaagatcccctacaccacagtactgcgtctgtttttgttaccccacaaggaccagcgccagatgttctttgtgatcagcctggatcccccaatcaagcaaggccaaactcgctaccacttcctgatcctcctcttctccaaggacgaggacatttcgttgactctgaacatgaacgaggaagaagtggagaagcgctttgagggtcggctcaccaagaacatgtcaggatccctctatgagatggtcagccgggtcatgaaagcactggtaaaccgcaagatcacagtgccaggcaacttccaagggcactcaggggcccagtgcattacctgttcctacaaggcaagctcaggactgctctacccgctggagcggggcttcatctacgtccacaagccacctgtgcacatccgcttcgatgagatctcctttgtcaactttgctcgtggtaccactactactcgttcctttgactttgaaattgagaccaagcagggcactcagtataccttcagcagcattgagagggaggagtacgggaaactgtttgattttgtcaacgcgaaaaagctcaacatcaaaaaccgaggattgaaagagggcatgaacccaagctacgatgaatatgctgactctgatgaggaccagcatgatgcctacttggagaggatgaaggaggaaggcaagatccgggaggagaatgccaatgacagcagcgatgactcaggagaagaaaccgatgagtcattcaacccaggtgaagaggaggaagatgtggcagaggagtttgacagcaacgcctctgccagctcctccagtaatgagggtgacagtgaccgggatgagaagaagcggaaacagctcaaaaaggccaagatggccaaggaccgcaagagccgcaagaagcctgtggaggtgaagaagggcaaagaccccaatgcccccaagaggcccatgtctgcatacatgctgtggctcaatgccagccgagagaagatcaagtcagaccatcctggcatcagcatcacggatctttccaagaaggcaggcgagatctggaagggaatgtccaaagagaagaaagaggagtgggatcgcaaggctgaggatgccaggagggactatgaaaaagccatgaaagaatatgaagggggccgaggcgagtcttctaagagggacaagtcaaagaagaagaagaaagtaaaggtaaagatggaaaagaaatccacgccctctaggggctcatcatccaagtcgtcctcaaggcagctaagcgagagcttcaagagcaaagagtttgtgtctagtgatgagagctcttcgggagagaacaagagcaaaaagaagaggaggaggagcgaggactctgaagaagaagaactagccagtactccccccagctcagaggactcagcgtcaggatccgatgagtagaaacggaggaaggttctctttgcgcttgccttctcacaccccccgactccccacccatattttggtaccagtttctcctcatgaaatgcagtccctggattctgtgccatctgaacatgctctcctgttggtgtgtatgtcactagggcagtggggagacgtcttaactctgctgcttcccaaggatggctgtttataatttggggagagatagggtgggaggcagggcaatgcaggatccaaatcctcatcttactttcccgaccttaaggatgtagctgctgcttgtcctgttcaagttgctggagcaggggtcatgtgaggccaggcctgtagctcctacctggggcctatttctactttcattttgtatttctggtctgtgaaaatgatttaataaagggaactgactttggaaaaaaaaaaaaaaaaaaaaaaaaaaaaaaaaaaaaaaaaaaaaaaaaaaaaaaaaaaaaaaaaaaagagggggggggcggcgccccaaagaaatccccccgggggggcgccccagggcgacgcccccccgttttgggcgagagagagggggccccccataggggaagaggcgcataataaatagaggcagagaaccggcgggcgcgcgcggattataaacacaagccaggacggagggagggagagaaaacaacgcgtcgcgagtggggagaagccattcttggtgagaagaagagacacccaacaacgatgaggggggggggggaaacaaaagtgtgggggacaccaacaccacaccgcgacagaagaaaaattaaacagcacgccggcggggaagaagcgagaaactctgcagagcgagta

SEQ ID NO: 56850 - DNA, 2854 bp, Homo sapiens
cctctctgtgaattccgtacggcttccggtggcgggacgcggggccgcgcacgcgggaaaagcttccccggtgtccccccatccccctccccgcgccccccccgcgtccccccagcgcgcccacctctcgcgccggggccctcgcgaggccgcagcctgaggagattcccaacctgctgagcatccgcacacccactcaggagttggggcccagctcccagtttacttggtttcccttgtgcagcctggggctctgcccaggccaccacaggcaggggtcgacatggcagagacactggagttcaacgacgtctatcaggaggtgaaaggttccatgaatgatggtcgactgaggttgagccgtcagggcatcatcttcaagaatagcaagacaggcaaagtggacaacatccaggctggggagttaacagaaggtatctggcgccgtgttgctctgggccatggacttaaactgcttacaaagaatggccatgtctacaagtatgatggcttccgagaatcggagtttgagaaactctctgatttcttcaaaactcactatcgccttgagctaatggagaaggacctttgtgtgaagggctggaactgggggacagtgaaatttggtgggcagctgctttcctttgacattggtgaccagccagtctttgagatacccctcagcaatgtgtcccagtgcaccacaggcaagaatgaggtgacactggaattccaccaaaacgatgacgcagaggtgtctctcatggaggtgcgcttctacgtcccacccacccaggaggatggtgtggaccctgttgaggcctttgcccagaatgtgttgtcaaaggcggatgtaatccaggccacgggagatgccatctgcatcttccgggagctgcagtgtctgactcctcgtggtcgttatgacattcggatctaccccacctttctgcacctgcatggcaagacctttgactacaagatcccctacaccacagtactgcgtctgtttttgttaccccacaaggaccagcgccagatgttctttgtgatcagcctggatcccccaatcaagcaaggccaaactcgctaccacttcctgatcctcctcttctccaaggacgaggacatttcgttgactctgaacatgaacgaggaagaagtggagaagcgctttgagggtcggctcaccaagaacatgtcaggatccctctatgagatggtcagccgggtcatgaaagcactggtaaaccgcaagatcacagtgccaggcaacttccaagggcactcaggggcccagtgcattacctgttcctacaaggcaagctcaggactgctctacccgctggagcggggcttcatctacgtccacaagccacctgtgcacatccgcttcgatgagatctcctttgtcaactttgctcgtggtaccactactactcgttcctttgactttgaaattgagaccaagcagggcactcagtataccttcagcagcattgagagggaggagtacgggaaactgtttgattttgtcaacgcgaaaaagctcaacatcaaaaaccgaggattgaaagagggcatgaacccaagctacgatgaatatgctgactctgatgaggaccagcatgatgcctacttggagaggatgaaggaggaaggcaagatccgggaggagaatgccaatgacagcagcgatgactcaggagaagaaaccgatgagtcattcaacccaggtgaagaggaggaagatgtggcagaggagtttgacagcaacgcctctgccagctcctccagtaatgagggtgacagtgaccgggatgagaagaagcggaaacagctcaaaaaggccaagatggccaaggaccgcaagagccgcaagaagcctgtggaggtgaagaagggcaaagaccccaatgcccccaagaggcccatgtctgcatacatgctgtggctcaatgccagccgagagaagatcaagtcagaccatcctggcatcagcatcacggatctttccaagaaggcaggcgagatctggaagggaatgtccaaagagaagaaagaggagtgggatcgcaaggctgaggatgccaggagggactatgaaaaagccatgaaagaatatgaagggggccgaggcgagtcttctaagagggacaagtcaaagaagaagaagaaagtaaaggtaaagatggaaaagaaatccacgccctctaggggctcatcatccaagtcgtcctcaaggcagctaagcgagagcttcaagagcaaagagtttgtgtctagtgatgagagctcttcgggagagaacaagagcaaaaagaagaggaggaggagcgaggactctgaagaagaagaactagccagtactccccccagctcagaggactcagcgtcaggatccgatgagtagaaacggaggaaggttctctttgcgcttgccttctcacaccccccggaagtcagcagggaaacgcagagaactcctatgaaccaccaaaaggctgtaaatgatgaaacatgcaaagctagccacataacatcaagtgtctttccttcagcctctctcggtaaagcatcatctcgaaagccatttgggatcctttctccaaatgttctgtgcagtatgagtgggaagagtcctgtagagagcagcttgaatgttaaaaccaaaaagaatgcaccatctgcaacgatccaccagggcgaagaagaaggaccacttgatatctgggctgttgtgaaacctggaaataccaaggaaaaaattgcattctttgcatcccaccagtgtagtaacaggataggatctatgaaaataaaaagttcctgggatattgatgggagagctact

SEQ ID NO: 56851 - DNA, 1763 bp, Homo sapiens
tagatgagtcggtaccaacatgcgaacggactgatcctcctcttctccaaggacgaggacatttcgttgactctgaacatgaacgaggaagaagtggagaagcgctttgagggtcggctcaccaagaacatgtcaggatccctctatgagatggtcagccgggtcatgaaagcactggtaaaccgcaagatcacagtgccaggcaacttccaagggcactcaggggcccagtgcattacctgttcctacaaggcaagctcaggactgctctacccgctggagcggggcttcatctacgtccacaagccacctgtgcacatccgcttcgatgagatctcctttgtcaactttgctcgtggtaccactactactcgttcctttgactttgaaattgagaccaagcagggcactcagtataccttcagcagcattgagagggaggagtacgggaaactgtttgattttgtcaacgcgaaaaagctcaacatcaaaaaccgaggattgaaagagggcatgaacccaagctacgatgaatatgctgactctgatgaggaccagcatgatgcctacttggagaggatgaaggaggaaggcaagatccgggaggagaatgccaatgacagcagcgatgactcaggagaagaaaccgatgagtcattcaacccaggtgaagaggaggaagatgtggcagaggagtttgacagcaacgcctctgccagctcctccagtaatgagggtgacagtgaccgggatgagaagaagcggaaacagctcaaaaaggccaagatggccaaggaccgcaagagccgcaagaagcctgtggaggtgaagaagggcaaagaccccaatgcccccaagaggcccatgtctgcatacatgctgtggctcaatgccagccgagagaagatcaagtcagaccatcctggcatcagcatcacggatctttccaagaaggcaggcgagatctggaagggaatgtccaaagagaagaaagaggagtgggatcgcaaggctgaggatgccaggagggactatgaaaaagccatgaaagaatatgaagggggccgaggcgagtcttctaagagggacaagtcaaagaagaagaagaaagtaaaggtaaagatggaaaagaaatccacgccctctaggggctcatcatccaagtcgtcctcaaggcagctaagcgagagcttcaagagcaaagagtttgtgtctagtgatgagagctcttcgggagagaacaagagcaaaaagaagaggaggaggagcgaggactctgaagaagaagaactagccagtactccccccagctcagaggactcagcgtcaggatccgatgagtagaaacggaggaaggttctctttgcgcttgccttctcacaccccccgactccccacccatattttggtaccagtttctcctcatgaaatgcagtccctggattctgtgccatctgaacatgctctcctgttggtgtgtatgtcactagggcagtggggagacgtcttaactctgctgcttcccaaggatggctgtttataatttggggagagatagggtgggaggcagggcaatgcaggatccaaatcctcatcttactttcccgaccttaaggatgtagctgctgcttgtcctgttcaagttgctggagcaggggtcatgtgaggccaggcctgtagctcctacctggggcctatttctactttcattttgtatttctggtctgtgaaaatgatttaataaagggaactgactttggaaa

SEQ ID NO: 56852 - DNA, 1325 bp, Homo sapiens
cccacgcgtccgcgacccacgcgtccgcggacgcgtgggtcgacccacgcgtccgaccgaggattgaaagagggcatgaacccaagctacgatgaatatgctgactctgatgaggaccagcatgatgcctacttggagaggatgaaggaggaaggcaagatccgggaggagaatgccaatgacagcagcgatgactcaggagaagaaaccgatgagtcattcaacccaggtgaagaggaggaagatgtggcagaggagtttgacagcaacgcctctgccagctcctccagtaatgagggtgacagtgaccgggatgagaagaagcggaaacagctcaaaaaggccaagatggccaaggaccgcaagagccgcaagaagcctgtggaggtgaagaagggcaaagaccccaatgcccccaagaggcccatgtctgcatacatgctgtggctcaatgccagccgagagaagatcaagtcagaccatcctggcatcagcatcacggatctttccaagaaggcaggcgagatctggaagggaatgtccaaagagaagaaagaggagtgggatcgcaaggctgaggatgccaggagggactatgaaaaagccatgaaagaatatgaagggggccgaggcgagtcttctaagagggacaagtcaaagaagaagaagaaagtaaaggtaaagatggaaaagaaatccacgccctctaggggctcatcatccaagtcgtcctcaaggcagctaagcgagagcttcaagagcaaagagtttgtgtctagtgatgagagctcttcgggagagaacaagagcaaaaagaagaggaggaggagcgaggactctgaagaagaagaactagccagtactccccccagctcagaggactcagcgtcaggatccgatgagtagaaacggaggaaggttctctttgcgcttgccttctcacaccccccgactccccacccatattttggtaccagtttctcctcatgaaatgcagtccctggattctgtgccatctgaacatgctctcctgttggtgtgtatgtcactagggcagtggggagacgtcttaactctgctgcttcccaaggatggctgtttataatttggggagagatagggtgggaggcagggcaatgcaggatccaaatcctcatcttactttcccgaccttaaggatgtagctgctgcttgtcctgttcaagttgctggagcaggggtcatgtgaggccaggcctgtagctcctacctggggcctatttctactttcattttgtatttctggtctgtgaaaatgatttaataaagggaactgactttggaaa

SEQ ID NO: 56853 - DNA, 1916 bp, Homo sapiens
cctctctgtgaattccgtacggcttccggtggcgggacgcggggccgcgcacgcgggaaaagcttccccggtgtccccccatccccctccccgcgccccccccgcgtccccccagcgcgcccacctctcgcgccggggccctcgcgaggccgcagcctgaggagattcccaacctgctgagcatccgcacacccactcaggagttggggcccagctcccagtttacttggtttcccttgtgcagcctggggctctgcccaggccaccacaggcaggggtcgacatggcagagacactggagttcaacgacgtctatcaggaggtgaaaggttccatgaatgatggtcgactgaggttgagccgtcagggcatcatcttcaagaatagcaagacaggcaaagtggacaacatccaggctggggagttaacagaaggtatctggcgccgtgttgctctgggccatggacttaaactgcttacaaagaatggccatgtctacaagtatgatggcttccgagaatcggagtttgagaaactctctgatttcttcaaaactcactatcgccttgagctaatggagaaggacctttgtgtgaagggctggaactgggggacagtgaaatttggtgggcagctgctttcctttgacattggtgaccagccagtctttgagatacccctcagcaatgtgtcccagtgcaccacaggcaagaatgaggtgacactggaattccaccaaaacgatgacgcagaggtgtctctcatggaggtgcgcttctacgtcccacccacccaggaggatggtgtggaccctgttgaggcctttgcccagaatgtgttgtcaaaggcggatgtaatccaggccacgggagatgccatctgcatcttccgggagctgcagtgtctgactcctcgtggtcgttatgacattcggatctaccccacctttctgcacctgcatggcaagacctttgactacaagatcccctacaccacagtactgcgtctgtttttgttaccccacaaggaccagcgccagatgttctttgtgatcagcctggatcccccaatcaagcaaggccaaactcgctaccacttcctgatcctcctcttctccaaggacgaggacatttcgttgactctgaacatgaacgaggaagaagtggagaagcgctttgagggtcggctcaccaagaacatgtcaggatccctctatgagatggtcagccgggtcatgaaagcactggtaaaccgcaagatcacagtgccaggcaacttccaagggcactcaggggcccagtgcattacctgttcctacaaggcaagctcaggactgctctacccgctggagcggggcttcatctacgtccacaagccacctgtgcacatccgcttcgatgagatctcctttgtcaactttgctcgtggtaccactactactcgttcctttgactttgaaattgagaccaagcagggcactcagtataccttcagcagcattgagagggaggagtacgggaaactgtttgattttgtcaacgcgaaaaagctcaacatcaaaaaccgaggattgaaagagggcatgaacccaagctacgatgaatatgctgactctgatgaggaccagcatgatgcctacttggagaggatgaaggaggaaggcaagatccgggaggagaatgccaatgacagcagcgatgactcaggagaagaaaccgatgagtcattcaacccaggtgaagaggaggaagatgtggcagaggacttgaggcacgcctccttggtcaggtaattattgctgtttccgtcacagcccccatacacaaacagctggcaggagccgtcagtgacatgtaccatcaccatagcatggaggcccggcatcgcccagcatcagccgggatcctgtagagtca

SEQ ID NO: 56854 - DNA, 1137 bp, Homo sapiens
ttggatgtgttcttgatttccttgatcagcttcactttgtccactggcttcgcctcggtcaggcggaccgcgtgaacatgtgtccgttctttcgctatggggtttcttcttccaccgcctcctggtctgctgcagcatgtacagcccctgatatcacaccacccatcggcactagcccaacatcctggatcttcaacgttttcttcaggagctcgttgaggtctgagatttccaagagagtgaggctggcgatgtcctggaccagctgctgtatcttgtggtccgagcggaccggtccgctcggaccatcacggatctttccaagaaggcaggcgagatctggaagggaatgtccaaagagaagaaagaggagtgggatcgcaaggctgaggatgccaggagggactatgaaaaagccatgaaagaatatgaagggggccgaggcgagtcttctaagagggacaagtcaaagaagaagaagaaagtaaaggtaaagatggaaaagaaatccacgccctctaggggctcatcatccaagtcgtcctcaaggcagctaagcgagagcttcaagagcaaagagtttgtgtctagtgatgagagctcttcgggagagaacaagagcaaaaagaagaggaggaggagcgaggactctgaagaagaagaactagccagtactccccccagctcagaggactcagcgtcaggatccgatgagtagaaacggaggaaggttctctttgcgcttgccttctcacaccccccgactccccacccatattttggtaccagtttctcctcatgaaatgcagtccctggattctgtgccatctgaacatgctctcctgttggtgtgtatgtcactagggcagtggggagacgtcttaactctgctgcttcccaaggatggctgtttataatttggggagagatagggtgggaggcagggcaatgcaggatccaaatcctcatcttactttcccgaccttaaggatgtagctgctgcttgtcctgttcaagttgctggagcaggggtcatgtgaggccaggcctgtagctcctacctggggcctatttctactttcattttgtatttctggtctgtgaaaatgatttaataaagggaactgactttggaaa

SEQ ID NO: 56855 - DNA, 1853 bp, Homo sapiens
tagggctatcgtcgaccagcgtcgcgcgaaaaagctcaacatcaaaaaccgaggattgaaagagggcatgaacccaagctacgatgaatatgctgactctgatgaggaccagcatgatgcctacttggagaggatgaaggaggaaggcaagatccgggaggagaatgccaatgacagcagcgatgactcaggagaagaaaccgatgagtcattcaacccaggtgaagaggaggaagatgtggcagaggagtttgacagcaacgcctctgccagctcctccagtaatgagggtgacagtgaccgggatgagaagaagcggaaacagctcaaaaaggccaagatggccaaggaccgcaagagccgcaagaagcctgtggaggtgaagaagggcaaagaccccaatgcccccaagaggcccatgtctgcatacatgctgtggctcaatgccagccgagagaagatcaagtcagaccatcctggcatcagcatcacggatctttccaagaaggcaggcgagatctggaagggaatgtccaaagagaagaaagaggagtgggatcgcaaggctgaggatgccaggagggactatgaaaaagccatgaaagaatatgaagggggccgaggcgagtcttctaagaggtgagtgtcgagaacatggcccagtcactgatttttgtggcagacttttttttttttaacaggccgaagttgagcattggaaagttaaagacagcagagatgcttctgactgcagtagggtagtgcttctcaaacctgggtaggccattgcccaagtatgggtgacacaatagggcattcaagtcactggggaaatatggcctcttttcctggaccattttatttgaaggtatgggggaacgaaaaaaatactattatggagtgcagtgcacagtttgcatgaactctaaaagataaagcaagaaatatcaagtaggttttgcacattgggctgctttaggctgtgccctctgattcttctggtgtactcatgatactctcccttggtgccctccaggctgacgcagctatttacgttcagagtgaaatgggctgtgtggctgggattgggaaaggccttgttaaagctgggagaggtttggtcatggtgacaggggacctgaaggcccagctcctcttccctcttgccaatacagggacaagtcaaagaagaagaagaaagtaaaggtaaagatggaaaagaaatccacgccctctaggggctcatcatccaagtcgtcctcaaggcagctaagcgagagcttcaagagcaaagagtttgtgtctagtgatgagagctcttcgggagagaacaagagcaaaaagaagaggaggaggagcgaggactctgaagaagaagaactagccagtactccccccagctcagaggactcagcgtcaggatccgatgagtagaaacggaggaaggttctctttgcgcttgccttctcacaccccccgactccccacccatattttggtaccagtttctcctcatgaaatgcagtccctggattctgtgccatctgaacatgctctcctgttggtgtgtatgtcactagggcagtggggagacgtcttaactctgctgcttcccaaggatggctgtttataatttggggagagatagggtgggaggcagggcaatgcaggatccaaatcctcatcttactttcccgaccttaaggatgtagctgctgcttgtcctgttcaagttgctggagcaggggtcatgtgaggccaggcctgtagctcctacctggggcctatttctactttcattttgtatttctggtctgtgaaaatgatttaataaagggaactgactttggaaa

SEQ ID NO: 56856 - DNA, 1705 bp, Homo sapiens
cctctctgtgaattccgtacggcttccggtggcgggacgcggggccgcgcacgcgggaaaagcttccccggtgtccccccatccccctccccgcgccccccccgcgtccccccagcgcgcccacctctcgcgccggggccctcgcgaggccgcagcctgaggagattcccaacctgctgagcatccgcacacccactcaggagttggggcccagctcccagtttacttggtttcccttgtgcagcctggggctctgcccaggccaccacaggcaggggtcgacatggcagagacactggagttcaacgacgtctatcaggaggtgaaaggttccatgaatgatggtcgactgaggttgagccgtcagggcatcatcttcaagaatagcaagacaggcaaagtggacaacatccaggctggggagttaacagaaggtatctggcgccgtgttgctctgggccatggacttaaactgcttacaaagaatggccatgtctacaagtatgatggcttccgagaatcggagtttgagaaactctctgatttcttcaaaactcactatcgccttgagctaatggagaaggacctttgtgtgaagggctggaactgggggacagtgaaatttggtgggcagctgctttcctttgacattggtgaccagccagtctttgagatacccctcagcaatgtgtcccagtgcaccacaggcaagaatgaggtgacactggaattccaccaaaacgatgacgcagaggtgtctctcatggaggtgcgcttctacgtcccacccacccaggaggatggtgtggaccctgttgaggcctttgcccagaatgtgttgtcaaaggcggatgtaatccaggccacgggagatgccatctgcatcttccgggagctgcagtgtctgactactccccacccatattttggtaccagtttctcctcatgaaatgcagtccctggattctgtgccatctgaacatgctctcctgttggtgtgtatgtcactagggcagtggggagacgtcttaactctgctgcttcccaaggatggctgtttataatttggggagagatagggtgggaggcagggcaatgcaggatccaaatcctcatcttactttcccgaccttaaggatgtagctgctgcttgtcctgttcaagttgctggagcaggggtcatgtgaggccaggcctgtagctcctacctggggcctatttctactttcattttgtatttctggtctgtgaaaatgatttaataaagggaactgactttggaaaaaaaaaaaaaaaaaaaaaaaaaaaaaaaaaaaaaaaaaaaaaaaaaaaaaaaaaaaaaaaaaaagagggggggggcggcgccccaaagaaatccccccgggggggcgccccagggcgacgcccccccgttttgggcgagagagagggggccccccataggggaagaggcgcataataaatagaggcagagaaccggcgggcgcgcgcggattataaacacaagccaggacggagggagggagagaaaacaacgcgtcgcgagtggggagaagccattcttggtgagaagaagagacacccaacaacgatgaggggggggggggaaacaaaagtgtgggggacaccaacaccacaccgcgacagaagaaaaattaaacagcacgccggcggggaagaagcgagaaactctgcagagcgagta

SEQ ID NO: 56857 - DNA, 302 bp, Homo sapiens
tggactcgtttcctaccactgtccaggcaggagacaggtgtgccattagaaggcagtagtgttgtgacctcaccttgctttctttgtagggaagaagtggagaagcgctttgagggtcggctcaccaagaacatgtcaggatccctctatgagatggtcagccgggtcatgaaagcactggtaaaccgcaagatcacagtgccaggcaacttccaagggtgagagtgtgggcctgggatcctgccctgcctgggtatgggaaatgccgtgtctccttggtaaacccttcctgagatgggaat

SEQ ID NO: 56858 - DNA, 392 bp, Homo sapiens
acccatgcctgactccatcgttgtagttaccacattatttcataattatctgcttatgtgtctggcttctgcatgcttattcattgttctacccctctgtgcacagtgcctggcacagagtaactccctttgcagatactatcgctcggtaacaaatcaccccataatttagtggcttaaaagtgctatttaatcttgctcatggttttgtgggtgtagaatttgggaaggtctcagccaggcagttctcatttgggttctgccatggactggatcacccaaagtctcaagggggtgcatgcaaatgggcttgggttctgccatggctgcattggatgctggcaattggctgggagttggccaggctttccactgaggtgttacatgtggcc

SEQ ID NO: 56859 - DNA, 368 bp, Homo sapiens
gtttctgagttgagctctgatgggcagggatgaatgaatggtgggggcaggggagcatgtcatgttagcgtctctgggtggtggaagatatgagaatgaattggcagaagatccatctggaaggatggagagagggtcatcatagctcatagtagagagctggcggggagtgatggagtcggggctgggaggtcagaagtagccaggcaacgttggatgctgaagccttatgaaggaattttgccattaggttaaagatggcgagaagctgggggtacaaaattcatcaaataggaaaggatatagcacctttgtgctataccaacaaataggaaaggatatagcacactctgtcccccagccactct

SEQ ID NO: 56860 - DNA, 458 bp, Homo sapiens
tcattctccctctttcagtgtggtcctcccttagtgttcctatctcaggaaatgacaccctgttgtgttattcttgactcctttcataccccgcatctcatatacgtatcaggcaatgcctctaccttcaaaatatatccacatctgactactgttcttcacatccaccattattattaccttgggtttaactaccagtttttccttgggttattgtagcttcctaagtggtcctaagtgatcttcctgcttccattcttcttctgctccgtataacattgaacacttcatagtacacagaagctatatgtagaatgtatgatccttgtaaaacataaattatgttaatttgtctgtagagtcttctaacgacttccttttacacttacatacattgcagttttttcctgttgcttgcaatttcctaatagatccattctgtttatttctcttttctc

SEQ ID NO: 56861 - DNA, 815 bp, Homo sapiens
acatgaacaagattttctgaaagactgctatggagtctgagaaaaaatgtcaaagattgaggacatgaagaggaaagaactgacagaggaggtgaagaaaggtgatcaggaagagccatcaaagtgttatcctggaattcaagtgaagacagtgtttcaaagtggaaatgaacagtgtcctgtaaccctcagagtgagactagagtcagaatgcaggcttttctcatttgaaatctcaaggtaagtccaggtcctaacctccacctaaaagttctgccatcaaggaacatctgctcattatcttctgttcacacatcaaatgacttcaatgtgatccctggatgttctccaaagagctgaagggaaataaatattctttctttatcaccaaatacttcaactgcagagtgattgtgctaccaaggcctgaaacttcggaaaaacctgcataacacaaaatataaaatatgccacagagaggatccagagagcccatctccggtcagttatctgtatttgtatgtcaactacagcatcaaaaagcataggcgtggatactaaggaccccctctgtacaccaacgccagtccaaaggacagtgtgtcactgtgaactggaaattcatctctcttcttcattttttttctacctactttatgctttatctctaagttgaggctgtttatggcctcatcctcaattaccttgtccctcattactcccagttaatggagattaagctttgtatcatgacttcctaactaaaattgaaatcacaagacatcacataaataaagttacaaatggattagata

SEQ ID NO: 56862 - DNA, 586 bp, Homo sapiens
acatgaacaagattttctgaaagactgctatggagtctgagaaaaaatgtcaaagattgaggacatgaagaggaaagaactgacagaggaggtgaagaaaggtgatcaggaagagccatcaaagtgttatcctggaattcaagtgaagacagtgtttcaaagtggaaatgaacagtgtcctgtaaccctcagagtgagactagagtcagaatgcaggcttttctcatttgaaatctatatgccacagagaggatccagagagcccatctccggtcagttatctgtatttgtatgtcaactacagcatcaaaaagcataggcgtggatactaaggaccccctctgtacaccaacgccagtccaaaggacagtgtgtcactgtgaactggaaattcatctctcttcttcattttttttctacctactttatgctttatctctaagttgaggctgtttatggcctcatcctcaattaccttgtccctcattactcccagttaatggagattaagctttgtatcatgacttcctaactaaaattgaaatcacaagacatcacataaataaagttacaaatggattagata

SEQ ID NO: 56863 - DNA, 930 bp, Homo sapiens
ggtcgaccacgcgtcgccacgcgtcgccacgcgtccatgttggccaggctggtctcgaactcctgacctcaggtgatccacccgcctcggcctcccaaagtgctgggattacaggcgtgagccgccgtgcccggcccccttttcttttcaaagcagaactacaaagatgagaaattaccagaagcctcgccttttcctaagcaccagcggaaggagctgtgccccgggatggagtgagggtggagggcgcgtcagccacgggtgggccttgtgtcgccttgtatcggcccaggtaggttgttggcctcttacttgggctgacctgacccccgaaagagaaacagacaactctgttctcaggattggggatggacggcttcggccaagcgttttagcctcattcactcaggccccactcagcactctgccagccaagaccattgatttggaaaatccggtccccacccgctaatgagctgttgacactgttgttccttgctgaattggattgttgacttgtagttcagaggcgtacaactagttggcgattagacttgttatgtgatgttaccagcctgaaatgcgatcaccccgtaggaaataaagcaggcatctctggacctcatccaccctgggcctctgctgtccttgatcacaaaagttgtttttgcttgtggtcctgtgctctatcggggtgggcagtggaggatacctggtagctgggagctgagtcccaggagttttgagacccccaggatgtagcatctgtcacatcctcttggcttccggcagccaggaagctcatttggatgaccgtggcagaggcagatccctcctgcagccctggccaccgtctctcctggtttgacttggccctggacggagggtgaatcctcagatcgcgtaccttgctgtggacattcttgccca

SEQ ID NO: 56864 - DNA, 1205 bp, Homo sapiens
gagcggggtcgcagccgcctgcccgccctgcggtgggccaggatgtcgggcttcctggaggagctgctcggcgagaagctggtgacgggcggcggcgaggaggtggacgtgcactcgctgggcgcccgcggcatctcgctgctgggtctctacttcggctgcagcctcagcgccccctgcgcgcagctcagcgccagcctggccgccttctacgggcgcctgcggggggacgcggcggccgggccggggccgggagcgggggccggggcggcggcggagcccgagccgcggcggcgcctggagatcgtcttcgtgtcctcggaccaggaccagcggcagtggcaggacttcgtgcgggacatgccgtggctggcgctgccctacaaggagaagcacaggaagctcaaactttggaacaaataccgaatttccaacattccatcactaatattcctcgacgccaccactgggaaggttgtgtgcaggaacgggctgctggtgatccgagatgacccagaaggtaaaacctcagcccgtgcatatggtcctcttattacccagccctccctcctccatgcccttaggctaatctccgtcccaccggtggagagagtactggtgaaatagatacacgtgggtttacgtggtagagaatgtcgtcttggtgaaatcatagtattccctaggacatggttttaagattttcacagggatcagaatgtccctcctaggggctttaattcatgggccaaaagagatggactctgccgtaagaagctccgcttggagggccgcagaggctgtgggaaagcggagagctcagaccccggcctctagtgctgcatccgtggcggctgcccccttcacagttagaggcaggctgagtggggtttttcctctttaaaacattacatagcgaagtcccagcccccgtgtcactctcctggccttggcggtgagtgcacctcgttgcttggagctgtcactccctgcgggccttggtcttgctggctacgcgtgggctgtgctcctccagccgccccgctcagggccgtccgcgtggcgtctttccctctggcagtgagtgagaacagggctgtgagatctcctcccctcacttaatccgtccagtgagaagattcaaccccgctcacacattttcccagtaaaaatgccacctacttcaaagaattgtcctcagtaaa

SEQ ID NO: 56865 - DNA, 2954 bp, Homo sapiens
gagcggggtcgcagccgcctgcccgccctgcggtgggccaggatgtcgggcttcctggaggagctgctcggcgagaagctggtgacgggcggcggcgaggaggtggacgtgcactcgctgggcgcccgcggcatctcgctgctgggtctctacttcggctgcagcctcagcgccccctgcgcgcagctcagcgccagcctggccgccttctacgggcgcctgcggggggacgcggcggccgggccggggccgggagcgggggccggggcggcggcggagcccgagccgcggcggcgcctggagatcgtcttcgtgtcctcggaccaggaccagcggcagtggcaggacttcgtgcgggacatgccgtggctggcgctgccctacaaggagaagcacaggaagctcaaactttggaacaaataccgaatttccaacattccatcactaatattcctcgacgccaccactgggaaggttgtgtgcaggaacgggctgctggtgatccgagatgacccagaaggtctggagttcccctggggaccgaaacccttcagggaagtcattgcagggcccttgcttagaaacaatgggcagtctctggagagcagcagcctggaggggtctcacgtgggcgtctatttctccgcacattggtgtccgccctgccgaagcctcacccgggtcctggtggaatcctaccggaagatcaaggaggcaggccagaacttcgagatcatcttcgttagtgcagacaggtcggaggagtccttcaaacagtacttcagtgagatgccctggctcgccgtcccctacacggatgaggcccggcggtcgcgcctcaaccggctgtacggaatccaaggcatccccacgctcatcatgctggacccgcagggcgaggtgatcacgcggcaggggcgggtggaggtgctgaacgacgaggactgccgggagttcccctggcaccccaagcccgtgctggagctctccgactccaacgccgcgcagcttaacgagggcccctgcctcgtcctttttgtagattctgaggatgacggagagtccgaggcggccaagcagctgattcagccgatagctgagaaaatcattgccaagtacaaagccaaagaggaggaggcaccccttctgttcttcgtagccggggaggatgacatgactgactccctgcgagattacaccaacctgcctgaggctgcccctttgctcaccatcctggacatgtcagcccgggccaagtacgtgatggacgtggaggagatcacccccgccatcgtggaggcctttgtgaatgacttcctagcagagaagctcaaaccggagcccatctagcgtggctccggcctcctgagacgttatttaaaactcagccttctcctcctccccctccttccttccgcccttggacttacccagcgtgccccgaatcccaccacccaagtgtccagcctctctgtggtgccttgtttctgcagtaaactcctcagccagcaccctggggtgtggaatcagcagcggcagagtccaccgtgtttggagactctgtttgggagcacgggatggccgggggcccggccagagcggggctgcatggctttcgcaaagtcactagcttttggtgaaggatctgccagggtgtcctgggcagagtgagcgtggagggccggtgggtcccgctcgggctctgactctgacgtcggcacacacggccccggacggccagaggggaaccgccgggtgacacctgcgtggaggctgagctgagaaagggcctccgcttagagctgcgggtgaggacgtccttttctaagcgacacagtcttcctcggtctgagagaaaagcagcccactcttgtgttctcaggcaggggatctccaaatgcaaaaggaagcttgtagaggttttttgggtgagaagaaaaatgtagctaaggtaatggttcatatcatacaaacagctcccacgatcctgaaattctgttaacgaatccttctctttggacatcttcccaagaaacttagccctgagtcctaggaggagcacctctgcaccagcacggacctctcgctccacccagctctgtgcccaaggcccctgatctctgctgaggtgcccacgcccacgttcgatcacccctgccattcccttttattttcttttttttgagatggagtcttgctctgtcgcccaggctggagtgcagtggcaccatcttggctcacttcaacctccgcccccaaggttcaagtgattctcctgcctcagcctcccgagtagctgggattacaggcacccgccaccgtacctggctaatttttgtatttttagtagagatggggtttcaccatgttggccaggctggtctcgaactcctgacctcaggtgatccacccgcctcggcctcccaaagtgctgggattacaggcgtgagccgccgtgcccggcccccttttcttttcaaagcagaactacaaagatgagaaattaccagaagcctcgccttttcctaagcaccagcggaaggagctgtgccccgggatggagtgagggtggagggcgcgtcagccacgggtgggccttgtgtcgccttgtatcggcccaggtaggttgttggcctcttacttgggctgacctgacccccgaaagagaaacagacaactctgttctcaggattggggatggacggcttcggccaagcgttttagcctcattcactcaggccccactcagcactctgccagccaagaccattgatttggaaaatccggtccccacccgctaatgagctgttgacactgttgttccttgctgaattggattgttgacttgtagttcagaggcgtacaactagttggcgattagacttgttatgtgatgttaccagcctgaaatgcgatcaccccgtaggaaataaagcaggcatctctggacctca

SEQ ID NO: 56866 - DNA, 2766 bp, Homo sapiens
ttcaccggaaccgagcaacggtaactgtgccccttcaccggaaccgagcaatggcagacgtgtcccttcaccggaacccagcaacggtaactgtgtcctttcaccgaaactgagcaatggttaacgtgtttcctcactcagttcccaggcattgctgctgctgatctggggaacacactgtatgagcctgacataaacctctacagagctctgtctcaaactttggaacaaataccgaatttccaacattccatcactaatattcctcgacgccaccactgggaaggttgtgtgcaggaacgggctgctggtgatccgagatgacccagaaggtctggagttcccctggggaccgaaacccttcagggaagtcattgcagggcccttgcttagaaacaatgggcagtctctggagagcagcagcctggaggggtctcacgtgggcgtctatttctccgcacattggtgtccgccctgccgaagcctcacccgggtcctggtggaatcctaccggaagatcaaggaggcaggccagaacttcgagatcatcttcgttagtgcagacaggtcggaggagtccttcaaacagtacttcagtgagatgccctggctcgccgtcccctacacggatgaggcccggcggtcgcgcctcaaccggctgtacggaatccaaggcatccccacgctcatcatgctggacccgcagggcgaggtgatcacgcggcaggggcgggtggaggtgctgaacgacgaggactgccgggagttcccctggcaccccaagcccgtgctggagctctccgactccaacgccgcgcagcttaacgagggcccctgcctcgtcctttttgtagattctgaggatgacggagagtccgaggcggccaagcagctgattcagccgatagctgagaaaatcattgccaagtacaaagccaaagaggaggaggcaccccttctgttcttcgtagccggggaggatgacatgactgactccctgcgagattacaccaacctgcctgaggctgcccctttgctcaccatcctggacatgtcagcccgggccaagtacgtgatggacgtggaggagatcacccccgccatcgtggaggcctttgtgaatgacttcctagcagagaagctcaaaccggagcccatctagcgtggctccggcctcctgagacgttatttaaaactcagccttctcctcctccccctccttccttccgcccttggacttacccagcgtgccccgaatcccaccacccaagtgtccagcctctctgtggtgccttgtttctgcagtaaactcctcagccagcaccctggggtgtggaatcagcagcggcagagtccaccgtgtttggagactctgtttgggagcacgggatggccgggggcccggccagagcggggctgcatggctttcgcaaagtcactagcttttggtgaaggatctgccagggtgtcctgggcagagtgagcgtggagggccggtgggtcccgctcgggctctgactctgacgtcggcacacacggccccggacggccagaggggaaccgccgggtgacacctgcgtggaggctgagctgagaaagggcctccgcttagagctgcgggtgaggacgtccttttctaagcgacacagtcttcctcggtctgagagaaaagcagcccactcttgtgttctcaggcaggggatctccaaatgcaaaaggaagcttgtagaggttttttgggtgagaagaaaaatgtagctaaggtaatggttcatatcatacaaacagctcccacgatcctgaaattctgttaacgaatccttctctttggacatcttcccaagaaacttagccctgagtcctaggaggagcacctctgcaccagcacggacctctcgctccacccagctctgtgcccaaggcccctgatctctgctgaggtgcccacgcccacgttcgatcacccctgccattcccttttattttcttttttttgagatggagtcttgctctgtcgcccaggctggagtgcagtggcaccatcttggctcacttcaacctccgcccccaaggttcaagtgattctcctgcctcagcctcccgagtagctgggattacaggcacccgccaccgtacctggctaatttttgtatttttagtagagatggggtttcaccatgttggccaggctggtctcgaactcctgacctcaggtgatccacccgcctcggcctcccaaagtgctgggattacaggcgtgagccgccgtgcccggcccccttttcttttcaaagcagaactacaaagatgagaaattaccagaagcctcgccttttcctaagcaccagcggaaggagctgtgccccgggatggagtgagggtggagggcgcgtcagccacgggtgggccttgtgtcgccttgtatcggcccaggtaggttgttggcctcttacttgggctgacctgacccccgaaagagaaacagacaactctgttctcaggattggggatggacggcttcggccaagcgttttagcctcattcactcaggccccactcagcactctgccagccaagaccattgatttggaaaatccggtccccacccgctaatgagctgttgacactgttgttccttgctgaattggattgttgacttgtagttcagaggcgtacaactagttggcgattagacttgttatgtgatgttaccagcctgaaatgcgatcaccccgtaggaaataaagcaggcatctctggacctca

SEQ ID NO: 56867 - DNA, 2871 bp, Homo sapiens
gagcggggtcgcagccgcctgcccgccctgcggtgggccaggatgtcgggcttcctggaggagctgctcggcgagaagctggtgacgggcggcggcgaggaggtggacgtgcactcgctgggcgcccgcggcatctcgctgctgggtctctacttcggctgcagcctcagcgccccctgcgcgcagctcagcgccagcctggccgccttctacgggcgcctgcggggggacgcggcggccgggccggggccgggagcgggggccggggcggcggcggagcccgagccgcggcggcgcctggagatcgtcttcgtgtcctcggaccaggaccagcggcagtggcaggacttcgtgcgggacatgccgtggctggcgctgccctacaaggagaagcacaggaagctcaaactttggaacaaataccgaatttccaacattccatcactaatattcctcgacgccaccactgggaaggttgtgtgcaggaacgggctgctggtgatccgagatgacccagaaggtctggagttcccctggggaccgaaacccttcagggaagtcattgcagggcccttgcttagaaacaatgggcagtctctggagagcagcagcctggaggggtctcacgtgggcgtctatttctccgcacattggtgtccgccctgccgaagcctcacccgggtcctggtggaatcctaccggaagatcaaggaggcaggccagaacttcgagatcatcttcgttagtgcagacaggtcggaggagtccttcaaacagtacttcagtgagatgccctggctcgccgtcccctacacggatgaggcccggcggtcgcgcctcaaccggctgtacggaatccaaggcatccccacgctcatcatgctggacccgcagggcgaggtgatcacgcggcaggggcgggtggaggtgctgaacgacgaggactgccgggagttcccctggcaccccaagcccgtgctggagctctccgactccaacgccgcgcagcttaacgagggcccctgcctcgtcctttttgtagattctgaggatgacggagagtccgaggcggccaagcagctgattcagccgatagctgagaaaatcattgccaagtacaaagccaaagaggaggaggcaccccttctgttcttcgtagccggggaggatgacatgactgactccctgcgagattacaccaacctgcctgaggctgcccctttgctcaccatcctggacatgtcagcccgggccaagtacgtgatggacgtggaggagatcacccccgccatcgtggaggcctttgtgaatgacttcctagcagagaagctcaaaccggagcccatctagcgtggctccggcctcctgagacgttatttaaaactcagccttctcctcctccccctccttccttccgcccttggacttacccagcgtgccccgaatcccaccacccaagtgtccagcctctctgtggtgccttgtttctgcagtaaactcctcagccagcaccctggggtgtggaatcagcagcggcagagtccaccgtgtttggagactctgtttgggagcacgggatggccgggggcccggccagagcggggctgcatggctttcgcaaagtcactagcttttggtgaaggatctgccagggtgtcctgggcagagtgagcgtggagggccggtgggtcccgctcgggctctgactctgacgtcggcacacacggccccggacggccagaggggaaccgccgggtgacacctgcgtggaggctgagctgagaaagggcctccgcttagagctgcgggtgaggacgtccttttctaagcgacacagtcttcctcggtctgagagaaaagcagcccactcttgtgttctcaggcaggggatctccaaatgcaaaaggaagcttgtagaggttttttgggtgagaagaaaaatgtagctaaggtaatggttcatatcatacaaacagctcccacgatcctgaaattctgttaacgaatccttctctttggacatcttcccaagaaacttagccctgagtcccacgcccacgttcgatcacccctgccattcccttttattttcttttttttgagatggagtcttgctctgtcgcccaggctggagtgcagtggcaccatcttggctcacttcaacctccgcccccaaggttcaagtgattctcctgcctcagcctcccgagtagctgggattacaggcacccgccaccgtacctggctaatttttgtatttttagtagagatggggtttcaccatgttggccaggctggtctcgaactcctgacctcaggtgatccacccgcctcggcctcccaaagtgctgggattacaggcgtgagccgccgtgcccggcccccttttcttttcaaagcagaactacaaagatgagaaattaccagaagcctcgccttttcctaagcaccagcggaaggagctgtgccccgggatggagtgagggtggagggcgcgtcagccacgggtgggccttgtgtcgccttgtatcggcccaggtaggttgttggcctcttacttgggctgacctgacccccgaaagagaaacagacaactctgttctcaggattggggatggacggcttcggccaagcgttttagcctcattcactcaggccccactcagcactctgccagccaagaccattgatttggaaaatccggtccccacccgctaatgagctgttgacactgttgttccttgctgaattggattgttgacttgtagttcagaggcgtacaactagttggcgattagacttgttatgtgatgttaccagcctgaaatgcgatcaccccgtaggaaataaagcaggcatctctggacctca

SEQ ID NO: 56868 - DNA, 3259 bp, Homo sapiens
gagcggggtcgcagccgcctgcccgccctgcggtgggccaggatgtcgggcttcctggaggagctgctcggcgagaagctggtgacgggcggcggcgaggaggtggacgtgcactcgctgggcgcccgcggcatctcgctgctgggtctctacttcggctgcagcctcagcgccccctgcgcgcagctcagcgccagcctggccgccttctacgggcgcctgcggggggacgcggcggccgggccggggccgggagcgggggccggggcggcggcggagcccgagccgcggcggcgcctggagatcgtcttcgtgtcctcggaccaggaccagcggcagtggcaggacttcgtgcgggacatgccgtggctggcgctgccctacaaggagaagcacaggaagctcaaactttggaacaaataccgaatttccaacattccatcactaatattcctcgacgccaccactgggaaggttgtgtgcaggaacgggctgctggtgatccgagatgacccagaaggtctggagttcccctggggaccgaaacccttcagggaagtcattgcagggcccttgcttagaaacaatgggcagtctctggagagcagcagcctggaggggtctcacgtgggcgtctatttctccgcacattggtgtccgccctgccgaagcctcacccgggtcctggtggaatcctaccggaagatcaaggaggcaggccagaacttcgagatcatcttcgttagtgcagacaggtcggaggagtccttcaaacagtacttcagtgagatgccctggctcgccgtcccctacacggatgaggcccggcggtcgcgcctcaaccggctgtacggaatccaaggcatccccacgctcatcatgctggacccgcagggcgaggtgatcacgcggcaggggcgggtggaggtgctgaacgacgaggactgccgggagttcccctggcaccccaagcccgtgctggagctctccgactccaacgccgcgcagcttaacgagggcccctgcctcgtcctttttgtagattctgaggatgacggagagtccgaggcggccaagcagctgattcagccgatagctgagaaaatcattgccaagtacaaagccaaagaggaggaggcaccccttctgttcttcgtagccggggaggatgacatgactgactccctgcgagattacaccaacctgcctgaggctgcccctttgctcaccatcctggacatgtcagcccgggccaagtacgtgatggacgtggaggagatcacccccgccatcgtggaggcctttgtgaatgacttcctagcagagaagctcaaaccggagcccatctagcgtggctccggcctcctgagacgttatttaaaactcagccttctcctcctccccctccttccttccgcccttggacttacccagcgtgccccgaatcccaccacccaagtgtccagcctctctgtggtgccttgtttctgcagtaaactcctcagccagcaccctggggtgtggaatcagcagcggcagagtccaccgtgtttggagactctgtttgggagcacgggatggccgggggcccggccagagcggggctgcatggctttcgcaaagtcactagcttttggtgaaggatctgccagggtgtcctgggcagagtgagcgtggagggccggtgggtcccgctcgggctctgactctgacgtcggcacacacggccccggacggccagaggggaaccgccgggtgacacctgcgtggaggctgagctgagaaagggcctccgcttagagctgcgggtgaggacgtccttttctaagcgacacagtcttcctcggtctgagagaaaagcagcccactcttgtgttctcaggcaggggatctccaaatgcaaaaggaagcttgtagaggttttttgggtgagaagaaaaatgtagctaaggtaatggttcatatcatacaaacagctcccacgatcctgaaattctgttaacgaatccttctctttggacatcttcccaagaaacttagccctgagtcctaggaggagcacctctgcaccagcacggacctctcgctccacccagctctgtgcccaaggcccctgatctctgctgaggtgcccacgcccacgttcgatcacccctgccattcccttttattttcttttttttgagatggagtcttgctctgtcgcccaggctggagtgcagtggcaccatcttggctcacttcaacctccgcccccaaggttcaagtgattctcctgcctcagcctcccgagtagctgggattacaggcacccgccaccgtacctggctaatttttgtatttttagtagagatggggtttcaccatgttggccaggctggtctcgaactcctgacctcaggtgatccacccgcctcggcctcccaaagtgctgggattacaggcgtgagccgccgtgcccggcccccttttcttttcaaagcagaactacaaagatgagaaattaccagaagcctcgccttttcctaagcaccagcggaaggagctgtgccccgggatggagtgagggtggagggcgcgtcagccacgggtgggccttgtgtcgccttgtatcggcccaggtaggttgttggcctcttacttgggctgacctgacccccgaaagagaaacagacaactctgttctcaggattggggatggacggcttcggccaagcgttttagcctcattcactcaggccccactcagcactctgccagccaagaccattgatttggaaaatccggtccccacccgctaatgagctgttgacactgttgttccttgctgaattggattgttgacttgtagttcagaggcgtacaactagttggcgattagacttgttatgtgatgttaccagcctgaaatgcgatcaccccgtaggaaataaagcaggcatctctggacctcatccaccctgggcctctgctgtccttgatcacaaaagttgtttttgcttgtggtcctgtgctctatcggggtgggcagtggaggatacctggtagctgggagctgagtcccaggagttttgagacccccaggatgtagcatctgtcacatcctcttggcttccggcagccaggaagctcatttggatgaccgtggcagaggcagatccctcctgcagccctggccaccgtctctcctggtttgacttggccctggacggagggtgaatcctcagatcgcgtaccttgctgtggacattcttgccca

SEQ ID NO: 56869 - DNA, 2034 bp, Homo sapiens
cggtccgaaactgacatagaggaggaggcccccttctgttcttcgtagccggggaggatgacatgactgactccctgcgagattacaccaacctgcctgaggctgcctcgtcctttttgtagattctgaggatgacggagagtccgaggcggccaagcagctgattcagccgatagctgagaaaatcattgccaagtacaaagccaaagaggaggaggcaccccttctgttcttcgtagccggggaggatgacatgactgactccctgcgagattacaccaacctgcctgaggctgcccctttgctcaccatcctggacatgtcagcccgggccaagtacgtgatggacgtggaggagatcacccccgccatcgtggaggcctttgtgaatgacttcctagcagagaagctcaaaccggagcccatctagcgtggctccggcctcctgagacgttatttaaaactcagccttctcctcctccccctccttccttccgcccttggacttacccagcgtgccccgaatcccaccacccaagtgtccagcctctctgtggtgccttgtttctgcagtaaactcctcagccagcaccctggggtgtggaatcagcagcggcagagtccaccgtgtttggagactctgtttgggagcacgggatggccgggggcccggccagagcggggctgcatggctttcgcaaagtcactagcttttggtgaaggatctgccagggtgtcctgggcagagtgagcgtggagggccggtgggtcccgctcgggctctgactctgacgtcggcacacacggccccggacggccagaggggaaccgccgggtgacacctgcgtggaggctgagctgagaaagggcctccgcttagagctgcgggtgaggacgtccttttctaagcgacacagtcttcctcggtctgagagaaaagcagcccactcttgtgttctcaggcaggggatctccaaatgcaaaaggaagcttgtagaggttttttgggtgagaagaaaaatgtagctaaggtaatggttcatatcatacaaacagctcccacgatcctgaaattctgttaacgaatccttctctttggacatcttcccaagaaacttagccctgagtcctaggaggagcacctctgcaccagcacggacctctcgctccacccagctctgtgcccaaggcccctgatctctgctgaggtgcccacgcccacgttcgatcacccctgccattcccttttattttcttttttttgagatggagtcttgctctgtcgcccaggctggagtgcagtggcaccatcttggctcacttcaacctccgcccccaaggttcaagtgattctcctgcctcagcctcccgagtagctgggattacaggcacccgccaccgtacctggctaatttttgtatttttagtagagatggggtttcaccatgttggccaggctggtctcgaactcctgacctcaggtgatccacccgcctcggcctcccaaagtgctgggattacaggcgtgagccgccgtgcccggcccccttttcttttcaaagcagaactacaaagatgagaaattaccagaagcctcgccttttcctaagcaccagcggaaggagctgtgccccgggatggagtgagggtggagggcgcgtcagccacgggtgggccttgtgtcgccttgtatcggcccaggtaggttgttggcctcttacttgggctgacctgacccccgaaagagaaacagacaactctgttctcaggattggggatggacggcttcggccaagcgttttagcctcattcactcaggccccactcagcactctgccagccaagaccattgatttggaaaatccggtccccacccgctaatgagctgttgacactgttgttccttgctgaattggattgttgacttgtagttcagaggcgtacaactagttggcgattagacttgttatgtgatgttaccagcctgaaatgcgatcaccccgtaggaaataaagcaggcatctctggacctca

SEQ ID NO: 56870 - DNA, 997 bp, Homo sapiens
gtgtccatcccccttcgtgtgtccatcccccttcgtttctgttaacgaatccttctctttggacatcttcccaagaaacttagccctgagtcctaggaggagcacctctgcaccagcacggacctctcgctccacccagctctgtgcccaaggcccctgatctctgctgaggtgcccacgcccacgttcgatcacccctgccattcccttttattttcttttttttgagatggagtcttgctctgtcgcccaggctggagtgcagtggcaccatcttggctcacttcaacctccgcccccaaggttcaagtgattctcctgcctcagcctcccgagtagctgggattacaggcacccgccaccgtacctggctaatttttgtatttttagtagagatggggtttcaccatgttggccaggctggtctcgaactcctgacctcaggtgatccacccgcctcggcctcccaaagtgctgggattacaggcgtgagccgccgtgcccggcccccttttcttttcaaagcagaactacaaagatgagaaattaccagaagcctcgccttttcctaagcaccagcggaaggagctgtgccccgggatggagtgagggtggagggcgcgtcagccacgggtgggccttgtgtcgccttgtatcggcccaggtaggttgttggcctcttacttgggctgacctgacccccgaaagagaaacagacaactctgttctcaggattggggatggacggcttcggccaagcgttttagcctcattcactcaggccccactcagcactctgccagccaagaccattgatttggaaaatccggtccccacccgctaatgagctgttgacactgttgttccttgctgaattggattgttgacttgtagttcagaggcgtacaactagttggcgattagacttgttatgtgatgttaccagcctgaaatgcgatcaccccgtaggaaataaagcaggcatctctggacctca

SEQ ID NO: 56871 - DNA, 534 bp, Homo sapiens
ttacatgatacgactcgagttagtaccctcgatagccaagaccattgatttggaaaatccggtccccacccgctaatgagctgttgacactgttgttccttgctgaattggattgttgacttgtagttcagaggcgtacaactagttggcgattagacttgttatgtgatgttaccagcctgaaatgcgatcaccccgtaggaaataaagcaggcatctctggacctcatccaccctgggcctctgctgtccttgatcacaaaagttgtttttgcttgtggtcctgtgctctatcggggtgggcagtggaggatacctggtagctgggagctgagtcccaggagttttgagacccccaggatgtagcatctgtcacatcctcttggcttccggcagccaggaagctcatttggatgaccgtggcagaggcagatccctcctgcagccctggccaccgtctctcctggtttgacttggccctggacggagggtgaatcctcagatcgcgtaccttgctgtggacattcttgccca

SEQ ID NO: 56872 - DNA, 198 bp, Homo sapiens
tgggaggtggagaagcagcgtgacgcagcgggtcttgctgtcctgtctttcagtgtccgccctgccgaagcctcacccgggtcctggtggaatcctaccggaagatcaaggaggcaggccagaacttcgagatcatcttcgttagtgcagacaggtcagtcgtgccgtgaagtgctgggccccttttctgtaggtagc

SEQ ID NO: 56873 - DNA, 492 bp, Homo sapiens
tcactgggaagtcggaggtcggaggtcatggcttctcattctgtggctgagagaaacactagcaggcgcctcaggtcctggcttaggggaagctcagcctcccaggcgggtttgtgaggaattcaatgggaagactgtctacctgggagagcagagctgctcagtgaggcaggttcctcctggggagcccggtgcaggagagcactgtgagctttgctgctgggacgcatgtgcacacacacccatgcatgcggggagcaagacctgcatccaaggggaacttcatttccgttcaggggccgctcaggcgggcgtttctgcagctcaggccccctcggcgggtgccgctctgtttgacaagccagtgctttttctccccgtctttttctacccccgacccaatcacagattctgaggatgacggagagtccgaggcggccaagcagctgattcagccgatagctgagaaaatcattgccaagtacaaagcca

SEQ ID NO: 56874 - DNA, 1194 bp, Homo sapiens
ttcaccggaaccgagcaacggtaactgtgccccttcaccggaaccgagcaatggcagacgtgtcccttcaccggaacccagcaacgctcaaactttggaacaaataccgaatttccaacattccatcactaatattcctcgacgccaccactgggaaggttgtgtgcaggaacgggctgctggtgatccgagatgacccagaaggtctggagttcccctggggaccgaaacccttcagggaagtcattgcagggcccttgcttagaaacaatgggcagtctctggagagcagcagcctggaggggtctcacgtgggcgtctatttctccgcacattggtgtccgccctgccgaagcctcacccgggtcctggtggaatcctaccggaagatcaaggaggcaggccagaacttcgagatcatcttcgttagtgcagacaggtcggaggagtccttcaaacagtacttcagtgagatgccctggctcgccgtcccctacacggatgaggcccggcggtcgcgcctcaaccggctgtacggaatccaaggcatccccacgctcatcatgctggacccgcagggcgaggtgatcacgcggcaggggcgggtggaggtgctgaacgacgaggactgccgggagttcccctggcaccccaagcccgtgctggagctctccgactccaacgccgcgcagcttaacgagggcccctgcctcgtcctttttgtagattctgaggatgacggagagtccgaggcggccaagcagctgattcagccgatagctgagaaaatcattgccaagtacaaagccaaagaggaggaggcaccccttctgttcttcgtagccggggaggatgacatgactgactccctgcgagattacaccaacctgcctgaggctgcccctttgctcaccatcctggacatgtcagcccgggccaagtacgtgatggacgtggaggagatcacccccgccatcgtggaggcctttgtgaatgacttcctagcagagaagctcaaaccggagcccatctagcgtggctccggcctcctgagacgttatttaaaactcagccttctcctcctccccctccttccttccgcccttggacttacccagcgtgccccgaatcccaccacccaagtgtccagcctctctgtggtgccttgtttctgcagtaaactcctcagccagc

SEQ ID NO: 56875 - DNA, 739 bp, Homo sapiens
ttcaccggaaccgagcaacggtaactgtgccccttcaccggaaccgagcaatggcagacgtgtcccttcaccggaacccagcaacggtaactgtgtcctttcaccgaaactgagcaatggttaacgtgtttcctcactcagttcccaggcattgctgctgctgatctggggaacacactgtatgagcctgacataaacctctacagagctctgtctcaaactttggaacaaataccgaatttccaacattccatcactaatattcctcgacgccaccactgggaaggttgtgtgcaggaacgggctgctggtgatccgagatgacccagaaggtctggagttcccctggggaccgaaacccttcagggaagtcattgcagggcccttgcttagaaacaatgggcagtctctggagagcagcagcctggaggggtctcacgtgggcgtctatttctccgcacattggtgtccgccctgccgaagcctcacccgggtcctggtggaatcctaccggaagatcaaggaggcaggccagaacttcgagatcatcttcgttagtgcagacaggtcggaggagtccttcaaacagtacttcagtgagatgccctggctcgccgtcccctacacggatgaggcccggcggtcgcgcctcaaccggctgtacggaatccaaggttctgcggccatgagcgaatttgcaagacacgctgcaaagctgcctgtaatgggccttatgatc

SEQ ID NO: 56876 - DNA, 2638 bp, Homo sapiens
ttcaccggaaccgagcaacggtaactgtgccccttcaccggaaccgagcaatggcagacgtgtcccttcaccggaacccagcaacgctcaaactttggaacaaataccgaatttccaacattccatcactaatattcctcgacgccaccactgggaaggttgtgtgcaggaacgggctgctggtgatccgagatgacccagaaggtctggagttcccctggggaccgaaacccttcagggaagtcattgcagggcccttgcttagaaacaatgggcagtctctggagagcagcagcctggaggggtctcacgtgggcgtctatttctccgcacattggtgtccgccctgccgaagcctcacccgggtcctggtggaatcctaccggaagatcaaggaggcaggccagaacttcgagatcatcttcgttagtgcagacaggtcggaggagtccttcaaacagtacttcagtgagatgccctggctcgccgtcccctacacggatgaggcccggcggtcgcgcctcaaccggctgtacggaatccaaggcatccccacgctcatcatgctggacccgcagggcgaggtgatcacgcggcaggggcgggtggaggtgctgaacgacgaggactgccgggagttcccctggcaccccaagcccgtgctggagctctccgactccaacgccgcgcagcttaacgagggcccctgcctcgtcctttttgtagattctgaggatgacggagagtccgaggcggccaagcagctgattcagccgatagctgagaaaatcattgccaagtacaaagccaaagaggaggaggcaccccttctgttcttcgtagccggggaggatgacatgactgactccctgcgagattacaccaacctgcctgaggctgcccctttgctcaccatcctggacatgtcagcccgggccaagtacgtgatggacgtggaggagatcacccccgccatcgtggaggcctttgtgaatgacttcctagcagagaagctcaaaccggagcccatctagcgtggctccggcctcctgagacgttatttaaaactcagccttctcctcctccccctccttccttccgcccttggacttacccagcgtgccccgaatcccaccacccaagtgtccagcctctctgtggtgccttgtttctgcagtaaactcctcagccagcaccctggggtgtggaatcagcagcggcagagtccaccgtgtttggagactctgtttgggagcacgggatggccgggggcccggccagagcggggctgcatggctttcgcaaagtcactagcttttggtgaaggatctgccagggtgtcctgggcagagtgagcgtggagggccggtgggtcccgctcgggctctgactctgacgtcggcacacacggccccggacggccagaggggaaccgccgggtgacacctgcgtggaggctgagctgagaaagggcctccgcttagagctgcgggtgaggacgtccttttctaagcgacacagtcttcctcggtctgagagaaaagcagcccactcttgtgttctcaggcaggggatctccaaatgcaaaaggaagcttgtagaggttttttgggtgagaagaaaaatgtagctaaggtaatggttcatatcatacaaacagctcccacgatcctgaaattctgttaacgaatccttctctttggacatcttcccaagaaacttagccctgagtcctaggaggagcacctctgcaccagcacggacctctcgctccacccagctctgtgcccaaggcccctgatctctgctgaggtgcccacgcccacgttcgatcacccctgccattcccttttattttcttttttttgagatggagtcttgctctgtcgcccaggctggagtgcagtggcaccatcttggctcacttcaacctccgcccccaaggttcaagtgattctcctgcctcagcctcccgagtagctgggattacaggcacccgccaccgtacctggctaatttttgtatttttagtagagatggggtttcaccatgttggccaggctggtctcgaactcctgacctcaggtgatccacccgcctcggcctcccaaagtgctgggattacaggcgtgagccgccgtgcccggcccccttttcttttcaaagcagaactacaaagatgagaaattaccagaagcctcgccttttcctaagcaccagcggaaggagctgtgccccgggatggagtgagggtggagggcgcgtcagccacgggtgggccttgtgtcgccttgtatcggcccaggtaggttgttggcctcttacttgggctgacctgacccccgaaagagaaacagacaactctgttctcaggattggggatggacggcttcggccaagcgttttagcctcattcactcaggccccactcagcactctgccagccaagaccattgatttggaaaatccggtccccacccgctaatgagctgttgacactgttgttccttgctgaattggattgttgacttgtagttcagaggcgtacaactagttggcgattagacttgttatgtgatgttaccagcctgaaatgcgatcaccccgtaggaaataaagcaggcatctctggacctca

SEQ ID NO: 56877 - DNA, 2682 bp, Homo sapiens
cattacggagtccgtgtatctgccgcggggactttcctaggagaggcgtcactgcaacaggcctaggaggggactggcttgggaaaaaaagaagaatattgtgtgtgatatgcaggaactgagaaatagcctcaaactttggaacaaataccgaatttccaacattccatcactaatattcctcgacgccaccactgggaaggttgtgtgcaggaacgggctgctggtgatccgagatgacccagaaggtctggagttcccctggggaccgaaacccttcagggaagtcattgcagggcccttgcttagaaacaatgggcagtctctggagagcagcagcctggaggggtctcacgtgggcgtctatttctccgcacattggtgtccgccctgccgaagcctcacccgggtcctggtggaatcctaccggaagatcaaggaggcaggccagaacttcgagatcatcttcgttagtgcagacaggtcggaggagtccttcaaacagtacttcagtgagatgccctggctcgccgtcccctacacggatgaggcccggcggtcgcgcctcaaccggctgtacggaatccaaggcatccccacgctcatcatgctggacccgcagggcgaggtgatcacgcggcaggggcgggtggaggtgctgaacgacgaggactgccgggagttcccctggcaccccaagcccgtgctggagctctccgactccaacgccgcgcagcttaacgagggcccctgcctcgtcctttttgtagattctgaggatgacggagagtccgaggcggccaagcagctgattcagccgatagctgagaaaatcattgccaagtacaaagccaaagaggaggaggcaccccttctgttcttcgtagccggggaggatgacatgactgactccctgcgagattacaccaacctgcctgaggctgcccctttgctcaccatcctggacatgtcagcccgggccaagtacgtgatggacgtggaggagatcacccccgccatcgtggaggcctttgtgaatgacttcctagcagagaagctcaaaccggagcccatctagcgtggctccggcctcctgagacgttatttaaaactcagccttctcctcctccccctccttccttccgcccttggacttacccagcgtgccccgaatcccaccacccaagtgtccagcctctctgtggtgccttgtttctgcagtaaactcctcagccagcaccctggggtgtggaatcagcagcggcagagtccaccgtgtttggagactctgtttgggagcacgggatggccgggggcccggccagagcggggctgcatggctttcgcaaagtcactagcttttggtgaaggatctgccagggtgtcctgggcagagtgagcgtggagggccggtgggtcccgctcgggctctgactctgacgtcggcacacacggccccggacggccagaggggaaccgccgggtgacacctgcgtggaggctgagctgagaaagggcctccgcttagagctgcgggtgaggacgtccttttctaagcgacacagtcttcctcggtctgagagaaaagcagcccactcttgtgttctcaggcaggggatctccaaatgcaaaaggaagcttgtagaggttttttgggtgagaagaaaaatgtagctaaggtaatggttcatatcatacaaacagctcccacgatcctgaaattctgttaacgaatccttctctttggacatcttcccaagaaacttagccctgagtcctaggaggagcacctctgcaccagcacggacctctcgctccacccagctctgtgcccaaggcccctgatctctgctgaggtgcccacgcccacgttcgatcacccctgccattcccttttattttcttttttttgagatggagtcttgctctgtcgcccaggctggagtgcagtggcaccatcttggctcacttcaacctccgcccccaaggttcaagtgattctcctgcctcagcctcccgagtagctgggattacaggcacccgccaccgtacctggctaatttttgtatttttagtagagatggggtttcaccatgttggccaggctggtctcgaactcctgacctcaggtgatccacccgcctcggcctcccaaagtgctgggattacaggcgtgagccgccgtgcccggcccccttttcttttcaaagcagaactacaaagatgagaaattaccagaagcctcgccttttcctaagcaccagcggaaggagctgtgccccgggatggagtgagggtggagggcgcgtcagccacgggtgggccttgtgtcgccttgtatcggcccaggtaggttgttggcctcttacttgggctgacctgacccccgaaagagaaacagacaactctgttctcaggattggggatggacggcttcggccaagcgttttagcctcattcactcaggccccactcagcactctgccagccaagaccattgatttggaaaatccggtccccacccgctaatgagctgttgacactgttgttccttgctgaattggattgttgacttgtagttcagaggcgtacaactagttggcgattagacttgttatgtgatgttaccagcctgaaatgcgatcaccccgtaggaaataaagcaggcatctctggacctca

SEQ ID NO: 56878 - DNA, 3703 bp, Homo sapiens
gagcggggtcgcagccgcctgcccgccctgcggtgggccaggatgtcgggcttcctggaggagctgctcggcgagaagctggtgacgggcggcggcgaggaggtggacgtgcactcgctgggcgcccgcggcatctcgctgctgggtctctacttcggctgcagcctcagcgccccctgcgcgcagctcagcgccagcctggccgccttctacgggcgcctgcggggggacgcggcggccgggccggggccgggagcgggggccggggcggcggcggagcccgagccgcggcggcgcctggagatcgtcttcgtgtcctcggaccaggaccagcggcagtggcaggacttcgtgcgggacatgccgtggctggcgctgccctacaaggagaagcacaggaagctcaaactttggaacaaataccgaatttccaacattccatcactaatattcctcgacgccaccactgggaaggttgtgtgcaggaacgggctgctggtgatccgagatgacccagaaggtctggagttcccctggggaccgaaacccttcagggaagtcattgcagggcccttgcttagaaacaatgggcagtctctggagagcagcagcctggaggggtctcacgtgggcgtctatttctccgcacattggtgtccgccctgccgaagcctcacccgggtcctggtggaatcctaccggaagatcaaggaggcaggccagaacttcgagatcatcttcgttagtgcagacaggtcggaggagtccttcaaacagtacttcagtgagatgccctggctcgccgtcccctacacggatgaggcccggcggtcgcgcctcaaccggctgtacggaatccaaggcatccccacgctcatcatgctggacccgcagggcgaggtgatcacgcggcaggggcgggtggaggtgctgaacgacgaggactgccgggagttcccctggcaccccaagcccgtgctggagctctccgactccaacgccgcgcagcttaacgagggcccctgcctcgtcctttttgtagattctgaggatgacggagagtccgaggcggccaagcagctgattcagccgatagctgagaaaatcattgccaagtacaaagccaaagaggaggaggcaccccttctgttcttcgtagccggggaggatgacatgactgactccctgcgagattacaccaacctgcctgaggctgcccctttgctcaccatcctggacatgtcagcccgggccaagtacgtgatggacgtggaggagatcacccccgccatcgtggaggcctttgtgaatgacttcctagcagagaagctcaaaccggagcccatctagcgtggctccggcctcctgagacgttatttaaaactcagccttctcctcctccccctccttccttccgcccttggacttacccagcgtgccccgaatcccaccacccaagtgtccagcctctctgtggtgccttgtttctgcagtaaactcctcagccagcaccctggggtgtggaatcagcagcggcagagtccaccgtgtttggagactctgtttgggagcacgggatggccgggggcccggccagagcggggctgcatggctttcgcaaagtcactagcttttggtgaaggatctgccagggtgtcctgggcagagtgagcgtggagggccggtgggtcccgctcgggctctgactctgacgtcggcacacacggccccggacggccagaggggaaccgccgggtgacacctgcgtggaggctgagctgagaaagggcctccgcttagagctgcgggtgaggacgtccttttctaagcgacacagtcttcctcggtctgagagaaaagcagcccactcttgtgttctcaggcaggggatctccaaatgcaaaaggaagcttgtagaggttttttgggtgagaagaaaaatgtagctaaggtaatggttcatatcatacaaacagctcccacgatcctgaaattctgttaacgaatccttctctttggacatcttcccaagaaacttagccctgagtcctaggaggagcacctctgcaccagcacggacctctcgctccacccagctctgtgcccaaggcccctgatctctgctgaggtgcccacgcccacgttcgatcacccctgccattcccttttattttcttttttttgagatggagtcttgctctgtcgcccaggctggagtgcagtggcaccatcttggctcacttcaacctccgcccccaaggttcaagtgattctcctgcctcagcctcccgagtagctgggattacaggcacccgccaccgtacctggctaatttttgtatttttagtagagatggggtttcaccatgttggccaggctggtctcgaactcctgacctcaggtgatccacccgcctcggcctcccaaagtgctgggattacaggcgtgagccgccgtgcccggcccccttttcttttcaaagcagaactacaaagatgagaaattaccagaagcctcgccttttcctaagcaccagcggaaggagctgtgccccgggatggagtgagggtggagggcgcgtcagccacgggtgggccttgtgtcgccttgtatcggcccaggtaggttgttggcctcttacttgggctgacctgacccccgaaagagaaacagacaactctgttctcaggattggggatggacggcttcggccaagcgttttagcctcattcactcaggccccactcagcactctgccagccaagaccattgatttggaaaatccggtccccacccgctaatgagctgttgacactgttgttccttgctgaattggattgttgacttgtagttcagaggcgtacaactagttggcgattagacttgttatgtgatgttaccagcctgaaatgcgatcaccccgtaggaaataaagcaggcatctctggacctcaaaaaaaaaaaaaaaaaaaaaaaaaaaaaaaaaaaaaaaaaaaaaaaaaaaaaaaaaaaaaaggggggggcgacaaaaaaatccccggggggcgcccaacaagcggcacccggttgttggaaacaagcgggccccccaaagagaaggcggcaacaattaaaacgccacagcacgcggccaccggtataacaccactgcctagctggagcacacaccaacaagaggcaacctggagagaagagccccacacacgaggggggcgaaccacacacatcttgtcaccacacacatacccaacagagaaaaatataggacacgcgagaaggaaattatcaacaatagaggctattacatacggtgtctataacgcaggacaataatactgggctgcctccgaagcaattgtcttctgtttttttttcttttataatagaacgcgcaaacgccacacagaacgggacaaagggacgaagcagacagaagaagacaggcagaacgaagccacgagaggcggccaacaggaagaagagaagcgggggaggagaagggagaacgagaccgagcagcggcagccagccccagcgaggacgaaggccacccgcggcaagaaggggagaagcgaggaggcagacagaaagacagagcagggaacacagcgaggcgagagccgagagcgaacagaacagcaggaagaggagaggacgaagagaagaagaagcggacgccgcgcgacccccacgacccgatcga

SEQ ID NO: 56879 - DNA, 2599 bp, Homo sapiens
gagcggggtcgcagccgcctgcccgccctgcggtgggccaggatgtcgggcttcctggaggagctgctcggcgagaagctggtgacgggcggcggcgaggaggtggacgtgcactcgctgggcgcccgcggcatctcgctgctgggtctctacttcggctgcagcctcagcgccccctgcgcgcagctcagcgccagcctggccgccttctacgggcgcctgcggggggacgcggcggccgggccggggccgggagcgggggccggggcggcggcggagcccgagccgcggcggcgcctggagatcgtcttcgtgtcctcggaccaggaccagcggcagtggcaggacttcgtgcgggacatgccgtggctggcgctgccctacaaggagaagcacaggaagctcaaactttggaacaaataccgaatttccaacattccatcactaatattcctcgacgccaccactgggaaggttgtgtgcaggaacgggctgctggtgatccgagatgacccagaaggtctggagttcccctggggaccgaaacccttcagggaagtcattgcagggcccttgcttagaaacaatgggcagtctctggagagcagcagcctggaggggtctcacgtgggcgtctatttctccgcacattggtgtccgccctgccgaagcctcacccgggtcctggtggaatcctaccggaagatcaaggaggcaggccagaacttcgagatcatcttcgttagtgcagacaggtcggaggagtccttcaaacagtacttcagtgagatgccctggctcgccgtcccctacacggatgaggcccggcggtcgcgcctcaaccggctgtacggaatccaaggcatccccacgctcatcatgctggacccgcagggcgaggtgatcacgcggcaggggcgggtggaggtgctgaacgacgaggactgccgggagttcccctggcaccccaagcccgtgctggagctctccgactccaacgccgcgcagcttaacgagggcccctgcctcgtcctttttgtagattctgaggatgacggagagtccgaggcggccaagcagctgattcagccgatagctgagaaaatcattgccaagtacaaagccaaagaggaggaggcaccccttctgttcttcgtagccggggaggatgacatgactgactccctgcgagattacaccaacctgcctgaggctgcccctttgctcaccatcctggacatgtcagcccgggccaagtacgtgatggacgtggaggagatcacccccgccatcgtggaggcctttgtgaatgacttcctagcagagaagctcaaaccggagcccatctagcgtggctccggcctcctgagacgttatttaaaactcagccttctcctcctccccctccttccttccgcccttggacttacccagcgtgccccgaatcccaccacccaagtgtccagcctctctgtggtgccttgtttctgcagtaaactcctcagccagcaccctggggtgtggaatcagcagcggcagagtccaccgtgtttggagactctgtttgggagcacgggatggccgggggcccggccagagcggggctgcatggctttcgcaaagtcactagcttttggtgaaggatctgccagggtgtcctgggcagagtgagcgtggagggccggtgggtcccgctcgggctctgactctgacgtcggcacacacggccccggacggccagaggggaaccgccgggtgacacctgcgtggaggctgagctgagaaagggcctccgcttagagctgcgggtgaggacgtccttttctaagcgacacagtcttcctcggtctgagagaaaagcagcccactcttgtgttctcaggcaggggatctccaaatgcaaaaggaagcttgtagaggttttttgggtgagaagaaaaatgtagctaaggtaatggttcatatcatacaaacagctcccacgatcctgaaattctgttaacgaatccttctctttggacatcttcccaagaaacttagccctgagtcctaggaggagcacctctgcaccagcacggacctctcgctccacccagctctgtgcccggcccccttttcttttcaaagcagaactacaaagatgagaaattaccagaagcctcgccttttcctaagcaccagcggaaggagctgtgccccgggatggagtgagggtggagggcgcgtcagccacgggtgggccttgtgtcgccttgtatcggcccaggtaggttgttggcctcttacttgggctgacctgacccccgaaagagaaacagacaactctgttctcaggattggggatggacggcttcggccaagcgttttagcctcattcactcaggccccactcagcactctgccagccaagaccattgatttggaaaatccggtccccacccgctaatgagctgttgacactgttgttccttgctgaattggattgttgacttgtagttcagaggcgtacaactagttggcgattagacttgttatgtgatgttaccagcctgaaatgcgatcaccccgtaggaaataaagcaggcatctctggacctca

SEQ ID NO: 56880 - DNA, 348 bp, Homo sapiens
catctttttacatcaaagtactaccaagtaaagaatttaaaaattacttgtctagtcatgatatatttttctgctgctgctgaaaaatccctgtcttattatttcatgttcctttatcattcatttgatgacactgacagcaacttgctgaacaagtttaagaatagctgatatttactgagcaacctggactttgtactcatgcaggatacagctctcagtattgcactgcatgtaggctgtatgtgctgttcctataatgagtagaggctcatagtccctcagcccagtcctgcctgatatggcagcatatgctgtgaggagattacaaaggaaatcaaaatcatg

SEQ ID NO: 56881 - DNA, 229 bp, Homo sapiens
cagatatgttgctttagtccacaatagtgatgaatgaaccttttctcttcacggagggcttgtgaacaaaagctgaacaagcttcatatcaaagatggcaaatgttttcagtatatcctgaagggatgtatcttcgctgttagtaatctgtggtaaatttcactgtaactatttgatgtaaattgctagcctctgcaagtaagtcacactgtaaataggctctattttt

SEQ ID NO: 56882 - DNA, 141 bp, Homo sapiens
  misc_feature (140)..(141): n is a, c, g, or t
cttgcacaggtgtgccctctcgcatgcccttcttcccttgtttaccttttaaactcttattcatctttcattcttcattctctgtaaaatcttctctgattcctcaaattagaattaaaggctctatctatgctctgtgnn

SEQ ID NO: 56883 - DNA, 5833 bp, Homo sapiens
gtctcaacatgactgactgggaagcggtggctcgggcagagcagctccgctggcgcaggcaggaggagcaggaggattattaaataacgcagctggactctgtgcaactgggagtggagaggagcccaacagccgagaaggggagggagggcagaggagggggaccaggaaggacacccccgtgccccgaagacataaatccctgagtgcccgggaggagccttaacaagcgcacggagccctcaaggctgcaaagttggctttcacagtgcaagcctttgattcccaatgggggactcaggatcaagacgatctaccctggtctcccggttgccaatattcagaagaagtattaacagaagacatgattctcttccttcttcaccttcttccagtaatacagttggtgtccacagttcctctccttccagcactaactcaagctcaggtagcacaggtaaacggaggagcatattccgtactccttccattagcttccaccataagaaggggagtgagcctaagcaagagcctaccaaccagaaccttagtatttcaaatggtgctcaacctggtcacagcaatatgcagaaactgagtttggaagaacatattaagaccaggggaagacattctgttggttttagtagttcacgaaataagaagataacaagatctttgacagaggattttgaaagggaaaaagagcactcaactaacaagaatgtctttataaattgtctaagttctggcaaaagtgaaggggatgattctggtttcacagaagaccaaactcgtcgttctgttaagcagtcaacaaggaagctactccctaaatctttttcatctcactataaattttctaagccagttctacagagccaatccatttcattggtacaacagtctgaattctcattggaagttacacagtaccaagagagagaacctgtattagtaagagcttcgccatcctgttctgtggatgtaacagaacgggcaggaagctctttacaatctcctttgctttctgctgatcttaccacagctcagacaccttcagaatttttagccttgactgaagattctgtgtctgaaatggatgcattttctaaaagtggaagcatggcatcccactgtgacaactttggccacaatgattctacctctcagatgtccctcaattctgctgctgttacaaagacaacaacagaacttacgggaactgttccctgtgcaattatgtctcctgggaaatataggttagagggtcaatgtagcactgaatctaattcattaccggaaacctctgctgctaatcagaaggaagtgttattacaaattgctgaactacctgctacaagtgtgagccactcagagagtaacctaccagcagatagtgaaagagaagaaaatatagggttacaaaatggtgaaacaatgctggggacaaactccccaaggaaacttggattttatgagcaacataaagcaatagcggaacatgtaaaagggatccatcctatttcagattcaaagataatacctacttctggtgatcatcatatttttaacaaaacatcacatggatatgaagcaaatcctgccaaagttcttgccagtagtctcagtccatttcgtgaaggaagatttatagagaggagactgcgatcctcgtcagaaggcactgcagggagtagcagaatgattttgaaaccgaaagatggaaatatagaagaagttaatagtttaagaaagcaaagagcaggttcttcatcttcaaaaatgaacagtttggatgttttgaataatttgggatcttgtgaactggatgaagatgatctaatgcttgatcttgaatttttagaggaacagagtcttcacccttctgtttgccgggaggactcatatcactctgtcgtctcatgtgccgcagtagttcttactcctatggaaccaatgatagaaatgaagaaaagagaagaaccagaatttcctgagccttccaaacagaatctttccctgaaattaacaaaggacgttgatcaagaagccaggtgttcccacatcagccgaatgcccaacagtccatctgcggattggcctctacaaggtgtggaagaaaacggaggcatagattctctgccattcagactgatgttacaggactgcacggcagtcaagacgttattattaaagatgaagagagttcttcaagagagtgcagacatgagtccagcaagcagtaccacgtcacttcctgttagtcctcttactgaagagccagtgcctttcaaggatataatgaaagatgaatgctcgatgctcaagctgcagctgaaagagaaggatgaactcatttcccaacttcaggaagagctgggaaaagtccggcatttacagaaggcttttgcttcaagagtagataaatccacacagactgaactactatgctatgatggtttaaacttgaaaagactagagacagtacaaggagggagagaggctacatatcgaaatcgaattgtgagccaaaatctcagcacaagggacagaaaagcaatacatactcccaccgaggaccgttttaggtattcggcagcggaccagacaagcccctacaaaaacaagacctgtcaactcccaagtctctgtttaagtaatttcctgaaggacaaggaactagcagaagttatcaaacattcaagaggaacttatgaaaccctcacttcagacgttacacagaacttacgggccaccgttgggcagagctctctgaagccaacagctaagacagaagggctctccacgttcttagagaaaccaaaggaccaagttgctacggcccgacagcattcgacctttacaggcaggtttggacagccacccagagggccaatctctttacacatgtacagcaggaagaatgtgtttctccaccacaatttacacagcactgagctgcaaactctaggccagcaggatgggtaattaaatcaccgtattcctgtctttgggtaggataaagatggttagtgtttctcgtgcatagttcatattaaaattgtcatgtactttttcttacattttagttataaacagagttgtgttgttgggttttttttcttagtcataaacaaagacttgtgggttttttttttccaagagtgaaagtttgagcatgttaattgaactaggttgcattgccttgaagactttactatataggtgtataataaatgggaccatcatgatcgtttatatagtccataatttatttattttttatctctatcacttactgatatgcattaaggtttcagaagataatatcaaatagcaatctgttcactgttaatggtgttactataaaagtagacctgatgaaaaatagataaaggaattataaagaattttaaattatataattaatagaaggaggaaaaaagagaaatgttaacgtcttatatttggtggtatatttatttgaagaatgtggcttgcttgcatgtaacctagagatgtgtttgtctctattacatacattcaagctcatcttgtgatactagtaagggggaaatggctgtattttttttcctttaaacgtttagttcatactagttcacaaaggatttcagacagagtaattgctagccaaatagagaatgacagctctgatctttgaaaaattttgcttttagtttttgttattgatgttgaagtaccgtgacataacacaaggtgataaagttggttgaattttgtcagatgatgcataaatactgacatgctatattctttgagccactgtcatggcaatataaacattttttcaaaatttcaaggatgaaacatcctaagaaaattattctttttctttactttccttattttttaaaatgttcttttttatgtaaatccaattttggtttatatacatcaacccatatctataattttatgaactgaagaacagaaagtcagtattttagtagccagcatacaatattctgactatgcagaaatctagatttggaacaaaagtaaagtaaatgtgaacattggcaatttaatcttagaaataagcttctaacaggaatatttaaaacccatttgatggcaaatatttctctttgacaaataaggcccaaatatgttataatatgttatatacttatgtgcactttagatcaatatatgaattgatctatggataattccatcatgttcaattagtagcagagcagaatcaaagagtacaattaaatacataaataaataatttttaaaagactaataggaatcaaggctgcagttttcttatacacatcagagctgttaagtacatccacattagccatagtccatgcaaattgaaactgtcatacctactgcatgatctgtttcccttgcattttctaacagaatctgtcagcgtgcacaagcaagatgaacaaagggaaattgagatagcagttttagcatggcatctgacaacttgcttaaattaaagctgtgtgcaaaatgcatctcctattataaaaatgtatttgtgccctgtgctttggggaaaagccattagacactccacccctgagctttaactactgaactttgatacatttgcaaacttagattggaactgataaagtaaggagtcgagtggatatgttgtacttgtaattttggttttccaaaggaacacacatgtgcatcaaggcagacatttgccaaatgttttctttctttgcgtgtttgtaattctgccaaaagagaacaatatacactgcaaattgcttgacttaatgagattgccatctaaagttcccaccatactttggaagctataatgatcatgcagatatacactttgggctgggcaatatttaagaaatgataggaaaatagaaaaatcatgattattaattgtggaattcagcttgatttgtcctaaatgttggtgtctgttgctagagtattttaaatctgtacataaataagcatgataaaataatcaaggattttttcccaggatatggaagaactatgtatcacaaataatgtttttgatttggacttttggagttgatagttttgttttcctggaagatagacttttgaattatactttataaaaataatctatttatagaagatctgtcatttaatagacattttaagagatgttttaaacgctagtattttcttgaaaaatcttttttaaagctgaatcattcaaaagaaaacctggattaaacagttcgattttaaaaggaagggtattttttggaaatatcatcttaaagctgttttgtatcagtattttcaacattgttataatattatttgtaatactaagtgtaactcaggcctggagaaggtgtaagcccactatgctaatgtacatcagtaactgtaaaacaggggttctttgtaagttcctcttgtgtatatatagtaacttataacaatggcatgtgggcattctttcagtgaattgctttctttgtactaaaatctctagttttctaagacagttccatgtataaaaatgatttatgcctttctccaaggcggtacatatccaaagacatgacaccagggggaaaaagtgcttgtttttctgatggaagcagtggtcttttcttttctttcctctttcttttgtgcatgtgtatgtgtagctaagcctaaataaccctgtaaaatttctgctgcaaattgtctcttctgaatttagaatgtgttttaaaggaacacttaggaagagaaataccttgaagaaaagctgtttccacctgaaataaactgttcccatttttataattattgg

SEQ ID NO: 56884 - DNA, 748 bp, Homo sapiens
  misc_feature (658)..(658): n is a, c, g, or t
tgaatttcaaggacgttgatcaagaagccaggtgttcccacatcagccgaatgcccaacagtccatctgcggattggcctctacaaggtgtggaagaaaacggaggcatagattctctgccattcagactgatgttacaggactgcacggcagtcaagacgctattattaaagatgaagagagttcttcaagaggaatctttccctgaaattaacaaaggacgttgatcaagaagccaggtgttcccacatcagccgaatgcccaacagtccatctgcggattggcctctacaaggtgtggaagaaaacggaggcatagattctctgccattcagactgatgttacaggactgcacggcagtcaagacgttattattaaagatgaagagagttcttcaagagagtgcagacatgagtccagcaagcagtaccacgtcacttcctgttagtcctcttactgaagagccagtgcctttcaaggatataatgaaagatgaatgctcgatgctcaagctgcagctgaaagagaaggatgaactcatttcccaacttcaggaagagctgggaaaagtccggcatttacagaaggcttttgcttcaagagtagataaatccacacagactgaactactatgctatgatccctgggaatactacntgccctgaatggctatccgcgcccgtttcttctcgcccgttcggttcccgccccgcccgtcaataaaaccttcctcgctcctccgcgagg

SEQ ID NO: 56885 - DNA, 781 bp, Homo sapiens
agggattgagaaagtaattggttgggtcgggtgaggaaggcttcgggaacttcctgaattttaaaggacgttgatcaagaagccaggtgttcccacatcagccgaatgcccaacagtccatctgcggattggcctctacaaggtgtggaagaaaacggaggcatagattctctgccattcagactgatgttacaggactgcacggcagtcaagacgttattattaaagatgaagagagttcttcaagagttttcttcatgaatccagcattaatgtttcacttgtaaaacaactcacatacttttgtgtgattcgatgggctaaatccgacattaagaatttcaagctgcaacataacaggtatacagcagacggcaccctgcagaatctccaaggaatacttgagtcgtcagcgcttctgatgggttttggaaaaagacagtgagcagagaatcacttaagcaaagtggaaaagccgtaattgtgttcctctgagacacatttttactgaaattatgttttgtttttgtttgaaaatcagaatcaaaggcatatttaactacagttaaaatagctgtttttaatgagtgattctatcaaatatgatgttacaactttagataacataatgcaatttcttaaaagtagtatgaatctaataatattcacatgtttacagatgagcaaaagtgtttcagaatctagtgactcgtttagctggaatgcacttattccttaactgtatcattttaaccttgataaaattgaaaacttgtggaaa

SEQ ID NO: 56886 - DNA, 418 bp, Homo sapiens
agctacaagttagagttggattatctacattacgaagagaggaaagtgattgtaaaactagactttatttcattcagcaaaggaaattcattggcagggtgagactagtcgaagtgcagacatgagtccagcaagcagtaccacgtcacttcctgttagtcctcttactgaagagccagtgcctttcaagaatattcagcattatatcaactgtacacacatatggtctgacacatgccactgcatcattatagaagagccaaaggataaccaattttgcatagaccacataccctagggaattctgaaaacctgactaacatcaattgaagattggggttcaggaggcctagatgatccaccatgacttattcaaaagttgaagatgaaaggaaagaataaagactctttccatcca

SEQ ID NO: 56887 - DNA, 2578 bp, Homo sapiens
tttccatcttatacacaataaatttgaggcatagagaggttaaatttgagcagtgtcactgtaactcacttttaaaaactgtgtgataattaaatggcagtccttagttttaacccagttatggctggctgtaagttccatcccgtcatgaccattatgtttcctcaacttttctattttcctacttcctttgctctgctctcagtcactgggagacgaaagtgctgctggttagcacagaagaaactgctgctgctgcggcttctactgttgtctgccatctctgttaccatcgagaccggggctgtgtatgctcgaggtgcagggagctaatgtataaggagttaaatgaactcttgctgctgccaaatatgttgttatcactaactgcaccgctgctgtcattagtgctgctgccaacactgcaagccctgctgctgccagtgccaattctgctgatgccttgggctctccatgtcccagggtgattccatagacaagcagctgcttttagatttcacttgctcattacctgtagatcctttgccttaggactcaagcttaagcccatgaagcctgggatagaagacaattggaggctgcaaagttggctttcacagtgcaagcctttgattcccaatgggggactcaggatcaagacgatctaccctggtctcccggttgccaatattcagaagaagtattaacagaagacatgattctcttccttcttcaccttcttccagtaatacagttggtgtccacagttcctctccttccagcactaactcaagctcaggtagcacaggtaaacggaggagcatattccgtactccttccattagcttccaccataagaaggggagtgagcctaagcaagagcctaccaaccagaaccttagtatttcaaatggtgctcaacctggtcacagcaatatgcagaaactgagtttggaagaacatattaagaccaggggaagacattctgttggttttagtagttcacgaaataagaagataacaagatctttgacagaggattttgaaagggaaaaagagcactcaactaacaagaatgtctttataaattgtctaagttctggcaaaagtgaaggggatgattctggtttcacagaagaccaaactcgtcgttctgttaagcagtcaacaaggaagctactccctaaatctttttcatctcactataaattttctaagccagttctacagagccaatccatttcattggtacaacagtctgaattctcattggaagttacacagtaccaagagagagaacctgtattagtaagagcttcgccatcctgttctgtggatgtaacagaacgggcaggaagctctttacaatctcctttgctttctgctgatcttaccacagctcagacaccttcagaatttttagccttgactgaagattctgtgtctgaaatggatgcattttctaaaagtggaagcatggcatcccactgtgacaactttggccacaatgattctacctctcagatgtccctcaattctgctgctgttacaaagacaacaacagaacttacgggaactgttccctgtgcaattatgtctcctgggaaatataggttagagggtcaatgtagcactgaatctaattcattaccggaaacctctgctgctaatcagaaggaagtgttattacaaattgctgaactacctgctacaagtgtgagccactcagagagtaacctaccagcagatagtgaaagagaagaaaatatagggttacaaaatggtgaaacaatgctggggacaaactccccaaggaaacttggattttatgagcaacataaagcaatagcggaacatgtaaaagggatccatcctatttcagattcaaagataatacctacttctggtgatcatcatatttttaacaaaacatcacatggatatgaagcaaatcctgccaaagttcttgccagtagtctcagtccatttcgtgaaggaagatttatagagaggagactgcgatcctcgtcagaaggcactgcagggagtagcagaatgattttgaaaccgaaagatggaaatatagaagaagttaatagtttaagaaagcaaagagcaggttcttcatcttcaaaaatgaacagtttggatgttttgaataatttgggatcttgtgaactggatgaagatgatctaatgcttgatcttgaatttttagaggaacagagtcttcacccttctgaactaccgcaggaacataccaggaaagccaagagaatccacagacctttgaaggaattggatcaccgccacaggctccccgagatggcaaaaaacttttgccgggaggactcatatcactctgtcgtctcatgtgccgcagtagttcttactcctatggaaccaatgatagaaatgaagaaaagagaagaaccagaatttcctgagccttccaaacagtgagttgttcatttaatttttcaaggccttgtaaaatcaattagataactgataagaaaatgtgatttataataaatgtgttaatattagtataaagaaagaagaaatattttatggc

SEQ ID NO: 56888 - DNA, 3217 bp, Homo sapiens
tttccatcttatacacaataaatttgaggcatagagaggttaaatttgagcagtgtcactgtaactcacttttaaaaactgtgtgataattaaatggcagtccttagttttaacccagttatggctggctgtaagttccatcccgtcatgaccattatgtttcctcaacttttctattttcctacttcctttgctctgctctcagtcactgggagacgaaagtgctgctggttagcacagaagaaactgctgctgctgcggcttctactgttgtctgccatctctgttaccatcgagaccggggctgtgtatgctcgaggtgcagggagctaatgtataaggagttaaatgaactcttgctgctgccaaatatgttgttatcactaactgcaccgctgctgtcattagtgctgctgccaacactgcaagccctgctgctgccagtgccaattctgctgatgccttgggctctccatgtcccagggtgattccatagacaagcagctgcttttagatttcacttgctcattacctgtagatcctttgccttaggactcaagcttaagcccatgaagcctgggatagaagacaattggaggctgcaaagttggctttcacagtgcaagcctttgattcccaatgggggactcaggatcaagacgatctaccctggtctcccggttgccaatattcagaagaagtattaacagaagacatgattctcttccttcttcaccttcttccagtaatacagttggtgtccacagttcctctccttccagcactaactcaagctcaggtagcacaggtaaacggaggagcatattccgtactccttccattagcttccaccataagaaggggagtgagcctaagcaagagcctaccaaccagaaccttagtatttcaaatggtgctcaacctggtcacagcaatatgcagaaactgagtttggaagaacatattaagaccaggggaagacattctgttggttttagtagttcacgaaataagaagataacaagatctttgacagaggattttgaaagggaaaaagagcactcaactaacaagaatgtctttataaattgtctaagttctggcaaaagtgaaggggatgattctggtttcacagaagaccaaactcgtcgttctgttaagcagtcaacaaggaagctactccctaaatctttttcatctcactataaattttctaagccagttctacagagccaatccatttcattggtacaacagtctgaattctcattggaagttacacagtaccaagagagagaacctgtattagtaagagcttcgccatcctgttctgtggatgtaacagaacgggcaggaagctctttacaatctcctttgctttctgctgatcttaccacagctcagacaccttcagaatttttagccttgactgaagattctgtgtctgaaatggatgcattttctaaaagtggaagcatggcatcccactgtgacaactttggccacaatgattctacctctcagatgtccctcaattctgctgctgttacaaagacaacaacagaacttacgggaactgttccctgtgcaattatgtctcctgggaaatataggttagagggtcaatgtagcactgaatctaattcattaccggaaacctctgctgctaatcagaaggaagtgttattacaaattgctgaactacctgctacaagtgtgagccactcagagagtaacctaccagcagatagtgaaagagaagaaaatatagggttacaaaatggtgaaacaatgctggggacaaactccccaaggaaacttggattttatgagcaacataaagcaatagcggaacatgtaaaagggatccatcctatttcagattcaaagataatacctacttctggtgatcatcatatttttaacaaaacatcacatggatatgaagcaaatcctgccaaagttcttgccagtagtctcagtccatttcgtgaaggaagatttatagagaggagactgcgatcctcgtcagaaggcactgcagggagtagcagaatgattttgaaaccgaaagatggaaatatagaagaagttaatagtttaagaaagcaaagagcaggttcttcatcttcaaaaatgaacagtttggatgttttgaataatttgggatcttgtgaactggatgaagatgatctaatgcttgatcttgaatttttagaggaacagagtcttcacccttctgaactaccgcaggaacataccaggaaagccaagagaatccacagacctttgaaggaattggatcaccgccacaggctccccgagatggcaaaaaacttttgccgggaggactcatatcactctgtcgtctcatgtgccgcagtagttcttactcctatggaaccaatgatagaaatgaagaaaagagaagaaccagaatttcctgagccttccaaacagaatctttccctgaaattaacaaaggacgttgatcaagaagccaggtgttcccacatcagccgaatgcccaacagtccatctgcggattggcctctacaaggtgtggaagaaaacggaggcatagattctctgccattcagactgatgttacaggactgcacggcagtcaagacgttattattaaagatgaagagagttcttcaagagagtgcagacatgagtccagcaagcagtaccacgtcacttcctgttagtcctcttactgaagagccagtgcctttcaaggatataatgaaagatgaatgctcgatgctcaagctgcagctgaaagagaaggatgaactcatttcccaacttcaggaagagctgctcccgaaaattttgtgttccatgagaggaggttttatttgcttggctgtgtttcttgaagattctactgatgtcttcagtgatatgcatgcccccattaaagggaaaagtccggcatttacagaaggcttttgcttcaagagtagataaatccacacagactgaactactatgctatgatgagcgttaacgtcatgaatcctgtggctcaccacttcatgtctgaaggttagtgagccaatgactcatccctcaaggctctggatttgtttacttatttagcaaggtatagcagaaaatgacagcatgcccttaacacaaagcttttcctctagtactcttgtccaggaagaggtaataaaatttactttaaaaaactactcagtaa

SEQ ID NO: 56889 - DNA, 4200 bp, Homo sapiens
tgaggacacagtgagaaggcagctatttgcaagccaggaagagagccatcaccaagaactgaatctgccagccccttcatcttggatttcccagcctccaaaactagtgcagacatgagtccagcaagcagtaccacgtcacttcctgttagtcctcttactgaagagccagtgcctttcaaggatataatgaaagatgaatgctcgatgctcaagctgcagctgaaagagaaggatgaactcatttcccaacttcaggaagagctgctcccgaaaattttgtgttccatgagaggaggttttatttgcttggctgtgtttcttgaagattctactgatgtcttcagtgatatgcatgcccccattaaagattctaaagcaaactactacacgtaggccatcatgttccaagtttttgaaagttcatctttttcatcttgttgataaatttcatcaacttttatgtagggaaaagtccggcatttacagaaggcttttgcttcaagagtagataaatccacacagactgaactactatgctatgatgctaccgtgataagctgctattctgctcatcacaaggagttagagtcctaattatttaaataaacagaaggaagaaaggaaggaaattaattttgacaaaggacctgaataatccataaaccagatgcctttagtgaaaacgaagtaagatcagctctggatacctcctaactcttcccctccttctcctgatgagggagaagtggaggcccaaggaaaatgagcaagttttgtaacaacacgaatggggaaggatgggaaagagaacagaatcggtggagggtttaaacttgaaaagactagagacagtacaaggagggagagaggctacatatcgaaatcgaattgtgagccaaaatctcagcacaagggacagaaaagcaatacatactcccaccgaggaccgttttaggtattcggcagcggaccagacaagcccctacaaaaacaagacctgtcaactcccaagtctctgtttaagtaatttcctgaaggacaaggaactagcagaagttatcaaacattcaagaggaacttatgaaaccctcacttcagacgttacacagaacttacgggccaccgttgggcagagctctctgaagccaacagctaagacagaagggctctccacgttcttagagaaaccaaaggaccaagttgctacggcccgacagcattcgacctttacaggcaggtttggacagccacccagagggccaatctctttacacatgtacagcaggaagaatgtgtttctccaccacaatttacacagcactgagctgcaaactctaggccagcaggatgggtaattaaatcaccgtattcctgtctttgggtaggataaagatggttagtgtttctcgtgcatagttcatattaaaattgtcatgtactttttcttacattttagttataaacagagttgtgttgttgggttttttttcttagtcataaacaaagacttgtgggttttttttttccaagagtgaaagtttgagcatgttaattgaactaggttgcattgccttgaagactttactatataggtgtataataaatgggaccatcatgatcgtttatatagtccataatttatttattttttatctctatcacttactgatatgcattaaggtttcagaagataatatcaaatagcaatctgttcactgttaatggtgttactataaaagtagacctgatgaaaaatagataaaggaattataaagaattttaaattatataattaatagaaggaggaaaaaagagaaatgttaacgtcttatatttggtggtatatttatttgaagaatgtggcttgcttgcatgtaacctagagatgtgtttgtctctattacatacattcaagctcatcttgtgatactagtaagggggaaatggctgtattttttttcctttaaacgtttagttcatactagttcacaaaggatttcagacagagtaattgctagccaaatagagaatgacagctctgatctttgaaaaattttgcttttagtttttgttattgatgttgaagtaccgtgacataacacaaggtgataaagttggttgaattttgtcagatgatgcataaatactgacatgctatattctttgagccactgtcatggcaatataaacattttttcaaaatttcaaggatgaaacatcctaagaaaattattctttttctttactttccttattttttaaaatgttcttttttatgtaaatccaattttggtttatatacatcaacccatatctataattttatgaactgaagaacagaaagtcagtattttagtagccagcatacaatattctgactatgcagaaatctagatttggaacaaaagtaaagtaaatgtgaacattggcaatttaatcttagaaataagcttctaacaggaatatttaaaacccatttgatggcaaatatttctctttgacaaataaggcccaaatatgttataatatgttatatacttatgtgcactttagatcaatatatgaattgatctatggataattccatcatgttcaattagtagcagagcagaatcaaagagtacaattaaatacataaataaataatttttaaaagactaataggaatcaaggctgcagttttcttatacacatcagagctgttaagtacatccacattagccatagtccatgcaaattgaaactgtcatacctactgcatgatctgtttcccttgcattttctaacagaatctgtcagcgtgcacaagcaagatgaacaaagggaaattgagatagcagttttagcatggcatctgacaacttgcttaaattaaagctgtgtgcaaaatgcatctcctattataaaaatgtatttgtgccctgtgctttggggaaaagccattagacactccacccctgagctttaactactgaactttgatacatttgcaaacttagattggaactgataaagtaaggagtcgagtggatatgttgtacttgtaattttggttttccaaaggaacacacatgtgcatcaaggcagacatttgccaaatgttttctttctttgcgtgtttgtaattctgccaaaagagaacaatatacactgcaaattgcttgacttaatgagattgccatctaaagttcccaccatactttggaagctataatgatcatgcagatatacactttgggctgggcaatatttaagaaatgataggaaaatagaaaaatcatgattattaattgtggaattcagcttgatttgtcctaaatgttggtgtctgttgctagagtattttaaatctgtacataaataagcatgataaaataatcaaggattttttcccaggatatggaagaactatgtatcacaaataatgtttttgatttggacttttggagttgatagttttgttttcctggaagatagacttttgaattatactttataaaaataatctatttatagaagatctgtcatttaatagacattttaagagatgttttaaacgctagtattttcttgaaaaatcttttttaaagctgaatcattcaaaagaaaacctggattaaacagttcgattttaaaaggaagggtattttttggaaatatcatcttaaagctgttttgtatcagtattttcaacattgttataatattatttgtaatactaagtgtaactcaggcctggagaaggtgtaagcccactatgctaatgtacatcagtaactgtaaaacaggggttctttgtaagttcctcttgtgtatatatagtaacttataacaatggcatgtgggcattctttcagtgaattgctttctttgtactaaaatctctagttttctaagacagttccatgtataaaaatgatttatgcctttctccaaggcggtacatatccaaagacatgacaccagggggaaaaagtgcttgtttttctgatggaagcagtggtcttttcttttctttcctctttcttttgtgcatgtgtatgtgtagctaagcctaaataaccctgtaaaatttctgctgcaaattgtctcttctgaatttagaatgtgttttaaaggaacacttaggaagagaaataccttgaagaaaagctgtttccacctgaaataaactgttcccatttttataattattgg

SEQ ID NO: 56890 - DNA, 367 bp, Homo sapiens
ctccctcccacccaggagccaaacaaatcagaaatagttgtcagcagcctgtagctcccctcatctccatgaggctcaagtaaaaattaaacatttctccccaactcacagcccaaagacataggccacgatttgaaatctggtgacagagtccttatctgggtttccacccagaggctgagcctgtgttgtcacaggtggaggttcctgcaggagacacctgagcgccttccaaagtctctgcgggcaaagcctgcatccttcctggtacttgctgatgtccatacattttcttctctgcaacctttcagggcatcgttaagcttgccaagttcttccaaatggcctttagtggagggaaccctgg

SEQ ID NO: 56891 - DNA, 474 bp, Homo sapiens
gaacaattaagaagaaatgtcagctccagaataaaagcaaatatggcagaacagcctgtttaatagaaaaaatgagggagacagctaagaataggtctcctgcaatcccattcaacttcagtgtttgagaaggctgtgcacaggcactaagctgcacctactcaagggcaatcagaacagaatgcatggagtgtacttgagaggattatgcaagccatacaaaaaaatcatcaatagagagcaaaagcctcactggtccgtgaagttttaaccctacttctgaccacaaactgattgaacaataagccattctgatggaggagtgactaccaggaatataggcttaaaaataaaataaaagcagtaattattggctgccttgaaaaatttgtgcatgagcaaaacttcaatgtctcagaaattttcacaagggaatctataagcttttagttctgggttgaccatacagcaaaa

SEQ ID NO: 56892 - DNA, 345 bp, Homo sapiens
gagcttcctagaggctgaagcaaaaatagtttaaaaccccactgttggttatcttactcgtatcagtgggcttgagggacatactcttctctcaatggagtacaaaaaaggttttcttgttccaaaaaaatttttttcatgtgtatttatattcaagaaagatacagcattaaagaatgtggatcacagtgaaagtacaaatgaaacagtaaatgtggttgttaagagcacagactttgatgtcaagattgacccaaatttacaatctggctctacaactggttacaatgttaagcaaagttgctacacctcagtttccttttctgtcaattgggaggtaaaagt

SEQ ID NO: 56893 - DNA, 447 bp, Homo sapiens
ataaaaagcaagagaaacatacaaatcaggcccatctggagagaagggagtgaagcattgcgctgatacggggataaatatgctggttgggtagacaggcagtccttatgcttttggctgacgtagatgttacgtactatttcatgtgttatcacactctccagtaaacacgtaacataagagaataattaaccactatcaagcgttctcatcttgagacaggaagatgtagaggaaagaccttgatgtgtgtgtcagttacaaggatgtacaccagtgactgacatgacttggtgcaaatcttgggtagagacctatacttaagctcctcacccccacctgccgaggcgtaagggctcagagggggttccatggggtgggcgggagtggtaagggtcgaggtgcagccacagcctggctctgtgcacaccccctccctccccctgg

SEQ ID NO: 56894 - DNA, 218 bp, Homo sapiens
caaatcccacagctagtaagcaaatgcaccaattataaaccaggtctcctaagcctgatgttctttttaggttgactttcaataaggtctcaattgttgctaaatcaattccatctctcctttggtccaagttccaaatgatttttgaataatctcaagttgtttatagtgaaccaatttagtcctgctagttcaattcaaaataagaattcatattt

SEQ ID NO: 56895 - DNA, 411 bp, Homo sapiens
gcatttaaaaaatactgtgtcctcccatctagaaacatgattttttctactgattgcataaaatgttttccttttgttttcactcttccaataacaattctacattttgtttttatgtttctttcaccttttctgttatgtctatgctaggcatattataatatttgatgctaccatgaattttcccccaatgatgttgtacattttttgccagtttacagaaaagctattgattttcagtgtatattatgtaacctgccatgaaaccgcatttttttttgaaaatttgttcttaaagattttttctattgattatttggactttcctaagtatatgatataatcaggtataaataaatagtgagggttttacatttttcatactttcacctcttttagaaagttttggca

SEQ ID NO: 56896 - DNA, 2514 bp, Homo sapiens
  misc_feature (69)..(69): n is a, c, g, or t
acttcaaataatgaccttttttctacctaacaattactgagcattcaactctgtgctgcgtgtgtgctnacccttcacacacaccacctcactaatcctcacagtccttgaaggtggggactagtgtcacacgtggccattgggaacatcacacagatcaaaggctgggctcaaggtcacattgcctaaacacacattcatgtgacgtgagaaccttaactcttgccctcccagtgacacttccttctctgggtttccattccgccttgcagagagcattctgacttactgtagccttctgtgtgtgtgtctcccctctctactgtgagcccctcgagagcagggcccatgccttccccatccctgtcccagaagctaactggaaacagtggagacatgcagcagattgttgactgaagaaggtgctgcgtccatggtcatccctcatatcctttataaatttcttacacatttcattcctttgtgggaattgcatcttgaagctttgtttatagccatctgcgtgggtcccttaggctatgtggctgactttaatgctacagatatttttccgtttctggcatgtagcagtgctgggcttagcattgtagagattataaaagagaagacatggcccctgccctccaattgcagagatgagaccatatggaacacaattagccattaaagacaatacatttcagtatttgcatggagtatttgattatatagcacatgcaaattctttggaatgacatacaaggccctgcaagatctgattctaggccactttcccagtttcatctgctactctcccacggatccccccacatcccagacatactgaggtgtgtgcagtcctctgagcccaccatgcttccaatgtcaccatctctttgtaggtgctgtttcttcttcctagaatgcctgtcttgttcctatctgcctggcaacttcttactcatcttttagaacactgtctagtgccagttctttcctttttgtttttgtttttgttttcatggcctttgtatgtttttctgtagtgtgacccttatcacataagtcagttttgtaagtctgctctgcctgttcattgttgagttactttaggtcaagatccgtgtctcagtgatggaaaaatgaatgacaaaatagaaattggataaatgggaaggaaggagtgatgatctaacatggctgggggtcagtggggaatcactttcattggccagaatagagagctaaataaagtggcttaaaggcattagaggttcatttgcatgtggaaaaagcctggaggtggatggttgagtgctggtgtgggtgccacaatgtcatcaggagcccgggctctgctgcgcagcttggccacctttaatgcgaagtttccctcttcagggtaatctcgtggctcaaaatggttgctggagctgcagccatcttatccatttcaggcaagaaggactagagaggtcagctggtacaaaaaaaaaaaattatgttcattccctgaaggcagtctccttcaaacagatttctcagggtcctttacccaggagcttcatctgcatctcaggccaggatgtagtcacatgttcacctctgagtttggaagagatgtaaatatacagcaataaacataggttatctccacatttaatttaaaatgacattgctttttaaaacagtttttaggtctgaatacacatttctcaaaaaaagatataaaatggccaataagcatatgaaaagatgcttagggaattagtcattagggaaatacaaatcagaaccacaatgagacataatttcacatctaccaggatagcactagagtcaaaaaggcataataacaagtgctggcaaagagagaaattagaattctcaaaacgccactggtgggactgtgaaatgttacagcagtctggcaagccctcacaaagttaaacacttgagttaccctatgacccagcaatcccacttctaggtatacatatgtgagagaatgaaaacatacatccacacaaaagcttatgtatgcatattcatagcactattcataatagccaaaaaataaaaataaccaaaatgcccattaacaaatgagtggatcaacaaattgtggtatatccatacagtggaatattactctgtcattaaaaggagtgaagtactgatacatgctatataacatggatgaatttaaaaaacattacagcaagtgaaagaagacagtcacaaaaaaacccacatagttgatgatcctatttttatgaaatgtccagaacaggcaaatccacagagacagaaactagacgaatggttgcctgagggtgaggggaaacagggagtgactgatgatgggttttgtgtgggggcaatagaatgttctaaaatttgatagtaatggttatacaactctgaatatactaaaagccattgtacacacgttaaaaagggtggattgtatgtgaattctatctcaataaagctgttcaaaaattcagtttt

SEQ ID NO: 56897 - DNA, 331 bp, Homo sapiens
gactcctcttctgggctggaactgtggggcttgagagaaggaaattgggaccaggcaggcaggaggggctaatggtatcaggaggtcagggctgcgggaagaggcagcagtgttggtggtgtaggggtctctccccacggctttacctctgctcttgctgggatcctggtatttcactttccaactcctgtctacgtgtgctaggaaagtctatctcctccccagtcctaaccccaatttttcaccctcaggaaaaccacagaagaccctgagcctccggacaggtggacaacccaggaccggtcctgaaatccagggaagcaacgggggt

SEQ ID NO: 56898 - DNA, 200 bp, Homo sapiens
atgtctcggccggcgctgtctggcttgtccgcagcccctccccacgccccgcggccctcccctgctttcacactgccctccccaagctacccaccctcgccaaatggcctcctcttggccaaagagcagcccgctgcgcgcctcctgcaaacgcggtctactccagcgccctgaccccaaggcgggcgggagagggtagc

SEQ ID NO: 56899 - DNA, 500 bp, Homo sapiens
gaaggttcattaagtttccacatcaacctcagtctcctcactgtgagaaggcctggccacatagcagcagcccttcaccctccatgttcctctggctactcctttctggacctatttcgccttaacagcagctttcttggagcacagagcttggagatcaatggagtatttcaggtgtgagagcccagctaggcgtggaagagggtggcaaatggctaggccagggaactatgaaatatatttgccttaagtaaggagatggaaagataagccctccagagtagggcttatcaactgagatgacttcgaaaataaaccagaccctgacctaggactttagccgcactccgtcccccctagcgcagcagctgacatatcagctagtgttggcagtaacaggatttgcagacttcctgggaggcgtggcagactcagactatagggacctggggtgtgggtgttcaaccaaataattgagaagacagtcaccccaaaatgtg

SEQ ID NO: 56900 - DNA, 155 bp, Homo sapiens
ggaagaggggcaaatgagggtccctccctgccccctactgggtgacggcatggcacctttcatgggtctgcaggaccagtctcagctactgaaaaagtctagctcagtcctagccccacaggtttcccacaaacgccctggaaagagccatggag

SEQ ID NO: 56901 - DNA, 380 bp, Homo sapiens
gtctgtcctctgagttcccatagaatctgaattacaccactttattcacacttacattatgtgtttacttttctgagtgtcctattaatctttattccttaaaggaaagcctgagggcatcttgtttaacaatgcatctctctcttcatcaatcaacgctgcaggtgcttacaagacttataacttaaaaaaattataatacaaggctcagcgcagtgcctcaagtgccaacagtttcggaggccttggcaggcggatcacttgaggccaagagttcgagactagcctggccaacatggtgaaacaccgtctgtactaaaaatacaaaaattagctgggtgtggtggcacgcgcctgtagtctcagctacttgggaggct

SEQ ID NO: 56902 - DNA, 282 bp, Homo sapiens
gacaagacctagaagcaacaatgcccagtagaaacaaacacacctactgcctggatcttagtttttaattatattccccaataaagagacccagggctccttgttgaaatggctgattctaggactggggcaggaaatatgcaagatgaacctagaatatctaatactgccaaaaattaagaaagtgttctaaaaaaaatcccacaatgatagggtgtcaaaagagacatagaagccatctgaaggagttcccaatggccaaagatcaaataattttatcaa

SEQ ID NO: 56903 - DNA, 7122 bp, Homo sapiens
  misc_feature (3058)..(3058): n is a, c, g, or t
  misc_feature (3121)..(3121): n is a, c, g, or t
  misc_feature (3202)..(3202): n is a, c, g, or t
ggcggcggcggcggcggcggcggcggggattgtttttgttgtcgctgaggccggaagagccggagccgggtccctgtccccgggccgggcgccgccgccgccccctgcccagcgcccgcgtctccgcggcgccaccccagcgccaatattccggagatcaagcgttacgcggcggcggcggcggcggcggcggggcccggagcgggaggcgccggggaccggggcgaggcggcccccgccgccgccatggaggcgctgggacccggacctccggctagcctgtttcagccacctcgtcgtcctggccttggaactgttggaaaaccaattcgactgttagccaatcattttcaggttcagattcctaaaatagatgtgtatcactatgatgtggatattaagcctgaaaaacggcctcgtagagtcaacagggaggtagtagatacaatggtgcggcacttcaagatgcaaatatttggtgatcggcagcctgggtatgatggcaaaagaaacatgtacacagcacatccactaccaattggacgggatagggttgatatggaggtgactcttccaggcgagggtaaagaccaaacatttaaagtgtctgttcagtgggtgtcagttgtgagccttcagttgcttttagaagctttggctgggcacttgaatgaagtcccagatgactcagtacaagcacttgatgttatcacaagacaccttccctccatgaggtacaccccagtgggccgttcctttttctcacccccggaaggttactaccaccctctgggagggggcagggaggtctggtttggttttcatcagtctgtgagacctgccatgtggaatatgatgctcaacattgatgtatctgcaactgctttctaccgggctcagcctatcattgagttcatgtgtgaggttttagacattcagaacatcaatgaacagaccaaacctctaacagactcccagcgtgtcaaatttaccaaagaaatcagaggtctcaaagttgaggtgacccactgtggacagatgaaacgaaaataccgagtttgtaatgtgactagacggccagccagtcatcaaacttttcctttgcagctagaaaacggtcaagctatggaatgtacagtagctcaatattttaagcaaaagtatagtctgcaactgaaatacccccatcttccctgtctccaagtgggacaagaacaaaagcatacatacttgccactcgaggtctgtaatatagtggcaggacagcgatgtatcaagaagctcacagacaatcagacttccacaatgatcaaagctacagcaagatctgctcctgacagacaggaagagatcagtagactggtgaagagcaacagtatggtgggtggacctgatccataccttaaagaatttggtattgttgtccacaatgaaatgacagagctcacaggcagggtacttccagcaccaatgctgcaatatggaggccggaataaaacagtagccacacccaaccagggtgtctgggacatgcgaggaaagcagttttatgctggcattgaaattaaagtttgggcagttgcttgttttgcacctcagaaacaatgtagggaagatttactaaagagtttcactgaccagctgcgtaaaatctctaaggatgcaggaatgcccatccagggtcagccatgtttctgcaagtatgcacaaggtgcagacagtgtggagcctatgtttaaacatctgaaaatgacttatgtgggcctacagctaatagtggttatcctgcctggaaagacaccagtatatgcggaggtgaaacgtgttggagatacccttctaggtatggccacacagtgtgtccaggtaaaaaatgtagtgaagacctcacctcaaaccctttccaatctttgcctgaagataaatgcaaaacttggaggaattaacaatgtgcttgtgcctcatcaaaggccctcggtgttccagcagcctgtcatcttcctgggagcggatgtcacacaccccccagcaggggatgggaagaaaccttccattgctgctgtggttggcagtatggatggccaccccagccggtactgtgccaccgttcgggtgcagacttcccggcaggagatctcccaagagctcctctacagtcaagaggtcatccaggacctgactaacatggttcgagagctgctgattcagttctacaaatccacacgcttcaaacccactcggatcatctattaccgtggaggggtatctgagggacaaatgaaacaggtagcttggccagaactaatagcaattcgaaaggcatgtattagcttggaagaagattaccggccaggaataacttatattgtggtgcaaaaaagacatcacacacgactcttctgtgcagataaaacagaaagggtagggaaaagtggcaatgtaccagcaggcactacagtggatagtaccatcacacatccatctgagtttgacttttacctctgtagtcatgcaggaattcagggaaccagccgtccctcacattaccaggtcttgtgggatgacaactgcttcactgcagatgaactccagctactgacttaccagctgtgtcacacctatgtgaggtgcactcgctcagtctctattccagcccctgcatattatgcccggcttgtagcatttagggcaaggtatcatctggtggataaagatcatgacagtgcggaaggcagtcatgtgtcaggacagagcaacggccgggatcctcaggccttggctaaggctgtgcaaatccaccatgatacccagcacacgatgtattttgcctgagagtctcagaaaaagaactcaaccaatttggcaccccatgcagcctcaaaatgtttcaaatgcctaccgcctctagatcgagccacgttgacttcaggtggtcttctaccagcagctcggaatagttgcactgaatctatactttgcagcactgtctgatgcgtcaacaaaattgagccatttttttaaagtaatagatactaatagattatcttttctgatgcantggactgaatttttacctcaatgtgcaaaggctgatcagcctgaactttctaaaggactttanaagaagggtttctatggaatattttgctagctgtggtgttcaccgcatccctctagtcttagaagagaagattattccttntttctgtagtcattgagtggggtatatgcataagtgggagagaaaaaccaaacaatctacttcagttcagtgtaactatttaattgtgtgggtccatagactttttaatgaagatttctgactttgccactgtaaatgcctttaatgagcattaatttttgaaagttttacagagttttattagttttactactttatcttattgatctctgcagacttgtgctggtgcaagtacatgctgacaggcaatttgcactatatttggctgcagattcaaataggcagttctcttatttggtcgacttttgtgaatgtgtgacataaacagatgtaatgcatgtcacagtgacggagataacactgccatgataaaagtactcatgtttcccctatttggaaaaaaaaattgcttttagtatttttccaagttttcaaaagtgcccattttatgctgctgtgtggtttgttaaatctaaatgatttttaaacttttctcatagaaacttaactttggcaataaacattttttaaggtctctcctcttccttccccaacaatgtagttttctagatgagatttcagtatgattttatcagctatttcttatatatcataatctggcaatttctgaaaccagtcagaaaagacatatatttccatgcctttttaaagaattatttttacctgttttatattcacagttggtgtcctgtcactttgttttaaaataagctagaaccaggatgcttccttattggaaaggctttgccagtccttaaggtacaatgagtgatgctgcaacttgcaaatgtaccagcatttaaaatttcttttcctgggaatcaaggtaactcacacgactacttgcagtacaaattttttgcttctctttcgacatgaaatgtacttggtgggttttccttccttttattaaactaaaactgtgtggaaaaggttgatttttcttaatagattctggattccactcacagggagatgggattcctttcttgtccaaacaaagggagttgctctaaagcgagcatcagttaaaatgtaggggaaaatgtattctgtatgtagtgtagataatactttgtgaatggacaacagttacatagtgtcttggtagcaccagccagtgtttcccagcccagagtttactgacttgtaattctctatccaggacatcaggagtgagggatggaaaaggggataaaaggcctggagccacactctatatggctgaggaaggagctagggaaagagatagacacaatggggtgaaaacaattttgccgcccctgcctggaaactgctggtggggaaatgatggtgaagggtgtttgcttgaactcatgagacggtccaaatctcataaactagccttctcaaaatcccagcaatataaagcactgtttttcttcagtcgtttaaataaacttgtaaatacattgaagtttacatttccatgtgctgttgatcaacggcgccacctgtgtttgctgagactggtctctgagagagttttatgtcgatcgaggcctgttgctcattaagctgagtgcagacgtccttaatccctgcagatagtgggatgaaagcaagttctgtaaaatgaagcacaacatagccaggagtgaagagatggcagatgttaatttcttaaaattttccttttttttttttttttttgcaaatacctcacttggataatacaaatcaggacatgttggtgaggggctggctgcttggctgctgcttttattcacacttgttcagggagagcacagagaatacccttcagcatggccactctggacccaagaggaggaaaaaacggaagcttttttaggagaaggaggacttgctggaatccaagatgtgaagaactcttggtgactggctggctggccagcgggcaccacacctgcacttgagtgcctcgggcttgcttattaataacgcacagaagaagcatcacttctcaccatctcctggcatgtatggagcagggagcaaggctatgttcccgaaagccctgattagcttgtcttgctctacgctcgacctcgaacaatacagcttgtaagacctcagtcagtcctggtacactggggtaaatcagtgtggtggtggaagaaaagccgggaggcctatttttataggaaaatagtaccattaaaggtgcaatgctgtcattttggacaaaaggaaagaaatttggaagagctgggattattggcaaaaacttgctgaggggtgaatctttagagctaatcactgcagaatcagagttgcagcaatatgattgcaagcaagtctgaatgcatagttttactttaattcggcttgacaatttgaataggtaaccccctcgggactgactgaatcgttatgcatgtgtcaatcaatgggaggtgtgcattctctagaagtagttttaggctgtttggtttggttttggttttgttttttaaatgcagcctgttgaggcactgtcatgtggtgtgaaagatttaaatgtagcaacgctaaagagtaataatttggggataagaagtggggacattggccgggcgcggtggctcacgcctgtaattccagcactttgggaggcctaggtgggcggatcagctgaggtcgagagttcgaggccagtctgaccaacatggtgaaaccccatctctactaaaaatacagaaaattagctgggtctggtggtggatgcctgtaatcccagctactcgggaggctgaggcaggagaattgcttgaacccaggaggtggacggtgcagtgagctattactccagcctgggcaacaagagcgaaactctgtctcaaaaaaaaaaagggggggggggacattaagagagtggtgatgacccaaatgttgaaccaattatgttttggtggtggtgttcttagctgttgaatcctgaatggtttataaagtgaactagctggcttaatgcagccagcgttctgggcagcagaacatattcattcttactgtaaattctatttgctgcttccaaaggtgatgattttcaagcagacatgttctatatggtctgtgttttaggatctggtgcccagcctctatcagagcttgcctacctggcaaagctgcctacccttcaagtgggaaaatataatccactgtttaacaaggctcaccctctccaccctgtcctaacgaccttttgtgaatgtgctgtgatattttcttgctcaatagcaaggtggtagctctgctttcattttaagaaagtggaggctgagggcattgtatcaatactgttgcaactccaagaagttttccttgtaaaattaaaggaaagatcttgttattgattaaccattttcttatgccttgctattgacatattcatgctctttctacgtctagtggctgaaaatgtttgcatttgttcatttgactaatggtgtgatttttgtttctatattattagacctgtaatgttttaaaatgtattttattaaatttggactggatgtatgtctctagcaatacgaggtactttctaaactattaagggaggggttgtatcctcatgttgagataagatgatggtcgtttaaattttgcaattttttttggcctgcagggatattttgtgtttatgtgtccaaaaaaggaataaattggcattcttgtgccaaaagttgtttttcctgtcaattgtctaataagtatgcagtacactgtaatggcaacatacatggttgctttataaaaacagtttcctcagtatgagaaattttacaaagaacagtggaaaaactttgtgtttttaactcttgggtctccctatttttaaaaattgctatttggtatacaattattatgtgtcaattaaaactaaaataaaacttttaaaaaagaaaaaaaaa

SEQ ID NO: 56904 - DNA, 6727 bp, Homo sapiens
  misc_feature (3058)..(3058): n is a, c, g, or t
  misc_feature (3121)..(3121): n is a, c, g, or t
  misc_feature (3202)..(3202): n is a, c, g, or t
ggcggcggcggcggcggcggcggcggggattgtttttgttgtcgctgaggccggaagagccggagccgggtccctgtccccgggccgggcgccgccgccgccccctgcccagcgcccgcgtctccgcggcgccaccccagcgccaatattccggagatcaagcgttacgcggcggcggcggcggcggcggcggggcccggagcgggaggcgccggggaccggggcgaggcggcccccgccgccgccatggaggcgctgggacccggacctccggctagcctgtttcagccacctcgtcgtcctggccttggaactgttggaaaaccaattcgactgttagccaatcattttcaggttcagattcctaaaatagatgtgtatcactatgatgtggatattaagcctgaaaaacggcctcgtagagtcaacagggaggtagtagatacaatggtgcggcacttcaagatgcaaatatttggtgatcggcagcctgggtatgatggcaaaagaaacatgtacacagcacatccactaccaattggacgggatagggttgatatggaggtgactcttccaggcgagggtaaagaccaaacatttaaagtgtctgttcagtgggtgtcagttgtgagccttcagttgcttttagaagctttggctgggcacttgaatgaagtcccagatgactcagtacaagcacttgatgttatcacaagacaccttccctccatgaggtacaccccagtgggccgttcctttttctcacccccggaaggttactaccaccctctgggagggggcagggaggtctggtttggttttcatcagtctgtgagacctgccatgtggaatatgatgctcaacattgatgtatctgcaactgctttctaccgggctcagcctatcattgagttcatgtgtgaggttttagacattcagaacatcaatgaacagaccaaacctctaacagactcccagcgtgtcaaatttaccaaagaaatcagaggtctcaaagttgaggtgacccactgtggacagatgaaacgaaaataccgagtttgtaatgtgactagacggccagccagtcatcaaacttttcctttgcagctagaaaacggtcaagctatggaatgtacagtagctcaatattttaagcaaaagtatagtctgcaactgaaatacccccatcttccctgtctccaagtgggacaagaacaaaagcatacatacttgccactcgaggtctgtaatatagtggcaggacagcgatgtatcaagaagctcacagacaatcagacttccacaatgatcaaagctacagcaagatctgctcctgacagacaggaagagatcagtagactggtgaagagcaacagtatggtgggtggacctgatccataccttaaagaatttggtattgttgtccacaatgaaatgacagagctcacaggcagggtacttccagcaccaatgctgcaatatggaggccggaataaaacagtagccacacccaaccagggtgtctgggacatgcgaggaaagcagttttatgctggcattgaaattaaagtttgggcagttgcttgttttgcacctcagaaacaatgtagggaagatttactaaagagtttcactgaccagctgcgtaaaatctctaaggatgcaggaatgcccatccagggtcagccatgtttctgcaagtatgcacaaggtgcagacagtgtggagcctatgtttaaacatctgaaaatgacttatgtgggcctacagctaatagtggttatcctgcctggaaagacaccagtatatgcggaggtgaaacgtgttggagatacccttctaggtatggccacacagtgtgtccaggtaaaaaatgtagtgaagacctcacctcaaaccctttccaatctttgcctgaagataaatgcaaaacttggaggaattaacaatgtgcttgtgcctcatcaaaggccctcggtgttccagcagcctgtcatcttcctgggagcggatgtcacacaccccccagcaggggatgggaagaaaccttccattgctgctgtggttggcagtatggatggccaccccagccggtactgtgccaccgttcgggtgcagacttcccggcaggagatctcccaagagctcctctacagtcaagaggtcatccaggacctgactaacatggttcgagagctgctgattcagttctacaaatccacacgcttcaaacccactcggatcatctattaccgtggaggggtatctgagggacaaatgaaacaggtagcttggccagaactaatagcaattcgaaaggcatgtattagcttggaagaagattaccggccaggaataacttatattgtggtgcaaaaaagacatcacacacgactcttctgtgcagataaaacagaaagggtagggaaaagtggcaatgtaccagcaggcactacagtggatagtaccatcacacatccatctgagtttgacttttacctctgtagtcatgcaggaattcagggaaccagccgtccctcacattaccaggtcttgtgggatgacaactgcttcactgcagatgaactccagctactgacttaccagctgtgtcacacctatgtgaggtgcactcgctcagtctctattccagcccctgcatattatgcccggcttgtagcatttagggcaaggtatcatctggtggataaagatcatgacagtgcggaaggcagtcatgtgtcaggacagagcaacggccgggatcctcaggccttggctaaggctgtgcaaatccaccatgatacccagcacacgatgtattttgcctgagagtctcagaaaaagaactcaaccaatttggcaccccatgcagcctcaaaatgtttcaaatgcctaccgcctctagatcgagccacgttgacttcaggtggtcttctaccagcagctcggaatagttgcactgaatctatactttgcagcactgtctgatgcgtcaacaaaattgagccatttttttaaagtaatagatactaatagattatcttttctgatgcantggactgaatttttacctcaatgtgcaaaggctgatcagcctgaactttctaaaggactttanaagaagggtttctatggaatattttgctagctgtggtgttcaccgcatccctctagtcttagaagagaagattattccttntttctgtagtcattgagtggggtatatgcataagtgggagagaaaaaccaaacaatctacttcagttcagtgtaactatttaattgtgtgggtccatagactttttaatgaagatttctgactttgccactgtaaatgcctttaatgagcattaatttttgaaagttttacagagttttattagttttactactttatcttattgatctctgcagacttgtgctggtgcaagtacatgctgacaggcaatttgcactatatttggctgcagattcaaataggcagttctcttatttggtcgacttttgtgaatgtgtgacataaacagatgtaatgcatgtcacagtgacggagataacactgccatgataaaagtactcatgtttcccctatttggaaaaaaaaattgcttttagtatttttccaagttttcaaaagtgcccattttatgctgctgtgtggtttgttaaatctaaatgatttttaaacttttctcatagaaacttaactttggcaataaacattttttaaggtctctcctcttccttccccaacaatgtagttttctagatgagatttcagtatgattttatcagctatttcttatatatcataatctggcaatttctgaaaccagtcagaaaagacatatatttccatgcctttttaaagaattatttttacctgttttatattcacagttggtgtcctgtcactttgttttaaaataagctagaaccaggatgcttccttattggaaaggctttgccagtccttaaggtacaatgagtgatgctgcaacttgcaaatgtaccagcatttaaaatttcttttcctgggaatcaaggtaactcacacgactacttgcagtacaaattttttgcttctctttcgacatgaaatgtacttggtgggttttccttccttttattaaactaaaactgtgtggaaaaggttgatttttcttaatagattctggattccactcacagggagatgggattcctttcttgtccaaacaaagggagttgctctaaagcgagcatcagttaaaatgtaggggaaaatgtattctgtatgtagtgtagataatactttgtgaatggacaacagttacatagtgtcttggtagcaccagccagtgtttcccagcccagagtttactgacttgtaattctctatccaggacatcaggagtgagggatggaaaaggggataaaaggcctggagccacactctatatggctgaggaaggagctagggaaagagatagacacaatggggtgaaaacaattttgccgcccctgcctggaaactgctggtggggaaatgatggtgaagggtgtttgcttgaactcatgagacggtccaaatctcataaactagccttctcaaaatcccagcaatataaagcactgtttttcttcagtcgtttaaataaacttgtaaatacattgaagtttacatttccatgtgctgttgatcaacggcgccacctgtgtttgctgagactggtctctgagagagttttatgtcgatcgaggcctgttgctcattaagctgagtgcagacgtccttaatccctgcagatagtgggatgaaagcaagttctgtaaaatgaagcacaacatagccaggagtgaagagatggcagatgttaatttcttaaaattttccttttttttttttttttttgcaaatacctcacttggataatacaaatcaggacatgttggtgaggggctggctgcttggctgctgcttttattcacacttgttcagggagagcacagagaatacccttcagcatggccactctggacccaagaggaggaaaaaacggaagcttttttaggagaaggaggacttgctggaatccaagatgtgaagaactcttggtgactggctggctggccagcgggcaccacacctgcacttgagtgcctcgggcttgcttattaataacgcacagaagaagcatcacttctcaccatctcctggcatgtatggagcagggagcaaggctatgttcccgaaagccctgattagcttgtcttgctctacgctcgacctcgaacaatacagcttgtaagacctcagtcagtcctggtacactggggtaaatcagtgtggtggtggaagaaaagccgggaggcctatttttataggaaaatagtaccattaaaggtgcaatgctgtcattttggacaaaaggaaagaaatttggaagagctgggattattggcaaaaacttgctgaggggtgaatctttagagctaatcactgcagaatcagagttgcagcaatatgattgcaagcaagtctgaatgcatagttttactttaattcggcttgacaatttgaataggtaaccccctcgggactgactgaatcgttatgcatgtgtcaatcaatgggaggtgtgcattctctagaagtagttttaggctgtttggtttggttttggttttgttttttaaatgcagcctgttgaggcactgtcatgtggtgtgaaagatttaaatgtagcaacgctaaagagtaataatttggggataagaagtggggacattggccgggcgcggtggctcacgcctgtaattccagcactttgggaggcctaggtgggcggatcagctgaggtcgagagttcgaggccagtctgaccaacatggtgaaaccccatctctactaaaaatacagaaaattagctgggtctggtggtggatgcctgtaatcccagctactcgggaggctgaggcaggagaattgcttgaacccaggaggtggacggtgcagtgagctattactccagcctgggcaacaagagcgaaactctgtctcaaaaaaaaaaagggggggggggacattaagagagtggtgatgacccaaatgttgaaccaattatgttttggtggtggtgttcttagctgttgaatcctgaatggtttataaagtgaactagctggcttaatgcagccagcgttctgggcagcagaacatattcattcttactgtaaattctatttgctgcttccaaaggtgatgattttcaagcagacatgttctatatggtctgtgttttaggatctggtgcccagcctctatcagagcttgcctacctggcaaagctgcctacccttcaagtgggaaaatataatccactgtttaacaaggctcaccctctccaccctgtcctaacgaccttttgtgaatgtgctgtgatattttcttgctcaatagcaaggtggtagctctgctttcattttaagaaagtggaggctgagggcattgtatcaatactgttgcaactccaagaagttttccttgtaaaattaaaggaaagatcttgttattgattaaccattttcttatgccttgctattgacatattcatgctctttctacgtctagtggctgaaaatgtttgcatttgttcatttgactaatggtgtgatttttgtttctatattattagacctgtaatgttttaaaatgtattttattaaatttggactggatgta

SEQ ID NO: 56905 - DNA, 5031 bp, Homo sapiens
  misc_feature (3434)..(3434): n is a, c, g, or t
  misc_feature (3497)..(3497): n is a, c, g, or t
  misc_feature (3578)..(3578): n is a, c, g, or t
ggcggcggcggcggcggcggcggcggggattgtttttgttgtcgctgaggccggaagagccggagccgggtccctgtccccgggccgggcgccgccgccgccccctgcccagcgcccgcgtctccgcggcgccaccccagcgccaatattccggagatcaagcgttacgcggcggcggcggcggcggcggcggggcccggagcgggaggcgccggggaccggggcgaggcggcccccgccgccgccatggaggcgctgggacccggacctccggctagcctgtttcagccacctcgtcgtcctggccttggaactgttggaaaaccaattcgactgttagccaatcattttcaggttcagattcctaaaatagatgtgtatcactatgatgtggatattaagcctgaaaaacggcctcgtagagtcaacagggaggtagtagatacaatggtgcggcacttcaagatgcaaatatttggtgatcggcagcctgggtatgatggcaaaagaaacatgtacacagcacatccactaccaattggacgggatagggttgatatggaggtgactcttccaggcgagggtaaagaccaaacatttaaagtgtctgttcagtgggtgtcagttgtgagccttcagttgcttttagaagctttggctgggcacttgaatgaagtcccagatgactcagtacaagcacttgatgttatcacaagacaccttccctccatgaggtacaccccagtgggccgttcctttttctcacccccggaaggttactaccaccctctgggagggggcagggaggtctggtttggttttcatcagtctgtgagacctgccatgtggaatatgatgctcaacattgatgtatctgcaactgctttctaccgggctcagcctatcattgagttcatgtgtgaggttttagacattcagaacatcaatgaacagaccaaacctctaacagactcccagcgtgtcaaatttaccaaagaaatcagaggtctcaaagttgaggtgacccactgtggacagatgaaacgaaaataccgagtttgtaatgtgactagacggccagccagtcatcaaacttttcctttgcagctagaaaacggtcaagctatggaatgtacagtagctcaatattttaagcaaaagtatagtctgcaactgaaatacccccatcttccctgtctccaagtgggacaagaacaaaagcatacatacttgccactcgaggtctgtaatatagtggcaggacagcgatgtatcaagaagctcacagacaatcagacttccacaatgatcaaagctacagcaagatctgctcctgacagacaggaagagatcagtagactggtcagtaaggcatggtcttcaagatgagctagctttgagatgacaaaaaacaaaagaatagaaaactcctcctgggacacagttactctctggtttttatatatgcaggctttcctgttctttaggtgaagagcaacagtatggtgggtggacctgatccataccttaaagaatttggtattgttgtccacaatgaaatgacagagctcacaggcagggtacttccagcaccaatgctgcaatatggaggccgggtaagctttttattttattcagcaagcttcttccacaaccagtcaaaaagagaataatccagggtttctctactctgccactgctgaatttacccatagttttgttcattattgccttttgtgttctggctcatacctaatagaattttgtttattcactagtcaatagtaaaatggccttagattgtaatgtcttttctcttttcttttgtttcttcttcttcttcttcttctttttttttttttcaaagaataaaacagtagccacacccaaccagggtgtctgggacatgcgaggaaagcagttttatgctggcattgaaattaaagtttgggcagttgcttgttttgcacctcagaaacaatgtagggaagatttactaaagagtttcactgaccagctgcgtaaaatctctaaggatgcaggaatgcccatccagggtcagccatgtttctgcaagtatgcacaaggtgcagacagtgtggagcctatgtttaaacatctgaaaatgacttatgtgggcctacagctaatagtggttatcctgcctggaaagacaccagtatatgcggaggtgaaacgtgttggagatacccttctaggtatggccacacagtgtgtccaggtaaaaaatgtagtgaagacctcacctcaaaccctttccaatctttgcctgaagataaatgcaaaacttggaggaattaacaatgtgcttgtgcctcatcaaaggccctcggtgttccagcagcctgtcatcttcctgggagcggatgtcacacaccccccagcaggggatgggaagaaaccttccattgctgctgtggttggcagtatggatggccaccccagccggtactgtgccaccgttcgggtgcagacttcccggcaggagatctcccaagagctcctctacagtcaagaggtcatccaggacctgactaacatggttcgagagctgctgattcagttctacaaatccacacgcttcaaacccactcggatcatctattaccgtggaggggtatctgagggacaaatgaaacaggtagcttggccagaactaatagcaattcgaaaggcatgtattagcttggaagaagattaccggccaggaataacttatattgtggtgcaaaaaagacatcacacacgactcttctgtgcagataaaacagaaagggtagggaaaagtggcaatgtaccagcaggcactacagtggatagtaccatcacacatccatctgagtttgacttttacctctgtagtcatgcaggaattcagggaaccagccgtccctcacattaccaggtcttgtgggatgacaactgcttcactgcagatgaactccagctactgacttaccagctgtgtcacacctatgtgaggtgcactcgctcagtctctattccagcccctgcatattatgcccggcttgtagcatttagggcaaggtatcatctggtggataaagatcatgacagtgcggaaggcagtcatgtgtcaggacagagcaacggccgggatcctcaggccttggctaaggctgtgcaaatccaccatgatacccagcacacgatgtattttgcctgagagtctcagaaaaagaactcaaccaatttggcaccccatgcagcctcaaaatgtttcaaatgcctaccgcctctagatcgagccacgttgacttcaggtggtcttctaccagcagctcggaatagttgcactgaatctatactttgcagcactgtctgatgcgtcaacaaaattgagccatttttttaaagtaatagatactaatagattatcttttctgatgcantggactgaatttttacctcaatgtgcaaaggctgatcagcctgaactttctaaaggactttanaagaagggtttctatggaatattttgctagctgtggtgttcaccgcatccctctagtcttagaagagaagattattccttntttctgtagtcattgagtggggtatatgcataagtgggagagaaaaaccaaacaatctacttcagttcagtgtaactatttaattgtgtgggtccatagactttttaatgaagatttctgactttgccactgtaaatgcctttaatgagcattaatttttgaaagttttacagagttttattagttttactactttatcttattgatctctgcagacttgtgctggtgcaagtacatgctgacaggcaatttgcactatatttggctgcagattcaaataggcagttctcttatttggtcgacttttgtgaatgtgtgacataaacagatgtaatgcatgtcacagtgacggagataacactgccatgataaaagtactcatgtttcccctatttggaaaaaaaaattgcttttagtatttttccaagttttcaaaagtgcccattttatgctgctgtgtggtttgttaaatctaaatgatttttaaacttttctcatagaaacttaactttggcaataaacattttttaaggtctctcctcttccttccccaacaatgtagttttctagatgagatttcagtatgattttatcagctatttcttatatatcataatctggcaatttctgaaaccagtcagaaaagacatatatttccatgcctttttaaagaattatttttacctgttttatattcacagttggtgtcctgtcactttgttttaaaataagctagaaccaggatgcttccttattggaaaggctttgccagtccttaaggtacaatgagtgatgctgcaacttgcaaatgtaccagcatttaaaatttcttttcctgggaatcaaggtaactcacacgactacttgcagtacaaattttttgcttctctttcgacatgaaatgtacttggtgggttttccttccttttattaaactaaaactgtgtggaaaaggttgatttttcttaatagattctggattccactcacagggagatgggattcctttcttgtccaaacaaagggagttgctctaaagcgagcatcagttaaaatgtaggggaaaatgtattctgtatgtagtgtagataatactttgtgaatggacaacagttacatagtgtcttggtagcaccagccagtgtttcccagcccagagtttactgacttgtaattctctatccaggacatcaggagtgagggatggaaaaggggataaaaggcctggagccacactctatatggctgaggaaggagctagggaaagagatagacacaatggggtgaaaacaattttgccgcccctgcctggaaactgctggtggggaaatgatggtgaagggtgtttgcttgaactcatgagacggtccaaatctcataaactagccttctcaaaatcccagcaatataaagcactgtttttcttcagtcgtttaaataaacttgtaaatac

SEQ ID NO: 56906 - DNA, 7439 bp, Homo sapiens
  misc_feature (3375)..(3375): n is a, c, g, or t
  misc_feature (3438)..(3438): n is a, c, g, or t
  misc_feature (3519)..(3519): n is a, c, g, or t
ggcggcggcggcggcggcggcggcggggattgtttttgttgtcgctgaggccggaagagccggagccgggtccctgtccccgggccgggcgccgccgccgccccctgcccagcgcccgcgtctccgcggcgccaccccagcgccaatattccggagatcaagcgttacgcggcggcggcggcggcggcggcggggcccggagcgggaggcgccggggaccggggcgaggcggcccccgccgccgccatggaggcgctgggacccggacctccggctagcctgtttcagccacctcgtcgtcctggccttggaactgttggaaaaccaattcgactgttagccaatcattttcaggttcagattcctaaaatagatgtgtatcactatgatgtggatattaagcctgaaaaacggcctcgtagagtcaacagggaggtagtagatacaatggtgcggcacttcaagatgcaaatatttggtgatcggcagcctgggtatgatggcaaaagaaacatgtacacagcacatccactaccaattggacgggatagggttgatatggaggtgactcttccaggcgagggtaaagaccaaacatttaaagtgtctgttcagtgggtgtcagttgtgagccttcagttgcttttagaagctttggctgggcacttgaatgaagtcccagatgactcagtacaagcacttgatgttatcacaagacaccttccctccatgaggtacaccccagtgggccgttcctttttctcacccccggaaggttactaccaccctctgggagggggcagggaggtctggtttggttttcatcagtctgtgagacctgccatgtggaatatgatgctcaacattgatgtatctgcaactgctttctaccgggctcagcctatcattgagttcatgtgtgaggttttagacattcagaacatcaatgaacagaccaaacctctaacagactcccagcgtgtcaaatttaccaaagaaatcagaggtctcaaagttgaggtgacccactgtggacagatgaaacgaaaataccgagtttgtaatgtgactagacggccagccagtcatcaaacttttcctttgcagctagaaaacggtcaagctatggaatgtacagtagctcaatattttaagcaaaagtatagtctgcaactgaaatacccccatcttccctgtctccaagtgggacaagaacaaaagcatacatacttgccactcgaggtctgtaatatagtggcaggacagcgatgtatcaagaagctcacagacaatcagacttccacaatgatcaaagctacagcaagatctgctcctgacagacaggaagagatcagtagactggtcagtaaggcatggtcttcaagatgagctagctttgagatgacaaaaaacaaaagaatagaaaactcctcctgggacacagttactctctggtttttatatatgcaggctttcctgttctttaggtgaagagcaacagtatggtgggtggacctgatccataccttaaagaatttggtattgttgtccacaatgaaatgacagagctcacaggcagggtacttccagcaccaatgctgcaatatggaggccgggtaagctttttattttattcagcaagcttcttccacaaccagtcaaaaagagaataatccagggtttctctactctgccactgctgaatttacccatagttttgttcattattgccttttgtgttctggctcatacctaatagaattttgtttattcactagtcaatagtaaaatggccttagattgtaatgtcttttctcttttcttttgtttcttcttcttcttcttcttctttttttttttttcaaagaataaaacagtagccacacccaaccagggtgtctgggacatgcgaggaaagcagttttatgctggcattgaaattaaagtttgggcagttgcttgttttgcacctcagaaacaatgtagggaagatttactaaagagtttcactgaccagctgcgtaaaatctctaaggatgcaggaatgcccatccagggtcagccatgtttctgcaagtatgcacaaggtgcagacagtgtggagcctatgtttaaacatctgaaaatgacttatgtgggcctacagctaatagtggttatcctgcctggaaagacaccagtatatgcggaggtgaaacgtgttggagatacccttctaggtatggccacacagtgtgtccaggtaaaaaatgtagtgaagacctcacctcaaaccctttccaatctttgcctgaagataaatgcaaaacttggaggaattaacaatgtgcttgtgcctcatcaaaggccctcggtgttccagcagcctgtcatcttcctgggagcggatgtcacacaccccccagcaggggatgggaagaaaccttccattgctgctgtggttggcagtatggatggccaccccagccggtactgtgccaccgttcgggtgcagacttcccggcaggagatctcccaagagctcctctacagtcaagaggtcatccaggacctgactaacatggttcgagagctgctgattcagttctacaaatccacacgcttcaaacccactcggatcatctattaccgtggaggggtatctgagggacaaatgaaacaggtagcttggccagaactaatagcaattcgaaaggcatgtattagcttggaagaagattaccggccaggaataacttatattgtggtgcaaaaaagacatcacacacgactcttctgtgcagataaaacagaaaggatctgagtttgacttttacctctgtagtcatgcaggaattcagggaaccagccgtccctcacattaccaggtcttgtgggatgacaactgcttcactgcagatgaactccagctactgacttaccagctgtgtcacacctatgtgaggtgcactcgctcagtctctattccagcccctgcatattatgcccggcttgtagcatttagggcaaggtatcatctggtggataaagatcatgacagtgcggaaggcagtcatgtgtcaggacagagcaacggccgggatcctcaggccttggctaaggctgtgcaaatccaccatgatacccagcacacgatgtattttgcctgagagtctcagaaaaagaactcaaccaatttggcaccccatgcagcctcaaaatgtttcaaatgcctaccgcctctagatcgagccacgttgacttcaggtggtcttctaccagcagctcggaatagttgcactgaatctatactttgcagcactgtctgatgcgtcaacaaaattgagccatttttttaaagtaatagatactaatagattatcttttctgatgcantggactgaatttttacctcaatgtgcaaaggctgatcagcctgaactttctaaaggactttanaagaagggtttctatggaatattttgctagctgtggtgttcaccgcatccctctagtcttagaagagaagattattccttntttctgtagtcattgagtggggtatatgcataagtgggagagaaaaaccaaacaatctacttcagttcagtgtaactatttaattgtgtgggtccatagactttttaatgaagatttctgactttgccactgtaaatgcctttaatgagcattaatttttgaaagttttacagagttttattagttttactactttatcttattgatctctgcagacttgtgctggtgcaagtacatgctgacaggcaatttgcactatatttggctgcagattcaaataggcagttctcttatttggtcgacttttgtgaatgtgtgacataaacagatgtaatgcatgtcacagtgacggagataacactgccatgataaaagtactcatgtttcccctatttggaaaaaaaaattgcttttagtatttttccaagttttcaaaagtgcccattttatgctgctgtgtggtttgttaaatctaaatgatttttaaacttttctcatagaaacttaactttggcaataaacattttttaaggtctctcctcttccttccccaacaatgtagttttctagatgagatttcagtatgattttatcagctatttcttatatatcataatctggcaatttctgaaaccagtcagaaaagacatatatttccatgcctttttaaagaattatttttacctgttttatattcacagttggtgtcctgtcactttgttttaaaataagctagaaccaggatgcttccttattggaaaggctttgccagtccttaaggtacaatgagtgatgctgcaacttgcaaatgtaccagcatttaaaatttcttttcctgggaatcaaggtaactcacacgactacttgcagtacaaattttttgcttctctttcgacatgaaatgtacttggtgggttttccttccttttattaaactaaaactgtgtggaaaaggttgatttttcttaatagattctggattccactcacagggagatgggattcctttcttgtccaaacaaagggagttgctctaaagcgagcatcagttaaaatgtaggggaaaatgtattctgtatgtagtgtagataatactttgtgaatggacaacagttacatagtgtcttggtagcaccagccagtgtttcccagcccagagtttactgacttgtaattctctatccaggacatcaggagtgagggatggaaaaggggataaaaggcctggagccacactctatatggctgaggaaggagctagggaaagagatagacacaatggggtgaaaacaattttgccgcccctgcctggaaactgctggtggggaaatgatggtgaagggtgtttgcttgaactcatgagacggtccaaatctcataaactagccttctcaaaatcccagcaatataaagcactgtttttcttcagtcgtttaaataaacttgtaaatacattgaagtttacatttccatgtgctgttgatcaacggcgccacctgtgtttgctgagactggtctctgagagagttttatgtcgatcgaggcctgttgctcattaagctgagtgcagacgtccttaatccctgcagatagtgggatgaaagcaagttctgtaaaatgaagcacaacatagccaggagtgaagagatggcagatgttaatttcttaaaattttccttttttttttttttttttgcaaatacctcacttggataatacaaatcaggacatgttggtgaggggctggctgcttggctgctgcttttattcacacttgttcagggagagcacagagaatacccttcagcatggccactctggacccaagaggaggaaaaaacggaagcttttttaggagaaggaggacttgctggaatccaagatgtgaagaactcttggtgactggctggctggccagcgggcaccacacctgcacttgagtgcctcgggcttgcttattaataacgcacagaagaagcatcacttctcaccatctcctggcatgtatggagcagggagcaaggctatgttcccgaaagccctgattagcttgtcttgctctacgctcgacctcgaacaatacagcttgtaagacctcagtcagtcctggtacactggggtaaatcagtgtggtggtggaagaaaagccgggaggcctatttttataggaaaatagtaccattaaaggtgcaatgctgtcattttggacaaaaggaaagaaatttggaagagctgggattattggcaaaaacttgctgaggggtgaatctttagagctaatcactgcagaatcagagttgcagcaatatgattgcaagcaagtctgaatgcatagttttactttaattcggcttgacaatttgaataggtaaccccctcgggactgactgaatcgttatgcatgtgtcaatcaatgggaggtgtgcattctctagaagtagttttaggctgtttggtttggttttggttttgttttttaaatgcagcctgttgaggcactgtcatgtggtgtgaaagatttaaatgtagcaacgctaaagagtaataatttggggataagaagtggggacattggccgggcgcggtggctcacgcctgtaattccagcactttgggaggcctaggtgggcggatcagctgaggtcgagagttcgaggccagtctgaccaacatggtgaaaccccatctctactaaaaatacagaaaattagctgggtctggtggtggatgcctgtaatcccagctactcgggaggctgaggcaggagaattgcttgaacccaggaggtggacggtgcagtgagctattactccagcctgggcaacaagagcgaaactctgtctcaaaaaaaaaaagggggggggggacattaagagagtggtgatgacccaaatgttgaaccaattatgttttggtggtggtgttcttagctgttgaatcctgaatggtttataaagtgaactagctggcttaatgcagccagcgttctgggcagcagaacatattcattcttactgtaaattctatttgctgcttccaaaggtgatgattttcaagcagacatgttctatatggtctgtgttttaggatctggtgcccagcctctatcagagcttgcctacctggcaaagctgcctacccttcaagtgggaaaatataatccactgtttaacaaggctcaccctctccaccctgtcctaacgaccttttgtgaatgtgctgtgatattttcttgctcaatagcaaggtggtagctctgctttcattttaagaaagtggaggctgagggcattgtatcaatactgttgcaactccaagaagttttccttgtaaaattaaaggaaagatcttgttattgattaaccattttcttatgccttgctattgacatattcatgctctttctacgtctagtggctgaaaatgtttgcatttgttcatttgactaatggtgtgatttttgtttctatattattagacctgtaatgttttaaaatgtattttattaaatttggactggatgtatgtctctagcaatacgaggtactttctaaactattaagggaggggttgtatcctcatgttgagataagatgatggtcgtttaaattttgcaattttttttggcctgcagggatattttgtgtttatgtgtccaaaaaaggaataaattggcattcttgtgccaaaagttgtttttcctgtcaattgtctaataagtatgcagtacactgtaatggcaacatacatggttgctttataaaaacagtttcctcagtatgagaaattttacaaagaacagtggaaaaactttgtgtttttaactcttgggtctccctatttttaaaaattgctatttggtatacaattattatgtgtcaattaaaactaaaataaaacttttaaaaaagaaaaaaaaa

SEQ ID NO: 56907 - DNA, 5487 bp, Homo sapiens
  misc_feature (134)..(134): n is a, c, g, or t
  misc_feature (156)..(157): n is a, c, g, or t
  misc_feature (163)..(163): n is a, c, g, or t
  misc_feature (165)..(165): n is a, c, g, or t
  misc_feature (173)..(173): n is a, c, g, or t
  misc_feature (182)..(182): n is a, c, g, or t
  misc_feature (188)..(188): n is a, c, g, or t
  misc_feature (190)..(191): n is a, c, g, or t
  misc_feature (1423)..(1423): n is a, c, g, or t
  misc_feature (1486)..(1486): n is a, c, g, or t
  misc_feature (1567)..(1567): n is a, c, g, or t
tgatggtactatccactgtagtgcctgctggtacatgccacttttccctgccctttctgttttatctgcacagaagagtcgtgtgtgatgtcttttttgcaccacaatataagttattcctggccggtaatctnctcccaagctaatacatgcctnncgaatngntattagtnctggccagntacctntnncatttgtccccttctaggtatggccacacagtgtgtccaggtaaaaaatgtagtgaagacctcacctcaaaccctttccaatctttgcctgaagataaatgcaaaacttggaggaattaacaatgtgcttgtgcctcatcaaaggccctcggtgttccagcagcctgtcatcttcctgggagcggatgtcacacaccccccagcaggggatgggaagaaaccttccattgctgctgtggttggcagtatggatggccaccccagccggtactgtgccaccgttcgggtgcagacttcccggcaggagatctcccaagagctcctctacagtcaagaggtcatccaggacctgactaacatggttcgagagctgctgattcagttctacaaatccacacgcttcaaacccactcggatcatctattaccgtggaggggtatctgagggacaaatgaaacaggtagcttggccagaactaatagcaattcgaaaggcatgtattagcttggaagaagattaccggccaggaataacttatattgtggtgcaaaaaagacatcacacacgactcttctgtgcagataaaacagaaagggtagggaaaagtggcaatgtaccagcaggcactacagtggatagtaccatcacacatccatctgagtttgacttttacctctgtagtcatgcaggaattcagggaaccagccgtccctcacattaccaggtcttgtgggatgacaactgcttcactgcagatgaactccagctactgacttaccagctgtgtcacacctatgtgaggtgcactcgctcagtctctattccagcccctgcatattatgcccggcttgtagcatttagggcaaggtatcatctggtggataaagatcatgacagtgcggaaggcagtcatgtgtcaggacagagcaacggccgggatcctcaggccttggctaaggctgtgcaaatccaccatgatacccagcacacgatgtattttgcctgagagtctcagaaaaagaactcaaccaatttggcaccccatgcagcctcaaaatgtttcaaatgcctaccgcctctagatcgagccacgttgacttcaggtggtcttctaccagcagctcggaatagttgcactgaatctatactttgcagcactgtctgatgcgtcaacaaaattgagccatttttttaaagtaatagatactaatagattatcttttctgatgcantggactgaatttttacctcaatgtgcaaaggctgatcagcctgaactttctaaaggactttanaagaagggtttctatggaatattttgctagctgtggtgttcaccgcatccctctagtcttagaagagaagattattccttntttctgtagtcattgagtggggtatatgcataagtgggagagaaaaaccaaacaatctacttcagttcagtgtaactatttaattgtgtgggtccatagactttttaatgaagatttctgactttgccactgtaaatgcctttaatgagcattaatttttgaaagttttacagagttttattagttttactactttatcttattgatctctgcagacttgtgctggtgcaagtacatgctgacaggcaatttgcactatatttggctgcagattcaaataggcagttctcttatttggtcgacttttgtgaatgtgtgacataaacagatgtaatgcatgtcacagtgacggagataacactgccatgataaaagtactcatgtttcccctatttggaaaaaaaaattgcttttagtatttttccaagttttcaaaagtgcccattttatgctgctgtgtggtttgttaaatctaaatgatttttaaacttttctcatagaaacttaactttggcaataaacattttttaaggtctctcctcttccttccccaacaatgtagttttctagatgagatttcagtatgattttatcagctatttcttatatatcataatctggcaatttctgaaaccagtcagaaaagacatatatttccatgcctttttaaagaattatttttacctgttttatattcacagttggtgtcctgtcactttgttttaaaataagctagaaccaggatgcttccttattggaaaggctttgccagtccttaaggtacaatgagtgatgctgcaacttgcaaatgtaccagcatttaaaatttcttttcctgggaatcaaggtaactcacacgactacttgcagtacaaattttttgcttctctttcgacatgaaatgtacttggtgggttttccttccttttattaaactaaaactgtgtggaaaaggttgatttttcttaatagattctggattccactcacagggagatgggattcctttcttgtccaaacaaagggagttgctctaaagcgagcatcagttaaaatgtaggggaaaatgtattctgtatgtagtgtagataatactttgtgaatggacaacagttacatagtgtcttggtagcaccagccagtgtttcccagcccagagtttactgacttgtaattctctatccaggacatcaggagtgagggatggaaaaggggataaaaggcctggagccacactctatatggctgaggaaggagctagggaaagagatagacacaatggggtgaaaacaattttgccgcccctgcctggaaactgctggtggggaaatgatggtgaagggtgtttgcttgaactcatgagacggtccaaatctcataaactagccttctcaaaatcccagcaatataaagcactgtttttcttcagtcgtttaaataaacttgtaaatacattgaagtttacatttccatgtgctgttgatcaacggcgccacctgtgtttgctgagactggtctctgagagagttttatgtcgatcgaggcctgttgctcattaagctgagtgcagacgtccttaatccctgcagatagtgggatgaaagcaagttctgtaaaatgaagcacaacatagccaggagtgaagagatggcagatgttaatttcttaaaattttccttttttttttttttttttgcaaatacctcacttggataatacaaatcaggacatgttggtgaggggctggctgcttggctgctgcttttattcacacttgttcagggagagcacagagaatacccttcagcatggccactctggacccaagaggaggaaaaaacggaagcttttttaggagaaggaggacttgctggaatccaagatgtgaagaactcttggtgactggctggctggccagcgggcaccacacctgcacttgagtgcctcgggcttgcttattaataacgcacagaagaagcatcacttctcaccatctcctggcatgtatggagcagggagcaaggctatgttcccgaaagccctgattagcttgtcttgctctacgctcgacctcgaacaatacagcttgtaagacctcagtcagtcctggtacactggggtaaatcagtgtggtggtggaagaaaagccgggaggcctatttttataggaaaatagtaccattaaaggtgcaatgctgtcattttggacaaaaggaaagaaatttggaagagctgggattattggcaaaaacttgctgaggggtgaatctttagagctaatcactgcagaatcagagttgcagcaatatgattgcaagcaagtctgaatgcatagttttactttaattcggcttgacaatttgaataggtaaccccctcgggactgactgaatcgttatgcatgtgtcaatcaatgggaggtgtgcattctctagaagtagttttaggctgtttggtttggttttggttttgttttttaaatgcagcctgttgaggcactgtcatgtggtgtgaaagatttaaatgtagcaacgctaaagagtaataatttggggataagaagtggggacattggccgggcgcggtggctcacgcctgtaattccagcactttgggaggcctaggtgggcggatcagctgaggtcgagagttcgaggccagtctgaccaacatggtgaaaccccatctctactaaaaatacagaaaattagctgggtctggtggtggatgcctgtaatcccagctactcgggaggctgaggcaggagaattgcttgaacccaggaggtggacggtgcagtgagctattactccagcctgggcaacaagagcgaaactctgtctcaaaaaaaaaaagggggggggggacattaagagagtggtgatgacccaaatgttgaaccaattatgttttggtggtggtgttcttagctgttgaatcctgaatggtttataaagtgaactagctggcttaatgcagccagcgttctgggcagcagaacatattcattcttactgtaaattctatttgctgcttccaaaggtgatgattttcaagcagacatgttctatatggtctgtgttttaggatctggtgcccagcctctatcagagcttgcctacctggcaaagctgcctacccttcaagtgggaaaatataatccactgtttaacaaggctcaccctctccaccctgtcctaacgaccttttgtgaatgtgctgtgatattttcttgctcaatagcaaggtggtagctctgctttcattttaagaaagtggaggctgagggcattgtatcaatactgttgcaactccaagaagttttccttgtaaaattaaaggaaagatcttgttattgattaaccattttcttatgccttgctattgacatattcatgctctttctacgtctagtggctgaaaatgtttgcatttgttcatttgactaatggtgtgatttttgtttctatattattagacctgtaatgttttaaaatgtattttattaaatttggactggatgtatgtctctagcaatacgaggtactttctaaactattaagggaggggttgtatcctcatgttgagataagatgatggtcgtttaaattttgcaattttttttggcctgcagggatattttgtgtttatgtgtccaaaaaaggaataaattggcattcttgtgccaaaagttgtttttcctgtcaattgtctaataagtatgcagtacactgtaatggcaacatacatggttgctttataaaaacagtttcctcagtatgagaaattttacaaagaacagtggaaaaactttgtgtttttaactcttgggtctccctatttttaaaaattgctatttggtatacaattattatgtgtcaattaaaactaaaataaaacttttaaaaaagaaaaaaaaa

SEQ ID NO: 56908 - DNA, 6524 bp, Homo sapiens
ggcggcggcggcggcggcggcggcggggattgtttttgttgtcgctgaggccggaagagccggagccgggtccctgtccccgggccgggcgccgccgccgccccctgcccagcgcccgcgtctccgcggcgccaccccagcgccaatattccggagatcaagcgttacgcggcggcggcggcggcggcggcggggcccggagcgggaggcgccggggaccggggcgaggcggcccccgccgccgccatggaggcgctgggacccggacctccggctagcctgtttcagccacctcgtcgtcctggccttggaactgttggaaaaccaattcgactgttagccaatcattttcaggttcagattcctaaaatagatgtgtatcactatgatgtggatattaagcctgaaaaacggcctcgtagagtcaacagggaggtagtagatacaatggtgcggcacttcaagatgcaaatatttggtgatcggcagcctgggtatgatggcaaaagaaacatgtacacagcacatccactaccaattggacgggatagggttgatatggaggtgactcttccaggcgagggtaaagaccaaacatttaaagtgtctgttcagtgggtgtcagttgtgagccttcagttgcttttagaagctttggctgggcacttgaatgaagtcccagatgactcagtacaagcacttgatgttatcacaagacaccttccctccatgaggtacaccccagtgggccgttcctttttctcacccccggaaggttactaccaccctctgggagggggcagggaggtctggtttggttttcatcagtctgtgagacctgccatgtggaatatgatgctcaacattgatgtatctgcaactgctttctaccgggctcagcctatcattgagttcatgtgtgaggttttagacattcagaacatcaatgaacagaccaaacctctaacagactcccagcgtgtcaaatttaccaaagaaatcagaggtctcaaagttgaggtgacccactgtggacagatgaaacgaaaataccgagtttgtaatgtgactagacggccagccagtcatcaaacttttcctttgcagctagaaaacggtcaagctatggaatgtacagtagctcaatattttaagcaaaagtatagtctgcaactgaaatacccccatcttccctgtctccaagtgggacaagaacaaaagcatacatacttgccactcgaggtctgtaatatagtggcaggacagcgatgtatcaagaagctcacagacaatcagacttccacaatgatcaaagctacagcaagatctgctcctgacagacaggaagagatcagtagactggtcagtaaggcatggtcttcaagatgagctagctttgagatgacaaaaaacaaaagaatagaaaactcctcctgggacacagttactctctggtttttatatatgcaggctttcctgttctttaggtgaagagcaacagtatggtgggtggacctgatccataccttaaagaatttggtattgttgtccacaatgaaatgacagagctcacaggcagggtacttccagcaccaatgctgcaatatggaggccgggtaagctttttattttattcagcaagcttcttccacaaccagtcaaaaagagaataatccagggtttctctactctgccactgctgaatttacccatagttttgttcattattgccttttgtgttctggctcatacctaatagaattttgtttattcactagtcaatagtaaaatggccttagattgtaatgtcttttctcttttcttttgtttcttcttcttcttcttcttctttttttttttttcaaagaataaaacagtagccacacccaaccagggtgtctgggacatgcgaggaaagcagttttatgctggcattgaaattaaagtttgggcagttgcttgttttgcacctcagaaacaatgtagggaagatttactaaagagtttcactgaccagctgcgtaaaatctctaaggatgcaggaatgcccatccagggtcagccatgtttctgcaagtatgcacaaggtgcagacagtgtggagcctatgtttaaacatctgaaaatgacttatgtgggcctacagctaatagtggttatcctgcctggaaagacaccagtatatgcggaggtgaaacgtgttggagatacccttctaggtatggccacacagtgtgtccaggtaaaaaatgtagtgaagacctcacctcaaaccctttccaatctttgcctgaagataaatgcaaaacttggaggaattaacaatgtgcttgtgcctcatcaaaggccctcggtgttccagcagcctgtcatcttcctgggagcggatgtcacacaccccccagcaggggatgggaagaaaccttccattgctgctgtggttggcagtatggatggccaccccagccggtactgtgccaccgttcgggtgcagacttcccggcaggagatctcccaagagctcctctacagtcaagaggtcatccaggacctgactaacatggttcgagagctgctgattcagttctacaaatccacacgcttcaaacccactcggatcatctattaccgtggaggggtatctgagggacaaatgaaacaggtagcttggccagaactaatagcaattcgaaaggcatgtattagcttggaagaagattaccggccaggaataacttatattgtggtgcaaaaaagacatcacacacgactcttctgtgcagataaaacagaaagggtagggaaaagtggcaatgtaccagcaggcactacagtggatagtaccatcacacatccatctgagtttgacttttacctctgtagtcatgcaggaattcagggaaccagccgtccctcacattaccaggtcttgtgggatgacaactgcttcactgcagatgaactccagctactgacttaccagctgtgtcacacctatgtgaggtgcactcgctcagtctctattccagcccctgcatattatgcccggcttgtagcatttagggcaaggtatcatctggtggataaagatcatgacagtgcggaaggcagtcatgtgtcaggacagagcaacggccgggatcctcaggccttggctaaggctgtgcaaatccaccatgatacccagcacacgatgtattttgcctgagagtctcagaaaaagaactcaaccaatttggcaccccatgcagcctcaaaatgtttcaaatgcctaccgcctctagatcgagccacgttgacttcagttggtgtcctgtcactttgttttaaaataagctagaaccaggatgcttccttattggaaaggctttgccagtccttaaggtacaatgagtgatgctgcaacttgcaaatgtaccagcatttaaaatttcttttcctgggaatcaaggtaactcacacgactacttgcagtacaaattttttgcttctctttcgacatgaaatgtacttggtgggttttccttccttttattaaactaaaactgtgtggaaaaggttgatttttcttaatagattctggattccactcacagggagatgggattcctttcttgtccaaacaaagggagttgctctaaagcgagcatcagttaaaatgtaggggaaaatgtattctgtatgtagtgtagataatactttgtgaatggacaacagttacatagtgtcttggtagcaccagccagtgtttcccagcccagagtttactgacttgtaattctctatccaggacatcaggagtgagggatggaaaaggggataaaaggcctggagccacactctatatggctgaggaaggagctagggaaagagatagacacaatggggtgaaaacaattttgccgcccctgcctggaaactgctggtggggaaatgatggtgaagggtgtttgcttgaactcatgagacggtccaaatctcataaactagccttctcaaaatcccagcaatataaagcactgtttttcttcagtcgtttaaataaacttgtaaatacattgaagtttacatttccatgtgctgttgatcaacggcgccacctgtgtttgctgagactggtctctgagagagttttatgtcgatcgaggcctgttgctcattaagctgagtgcagacgtccttaatccctgcagatagtgggatgaaagcaagttctgtaaaatgaagcacaacatagccaggagtgaagagatggcagatgttaatttcttaaaattttccttttttttttttttttttgcaaatacctcacttggataatacaaatcaggacatgttggtgaggggctggctgcttggctgctgcttttattcacacttgttcagggagagcacagagaatacccttcagcatggccactctggacccaagaggaggaaaaaacggaagcttttttaggagaaggaggacttgctggaatccaagatgtgaagaactcttggtgactggctggctggccagcgggcaccacacctgcacttgagtgcctcgggcttgcttattaataacgcacagaagaagcatcacttctcaccatctcctggcatgtatggagcagggagcaaggctatgttcccgaaagccctgattagcttgtcttgctctacgctcgacctcgaacaatacagcttgtaagacctcagtcagtcctggtacactggggtaaatcagtgtggtggtggaagaaaagccgggaggcctatttttataggaaaatagtaccattaaaggtgcaatgctgtcattttggacaaaaggaaagaaatttggaagagctgggattattggcaaaaacttgctgaggggtgaatctttagagctaatcactgcagaatcagagttgcagcaatatgattgcaagcaagtctgaatgcatagttttactttaattcggcttgacaatttgaataggtaaccccctcgggactgactgaatcgttatgcatgtgtcaatcaatgggaggtgtgcattctctagaagtagttttaggctgtttggtttggttttggttttgttttttaaatgcagcctgttgaggcactgtcatgtggtgtgaaagatttaaatgtagcaacgctaaagagtaataatttggggataagaagtggggacattggccgggcgcggtggctcacgcctgtaattccagcactttgggaggcctaggtgggcggatcagctgaggtcgagagttcgaggccagtctgaccaacatggtgaaaccccatctctactaaaaatacagaaaattagctgggtctggtggtggatgcctgtaatcccagctactcgggaggctgaggcaggagaattgcttgaacccaggaggtggacggtgcagtgagctattactccagcctgggcaacaagagcgaaactctgtctcaaaaaaaaaaagggggggggggacattaagagagtggtgatgacccaaatgttgaaccaattatgttttggtggtggtgttcttagctgttgaatcctgaatggtttataaagtgaactagctggcttaatgcagccagcgttctgggcagcagaacatattcattcttactgtaaattctatttgctgcttccaaaggtgatgattttcaagcagacatgttctatatggtctgtgttttaggatctggtgcccagcctctatcagagcttgcctacctggcaaagctgcctacccttcaagtgggaaaatataatccactgtttaacaaggctcaccctctccaccctgtcctaacgaccttttgtgaatgtgctgtgatattttcttgctcaatagcaaggtggtagctctgctttcattttaagaaagtggaggctgagggcattgtatcaatactgttgcaactccaagaagttttccttgtaaaattaaaggaaagatcttgttattgattaaccattttcttatgccttgctattgacatattcatgctctttctacgtctagtggctgaaaatgtttgcatttgttcatttgactaatggtgtgatttttgtttctatattattagacctgtaatgttttaaaatgtattttattaaatttggactggatgtatgtctctagcaatacgaggtactttctaaactattaagggaggggttgtatcctcatgttgagataagatgatggtcgtttaaattttgcaattttttttggcctgcagggatattttgtgtttatgtgtccaaaaaaggaataaattggcattcttgtgccaaaagttgtttttcctgtcaattgtctaataagtatgcagtacactgtaatggcaacatacatggttgctttataaaaacagtttcctcagtatgagaaattttacaaagaacagtggaaaaactttgtgtttttaactcttgggtctccctatttttaaaaattgctatttggtatacaattattatgtgtcaattaaaactaaaataaaacttttaaaaaagaaaaaaaaa

SEQ ID NO: 56909 - DNA, 5227 bp, Homo sapiens
  misc_feature (3434)..(3434): n is a, c, g, or t
  misc_feature (3497)..(3497): n is a, c, g, or t
  misc_feature (3578)..(3578): n is a, c, g, or t
ggcggcggcggcggcggcggcggcggggattgtttttgttgtcgctgaggccggaagagccggagccgggtccctgtccccgggccgggcgccgccgccgccccctgcccagcgcccgcgtctccgcggcgccaccccagcgccaatattccggagatcaagcgttacgcggcggcggcggcggcggcggcggggcccggagcgggaggcgccggggaccggggcgaggcggcccccgccgccgccatggaggcgctgggacccggacctccggctagcctgtttcagccacctcgtcgtcctggccttggaactgttggaaaaccaattcgactgttagccaatcattttcaggttcagattcctaaaatagatgtgtatcactatgatgtggatattaagcctgaaaaacggcctcgtagagtcaacagggaggtagtagatacaatggtgcggcacttcaagatgcaaatatttggtgatcggcagcctgggtatgatggcaaaagaaacatgtacacagcacatccactaccaattggacgggatagggttgatatggaggtgactcttccaggcgagggtaaagaccaaacatttaaagtgtctgttcagtgggtgtcagttgtgagccttcagttgcttttagaagctttggctgggcacttgaatgaagtcccagatgactcagtacaagcacttgatgttatcacaagacaccttccctccatgaggtacaccccagtgggccgttcctttttctcacccccggaaggttactaccaccctctgggagggggcagggaggtctggtttggttttcatcagtctgtgagacctgccatgtggaatatgatgctcaacattgatgtatctgcaactgctttctaccgggctcagcctatcattgagttcatgtgtgaggttttagacattcagaacatcaatgaacagaccaaacctctaacagactcccagcgtgtcaaatttaccaaagaaatcagaggtctcaaagttgaggtgacccactgtggacagatgaaacgaaaataccgagtttgtaatgtgactagacggccagccagtcatcaaacttttcctttgcagctagaaaacggtcaagctatggaatgtacagtagctcaatattttaagcaaaagtatagtctgcaactgaaatacccccatcttccctgtctccaagtgggacaagaacaaaagcatacatacttgccactcgaggtctgtaatatagtggcaggacagcgatgtatcaagaagctcacagacaatcagacttccacaatgatcaaagctacagcaagatctgctcctgacagacaggaagagatcagtagactggtcagtaaggcatggtcttcaagatgagctagctttgagatgacaaaaaacaaaagaatagaaaactcctcctgggacacagttactctctggtttttatatatgcaggctttcctgttctttaggtgaagagcaacagtatggtgggtggacctgatccataccttaaagaatttggtattgttgtccacaatgaaatgacagagctcacaggcagggtacttccagcaccaatgctgcaatatggaggccgggtaagctttttattttattcagcaagcttcttccacaaccagtcaaaaagagaataatccagggtttctctactctgccactgctgaatttacccatagttttgttcattattgccttttgtgttctggctcatacctaatagaattttgtttattcactagtcaatagtaaaatggccttagattgtaatgtcttttctcttttcttttgtttcttcttcttcttcttcttctttttttttttttcaaagaataaaacagtagccacacccaaccagggtgtctgggacatgcgaggaaagcagttttatgctggcattgaaattaaagtttgggcagttgcttgttttgcacctcagaaacaatgtagggaagatttactaaagagtttcactgaccagctgcgtaaaatctctaaggatgcaggaatgcccatccagggtcagccatgtttctgcaagtatgcacaaggtgcagacagtgtggagcctatgtttaaacatctgaaaatgacttatgtgggcctacagctaatagtggttatcctgcctggaaagacaccagtatatgcggaggtgaaacgtgttggagatacccttctaggtatggccacacagtgtgtccaggtaaaaaatgtagtgaagacctcacctcaaaccctttccaatctttgcctgaagataaatgcaaaacttggaggaattaacaatgtgcttgtgcctcatcaaaggccctcggtgttccagcagcctgtcatcttcctgggagcggatgtcacacaccccccagcaggggatgggaagaaaccttccattgctgctgtggttggcagtatggatggccaccccagccggtactgtgccaccgttcgggtgcagacttcccggcaggagatctcccaagagctcctctacagtcaagaggtcatccaggacctgactaacatggttcgagagctgctgattcagttctacaaatccacacgcttcaaacccactcggatcatctattaccgtggaggggtatctgagggacaaatgaaacaggtagcttggccagaactaatagcaattcgaaaggcatgtattagcttggaagaagattaccggccaggaataacttatattgtggtgcaaaaaagacatcacacacgactcttctgtgcagataaaacagaaagggtagggaaaagtggcaatgtaccagcaggcactacagtggatagtaccatcacacatccatctgagtttgacttttacctctgtagtcatgcaggaattcagggaaccagccgtccctcacattaccaggtcttgtgggatgacaactgcttcactgcagatgaactccagctactgacttaccagctgtgtcacacctatgtgaggtgcactcgctcagtctctattccagcccctgcatattatgcccggcttgtagcatttagggcaaggtatcatctggtggataaagatcatgacagtgcggaaggcagtcatgtgtcaggacagagcaacggccgggatcctcaggccttggctaaggctgtgcaaatccaccatgatacccagcacacgatgtattttgcctgagagtctcagaaaaagaactcaaccaatttggcaccccatgcagcctcaaaatgtttcaaatgcctaccgcctctagatcgagccacgttgacttcaggtggtcttctaccagcagctcggaatagttgcactgaatctatactttgcagcactgtctgatgcgtcaacaaaattgagccatttttttaaagtaatagatactaatagattatcttttctgatgcantggactgaatttttacctcaatgtgcaaaggctgatcagcctgaactttctaaaggactttanaagaagggtttctatggaatattttgctagctgtggtgttcaccgcatccctctagtcttagaagagaagattattccttntttctgtagtcattgagtggggtatatgcataagtgggagagaaaaaccaaacaatctacttcagttcagtgtaactatttaattgtgtgggtccatagactttttaatgaagatttctgactttgccactgtaaatgcctttaatgagcattaatttttgaaagttttacagagttttattagttttactactttatcttattgatctctgcagacttgtgctggtgcaagtacatgctgacaggcaatttgcactatatttggctgcagattcaaataggcagttctcttatttggtcgacttttgtgaatgtgtgacataaacagatgtaatgcatgtcacagtgacggagataacactgccatgataaaagtactcatgtttcccctatttggaaaaaaaaattgcttttagtatttttccaagttttcaaaagtgcccattttatgctgctgtgtggtttgttaaatctaaatgatttttaaacttttctcatagaaacttaactttggcaataaacattttttaaggtctctcctcttccttccccaacaatgtagttttctagatgagatttcagtatgattttatcagctatttcttatatatcataatctggcaatttctgaaaccagtcagaaaagacatatatttccatgcctttttaaagaattatttttacctgttttatattcacagttggtgtcctgtcactttgttttaaaataagctagaaccaggatgcttccttattggaaaggctttgccagtccttaaggtacaatgagtgatgctgcaacttgcaaatgtaccagcatttaaaatttcttttcctgggaatcaaggtaactcacacgactacttgcagtacaaattttttgcttctctttcgacatgaaatgtacttggtgggttttccttccttttattaaactaaaactgtgtggaaaaggttgatttttcttaatagattctggattccactcacagggagatgggattcctttcttgtccaaacaaagggagttgctctaaagcgagcatcagttaaaatgtaggggaaaatgtattctgtatgtagtgtagataatactttgtgaatggacaacagttacatagtgtcttggtagcaccagccagtgtttcccagcccagagtttactgacttgtaattctctatccaggacatcaggagtgagggatggaaaaggggataaaaggcctggagccacactctatatggctgaggaaggagctagggaaagagatagacacaatggggtgaaaacaattttgccgcccctgcctggaaactgctggtggggaaatgatggtgaagggtgtttgcttgaactcatgagacggtccaaatctcataaactagccttctcaaaatcccagcaatataaagcactgtttttcttcagtcgtttaaataaacttgtaaatacattgaagtttacatttccatgtgctgttgatcaacggcgccacctgtgtttgctgagactggtctctgagagagttttatgtcgatcgaggcctgttgctcattaagctgagtgcagacgtccttaatccctgcagatagtgggatgaaactcaggtcttcccctggtcccccaggcacttccctcgtcccctcct

SEQ ID NO: 56910 - DNA, 5222 bp, Homo sapiens
  misc_feature (3434)..(3434): n is a, c, g, or t
  misc_feature (3497)..(3497): n is a, c, g, or t
  misc_feature (3578)..(3578): n is a, c, g, or t
  misc_feature (5212)..(5212): n is a, c, g, or t
ggcggcggcggcggcggcggcggcggggattgtttttgttgtcgctgaggccggaagagccggagccgggtccctgtccccgggccgggcgccgccgccgccccctgcccagcgcccgcgtctccgcggcgccaccccagcgccaatattccggagatcaagcgttacgcggcggcggcggcggcggcggcggggcccggagcgggaggcgccggggaccggggcgaggcggcccccgccgccgccatggaggcgctgggacccggacctccggctagcctgtttcagccacctcgtcgtcctggccttggaactgttggaaaaccaattcgactgttagccaatcattttcaggttcagattcctaaaatagatgtgtatcactatgatgtggatattaagcctgaaaaacggcctcgtagagtcaacagggaggtagtagatacaatggtgcggcacttcaagatgcaaatatttggtgatcggcagcctgggtatgatggcaaaagaaacatgtacacagcacatccactaccaattggacgggatagggttgatatggaggtgactcttccaggcgagggtaaagaccaaacatttaaagtgtctgttcagtgggtgtcagttgtgagccttcagttgcttttagaagctttggctgggcacttgaatgaagtcccagatgactcagtacaagcacttgatgttatcacaagacaccttccctccatgaggtacaccccagtgggccgttcctttttctcacccccggaaggttactaccaccctctgggagggggcagggaggtctggtttggttttcatcagtctgtgagacctgccatgtggaatatgatgctcaacattgatgtatctgcaactgctttctaccgggctcagcctatcattgagttcatgtgtgaggttttagacattcagaacatcaatgaacagaccaaacctctaacagactcccagcgtgtcaaatttaccaaagaaatcagaggtctcaaagttgaggtgacccactgtggacagatgaaacgaaaataccgagtttgtaatgtgactagacggccagccagtcatcaaacttttcctttgcagctagaaaacggtcaagctatggaatgtacagtagctcaatattttaagcaaaagtatagtctgcaactgaaatacccccatcttccctgtctccaagtgggacaagaacaaaagcatacatacttgccactcgaggtctgtaatatagtggcaggacagcgatgtatcaagaagctcacagacaatcagacttccacaatgatcaaagctacagcaagatctgctcctgacagacaggaagagatcagtagactggtcagtaaggcatggtcttcaagatgagctagctttgagatgacaaaaaacaaaagaatagaaaactcctcctgggacacagttactctctggtttttatatatgcaggctttcctgttctttaggtgaagagcaacagtatggtgggtggacctgatccataccttaaagaatttggtattgttgtccacaatgaaatgacagagctcacaggcagggtacttccagcaccaatgctgcaatatggaggccgggtaagctttttattttattcagcaagcttcttccacaaccagtcaaaaagagaataatccagggtttctctactctgccactgctgaatttacccatagttttgttcattattgccttttgtgttctggctcatacctaatagaattttgtttattcactagtcaatagtaaaatggccttagattgtaatgtcttttctcttttcttttgtttcttcttcttcttcttcttctttttttttttttcaaagaataaaacagtagccacacccaaccagggtgtctgggacatgcgaggaaagcagttttatgctggcattgaaattaaagtttgggcagttgcttgttttgcacctcagaaacaatgtagggaagatttactaaagagtttcactgaccagctgcgtaaaatctctaaggatgcaggaatgcccatccagggtcagccatgtttctgcaagtatgcacaaggtgcagacagtgtggagcctatgtttaaacatctgaaaatgacttatgtgggcctacagctaatagtggttatcctgcctggaaagacaccagtatatgcggaggtgaaacgtgttggagatacccttctaggtatggccacacagtgtgtccaggtaaaaaatgtagtgaagacctcacctcaaaccctttccaatctttgcctgaagataaatgcaaaacttggaggaattaacaatgtgcttgtgcctcatcaaaggccctcggtgttccagcagcctgtcatcttcctgggagcggatgtcacacaccccccagcaggggatgggaagaaaccttccattgctgctgtggttggcagtatggatggccaccccagccggtactgtgccaccgttcgggtgcagacttcccggcaggagatctcccaagagctcctctacagtcaagaggtcatccaggacctgactaacatggttcgagagctgctgattcagttctacaaatccacacgcttcaaacccactcggatcatctattaccgtggaggggtatctgagggacaaatgaaacaggtagcttggccagaactaatagcaattcgaaaggcatgtattagcttggaagaagattaccggccaggaataacttatattgtggtgcaaaaaagacatcacacacgactcttctgtgcagataaaacagaaagggtagggaaaagtggcaatgtaccagcaggcactacagtggatagtaccatcacacatccatctgagtttgacttttacctctgtagtcatgcaggaattcagggaaccagccgtccctcacattaccaggtcttgtgggatgacaactgcttcactgcagatgaactccagctactgacttaccagctgtgtcacacctatgtgaggtgcactcgctcagtctctattccagcccctgcatattatgcccggcttgtagcatttagggcaaggtatcatctggtggataaagatcatgacagtgcggaaggcagtcatgtgtcaggacagagcaacggccgggatcctcaggccttggctaaggctgtgcaaatccaccatgatacccagcacacgatgtattttgcctgagagtctcagaaaaagaactcaaccaatttggcaccccatgcagcctcaaaatgtttcaaatgcctaccgcctctagatcgagccacgttgacttcaggtggtcttctaccagcagctcggaatagttgcactgaatctatactttgcagcactgtctgatgcgtcaacaaaattgagccatttttttaaagtaatagatactaatagattatcttttctgatgcantggactgaatttttacctcaatgtgcaaaggctgatcagcctgaactttctaaaggactttanaagaagggtttctatggaatattttgctagctgtggtgttcaccgcatccctctagtcttagaagagaagattattccttntttctgtagtcattgagtggggtatatgcataagtgggagagaaaaaccaaacaatctacttcagttcagtgtaactatttaattgtgtgggtccatagactttttaatgaagatttctgactttgccactgtaaatgcctttaatgagcattaatttttgaaagttttacagagttttattagttttactactttatcttattgatctctgcagacttgtgctggtgcaagtacatgctgacaggcaatttgcactatatttggctgcagattcaaataggcagttctcttatttggtcgacttttgtgaatgtgtgacataaacagatgtaatgcatgtcacagtgacggagataacactgccatgataaaagtactcatgtttcccctatttggaaaaaaaaattgcttttagtatttttccaagttttcaaaagtgcccattttatgctgctgtgtggtttgttaaatctaaatgatttttaaacttttctcatagaaacttaactttggcaataaacattttttaaggtctctcctcttccttccccaacaatgtagttttctagatgagatttcagtatgattttatcagctatttcttatatatcataatctggcaatttctgaaaccagtcagaaaagacatatatttccatgcctttttaaagaattatttttacctgttttatattcacagttggtgtcctgtcactttgttttaaaataagctagaaccaggatgcttccttattggaaaggctttgccagtccttaaggtacaatgagtgatgctgcaacttgcaaatgtaccagcatttaaaatttcttttcctgggaatcaaggtaactcacacgactacttgcagtacaaattttttgcttctctttcgacatgaaatgtacttggtgggttttccttccttttattaaactaaaactgtgtggaaaaggttgatttttcttaatagattctggattccactcacagggagatgggattcctttcttgtccaaacaaagggagttgctctaaagcgagcatcagttaaaatgtaggggaaaatgtattctgtatgtagtgtagataatactttgtgaatggacaacagttacatagtgtcttggtagcaccagccagtgtttcccagcccagagtttactgacttgtaattctctatccaggacatcaggagtgagggatggaaaaggggataaaaggcctggagccacactctatatggctgaggaaggagctagggaaagagatagacacaatggggtgaaaacaattttgccgcccctgcctggaaactgctggtggggaaatgatggtgaagggtgtttgcttgaactcatgagacggtccaaatctcataaactagccttctcaaaatcccagcaatataaagcactgtttttcttcagtcgtttaaataaacttgtaaatacattgaagtttacatttccatgtgctgttgatcaacggcgccacctgtgtttgctgagactggtctctgagagagttttatgtcgatcgaggcctgttgctcattaagctgagtgcagacgtccttaatccctgcagatagtgggatgaaacacaaagctgtccaattgcaatctgtcaaantttttttctt

SEQ ID NO: 56911 - DNA, 4625 bp, Homo sapiens
  misc_feature (3434)..(3434): n is a, c, g, or t
  misc_feature (3497)..(3497): n is a, c, g, or t
  misc_feature (3578)..(3578): n is a, c, g, or t
ggcggcggcggcggcggcggcggcggggattgtttttgttgtcgctgaggccggaagagccggagccgggtccctgtccccgggccgggcgccgccgccgccccctgcccagcgcccgcgtctccgcggcgccaccccagcgccaatattccggagatcaagcgttacgcggcggcggcggcggcggcggcggggcccggagcgggaggcgccggggaccggggcgaggcggcccccgccgccgccatggaggcgctgggacccggacctccggctagcctgtttcagccacctcgtcgtcctggccttggaactgttggaaaaccaattcgactgttagccaatcattttcaggttcagattcctaaaatagatgtgtatcactatgatgtggatattaagcctgaaaaacggcctcgtagagtcaacagggaggtagtagatacaatggtgcggcacttcaagatgcaaatatttggtgatcggcagcctgggtatgatggcaaaagaaacatgtacacagcacatccactaccaattggacgggatagggttgatatggaggtgactcttccaggcgagggtaaagaccaaacatttaaagtgtctgttcagtgggtgtcagttgtgagccttcagttgcttttagaagctttggctgggcacttgaatgaagtcccagatgactcagtacaagcacttgatgttatcacaagacaccttccctccatgaggtacaccccagtgggccgttcctttttctcacccccggaaggttactaccaccctctgggagggggcagggaggtctggtttggttttcatcagtctgtgagacctgccatgtggaatatgatgctcaacattgatgtatctgcaactgctttctaccgggctcagcctatcattgagttcatgtgtgaggttttagacattcagaacatcaatgaacagaccaaacctctaacagactcccagcgtgtcaaatttaccaaagaaatcagaggtctcaaagttgaggtgacccactgtggacagatgaaacgaaaataccgagtttgtaatgtgactagacggccagccagtcatcaaacttttcctttgcagctagaaaacggtcaagctatggaatgtacagtagctcaatattttaagcaaaagtatagtctgcaactgaaatacccccatcttccctgtctccaagtgggacaagaacaaaagcatacatacttgccactcgaggtctgtaatatagtggcaggacagcgatgtatcaagaagctcacagacaatcagacttccacaatgatcaaagctacagcaagatctgctcctgacagacaggaagagatcagtagactggtcagtaaggcatggtcttcaagatgagctagctttgagatgacaaaaaacaaaagaatagaaaactcctcctgggacacagttactctctggtttttatatatgcaggctttcctgttctttaggtgaagagcaacagtatggtgggtggacctgatccataccttaaagaatttggtattgttgtccacaatgaaatgacagagctcacaggcagggtacttccagcaccaatgctgcaatatggaggccgggtaagctttttattttattcagcaagcttcttccacaaccagtcaaaaagagaataatccagggtttctctactctgccactgctgaatttacccatagttttgttcattattgccttttgtgttctggctcatacctaatagaattttgtttattcactagtcaatagtaaaatggccttagattgtaatgtcttttctcttttcttttgtttcttcttcttcttcttcttctttttttttttttcaaagaataaaacagtagccacacccaaccagggtgtctgggacatgcgaggaaagcagttttatgctggcattgaaattaaagtttgggcagttgcttgttttgcacctcagaaacaatgtagggaagatttactaaagagtttcactgaccagctgcgtaaaatctctaaggatgcaggaatgcccatccagggtcagccatgtttctgcaagtatgcacaaggtgcagacagtgtggagcctatgtttaaacatctgaaaatgacttatgtgggcctacagctaatagtggttatcctgcctggaaagacaccagtatatgcggaggtgaaacgtgttggagatacccttctaggtatggccacacagtgtgtccaggtaaaaaatgtagtgaagacctcacctcaaaccctttccaatctttgcctgaagataaatgcaaaacttggaggaattaacaatgtgcttgtgcctcatcaaaggccctcggtgttccagcagcctgtcatcttcctgggagcggatgtcacacaccccccagcaggggatgggaagaaaccttccattgctgctgtggttggcagtatggatggccaccccagccggtactgtgccaccgttcgggtgcagacttcccggcaggagatctcccaagagctcctctacagtcaagaggtcatccaggacctgactaacatggttcgagagctgctgattcagttctacaaatccacacgcttcaaacccactcggatcatctattaccgtggaggggtatctgagggacaaatgaaacaggtagcttggccagaactaatagcaattcgaaaggcatgtattagcttggaagaagattaccggccaggaataacttatattgtggtgcaaaaaagacatcacacacgactcttctgtgcagataaaacagaaagggtagggaaaagtggcaatgtaccagcaggcactacagtggatagtaccatcacacatccatctgagtttgacttttacctctgtagtcatgcaggaattcagggaaccagccgtccctcacattaccaggtcttgtgggatgacaactgcttcactgcagatgaactccagctactgacttaccagctgtgtcacacctatgtgaggtgcactcgctcagtctctattccagcccctgcatattatgcccggcttgtagcatttagggcaaggtatcatctggtggataaagatcatgacagtgcggaaggcagtcatgtgtcaggacagagcaacggccgggatcctcaggccttggctaaggctgtgcaaatccaccatgatacccagcacacgatgtattttgcctgagagtctcagaaaaagaactcaaccaatttggcaccccatgcagcctcaaaatgtttcaaatgcctaccgcctctagatcgagccacgttgacttcaggtggtcttctaccagcagctcggaatagttgcactgaatctatactttgcagcactgtctgatgcgtcaacaaaattgagccatttttttaaagtaatagatactaatagattatcttttctgatgcantggactgaatttttacctcaatgtgcaaaggctgatcagcctgaactttctaaaggactttanaagaagggtttctatggaatattttgctagctgtggtgttcaccgcatccctctagtcttagaagagaagattattccttntttctgtagtcattgagtggggtatatgcataagtgggagagaaaaaccaaacaatctacttcagttcagtgtaactatttaattgtgtgggtccatagactttttaatgaagatttctgactttgccactgtaaatgcctttaatgagcattaatttttgaaagttttacagagttttattagttttactactttatcttattgatctctgcagacttgtgctggtgcaagtacatgctgacaggcaatttgcactatatttggctgcagattcaaataggcagttctcttatttggtcgacttttgtgaatgtgtgacataaacagatgtaatgcatgtcacagtgacggagataacactgccatgataaaagtactcatgtttcccctatttggaaaaaaaaattgcttttagtatttttccaagttttcaaaagtgcccattttatgctgctgtgtggtttgttaaatctaaatgatttttaaacttttctcatagaaacttaactttggcaataaacattttttaaggtctctcctcttccttccccaacaatgtagttttctagatgagatttcagtatgattttatcagctatttcttatatatcataatctggcaatttctgaaaccagtcagaaaagacatatatttccatgcctttttaaagaattatttttacctgttttatattcacagttggtgtcctgtcactttgttttaaaataagctagaaccaggatgcttccttattggaaaggctttgccagtccttaaggtacaatgagtgatgctgcaacttgcaaatgtaccagcatttaaaatttcttttcctgggaatcaaggtaactcacacgactacttgcagtacaaattttttgcttctctttcgacatgaaatgtacttggtgggttttccttccttttattaaactaaaactgtgtggaaaattttttttttttttttttttttttttttttttgtttttttttttttttttttttttttttttttttttttgtgtgtttttggggggggaaaaaa

SEQ ID NO: 56912 - DNA, 738 bp, Homo sapiens
gaatgagtatatatttttaagtagagttctaaactagtggtgaaatttagtgttaatttctaaaatatttttggcagatgatttcactatataaccaaattttaatttttctggaaatagaggatataagatatggtttggcaaaggtttaagatgtggaaccctttacacaaaccaatttctctttgtctcttggcaggtctgtaatatagtggcaggacagcgatgtatcaagaagctcacagacaatcagacttccacaatgatcaaagctacagcaagatctgctcctgacagacaggaagagatcagtagactggtcagtaaggcatggtcttcaagatgagctagctttgagatgacaaaaaacaaaagaatagaaaactcctcctgggacacagttactctctggtttttatatatgcaggctttcctgttctttaggtgaagagcaacagtatggtgggtggacctgatccataccttaaagaatttggtattgttgtccacaatgaaatgacagagctcacaggcagggtacttccagcaccaatgctgcaatatggaggccgggtaagctttttattttattcagcaagcttcttccacaaccagtcaaaaagagaataatccagggtttctctactctgccactgctgaatttacccatagttttgttcattattgccttttgtgttctggctcatacctaatagaattttgtttattcactagtca

SEQ ID NO: 56913 - DNA, 399 bp, Homo sapiens
tgttcaaatttgatttcagctcccagagttgagagtgaaatgaaggacctttcacatgtttaatgtgacacatgcaaactcttatttcttcaggtacaccccagtgggccgttcctttttctcacccccggaaggttactaccaccctctgggagggggcagggaggtctggtttggttttcatcagtctgtgagacctgccatgtggaatatgatgctcaacattgatggtaggatggaactctctttatccaataactctttgggctggtttttgtttgtttgtttgttttggcccttcccttttccctgaagtgaagtatccttctctgtttgttagtatctgcaactgctttctaccgggctcagcctatcattgagttcatgtgtgaggtttta

SEQ ID NO: 56914 - DNA, 7434 bp, Homo sapiens
  misc_feature (3434)..(3434): n is a, c, g, or t
  misc_feature (3497)..(3497): n is a, c, g, or t
  misc_feature (3578)..(3578): n is a, c, g, or t
ggcggcggcggcggcggcggcggcggggattgtttttgttgtcgctgaggccggaagagccggagccgggtccctgtccccgggccgggcgccgccgccgccccctgcccagcgcccgcgtctccgcggcgccaccccagcgccaatattccggagatcaagcgttacgcggcggcggcggcggcggcggcggggcccggagcgggaggcgccggggaccggggcgaggcggcccccgccgccgccatggaggcgctgggacccggacctccggctagcctgtttcagccacctcgtcgtcctggccttggaactgttggaaaaccaattcgactgttagccaatcattttcaggttcagattcctaaaatagatgtgtatcactatgatgtggatattaagcctgaaaaacggcctcgtagagtcaacagggaggtagtagatacaatggtgcggcacttcaagatgcaaatatttggtgatcggcagcctgggtatgatggcaaaagaaacatgtacacagcacatccactaccaattggacgggatagggttgatatggaggtgactcttccaggcgagggtaaagaccaaacatttaaagtgtctgttcagtgggtgtcagttgtgagccttcagttgcttttagaagctttggctgggcacttgaatgaagtcccagatgactcagtacaagcacttgatgttatcacaagacaccttccctccatgaggtacaccccagtgggccgttcctttttctcacccccggaaggttactaccaccctctgggagggggcagggaggtctggtttggttttcatcagtctgtgagacctgccatgtggaatatgatgctcaacattgatgtatctgcaactgctttctaccgggctcagcctatcattgagttcatgtgtgaggttttagacattcagaacatcaatgaacagaccaaacctctaacagactcccagcgtgtcaaatttaccaaagaaatcagaggtctcaaagttgaggtgacccactgtggacagatgaaacgaaaataccgagtttgtaatgtgactagacggccagccagtcatcaaacttttcctttgcagctagaaaacggtcaagctatggaatgtacagtagctcaatattttaagcaaaagtatagtctgcaactgaaatacccccatcttccctgtctccaagtgggacaagaacaaaagcatacatacttgccactcgaggtctgtaatatagtggcaggacagcgatgtatcaagaagctcacagacaatcagacttccacaatgatcaaagctacagcaagatctgctcctgacagacaggaagagatcagtagactggtcagtaaggcatggtcttcaagatgagctagctttgagatgacaaaaaacaaaagaatagaaaactcctcctgggacacagttactctctggtttttatatatgcaggctttcctgttctttaggtgaagagcaacagtatggtgggtggacctgatccataccttaaagaatttggtattgttgtccacaatgaaatgacagagctcacaggcagggtacttccagcaccaatgctgcaatatggaggccgggtaagctttttattttattcagcaagcttcttccacaaccagtcaaaaagagaataatccagggtttctctactctgccactgctgaatttacccatagttttgttcattattgccttttgtgttctggctcatacctaatagaattttgtttattcactagtcaatagtaaaatggccttagattgtaatgtcttttctcttttcttttgtttcttcttcttcttcttcttctttttttttttttcaaagaataaaacagtagccacacccaaccagggtgtctgggacatgcgaggaaagcagttttatgctggcattgaaattaaagtttgggcagttgcttgttttgcacctcagaaacaatgtagggaagatttactaaagagtttcactgaccagctgcgtaaaatctctaaggatgcaggaatgcccatccagggtcagccatgtttctgcaagtatgcacaaggtgcagacagtgtggagcctatgtttaaacatctgaaaatgacttatgtgggcctacagctaatagtggttatcctgcctggaaagacaccagtatatgcggaggtgaaacgtgttggagatacccttctaggtatggccacacagtgtgtccaggtaaaaaatgtagtgaagacctcacctcaaaccctttccaatctttgcctgaagataaatgcaaaacttggaggaattaacaatgtgcttgtgcctcatcaaaggccctcggtgttccagcagcctgtcatcttcctgggagcggatgtcacacaccccccagcaggggatgggaagaaaccttccattgctgctgtggttggcagtatggatggccaccccagccggtactgtgccaccgttcgggtgcagacttcccggcaggagatctcccaagagctcctctacagtcaagaggtcatccaggacctgactaacatggttcgagagctgctgattcagttctacaaatccacacgcttcaaacccactcggatcatctattaccgtggaggggtatctgagggacaaatgaaacaggtagcttggccagaactaatagcaattcgaaaggcatgtattagcttggaagaagattaccggccaggaataacttatattgtggtgcaaaaaagacatcacacacgactcttctgtgcagataaaacagaaagggtagggaaaagtggcaatgtaccagcaggcactacagtggatagtaccatcacacatccatctgagtttgacttttacctctgtagtcatgcaggaattcagggaaccagccgtccctcacattaccaggtcttgtgggatgacaactgcttcactgcagatgaactccagctactgacttaccagctgtgtcacacctatgtgaggtgcactcgctcagtctctattccagcccctgcatattatgcccggcttgtagcatttagggcaaggtatcatctggtggataaagatcatgacagtgcggaaggcagtcatgtgtcaggacagagcaacggccgggatcctcaggccttggctaaggctgtgcaaatccaccatgatacccagcacacgatgtattttgcctgagagtctcagaaaaagaactcaaccaatttggcaccccatgcagcctcaaaatgtttcaaatgcctaccgcctctagatcgagccacgttgacttcaggtggtcttctaccagcagctcggaatagttgcactgaatctatactttgcagcactgtctgatgcgtcaacaaaattgagccatttttttaaagtaatagatactaatagattatcttttctgatgcantggactgaatttttacctcaatgtgcaaaggctgatcagcctgaactttctaaaggactttanaagaagggtttctatggaatattttgctagctgtggtgttcaccgcatccctctagtcttagaagagaagattattccttntttctgtagtcattgagtggggtatatgcataagtgggagagaaaaaccaaacaatctacttcagttcagtgtaactatttaattgtgtgggtccatagactttttaatgaagatttctgactttgccactgtaaatgcctttaatgagcattaatttttgaaagttttacagagttttattagttttactactttatcttattgatctctgcagacttgtgctggtgcaagtacatgctgacaggcaatttgcactatatttggctgcagattcaaataggcagttctcttatttggtcgacttttgtgaatgtgtgacataaacagatgtaatgcatgtcacagtgacggagataacactgccatgataaaagtactcatgtttcccctatttggaaaaaaaaattgcttttagtatttttccaagttttcaaaagtgcccattttatgctgctgtgtggtttgttaaatctaaatgatttttaaacttttctcatagaaacttaactttggcaataaacattttttaaggtctctcctcttccttccccaacaatgtagttttctagatgagatttcagtatgattttatcagctatttcttatatatcataatctggcaatttctgaaaccagtcagaaaagacatatatttccatgcctttttaaagaattatttttacctgttttatattcacagttggtgtcctgtcactttgttttaaaataagctagaaccaggatgcttccttattggaaaggctttgccagtccttaaggtacaatgagtgatgctgcaacttgcaaatgtaccagcatttaaaatttcttttcctgggaatcaaggtaactcacacgactacttgcagtacaaattttttgcttctctttcgacatgaaatgtacttggtgggttttccttccttttattaaactaaaactgtgtggaaaaggttgatttttcttaatagattctggattccactcacagggagatgggattcctttcttgtccaaacaaagggagttgctctaaagcgagcatcagttaaaatgtaggggaaaatgtattctgtatgtagtgtagataatactttgtgaatggacaacagttacatagtgtcttggtagcaccagccagtgtttcccagcccagagtttactgacttgtaattctctatccaggacatcaggagtgagggatggaaaaggggataaaaggcctggagccacactctatatggctgaggaaggagctagggaaatgatggtgaagggtgtttgcttgaactcatgagacggtccaaatctcataaactagccttctcaaaatcccagcaatataaagcactgtttttcttcagtcgtttaaataaacttgtaaatacattgaagtttacatttccatgtgctgttgatcaacggcgccacctgtgtttgctgagactggtctctgagagagttttatgtcgatcgaggcctgttgctcattaagctgagtgcagacgtccttaatccctgcagatagtgggatgaaagcaagttctgtaaaatgaagcacaacatagccaggagtgaagagatggcagatgttaatttcttaaaattttccttttttttttttttttttgcaaatacctcacttggataatacaaatcaggacatgttggtgaggggctggctgcttggctgctgcttttattcacacttgttcagggagagcacagagaatacccttcagcatggccactctggacccaagaggaggaaaaaacggaagcttttttaggagaaggaggacttgctggaatccaagatgtgaagaactcttggtgactggctggctggccagcgggcaccacacctgcacttgagtgcctcgggcttgcttattaataacgcacagaagaagcatcacttctcaccatctcctggcatgtatggagcagggagcaaggctatgttcccgaaagccctgattagcttgtcttgctctacgctcgacctcgaacaatacagcttgtaagacctcagtcagtcctggtacactggggtaaatcagtgtggtggtggaagaaaagccgggaggcctatttttataggaaaatagtaccattaaaggtgcaatgctgtcattttggacaaaaggaaagaaatttggaagagctgggattattggcaaaaacttgctgaggggtgaatctttagagctaatcactgcagaatcagagttgcagcaatatgattgcaagcaagtctgaatgcatagttttactttaattcggcttgacaatttgaataggtaaccccctcgggactgactgaatcgttatgcatgtgtcaatcaatgggaggtgtgcattctctagaagtagttttaggctgtttggtttggttttggttttgttttttaaatgcagcctgttgaggcactgtcatgtggtgtgaaagatttaaatgtagcaacgctaaagagtaataatttggggataagaagtggggacattggccgggcgcggtggctcacgcctgtaattccagcactttgggaggcctaggtgggcggatcagctgaggtcgagagttcgaggccagtctgaccaacatggtgaaaccccatctctactaaaaatacagaaaattagctgggtctggtggtggatgcctgtaatcccagctactcgggaggctgaggcaggagaattgcttgaacccaggaggtggacggtgcagtgagctattactccagcctgggcaacaagagcgaaactctgtctcaaaaaaaaaaagggggggggggacattaagagagtggtgatgacccaaatgttgaaccaattatgttttggtggtggtgttcttagctgttgaatcctgaatggtttataaagtgaactagctggcttaatgcagccagcgttctgggcagcagaacatattcattcttactgtaaattctatttgctgcttccaaaggtgatgattttcaagcagacatgttctatatggtctgtgttttaggatctggtgcccagcctctatcagagcttgcctacctggcaaagctgcctacccttcaagtgggaaaatataatccactgtttaacaaggctcaccctctccaccctgtcctaacgaccttttgtgaatgtgctgtgatattttcttgctcaatagcaaggtggtagctctgctttcattttaagaaagtggaggctgagggcattgtatcaatactgttgcaactccaagaagttttccttgtaaaattaaaggaaagatcttgttattgattaaccattttcttatgccttgctattgacatattcatgctctttctacgtctagtggctgaaaatgtttgcatttgttcatttgactaatggtgtgatttttgtttctatattattagacctgtaatgttttaaaatgtattttattaaatttggactggatgtatgtctctagcaatacgaggtactttctaaactattaagggaggggttgtatcctcatgttgagataagatgatggtcgtttaaattttgcaattttttttggcctgcagggatattttgtgtttatgtgtccaaaaaaggaataaattggcattcttgtgccaaaagttgtttttcctgtcaattgtctaataagtatgcagtacactgtaatggcaacatacatggttgctttataaaaacagtttcctcagtatgagaaattttacaaagaacagtggaaaaactttgtgtttttaactcttgggtctccctatttttaaaaattgctatttggtatacaattattatgtgtcaattaaaactaaaataaaacttttaaaaaagaaaaaaaaa

SEQ ID NO: 56915 - DNA, 4531 bp, Homo sapiens
  misc_feature (3434)..(3434): n is a, c, g, or t
  misc_feature (3497)..(3497): n is a, c, g, or t
  misc_feature (3578)..(3578): n is a, c, g, or t
ggcggcggcggcggcggcggcggcggggattgtttttgttgtcgctgaggccggaagagccggagccgggtccctgtccccgggccgggcgccgccgccgccccctgcccagcgcccgcgtctccgcggcgccaccccagcgccaatattccggagatcaagcgttacgcggcggcggcggcggcggcggcggggcccggagcgggaggcgccggggaccggggcgaggcggcccccgccgccgccatggaggcgctgggacccggacctccggctagcctgtttcagccacctcgtcgtcctggccttggaactgttggaaaaccaattcgactgttagccaatcattttcaggttcagattcctaaaatagatgtgtatcactatgatgtggatattaagcctgaaaaacggcctcgtagagtcaacagggaggtagtagatacaatggtgcggcacttcaagatgcaaatatttggtgatcggcagcctgggtatgatggcaaaagaaacatgtacacagcacatccactaccaattggacgggatagggttgatatggaggtgactcttccaggcgagggtaaagaccaaacatttaaagtgtctgttcagtgggtgtcagttgtgagccttcagttgcttttagaagctttggctgggcacttgaatgaagtcccagatgactcagtacaagcacttgatgttatcacaagacaccttccctccatgaggtacaccccagtgggccgttcctttttctcacccccggaaggttactaccaccctctgggagggggcagggaggtctggtttggttttcatcagtctgtgagacctgccatgtggaatatgatgctcaacattgatgtatctgcaactgctttctaccgggctcagcctatcattgagttcatgtgtgaggttttagacattcagaacatcaatgaacagaccaaacctctaacagactcccagcgtgtcaaatttaccaaagaaatcagaggtctcaaagttgaggtgacccactgtggacagatgaaacgaaaataccgagtttgtaatgtgactagacggccagccagtcatcaaacttttcctttgcagctagaaaacggtcaagctatggaatgtacagtagctcaatattttaagcaaaagtatagtctgcaactgaaatacccccatcttccctgtctccaagtgggacaagaacaaaagcatacatacttgccactcgaggtctgtaatatagtggcaggacagcgatgtatcaagaagctcacagacaatcagacttccacaatgatcaaagctacagcaagatctgctcctgacagacaggaagagatcagtagactggtcagtaaggcatggtcttcaagatgagctagctttgagatgacaaaaaacaaaagaatagaaaactcctcctgggacacagttactctctggtttttatatatgcaggctttcctgttctttaggtgaagagcaacagtatggtgggtggacctgatccataccttaaagaatttggtattgttgtccacaatgaaatgacagagctcacaggcagggtacttccagcaccaatgctgcaatatggaggccgggtaagctttttattttattcagcaagcttcttccacaaccagtcaaaaagagaataatccagggtttctctactctgccactgctgaatttacccatagttttgttcattattgccttttgtgttctggctcatacctaatagaattttgtttattcactagtcaatagtaaaatggccttagattgtaatgtcttttctcttttcttttgtttcttcttcttcttcttcttctttttttttttttcaaagaataaaacagtagccacacccaaccagggtgtctgggacatgcgaggaaagcagttttatgctggcattgaaattaaagtttgggcagttgcttgttttgcacctcagaaacaatgtagggaagatttactaaagagtttcactgaccagctgcgtaaaatctctaaggatgcaggaatgcccatccagggtcagccatgtttctgcaagtatgcacaaggtgcagacagtgtggagcctatgtttaaacatctgaaaatgacttatgtgggcctacagctaatagtggttatcctgcctggaaagacaccagtatatgcggaggtgaaacgtgttggagatacccttctaggtatggccacacagtgtgtccaggtaaaaaatgtagtgaagacctcacctcaaaccctttccaatctttgcctgaagataaatgcaaaacttggaggaattaacaatgtgcttgtgcctcatcaaaggccctcggtgttccagcagcctgtcatcttcctgggagcggatgtcacacaccccccagcaggggatgggaagaaaccttccattgctgctgtggttggcagtatggatggccaccccagccggtactgtgccaccgttcgggtgcagacttcccggcaggagatctcccaagagctcctctacagtcaagaggtcatccaggacctgactaacatggttcgagagctgctgattcagttctacaaatccacacgcttcaaacccactcggatcatctattaccgtggaggggtatctgagggacaaatgaaacaggtagcttggccagaactaatagcaattcgaaaggcatgtattagcttggaagaagattaccggccaggaataacttatattgtggtgcaaaaaagacatcacacacgactcttctgtgcagataaaacagaaagggtagggaaaagtggcaatgtaccagcaggcactacagtggatagtaccatcacacatccatctgagtttgacttttacctctgtagtcatgcaggaattcagggaaccagccgtccctcacattaccaggtcttgtgggatgacaactgcttcactgcagatgaactccagctactgacttaccagctgtgtcacacctatgtgaggtgcactcgctcagtctctattccagcccctgcatattatgcccggcttgtagcatttagggcaaggtatcatctggtggataaagatcatgacagtgcggaaggcagtcatgtgtcaggacagagcaacggccgggatcctcaggccttggctaaggctgtgcaaatccaccatgatacccagcacacgatgtattttgcctgagagtctcagaaaaagaactcaaccaatttggcaccccatgcagcctcaaaatgtttcaaatgcctaccgcctctagatcgagccacgttgacttcaggtggtcttctaccagcagctcggaatagttgcactgaatctatactttgcagcactgtctgatgcgtcaacaaaattgagccatttttttaaagtaatagatactaatagattatcttttctgatgcantggactgaatttttacctcaatgtgcaaaggctgatcagcctgaactttctaaaggactttanaagaagggtttctatggaatattttgctagctgtggtgttcaccgcatccctctagtcttagaagagaagattattccttntttctgtagtcattgagtggggtatatgcataagtgggagagaaaaaccaaacaatctacttcagttcagtgtaactatttaattgtgtgggtccatagactttttaatgaagatttctgactttgccactgtaaatgcctttaatgagcattaatttttgaaagttttacagagttttattagttttactactttatcttattgatctctgcagacttgtgctggtgcaagtacatgctgacaggcaatttgcactatatttggctgcagattcaaataggcagttctcttatttggtcgacttttgtgaatgtgtgacataaacagatgtaatgcatgtcacagtgacggagataacactgccatgataaaagtactcatgtttcccctatttggaaaaaaaaattgcttttagtatttttccaagttttcaaaagtgcccattttatgctgctgtgtggtttgttaaatctaaatgatttttaaacttttctcatagaaacttaactttggcaataaacattttttaaggtctctcctcttccttccccaacaatgtagttttctagatgagatttcagtatgattttatcagctatttcttatatatcataatctggcaatttctgaaaccagtcagaaaagacatatatttccatgcctttttaaagaattatttttacctgttttatattcacagttggtgtcctgtcactttgttttaaaataagctagaaccaggatgcttccttattggaaaggctttgccagtccttaaggtacaatgagtgatgctgcaacttgcaaatgtaccagcatttaaaatttcttttcctgggaatcaaggtaactcacacgactacttgcagtacaaattttttgcttctctttcgacatgaaatgtacttggtgggttttccttccttttattaaactaaaactgtgtggaaaa

SEQ ID NO: 56916 - DNA, 369 bp, Homo sapiens
acaatgaactttgcttttagtagacagccctatcgtattatgaagatatagtggagttttaatttaaagaaatttaagataggttttgattattgtgggagggaaagaaacattgagagagcacaaaaggaatagttagtcctaaaagagatcttcttaatccagcattaacattcaaatcaattactgagatgataatatcccttgaatcccataagcttttattatccctattgataatgcttaaaaatatgtaagttccaggaattccgtcctctctttcatactttattttcctctctttgtgttattaccagcatacagtcatgcaagaacaaattaacagttcattggcatacaaacatcttt

SEQ ID NO: 56917 - DNA, 651 bp, Homo sapiens
ccaccctgcccctaagttattacctctccagttcctaccgtactccctgcaccgtctcactgtgtgtctcgtgtcagtaatttatatggtgttaaaatgtgtatatttttgtatgtcactattttcactagggctgaggggcctgcgcccagagctggcctcccccaacacctggtgcgcttggtaggtgtggtggcgttatggcagcccggctgctgcttggatgcgagcttggccttgggccggttgctgggggcacagctgtctgccaggcactctcatcaccccagaggccttgtcatcctccctttgccccaggcccaggtagcaagagagcagcgcccaggcctgctggcatcaggtctgggcaagtagcaggactaggcatgtcagaggaccccagggtggttagaggaaaagactcctcctgggggctggctcccagggtggaggaaggtgactgtgtgtgtgtgtggtgtgcgcgcacgcgcgagtgtgctgtatggcccaggcagcctcaaggccctcggagctggctgtgcctgcttctgtgtaccacttctgtgggcatggccgcttctagagcctcgacacccccccaacccccgcaccaagcagacaaagtcaataaaagagctgtctgactgcaaa

SEQ ID NO: 56918 - DNA, 609 bp, Homo sapiens
ccaccctgcccctaagttattacctctccagttcctaccgtactccctgcaccgtctcactgtgtgtctcgtgtcagtaatttatatggtgttaaaatgtgtatatttttgtatgtcactattttcactagggctgaggggcctgcgcccagagctggcctcccccaacactgctgcttggatgcgagcttggccttgggccggttgctgggggcacagctgtctgccaggcactctcatcaccccagaggccttgtcatcctccctttgccccaggcccaggtagcaagagagcagcgcccaggcctgctggcatcaggtctgggcaagtagcaggactaggcatgtcagaggaccccagggtggttagaggaaaagactcctcctgggggctggctcccagggtggaggaaggtgactgtgtgtgtgtgtggtgtgcgcgcacgcgcgagtgtgctgtatggcccaggcagcctcaaggccctcggagctggctgtgcctgcttctgtgtaccacttctgtgggcatggccgcttctagagcctcgacacccccccaacccccgcaccaagcagacaaagtcaataaaagagctgtctgactgcaaa

SEQ ID NO: 56919 - DNA, 511 bp, Homo sapiens
ttctatttctttgtaaaatagctcactagtttctggatatttcaaaatttcatttagttatctatccacattttcttgtgattccctaaacttctttaagaggactattctgaattttgtcatatatttcatagatctttaaatttttctagctctattactaaaactttgtttgtttcttttggtgatgtcatagttctctgggttttcataatccttacatctttacattgatgcctgcatataggaggagacctcccccatttgcctgttccagcttttgctggtggtttttggtggtgttaggcttttactacttaacactggagcttaaccgccattctgcgattgcttcccggattgcggaagacttacagtgagcattggaatgtaaacactgcacaggaactgaattgttgtgctgcccttgtttcccagtctgagaaagacttaagttagtgccactacttaatcaccagcctttgggttgtttccaggtcaagggaaggct

SEQ ID NO: 56920 - DNA, 362 bp, Homo sapiens
gaagtatgtgtttagtgaatgcaccttttcttgttcctcagagcgagagaggctcacctatttccttccctcttccagagatgttgagataagccagtcaaggacagacattactcatgagaggatttgtcatgtgtgacaaagaaataaccccctagaaaatgtgtagacattgagttcttatactttcttttgtttggggttatcctgatgtttatttttgttagggaataggaatgtttattcatactttgaaacttcaatcattctgaggcaggagaattgcttgaacctgggaggtggaggttgcagtgagccaagattgcgccattgcactccagcctgggcaacaagagcaaaac

SEQ ID NO: 56921 - DNA, 365 bp, Homo sapiens
gccagctccaattatcaataattggaaccatacaagagtgtgttgtgtgtgtcactttttgaacagtaagtttcatttcgaaatctatctgaatcagcttgtaaaacctcaaaaccaaaacatttgttcatcatctctatgcaaggattgatcagaaatatatagtaaatgtatactctattttcctcaaaagtaatgagaaataattcatagtagtgttctagttaaatgatgtgaacagatttcatcatttaactttggttcatttaaactggatcaaaggcctaaaggatatatgaaaattttgaattttaaattatgaagacaattgtcctatggatattagaagaaaggaaacagaaggc

SEQ ID NO: 56922 - DNA, 271 bp, Homo sapiens
cttcatggggaaagagaagacaaacaaaaagctaagctgaagttccttattccatggccaaaagaagaagaagaaagtcagatatgttcagggtgctaagattcaatacggggaagaaccagctaaagggaaagagaaaggacagagcttggtagtctgacggcataggtcattaccatgcaaatactctactaaattgcccagattaaaatacgaattgtgagatactctcctccaatattcaccctgctcagttctggagcatgagagg

SEQ ID NO: 56923 - DNA, 998 bp, Homo sapiens
  misc_feature (809)..(809): n is a, c, g, or t
  misc_feature (812)..(812): n is a, c, g, or t
  misc_feature (824)..(824): n is a, c, g, or t
  misc_feature (827)..(827): n is a, c, g, or t
  misc_feature (829)..(829): n is a, c, g, or t
  misc_feature (836)..(836): n is a, c, g, or t
  misc_feature (853)..(853): n is a, c, g, or t
  misc_feature (857)..(857): n is a, c, g, or t
aaaattgaacaaacaagatgagtttggtgctttggaaagtgtgaaagctgctagtgaactcttttctctttatcaggagagtacctgaattaatgaagctcttgcagaaatccaggacttgtaaacaaatcttgttatgaagatggttggctgatcaagatgacactgagtaacccttcagaactagatgaacttatgagtgaagaagcatatgagaaatacataaaatctattgaggagtgaaaatggaactcctaaataaactagtatgaaataacgcaagccagcagagttgtcttaaattagtggtggatagaagacttagaatagaaacttttagtattaccgatggggaaaaaaaaactactgttaacactgctaatgaaagaaaatgccctttaactttctaatgattatagataaatataatatgcgtctttttcacaatatcctatgatttttagactaggctctagtgttcagaattcatgaaattatccatggtaaaaactagttataaaaattacataattcaaagataacattgttattcttaagccttatataatattgtaacttgcatgtatccatacctggatttgggatgaaatacttaatgatctttccattggaaataactggaagtgaagaggttttgttgcttgtacagtgtcagatgaggaacaccactatcttaattttgcgatacactgcatttgctggtgctatttttatacagtgaagcaacagctttgcagcaaaataataaaatacttcttcgttaaaaaaacaaaaaaaaaaaaaaaaanttngggggcgccggnccnangaaggtnctcaaacattcgtggcngcgngcccaaggaagaaactgccaaacgtcccggagcccggcggaacgggcgttcccccaaaagcgggcgccggcctttgaaccaaggctgcgtctggtaccaagcagccaccccccgccccgggacccaaaacaccccaccgca

SEQ ID NO: 56924 - DNA, 1456 bp, Homo sapiens
aaaattgaacaaacaagatgagtttggtgctttggaaagtgtgaaagctgctagtgaactcttttctctttatcaggagagtacctgaattaatgaagctcttgcagaaatccaggacttgtaaacaaatcttgttatgaagatggttggctgatcaagatgacactgagtaacccttcagaactagatgaacttatgagtgaagaagcatatgagaaatacataaaatctattgaggagtgaaaatggaactcctaaataaactagtatgaaataacgcaagccagcagagttgtcttaaattagtggtggatagaagacttagaatagaaacttttagtattaccgatggggaaaaaaaaactactgttaacactgctaatgaaagaaaatgccctttaactttctaatgattatagataaatataatatgcgtctttttcacaatatcctatgatttttagactaggctctagtgttcagaattcatgaaattatccatggtaaaaactagttataaaaattacataattcaaagataacattgttattcttaagccttatataatattgtaacttgcatgtatccatacctggatttgggatgaaatacttaatgatctttccattggaaataactggaagtgaagaggttttgttgcttgtacagtgtcagatgaggaacaccactatcttaattttgcgatacactgcatttgctggtgctatttttatacagtgaagcaacagctttgcagcaaaataataaaatacttcttcgttaaaaaaacaaaaaaaaaaaaaaaaaaaaaaaaaaaaaaaaaaaaaaaaaaaaaaaagaaaaaaaaaaaaaaaaaaaaaaaaaaaaaggaagaaaaaaaaaaaacgagcaagaggacaaaaaaaaaaagaaaacacaatcacaaggacaaaatacacaccaagatcagctaaaccaaaagccatgggcaaccgcgctgggccacacacctcgcgcagcaacggctgccatgacacccatgcactaccggaataagcagtccacatgcccgctccttaagaacaacaaacacaacgccacgggggacccacacacacgacacagtcaagacactaaggcactcggctcagacagtacacccaccctctctcgctggcggttctactatcaagccaacaccccaccacgacgaagaaaaggcggcgagccaacaaacaaacctgctaggcgcggagggcagcccccagctccgtcgcgaagacggtcctccgagtgcttgtaaactatcccggcggacgcgagcagaactgagcgagaaagtaggtaacgaagaccctgacgggagccgcgaaaagcagagacaacacacgaaggcggacaggctgagatcgatggagacaaacgaagaagacacaagccacacaagaccacccagacgacgccgcactaacaacg

SEQ ID NO: 56925 - DNA, 461 bp, Homo sapiens
cgtgtgtgcacgtctgtgtgtgtgcttcagtcacagaagggggtgagaagtgggaagaggggatttgcatagaacctccaattttccttatttcctagggagttgatgatttcagccaaatataagtcttaacgttacatctgcaatggaaaaacaagtcaaactcagcaaaaaggagccctgaagagacagagttaagtgcttccgtgatgagagtagagttggcctatgctgtccctcccaggactcctttacccaagagaaagagagagtgtgcatccaaaggggagtgaaaatagaatataaatagggaaaatagaaccattcagagcagttcagggatctttactactctgacatggaaggaagaaggaggagaagagaaaagatgaacggaccttgaacctgggatatcgctcatgtgactgctacattggtattaagatacagcattcatgtgc

SEQ ID NO: 56926 - DNA, 425 bp, Homo sapiens
cagctcttcttccagcagcagggaagacggggcagatgccagtgggctgcatgtttggtgtcaggagaatgagggattcccatctgacggcatctactttctctgacaagaaggaggcaagatcatttattgagagtcagaatgagagagatagagaaaaaaataaaactcactttaaagtgcaaatatcaatatacaattgatttaaagaatagagttttcagtctattcttccaaacctctaagaaagatattcttcttgcattgcagttgagagaactggggctgataattcaattaacttccttttccctaagatttcccagttggaaagagaaaaagctagcacttttttgtttggcattttgttttgttttgtttttgagacagggtctcacgcttacccagccggagagcaatggcat

SEQ ID NO: 56927 - DNA, 339 bp, Homo sapiens
cttattttgatttccaggcagagtggagatttctgtgctcaagtccacagcttggtttcttttcatctctctccctcccacccctacactgcacatggtgcagtcaaatgaagaatattcctcttctatctctggacccttgtccctcggtgttgagagcccaagctgttaatccttgaactcagataactgatttttaaaaagcaaaaaccagaacgaaagccataaacaataattatgtagaaacatacgtgtatgtgtgtgcacacatatgaagatgaaatatcggaaggaaaaaaaccttaaagttgcccaaactatttaaggcaccccaccctc

SEQ ID NO: 56928 - DNA, 379 bp, Homo sapiens
caggtgcgagccaccacgcccaacccagaactctttttattttgcaaaattgaaattctacccattaaatagcaactcttcttttcccttctcccccaagcccttggcaactgcttttccatttctatgacaatgtctactctagatacctcatagagggtgaatcatacagtatttgtccttttatgactggcttatttcacttagctgctatattattaataccagctttctggggatataattcacaaactgcagaattgaatggtttttagtctattcacatcggatatgtttttgaagagacagtaaaaccaatccttttttccttagttctcagacacacacatgcttcttatctggcaagtcccgttataaa

SEQ ID NO: 56929 - DNA, 1628 bp, Homo sapiens
cgtgtgagggcaaggcaggggggatttgctctgccacaggctactggaaagcagctttttgcctcacagatgtccacaaaatgccttattttacaagactcattttgttcttgttttgcttgatggttctcgtggagagcagaaaacccaagaggaagcgatggacagggcaggtggaaatgcccaagccaagtcacttatataagaagaaccttgatgtgaccaagatccggaagggaaagcctcagcagcttctcagagtggacgagcacgacttcagcatgagacccgccttcggaggccctgccatcccggtgggcgtggacgtacaggtggagagcctggacagcatctccgaggtggacatggacttcactatgaccctgtacctgcggcattactggaaggatgagaggctagctttctccagcgccagcaacaagagcatgaccttcgatggccggctggtgaagaagatctgggtccctgatgtcttctttgttcactccaaaagatcgttcactcatgacaccaccactgacaacatcatgctgagggtgttcccagatggacacgtgctgtacagcatgaggattacggtcactgccatgtgcaacatggacttcagccactttcccctggactcccagacctgttctttggagctggagagctatgcctatacagatgaagatctaatgctgcactggaagaatggggatgaatccctaaaaacagatgagaagatctccttgtctcagtttctgattcagaaatttcacacaacttccaggctggccttctacagcagcactggctggtacaaccgtctgtacattaacttcacgttgcgtcgccacatcttcttcttcttgctccaaacatatttccctgccactctgatggtcatgctgtcctgggtgtccttctggatcgaccgcagagctgtgcctgccagagtttcactgggtatcacgacggtgctgaccatgaccaccatcatcacgggcgtgaatgcctccatgccgcgcgtctcctacgtcaaggccgtggacatctacctctgggtcagctttgtgttcgtgttcctctcggtgctggagtatgcggctgtcaactacctgaccaccgtgcaggagcgcaaggaacggaagctgcgggagaagttcccgtgcatgtgtggaatgcttcactcaaaaaccatgatgctggatggaagctacagtgagtctgaggccaacagcctggctgggtaccccagaagccatatcctgacagaagaagaaaggcaagacaaaatagtggtccacctgggcctgagtggtgaagccaacgctgccagaaagaaggggcttctgaagggccagacgggttttcgtatcttccagaatacccatgccattgacaaatactctaggttgatattccctgcctcctacatatttttcaacttaatttattggtcagtgttttcctaggggctccaaggctgttcctagaagagggcatagacatcgaggggggctggccagtcattgacagacggacttgttgaccacacgcccctcaccaaacaatgcagcagctactggaccaccctgagcagcactcatctctcagagaagccc

SEQ ID NO: 56930 - DNA, 342 bp, Homo sapiens
aaagggctaataaatgtaaagatgaaagaaagcttctgattcacagatacccaattaataatagtttccaaattctgtgtagtatttctacagccttattttcccagactcactcctgttgctaggttactgttatgaccttaaagatcaatacatacaagcttttcttatataggtctttttatttcttcaccattattaccctcagtctggatgcttacttccttttttcgacttttgtgttctcttttattcctaatgcagcagtcagtcttcttctaggacagtttataccactgcaaagtaaaagcctattatcaagtttcccctaaatatttggaa

SEQ ID NO: 56931 - DNA, 436 bp, Homo sapiens
atcagggacccttttgatccaattatagttattgggcagatacagtagtaccctattatcagaagacctagtttcaaatcctgagtcaatttctaattcactgtgtgaccttgtacaagtcacttaagctctctgatcattggttcaacatctttaatatgaggagagtaatgcctatctcaattacctcataaaattattgcaaagatcaagtgagttgatatgttacaaattatttctaaattataagattctgtataagtggaagggttaagtatactcccatattattaaacaccctacgtatcactcaggattctatatgactctgagttctcaatttctagaaatggtcccatttttgctttgttccctacaattctacggagtcttttttttttttaaaaggaagggtgtaggcaaaggtaaatgggag

SEQ ID NO: 56932 - DNA, 459 bp, Homo sapiens
tggctagagtctggtctcgtggactttcaagggttctttgccccactcctgagtttacaccactcttggctaatctgtaagtcccagcaaacagagttggagaaactgctttctcttggtttgactttgaatgctttcaaagtagttagagatatatttcccaaacaaattgcctcttggcaaatagcatagtatcatgccatagttctcaaagttcactgagctccaactactttcttcaagtgaaagttgaagcatacatccaaaatacaaaacaaaaagggcagcaacacctgtagttaaagtgggagtaggttcccagagccccacttgctcagcctccctctgtgtgggtcccaggatccataagtagtcctcagaaaacactgctggccaggatgtgattaaatcccaccccaactctagaaccacccccagacccctctccgccccacccct

SEQ ID NO: 56933 - DNA, 409 bp, Homo sapiens
ctgtgggtagaggtccttgtgatcgaggctggaaggctctcactgtgcctcttttgagttcaaaggaaggtgatgctcaccgtttcccatgaaggtgggcacagcctccaatcagaagcggatctgaggccgggcgcagtggctcacgcctggaatcccagcactttgggaggccgagggaggtggatcacctgaggtcaggagttcgagaccagcctggccaacatgatgaaaccccgtctctactaaaaatacaaaaattagccaggcgtggtggtgtatgcctatagtcccagctatgcaggaggctgaggcgagaggattgcttgactccaggaggtggaggttgctgtgagccgagatcgcaccactggaccccagactgggcgacagagcaagactctatctc

SEQ ID NO: 56934 - DNA, 976 bp, Homo sapiens
  misc_feature (8)..(8): n is a, c, g, or t
gaaggagncaaatcagtactgtaagctggatgcctaatgatttcccatgggaactcttgcagaattgcccttgtctgatgagaggaatgagcgagaacattgtcatggtggaggaggactctctggtgaagctttcccaggcatttttctgctaaagctttgactttgtccaaacactcataataagcagatattatcatttgttggctttccagaaactcaacaagcaaaatgccttgagcatcccaaaaaactattgccatgacctttactcttgaccagtctgcttttcctttcactggaccacttggccactttgacctcttagtacccttttttttttttttttgagacaatatctggctctcttgcccaggctagagtgcaatgatgcggtcttgtctcactgcaggctcaacctccctggtagctgggactacaggcacgcgccactgtgcccagctaaattgctttgattgtgctttgtcttcgggattgtactggtaaagccatgtttcagttcctattgcagttcttcgaataagtgcttcaggatcttgatcgtacttgtctagactttctatccaaagctctgctcttgtctacagctgatctgggtgcaaagggttttaacagccattgagtggaaagcttgctcaactttaatttttcagtcagaattttgtaagctgaaccagttgaaatgaccacagtgttggctattgtttctgctcttgtcagtcctcttgaatcggcagaaacaagatgaatttttttccccgtaaattgatgtggagggcatgatgttcaacatcatctcaacccttcctgaaacaatttatccagctggtcatcatggttcatgcctataatcctaccactttgggaggctgaggctggcagatgactggagcctaggagtttaagaccagcctgggcgatatggcaaaaccccatatctacaaaaaaaatagaa

SEQ ID NO: 56935 - DNA, 368 bp, Homo sapiens
  misc_feature (36)..(36): n is a, c, g, or t
  misc_feature (73)..(73): n is a, c, g, or t
  misc_feature (96)..(97): n is a, c, g, or t
ttgtgtgtctgtagaaggtccgtggtgacgtgtgtntctgcaatgggcctatttcccaataagatcatattcntaggtactaagggttaggacttnnccatatgaattttggggaacacaaacagtaattgtgaagtgttatgttagcataggaaggttaggggaactcagactggtatttgaaacagttaccctagcctaaggttaggaatattatttggaaaccattgttttcttttgctaaagtgggtgggataaaatcaggaagtacaaagctgaagaccacttaagtccatggaggaaagccagattattcggtgaaaagtgttaggacatcggctggtcttccagcaaacaatgcaagctgg

SEQ ID NO: 56936 - DNA, 398 bp, Homo sapiens
tttttttttttgagacagtctcgctctgtcgccaaggctggagtacagtggcgcgatctcagctcactgcaagctccgcctcccgaattcaagcaattcttcagcctcagtctctccagtagctgggattacaggcacctgctatcagcccagctaattgtttgtatttttagtagagacagggtttcaccatgttggcgaggctggtctcaaattcctgacctcaggtgatccgcccacctctgcctcccaaaatgctgggattacaggcgtgagccattgtgcccggcctgtctcagaacattgacacccctgacatgagagctaattggccccagtcaggagcttcaaaagacagcattggccagttgtggtgtgcatgcctgtaatcctagtgc

SEQ ID NO: 56937 - DNA, 186 bp, Homo sapiens
ccagtctgtgtggctcccggcttttcctcccactccaagctggcttccaagccccactcctcagcagagtgtctgaggccctcacatctagctctcttccctgctcccaatctagccagattcacgcattcccatccagcctctggaagcacacaccccatcttcacttatgtgctttccccacgg

SEQ ID NO: 56938 - DNA, 365 bp, Homo sapiens
aaccaaaaaatctgtgactccttctattgtaatatttgctttattgcggtagtctggaaccaaacacgaaatatctccaagatatttctgtattttgaagaggagtgagttactttttatttatcatctaaattctagagggcatagcttgtagaaattgccaagttaggtatttttgtagtcctaatacacttcaatttgtgctgtccctttttttccttcaaaaagctcaaaacaagcaattaatagtggaaaaataaaacaaatcttgttctccatttctttaaagcagttcacttgttaagcctttttatacctaggaagcctcctttgagaaggctttaaaaggagtgggggtagattct

SEQ ID NO: 56939 - DNA, 569 bp, Homo sapiens
ccctgaggctggagtcaggctctgttgccactttgaatccaggggcccaccctgaaccctgagctgggcttctgttcagtacgcggaggtgatgacctctcccacccggggggggtttgaggactcccgaggtggcaggggtgacgcccagcccagcatgcagagtgcccaggcagtgcccacacctttcctctccctgccaaggtgctccgggcctgagcctgtgtggccccctgcttggggctgtcaccacaatgccattccccgcacgcccagcaagtccctcctatgggtgagagcctaacttgagagactcttttggggaggagtaagatgacctgcccttctcaagagtgagcagttcttagatgactgccttgagcagcgatggttcttcctgcaggggtgcgcccacgaaacgctctgcgtgaagcacattggtgccatgctcaggcccagggagagtggagggtgctgtgctcttggactgggtcctggctcgagggttgaggggctgggccatgtccacaaaaagtcactggatggctgggctgctcccactgtgtcgc

SEQ ID NO: 56940 - DNA, 386 bp, Homo sapiens
agtcattgtgtatattatgaaagttggtctcaatttagtcaaacctgggtttcaggggatatagctcacataaaaaggaatgggaggtatcattatatggaaatacctgctgtgtgccagagcatcctttaaggtattttgttttctgtgatattttcaaaccctccactttacagatgaggaaagtcaggcccagagaggtcaagaaaatcacttcaggccaaacaaggtcacatggaaaagtagggattcctgtgaactcaccctgtgttcttcctactccttcatgctgcagaaactctccctgaatccaaatgatgccgctgctgaagtgtgggctggttagagtgcatcacacagagccaagcctcattgtacgggaaggt

SEQ ID NO: 56941 - DNA, 688 bp, Homo sapiens
atctgcattattgcaggaaagatctaactcctaggtgaggcctggaagcacagtctctggtgggttctataaaacccactcttcatttatttattgacttcttgggaccgggtctcattctgtcccctgggctggagtatggtggtgccatcacagcttagtgtagcctcaacattttgattcttaagttgttgcagctctgtccgtggggagccccttcaggtggctcctgtgtcatgtgtttgaagcacatcctggcttgtgacactgcaagttggtgccgcaggctcatcgtgtaggccctgtctccgttctgagtccgctgtttctccaaggagtcttggtgccttttactagattatggtgttgagaccaagacctgggctctaggtgtgctcactcctgctgggatgttgctgctgcttctgggctctctccgtggacagagtgaggaagggtgtgcctgggagctagtctgtgtgtacactcatagctgtatttatgttcatttgtatttatagacatatatgttaaataggaatacatactgatacctcagagcctaatccagcaccacagagttcattctgccctcccccccaggtttatttgcagtttccttctcggatagtgagaagcctggctctcacttctgccatttatttactttaaaaaaaaaaattagaag

SEQ ID NO: 56942 - DNA, 518 bp, Homo sapiens
gctcacatgtgagtcctggcagaagccatggcccatgtctgcacatccagggaggaggacagaaggcccagctcacatgtgagtcctggcagaagccatggcccatgtctgcacatccagggaggaggacagaaggcccagctcacatgtgagtcctggcagaagccatggcccatgtctgcacatccagggaggaggacagaaggcccagctcacatgtgagtcctggcagaagccatggcccatgtctgcacatccagggaggaggacagaaggcccagctcacatgtgagtcctggcagaagccatggcccatgtctgcacatccagggaggaggacagaaggcccagctcagtggcccccgccccccaccccccacgcccgaacagcaggggcagagcagccctccttcgaagtgtgtccaagtccgcatttgagccttgttctggggcccagcccaacacctggcttgggctcactgtcctgagttgcagtaaagctataaccttgaatcaca

SEQ ID NO: 56943 - DNA, 3171 bp, Homo sapiens
cagccaatgagcgccggcgggccggttgcccaggcgaccagcgcgcggctccgccccccgcggggaggctcccgcgcgcggctgagtgcggactggagtgggaacccgggtccccgcgcttagagaacacgcgatgaccacgtggagcctccggcggaggccggcccgcacgctgggactcctgctgctggtcgtcttgggcttcctggtgctccgcaggctggactggagcaccctggtccctctgcggctccgccatcgacagctggggctgcaggccaagggctggaacttcatgctggaggattccaccttctggatcttcgggggctccatccactatttccgtgtgcccagggagtactggagggaccgcctgctgaagatgaaggcctgtggcttgaacaccctcaccacctatgttccgtggaacctgcatgagccagaaagaggcaaatttgacttctctgggaacctggacctggaggccttcgtcctgatggccgcagagatcgggctgtgggtgattctgcgtccaggcccctacatctgcagtgagatggacctcgggggcttgcccagctggctactccaagaccctggcatgaggctgaggacaacttacaagggcttcaccgaagcagtggacctttattttgaccacctgatgtccagggtggtgccactccagtacaagcgtgggggacctatcattgccgtgcaggtggagaatgaatatggttcctataataaagaccccgcatacatgccctacgtcaagaaggcactggaggaccgtggcattgtggaactgctcctgacttcagacaacaaggatgggctgagcaaggggattgtccagggagtcttggccaccatcaacttgcagtcaacacacgagctgcagctactgaccacctttctcttcaacgtccaggggactcagcccaagatggtgatggagtactggacggggtggtttgactcgtggggaggccctcacaatatcttggattcttctgaggttttgaaaaccgtgtctgccattgtggacgccggctcctccatcaacctctacatgttccacggaggcaccaactttggcttcatgaatggagccatgcacttccatgactacaagtcagatgtcaccagctatgactatgatgctgtgctgacagaagccggcgattacacggccaagtacatgaagcttcgagacttcttcggctccatctcaggcatccctctccctcccccacctgaccttcttcccaagatgccgtatgagcccttaacgccagtcttgtacctgtctctgtgggacgccctcaagtacctgggggagccaatcaagtctgaaaagcccatcaacatggagaacctgccagtcaatgggggaaatggacagtccttcgggtacattctctatgagaccagcatcacctcgtctggcatcctcagtggccacgtgcatgatcgggggcaggtgtttgtgaacacagtatccataggattcttggactacaagacaacgaagattgctgtccccctgatccagggttacaccgtgctgaggatcttggtggagaatcgtgggcgagtcaactatggggagaatattgatgaccagcgcaaaggcttaattggaaatctctatctgaatgattcacccctgaaaaacttcagaatctatagcctggatatgaagaagagcttctttcagaggttcggcctggacaaatggagttccctcccagaaacacccacattacctgctttcttcttgggtagcttgtccatcagctccaccccttgtgacacctttctgaagctggagggctgggagaagggggttgtattcatcaatggccagaaccttggacgttactggaacattggaccccagaagacgctttacctcccaggtccctggttgagcagcggaatcaaccaggtcatcgtttttgaggagacgatggcgggccctgcattacagtttcacggaaaccccccacctgggcaggaaccagtacattaagtgagcggtggcaccccctcctgctggtgccagtgggagactgccgcctcctcttgacctgaagcctggtggctgctgccccacccctcactgcaaaagcatctccttaagtagcaacctcagggactgggggctacagtctgcccctgtctcagctcaaaaccctaagcctgcagggaaaggtgggatggctctgggcctggctttgttgatgatggctttcctacagccctgctcttgtgccgaggctgtcgggctgtctctagggtgggagcagctaatcagatcgcccagcctttggccctcagaaaaagtgctgaaacgtgcccttgcaccggacgtcacagccctgcgagcatctgctggactcaggcgtgctctttgctggttcctgggaggcttggccacatccctcatggccccattttatccccgaaatcctgggtgtgtcaccagtgtagagggtggggaaggggtgtctcacctgagctgactttgttcttccttcacaaccttctgagccttctttgggattctggaaggaactcggcgtgagaaacatgtgacttcccctttcccttcccactcgctgcttcccacagggtgacaggctgggctggagaaacagaaatcctcaccctgcgtcttcccaagttagcaggtgtctctggtgttcagtgaggaggacatgtgagtcctggcagaagccatggcccatgtctgcacatccagggaggaggacagaaggcccagctcacatgtgagtcctggcagaagccatggcccatgtctgcacatccagggaggaggacagaaggcccagctcacatgtgagtcctggcagaagccatggcccatgtctgcacatccagggaggaggacagaaggcccagctcacatgtgagtcctggcagaagccatggcccatgtctgcacatccagggaggaggacagaaggcccagctcagtggcccccgccccccaccccccacgcccgaacagcaggggcagagcagccctccttcgaagtgtgtccaagtccgcatttgagccttgttctggggcccagcccaacacctggcttgggctcactgtcctgagttgcagtaaagctataaccttgaatcaca

SEQ ID NO: 56944 - DNA, 1619 bp, Homo sapiens
cagccaatgagcgccggcgggccggttgcccaggcgaccagcgcgcggctccgccccccgcggggaggctcccgcgcgcggctgagtgcggactggagtgggaacccgggtccccgcgcttagagaacacgcgatgaccacgtggagcctccggcggaggccggcccgcacgctgggactcctgctgctggtcgtcttgggcttcctggtgctccgcaggctggactggagcaccctggtccctctgcggctccgccatcgacagctggggctgcaggccaagggctggaacttcatgctggaggattccaccttctggatcttcgggggctccatccactatttccgtgtgcccagggagtactggagggaccgcctgctgaagatgaaggcctgtggcttgaacaccctcaccacctatgttccgtggaacctgcatgagccaggtccctggttgagcagcggaatcaaccaggtcatcgtttttgaggagacgatggcgggccctgcattacagtttcacggaaaccccccacctgggcaggaaccagtacattaagtgagcggtggcaccccctcctgctggtgccagtgggagactgccgcctcctcttgacctgaagcctggtggctgctgccccacccctcactgcaaaagcatctccttaagtagcaacctcagggactgggggctacagtctgcccctgtctcagctcaaaaccctaagcctgcagggaaaggtgggatggctctgggcctggctttgttgatgatggctttcctacagccctgctcttgtgccgaggctgtcgggctgtctctagggtgggagcagctaatcagatcgcccagcctttggccctcagaaaaagtgctgaaacgtgcccttgcaccggacgtcacagccctgcgagcatctgctggactcaggcgtgctctttgctggttcctgggaggcttggccacatccctcatggccccattttatccccgaaatcctgggtgtgtcaccagtgtagagggtggggaaggggtgtctcacctgagctgactttgttcttccttcacaaccttctgagccttctttgggattctggaaggaactcggcgtgagaaacatgtgacttcccctttcccttcccactcgctgcttcccacagggtgacaggctgggctggagaaacagaaatcctcaccctgcgtcttcccaagttagcaggtgtctctggtgttcagtgaggaggacatgtgagtcctggcagaagccatggcccatgtctgcacatccagggaggaggacagaaggcccagctcacatgtgagtcctggcagaagccatggcccatgtctgcacatccagggaggaggacagaaggcccagctcacatgtgagtcctggcagaagccatggcccatgtctgcacatccagggaggaggacagaaggcccagctcagtggcccccgccccccaccccccacgcccgaacagcaggggcagagcagccctccttcgaagtgtgtccaagtccgcatttgagccttgttctggggcccagcccaacacctggcttgggctcactgtcctgagttgcagtaaagctataaccttgaatcaca

SEQ ID NO: 56945 - DNA, 1918 bp, Homo sapiens
cagccaatgagcgccggcgggccggttgcccaggcgaccagcgcgcggctccgccccccgcggggaggctcccgcgcgcggctgagtgcggactggagtgggaacccgggtccccgcgcttagagaacacgcgatgaccacgtggagcctccggcggaggccggcccgcacgctgggactcctgctgctggtcgtcttgggcttcctggtgctccgcaggctggactggagcaccctggtccctctgcggctccgccatcgacagctggggctgcaggccaagggctggaacttcatgctggaggattccaccttctggatcttcgggggctccatccactatttccgtgtgcccagggagtactggagggaccgcctgctgaagatgaaggcctgtggcttgaacaccctcaccacctatgttccgtggaacctgcatgagccagaaagaggcaaatttgacttctctgggaacctggacctggaggccttcgtcctgatggccgcagagatcgggctgtgggtgattctgcgtccaggcccctacatctgcagtgagatggacctcgggggcttgcccagctggctactccaagaccctggcatgaggctgaggacaacttacaagggcttcaccgaagcagtggacctttattttgaccacctgatgtccagggtggtgccactccagtacaagcgtgggggacctatcattgccgtgcaggtggagaatgaatatggttcctataataaagaccccgcatacatgccctacgtcaagaaggcactggaggaccgtggcattgtggaactgctcctgacttcagacaacaaggatgggctgagcaaggggattgtccagggagtcttggccaccatcaacttgcagtcaacacacgagctgcagctactgaccacctttctcttcaacgtccaggggactcagcccaagatggtgatggagtactggacggggtggtttgactcgtggggaggccctcacaatatcttggattcttctgaggttttgaaaaccgtgtctgccattgtggacgccggctcctccatcaacctctacatgttccacggaggcaccaactttggcttcatgaatggagccatgcacttccatgactacaagtcagatgtcaccagctatgactatgatgctgtgctgacagaagccggcgattacacggccaagtacatgaagcttcgagacttcttcggctccatctcaggcatccctctccctcccccacctgaccttcttcccaagatgccgtatgagcccttaacgccagtcttgtacctgtctctgtgggacgccctcaagtacctgggggagccaatcaagtctgaaaagcccatcaacatggagaacctgccagtcaatgggggaaatggacagtccttcgggtacattctctatgagaccagcatcacctcgtctggcatcctcagtggccacgtgcatgatcgggggcaggtgtttgtgaacacagtatccataggattcttggactacaagacaacgaagattgctgtccccctgatccagggttacaccgtgctgaggatcttggtggagaatcgtgggcgagtcaactatggggagaatattgatgaccagcgcaaaggcttaattggaaatctctatctgaatgattcacccctgaaaaacttcagaatctatagcctggatatgaagaagagcttctttcagaggttcggcctggacaaatggagttccctcccagaaacacccacattacctgctttcttcttgggtagcttgtccatcagctccacccctttgtgtccaagtccgcatttgagccttgttctggggcccagcccaacacctggcttgggctcactgtcctgagttgcagtaaagctataaccttgaatcaca

SEQ ID NO: 56946 - DNA, 1624 bp, Homo sapiens
cagccaatgagcgccggcgggccggttgcccaggcgaccagcgcgcggctccgccccccgcggggaggctcccgcgcgcggctgagtgcggactggagtgggaacccgggtccccgcgcttagagaacacgcgatgaccacgtggagcctccggcggaggccggcccgcacgctgggactcctgctgctggtcgtcttgggcttcctggtgctccgcaggctggactggagcaccctggtccctctgcggctccgccatcgacagctggggctgcaggccaagggctggaacttcatgctggaggattccaccttctggatcttcgggggctccatccactatttccgtgtgcccagggagtactggagggaccgcctgctgaagatgaaggcctgtggcttgaacaccctcaccacctatgttccgtggaacctgcatgagccagaaagaggcaaatttgacttctctgggaacctggacctggaggccttcgtcctgatggccgcagagatcgggctgtgggtgattctgcgtccaggcccctacatctgcagtgagatggacctcgggggcttgcccagctggctactccaagaccctggcatgaggctgaggacaacttacaagggcttcaccgaagcagtggacctttattttgaccacctgatgtccagggtggtgccactccagtacaagcgtgggggacctatcattgccgtgcaggtggagaatgaatatggttcctataataaagaccccgcatacatgccctacgtcaagaaggcactggaggaccgtggcattgtggaactgctcctgacttcagacaacaaggatgggctgagcaaggggattgtccagggagtcttggccaccatcaacttgcagtcaacacacgagctgcagctactgaccacctttctcttcaacgtccaggggactcagcccaagatggtgatggagtactggacggggtggtttgactcgtggggaggccctcacaatatcttggattcttctgaggttttgaaaaccgtgtctgccattgtggacgccggctcctccatcaacctctacatgttccacggaggcaccaactttggcttcatgaatggagccatgcacttccatgactacaagtcagatgtcaccagctatgactatgatgctgtgctgacagaagccggcgattacacggccaagtacatgaagcttcgagacttcttcggctccatctcaggtacccagcagacagcagactcaagttccaactcaggccctcgcttctgctctcagacccctaaagagttacttccttactgtcccacctcgaccccagttgatctgcgtgcaagaatatcctagacaaggacagggaggtgtgtgaggctgtttccatcttgccggcttcacctgttacaggtgttaacgctccttatctcctgtggaggacgggagaacgccctggctttcccccaggcctggccttcctccctggcctcagcaggtgctgagagctagcctgttgttcctcttggtgctgggacgcaggagcacatcgggtctgtggatgggagccgggtggggaggacgagcaggcagtgacatttgggtccgttgggg

SEQ ID NO: 56947 - DNA, 484 bp, Homo sapiens
gtaactgcacttgtgttgggccgtgggggctggcggcggccctgggctggctgtgcacgctcccgctgtgggactgcgacccaagtaggagtttctctggtgcctgttattctcccgtgcatatggcactgggctgcagacacccttgggttccatgagtggggagggtctgtgtgagagattgtggtgcgtggctggctgggtggctgttctcctgccctgctgggcactcgggctccaagggcactctgcagatgactgcttcacgtgcgggcttcctgttttcagaacatcgcagctccgttcttcccagctgcatgggccccgaacctggtagtgactgtgagctcctctccattccgcctggcacctaagccattgtttgctttatctcccagtgctcctggaatccctacaggcctaagcagttgcctgctagcagcacccctggcctgcattgctgcagtagcattttcactgttga

SEQ ID NO: 56948 - DNA, 3101 bp, Homo sapiens
cagccaatgagcgccggcgggccggttgcccaggcgaccagcgcgcggctccgccccccgcggggaggctcccgcgcgcggctgagtgcggactggagtgggaacccgggtccccgcgcttagagaacacgcgatgaccacgtggagcctccggcggaggccggcccgcacgctgggactcctgctgctggtcgtcttgggcttcctggtgctccgcaggctggactggagcaccctggtccctctgcggctccgccatcgacagctggggctgcaggccaagggctggaacttcatgctggaggattccaccttctggatcttcgggggctccatccactatttccgtgtgcccagggagtactggagggaccgcctgctgaagatgaaggcctgtggcttgaacaccctcaccacctatgttccgtggaacctgcatgagccagaaagaggcaaatttgacttctctgggaacctggacctggaggccttcgtcctgatggccgcagagatcgggctgtgggtgattctgcgtccaggcccctacatctgcagtgagatggacctcgggggcttgcccagctggctactccaagaccctggcatgaggctgaggacaacttacaagggcttcaccgaagcagtggacctttattttgaccacctgatgtccagggtggtgccactccagtacaagcgtgggggacctatcattgccgtgcaggtggagaatgaatatggttcctataataaagaccccgcatacatgccctacgtcaagaaggcactggaggaccgtggcattgtggaactgctcctgacttcagacaacaaggatgggctgagcaaggggattgtccagggagtcttggccaccatcaacttgcagtcaacacacgagctgcagctactgaccacctttctcttcaacgtccaggggactcagcccaagatggtgatggagtactggacggggtggtttgactcgtggggaggccctcacaatatcttggattcttctgaggttttgaaaaccgtgtctgccattgtggacgccggctcctccatcaacctctacatgttccacggaggcaccaactttggcttcatgaatggagccatgcacttccatgactacaagtcagatgtcaccagctatgactatgatgctgtgctgacagaagccggcgattacacggccaagtacatgaagcttcgagacttcttcggctccatctcaggcatccctctccctcccccacctgaccttcttcccaagatgccgtatgagcccttaacgccagtcttgtacctgtctctgtgggacgccctcaagtacctgggggagccaatcaagtctgaaaagcccatcaacatggagaacctgccagtcaatgggggaaatggacagtccttcgggtacattctctatgagaccagcatcacctcgtctggcatcctcagtggccacgtgcatgatcgggggcaggtgtttgtgaacacagtatccataggattcttggactacaagacaacgaagattgctgtccccctgatccagggttacaccgtgctgaggatcttggtggagaatcgtgggcgagtcaactatggggagaatattgatgaccagcgcaaaggcttaattggaaatctctatctgaatgattcacccctgaaaaacttcagaatctatagcctggatatgaagaagagcttctttcagaggttcggcctggacaaatggagttccctcccagaaacacccacattacctgctttcttcttgggtagcttgtccatcagctccaccccttgtgacacctttctgaagctggagggctgggagaagggggttgtattcatcaatggccagaaccttggacgttactggaacattggaccccagaagacgctttacctcccaggtccctggttgagcagcggaatcaaccaggtcatcgtttttgaggagacgatggcgggccctgcattacagtttcacggaaaccccccacctgggcaggaaccagtacattaagtgagcggtggcaccccctcctgctggtgccagtgggagactgccgcctcctcttgacctgaagcctggtggctgctgccccacccctcactgcaaaagcatctccttaagtagcaacctcagggactgggggctacagtctgcccctgtctcagctcaaaaccctaagcctgcagggaaaggtgggatggctctgggcctggctttgttgatgatggctttcctacagccctgctcttgtgccgaggctgtcgggctgtctctagggtgggagcagctaatcagatcgcccagcctttggccctcagaaaaagtgctgaaacgtgcccttgcaccggacgtcacagccctgcgagcatctgctggactcaggcgtgctctttgctggttcctgggaggcttggccacatccctcatggccccattttatccccgaaatcctgggtgtgtcaccagtgtagagggtggggaaggggtgtctcacctgagctgactttgttcttccttcacaaccttctgagccttctttgggattctggaaggaactcggcgtgagaaacatgtgacttcccctttcccttcccactcgctgcttcccacagggtgacaggctgggctggagaaacagaaatcctcaccctgcgtcttcccaagttagcaggtgtctctggtgttcagtgaggaggacatgtgagtcctggcagaagccatggcccatgtctgcacatccagggaggaggacagaaggcccagctcacatgtgagtcctggcagaagccatggcccatgtctgcacatccagggaggaggacagaaggcccagctcacatgtgagtcctggcagaagccatggcccatgtctgcacatccagggaggaggacagaaggcccagctcagtggcccccgccccccaccccccacgcccgaacagcaggggcagagcagccctccttcgaagtgtgtccaagtccgcatttgagccttgttctggggcccagcccaacacctggcttgggctcactgtcctgagttgcagtaaagctataaccttgaatcaca

SEQ ID NO: 56949 - DNA, 2961 bp, Homo sapiens
cagccaatgagcgccggcgggccggttgcccaggcgaccagcgcgcggctccgccccccgcggggaggctcccgcgcgcggctgagtgcggactggagtgggaacccgggtccccgcgcttagagaacacgcgatgaccacgtggagcctccggcggaggccggcccgcacgctgggactcctgctgctggtcgtcttgggcttcctggtgctccgcaggctggactggagcaccctggtccctctgcggctccgccatcgacagctggggctgcaggccaagggctggaacttcatgctggaggattccaccttctggatcttcgggggctccatccactatttccgtgtgcccagggagtactggagggaccgcctgctgaagatgaaggcctgtggcttgaacaccctcaccacctatgttccgtggaacctgcatgagccagaaagaggcaaatttgacttctctgggaacctggacctggaggccttcgtcctgatggccgcagagatcgggctgtgggtgattctgcgtccaggcccctacatctgcagtgagatggacctcgggggcttgcccagctggctactccaagaccctggcatgaggctgaggacaacttacaagggcttcaccgaagcagtggacctttattttgaccacctgatgtccagggtggtgccactccagtacaagcgtgggggacctatcattgccgtgcaggtggagaatgaatatggttcctataataaagaccccgcatacatgccctacgtcaagaaggcactggaggaccgtggcattgtggaactgctcctgacttcagacaacaaggatgggctgagcaaggggattgtccagggagtcttggccaccatcaacttgcagtcaacacacgagctgcagctactgaccacctttctcttcaacgtccaggggactcagcccaagatggtgatggagtactggacggggtggtttgactcgtggggaggccctcacaatatcttggattcttctgaggttttgaaaaccgtgtctgccattgtggacgccggctcctccatcaacctctacatgttccacggaggcaccaactttggcttcatgaatggagccatgcacttccatgactacaagtcagatgtcaccagctatgactatgatgctgtgctgacagaagccggcgattacacggccaagtacatgaagcttcgagacttcttcggctccatctcaggcatccctctccctcccccacctgaccttcttcccaagatgccgtatgagcccttaacgccagtcttgtacctgtctctgtgggacgccctcaagtacctgggggagccaatcaagtctgaaaagcccatcaacatggagaacctgccagtcaatgggggaaatggacagtccttcgggtacattctctatgagaccagcatcacctcgtctggcatcctcagtggccacgtgcatgatcgggggcaggtgtttgtgaacacagtatccataggattcttggactacaagacaacgaagattgctgtccccctgatccagggttacaccgtgctgaggatcttggtggagaatcgtgggcgagtcaactatggggagaatattgatgaccagcgcaaaggcttaattggaaatctctatctgaatgattcacccctgaaaaacttcagaatctatagcctggatatgaagaagagcttctttcagaggttcggcctggacaaatggagttccctcccagaaacacccacattacctgctttcttcttgggtagcttgtccatcagctccaccccttgtgacacctttctgaagctggagggctgggagaagggggttgtattcatcaatggccagaaccttggacgttactggaacattggaccccagaagacgctttacctcccaggtccctggttgagcagcggaatcaaccaggtcatcgtttttgaggagacgatggcgggccctgcattacagtttcacggaaaccccccacctgggcaggaaccagtacattaagtgagcggtggcaccccctcctgctggtgccagtgggagactgccgcctcctcttgacctgaagcctggtggctgctgccccacccctcactgcaaaagcatctccttaagtagcaacctcagggactgggggctacagtctgcccctgtctcagctcaaaaccctaagcctgcagggaaaggtgggatggctctgggcctggctttgttgatgatggctttcctacagccctgctcttgtgccgaggctgtcgggctgtctctagggtgggagcagctaatcagatcgcccagcctttggccctcagaaaaagtgctgaaacgtgcccttgcaccggacgtcacagccctgcgagcatctgctggactcaggcgtgctctttgctggttcctgggaggcttggccacatccctcatggccccattttatccccgaaatcctgggtgtgtcaccagtgtagagggtggggaaggggtgtctcacctgagctgactttgttcttccttcacaaccttctgagccttctttgggattctggaaggaactcggcgtgagaaacatgtgacttcccctttcccttcccactcgctgcttcccacagggtgacaggctgggctggagaaacagaaatcctcaccctgcgtcttcccaagttagcaggtgtctctggtgttcagtgaggaggacatgtgagtcctggcagaagccatggcccatgtctgcacatccagggaggaggacagaaggcccagctcagtggcccccgccccccaccccccacgcccgaacagcaggggcagagcagccctccttcgaagtgtgtccaagtccgcatttgagccttgttctggggcccagcccaacacctggcttgggctcactgtcctgagttgcagtaaagctataaccttgaatcaca

SEQ ID NO: 56950 - DNA, 2273 bp, Homo sapiens
cagccaatgagcgccggcgggccggttgcccaggcgaccagcgcgcggctccgccccccgcggggaggctcccgcgcgcggctgagtgcggactggagtgggaacccgggtccccgcgcttagagaacacgcgatgaccacgtggagcctccggcggaggccggcccgcacgctgggactcctgctgctggtcgtcttgggcttcctggtgctccgcaggctggactggagcaccctggtccctctgcggctccgccatcgacagctggggctgcaggccaagggctggaacttcatgctggaggattccaccttctggatcttcgggggctccatccactatttccgtgtgcccagggagtactggagggaccgcctgctgaagatgaaggcctgtggcttgaacaccctcaccacctatgttccgtggaacctgcatgagccagaaagaggcaaatttgacttctctgggaacctggacctggaggccttcgtcctgatggccgcagagatcgggctgtgggtgattctgcgtccaggcccctacatctgcagtgagatggacctcgggggcttgcccagctggctactccaagaccctggcatgaggctgaggacaacttacaagggcttcaccgaagcagtggacctttattttgaccacctgatgtccagggtggtgccactccagtacaagcgtgggggacctatcattgccgtgcaggtggagaatgaatatggttcctataataaagaccccgcatacatgccctacgtcaagaaggcactggaggaccgtggcattgtggaactgctcctgacttcagacaacaaggatgggctgagcaaggggattgtccagggagtcttggccaccatcaacttgcagtcaacacacgagctgcagctactgaccacctttctcttcaacgtccaggggactcagcccaagatggtgatggagtactggacggggtggtttgactcgtggggaggccctcacaatatcttggattcttctgaggttttgaaaaccgtgtctgccattgtggacgccggctcctccatcaacctctacatgttccacggaggcaccaactttggcttcatgaatggagccatgcacttccatgactacaagtcagatgtcaccagctatgactatgatgctgtgctgacagaagccggcgattacacggccaagtacatgaagcttcgagacttcttcggctccatctcaggcatccctctccctcccccacctgaccttcttcccaagatgccgtatgagcccttaacgccagtcttgtacctgtctctgtgggacgccctcaagtacctgggggagccaatcaagtctgaaaagcccatcaacatggagaacctgccagtcaatgggggaaatggacagtccttcgggtacattctctatgagaccagcatcacctcgtctggcatcctcagtggccacgtgcatgatcgggggcaggtgtttgtgaacacagtatccataggattcttggactacaagacaacgaagattgctgtccccctgatccagggttacaccgtgctgaggatcttggtggagaatcgtgggcgagtcaactatggggagaatattgatgaccagcgcaaaggcttaattggaaatctctatctgaatgattcacccctgaaaaacttcagaatctatagcctggatatgaagaagagcttctttcagaggttcggcctggacaaatggagttccctcccagaaacacccacattacctgctttcttcttgggtagcttgtccatcagctccaccccttgtgacacctttctgaagctggagggctgggagaagggggttgtattcatcaatggccagaaccttggacgttactggaacattggaccccagaagacgctttacctcccaggtccctggttgagcagcggaatcaaccaggtcatcgtttttgaggagacgatggcgggccctgcattacagtttcacggaaaccccccacctgggcaggaaccagtacattaagtgagcggtggcaccccctcctgctggtgccagtgggagactgccgcctcctcttgacctgaagcctggtggctgctgccccacccctcactgcaaaagcatctccttaagtaagcagccctccttcgaagtgtgtccaagtccgcatttgagccttgttctggggcccagcccaacacctggcttgggctcactgtcctgagttgcagtaaagctataaccttgaatcaca

SEQ ID NO: 56951 - DNA, 539 bp, Homo sapiens
ctgaatggctcaaaagtgtcttgcctccccaatggctgagatgaagacctgtggcccttccaagcttctccctgttcttcgtgctacatgtgctgtgctggggacaggaatgaccatgacagggcccggtgtcttgcagactatgatgctgtgctgacagaagccggcgattacacggccaagtacatgaagcttcgagacttcttcggctccatctcaggtacccagcagacagcagactcaagttccaactcaggccctcgcttctgctctcagacccctaaagagttacttccttactgtcccacctcgaccccagttgatctgcgtgcaagaatatcctagacaaggacagggaggtgtgtgaggctgtttccatcttgccggcttcacctgttacaggtgttaacgctccttatctcctgtggaggacgggagaacgccctggctttcccccaggcctggccttcctccctggcctcagcaggtgctgagagctagcctgttgttcctcttggtgctgggacgcaggagcacat

SEQ ID NO: 56952 - DNA, 478 bp, Homo sapiens
actttcaatttccatttcattataaggtatacaaatggtcagccagatgaagaggtacatgggaggaggactggaagggtcatgagcacaggagcctctgcttccacagagtcagggtgtgccgccctcttagtatcaggaagctcccctgagcatggtgtccagggtttttaatgaggtttcattatgtaggcatgattgattaaataattggccatatgactgaacttaatctccagttcttctctcctcctaggaagttaggggaatggggtgggtttgaaatttccaatctctaatcacatgtttgggctttttgatgtgacagccccttccttggaactatgtaaggatcccttagatagttccataataagccttcctaatagagtccactaggaaacaataaataaataagtttaatggctgaaacttcattttcccacttcacaaatattaggatggctactatttgaaa

SEQ ID NO: 56953 - DNA, 609 bp, Homo sapiens
  misc_feature (509)..(509): n is a, c, g, or t
  misc_feature (585)..(585): n is a, c, g, or t
  misc_feature (601)..(601): n is a, c, g, or t
gttgtaacaaaaccgctcaagtctgccttaaagagccttacaagccagccagtccctgcagctccacaaactgacccatcctgggccttgttctccacagaatgggtctgctccttcccctggcactctgcatcctagtcctgtgctgcggagcaatgtctccaccccagctggccctcaacccctcggctctgctctcccggggctgcaatgactccgatgtgctggcagttgcaggctttgccctgcgggatattaacaaagacagaaaggatggctatgtgctgagactcaaccgagtgaacgacgcccaggaatacagacggtttcaaaaaaaaagatttacatgacgtgccctgactgcccaagctccatacccactgactcttccaatcaccaagtgctggaggctgccaccgagtctcttgcgaaatacaacaatgagaacacatccaagcagtattctctcttcaaagtcaccagggcttctagccagtgggttggtcggncttttttattttgtgggataatttaatttaagggggcgaaaggttttttcctttagtgaggggttaatttttaggntttggaattggccttnggttttaa

SEQ ID NO: 56954 - DNA, 1635 bp, Homo sapiens
  misc_feature (701)..(701): n is a, c, g, or t
  misc_feature (719)..(719): n is a, c, g, or t
  misc_feature (728)..(728): n is a, c, g, or t
gttgtaacaaaaccgctcaagtctgccttaaagagccttacaagccagccagtccctgcagctccacaaactgacccatcctgggccttgttctccacagaatgggtctgctccttcccctggcactctgcatcctagtcctgtgctgcggagcaatgtctccaccccagctggccctcaacccctcggctctgctctcccggggctgcaatgactccgatgtgctggcagttgcaggctttgccctgcgggatattaacaaagacagaaaggatggctatgtgctgagactcaaccgagtgaacgacgcccaggaatacagacggggtggcctgggatctctgttctatcttacactggatgtgctagagactgactgccatgtgctcagaaagaaggcatggcaagactgtggaatgaggatattttttgaatcagtttatggtcaatgcaaagcaatattttatatgaacaacccaagtagagttctctatttagctgcttataactgtactcttcgcccagtttcaaaaaaaaagatttacatgacgtgccctgactgcccaagctccatacccactgactcttccaatcaccaagtgctggaggctgccaccgagtctcttgcgaaatacaacaatgagaacacatccaagcagtattctctcttcaaagtcaccagggcttctagccagtgggtngtcggcccttcttacttngtggaatanttaattaaagaatcaccatgtactaaatcccaggccagcagctgttcacttcagtcctccgactctgtgcctgttggtctttgcaaaggttctctgactcgaacacactgggaaaagtttgtctctgtgacttgtgacttctttgaatcacaggctccagccactggaagtgaaaactctgctgttaaccagaaacctacaaaccttcccaaggtggaagaatcccagcagaaaaacacccccccaacagactccccctccaaagctgggccaagaggatctgtccaatatcttcctgacttggatgataaaaattcccaggaaaagggccctcaggaggcctttcctgtgcatctggacctaaccacgaatccccagggagaaaccctggatatttccttcctcttcctggagcctatggaggagaagctggttgtcctgcctttcccccaaagaaaaagcacgcactgctgagtgcccagggccagcccagaatgccagccctcttgtccttccgccatgagaatcacacagagtcttctgtaggggtatggtgcgccgcatgacatgggaggcgatggggacgatggacagagacagagcgtgcacacgtagagtggctagtgaaggacgcctttttgactcttcttggtctcagcatgttgactgggattggaaataatgagactgaccctcggcttgggctgcactctaccctgtacactgccttgtaccctgagctgcatcacctcctaaactgagcagtctcataccatggagagatgcctctcttatgtcttcagccactcacttataaagatacttatcttttcagcagtatatatgtgctgaaatctcagcatgaaagcattgcatgagtaaagatactttccctaacaccgggagg

SEQ ID NO: 56955 - DNA, 1569 bp, Homo sapiens
  misc_feature (635)..(635): n is a, c, g, or t
  misc_feature (653)..(653): n is a, c, g, or t
  misc_feature (662)..(662): n is a, c, g, or t
gttgtaacaaaaccgctcaagtctgccttaaagagccttacaagccagccagtccctgcagctccacaaactgacccatcctgggccttgttctccacagaatgggtctgctccttcccctggcactctgcatcctagtcctgtgctgcggagcaatgtctccaccccagctggccctcaacccctcggctctgctctcccggggctgcaatgactccgatgtgctggcagttgcaggctttgccctgcgggatattaacaaagacagaaaggatggctatgtgctgagactcaaccgagtgaacgacgcccaggaatacagacggggtggcctgggatctctgttctatcttacactggatgtgctagagactgactgccatgtgctcagaaagaaggcatggcaagactgtggaatgaggatattttttgaatcagtttatggtcaatgcaaagcaatattttatatgaacaacccaagtagagttctctatttagctgcttataactgtactcttcgcccagatcaccaagtgctggaggctgccaccgagtctcttgcgaaatacaacaatgagaacacatccaagcagtattctctcttcaaagtcaccagggcttctagccagtgggtngtcggcccttcttacttngtggaatanttaattaaagaatcaccatgtactaaatcccaggccagcagctgttcacttcagtcctccgactctgtgcctgttggtctttgcaaaggttctctgactcgaacacactgggaaaagtttgtctctgtgacttgtgacttctttgaatcacaggctccagccactggaagtgaaaactctgctgttaaccagaaacctacaaaccttcccaaggtggaagaatcccagcagaaaaacacccccccaacagactccccctccaaagctgggccaagaggatctgtccaatatcttcctgacttggatgataaaaattcccaggaaaagggccctcaggaggcctttcctgtgcatctggacctaaccacgaatccccagggagaaaccctggatatttccttcctcttcctggagcctatggaggagaagctggttgtcctgcctttcccccaaagaaaaagcacgcactgctgagtgcccagggccagcccagaatgccagccctcttgtccttccgccatgagaatcacacagagtcttctgtaggggtatggtgcgccgcatgacatgggaggcgatggggacgatggacagagacagagcgtgcacacgtagagtggctagtgaaggacgcctttttgactcttcttggtctcagcatgttgactgggattggaaataatgagactgaccctcggcttgggctgcactctaccctgtacactgccttgtaccctgagctgcatcacctcctaaactgagcagtctcataccatggagagatgcctctcttatgtcttcagccactcacttataaagatacttatcttttcagcagtatatatgtgctgaaatctcagcatgaaagcattgcatgagtaaagatactttccctaacaccgggagg

SEQ ID NO: 56956 - DNA, 1252 bp, Homo sapiens
  misc_feature (3)..(3): n is a, c, g, or t
  misc_feature (9)..(9): n is a, c, g, or t
  misc_feature (318)..(318): n is a, c, g, or t
  misc_feature (336)..(336): n is a, c, g, or t
  misc_feature (345)..(345): n is a, c, g, or t
ggnggaggntttgggggaccaggctgaaggggctctgactgcccttttgggaggagtgtgagtggcttccctttgctgcaaggagcattgtactcagcaattgcaaactcatccgtctcgtagtaatcatagactttcgccctttcaaaaaaaaagatttacatgacgtgccctgactgcccaagctccatacccactgactcttccaatcaccaagtgctggaggctgccaccgagtctcttgcgaaatacaacaatgagaacacatccaagcagtattctctcttcaaagtcaccagggcttctagccagtgggtngtcggcccttcttacttngtggaatanttaattaaagaatcaccatgtactaaatcccaggccagcagctgttcacttcagtcctccgactctgtgcctgttggtctttgcaaaggttctctgactcgaacacactgggaaaagtttgtctctgtgacttgtgacttctttgaatcacaggctccagccactggaagtgaaaactctgctgttaaccagaaacctacaaaccttcccaaggtggaagaatcccagcagaaaaacacccccccaacagactccccctccaaagctgggccaagaggatctgtccaatatcttcctgacttggatgataaaaattcccaggaaaagggccctcaggaggcctttcctgtgcatctggacctaaccacgaatccccagggagaaaccctggatatttccttcctcttcctggagcctatggaggagaagctggttgtcctgcctttcccccaaagaaaaagcacgcactgctgagtgcccagggccagcccagaatgccagccctcttgtccttccgccatgagaatcacacagagtcttctgtaggggtatggtgcgccgcatgacatgggaggcgatggggacgatggacagagacagagcgtgcacacgtagagtggctagtgaaggacgcctttttgactcttcttggtctcagcatgttgactgggattggaaataatgagactgaccctcggcttgggctgcactctaccctgtacactgccttgtaccctgagctgcatcacctcctaaactgagcagtctcataccatggagagatgcctctcttatgtcttcagccactcacttataaagatacttatcttttcagcagtatatatgtgctgaaatctcagcatgaaagcattgcatgagtaaagatactttccctaacaccgggagg

SEQ ID NO: 56957 - DNA, 1384 bp, Homo sapiens
  misc_feature (701)..(701): n is a, c, g, or t
  misc_feature (719)..(719): n is a, c, g, or t
  misc_feature (728)..(728): n is a, c, g, or t
gttgtaacaaaaccgctcaagtctgccttaaagagccttacaagccagccagtccctgcagctccacaaactgacccatcctgggccttgttctccacagaatgggtctgctccttcccctggcactctgcatcctagtcctgtgctgcggagcaatgtctccaccccagctggccctcaacccctcggctctgctctcccggggctgcaatgactccgatgtgctggcagttgcaggctttgccctgcgggatattaacaaagacagaaaggatggctatgtgctgagactcaaccgagtgaacgacgcccaggaatacagacggggtggcctgggatctctgttctatcttacactggatgtgctagagactgactgccatgtgctcagaaagaaggcatggcaagactgtggaatgaggatattttttgaatcagtttatggtcaatgcaaagcaatattttatatgaacaacccaagtagagttctctatttagctgcttataactgtactcttcgcccagtttcaaaaaaaaagatttacatgacgtgccctgactgcccaagctccatacccactgactcttccaatcaccaagtgctggaggctgccaccgagtctcttgcgaaatacaacaatgagaacacatccaagcagtattctctcttcaaagtcaccagggcttctagccagtgggtngtcggcccttcttacttngtggaatanttaattaaagaatcaccatgtactaaatcccaggccagcagctgttcacttcagtcctccgactctgtgcctgttggtctttgcaaaggttctctgactcgaacacactgggaaaagtttgtctctgtgacttgtgacttctttgaatcacaggctccagccactggaagtgaaaactctgctgttaaccagaaacctacaaaccttcccaaggtggaagaatcccagcagaaaaacacccccccaacagactccccgtccttccgccatgagaatcacacagagtcttctgtaggggtatggtgcgccgcatgacatgggaggcgatggggacgatggacagagacagagcgtgcacacgtagagtggctagtgaaggacgcctttttgactcttcttggtctcagcatgttgactgggattggaaataatgagactgaccctcggcttgggctgcactctaccctgtacactgccttgtaccctgagctgcatcacctcctaaactgagcagtctcataccatggagagatgcctctcttatgtcttcagccactcacttataaagatacttatcttttcagcagtatatatgtgctgaaatctcagcatgaaagcattgcatgagtaaagatactttccctaacaccgggagg

SEQ ID NO: 56958 - DNA, 1436 bp, Homo sapiens
  misc_feature (502)..(502): n is a, c, g, or t
  misc_feature (520)..(520): n is a, c, g, or t
  misc_feature (529)..(529): n is a, c, g, or t
gttgtaacaaaaccgctcaagtctgccttaaagagccttacaagccagccagtccctgcagctccacaaactgacccatcctgggccttgttctccacagaatgggtctgctccttcccctggcactctgcatcctagtcctgtgctgcggagcaatgtctccaccccagctggccctcaacccctcggctctgctctcccggggctgcaatgactccgatgtgctggcagttgcaggctttgccctgcgggatattaacaaagacagaaaggatggctatgtgctgagactcaaccgagtgaacgacgcccaggaatacagacggtttcaaaaaaaaagatttacatgacgtgccctgactgcccaagctccatacccactgactcttccaatcaccaagtgctggaggctgccaccgagtctcttgcgaaatacaacaatgagaacacatccaagcagtattctctcttcaaagtcaccagggcttctagccagtgggtngtcggcccttcttacttngtggaatanttaattaaagaatcaccatgtactaaatcccaggccagcagctgttcacttcagtcctccgactctgtgcctgttggtctttgcaaaggttctctgactcgaacacactgggaaaagtttgtctctgtgacttgtgacttctttgaatcacaggctccagccactggaagtgaaaactctgctgttaaccagaaacctacaaaccttcccaaggtggaagaatcccagcagaaaaacacccccccaacagactccccctccaaagctgggccaagaggatctgtccaatatcttcctgacttggatgataaaaattcccaggaaaagggccctcaggaggcctttcctgtgcatctggacctaaccacgaatccccagggagaaaccctggatatttccttcctcttcctggagcctatggaggagaagctggttgtcctgcctttcccccaaagaaaaagcacgcactgctgagtgcccagggccagcccagaatgccagccctcttgtccttccgccatgagaatcacacagagtcttctgtaggggtatggtgcgccgcatgacatgggaggcgatggggacgatggacagagacagagcgtgcacacgtagagtggctagtgaaggacgcctttttgactcttcttggtctcagcatgttgactgggattggaaataatgagactgaccctcggcttgggctgcactctaccctgtacactgccttgtaccctgagctgcatcacctcctaaactgagcagtctcataccatggagagatgcctctcttatgtcttcagccactcacttataaagatacttatcttttcagcagtatatatgtgctgaaatctcagcatgaaagcattgcatgagtaaagatactttccctaacaccgggagg

SEQ ID NO: 56959 - DNA, 1325 bp, Homo sapiens
  misc_feature (391)..(391): n is a, c, g, or t
  misc_feature (409)..(409): n is a, c, g, or t
  misc_feature (418)..(418): n is a, c, g, or t
cagtctccagtacaaattaacaaaccggctgctggcttatgtatcagttgcctatgcatagggtcagtatactcacccccaggcctgaacaactctgggtcctcaggaaccctgaaggtgtgactggcaaagctgaggccctggctcgggagctgcttccctgagaggactgcgcctacagcatccttgacatcttttcataaaccagcacaacttttcaaaaaaaaagatttacatgacgtgccctgactgcccaagctccatacccactgactcttccaatcaccaagtgctggaggctgccaccgagtctcttgcgaaatacaacaatgagaacacatccaagcagtattctctcttcaaagtcaccagggcttctagccagtgggtngtcggcccttcttacttngtggaatanttaattaaagaatcaccatgtactaaatcccaggccagcagctgttcacttcagtcctccgactctgtgcctgttggtctttgcaaaggttctctgactcgaacacactgggaaaagtttgtctctgtgacttgtgacttctttgaatcacaggctccagccactggaagtgaaaactctgctgttaaccagaaacctacaaaccttcccaaggtggaagaatcccagcagaaaaacacccccccaacagactccccctccaaagctgggccaagaggatctgtccaatatcttcctgacttggatgataaaaattcccaggaaaagggccctcaggaggcctttcctgtgcatctggacctaaccacgaatccccagggagaaaccctggatatttccttcctcttcctggagcctatggaggagaagctggttgtcctgcctttcccccaaagaaaaagcacgcactgctgagtgcccagggccagcccagaatgccagccctcttgtccttccgccatgagaatcacacagagtcttctgtaggggtatggtgcgccgcatgacatgggaggcgatggggacgatggacagagacagagcgtgcacacgtagagtggctagtgaaggacgcctttttgactcttcttggtctcagcatgttgactgggattggaaataatgagactgaccctcggcttgggctgcactctaccctgtacactgccttgtaccctgagctgcatcacctcctaaactgagcagtctcataccatggagagatgcctctcttatgtcttcagccactcacttataaagatacttatcttttcagcagtatatatgtgctgaaatctcagcatgaaagcattgcatgagtaaagatactttccctaacaccgggagg

SEQ ID NO: 56960 - DNA, 326 bp, Homo sapiens
gaagattttctagaagcaaatagtgccaccatccgtcatgaggatctgtttctataacgcttgtgtgtctttgagactacgtaggtggtagcttatgagtagtaatgttcttttgttagtaaatgtcaccaaataagcaaataagagaaacatgaaggccaaaaactgtgttactattcaggagaaaatggacggtttagcaacaatacaatgtagacttcaaaatatgaaaaatcaaggaaatttctgtcattgtctttaagggcctccagagaagtattaatttgttctttatgtgaatttaatgagatcatgtgaaatgtatg

SEQ ID NO: 56961 - DNA, 315 bp, Homo sapiens
  misc_feature (197)..(197): n is a, c, g, or t
  misc_feature (266)..(266): n is a, c, g, or t
  misc_feature (270)..(270): n is a, c, g, or t
actccagcctggggaacaaacaagcaagactccatctctaaataaaaaagagtgtccccctaagatgctctgcgaaatattgtagactggtgtctctcttggatgatgtttgccgtcagcattcaccaaataaacttgctctctgggaaaaaaaaaaaaataataaataaaataaacagtaagaaacacccataaancaaatttctatgctcctgcagcctctttttgcctgagcaagtgggaccttggtatacacatcacctgtncttncccttttctttgaaatgtggtgtttgctgttaaattgggattgaa

SEQ ID NO: 56962 - DNA, 178 bp, Homo sapiens
attggagaaaagctgtgcttagatagggtgcatttgctcttgccttggaaggttgttttctgataaggttctatatcctctgcaaatcaaatcaggcacttacagtgtgagtatgcattctcttcctgccagtctggagatgatcaaaaagcctataacaggcttggcctattttcct

SEQ ID NO: 56963 - DNA, 3804 bp, Homo sapiens
aaataataatgcttttttcttttttgtcaacaacttctctcttttctacaaatccaatctttttactattacacatacttaattgcagttggtttttttccagttgctacagttcatttgaattctcaaatatttatctaccacaaggcagccatatatgctttgaagaccaggccatgactagaatttacattctttatacctaggtaattgaggttgcctaggaatcaaaagtcaaaaaaagtcaagagctcatctctggacctaaagccacattgacaattattcctctgtcttaaagaaactctctgcataagaaaaaaaaaagtcttatttttataccaaattcaaggtaaagctgacctgctctaaaatcatttttccaagtattgttctaatgtcttttggaaaggtccctgcgaccctgagtgcagtgaggttggctgtgacgggccaggaccagaccactgcaatgactgtttgcactactactacaagctgaaaaacaataccaggatctgtgtctccagctgcccccctggccactaccacgccgacaagaagcgctgcaggaagtgtgcccccaactgtgagtcctgctttgggagccatggtgaccaatgcatgtcctgcaaatatggatactttctgaatgaagaaaccaacagctgtgttactcactgccctgatgggtcatatcaggataccaagaaaaatctttgccggaaatgcagtgaaaactgcaagacatgtactgaattccataactgtacagaatgtagggatgggttaagcctgcagggatcccggtgctctgtctcctgtgaagatggacggtatttcaacggccaggactgccagccctgccaccgcttctgcgccacttgtgctggggcaggagctgatgggtgcattaactgcacagagggctacttcatggaggatgggagatgcgtgcagagctgtagtatcagctattactttgaccactcttcagagaatggatacaaatcctgcaaaaaatgtgatatcagttgtttgacgtgcaatggcccaggattcaagaactgtacaagctgccctagtgggtatctcttagacttaggaatgtgtcaaatgggagccatttgcaaggatgcaacggaagagtcctgggcggaaggaggcttctgtatgcttgtgaaaaagaacaatctgtgccaacggaaggttcttcaacaactttgctgcaaaacatgtacatttcaaggctgagcagccatcttagatttctttgttcctgtagacttatagattattccatattattaaaaagaaaaaaaaaagccaaaaagaaaaaaaaaaaaaagcaagccacctctctctttcttttcttgctctctttttctttctctctctctcaagtttgtgcagggagatggtgaactgttttgtcagaacttaaatggaaaaaaaaataaaactacaacaagcctaccttttataactgggtgtttagtgctaaacagccagaaccacagagacagtattgtatgaccaaagcatttgatgccaaaatttgacgttaaagtaatgatttgatttcctgccctggttttgaaggtccatttttttcccttttgcattgacttgcttgtttcccctttgaaacacctaaaaatacctttccaaaacatcgcgagagcatacatagacaaaaatgaaatagaaagctcttgcatgcttgagtccaccattgggggaaatgacagaaaactggacctgagggcattaggaacatcctacagagttgtgtttagtgtcgtttgccatggtatttcacagtgaaacatggatactctccacacatcatttacttcatgctgtgtacttatgtactggtttttgcattttactcacttgataagtctgctccactggtttcatcagatagacttgctgctactggcttttccattgtagattgggttattttacacgcagttcgccaaatgggattgctctgtatagtcaaattggtgatggacagatggacagaatgcagaggtacatagatgagctgaggctgatccagctcccctgaaattcagagtgttaactttgtagaccctgcacaatctcttggtgctatctagccattacccccattttttttttaaaggccatctgaaattccatttgtcatggtgggaagcattttggatatgatgcaggaaatctcttcctggagtcaaaagttcccaagaggtcctgtatttttaagaaatggaatttatttaaataatatttaagcttgtgcccatgttggccgggcaacttttttcaatggtgcttattagaagaagttttttcatcttgtcattttaagaaaataaaactggaaattgaatatgggtggcatgattgtacccttttagttctcttatttttctactcctctgtccctctataactatgccatactattatatgctggtccactgaatgctgagatgatctgttttttggggttttttttttttaagaaatattttcactggttttctgtgactctctaaacacttcatcgaaactagaagactgaattatgaggaaactatttggattagtggccagaaacgatgaaatcttatagatcttttgacagtttctctgtttaggggagcctagactgatatcaagtttcttcatatcaaagcttcattggtgacctcatttgctttacaagtgaccagccatcttgcaggcttcatgcttctgagagccttacttagaagatgctgctggagtcacagctgaggagaggaatactatcaacatggactatcctgggaaagagctaggaagtagatgctgaggtccccatccaaacagcaagctaggaaaaagcctgccttgaaaatatttctagacatcaaagataacttacaacccaaagtgaataataagtaaatagtctgatgaccctcttaatagcattgcaattgtattgaatcacataatgattcataagtaactagggaaccaactgattttgctaagcagtcttccccttataacaccacaggcccttctgacacacaaaaaaatgaaagttaatcctgggtacagcatacagttttacatttaaacgcacagtcttacgtggacaaatgcaagcacaagcctaaagcaaggtcaagcagatggcaaaaccgaatttgcctgcaaagaaatctatttaactgaatcagcccataatatttgaggcacgaggttactgtgattgataggaaagataaaaatgatgtctgtttttgtagacgaataaccatcaacatgacaacaaaattcattggggtctaccagcgtgcattccatttcccactgaccatgcaggtgcacgtcgcggaaatactggtttaactactagtgtgttactgcctcatttatctacataacattattaactagaacataatgctttcaaagtttaagttaatgttatatattatgtataaatatatatattcataatgagatatatgtaatggatagtacaaagtttggagactcaacaaatgctctaaccttctagagacaaaagtcctatttctgttttcttttgtctttttattttcaattagtgacccattgttaaatccaaatccacttttactgaaaaatactgtacatgtgtaaaatgttcagttgtttttttgtaaaatatagtagaacggttgtaactgatactggccaaaatcaatgttattccatattttattttttctattaaattaacctaagttcctgtttaaaaaaact

SEQ ID NO: 56964 - DNA, 2958 bp, Homo sapiens
attaattgatttcgatacgactttattctttttctaatcttttttttttttcacaaatggataccaattacatttaccattggactgcaatgtctctcctctccttgaaaaacaatgcggttgactgaaatcactttgggtggaccaaatttcctcctgttgactactcctgaatgatctcttccaattccccaaatctgcctctctggccaatcacaaccttcttccatgtgtgtacatcatgctgctctcgtcttcaactccccttctctcttgctgacttctggaaaagcaacggaagagtcctgggcggaaggaggcttctgtatgcttgtgaaaaagaacaatctgtgccaacggaaggttcttcaacaactttgctgcaaaacatgtacatttcaaggctgagcagccatcttagatttctttgttcctgtagacttatagattattccatattattaaaaagaaaaaaaaaagccaaaaagaaaaaaaaaaaaaagcaagccacctctctctttcttttcttgctctctttttctttctctctctctcaagtttgtgcagggagatggtgaactgttttgtcagaacttaaatggaaaaaaaaataaaactacaacaagcctaccttttataactgggtgtttagtgctaaacagccagaaccacagagacagtattgtatgaccaaagcatttgatgccaaaatttgacgttaaagtaatgatttgatttcctgccctggttttgaaggtccatttttttcccttttgcattgacttgcttgtttcccctttgaaacacctaaaaatacctttccaaaacatcgcgagagcatacatagacaaaaatgaaatagaaagctcttgcatgcttgagtccaccattgggggaaatgacagaaaactggacctgagggcattaggaacatcctacagagttgtgtttagtgtcgtttgccatggtatttcacagtgaaacatggatactctccacacatcatttacttcatgctgtgtacttatgtactggtttttgcattttactcacttgataagtctgctccactggtttcatcagatagacttgctgctactggcttttccattgtagattgggttattttacacgcagttcgccaaatgggattgctctgtatagtcaaattggtgatggacagatggacagaatgcagaggtacatagatgagctgaggctgatccagctcccctgaaattcagagtgttaactttgtagaccctgcacaatctcttggtgctatctagccattacccccattttttttttaaaggccatctgaaattccatttgtcatggtgggaagcattttggatatgatgcaggaaatctcttcctggagtcaaaagttcccaagaggtcctgtatttttaagaaatggaatttatttaaataatatttaagcttgtgcccatgttggccgggcaacttttttcaatggtgcttattagaagaagttttttcatcttgtcattttaagaaaataaaactggaaattgaatatgggtggcatgattgtacccttttagttctcttatttttctactcctctgtccctctataactatgccatactattatatgctggtccactgaatgctgagatgatctgttttttggggttttttttttttaagaaatattttcactggttttctgtgactctctaaacacttcatcgaaactagaagactgaattatgaggaaactatttggattagtggccagaaacgatgaaatcttatagatcttttgacagtttctctgtttaggggagcctagactgatatcaagtttcttcatatcaaagcttcattggtgacctcatttgctttacaagtgaccagccatcttgcaggcttcatgcttctgagagccttacttagaagatgctgctggagtcacagctgaggagaggaatactatcaacatggactatcctgggaaagagctaggaagtagatgctgaggtccccatccaaacagcaagctaggaaaaagcctgccttgaaaatatttctagacatcaaagataacttacaacccaaagtgaataataagtaaatagtctgatgaccctcttaatagcattgcaattgtattgaatcacataatgattcataagtaactagggaaccaactgattttgctaagcagtcttccccttataacaccacaggcccttctgacacacaaaaaaatgaaagttaatcctgggtacagcatacagttttacatttaaacgcacagtcttacgtggacaaatgcaagcacaagcctaaagcaaggtcaagcagatggcaaaaccgaatttgcctgcaaagaaatctatttaactgaatcagcccataatatttgaggcacgaggttactgtgattgataggaaagataaaaatgatgtctgtttttgtagacgaataaccatcaacatgacaacaaaattcattggggtctaccagcgtgcattccatttcccactgaccatgcaggtgcacgtcgcggaaatactggtttaactactagtgtgttactgcctcatttatctacataacattattaactagaacataatgctttcaaagtttaagttaatgttatatattatgtataaatatatatattcataatgagatatatgtaatggatagtacaaagtttggagactcaacaaatgctctaaccttctagagacaaaagtcctatttctgttttcttttgtctttttattttcaattagtgacccattgttaaatccaaatccacttttactgaaaaatactgtacatgtgtaaaatgttcagttgtttttttgtaaaatatagtagaacggttgtaactgatactggccaaaatcaatgttattccatattttattttttctattaaattaacctaagttcctgtttaaaaaaact

SEQ ID NO: 56965 - DNA, 2806 bp, Homo sapiens
gcgggtgcctgtagtcccagctactcgggaggctgaggcaggagaatcacttgaacccgggaggcggaggttgcagtgagccgagatcacaccactgcactccagcctggcgacagagcgagactccgtctcaaggaaaaaaaaaaaaacaaaaaagaaaaatcgaggcttctgtatgcttgtgaaaaagaacaatctgtgccaacggaaggttcttcaacaactttgctgcaaaacatgtacatttcaaggctgagcagccatcttagatttctttgttcctgtagacttatagattattccatattattaaaaagaaaaaaaaaagccaaaaagaaaaaaaaaaaaaagcaagccacctctctctttcttttcttgctctctttttctttctctctctctcaagtttgtgcagggagatggtgaactgttttgtcagaacttaaatggaaaaaaaaataaaactacaacaagcctaccttttataactgggtgtttagtgctaaacagccagaaccacagagacagtattgtatgaccaaagcatttgatgccaaaatttgacgttaaagtaatgatttgatttcctgccctggttttgaaggtccatttttttcccttttgcattgacttgcttgtttcccctttgaaacacctaaaaatacctttccaaaacatcgcgagagcatacatagacaaaaatgaaatagaaagctcttgcatgcttgagtccaccattgggggaaatgacagaaaactggacctgagggcattaggaacatcctacagagttgtgtttagtgtcgtttgccatggtatttcacagtgaaacatggatactctccacacatcatttacttcatgctgtgtacttatgtactggtttttgcattttactcacttgataagtctgctccactggtttcatcagatagacttgctgctactggcttttccattgtagattgggttattttacacgcagttcgccaaatgggattgctctgtatagtcaaattggtgatggacagatggacagaatgcagaggtacatagatgagctgaggctgatccagctcccctgaaattcagagtgttaactttgtagaccctgcacaatctcttggtgctatctagccattacccccattttttttttaaaggccatctgaaattccatttgtcatggtgggaagcattttggatatgatgcaggaaatctcttcctggagtcaaaagttcccaagaggtcctgtatttttaagaaatggaatttatttaaataatatttaagcttgtgcccatgttggccgggcaacttttttcaatggtgcttattagaagaagttttttcatcttgtcattttaagaaaataaaactggaaattgaatatgggtggcatgattgtacccttttagttctcttatttttctactcctctgtccctctataactatgccatactattatatgctggtccactgaatgctgagatgatctgttttttggggttttttttttttaagaaatattttcactggttttctgtgactctctaaacacttcatcgaaactagaagactgaattatgaggaaactatttggattagtggccagaaacgatgaaatcttatagatcttttgacagtttctctgtttaggggagcctagactgatatcaagtttcttcatatcaaagcttcattggtgacctcatttgctttacaagtgaccagccatcttgcaggcttcatgcttctgagagccttacttagaagatgctgctggagtcacagctgaggagaggaatactatcaacatggactatcctgggaaagagctaggaagtagatgctgaggtccccatccaaacagcaagctaggaaaaagcctgccttgaaaatatttctagacatcaaagataacttacaacccaaagtgaataataagtaaatagtctgatgaccctcttaatagcattgcaattgtattgaatcacataatgattcataagtaactagggaaccaactgattttgctaagcagtcttccccttataacaccacaggcccttctgacacacaaaaaaatgaaagttaatcctgggtacagcatacagttttacatttaaacgcacagtcttacgtggacaaatgcaagcacaagcctaaagcaaggtcaagcagatggcaaaaccgaatttgcctgcaaagaaatctatttaactgaatcagcccataatatttgaggcacgaggttactgtgattgataggaaagataaaaatgatgtctgtttttgtagacgaataaccatcaacatgacaacaaaattcattggggtctaccagcgtgcattccatttcccactgaccatgcaggtgcacgtcgcggaaatactggtttaactactagtgtgttactgcctcatttatctacataacattattaactagaacataatgctttcaaagtttaagttaatgttatatattatgtataaatatatatattcataatgagatatatgtaatggatagtacaaagtttggagactcaacaaatgctctaaccttctagagacaaaagtcctatttctgttttcttttgtctttttattttcaattagtgacccattgttaaatccaaatccacttttactgaaaaatactgtacatgtgtaaaatgttcagttgtttttttgtaaaatatagtagaacggttgtaactgatactggccaaaatcaatgttattccatattttattttttctattaaattaacctaagttcctgtttaaaaaaact

SEQ ID NO: 56966 - DNA, 4262 bp, Homo sapiens
gccggagggagcgctgggagcgagcaagcgagcgtttggagcccgggccagcagagggggcgcccggtcgctgcctgtaccgctcccgctggtcatctccgccgcgctcgggggccccgggaggagcgagaccgagtcggagagtccgggagccaagccgggcgaaacccaactgcggaggacgcccgccccactcagcctcctcctgcgtccgagccggggagcatcgccgagcgccccacgggccggagagctgggagcacaggtcccggcagccccagggatggtctaggagccggcgtaaggctcgctgctctgctccctgccggggctagccgcctcctgccgatcgcccggggctgcgagctgcggcggcccggggctgctcgccgggcggcgcaggccggagaagttagttgtgcgcgcccttagtgcgcggaaccagccagcgagcgagggagcagcgaggcgccgggaccatgggctgggggagccgctgctgctgcccgggacgtttggacctgctgtgcgtgctggcgctgctcgggggctgcctgctccccgtgtgtcggacgcgcgtctacaccaaccactgggcagtcaaaatcgccgggggcttcccggaggccaaccgtatcgccagcaagtacggattcatcaacataggacagataggggccctgaaggactactaccacttctaccatagcaggacgattaaaaggtcagttatctcgagcagagggacccacagtttcatttcaatggaaccaaaggtggaatggatccaacagcaagtggtaaaaaagcggacaaagagggattatgacttcagtcgtgcccagtctacctatttcaatgatcccaagtggcccagcatgtggtatatgcactgcagtgacaatacacatccctgccagtctgacatgaatatcgaaggagcctggaagagaggctacacgggaaagaacattgtggtcactatcctggatgacggaattgagagaacccatccagatctgatgcaaaactacgatgctctggcaagttgcgacgtgaatgggaatgacttggacccaatgcctcgttatgatgcaagcaacgagaacaagcatgggactcgctgtgctggagaagtggcagccgctgcaaacaattcgcactgcacagtcggaattgctttcaacgccaagatcggaggagtgcgaatgctggacggagatgtcacggacatggttgaagcaaaatcagttagcttcaacccccagcacgtgcacatttacagcgccagctggggcccggatgatgatggcaagactgtggacggaccagcccccctcacccggcaagcctttgaaaacggcgttagaatggggcggagaggcctcggctctgtgtttgtttgggcatctggaaatggtggaaggagcaaagaccactgctcctgtgatggctacaccaacagcatctacaccatctccatcagcagcactgcagaaagcggaaagaaaccttggtacctggaagagtgttcatccacgctggccacaacctacagcagcggggagtcctacgataagaaaatcatcactacagatctgaggcagcgttgcacggacaaccacactgggacgtcagcctcagcccccatggctgcaggcatcattgcgctggccctggaagccaatccgtttctgacctggagagacgtacagcatgttattgtcaggacttcccgtgcgggacatttgaacgctaatgactggaaaaccaatgctgctggttttaaggtgagccatctttatggatttggactgatggacgcagaagccatggtgatggaggcagagaagtggaccaccgttccccggcagcacgtgtgtgtggagagcacagaccgacaaatcaagacaatccgccctaacagtgcagtgcgctccatctacaaagcttcaggctgctcggataaccccaaccgccatgtcaactacctggagcacgtcgttgtgcgcatcaccatcacccaccccaggagaggagacctggccatctacctgacctcgccctctggaactaggtctcagcttttggccaacaggctatttgatcactccatggaaggattcaaaaactgggagttcatgaccattcattgctggggagaaagagctgctggtgactgggtccttgaagtttatgatactccctctcagctaaggaactttaagactccaggtaaattgaaagaatggtctttggtcctctacggcacctccgtgcagccatattcaccaaccaatgaatttccgaaagtggaacggttccgctatagccgagttgaagaccccacagacgactatggcacagaggattatgcaggtccctgcgaccctgagtgcagtgaggttggctgtgacgggccaggaccagaccactgcaatgactgtttgcactactactacaagctgaaaaacaataccaggatctgtgtctccagctgcccccctggccactaccacgccgacaagaagcgctgcaggaagtgtgcccccaactgtgagtcctgctttgggagccatggtgaccaatgcatgtcctgcaaatatggatactttctgaatgaagaaaccaacagctgtgttactcactgccctgatgggtcatatcaggataccaagaaaaatctttgccggaaatgcagtgaaaactgcaagacatgtactgaattccataactgtacagaatgtagggatgggttaagcctgcagggatcccggtgctctgtctcctgtgaagatggacggtatttcaacggccaggactgccagccctgccaccgcttctgcgccacttgtgctggggcaggagctgatgggtgcattaactgcacagagggctacttcatggaggatgggagatgcgtgcagagctgtagtatcagctattactttgaccactcttcagagaatggatacaaatcctgcaaaaaatgtgatatcagttgtttgacgtgcaatggcccaggattcaagaactgtacaagctgccctagtgggtatctcttagacttaggaatgtgtcaaatgggagccatttgcaaggatgtttctctgtttaggggagcctagactgatatcaagtttcttcatatcaaagcttcattggtgacctcatttgctttacaagtgaccagccatcttgcaggcttcatgcttctgagagccttacttagaagatgctgctggagtcacagctgaggagaggaatactatcaacatggactatcctgggaaagagctaggaagtagatgctgaggtccccatccaaacagcaagctaggaaaaagcctgccttgaaaatatttctagacatcaaagataacttacaacccaaagtgaataataagtaaatagtctgatgaccctcttaatagcattgcaattgtattgaatcacataatgattcataagtaactagggaaccaactgattttgctaagcagtcttccccttataacaccacaggcccttctgacacacaaaaaaatgaaagttaatcctgggtacagcatacagttttacatttaaacgcacagtcttacgtggacaaatgcaagcacaagcctaaagcaaggtcaagcagatggcaaaaccgaatttgcctgcaaagaaatctatttaactgaatcagcccataatatttgaggcacgaggttactgtgattgataggaaagataaaaatgatgtctgtttttgtagacgaataaccatcaacatgacaacaaaattcattggggtctaccagcgtgcattccatttcccactgaccatgcaggtgcacgtcgcggaaatactggtttaactactagtgtgttactgcctcatttatctacataacattattaactagaacataatgctttcaaagtttaagttaatgttatatattatgtataaatatatatattcataatgagatatatgtaatggatagtacaaagtttggagactcaacaaatgctctaaccttctagagacaaaagtcctatttctgttttcttttgtctttttattttcaattagtgacccattgttaaatccaaatccacttttactgaaaaatactgtacatgtgtaaaatgttcagttgtttttttgtaaaatatagtagaacggttgtaactgatactggccaaaatcaatgttattccatattttattttttctattaaattaacctaagttcctgtttaaaaaaact

SEQ ID NO: 56967 - DNA, 564 bp, Homo sapiens
aaataataatgcttttttcttttttgtcaacaacttctctcttttctacaaatccaatctttttactattacacatacttaattgcagttggtttttttccagttgctacagttcatttgaattctcaaatatttatctaccacaaggcagccatatatgctttgaagaccaggccatgactagaatttacattctttatacctaggtaattgaggttgcctaggaatcaaaagtcaaaaaaagtcaagagctcatctctggacctaaagccacattgacaattattcctctgtcttaaagaaactctctgcataagaaaaaaaaaagtcttatttttataccaaattcaaggtaaagctgacctgctctaaaatcatttttccaagtattgttctaatgtcttttggaaaggtccctgcgaccctgagtgcagtgaggttggctgtgacgggccaggaccagaccactgcaatgactgtttgcactactactacaagctgaaaaacaataccaggtaagagaggtgccaagtcacatccccacagcatgtgccaggcatctta

SEQ ID NO: 56968 - DNA, 602 bp, Homo sapiens
taagatgttgcgcaaagtaggagtgtgcccatcagtctaacaaattaaggaggctgtccccgaagcctagcagcgtgtgtgtatgctacagatatcattgtaggcacagagaagcattataagcattgagaggagaaaaaaaagggtacacgggctatttccccggctttgaagctttgccaaatccactggcctctgagggaaactgtatctgttacatatggagtttggggagtcattacgttttggcctcatcacaacagtctgtttgaagctccctttatacttcttccagcctgcagggatcccggtgctctgtctcctgtgaagatggacggtatttcaacggccaggactgccagccctgccaccgcttctgcgccacttgtgctggtaccttccctagttcttttgtttattctcccggttctggttttgcttttctttctggtttgggccatcactcatgcaacccacttgatacttttaaagtaatgctggaaaagtttatttctcgtttgataattgtgtgtgtattctcattgaaagtcaagcagtcatcagcatcctatcctcattgagaaacttacatagcccagtga

SEQ ID NO: 56969 - DNA, 5771 bp, Homo sapiens
gccggagggagcgctgggagcgagcaagcgagcgtttggagcccgggccagcagagggggcgcccggtcgctgcctgtaccgctcccgctggtcatctccgccgcgctcgggggccccgggaggagcgagaccgagtcggagagtccgggagccaagccgggcgaaacccaactgcggaggacgcccgccccactcagcctcctcctgcgtccgagccggggagcatcgccgagcgccccacgggccggagagctgggagcacaggtcccggcagccccagggatggtctaggagccggcgtaaggctcgctgctctgctccctgccggggctagccgcctcctgccgatcgcccggggctgcgagctgcggcggcccggggctgctcgccgggcggcgcaggccggagaagttagttgtgcgcgcccttagtgcgcggaaccagccagcgagcgagggagcagcgaggcgccgggaccatgggctgggggagccgctgctgctgcccgggacgtttggacctgctgtgcgtgctggcgctgctcgggggctgcctgctccccgtgtgtcggacgcgcgtctacaccaaccactgggcagtcaaaatcgccgggggcttcccggaggccaaccgtatcgccagcaagtacggattcatcaacataggacagataggggccctgaaggactactaccacttctaccatagcaggacgattaaaaggtcagttatctcgagcagagggacccacagtttcatttcaatggaaccaaaggtggaatggatccaacagcaagtggtaaaaaagcggacaaagagggattatgacttcagtcgtgcccagtctacctatttcaatgatcccaagtggcccagcatgtggtatatgcactgcagtgacaatacacatccctgccagtctgacatgaatatcgaaggagcctggaagagaggctacacgggaaagaacattgtggtcactatcctggatgacggaattgagagaacccatccagatctgatgcaaaactacgatgctctggcaagttgcgacgtgaatgggaatgacttggacccaatgcctcgttatgatgcaagcaacgagaacaagcatgggactcgctgtgctggagaagtggcagccgctgcaaacaattcgcactgcacagtcggaattgctttcaacgccaagatcggaggagtgcgaatgctggacggagatgtcacggacatggttgaagcaaaatcagttagcttcaacccccagcacgtgcacatttacagcgccagctggggcccggatgatgatggcaagactgtggacggaccagcccccctcacccggcaagcctttgaaaacggcgttagaatggggcggagaggcctcggctctgtgtttgtttgggcatctggaaatggtggaaggagcaaagaccactgctcctgtgatggctacaccaacagcatctacaccatctccatcagcagcactgcagaaagcggaaagaaaccttggtacctggaagagtgttcatccacgctggccacaacctacagcagcggggagtcctacgataagaaaatcatcactacagatctgaggcagcgttgcacggacaaccacactgggacgtcagcctcagcccccatggctgcaggcatcattgcgctggccctggaagccaatccgtttctgacctggagagacgtacagcatgttattgtcaggacttcccgtgcgggacatttgaacgctaatgactggaaaaccaatgctgctggttttaaggtgagccatctttatggatttggactgatggacgcagaagccatggtgatggaggcagagaagtggaccaccgttccccggcagcacgtgtgtgtggagagcacagaccgacaaatcaagacaatccgccctaacagtgcagtgcgctccatctacaaagcttcaggctgctcggataaccccaaccgccatgtcaactacctggagcacgtcgttgtgcgcatcaccatcacccaccccaggagaggagacctggccatctacctgacctcgccctctggaactaggtctcagcttttggccaacaggctatttgatcactccatggaaggattcaaaaactgggagttcatgaccattcattgctggggagaaagagctgctggtgactgggtccttgaagtttatgatactccctctcagctaaggaactttaagactccaggtaaattgaaagaatggtctttggtcctctacggcacctccgtgcagccatattcaccaaccaatgaatttccgaaagtggaacggttccgctatagccgagttgaagaccccacagacgactatggcacagaggattatgcaggtccctgcgaccctgagtgcagtgaggttggctgtgacgggccaggaccagaccactgcaatgactgtttgcactactactacaagctgaaaaacaataccaggatctgtgtctccagctgcccccctggccactaccacgccgacaagaagcgctgcaggaagtgtgcccccaactgtgagtcctgctttgggagccatggtgaccaatgcatgtcctgcaaatatggatactttctgaatgaagaaaccaacagctgtgttactcactgccctgatgggtcatatcaggataccaagaaaaatctttgccggaaatgcagtgaaaactgcaagacatgtactgaattccataactgtacagaatgtagggatgggttaagcctgcagggatcccggtgctctgtctcctgtgaagatggacggtatttcaacggccaggactgccagccctgccaccgcttctgcgccacttgtgctggggcaggagctgatgggtgcattaactgcacagagggctacttcatggaggatgggagatgcgtgcagagctgtagtatcagctattactttgaccactcttcagagaatggatacaaatcctgcaaaaaatgtgatatcagttgtttgacgtgcaatggcccaggattcaagaactgtacaagctgccctagtgggtatctcttagacttaggaatgtgtcaaatgggagccatttgcaaggatgcaacggaagagtcctgggcggaaggaggcttctgtatgcttgtgaaaaagaacaatctgtgccaacggaaggttcttcaacaactttgctgcaaaacatgtacatttcaaggctgagcagccatcttagatttctttgttcctgtagacttatagattattccatattattaaaaagaaaaaaaaaagccaaaaagaaaaaaaaaaaaaagcaagccacctctctctttcttttcttgctctctttttctttctctctctctcaagtttgtgcagggagatggtgaactgttttgtcagaacttaaatggaaaaaaaaataaaactacaacaagcctaccttttataactgggtgtttagtgctaaacagccagaaccacagagacagtattgtatgaccaaagcatttgatgccaaaatttgacgttaaagtaatgatttgatttcctgccctggttttgaaggtccatttttttcccttttgcattgacttgcttgtttcccctttgaaacacctaaaaatacctttccaaaacatcgcgagagcatacatagacaaaaatgaaatagaaagctcttgcatgcttgagtccaccattgggggaaatgacagaaaactggacctgagggcattaggaacatcctacagagttgtgtttagtgtcgtttgccatggtatttcacagtgaaacatggatactctccacacatcatttacttcatgctgtgtacttatgtactggtttttgcattttactcacttgataagtctgctccactggtttcatcagatagacttgctgctactggcttttccattgtagattgggttattttacacgcagttcgccaaatgggattgctctgtatagtcaaattggtgatggacagatggacagaatgcagaggtacatagatgagctgaggctgatccagctcccctgaaattcagagtgttaactttgtagaccctgcacaatctcttggtgctatctagccattacccccattttttttttaaaggccatctgaaattccatttgtcatggtgggaagcattttggatatgatgcaggaaatctcttcctggagtcaaaagttcccaagaggtcctgtatttttaagaaatggaatttatttaaataatatttaagcttgtgcccatgttggccgggcaacttttttcaatggtgcttattagaagaagttttttcatcttgtcattttaagaaaataaaactggaaattgaatatgggtggcatgattgtacccttttagttctcttatttttctactcctctgtccctctataactatgccatactattatatgctggtccactgaatgctgagatgatctgttttttggggttttttttttttaagaaatattttcactggttttctgtgactctctaaacacttcatcgaaactagaagactgaattatgaggaaactatttggattagtggccagaaacgatgaaatcttatagatcttttgacagtttctctgtttaggggagcctagactgatatcaagtttcttcatatcaaagcttcattggtgacctcatttgctttacaagtgaccagccatcttgcaggcttcatgcttctgagagccttacttagaagatgctgctggagtcacagctgaggagaggaatactatcaacatggactatcctgggaaagagctaggaagtagatgctgaggtccccatccaaacagcaagctaggaaaaagcctgccttgaaaatatttctagacatcaaagataacttacaacccaaagtgaataataagtaaatagtctgatgaccctcttaatagcattgcaattgtattgaatcacataatgattcataagtaactagggaaccaactgattttgctaagcagtcttccccttataacaccacaggcccttctgacacacaaaaaaatgaaagttaatcctgggtacagcatacagttttacatttaaacgcacagtcttacgtggacaaatgcaagcacaagcctaaagcaaggtcaagcagatggcaaaaccgaatttgcctgcaaagaaatctatttaactgaatcagcccataatatttgaggcacgaggttactgtgattgataggaaagataaaaatgatgtctgtttttgtagacgaataaccatcaacatgacaacaaaattcattggggtctaccagcgtgcattccatttcccactgaccatgcaggtgcacgtcgcggaaatactggtttaactactagtgtgttactgcctcatttatctacataacattattaactagaacataatgctttcaaagtttaagttaatgttatatattatgtataaatatatatattcataatgagatatatgtaatggatagtacaaagtttggagactcaacaaatgctctaaccttctagagacaaaagtcctatttctgttttcttttgtctttttattttcaattagtgacccattgttaaatccaaatccacttttactgaaaaatactgtacatgtgtaaaatgttcagttgtttttttgtaaaatatagtagaacggttgtaactgatactggccaaaatcaatgttattccatattttattttttctattaaattaacctaagttcctgtttaaaaaaact

SEQ ID NO: 56970 - DNA, 946 bp, Homo sapiens
tgcggccgccacagagagaaaggctaaagttctctggaggatgtggctgcagagcctgctgctcttgggcactgtggcctgcagcatctctgcacccgcccgctcgcccagccccagcacgcagccctgggagcatgtgaatgccatccaggaggcccggcgtctcctgaacctgagtagagacactgctgctgagatgaatgaaacagtagaagtcatctcagaaatgtttgacctccaggagccgacctgcctacagacccgcctggagctgtacaagcagggcctgcggggcagcctcaccaagctcaagggccccttgaccatgatggccagccactacaagcagcactgccctccaaccccggaaacttcctgtgcaacccagattatcacctttgaaagtttcaaagagaacctgaaggactttctgcttgtcatcccctttgactgctgggagccagtccaggagtgagaccggccagatgaggctggccaagccggggagctgctctctcatgaaacaagagctagaaactcaggatggtcatcttggagggaccaaggggtgggccacagccatggtgggagtggcctggacctgccctgggccacactgaccctgatacaggcatggcagaagaatgggaatattttatactgacagaaatcagtaatatttatatatttatatttttaaaatatttatttatttatttatttaagttcatattccatatttattcaagatgttttaccgtaataattattattaaaaatatgctctactaaaaaaaaaaagggggggtaaaaatcctcgaggggcagttaccgaccggttctgtcaagggcctaggagcgataaaaggcgccgcgttacggacggacgcgggctgaagcccctggggaggacccgaaccgaaatttggcaacgtgcggggtacag

SEQ ID NO: 56971 - DNA, 1605 bp, Homo sapiens
cctgggtgcaaccagtcacagctctgcagaggttactgtgattttgcccctgaaggatctgtccacaacttaggaactcacacagcttttggcctgagcccccgttaccaagagaaaggaggtttttgccaaggactccaaggggagtgcacttgatgctggtcgggacccaaagcgcccagccctccctgagacattgtgtgagtcgggctgggcctcaaacacggcccccactgccccaccccagccagggtggtgcttgtgtgggaaggactttaaatccagctgccagacccctggacgggagaaggagagacggctggccaccatgcacggctcctgcagtttcctgatgcttctgctgccgctactgctactgctggtggccaccacaggccccgttggagccctcacagatgaggagaaacgtttgatggtggagctgcacaacctctaccgggcccaggtatccccgacggcctcagacatgctgcacatgagatgggacgaggagctggccgccttcgccaaggcctacgcacggcagtgcgtgtggggccacaacaaggagcgcgggcgccgcggcgagaatctgttcgccatcacagacgagggcatggacgtgccgctggccatggaggagtggcaccacgagcgtgagcactacaacctcagcgccgccacctgcagcccaggccagatgtgcggccactacacgcaggtggtatgggccaagacagagaggatcggctgtggttcccacttctgtgagaagctccagggtgttgaggagaccaacatcgaattactggtgtgcaactatgagcctccggggaacgtgaaggggaaacggccctaccaggaggggactccgtgctcccaatgtccctctggctaccactgcaagaactccctctgtgaacccatcggaagcccggaagatgctcaggatttgccttacctggtaactgaggccccatccttccgggcgactgaagcatcagactctaggaaaatgggtgcagagggccctgacaagcctagcgtcgtgtcagggctgaactcgggccctggtcatgtgtggggccctctcctgggactactgctcctgcctcctctggtgttggctggaatcttctgaaggggataccactcaaagggtgaagaggtcagctgtcctcctgtcatcttccccaccctgtccccagcccctaaacaagatacttcttggttaaggccctccggaagggaaaggctacggggcatgtgcctcatcacaccatccatcctggaggcacaaggcctggctggctgcgagctcaggaggccgcctgaggactgcacaccgggcccacacctctcctgcccctccctcctgagtcctgggggtgggaggatttgagggagctcactgcctacctggcctggggctgtctgcccacacagcatgtgcgctctccctgagtgcctgtgtagctggggatggggattcctaggggcagatgaaggacaagccccactggagtggggttctttgagtgggggaggcagggacgagggaaggaaagtaactcctgactctccaataaaaacctgtccaacctg

SEQ ID NO: 56972 - DNA, 1068 bp, Homo sapiens
gccggtcctctcacgctcagccacgggcggcgtgcgtggctctgcagtcgtccttccaggtgcagagggccctgacaagcctagcgtcgtgtcagggctgaactcgggccctggtcatgtgtggggccctctcctgggactactgctcctgcctcctctggtgttggctggaatcttctgaaggggataccactcaaaggcaaggcctggtgaggggggccctggcctcatacccacctggattgtcttcctccaagtgagagaccacagcttcctgggcaggtcctgctctgtggcccagcagccccccttcaccccaacttctggccagattccaggccagcactcttgtcctcctgggaggcgtctacagggccagcccctggcactgccccaggagtgccttggctctgggtaggcccatccttcagctggctgcagactgttctgagcggtatttacatgtgcccactctcaggttgtcctgtggccatcagcttctctcccagacagaggatctcaggcttcccaggaacccccgggcccctcccagtcccctggcctcttccttgagccatctgagtccaggactgttccccagaagtgcctcttgccttctcagggtgaagaggtcagctgtcctcctgtcatcttccccaccctgtccccagcccctaaacaagatacttcttggttaaggccctccggaagggaaaggctacggggcatgtgcctcatcacaccatccatcctggaggcacaaggcctggctggctgcgagctcaggaggccgcctgaggactgcacaccgggcccacacctctcctgcccctccctcctgagtcctgggggtgggaggatttgagggagctcactgcctacctggcctggggctgtctgcccacacagcatgtgcgctctccctgagtgcctgtgtagctggggatggggattcctaggggcagatgaaggacaagccccactggagtggggttctttgagtgggggaggcagggacgagggaaggaaagtaactcctgactctccaataaaaacctgtccaacctg

SEQ ID NO: 56973 - DNA, 1435 bp, Homo sapiens
cctgggtgcaaccagtcacagctctgcagaggttactgtgattttgcccctgaaggatctgtccacaacttaggaactcacacagcttttggcctgagcccccgttaccaagagaaaggaggtttttgccaaggactccaaggggagtgcacttgatgctggtcgggacccaaagcgcccagccctccctgagacattgtgtgagtcgggctgggcctcaaacacggcccccactgccccaccccagccagggtggtgcttgtgtgggaaggactttaaatccagctgccagacccctggacgggagaaggagagacggctggccaccatgcacggctcctgcagtttcctgatgcttctgctgccgctactgctactgctggtggccaccacaggccccgttggagccctcacagatgaggagaaacgtttgatggtggagctgcacaacctctaccgggcccaggtatccccgacggcctcagacatgctgcacatgagatgggacgaggagctggccgccttcgccaaggcctacgcacggcagtgcgtgtggggccacaacaaggagcgcgggcgccgcggcgagaatctgttcgccatcacagacgagggcatggacgtgccgctggccatggaggagtggcaccacgagcgtgagcactacaacctcagcgccgccacctgcagcccaggccagatgtgcggccactacacgcaggtggtatgggccaagacagagaggatcggctgtggttcccacttctgtgagaagctccagggtgttgaggagaccaacatcgaattactggtgtgcaactatgagcctccggggaacgtgaaggggaaacggccctaccaggaggggactccgtgctcccaatgtccctctggctaccactgcaagaactccctctgtgaacccatcggaagcccggaagatgctcaggatttgccttacctggtaactgaggccccatccttccgggcgactgaagcatcagactctaggaaaatgggtactccttcttccctagcaacggggattccggctttcttggtaacagaggtctcaggctccctggcaaccaaggctctgcctgctgtggaaacccaggccccaacttccttagcaacgaaagacccgccctccatggcaacagaggctccaccttgcgtaacaactgaggtcccttccattttggcagctcacagcctgccctccttggatgaggagccagttaccttccccaaatcgacccatgttcctatcccaaaatcagcagacaaagtgacagacaaaacaaaagtgccctctaggagcccagagaactctctggaccccaagatgtccctgacaggggcaagggaactcctaccccatgcccaggaggaggctgaggctgaggctgagttgcctccttccagtgaggtc

SEQ ID NO: 56974 - DNA, 2028 bp, Homo sapiens
cctgggtgcaaccagtcacagctctgcagaggttactgtgattttgcccctgaaggatctgtccacaacttaggaactcacacagcttttggcctgagcccccgttaccaagagaaaggaggtttttgccaaggactccaaggggagtgcacttgatgctggtcgggacccaaagcgcccagccctccctgagacattgtgtgagtcgggctgggcctcaaacacggcccccactgccccaccccagccagggtggtgcttgtgtgggaaggactttaaatccagctgccagacccctggacgggagaaggagagacggctggccaccatgcacggctcctgcagtttcctgatgcttctgctgccgctactgctactgctggtggccaccacaggccccgttggagccctcacagatgaggagaaacgtttgatggtggagctgcacaacctctaccgggcccaggtatccccgacggcctcagacatgctgcacatgagatgggacgaggagctggccgccttcgccaaggcctacgcacggcagtgcgtgtggggccacaacaaggagcgcgggcgccgcggcgagaatctgttcgccatcacagacgagggcatggacgtgccgctggccatggaggagtggcaccacgagcgtgagcactacaacctcagcgccgccacctgcagcccaggccagatgtgcggccactacacgcaggtggtatgggccaagacagagaggatcggctgtggttcccacttctgtgagaagctccagggtgttgaggagaccaacatcgaattactggtgtgcaactatgagcctccggggaacgtgaaggggaaacggccctaccaggaggggactccgtgctcccaatgtccctctggctaccactgcaagaactccctctgtgaacccatcggaagcccggaagatgctcaggatttgccttacctggtaactgaggccccatccttccgggcgactgaagcatcagactctaggaaaatgggtgcagagggccctgacaagcctagcgtcgtgtcagggctgaactcgggccctggtcatgtgtggggccctctcctgggactactgctcctgcctcctctggtgttggctggaatcttctgaaggggataccactcaaaggcaaggcctggtgaggggggccctggcctcatacccacctggattgtcttcctccaagtgagagaccacagcttcctgggcaggtcctgctctgtggcccagcagccccccttcaccccaacttctggccagattccaggccagcactcttgtcctcctgggaggcgtctacagggccagcccctggcactgccccaggagtgccttggctctgggtaggcccatccttcagctggctgcagactgttctgagcggtatttacatgtgcccactctcaggttgtcctgtggccatcagcttctctcccagacagaggatctcaggcttcccaggaacccccgggcccctcccagtcccctggcctcttccttgagccatctgagtccaggactgttccccagaagtgcctcttgccttctcagggtgaagaggtcagctgtcctcctgtcatcttccccaccctgtccccagcccctaaacaagatacttcttggttaaggccctccggaagggaaaggctacggggcatgtgcctcatcacaccatccatcctggaggcacaaggcctggctggctgcgagctcaggaggccgcctgaggactgcacaccgggcccacacctctcctgcccctccctcctgagtcctgggggtgggaggatttgagggagctcactgcctacctggcctggggctgtctgcccacacagcatgtgcgctctccctgagtgcctgtgtagctggggatggggattcctaggggcagatgaaggacaagccccactggagtggggttctttgagtgggggaggcagggacgagggaaggaaagtaactcctgactctccaataaaaacctgtccaacctg

SEQ ID NO: 56975 - DNA, 1744 bp, Homo sapiens
cctgggtgcaaccagtcacagctctgcagaggttactgtgattttgcccctgaaggatctgtccacaacttaggaactcacacagcttttggcctgagcccccgttaccaagagaaaggaggtttttgccaaggactccaaggggagtgcacttgatgctggtcgggacccaaagcgcccagccctccctgagacattgtgtgagtcgggctgggcctcaaacacggcccccactgccccaccccagccagggtggtgcttgtgtgggaaggactttaaatccagctgccagacccctggacgggagaaggagagacggctggccaccatgcacggctcctgcagtttcctgatgcttctgctgccgctactgctactgctggtggccaccacaggccccgttggagccctcacagatgaggagaaacgtttgatggtggagctgcacaacctctaccgggcccaggtatccccgacggcctcagacatgctgcacatgagatgggacgaggagctggccgccttcgccaaggcctacgcacggcagtgcgtgtggggccacaacaaggagcgcgggcgccgcggcgagaatctgttcgccatcacagacgagggcatggacgtgccgctggccatggaggagtggcaccacgagcgtgagcactacaacctcagcgccgccacctgcagcccaggccagatgtgcggccactacacgcaggtggtatgggccaagacagagaggatcggctgtggttcccacttctgtgagaagctccagggtgttgaggagaccaacatcgaattactggtgtgcaactatgagcctccggggaacgtgaaggggaaacggccctaccaggaggggactccgtgctcccaatgtccctctggctaccactgcaagaactccctctgtgaacccatcggaagcccggaagatgctcaggatttgccttacctggtaactgaggccccatccttccgggcgactgaagcatcagactctaggaaaatgggtgcagagggccctgacaagcctagcgtcgtgtcagggctgaactcgggccctggtcatgtgtggggccctctcctgggactactgctcctgcctcctctggtgttggctggaatcttctgaaggggataccactcaaagggtgaagaggtcagctgtcctcctgtcatcttccccaccctgtccccagcccctaaacaagatacttcttggttaaggccctccggaagggaaaggctacggggcatgtgcctcatcacaccatccatcctggaggcacaaggcctggctggctgcgagctcaggaggccgcctgaggactgcacaccgggcccacacctctcctgcccctccctcctgagtcctgggggtgggaggatttgagggagctcactgcctacctggcctggggctgtctgcccacacagcatgtgcgctctccctgagtgcctgtgtagctggggatggggattcctaggggcagatgaaggacaagccccactggagtggggttctttgagtgggggaggcagggacgagggaaggaaagtaactcctgactctccaataaaaacctgtccaacctgggtttccataaagaagattaaccagttgcttgagaatgtaattttgctcctagggggggggcccggttcccaattagccctatggggaggcgtttaacaattcaggggccgtagttttacaaaggcgagactggaaaaa

SEQ ID NO: 56976 - DNA, 271 bp, Homo sapiens
cttcccagcttttgcttgttgtaaacagctggcagtggttacatctatatttgttaagaggcagagcactgtattttgtgtaagataaggtgctagtcttggccaggctgccaagcctgggcttttaaaataaaagttttaaagaaaaattatagcataataaattacacaattttattggaaaactgaaggtgttcaaccaatgctagtttttaaatatatttagaaatactatttcaggaaattttaactacactcattagtcttatgg

SEQ ID NO: 56977 - DNA, 484 bp, Homo sapiens
tgctgataaaggaatttcatttggctgaatttacaatttctaagaatatgaacagtgggctcaaccacactgccttacacttagtaagtgcttcataaatattagacactttttttttggtaaaaaaggcctgatttccaattgccatagagataacaatgagttcaatgagaagttactcccccctttctcaggcctgctagaggcatccaacgccctggtttgtaaatagcaacctaaaggcgtattttggcactggtctggggacattccccatctctcatcccttttcccccttcacagatggtggtgggcttcgctctacaaagaggactctgatgttactcttgagcttatgagccagagagctgaaacccgcagcttgttgtgtaagtacaaggaaatggatttggaataagtttagagacacacctcaactcaactctaaaggaaaagaacctgccatctggctgaaggttagacg

SEQ ID NO: 56978 - DNA, 450 bp, Homo sapiens
taagcaacagacatttatttctcatgcttatggaggctgggaagttcaggatccaggtggaggctgaccccatgtctttctgggaggtccagctgctcctggaccagatagtgccaacacaatacttctcattgtgttatgattgcctacagcaggtgaaggcctgcttcctgttttccagatggccgtcttctcattgtatcttaacatggtggaaggagaatgagaaagctcgcttgtgtctctttttataagggcactaatccagacgcggagggctcacctttacaacagctaaacctgatcaccccccagaggccccatctccaaataccatcacattggggattgtgctttgacatatgaatgtgggaggacacgagcattcagtccataacaggcaccaaggcaccaagtcagtctgcacaagtgtgtcgctgggcagaagaa

SEQ ID NO: 56979 - DNA, 2981 bp, Homo sapiens
  misc_feature (2058)..(2058): n is a, c, g, or t
actaaggggcggggccgaagcggcccagggggcgggcgtttgaaatcagtgccttagagtagaccctaaacctcattttataccttcaagaaccaattacttaatgtctcttccgtcttttccgtccccgaccccctcccagactccttcattccggtactgcgtggacggaaagccccgggtagccgacaccacgtccccggctagcgggagagagcgtggaaaaggattacaccaaactgtttaaatccaacgactcctgcttccatcctttctcctgagctagaaccaacaaacctagagagttgggcttcggaaaaactagtgttttcatttaattggatatgaagaaagaacaaatatgtacggggcaaccacgatctttacaaagaacataagttccaggaaagcaggaaccttgtctctcttgttcactgggtgtatcctctgcatatagaacagtgcctggcacataataggtgctgaattttgttctaaacactgaggacattctctgctacatttgggtcgtacccccaggtctgagtaattcaatagacttaagaagacagagcccagcagcaaccgaaacataacagagttgcaggatcagctaacgtcaatgcctgggcaaagctgctgcccagagtggaatctcactagtgaataaacaagcccaagaaagattatcatctcatttgcaaaaaaaaaaagtacgctggtagatcctgctacctcatagataacaccagtcaaatttttttttaaagtagcattttcctacattgtcaactatctagaacatacctaaaaactaagagtttactgcttattaaatggaaactatgaagtctaaggccaactgtgcccagaatccaaattgtaacataatgatatttcatccaaccaaagaagagtttaatgattttgataaatatattgcttacatggaatcccaaggtgcacacagagctggcttggctaagataattccacccaaagaatggaaagccagagagacctatgataatatcagtgaaatcttaatagccactcccctccagcaggtggcctctgggcgggcaggggtgtttactcaataccataaaaaaaaggaagcatgactgtgggggagtatcgccatttggcaaacagtaaaaaatatcagactccaccacaccagaatttcgaagatttggagcgaaaatactggaagaaccgcatctataattcaccgatttatggtgctgacatcagtggctccttgtttgatgaaaacactaaacaatggaatcttgggcacctgggaacaattcaggacctgctggaaaaggaatgtggggttgtcatagaaggcgtcaatacaccctacttgtactttggcatgtggaaaaccacgtttgcttggcatacagaggacatggacctttacagcatcaactacctgcaccttggggagcccaaaacttggtatgtggtgcccccagaacatggccagcgcctggaacgcctggccagggagctcttcccaggcagttcccggggttgtggggccttcctgcggcacaaggtggccctcatctcgcctacagttctcaaggaaaatgggattcccttcaatcgcataactcaggaggctggagagttcatggtgacctttccctatggctaccatgctggcttcaaccatggtttcaactgcgcagaggccatcaattttgccactccgcgatggattgattatggcaaaatggcctcccagtgtagctgtggggaggcaagggtgaccttttccatggatgccttcgtgcgcatcctgcaacctgaacgctatgacctgtggaaacgtgggcaagaccgggcagttgtggaccacatggagcccagggtaccagccagccaagagctgagcacccagaaggaagtccagttacccaggagagcagcgctgggcctgagacaactcccttcccactgggcccggcattccccttggcctatggctgcccgcagtgggacacggtgccacacccttgtgtgctcttcactcccacgccnatctgcagttagtggcactgctacgcagccccgggctgctgctgtccacagctctaagaagcccagctcaactccatcatccacccctggtccatctgcacagattatccacccgtcaaatggcagacgtggtcgtggtcgccctcctcagaaactgagagctcaggagctgaccctccagactccagccaagaggcccctcttggcgggcacaacatgcacagcttcgggcccagaacctgagcccctacctgaggatggggctttgatggacaagcctgtaccactgagcccagggctccagcatcctgtcaaggcttctgggtgcagctgggcccctgtgccctaagtccacgggctgtctttatatcccactgccctgctgtgtgacagtttgatgaaactggttacatttacatcccaaaactttggttgagtttgcaggactctaggcatgcatgaaagagcccccctggtgatgcccttggatgctgccaagtccatggtagttttcaattttgccatacttttgttcttcctaccggaccctggaatgtctttggatattgctaaaatctatttctgcagctgaggttttatccactggacacatttgtgtgtgagaactaggtcttgttgaggttagcgtaacctggtatatgcaactaccatcctctgggccaactgtggaagctgctgcacttgtgaagaatcctgagctttgattcctcttcagtctacgcatttctctcttcccctccctcaccccctttttcttataaaactaggttctttatacagataaggtcagtagagttccagaataaaagatatgacttttctgagttatttatgtacttaaaatatgttgtcacagtatttgttcccaaatatattaaaggtaaccaaaatgttaaaatctg

SEQ ID NO: 56980 - DNA, 354 bp, Homo sapiens
gtctttactaaaaatacaaaaatcagctggcgtggtagtgggtgcctataatcccagctactcaggaggctgaggcaggagaatcacttgaacccaggaggcggaggttgcagtgagcctggtttttcagcagtttactaataacacttggatctttagcattttcttctttttcgttttaaaagacaaccttgaggagagagaaggtagatatgaatggaagaataggggaaggacaatgatttggattggtttgaaacgttggcccctaatatgttgcttttgaggagtagtatttttctaaacggagtaacacttgggattttgtaaattcaatttgatgaggatcttaga

SEQ ID NO: 56981 - DNA, 380 bp, Homo sapiens
ttttttttttttagggagacaatctaatcaggatgagatcattgtaatttgcatttctttgattgctagtgaggctgaacaattttcatttgcttaatattgttatttcctattgcgtgaagtcatgttcctgctagcactgtgatctaaaagcagggcaaggaaaggttatcttgcacatagggaaagagcagagagacaagtgcaagaaacaggggctatatctttttggactgcatcttttcatagtgagtgaaagaaaatctcacttcacgtggcttaaataaaaaaggaaatgcagtaatcaccctactgaaaaggcctgacagtacgtttggcttcagttacagcttggacctcaaatgacggcaccaggaccc

SEQ ID NO: 56982 - DNA, 780 bp, Homo sapiens
gaagagaattctaggcaggaggaacaacagtaccaaacacctgagataagagtgcttggcatatgggaggcattgcaaagaagatggcagtgatgcagtggggggaagaacagatcacaaagggaatatagtatggatatatgtacatatacatacacatatgttttataacatacatagtacagtatatatatatacacacacaccatgcaccatgcactatatagtattaaattgtgtgtgtgtttgtgtgtataaagtactgtcgttgaaactgaagtctagtgtaatatgttcagtgccataggccagttataaagtgctatgaagatctagagaaggcagagattaaattccattttttactctcagaagttgaagcatgcatatccaagttggatttactgtttcatttttgttgcaaatagtctgaattgtgaaagctttgtgtcattctgttgttccatgggcactctgttttgttctttgttctttaagcagtattggccaccgtagctgcttatctaaaatgcatgtgtttatcagatattaacttatataataattggacctattaaaggaaaaattttaagtaaatgttggtagttacattgtcatttcttgctagcaatcaaggccaagttagatcatttgaattcatatttaatcattacacactgaagattaaaagtgaacaaattaatgtcatgaataacttttttccctttattgtagtatagctgagacatttatacattacattttatatatattttaaaa

SEQ ID NO: 56983 - DNA, 6705 bp, Homo sapiens
cctaggcccgggtcccggatccccgcgcacccggccaggctctggcacgttttgggggaggtgcctgcaggacccaacatactcaatgagcttccagcgcaatgtccgatcgctcggggccgactgccaagggaaaggatggaaagaagtattcctcgctcaacctgtttgatacgtataagggcaagtccttagagatccagaaacccgcctgttgcccctcgccatggcctgcagagtctcgggaaagttgccattgcccggcgtatcgacctccagccaaccttccaagcctgaaagccgagaacaaaggcaatgaccccaatgtctcactagtgccaaaagacggaacaggatgggcaagcaaacaggagcagtccgaccccaagagttccgatgcctcaaccgctcagccgccggaatcgcagccactgccggcttcacagacgcctgcctccaaccagccgaaacgacccccagcagcccccgagaacactcctttggttccaagcggggtaaagtcctgggcacaagccagcgtcacccatggagcacatggagatggtggaagggcatcaagcctactgtcacgattctctcgagaggaatttccgaccctgcaggcggctggcgaccaggacaaggctgccaaggaaagggagtctgccgaacagtcgtctgggcccggaccaagcctccgcccccaaaattctacaacttggagggacggaggtgggcgtggccctgatgagctggagggcccggactccaaacttcatcatggtcatgatccccggggtgggctacagccttcaggcccaccccagttccctccctaccgcggaatgatgccgcctttcatgtatcccccatatctcccgttccctccgccctatggaccccaggggccttaccgataccccactcctgatgggcccagccgttttccccgtgtggcgggcccccgaggctcagggccaccaatgcgcttagtagagcctgtgggtcgtccctctattctcaaagaggataatctcaaagagtttgatcagttggatcaggagaatgatgatggttgggcaggggcccatgaagaggttgactacactgaaaagctcaagttcagcgatgaggaagatgggcgagactctgatgaggagggagctgagggccacagggattcccaatcagcttctggtgaggaacggccccctgaagcagatggcaaaaagggcaactcccccaacagcgaaccgcccactcctaagacggcctgggcagaaacctctcggcctccagagacagagccgggacctcctgccccaaagcctcccctaccccctggggactacccagatcgtgggggtcctccctgcaagcccccagcacctgaagatgaggatgaggcatggcggcagcgacgaaagcagtcgtcatctgagatttccctggcagtggagcgggcccggcgacggcgagaagaagaggagcggcgcatgcaagaagagcgccgggcagcctgtgctgagaagctcaagcgactcgatgaaaagtttggggcacctgacaagcggctcaaagcagagcctgctgccccacctgctgccccttctaccccagccccaccacctgcagtccctaaagaactccctgcacctccagctccacctccagcatcagccccaacaccagagacagaacctgaagagccagcacaggcccctcctgcccaatctactcctactccaggtgtggctgcggctcccactctggtgagtggtggtggcagtaccagtagcaccagcagtggcagcttcgaagccagcccagtggaaccacaactgccctcaaaagagggtcctgaaccaccagaagaggttcctcctcctaccacacccccagttccaaaggtggaacccaagggtgatgggattggtcccacccgccagccccctagtcagggcttgggctaccccaaatatcagaagtcgttgcctcctcgtttccagcggcagcagcaggagcagctcctgaagcagcagcagcagcaccagtggcagcagcatcaacagggctctgcccctcctaccccagtgcccccatcaccaccacagcctgtgaccctgggggctgtgccagctccacaggctccacccccgccccccaaggccctgtacccaggtgctctgggccggcccccacccatgcccccaatgaactttgatccccgatggatgatgattcctccttatgtggacccccggctcctccagggtcgtccccctctagagttctaccctcctggtgtgcatccctctggcctagttccccgagagcgttcagacagtctggggctcagctcagagccatttgaccgtcatgcacctgctatgttacgggaacggggcactccaccggtggatccaaagttggcctgggtaggagatgtcttcaccgccacacccgctgaaccccgcccacttacctcacctctgcgccaggctgcggatgaggatgacaaggggatgaggagcgagactcctccagtacctcccccaccaccctatctggccagttatccaggctttcctgagaatggagcccctgggcccccaatctctcgctttcctctggaggaaccagggccccgtccactcccctggcccccaggcagtgatgaagtggccaagatacaaactccaccacccaagaaggagccccctaaggaggagactgcacagctgacggggccagaagcaggccgaaagctgcccgcgagtcggagtggagcaggccccccaccaccacgcagagagagtcgcacagagacccgctggggccctcgtccagggagcagtcgtcgtggaatccctccagaggagccaggggccccaccccgccgggctgggcctataaagaaacctccaccacctacaaaagtagaagagctgcctcccaagcccctcgaacagggggatgaaacccccaaacccccaaagccagacccactcaagataaccaaggggaagctagggggccccaaggagaccccacccaatggaaatctttcccctgccccaaggcttcggagggactattcgtatgaaagagtgggtcctacctcttgccggggtcggggccgaggcgagtattttgccagagggaggggttttcgggggacctatgggggacgagggcggggaggccaagcgaattccgcagttaccgagagtttcgaggagatgatgggcgtggaggtgggacagggggaccaaaccaccctcctgctccccgaggccgccatgccagcgagacacggagcgagggttcagagtatgaggaaatccccaagcggtgccggcagcggggctcagaaacaggcagcgagacccatgagagtgatctggctccttcagacaaggaggctcccacacccaaggagggaacactcacccaggtcctctcgctcccccaccaccaggagccccacccttcaccgagcgccagcccgcttcacgtgcccgggggtcggcgagtcttcactcccagagggtgccatctcgccggggccgaggaggagggaggcccctcctcaagtttgcccaggctggagccctccagccaagtctctggctcccaagaaacctcccacaggccctttgccaccaagtaaggagcctttgaaagagaagttgatcccagggcctctgtcccctgtggcgcgcggaggcagcaatggaggtagcaatgtgggcatggaagatggggagcgaccccgaaggaggcgacatgggagggctcagcagcaggataaaccgcctcgtttccggaggctgaagcaggaacgggagaatgccgcaagggggtctgagggcaagccctccctaacccttccagcctccgctcctggacctgaggaggccctcacaacagtcacagtggccccagcacctcgccgggcagctgccaagtctcctgatctgtcaaaccagaactcagaccaagccaatgaggaatgggagactgcatcagagagcagtgacttcaccagtgagcgccgaggggacaaagaggcacccccaccagtactgctgacacccaaggctgtgggaactcctgggggaggtggaggtggagccgtaccaggtatttcagccatgtcccgcggagatctgagccagagagccaaggatttgagtaaacggagcttctcaagtcagcggccaggcatggaacggcagaatcggcgccctggcccagggggcaaggctggcagcagtggcagcagcagtggaggaggcggtgggggtcctggaggaaggaccgggccaggacgaggcgacaagaggagctggccctctcccaagaaccgaagtcgtcctccagaggagcgtcccccggggcttcccctgcctcccccacctcccagcagttctgctgtcttccgcctggaccaagttatccacagcaaccctgctggcatccaacaggctctggcccagcttagtagccgtcaagggagtgtaactgcaccagggggtcatccaaggcacaagcctgggcctccccaagcccctcagggcccctctcctaggcccccaacccgatacgagccccagagggtcaacagcggcctcagttctgacccccactttgaggagccggggccaatggtgagaggggtgggtgggactcctcgggactctgccggggttagtccctttccccctaaacgtcgggagcggcctcccagaaaaccagagctgctacaggaggaatctttgccacctcctcatagctctggattcttgggctctaagcctgagggcccaggccctcaggcagagtccagagatacaggcacagaggccctgacccctcacatctggaaccgtttacatactgccactagccgaaagagttaccggcccagctccatggagccttggatggagcccctgagtccttttgaggatgtggctggcacagaaatgagtcagtctgacagtggggtggacctgagtggggattctcaggtgtcatcaggtccctgcagccagcgaagttcccctgatggaggactcaagggggcagcagagggaccccccaagaggcctggaggctcctcacccctgaatgctgttccttgtgagggtccacctggctctgaacctcctaggagaccaccacctgccccccacgatggggacagaaaggagctgccccgggagcagcctctgccccctggccccattggcacagaacgatcacagcgtacagaccgaggcacagagcctggccccattcggccatcccatcgacctggtcccccagtccagtttggcactagtgacaaggactcagacttacgcctagtggtaggagacagcttgaaagcagagaaggagctaacagcatcagtcactgaggccattcctgtatcacgagactgggagctgcttcccagtgctgctgcctctgctgagccacaatccaagaacctggattctgggcactgtgtcccggagcccagctcctcaggccagcgcctgtatcctgaggttttctatggcagtgctgggccttccagttctcagatctctggggggagccatggactctcaattacatccaaacagtggaggcttcgccctgggacaccctcactgcacccttacagatcacagcccctatacctacccccgggcccagcccctccctcagcactgctctctggggtagctctcaagggccagtttctggatttctccacaatgcaagctacagagctggggaagttgccggctggaggagttctctaccctccaccttccttcctctactctccggctttctgccccagtcctttgcctgacacatcgttgcttcaggtacgccaggatctgccatccccttcggatttttattctactcctctgcagcctggtggccaaagtggctttctcccttcaggggctcctgcccagcagatgcttctacccatggtagactcacagctgcctgtggtgaactttggctccctgccgccagcaccacctcctgccccacctcccctttctctgttacctgtgggccctgctctgcagccccccagcctggctgtgcggcccccacctgctcctgctactcgggtgctgccttcacctgccaggcccttccccgctagcttggggcgagcagagctgcatccagtggaactaaagccgttccaggattatcaaaaactgagcagcaaccttgggggacctggatcatcacggactcccccaactggaaggtccttctctggcctcaattcccgtctcaaggccacgccttccacctacagtggagtcttccgcacccagcgcgtcgacctttaccagcaggcctccccaccagatgccctgcgctggatacctaagccttgggagcggacagggccgccacctcgagaagggccctcccgacgggcagaggagcctgggtcccgaggggacaaggagcctgggttgcccccaccccgctgagggagttcctcttgccccctacccccggggcttgtatatagattataaatatataagggggaaaggggtgggcggggaggggttgtggggctggggcctcacttcccctcctcccccttcccctggtcccctgtccctggggctgtttgttaaaaaagagtaataaaaggattta

SEQ ID NO: 56984 - DNA, 2167 bp, Homo sapiens
ccacgcgatcgcccacgcgtccgggagcgaccccgaaggaggcgacatgggagggctcagcagcaggataaaccgcctcgtttccggaggctgaagcaggaacgggagaatgccgcaagggggtctgagggcaagccctccctaacccttccagcctccgctcctggacctgaggaggccctcacaacagtcacagtggccccagcacctcgccgggcagctgccaagtctcctgatctgtcaaaccagaactcagaccaagccaatgaggaatgggagactgcatcagagagcagtgacttcaccagtgagcgccgaggggacaaagaggcacccccaccagtactgctgacacccaaggctgtgggaactcctgggggaggtggaggtggagccgtaccaggtatttcagccatgtcccgcggagatctgagccagagagccaaggatttgagtaaacggagcttctcaagtcagcggccaggcatggaacggcagaatcggcgccctggcccagggggcaaggctggcagcagtggcagcagcagtggaggaggcggtgggggtcctggaggaaggaccgggccaggacgaggcgacaagaggagctggccctctcccaagaaccgaagtcgtcctccagaggagcgtcccccggggcttcccctgcctcccccacctcccagcagttctgctgtcttccgcctggaccaagttatccacagcaaccctgctggcatccaacaggctctggcccagcttagtagccgtcaagggagtgtaactgcaccagggggtcatccaaggcacaagcctgggcctccccaagcccctcagggcccctctcctaggcccccaacccgatacgagccccagagggtcaacagcggcctcagttctgacccccactttgaggagccggggccaatggtgagaggggtgggtgggactcctcgggactctgccggggttagtccctttccccctaaacgtcgggagcggcctcccagaaaaccagagctgctacaggaggaatctttgccacctcctcatagctctggattcttgggctctaagcctgagggcccaggccctcaggcagagtccagagatacaggcacagaggccctgacccctcacatctggaaccgtttacatactgccactagccgaaagagttaccggcccagctccatggagccttggatggagcccctgagtccttttgaggatgtggctggcacagaaatgagtcagtctgacagtggggtggacctgagtggggattctcaggtgtcatcaggtccctgcagccagcgaagttcccctgatggaggactcaagggggcagcagagggaccccccaagaggcctggaggctcctcacccctgaatgctgttccttgtgagggtccacctggctctgaacctcctaggagaccaccacctgccccccacgatggggacagaaaggagctgccccgggagcagcctctgccccctggccccattggcacagaacgatcacagcgtacagaccgaggcacagagcctggccccattcggccatcccatcgacctggtcccccagtccagtttggcactagtgacaaggactcagacttacgcctagtggtaggagacagcttgaaagcagagaaggagctaacagcatcagtcactgaggccattcctgtatcacgagactgggagctgcttcccagtgctgctgcctctgctgagccacaatccaagaacctggattctgggcactgtgtcccggagcccagctcctcaggccagcgcctgtatcctgaggttttctatggcagtgctgggccttccagttctcagatctctgggggagccatggacttttcacctaagccttgggagcggacagggccgccacctcgagaagggccctcccgacgggcagaggagcctgggtcccgaggggacaaggagcctgggttgcccccaccccgctgagggagttcctcttgccccctacccccggggcttgtatatagattataaatatataagggggaaaggggtgggcggggaggggttgtggggctggggcctcacttcccctcctcccccttcccctggtcccctgtccctggggctgtttgttaaaaaagagtaataaaaggattta

SEQ ID NO: 56985 - DNA, 173 bp, Homo sapiens
gatgacaaaattattttgtccttgtatttgtaaatggtagcaatgggcatgatttcagtcctgagtctccaccagttggagaagtcagggaggcatctcaggtgtgaataaccttcccattctgtcccctcagttccgatgcctcaaccgctcagccgccggaatcgcagcca

SEQ ID NO: 56986 - DNA, 5910 bp, Homo sapiens
cctaggcccgggtcccggatccccgcgcacccggccaggctctggcacgttttgggggaggtgcctgcaggacccaacatactcaatgagcttccagcgcaatgtccgatcgctcggggccgactgccaagggaaaggatggaaagaagtattcctcgctcaacctgtttgatacgtataagggcaagtccttagagatccagaaacccgcctgttgcccctcgccatggcctgcagagtctcgggaaagttgccattgcccggcgtatcgacctccagccaaccttccaagcctgaaagccgagaacaaaggcaatgaccccaatgtctcactagtgccaaaagacggaacaggatgggcaagcaaacaggagcagtccgaccccaagagttccgatgcctcaaccgctcagccgccggaatcgcagccactgccggcttcacagacgcctgcctccaaccagccgaaacgacccccagcagcccccgagaacactcctttggttccaagcggggtaaagtcctgggcacaagccagcgtcacccatggagcacatggagatggtggaagggcatcaagcctactgtcacgattctctcgagaggaatttccgaccctgcaggcggctggcgaccaggacaaggctgccaaggaaagggagtctgccgaacagtcgtctgggcccggaccaagcctccgcccccaaaattctacaacttggagggacggaggtgggcgtggccctgatgagctggagggcccggactccaaacttcatcatggtcatgatccccggggtgggctacagccttcaggcccaccccagttccctccctaccgcggaatgatgccgcctttcatgtatcccccatatctcccgttccctccgccctatggaccccaggggccttaccgataccccactcctgatgggcccagccgttttccccgtgtggcgggcccccgaggctcagggccaccaatgcgcttagtagagcctgtgggtcgtccctctattctcaaagaggataatctcaaagagtttgatcagttggatcaggagaatgatgatggttgggcaggggcccatgaagaggttgactacactgaaaagctcaagttcagcgatgaggaagatgggcgagactctgatgaggagggagctgagggccacagggattcccaatcagcttctggtgaggaacggccccctgaagcagatggcaaaaagggcaactcccccaacagcgaaccgcccactcctaagacggcctgggcagaaacctctcggcctccagagacagagccgggacctcctgccccaaagcctcccctaccccctggggactacccagatcgtgggggtcctccctgcaagcccccagcacctgaagatgaggatgaggcatggcggcagcgacgaaagcagtcgtcatctgagatttccctggcagtggagcgggcccggcgacggcgagaagaagaggagcggcgcatgcaagaagagcgccgggcagcctgtgctgagaagctcaagcgactcgatgaaaagtttggggcacctgacaagcggctcaaagcagagcctgctgccccacctgctgccccttctaccccagccccaccacctgcagtccctaaagaactccctgcacctccagctccacctccagcatcagccccaacaccagagacagaacctgaagagccagcacaggcccctcctgcccaatctactcctactccaggtgtggctgcggctcccactctggtgagtggtggtggcagtaccagtagcaccagcagtggcagcttcgaagccagcccagtggaaccacaactgccctcaaaagagggtcctgaaccaccagaagaggttcctcctcctaccacacccccagttccaaaggtggaacccaagggtgatgggattggtcccacccgccagccccctagtcagggcttgggctaccccaaatatcagaagtcgttgcctcctcgtttccagcggcagcagcaggagcagctcctgaagcagcagcagcagcaccagtggcagcagcatcaacagggctctgcccctcctaccccagtgcccccatcaccaccacagcctgtgaccctgggggctgtgccagctccacaggctccacccccgccccccaaggccctgtacccaggtgctctgggccggcccccacccatgcccccaatgaactttgatccccgatggatgatgattcctccttatgtggacccccggctcctccagggtcgtccccctctagagttctaccctcctggtgtgcatccctctggcctagttccccgagagcgttcagacagtctggggctcagctcagagccatttgaccgtcatgcacctgctatgttacgggaacggggcactccaccggtggatccaaagttggcctgggtaggagatgtcttcaccgccacacccgctgaaccccgcccacttacctcacctctgcgccaggctgcggatgaggatgacaaggggatgaggagcgagactcctccagtacctcccccaccaccctatctggccagttatccaggctttcctgagaatggagcccctgggcccccaatctctcgctttcctctggaggaaccagggccccgtccactcccctggcccccaggcagtgatgaagtggccaagatacaaactccaccacccaagaaggagccccctaaggaggagactgcacagctgacggggccagaagcaggccgaaagctgcccgcgagtcggagtggagcaggccccccaccaccacgcagagagagtcgcacagagacccgctggggccctcgtccagggagcagtcgtcgtggaatccctccagaggagccaggggccccaccccgccgggctgggcctataaagaaacctccaccacctacaaaagtagaagagctgcctcccaagcccctcgaacagggggatgaaacccccaaacccccaaagccagacccactcaagataaccaaggggaagctagggggccccaaggagaccccacccaatggaaatctttcccctgccccaaggcttcggagggactattcgtatgaaagagtgggtcctacctcttgccggggtcggggccgaggcgagtattttgccagagggaggggttttcgggggacctatgggggacgagggcggggaggccaagcgaattccgcagttaccgagagtttcgaggagatgatgggcgtggaggtgggacagggggaccaaaccaccctcctgctccccgaggccgccatgccagcgagacacggagcgagggttcagagtatgaggaaatccccaagcggtgccggcagcggggctcagaaacaggcagcgagacccatgagagtgatctggctccttcagacaaggaggctcccacacccaaggagggaacactcacccaggtcctctcgctcccccaccaccaggagccccacccttcaccgagcgccagcccgcttcacgtgcccgggggtcggcgagtcttcactcccagagggtgccatctcgccggggccgaggaggagggaggcccctcctcaagtttgcccaggctggagccctccagccaagtctctggctcccaagaaacctcccacaggccctttgccaccaagtaaggagcctttgaaagagaagttgatcccagggcctctgtcccctgtggcgcgcggaggcagcaatggaggtagcaatgtgggcatggaagatggggagcgaccccgaaggaggcgacatgggagggctcagcagcaggataaaccgcctcgtttccggaggctgaagcaggaacgggagaatgccgcaagggggtctgagggcaagccctccctaacccttccagcctccgctcctggacctgaggaggccctcacaacagtcacagtggccccagcacctcgccgggcagctgccaagtctcctgatctgtcaaaccagaactcagaccaagccaatgaggaatgggagactgcatcagagagcagtgacttcaccagtgagcgccgaggggacaaagaggcacccccaccagtactgctgacacccaaggctgtgggaactcctgggggaggtggaggtggagccgtaccaggtatttcagccatgtcccgcggagatctgagccagagagccaaggatttgagtaaacggagcttctcaagtcagcggccaggcatggaacggcagaatcggcgccctggcccagggggcaaggctggcagcagtggcagcagcagtggaggaggcggtgggggtcctggaggaaggaccgggccaggacgaggcgacaagaggagctggccctctcccaagaaccgaagtcgtcctccagaggagcgtcccccggggcttcccctgcctcccccacctcccagcagttctgctgtcttccgcctggaccaagttatccacagcaaccctgctggcatccaacaggctctggcccagcttagtagccgtcaagggagtgtaactgcaccagggggtcatccaaggcacaagcctgggcctccccaagcccctcagggcccctctcctaggcccccaacccgatacgagccccagagggtcaacagcggcctcagttctgacccccactttgaggagccggggccaatggtgagaggggtgggtgggactcctcgggactctgccggggttagtccctttccccctaaacgtcgggagcggcctcccagaaaaccagagctgctacaggaggaatctttgccacctcctcatagctctggattcttgggctctaagcctgagggcccaggccctcaggcagagtccagagatacaggcacagaggccctgacccctcacatctggaaccgtttacatactgccactagccgaaagagttaccggcccagctccatggagccttggatggagcccctgagtccttttgaggatgtggctggcacagaaatgagtcagtctgacagtggggtggacctgagtggggattctcaggtgtcatcaggtccctgcagccagcgaagttcccctgatggaggactcaagggggcagcagagggaccccccaagaggcctggaggctcctcacccctgaatgctgttccttgtgagggtccacctggctctgaacctcctaggagaccaccacctgccccccacgatggggacagaaaggagctgccccgggagcagcctctgccccctggccccattggcacagaacgatcacagcgtacagaccgaggcacagagcctggccccattcggccatcccatcgacctggtcccccagtccagtttggcactagtgacaaggactcagacttacgcctagtggtaggagacagcttgaaagcagagaaggagctaacagcatcagtcactgaggccattcctgtatcacgagactgggagctgcttcccagtgctgctgcctctgctgagccacaatccaagaacctggattctgggcactgtgtcccggagcccagctcctcaggccagcgcctgtatcctgaggttttctatggcagtgctgggccttccagttctcagatctctgggggagccatggacttttcacctaagccttgggagcggacagggccgccacctcgagaagggccctcccgacgggcagaggagcctgggtcccgaggggacaaggagcctgggttgcccccaccccgctgagggagttcctcttgccccctacccccggggcttgtatatagattataaatatataagggggaaaggggtgggcggggaggggttgtggggctggggcctcacttcccctcctcccccttcccctggtcccctgtccctggggctgtttgttaaaaaagagtaataaaaggattta

SEQ ID NO: 56987 - DNA, 349 bp, Homo sapiens
tgtatatttagtagagatgggagtttccccatgttggccaggctggtctcgaactccttacctcaagtgatccactcgcctcagcttcccaaagtggtgggattataggcgtgagccaccatgcccgtcctgccatctaaaattggtagggagaggtagccaggtagccaggcagttgttgggaagggcaggaggactctttagaatgtaacctatcaagtgtgcataccacctctggacaaaggagtccagaatgtgcctaccctctgggttatgtaactcccatgaaaaagtcagtccccttagcctgggagccacaaccacctttcagatcttctcctacctgtca

SEQ ID NO: 56988 - DNA, 175 bp, Homo sapiens
atggtcatcaagctgggacaatccttgccaccatcctagggctaggagggagagggagggctggtttgtgaacaggcatcccttgcctctccaaggccccaagataaaaccctgacccgtcacttccacccgtggggcctgcccacctctctgacctctccgccctctctgccct

SEQ ID NO: 56989 - DNA, 204 bp, Homo sapiens
tatcttttgctgtaaagagactattttcccgaaggaaaaatggcaatttacacaacgatctgcaattagagaaattaactgtagtctgtcacttgggggagctacttgaaattaatgttccattttattttcttttagttctagtagagtgtagattttacaatttttgattgactcattttgaatgagggcacaatttttgcc

SEQ ID NO: 56990 - DNA, 329 bp, Homo sapiens
gctatcaccgctggatgggcctgagggaatgacctattccaagcgcgtctcatatgccaaagggaaaagaaacgaaggccggagagtttatgcctcttgccggaagtccctgtgaaatgtgtgtggggccaggggcgacaagcattgactggaaatccgccttttaacaggagccttattcagattgacaagtagttggcattcagattttcccatctgagctcatggccgcagttcctaaaaggctgtttgagggtcccctgtcaacatttcagatttgaaggcaccactttaagggcctttatcattatccacaacagcagcagcag

SEQ ID NO: 56991 - DNA, 354 bp, Homo sapiens
ccaaatccttaagtttacaaagctgttggaaaactttgtgtcctgatttcaacaatcacgctttgtttgaaagatgagccaagctcacagacactaaattttatgtcatgccataagctggagaggagccatttggctacagctgcggaacttcattgaggagcaaatgaaaggcacatggacgagcacgctggtgcagttcatgttcttcctgcctgtgaattgaatactgtcctggtagcagtttcgggtcggtcaggagctcaaggctggtttgtgtggctgactacggatgagcactgaagttgcctcaaagaattaaggggtgtccacaccagcctctgggggtctttg

SEQ ID NO: 56992 - DNA, 351 bp, Homo sapiens
agtagagaaggggcttcacgatgttggccaggatggtctcgatctcttgacctcgtgatctgcccaactcggcctcccaaagtgctgggatcacaggcatgagccaccgcgcccagcctaagcatatgatttttttaaaaaaattatatgacatagtatatacaatttggtaactggatttttaaaaacttcaatatatttttaatttaaaagggggaattctatagggttcagcccccagttttttcctcttttcacactatcttctttccctagacaattccatctacttctgtggcttcaattcacaactatatttttcctaccagattttacctgtcaccccaattc

SEQ ID NO: 56993 - DNA, 339 bp, Homo sapiens
tctgtatatatattttttcttgccttgttgcactaattaggacatccagtaggatggtgaataagagtggcaaaaaaagaaccttgtcttgttcccaatatagaagaaaagcatatcatttctcaccataaaatagcgtgaagtcccattttttagatgttccagattaagttgaggatgttttttattcctagttttctaagactttttctcataaatagatgttggagtttgtcaaatgctttctctgcatcaattgacagaatcataaaatagttctttagccagttaataaatgtcagatcagtctggtatgcctaaaataaattgcacttactg

SEQ ID NO: 56994 - DNA, 10542 bp, Homo sapiens
cagtttggagctcagtcttccaccaaaggccgttcagttctcctgggctccagcctcctgcaaggactgcaagagttttcctccgcagctctgagtctccacttttttggtggagaaaggctgcaaaaagaaaaagagacgcagtgagtgggaaaagtatgcatcctattcaaacctaattgaatcgaggagcccagggacacacgccttcaggtttgctcaggggttcatatttggtgcttagacaaattcaaaatgaggaaacatcggcacttgcccttagtggccgtcttttgcctctttctctcaggctttcctacaactcatgcccagcagcagcaagcagatgtcaaaaatggtgcggctgctgatataatatttctagtggattcctcttggaccattggagaggaacatttccaacttgttcgagagtttctatatgatgttgtaaaatccttagctgtgggagaaaatgatttccattttgctctggtccagttcaacggaaacccacataccgagttcctgttaaatacgtatcgtactaaacaagaagtcctttctcatatttccaacatgtcttatattgggggaaccaatcagactggaaaaggattagaatacataatgcaaagccacctcaccaaggctgctggaagccgggccggtgacggagtccctcaggttatcgtagtgttaactgatggacactcgaaggatggccttgctctgccctcagcggaacttaagtctgctgatgttaacgtgtttgcaattggagttgaggatgcagatgaaggagcgttaaaagaaatagcaagtgaaccgctcaatatgcatatgttcaacctagagaattttacctcacttcatgacatagtaggaaacttagtgtcctgtgtgcattcatccgtgagtccagaaagggctggggacacggaaacccttaaagacatcacagcacaagactctgctgacattattttccttattgatggatcaaacaacaccggaagtgtcaatttcgcagtcattctcgacttccttgtaaatctccttgagaaactcccaattggaactcagcagatccgagtgggggtggtccagtttagcgatgagcccagaaccatgttttccttggacacctactccaccaaggcccaggttctgggtgcagtgaaagccctcgggtttgctggtggggagttggccaatatcggcctcgcccttgatttcgtggtggagaaccacttcacccgggcagggggcagccgcgtggaggaaggggttccccaggtgctggtcctcataagtgccgggccttctagtgacgagattcgctacggggtggtagcactgaagcaggctagcgtgttctcattcggccttggagcccaggccgcctccagggcagagcttcagcacatagctaccgatgacaacttggtgtttactgtcccggaattccgtagctttggggacctccaggagaaattactgccgtacattgttggcgtggcccaaaggcacattgtcttgaaaccgccaaccattgtcacacaagtcattgaagtcaacaagagagacatagtcttcctggtggatggctcatctgcactgggactggccaacttcaatgccatccgagacttcattgctaaagtcatccagaggctggaaatcggacaggatcttatccaggtggcagtggcccagtatgcagacactgtgaggcctgaattttatttcaatacccatccaacaaaaagggaagtcataaccgctgtgcggaaaatgaagcccctggacggctcggccctgtacacgggctctgctctagactttgttcgtaacaacctattcacgagttcagccggctaccgggctgccgaggggattcctaagcttttggtgctgatcacaggtggtaagtccctagatgaaatcagccagcctgcccaggagctgaagagaagcagcataatggcctttgccattgggaacaagggtgccgatcaggctgagctggaagagatcgctttcgactcctccctggtgttcatcccagctgagttccgagccgccccattgcaaggcatgctgcctggcttgctggcacctctcaggaccctctctggaacccctgaagttcactcaaacaaaagagatatcatctttcttttggatggatcagccaacgttggaaaaaccaatttcccttatgtgcgcgactttgtaatgaacctagttaacagccttgatattggaaatgacaatattcgtgttggtttagtgcaatttagtgacactcctgtaacggagttctctttaaacacataccagaccaagtcagatatccttggtcatctgaggcagctgcagctccagggaggttcgggcctgaacacaggctcagccctaagctatgtctatgccaaccacttcacggaagctggcggcagcaggatccgtgaacacgtgccgcagctcctgcttctgctcacagctgggcagtctgaggactcctatttgcaagctgccaacgccttgacacgcgcgggcatcctgactttttgtgtgggagctagccaggcgaataaggcagagcttgagcagattgcttttaacccaagcctggtgtatctcatggatgatttcagctccctgccagctttgcctcagcagctgattcagcccctaaccacatatgttagtggaggtgtggaggaagtaccactcgctcagccagagagcaagcgagacattctgttcctctttgacggctcagccaatcttgtgggccagttccctgttgtccgtgactttctctacaagattatcgatgagctcaatgtgaagccagaggggacccgaattgcggtggctcagtacagcgatgatgtcaaggtggagtcccgttttgatgagcaccagagtaagcctgagatcctgaatcttgtgaagagaatgaagatcaagacgggcaaagccctcaacctgggctacgcgctggactatgcacagaggtacatttttgtgaagtctgctggcagccggatcgaggatggagtgcttcagttcctggtgctgctggtcgcaggaaggtcatctgaccgtgtggatgggccagcaagtaacctgaagcagagtggggttgtgcctttcatcttccaagccaagaacgcagaccctgctgagttagagcagatcgtgctgtctccagcgtttatcctggctgcagagtcgcttcccaagattggagatcttcatccacagatagtgaatctcttaaaatcagtgcacaacggagcaccagcaccagtttcaggtgaaaaggacgtggtgtttctgcttgatggctctgagggcgtcaggagcggcttccctctgttgaaagagtttgtccagagagtggtggaaagcctggatgtgggccaggaccgggtccgcgtggccgtggtgcagtacagcgaccggaccaggcccgagttctacctgaattcatacatgaacaagcaggacgtcgtcaacgctgtccgccagctgaccctgctgggagggccgacccccaacaccggggccgccctggagtttgtcctgaggaacatcctggtcagctctgcgggaagcaggataacagaaggtgtgccccagctgctgatcgtcctcacggccgacaggtctggggatgatgtgcggaacccctccgtggtcgtgaagaggggtggggctgtgcccattggcattggcatcgggaacgctgacatcacagagatgcagaccatctccttcatcccggactttgccgtggccattcccacctttcgccagctggggaccgtccaacaggtcatctctgagagggtgacccagctcacccgcgaggagctgagcaggctgcagccggtgttgcagcctctaccgagcccaggtgttggtggcaagagggacgtggtctttctcatcgatgggtcccaaagtgccgggcctgagttccagtacgttcgcaccctcatagagaggctggttgactacctggacgtgggctttgacaccacccgggtggctgtcatccagttcagcgatgaccccaaggcggagttcctgctgaacgcccattccagcaaggatgaagtgcagaacgcggtgcagcggctgaggcccaagggagggcggcagatcaacgtgggcaatgccctggagtacgtgtccaggaacatcttcaagaggcccctggggagccgcattgaagagggcgtcccgcagttcctggtcctcatctcgtctggaaagtctgacgatgaggtggacgacccggcggtggagctcaagcagtttggcgtggcccctttcacgatcgccaggaacgcagaccaggaggagctggtgaagatctcgctgagccccgaatatgtgttctcggtgagcaccttccgggagctgcccagcctggagcagaaactgctgacgcccatcacgaccctgacctcagagcagatccagaagctcttagccagcactcgctatccacctccagcagttgagagtgatgctgcagacattgtctttctgatcgacagctctgagggagttaggccagatggctttgcacatattcgagattttgttagcaggattgttcgaagactcaacatcggccccagtaaagtgagagttggggtcgtgcagttcagcaatgatgtcttcccagaattctatctgaaaacctacagatcccaggccccggtgctggacgccatacggcgcctgaggctcagaggggggtccccactgaacactggcaaggctctcgaatttgtggcaagaaacctctttgttaagtctgcggggagtcgcatagaagacggggtgccccaacacctggtcctggtcctgggtggaaaatcccaggacgatgtgtccaggttcgcccaggtgatccgttcctcgggcattgtgagtttaggggtaggagaccggaacatcgacagaacagagctgcagaccatcaccaatgaccccagactggtcttcacagtgcgagagttcagagagcttcccaacatagaagaaagaatcatgaactcgtttggaccctccgcagccactcctgcacctccaggggtggacacccctcctccttcacggccagagaagaagaaagcagacattgtgttcctgttggatggttccatcaacttcaggagggacagtttccaggaagtgcttcgttttgtgtctgaaatagtggacacagtttatgaagatggcgactccatccaagtggggcttgtccagtacaactctgaccccactgacgaattcttcctgaaggacttctctaccaagaggcagattattgacgccatcaacaaagtggtctacaaagggggaagacacgccaacactaaggtgggccttgagcacctgcgggtaaaccactttgtgcctgaggcaggcagccgcctggaccagcgggtccctcagattgcctttgtgatcacgggaggaaagtcggtggaagatgcacaggatgtgagcctggccctcacccagaggggggtcaaagtgtttgctgttggagtgaggaatatcgactcggaggaggttggaaagatagcgtccaacagcgccacagcgttccgcgtgggcaacgtccaggagctgtccgaactgagcgagcaagttttggaaactttgcatgatgcgatgcatgaaaccctttgccctggtgtaactgatgctgccaaagcttgtaatctggatgtgattctggggtttgatggttctagagaccagaatgtttttgtggcccagaagggcttcgagtccaaggtggacgccatcttgaacagaatcagccagatgcacagggtcagctgcagcggtggccgctcgcccaccgtgcgtgtgtcagtggtggccaacacgccctcgggcccggtggaggcctttgactttgacgagtaccagccagagatgctcgagaagttccggaacatgcgcagccagcacccctacgtcctcacggaggacaccctgaaggtctacctgaacaagttcagacagtcctcgccggacagcgtgaaggtggtcattcattttactgatggagcagacggagatctggctgatttacacagagcatctgagaacctccgccaagaaggagtccgtgccttgatcctggtgggccttgaacgagtggtcaacttggagcggctaatgcatctggagtttgggcgagggtttatgtatgacaggcccctgaggcttaacttgctggacttggattatgaactagcggagcagcttgacaacattgccgagaaagcttgctgtggggttccctgcaagtgctctgggcagaggggagaccgcgggcccatcggcagcatcgggccaaagggtattcctggagaagacggctaccgaggctatcctggtgatgagggtggacccggtgagcgtggtccgcctggtgtgaacggcactcaaggtttccagggctgcccgggccagagaggagtaaagggctctcggggattcccaggagagaagggcgaagtaggagaaattggactggatggtctggatggtgaagatggagacaaaggattgcctggttcttctggagagaaagggaatcctggaagaaggggtgataaaggacctcgaggagagaaaggagaaagaggagatgttgggattcgaggggacccgggtaacccaggacaagacagccaggagagaggacccaaaggagaaaccggtgacctcggccccatgggtgtcccagggagagatggagtacctggaggacctggagaaactgggaagaatggtggctttggccgaaggggaccccccggagctaagggcaacaagggcggtcctggccagccgggctttgagggagagcaggggaccagaggtgcacagggcccagctggtcctgctggtcctccagggctgataggagaacaaggcatttctggacctcggggaagcggaggtgccgctggtgctcctggagaacgaggcagaaccggtccactgggaagaaagggtgagcccggagagccaggaccaaaaggaggaatcgggaaccggggccctcgtggggagacgggagatgacgggagagacggagttggcagtgaaggacgcagaggcaaaaaaggagaaagaggattccctggatacccaggaccaaagggtaacccaggtgaacctgggctaaatggaacaacaggacccaaaggcatcagaggccgaaggggaaattcgggacctccagggatagttggacagaagggagaccctggctacccaggaccagctggtcccaagggcaacaggggcgactccatcgatcaatgtgccctcatccaaagcatcaaagataaatgcccttgctgttacgggcccctggagtgccccgtcttcccaacagaactagcctttgctttagacacctctgagggagtcaaccaagacactttcggccggatgcgagatgtggtcttgagtattgtgaatgacctgaccattgctgagagcaactgcccacggggggcccgggtggctgtggtcacctacaacaacgaggtgaccacggagatccggtttgctgactccaagaggaagtcggtcctcctggacaagattaagaaccttcaggtggctctgacatccaaacagcagagtctggagactgccatgtcgtttgtggccaggaacacatttaagcgtgtgaggaacggattcctaatgaggaaagtggctgttttcttcagcaacacacccacaagagcatccccacagctcagagaggctgtgctcaagctctcagatgcggggatcacccccttgttccttacaaggcaggaagaccggcagctcatcaacgctttgcagatcaataacacagcagtggggcatgcgcttgtcctgcctgcagggagagacctcacagacttcctggagaatgtcctcacgtgtcatgtttgcttggacatctgcaacatcgacccatcctgtggatttggcagttggaggccttccttcagggacaggagagcggcagggagcgatgtggacatcgacatggctttcatcttagacagcgctgagaccaccaccctgttccagttcaatgagatgaagaagtacatagcgtacctggtcagacaactggacatgagcccagatcccaaggcctcccagcacttcgccagagtggcagttgtgcagcacgcgccctctgagtccgtggacaatgccagcatgccacctgtgaaggtggaattctccctgactgactatggctccaaggagaagctggtggacttcctcagcaggggaatgacacagttgcagggaaccagggccttaggcagtgccattgaatacaccatagagaatgtctttgaaagtgccccaaacccacgggacctgaaaattgtggtcctgatgctgacgggcgaggtgccggagcagcagctggaggaggcccagagagtcatcctgcaggccaaatgcaagggctacttcttcgtggtcctgggcattggcaggaaggtgaacatcaaggaggtatacaccttcgccagtgagccaaacgacgtcttcttcaaattagtggacaagtccaccgagctcaacgaggagcctttgatgcgcttcgggaggctgttgccgtccttcgtcagcagtgaaaatgctttttacttgtccccagatatcaggaaacagtgtgattggttccaaggggaccaacccacaaagaaccttgtgaagtttggtcacaaacaagtaaatgttccgaataacgttacttcaagtcctacatccaacccagtgacgacaacgaagccggtgactacgacgaagccggtgaccaccacaacaaagcctgtaaccaccacaacaaagcctgtgactattataaatcagccatctgtgaagccagccgctgcaaagccggcccctgcgaaacctgtggctgccaagcctgtggccacaaagacggccactgttagacccccagtggcggtgaagccagcaacagcagcgaagcctgtagcagcaaagccagcagctgtaagaccccccgctgctgctgcaaaaccagtggcgaccaagcctgaggtccctaggccacaggcagccaaaccagctgccaccaagccagccaccactaagcccgtggttaagatgctccgtgaagtccaggtgtttgagataacagagaacagcgccaaactccactgggagaggcctgagccccccggtccttatttttatgacctcaccgtcacctcagcccatgatcagtccctggttctgaagcagaacctcacggtcacggaccgcgtcattggaggcctgctcgctgggcagacataccatgtggctgtggtctgctacctgaggtctcaggtcagagccacctaccacggaagtttcagtacaaagaaatctcagcccccacctccacagccagcaaggtcagcttctagttcaaccatcaatctaatggtgagcacagaaccattggctctcactgaaacagatatatgcaagttgccgaaagacgaaggaacttgcagggatttcatattaaaatggtactatgatccaaacaccaaaagctgtgcaagattctggtatggaggttgtggtggaaacgaaaacaaatttggatcacagaaagaatgtgaaaaggtttgcgctcctgtgctcgccaaacccggagtcatcagtgtgatgggaacctaagcgtgggtggccaacatcatatacctcttgaagaagaaggagtcagccatcgccaacttgtctctgtagaagctccgggtgtagattcccttgcactgtatcatttcatgctttgatttacactcgaactcgggagggaacatcctgctgcatgacctatcagtatggtgctaatgtgtctgtggaccctcgctctctgtctccagcagttctctcgaatactttgaatgttgtgtaacagttagccactgctggtgtttatgtgaacattcctatcaatccaaattccctctggagtttcatgttatgcctgttgcaggcaaatgtaaagtctagaaaataatgcaaatgtcacggctactctatatacttttgcttggttcattttttttcccttttagttaagcatgactttagatgggaagcctgtgtatcgtggagaaacaagagaccaactttttcattccctgcccccaatttcccagactagatttcaagctaattttctttttctgaagcctctaacaaatgatctagttcagaaggaagcaaaatcccttaatctatgtgcaccgttgggaccaatgccttaattaaagaatttaaaaaagttgtaatagagaatatttttggcattcctctcaatgttgtgtgttttttttttttgtgtgctggagggaggggatttaattttaattttaaaatgtttaggaaatttatacaaagaaactttttaataaagtatattgaaagttt

SEQ ID NO: 56995 - DNA, 443 bp, Homo sapiens
atatcgtcgacccacgcgtccggggaagaaagggtgagcccggagagccaggaccaaaaggaggaatcgggaaccggggccctcgtggggagacgggagatgacgggagagacggagttggcagtgaaggacgcagaggcaaaaaatcgcttgaacctgggaggcggaggttgcagtgaaccgagatctcgccattgcactccagcctgggcaacaagagcaaaactccatcccaaaaaaagaagaccagcctgggcaacatggtgaaacctcatctctacaaaaaaatacaaaaattagctaggcatggtcatgtgtacctgtaatcccagccactccagaggctaaggcacaagaattgcttgaaccagggatgtggaggctgcagtgacctgaggttgtgccactacactccagcgggggatagagccagactttgtctc

SEQ ID NO: 56996 - DNA, 380 bp, Homo sapiens
cagtttggagctcagtcttccaccaaaggccgttcagttctcctgggctccagcctcctgcaaggactgcaagagttttcctccgcagctctgagtctccacttttttggtggagaaaggctgcaaaaagaaaaagagacgcagtgagtgggaaaagtatgcatcctattcaaacctaattgaatcgaggagcccagggacacacgccttcaggtttgctcaggggttcatatttggtgcttagacaaattcaaaatgaggaaacatcggcacttgcccttagtggccgtcttttgcctctttctctcaggctttcctacaactcatgcccagcagcagcaagcagcttcagataaaatggggatcctcagagatcacca

SEQ ID NO: 56997 - DNA, 10124 bp, Homo sapiens
gcttaaagaacatgtatttattatatttatttttcacgcaaattacccaaagcattgggggttagtgaatggaaaatagcaatttttacttttccttttttgtcaaggcccggttttgtattccaaactaaagaatgaatttataaaatgatggttggttgtctgtgataagacttccttctggtttaatcaggtgggtcttggggctcaaactgccacagggaatcatacttgagttaaagacagcccaggaaattgtttccccaatctggagcatgctactggcccattcatgatggtctctgagtatggaacttgggctagtgactgggcaccagcagctattgagtgcatgggctcaggtccctggttcccaggtaagtgagtctaccttcctgtattatcagtgaggtgtgaagtgtttagtagcagtatagtgtaaaccaaatttgtttaggaaggctttgcattgataggaagtaattgcttacatagtagaaaaatctaaaccaatgtctttttttaaagatgtcaaaaatggtgcggctgctgatataatatttctagtggattcctcttggaccattggagaggaacatttccaacttgttcgagagtttctatatgatgttgtaaaatccttagctgtgggagaaaatgatttccattttgctctggtccagttcaacggaaacccacataccgagttcctgttaaatacgtatcgtactaaacaagaagtcctttctcatatttccaacatgtcttatattgggggaaccaatcagactggaaaaggattagaatacataatgcaaagccacctcaccaaggctgctggaagccgggccggtgacggagtccctcaggttatcgtagtgttaactgatggacactcgaaggatggccttgctctgccctcagcggaacttaagtctgctgatgttaacgtgtttgcaattggagttgaggatgcagatgaaggagcgttaaaagaaatagcaagtgaaccgctcaatatgcatatgttcaacctagagaattttacctcacttcatgacatagtaggaaacttagtgtcctgtgtgcattcatccgtgagtccagaaagggctggggacacggaaacccttaaagacatcacagcacaagactctgctgacattattttccttattgatggatcaaacaacaccggaagtgtcaatttcgcagtcattctcgacttccttgtaaatctccttgagaaactcccaattggaactcagcagatccgagtgggggtggtccagtttagcgatgagcccagaaccatgttttccttggacacctactccaccaaggcccaggttctgggtgcagtgaaagccctcgggtttgctggtggggagttggccaatatcggcctcgcccttgatttcgtggtggagaaccacttcacccgggcagggggcagccgcgtggaggaaggggttccccaggtgctggtcctcataagtgccgggccttctagtgacgagattcgctacggggtggtagcactgaagcaggctagcgtgttctcattcggccttggagcccaggccgcctccagggcagagcttcagcacatagctaccgatgacaacttggtgtttactgtcccggaattccgtagctttggggacctccaggagaaattactgccgtacattgttggcgtggcccaaaggcacattgtcttgaaaccgccaaccattgtcacacaagtcattgaagtcaacaagagagacatagtcttcctggtggatggctcatctgcactgggactggccaacttcaatgccatccgagacttcattgctaaagtcatccagaggctggaaatcggacaggatcttatccaggtggcagtggcccagtatgcagacactgtgaggcctgaattttatttcaatacccatccaacaaaaagggaagtcataaccgctgtgcggaaaatgaagcccctggacggctcggccctgtacacgggctctgctctagactttgttcgtaacaacctattcacgagttcagccggctaccgggctgccgaggggattcctaagcttttggtgctgatcacaggtggtaagtccctagatgaaatcagccagcctgcccaggagctgaagagaagcagcataatggcctttgccattgggaacaagggtgccgatcaggctgagctggaagagatcgctttcgactcctccctggtgttcatcccagctgagttccgagccgccccattgcaaggcatgctgcctggcttgctggcacctctcaggaccctctctggaacccctgaagagagcaagcgagacattctgttcctctttgacggctcagccaatcttgtgggccagttccctgttgtccgtgactttctctacaagattatcgatgagctcaatgtgaagccagaggggacccgaattgcggtggctcagtacagcgatgatgtcaaggtggagtcccgttttgatgagcaccagagtaagcctgagatcctgaatcttgtgaagagaatgaagatcaagacgggcaaagccctcaacctgggctacgcgctggactatgcacagaggtacatttttgtgaagtctgctggcagccggatcgaggatggagtgcttcagttcctggtgctgctggtcgcaggaaggtcatctgaccgtgtggatgggccagcaagtaacctgaagcagagtggggttgtgcctttcatcttccaagccaagaacgcagaccctgctgagttagagcagatcgtgctgtctccagcgtttatcctggctgcagagtcgcttcccaagattggagatcttcatccacagatagtgaatctcttaaaatcagtgcacaacggagcaccagcaccagtttcaggtgaaaaggacgtggtgtttctgcttgatggctctgagggcgtcaggagcggcttccctctgttgaaagagtttgtccagagagtggtggaaagcctggatgtgggccaggaccgggtccgcgtggccgtggtgcagtacagcgaccggaccaggcccgagttctacctgaattcatacatgaacaagcaggacgtcgtcaacgctgtccgccagctgaccctgctgggagggccgacccccaacaccggggccgccctggagtttgtcctgaggaacatcctggtcagctctgcgggaagcaggataacagaaggtgtgccccagctgctgatcgtcctcacggccgacaggtctggggatgatgtgcggaacccctccgtggtcgtgaagaggggtggggctgtgcccattggcattggcatcgggaacgctgacatcacagagatgcagaccatctccttcatcccggactttgccgtggccattcccacctttcgccagctggggaccgtccaacaggtcatctctgagagggtgacccagctcacccgcgaggagctgagcaggctgcagccggtgttgcagcctctaccgagcccaggtgttggtggcaagagggacgtggtctttctcatcgatgggtcccaaagtgccgggcctgagttccagtacgttcgcaccctcatagagaggctggttgactacctggacgtgggctttgacaccacccgggtggctgtcatccagttcagcgatgaccccaaggcggagttcctgctgaacgcccattccagcaaggatgaagtgcagaacgcggtgcagcggctgaggcccaagggagggcggcagatcaacgtgggcaatgccctggagtacgtgtccaggaacatcttcaagaggcccctggggagccgcattgaagagggcgtcccgcagttcctggtcctcatctcgtctggaaagtctgacgatgaggtggacgacccggcggtggagctcaagcagtttggcgtggcccctttcacgatcgccaggaacgcagaccaggaggagctggtgaagatctcgctgagccccgaatatgtgttctcggtgagcaccttccgggagctgcccagcctggagcagaaactgctgacgcccatcacgaccctgacctcagagcagatccagaagctcttagccagcactcgctatccacctccagcagttgagagtgatgctgcagacattgtctttctgatcgacagctctgagggagttaggccagatggctttgcacatattcgagattttgttagcaggattgttcgaagactcaacatcggccccagtaaagtgagagttggggtcgtgcagttcagcaatgatgtcttcccagaattctatctgaaaacctacagatcccaggccccggtgctggacgccatacggcgcctgaggctcagaggggggtccccactgaacactggcaaggctctcgaatttgtggcaagaaacctctttgttaagtctgcggggagtcgcatagaagacggggtgccccaacacctggtcctggtcctgggtggaaaatcccaggacgatgtgtccaggttcgcccaggtgatccgttcctcgggcattgtgagtttaggggtaggagaccggaacatcgacagaacagagctgcagaccatcaccaatgaccccagactggtcttcacagtgcgagagttcagagagcttcccaacatagaagaaagaatcatgaactcgtttggaccctccgcagccactcctgcacctccaggggtggacacccctcctccttcacggccagagaagaagaaagcagacattgtgttcctgttggatggttccatcaacttcaggagggacagtttccaggaagtgcttcgttttgtgtctgaaatagtggacacagtttatgaagatggcgactccatccaagtggggcttgtccagtacaactctgaccccactgacgaattcttcctgaaggacttctctaccaagaggcagattattgacgccatcaacaaagtggtctacaaagggggaagacacgccaacactaaggtgggccttgagcacctgcgggtaaaccactttgtgcctgaggcaggcagccgcctggaccagcgggtccctcagattgcctttgtgatcacgggaggaaagtcggtggaagatgcacaggatgtgagcctggccctcacccagaggggggtcaaagtgtttgctgttggagtgaggaatatcgactcggaggaggttggaaagatagcgtccaacagcgccacagcgttccgcgtgggcaacgtccaggagctgtccgaactgagcgagcaagttttggaaactttgcatgatgcgatgcatgaaaccctttgccctggtgtaactgatgctgccaaagcttgtaatctggatgtgattctggggtttgatggttctagagaccagaatgtttttgtggcccagaagggcttcgagtccaaggtggacgccatcttgaacagaatcagccagatgcacagggtcagctgcagcggtggccgctcgcccaccgtgcgtgtgtcagtggtggccaacacgccctcgggcccggtggaggcctttgactttgacgagtaccagccagagatgctcgagaagttccggaacatgcgcagccagcacccctacgtcctcacggaggacaccctgaaggtctacctgaacaagttcagacagtcctcgccggacagcgtgaaggtggtcattcattttactgatggagcagacggagatctggctgatttacacagagcatctgagaacctccgccaagaaggagtccgtgccttgatcctggtgggccttgaacgagtggtcaacttggagcggctaatgcatctggagtttgggcgagggtttatgtatgacaggcccctgaggcttaacttgctggacttggattatgaactagcggagcagcttgacaacattgccgagaaagcttgctgtggggttccctgcaagtgctctgggcagaggggagaccgcgggcccatcggcagcatcgggccaaagggtattcctggagaagacggctaccgaggctatcctggtgatgagggtggacccggtgagcgtggtccgcctggtgtgaacggcactcaaggtttccagggctgcccgggccagagaggagtaaagggctctcggggattcccaggagagaagggcgaagtaggagaaattggactggatggtctggatggtgaagatggagacaaaggattgcctggttcttctggagagaaagggaatcctggaagaaggggtgataaaggacctcgaggagagaaaggagaaagaggagatgttgggattcgaggggacccgggtaacccaggacaagacagccaggagagaggacccaaaggagaaaccggtgacctcggccccatgggtgtcccagggagagatggagtacctggaggacctggagaaactgggaagaatggtggctttggccgaaggggaccccccggagctaagggcaacaagggcggtcctggccagccgggctttgagggagagcaggggaccagaggtgcacagggcccagctggtcctgctggtcctccagggctgataggagaacaaggcatttctggacctcggggaagcggaggtgccgctggtgctcctggagaacgaggcagaaccggtccactgggaagaaagggtgagcccggagagccaggaccaaaaggaggaatcgggaaccggggccctcgtggggagacgggagatgacgggagagacggagttggcagtgaaggacgcagaggcaaaaaaggagaaagaggattccctggatacccaggaccaaagggtaacccaggtgaacctgggctaaatggaacaacaggacccaaaggcatcagaggccgaaggggaaattcgggacctccagggatagttggacagaagggagaccctggctacccaggaccagctggtcccaagggcaacaggggcgactccatcgatcaatgtgccctcatccaaagcatcaaagataaatgcccttgctgttacgggcccctggagtgccccgtcttcccaacagaactagcctttgctttagacacctctgagggagtcaaccaagacactttcggccggatgcgagatgtggtcttgagtattgtgaatgacctgaccattgctgagagcaactgcccacggggggcccgggtggctgtggtcacctacaacaacgaggtgaccacggagatccggtttgctgactccaagaggaagtcggtcctcctggacaagattaagaaccttcaggtggctctgacatccaaacagcagagtctggagactgccatgtcgtttgtggccaggaacacatttaagcgtgtgaggaacggattcctaatgaggaaagtggctgttttcttcagcaacacacccacaagagcatccccacagctcagagaggctgtgctcaagctctcagatgcggggatcacccccttgttccttacaaggcaggaagaccggcagctcatcaacgctttgcagatcaataacacagcagtggggcatgcgcttgtcctgcctgcagggagagacctcacagacttcctggagaatgtcctcacgtgtcatgtttgcttggacatctgcaacatcgacccatcctgtggatttggcagttggaggccttccttcagggacaggagagcggcagggagcgatgtggacatcgacatggctttcatcttagacagcgctgagaccaccaccctgttccagttcaatgagatgaagaagtacatagcgtacctggtcagacaactggacatgagcccagatcccaaggcctcccagcacttcgccagagtggcagttgtgcagcacgcgccctctgagtccgtggacaatgccagcatgccacctgtgaaggtggaattctccctgactgactatggctccaaggagaagctggtggacttcctcagcaggggaatgacacagttgcagggaaccagggccttaggcagtgccattgaatacaccatagagaatgtctttgaaagtgccccaaacccacgggacctgaaaattgtggtcctgatgctgacgggcgaggtgccggagcagcagctggaggaggcccagagagtcatcctgcaggccaaatgcaagggctacttcttcgtggtcctgggcattggcaggaaggtgaacatcaaggaggtatacaccttcgccagtgagccaaacgacgtcttcttcaaattagtggacaagtccaccgagctcaacgaggagcctttgatgcgcttcgggaggctgttgccgtccttcgtcagcagtgaaaatgctttttacttgtccccagatatcaggaaacagtgtgattggttccaaggggaccaacccacaaagaaccttgtgaagtttggtcacaaacaagtaaatgttccgaataacgttacttcaagtcctacatccaacccagtgacgacaacgaagccggtgactacgacgaagccggtgaccaccacaacaaagcctgtaaccaccacaacaaagcctgtgactattataaatcagccatctgtgaagccagccgctgcaaagccggcccctgcgaaacctgtggctgccaagcctgtggccacaaagacggccactgttagacccccagtggcggtgaagccagcaacagcagcgaagcctgtagcagcaaagccagcagctgtaagaccccccgctgctgctgcaaaaccagtggcgaccaagcctgaggtccctaggccacaggcagccaaaccagctgccaccaagccagccaccactaagcccgtggttaagatgctccgtgaagtccaggtgtttgagataacagagaacagcgccaaactccactgggagaggcctgagccccccggtccttatttttatgacctcaccgtcacctcagcccatgatcagtccctggttctgaagcagaacctcacggtcacggaccgcgtcattggaggcctgctcgctgggcagacataccatgtggctgtggtctgctacctgaggtctcaggtcagagccacctaccacggaagtttcagtacaaagaaatctcagcccccacctccacagccagcaaggtcagcttctagttcaaccatcaatctaatggtgagcacagaaccattggctctcactgaaacagatatatgcaagttgccgaaagacgaaggaacttgcagggatttcatattaaaatggtactatgatccaaacaccaaaagctgtgcaagattctggtatggaggttgtggtggaaacgaaaacaaatttggatcacagaaagaatgtgaaaaggtttgcgctcctgtgctcgccaaacccggagtcatcagtgtgatgggaacctaagcgtgggtggccaacatcatatacctcttgaagaagaaggagtcagccatcgccaacttgtctctgtagaagctccgggtgtagattcccttgcactgtatcatttcatgctttgatttacactcgaactcgggagggaacatcctgctgcatgacctatcagtatggtgctaatgtgtctgtggaccctcgctctctgtctccagcagttctctcgaatactttgaatgttgtgtaacagttagccactgctggtgtttatgtgaacattcctatcaatccaaattccctctggagtttcatgttatgcctgttgcaggcaaatgtaaagtctagaaaataatgcaaatgtcacggctactctatatacttttgcttggttcattttttttcccttttagttaagcatgactttagatgggaagcctgtgtatcgtggagaaacaagagaccaactttttcattccctgcccccaatttcccagactagatttcaagctaattttctttttctgaagcctctaacaaatgatctagttcagaaggaagcaaaatcccttaatctatgtgcaccgttgggaccaatgccttaattaaagaatttaaaaaagttgtaatagagaatatttttggcattcctctcaatgttgtgtgttttttttttttgtgtgctggagggaggggatttaattttaattttaaaatgtttaggaaatttatacaaagaaactttttaataaagtatattgaaagttt

SEQ ID NO: 56998 - DNA, 9321 bp, Homo sapiens
cagtttggagctcagtcttccaccaaaggccgttcagttctcctgggctccagcctcctgcaaggactgcaagagttttcctccgcagctctgagtctccacttttttggtggagaaaggctgcaaaaagaaaaagagacgcagtgagtgggaaaagtatgcatcctattcaaacctaattgaatcgaggagcccagggacacacgccttcaggtttgctcaggggttcatatttggtgcttagacaaattcaaaatgaggaaacatcggcacttgcccttagtggccgtcttttgcctctttctctcaggctttcctacaactcatgcccagcagcagcaagcagtcattgaagtcaacaagagagacatagtcttcctggtggatggctcatctgcactgggactggccaacttcaatgccatccgagacttcattgctaaagtcatccagaggctggaaatcggacaggatcttatccaggtggcagtggcccagtatgcagacactgtgaggcctgaattttatttcaatacccatccaacaaaaagggaagtcataaccgctgtgcggaaaatgaagcccctggacggctcggccctgtacacgggctctgctctagactttgttcgtaacaacctattcacgagttcagccggctaccgggctgccgaggggattcctaagcttttggtgctgatcacaggtggtaagtccctagatgaaatcagccagcctgcccaggagctgaagagaagcagcataatggcctttgccattgggaacaagggtgccgatcaggctgagctggaagagatcgctttcgactcctccctggtgttcatcccagctgagttccgagccgccccattgcaaggcatgctgcctggcttgctggcacctctcaggaccctctctggaacccctgaagttcactcaaacaaaagagatatcatctttcttttggatggatcagccaacgttggaaaaaccaatttcccttatgtgcgcgactttgtaatgaacctagttaacagccttgatattggaaatgacaatattcgtgttggtttagtgcaatttagtgacactcctgtaacggagttctctttaaacacataccagaccaagtcagatatccttggtcatctgaggcagctgcagctccagggaggttcgggcctgaacacaggctcagccctaagctatgtctatgccaaccacttcacggaagctggcggcagcaggatccgtgaacacgtgccgcagctcctgcttctgctcacagctgggcagtctgaggactcctatttgcaagctgccaacgccttgacacgcgcgggcatcctgactttttgtgtgggagctagccaggcgaataaggcagagcttgagcagattgcttttaacccaagcctggtgtatctcatggatgatttcagctccctgccagctttgcctcagcagctgattcagcccctaaccacatatgttagtggaggtgtggaggaagtaccactcgctcagccagagagcaagcgagacattctgttcctctttgacggctcagccaatcttgtgggccagttccctgttgtccgtgactttctctacaagattatcgatgagctcaatgtgaagccagaggggacccgaattgcggtggctcagtacagcgatgatgtcaaggtggagtcccgttttgatgagcaccagagtaagcctgagatcctgaatcttgtgaagagaatgaagatcaagacgggcaaagccctcaacctgggctacgcgctggactatgcacagaggtacatttttgtgaagtctgctggcagccggatcgaggatggagtgcttcagttcctggtgctgctggtcgcaggaaggtcatctgaccgtgtggatgggccagcaagtaacctgaagcagagtggggttgtgcctttcatcttccaagccaagaacgcagaccctgctgagttagagcagatcgtgctgtctccagcgtttatcctggctgcagagtcgcttcccaagattggagatcttcatccacagatagtgaatctcttaaaatcagtgcacaacggagcaccagcaccagtttcaggtgaaaaggacgtggtgtttctgcttgatggctctgagggcgtcaggagcggcttccctctgttgaaagagtttgtccagagagtggtggaaagcctggatgtgggccaggaccgggtccgcgtggccgtggtgcagtacagcgaccggaccaggcccgagttctacctgaattcatacatgaacaagcaggacgtcgtcaacgctgtccgccagctgaccctgctgggagggccgacccccaacaccggggccgccctggagtttgtcctgaggaacatcctggtcagctctgcgggaagcaggataacagaaggtgtgccccagctgctgatcgtcctcacggccgacaggtctggggatgatgtgcggaacccctccgtggtcgtgaagaggggtggggctgtgcccattggcattggcatcgggaacgctgacatcacagagatgcagaccatctccttcatcccggactttgccgtggccattcccacctttcgccagctggggaccgtccaacaggtcatctctgagagggtgacccagctcacccgcgaggagctgagcaggctgcagccggtgttgcagcctctaccgagcccaggtgttggtggcaagagggacgtggtctttctcatcgatgggtcccaaagtgccgggcctgagttccagtacgttcgcaccctcatagagaggctggttgactacctggacgtgggctttgacaccacccgggtggctgtcatccagttcagcgatgaccccaaggcggagttcctgctgaacgcccattccagcaaggatgaagtgcagaacgcggtgcagcggctgaggcccaagggagggcggcagatcaacgtgggcaatgccctggagtacgtgtccaggaacatcttcaagaggcccctggggagccgcattgaagagggcgtcccgcagttcctggtcctcatctcgtctggaaagtctgacgatgaggtggacgacccggcggtggagctcaagcagtttggcgtggcccctttcacgatcgccaggaacgcagaccaggaggagctggtgaagatctcgctgagccccgaatatgtgttctcggtgagcaccttccgggagctgcccagcctggagcagaaactgctgacgcccatcacgaccctgacctcagagcagatccagaagctcttagccagcactcgctatccacctccagcagttgagagtgatgctgcagacattgtctttctgatcgacagctctgagggagttaggccagatggctttgcacatattcgagattttgttagcaggattgttcgaagactcaacatcggccccagtaaagtgagagttggggtcgtgcagttcagcaatgatgtcttcccagaattctatctgaaaacctacagatcccaggccccggtgctggacgccatacggcgcctgaggctcagaggggggtccccactgaacactggcaaggctctcgaatttgtggcaagaaacctctttgttaagtctgcggggagtcgcatagaagacggggtgccccaacacctggtcctggtcctgggtggaaaatcccaggacgatgtgtccaggttcgcccaggtgatccgttcctcgggcattgtgagtttaggggtaggagaccggaacatcgacagaacagagctgcagaccatcaccaatgaccccagactggtcttcacagtgcgagagttcagagagcttcccaacatagaagaaagaatcatgaactcgtttggaccctccgcagccactcctgcacctccaggggtggacacccctcctccttcacggccagagaagaagaaagcagacattgtgttcctgttggatggttccatcaacttcaggagggacagtttccaggaagtgcttcgttttgtgtctgaaatagtggacacagtttatgaagatggcgactccatccaagtggggcttgtccagtacaactctgaccccactgacgaattcttcctgaaggacttctctaccaagaggcagattattgacgccatcaacaaagtggtctacaaagggggaagacacgccaacactaaggtgggccttgagcacctgcgggtaaaccactttgtgcctgaggcaggcagccgcctggaccagcgggtccctcagattgcctttgtgatcacgggaggaaagtcggtggaagatgcacaggatgtgagcctggccctcacccagaggggggtcaaagtgtttgctgttggagtgaggaatatcgactcggaggaggttggaaagatagcgtccaacagcgccacagcgttccgcgtgggcaacgtccaggagctgtccgaactgagcgagcaagttttggaaactttgcatgatgcgatgcatgaaaccctttgccctggtgtaactgatgctgccaaagcttgtaatctggatgtgattctggggtttgatggttctagagaccagaatgtttttgtggcccagaagggcttcgagtccaaggtggacgccatcttgaacagaatcagccagatgcacagggtcagctgcagcggtggccgctcgcccaccgtgcgtgtgtcagtggtggccaacacgccctcgggcccggtggaggcctttgactttgacgagtaccagccagagatgctcgagaagttccggaacatgcgcagccagcacccctacgtcctcacggaggacaccctgaaggtctacctgaacaagttcagacagtcctcgccggacagcgtgaaggtggtcattcattttactgatggagcagacggagatctggctgatttacacagagcatctgagaacctccgccaagaaggagtccgtgccttgatcctggtgggccttgaacgagtggtcaacttggagcggctaatgcatctggagtttgggcgagggtttatgtatgacaggcccctgaggcttaacttgctggacttggattatgaactagcggagcagcttgacaacattgccgagaaagcttgctgtggggttccctgcaagtgctctgggcagaggggagaccgcgggcccatcggcagcatcgggccaaagggtattcctggagaagacggctaccgaggctatcctggtgatgagggtggacccggtgagcgtggtccgcctggtgtgaacggcactcaaggtttccagggctgcccgggccagagaggagtaaagggctctcggggattcccaggagagaagggcgaagtaggagaaattggactggatggtctggatggtgaagatggagacaaaggattgcctggttcttctggagagaaagggaatcctggaagaaggggtgataaaggacctcgaggagagaaaggagaaagaggagatgttgggattcgaggggacccgggtaacccaggacaagacagccaggagagaggacccaaaggagaaaccggtgacctcggccccatgggtgtcccagggagagatggagtacctggaggacctggagaaactgggaagaatggtggctttggccgaaggggaccccccggagctaagggcaacaagggcggtcctggccagccgggctttgagggagagcaggggaccagaggtgcacagggcccagctggtcctgctggtcctccagggctgataggagaacaaggcatttctggacctcggggaagcggaggtgccgctggtgctcctggagaacgaggcagaaccggtccactgggaagaaagggtgagcccggagagccaggaccaaaaggaggaatcgggaaccggggccctcgtggggagacgggagatgacgggagagacggagttggcagtgaaggacgcagaggcaaaaaaggagaaagaggattccctggatacccaggaccaaagggtaacccaggtgaacctgggctaaatggaacaacaggacccaaaggcatcagaggccgaaggggaaattcgggacctccagggatagttggacagaagggagaccctggctacccaggaccagctggtcccaagggcaacaggggcgactccatcgatcaatgtgccctcatccaaagcatcaaagataaatgcccttgctgttacgggcccctggagtgccccgtcttcccaacagaactagcctttgctttagacacctctgagggagtcaaccaagacactttcggccggatgcgagatgtggtcttgagtattgtgaatgacctgaccattgctgagagcaactgcccacggggggcccgggtggctgtggtcacctacaacaacgaggtgaccacggagatccggtttgctgactccaagaggaagtcggtcctcctggacaagattaagaaccttcaggtggctctgacatccaaacagcagagtctggagactgccatgtcgtttgtggccaggaacacatttaagcgtgtgaggaacggattcctaatgaggaaagtggctgttttcttcagcaacacacccacaagagcatccccacagctcagagaggctgtgctcaagctctcagatgcggggatcacccccttgttccttacaaggcaggaagaccggcagctcatcaacgctttgcagatcaataacacagcagtggggcatgcgcttgtcctgcctgcagggagagacctcacagacttcctggagaatgtcctcacgtgtcatgtttgcttggacatctgcaacatcgacccatcctgtggatttggcagttggaggccttccttcagggacaggagagcggcagggagcgatgtggacatcgacatggctttcatcttagacagcgctgagaccaccaccctgttccagttcaatgagatgaagaagtacatagcgtacctggtcagacaactggacatgagcccagatcccaaggcctcccagcacttcgccagagtggcagttgtgcagcacgcgccctctgagtccgtggacaatgccagcatgccacctgtgaaggtggaattctccctgactgactatggctccaaggagaagctggtggacttcctcagcaggggaatgacacagttgcagggaaccagggccttaggcagtgccattgaatacaccatagagaatgtctttgaaagtgccccaaacccacgggacctgaaaattgtggtcctgatgctgacgggcgaggtgccggagcagcagctggaggaggcccagagagtcatcctgcaggccaaatgcaagggctacttcttcgtggtcctgggcattggcaggaaggtgaacatcaaggaggtatacaccttcgccagtgagccaaacgacgtcttcttcaaattagtggacaagtccaccgagctcaacgaggagcctttgatgcgcttcgggaggctgttgccgtccttcgtcagcagtgaaaatgctttttacttgtccccagatatcaggaaacagtgtgattggttccaaggggaccaacccacaaagaaccttgtgaagtttggtcacaaacaagtaaatgttccgaataacgttacttcaagtcctacatccaacccagtgacgacaacgaagccggtgactacgacgaagccggtgaccaccacaacaaagcctgtaaccaccacaacaaagcctgtgactattataaatcagccatctgtgaagccagccgctgcaaagccggcccctgcgaaacctgtggctgccaagcctgtggccacaaagacggccactgttagacccccagtggcggtgaagccagcaacagcagcgaagcctgtagcagcaaagccagcagctgtaagaccccccgctgctgctgcaaaaccagtggcgaccaagcctgaggtccctaggccacaggcagccaaaccagctgccaccaagccagccaccactaagcccgtggttaagatgctccgtgaagtccaggtgtttgagataacagagaacagcgccaaactccactgggagaggcctgagccccccggtccttatttttatgacctcaccgtcacctcagcccatgatcagtccctggttctgaagcagaacctcacggtcacggaccgcgtcattggaggcctgctcgctgggcagacataccatgtggctgtggtctgctacctgaggtctcaggtcagagccacctaccacggaagtttcagtacaaagaaatctcagcccccacctccacagccagcaaggtcagcttctagttcaaccatcaatctaatggtgagcacagaaccattggctctcactgaaacagatatatgcaagttgccgaaagacgaaggaacttgcagggatttcatattaaaatggtactatgatccaaacaccaaaagctgtgcaagattctggtatggaggttgtggtggaaacgaaaacaaatttggatcacagaaagaatgtgaaaaggtttgcgctcctgtgctcgccaaacccggagtcatcagtgtgatgggaacctaagcgtgggtggccaacatcatatacctcttgaagaagaaggagtcagccatcgccaacttgtctctgtagaagctccgggtgtagattcccttgcactgtatcatttcatgctttgatttacactcgaactcgggagggaacatcctgctgcatgacctatcagtatggtgctaatgtgtctgtggaccctcgctctctgtctccagcagttctctcgaatactttgaatgttgtgtaacagttagccactgctggtgtttatgtgaacattcctatcaatccaaattccctctggagtttcatgttatgcctgttgcaggcaaatgtaaagtctagaaaataatgcaaatgtcacggctactctatatacttttgcttggttcattttttttcccttttagttaagcatgactttagatgggaagcctgtgtatcgtggagaaacaagagaccaactttttcattccctgcccccaatttcccagactagatttcaagctaattttctttttctgaagcctctaacaaatgatctagttcagaaggaagcaaaatcccttaatctatgtgcaccgttgggaccaatgccttaattaaagaatttaaaaaagttgtaatagagaatatttttggcattcctctcaatgttgtgtgttttttttttttgtgtgctggagggaggggatttaattttaattttaaaatgtttaggaaatttatacaaagaaactttttaataaagtatattgaaagttt

SEQ ID NO: 56999 - DNA, 4042 bp, Homo sapiens
cgccgctcgctacccctcatgcctgctcccccgctccccctccctgggataccccggagagaagggcgaagtaggagaaattggactggatggtctggatggtgaagatggagacaaaggattgcctggttcttctggagagaaagggaatcctggaagaaggggtgataaaggacctcgaggagagaaaggagaaagaggagatgttgggattcgaggggacccgggtaacccaggacaagacagccaggagagaggacccaaaggagaaaccggtgacctcggccccatgggtgtcccagggagagatggagtacctggaggacctggagaaactgggaagaatggtggctttggccgaaggggaccccccggagctaagggcaacaagggcggtcctggccagccgggctttgagggagagcaggggaccagaggtgcacagggcccagctggtcctgctggtcctccagggctgataggagaacaaggcatttctggacctcggggaagcggaggtgccgctggtgctcctggagaacgaggcagaaccggtccactgggaagaaagggtgagcccggagagccaggaccaaaaggaggaatcgggaaccggggccctcgtggggagacgggagatgacgggagagacggagttggcagtgaaggacgcagaggcaaaaaaggagaaagaggattccctggatacccaggaccaaagggtaacccaggtgaacctgggctaaatggaacaacaggacccaaaggcatcagaggccgaaggggaaattcgggacctccagggatagttggacagaagggagaccctggctacccaggaccagctggtcccaagggcaacaggggcgactccatcgatcaatgtgccctcatccaaagcatcaaagataaatgcccttgctgttacgggcccctggagtgccccgtcttcccaacagaactagcctttgctttagacacctctgagggagtcaaccaagacactttcggccggatgcgagatgtggtcttgagtattgtgaatgacctgaccattgctgagagcaactgcccacggggggcccgggtggctgtggtcacctacaacaacgaggtgaccacggagatccggtttgctgactccaagaggaagtcggtcctcctggacaagattaagaaccttcaggtggctctgacatccaaacagcagagtctggagactgccatgtcgtttgtggccaggaacacatttaagcgtgtgaggaacggattcctaatgaggaaagtggctgttttcttcagcaacacacccacaagagcatccccacagctcagagaggctgtgctcaagctctcagatgcggggatcacccccttgttccttacaaggcaggaagaccggcagctcatcaacgctttgcagatcaataacacagcagtggggcatgcgcttgtcctgcctgcagggagagacctcacagacttcctggagaatgtcctcacgtgtcatgtttgcttggacatctgcaacatcgacccatcctgtggatttggcagttggaggccttccttcagggacaggagagcggcagggagcgatgtggacatcgacatggctttcatcttagacagcgctgagaccaccaccctgttccagttcaatgagatgaagaagtacatagcgtacctggtcagacaactggacatgagcccagatcccaaggcctcccagcacttcgccagagtggcagttgtgcagcacgcgccctctgagtccgtggacaatgccagcatgccacctgtgaaggtggaattctccctgactgactatggctccaaggagaagctggtggacttcctcagcaggggaatgacacagttgcagggaaccagggccttaggcagtgccattgaatacaccatagagaatgtctttgaaagtgccccaaacccacgggacctgaaaattgtggtcctgatgctgacgggcgaggtgccggagcagcagctggaggaggcccagagagtcatcctgcaggccaaatgcaagggctacttcttcgtggtcctgggcattggcaggaaggtgaacatcaaggaggtatacaccttcgccagtgagccaaacgacgtcttcttcaaattagtggacaagtccaccgagctcaacgaggagcctttgatgcgcttcgggaggctgttgccgtccttcgtcagcagtgaaaatgctttttacttgtccccagatatcaggaaacagtgtgattggttccaaggggaccaacccacaaagaaccttgtgaagtttggtcacaaacaagtaaatgttccgaataacgttacttcaagtcctacatccaacccagtgacgacaacgaagccggtgactacgacgaagccggtgaccaccacaacaaagcctgtaaccaccacaacaaagcctgtgactattataaatcagccatctgtgaagccagccgctgcaaagccggcccctgcgaaacctgtggctgccaagcctgtggccacaaagacggccactgttagacccccagtggcggtgaagccagcaacagcagcgaagcctgtagcagcaaagccagcagctgtaagaccccccgctgctgctgcaaaaccagtggcgaccaagcctgaggtccctaggccacaggcagccaaaccagctgccaccaagccagccaccactaagcccgtggttaagatgctccgtgaagtccaggtgtttgagataacagagaacagcgccaaactccactgggagaggcctgagccccccggtccttatttttatgacctcaccgtcacctcagcccatgatcagtccctggttctgaagcagaacctcacggtcacggaccgcgtcattggaggcctgctcgctgggcagacataccatgtggctgtggtctgctacctgaggtctcaggtcagagccacctaccacggaagtttcagtacaaagaaatctcagcccccacctccacagccagcaaggtcagcttctagttcaaccatcaatctaatggtgagcacagaaccattggctctcactgaaacagatatatgcaagttgccgaaagacgaaggaacttgcagggatttcatattaaaatggtactatgatccaaacaccaaaagctgtgcaagattctggtatggaggttgtggtggaaacgaaaacaaatttggatcacagaaagaatgtgaaaaggtttgcgctcctgtgctcgccaaacccggagtcatcagtgtgatgggaacctaagcgtgggtggccaacatcatatacctcttgaagaagaaggagtcagccatcgccaacttgtctctgtagaagctccgggtgtagattcccttgcactgtatcatttcatgctttgatttacactcgaactcgggagggaacatcctgctgcatgacctatcagtatggtgctaatgtgtctgtggaccctcgctctctgtctccagcagttctctcgaatactttgaatgttgtgtaacagttagccactgctggtgtttatgtgaacattcctatcaatccaaattccctctggagtttcatgttatgcctgttgcaggcaaatgtaaagtctagaaaataatgcaaatgtcacggctactctatatacttttgcttggttcattttttttcccttttagttaagcatgactttagatgggaagcctgtgtatcgtggagaaacaagagaccaactttttcattccctgcccccaatttcccagactagatttcaagctaattttctttttctgaagcctctaacaaatgatctagttcagaaggaagcaaaatcccttaatctatgtgcaccgttgggaccaatgccttaattaaagaatttaaaaaagttgtaatagagaatatttttggcattcctctcaatgttgtgtgttttttttttttgtgtgctggagggaggggatttaattttaattttaaaatgtttaggaaatttatacaaagaaactttttaataaagtatattgaaagttt

SEQ ID NO: 57000 - DNA, 7043 bp, Homo sapiens
gcttaaagaacatgtatttattatatttatttttcacgcaaattacccaaagcattgggggttagtgaatggaaaatagcaatttttacttttccttttttgtcaaggcccggttttgtattccaaactaaagaatgaatttataaaatgatggttggttgtctgtgataagacttccttctggtttaatcaggtgggtcttggggctcaaactgccacagggaatcatacttgagttaaagacagcccaggaaattgtttccccaatctggagcatgctactggcccattcatgatggtctctgagtatggaacttgggctagtgactgggcaccagcagctattgagtgcatgggctcaggtccctggttcccaggtaagtgagtctaccttcctgtattatcagtgaggtgtgaagtgtttagtagcagtatagtgtaaaccaaatttgtttaggaaggctttgcattgataggaagtaattgcttacatagtagaaaaatctaaaccaatgtctttttttaaagatgtcaaaaatggtgcggctgctgatataatatttctagtggattcctcttggaccattggagaggaacatttccaacttgttcgagagtttctatatgatgttgtaaaatccttagctgtgggagaaaatgatttccattttgctctggtccagttcaacggaaacccacataccgagttcctgttaaatacgtatcgtactaaacaagaagtcctttctcatatttccaacatgtcttatattgggggaaccaatcagactggaaaaggattagaatacataatgcaaagccacctcaccaaggctgctggaagccgggccggtgacggagtccctcaggttatcgtagtgttaactgatggacactcgaaggatggccttgctctgccctcagcggaacttaagtctgctgatgttaacgtgtttgcaattggagttgaggatgcagatgaaggagcgttaaaagaaatagcaagtgaaccgctcaatatgcatatgttcaacctagagaattttacctcacttcatgacatagtaggaaacttagtgtcctgtgtgcattcatccgtgagtccagaaagggctggggacacggaaacccttaaagacatcacagcacaagactctgctgacattattttccttattgatggatcaaacaacaccggaagtgtcaatttcgcagtcattctcgacttccttgtaaatctccttgagaaactcccaattggaactcagcagatccgagtgggggtggtccagtttagcgatgagcccagaaccatgttttccttggacacctactccaccaaggcccaggttctgggtgcagtgaaagccctcgggtttgctggtggggagttggccaatatcggcctcgcccttgatttcgtggtggagaaccacttcacccgggcagggggcagccgcgtggaggaaggggttccccaggtgctggtcctcataagtgccgggccttctagtgacgagattcgctacggggtggtagcactgaagcaggctagcgtgttctcattcggccttggagcccaggccgcctccagggcagagcttcagcacatagctaccgatgacaacttggtgtttactgtcccggaattccgtagctttggggacctccaggagaaattactgccgtacattgttggcgtggcccaaaggcacattgtcttgaaaccgccaaccattgtcacacaagtcattgaagtcaacaagagagacatagtcttcctggtggatggctcatctgcactgggactggccaacttcaatgccatccgagacttcattgctaaagtcatccagaggctggaaatcggacaggatcttatccaggtggcagtggcccagtatgcagacactgtgaggcctgaattttatttcaatacccatccaacaaaaagggaagtcataaccgctgtgcggaaaatgaagcccctggacggctcggccctgtacacgggctctgctctagactttgttcgtaacaacctattcacgagttcagccggctaccgggctgccgaggggattcctaagcttttggtgctgatcacaggtggtaagtccctagatgaaatcagccagcctgcccaggagctgaagagaagcagcataatggcctttgccattgggaacaagggtgccgatcaggctgagctggaagagatcgctttcgactcctccctggtgttcatcccagctgagttccgagccgccccattgcaaggcatgctgcctggcttgctggcacctctcaggaccctctctggaacccctgaagttcactcaaacaaaagagatatcatctttcttttggatggatcagccaacgttggaaaaaccaatttcccttatgtgcgcgactttgtaatgaacctagttaacagccttgatattggaaatgacaatattcgtgttggtttagtgcaatttagtgacactcctgtaacggagttctctttaaacacataccagaccaagtcagatatccttggtcatctgaggcagctgcagctccagggaggttcgggcctgaacacaggctcagccctaagctatgtctatgccaaccacttcacggaagctggcggcagcaggatccgtgaacacgtgccgcagctcctgcttctgctcacagctgggcagtctgaggactcctatttgcaagctgccaacgccttgacacgcgcgggcatcctgactttttgtgtgggagctagccaggcgaataaggcagagcttgagcagattgcttttaacccaagcctggtgtatctcatggatgatttcagctccctgccagctttgcctcagcagctgattcagcccctaaccacatatgttagtggaggtgtggaggaagtaccactcgctcagccagagagcaagcgagacattctgttcctctttgacggctcagccaatcttgtgggccagttccctgttgtccgtgactttctctacaagattatcgatgagctcaatgtgaagccagaggggacccgaattgcggtggctcagtacagcgatgatgtcaaggtggagtcccgttttgatgagcaccagagtaagcctgagatcctgaatcttgtgaagagaatgaagatcaagacgggcaaagccctcaacctgggctacgcgctggactatgcacagaggtacatttttgtgaagtctgctggcagccggatcgaggatggagtgcttcagttcctggtgctgctggtcgcaggaaggtcatctgaccgtgtggatgggccagcaagtaacctgaagcagagtggggttgtgcctttcatcttccaagccaagaacgcagaccctgctgagttagagcagatcgtgctgtctccagcgtttatcctggctgcagagtcgcttcccaagattggagatcttcatccacagatagtgaatctcttaaaatcagtgcacaacggagcaccagcaccagtttcaggtgaaaaggacgtggtgtttctgcttgatggctctgagggcgtcaggagcggcttccctctgttgaaagagtttgtccagagagtggtggaaagcctggatgtgggccaggaccgggtccgcgtggccgtggtgcagtacagcgaccggaccaggcccgagttctacctgaattcatacatgaacaagcaggacgtcgtcaacgctgtccgccagctgaccctgctgggagggccgacccccaacaccggggccgccctggagtttgtcctgaggaacatcctggtcagctctgcgggaagcaggataacagaaggtgtgccccagctgctgatcgtcctcacggccgacaggtctggggatgatgtgcggaacccctccgtggtcgtgaagaggggtggggctgtgcccattggcattggcatcgggaacgctgacatcacagagatgcagaccatctccttcatcccggactttgccgtggccattcccacctttcgccagctggggaccgtccaacaggtcatctctgagagggtgacccagctcacccgcgaggagctgagcaggctgcagccggtgttgcagcctctaccgagcccaggtgttggtggcaagagggacgtggtctttctcatcgatgggtcccaaagtgccgggcctgagttccagtacgttcgcaccctcatagagaggctggttgactacctggacgtgggctttgacaccacccgggtggctgtcatccagttcagcgatgaccccaaggcggagttcctgctgaacgcccattccagcaaggatgaagtgcagaacgcggtgcagcggctgaggcccaagggagggcggcagatcaacgtgggcaatgccctggagtacgtgtccaggaacatcttcaagaggcccctggggagccgcattgaagagggcgtcccgcagttcctggtcctcatctcgtctggaaagtctgacgatgaggtggacgacccggcggtggagctcaagcagtttggcgtggcccctttcacgatcgccaggaacgcagaccaggaggagctggtgaagatctcgctgagccccgaatatgtgttctcggtgagcaccttccgggagctgcccagcctggagcagaaactgctgacgcccatcacgaccctgacctcagagcagatccagaagctcttagccagcactcgctatccacctccagcagttgagagtgatgctgcagacattgtctttctgatcgacagctctgagggagttaggccagatggctttgcacatattcgagattttgttagcaggattgttcgaagactcaacatcggccccagtaaagtgagagttggggtcgtgcagttcagcaatgatgtcttcccagaattctatctgaaaacctacagatcccaggccccggtgctggacgccatacggcgcctgaggctcagaggggggtccccactgaacactggcaaggctctcgaatttgtggcaagaaacctctttgttaagtctgcggggagtcgcatagaagacggggtgccccaacacctggtcctggtcctgggtggaaaatcccaggacgatgtgtccaggttcgcccaggtgatccgttcctcgggcattgtgagtttaggggtaggagaccggaacatcgacagaacagagctgcagaccatcaccaatgaccccagactggtcttcacagtgcgagagttcagagagcttcccaacatagaagaaagaatcatgaactcgtttggaccctccgcagccactcctgcacctccaggggtggacacccctcctccttcacggccagagaagaagaaagcagacattgtgttcctgttggatggttccatcaacttcaggagggacagtttccaggaagtgcttcgttttgtgtctgaaatagtggacacagtttatgaagatggcgactccatccaagtggggcttgtccagtacaactctgaccccactgacgaattcttcctgaaggacttctctaccaagaggcagattattgacgccatcaacaaagtggtctacaaagggggaagacacgccaacactaaggtgggccttgagcacctgcgggtaaaccactttgtgcctgaggcaggcagccgcctggaccagcgggtccctcagattgcctttgtgatcacgggaggaaagtcggtggaagatgcacaggatgtgagcctggccctcacccagaggggggtcaaagtgtttgctgttggagtgaggaatatcgactcggaggaggttggaaagatagcgtccaacagcgccacagcgttccgcgtgggcaacgtccaggagctgtccgaactgagcgagcaagttttggaaactttgcatgatgcgatgcatgaaaccctttgccctggtgtaactgatgctgccaaagcttgtaatctggatgtgattctggggtttgatggttctagagaccagaatgtttttgtggcccagaagggcttcgagtccaaggtggacgccatcttgaacagaatcagccagatgcacagggtcagctgcagcggtggccgctcgcccaccgtgcgtgtgtcagtggtggccaacacgccctcgggcccggtggaggcctttgactttgacgagtaccagccagagatgctcgagaagttccggaacatgcgcagccagcacccctacgtcctcacggaggacaccctgaaggtctacctgaacaagttcagacagtcctcgccggacagcgtgaaggtggtcattcattttactgatggagcagacggagatctggctgatttacacagagcatctgagaacctccgccaagaaggagtccgtgccttgatcctggtgggccttgaacgagtggtcaacttggagcggctaatgcatctggagtttgggcgagggtttatgtatgacaggcccctgaggcttaacttgctggacttggattatgaactagcggagcagcttgacaacattgccgagaaagcttgctgtggggttccctgcaagtgctctgggcagaggggagaccgcgggcccatcggcagcatcgggccaaagggtattcctggagaagacggctaccgaggctatcctggtgatgagggtggacccggtgagcgtggtccgcctggtgtgaacggcactcaaggtttccagggctgcccgggccagagaggagtaaagggctctcggggattcccaggagagaagggcgaagtaggagaaattggactggatggtctggatggtgaagatggagacaaaggattgcctggttcttctggagagaaagggaatcctggaagaagggggaacgggaggaagcgaaatctccgtttcatggaggctgaggcaagagaaaatttcggagcctggatgtggaggagcccaacagcagaactaactcaggaaattgtctttcagaaaaaggccgaacgtaggctgggtctgagaatcaggctggggtatggtggaggaacctgcatgtttaaaggaacaagaaaatga

SEQ ID NO: 57001 - DNA, 3503 bp, Homo sapiens
atatcgtcgacccacgcgtccggggaagaaagggtgagcccggagagccaggaccaaaaggaggaatcgggaaccggggccctcgtggggagacgggagatgacgggagagacggagttggcagtgaaggacgcagaggcaaaaaaggagaaagaggattccctggatacccaggaccaaagggtaacccaggtgaacctgggctaaatggaacaacaggacccaaaggcatcagaggccgaaggggaaattcgggacctccagggatagttggacagaagggagaccctggctacccaggaccagctggtcccaagggcaacaggggcgactccatcgatcaatgtgccctcatccaaagcatcaaagataaatgcccttgctgttacgggcccctggagtgccccgtcttcccaacagaactagcctttgctttagacacctctgagggagtcaaccaagacactttcggccggatgcgagatgtggtcttgagtattgtgaatgacctgaccattgctgagagcaactgcccacggggggcccgggtggctgtggtcacctacaacaacgaggtgaccacggagatccggtttgctgactccaagaggaagtcggtcctcctggacaagattaagaaccttcaggtggctctgacatccaaacagcagagtctggagactgccatgtcgtttgtggccaggaacacatttaagcgtgtgaggaacggattcctaatgaggaaagtggctgttttcttcagcaacacacccacaagagcatccccacagctcagagaggctgtgctcaagctctcagatgcggggatcacccccttgttccttacaaggcaggaagaccggcagctcatcaacgctttgcagatcaataacacagcagtggggcatgcgcttgtcctgcctgcagggagagacctcacagacttcctggagaatgtcctcacgtgtcatgtttgcttggacatctgcaacatcgacccatcctgtggatttggcagttggaggccttccttcagggacaggagagcggcagggagcgatgtggacatcgacatggctttcatcttagacagcgctgagaccaccaccctgttccagttcaatgagatgaagaagtacatagcgtacctggtcagacaactggacatgagcccagatcccaaggcctcccagcacttcgccagagtggcagttgtgcagcacgcgccctctgagtccgtggacaatgccagcatgccacctgtgaaggtggaattctccctgactgactatggctccaaggagaagctggtggacttcctcagcaggggaatgacacagttgcagggaaccagggccttaggcagtgccattgaatacaccatagagaatgtctttgaaagtgccccaaacccacgggacctgaaaattgtggtcctgatgctgacgggcgaggtgccggagcagcagctggaggaggcccagagagtcatcctgcaggccaaatgcaagggctacttcttcgtggtcctgggcattggcaggaaggtgaacatcaaggaggtatacaccttcgccagtgagccaaacgacgtcttcttcaaattagtggacaagtccaccgagctcaacgaggagcctttgatgcgcttcgggaggctgttgccgtccttcgtcagcagtgaaaatgctttttacttgtccccagatatcaggaaacagtgtgattggttccaaggggaccaacccacaaagaaccttgtgaagtttggtcacaaacaagtaaatgttccgaataacgttacttcaagtcctacatccaacccagtgacgacaacgaagccggtgactacgacgaagccggtgaccaccacaacaaagcctgtaaccaccacaacaaagcctgtgactattataaatcagccatctgtgaagccagccgctgcaaagccggcccctgcgaaacctgtggctgccaagcctgtggccacaaagacggccactgttagacccccagtggcggtgaagccagcaacagcagcgaagcctgtagcagcaaagccagcagctgtaagaccccccgctgctgctgcaaaaccagtggcgaccaagcctgaggtccctaggccacaggcagccaaaccagctgccaccaagccagccaccactaagcccgtggttaagatgctccgtgaagtccaggtgtttgagataacagagaacagcgccaaactccactgggagaggcctgagccccccggtccttatttttatgacctcaccgtcacctcagcccatgatcagtccctggttctgaagcagaacctcacggtcacggaccgcgtcattggaggcctgctcgctgggcagacataccatgtggctgtggtctgctacctgaggtctcaggtcagagccacctaccacggaagtttcagtacaaagaaatctcagcccccacctccacagccagcaaggtcagcttctagttcaaccatcaatctaatggtgagcacagaaccattggctctcactgaaacagatatatgcaagttgccgaaagacgaaggaacttgcagggatttcatattaaaatggtactatgatccaaacaccaaaagctgtgcaagattctggtatggaggttgtggtggaaacgaaaacaaatttggatcacagaaagaatgtgaaaaggtttgcgctcctgtgctcgccaaacccggagtcatcagtgtgatgggaacctaagcgtgggtggccaacatcatatacctcttgaagaagaaggagtcagccatcgccaacttgtctctgtagaagctccgggtgtagattcccttgcactgtatcatttcatgctttgatttacactcgaactcgggagggaacatcctgctgcatgacctatcagtatggtgctaatgtgtctgtggaccctcgctctctgtctccagcagttctctcgaatactttgaatgttgtgtaacagttagccactgctggtgtttatgtgaacattcctatcaatccaaattccctctggagtttcatgttatgcctgttgcaggcaaatgtaaagtctagaaaataatgcaaatgtcacggctactctatatacttttgcttggttcattttttttcccttttagttaagcatgactttagatgggaagcctgtgtatcgtggagaaacaagagaccaactttttcattccctgcccccaatttcccagactagatttcaagctaattttctttttctgaagcctctaacaaatgatctagttcagaaggaagcaaaatcccttaatctatgtgcaccgttgggaccaatgccttaattaaagaatttaaaaaagttgtaatagagaatatttttggcattcctctcaatgttgtgtgttttttttttttgtgtgctggagggaggggatttaattttaattttaaaatgtttaggaaatttatacaaagaaactttttaataaagtatattgaaagttt

SEQ ID NO: 57002 - DNA, 4844 bp, Homo sapiens
gcttaaagaacatgtatttattatatttatttttcacgcaaattacccaaagcattgggggttagtgaatggaaaatagcaatttttacttttccttttttgtcaaggcccggttttgtattccaaactaaagaatgaatttataaaatgatggttggttgtctgtgataagacttccttctggtttaatcaggtgggtcttggggctcaaactgccacagggaatcatacttgagttaaagacagcccaggaaattgtttccccaatctggagcatgctactggcccattcatgatggtctctgagtatggaacttgggctagtgactgggcaccagcagctattgagtgcatgggctcaggtccctggttcccaggtaagtgagtctaccttcctgtattatcagtgaggtgtgaagtgtttagtagcagtatagtgtaaaccaaatttgtttaggaaggctttgcattgataggaagtaattgcttacatagtagaaaaatctaaaccaatgtctttttttaaagatgtcaaaaatggtgcggctgctgatataatatttctagtggattcctcttggaccattggagaggaacatttccaacttgttcgagagtttctatatgatgttgtaaaatccttagctgtgggagaaaatgatttccattttgctctggtccagttcaacggaaacccacataccgagttcctgttaaatacgtatcgtactaaacaagaagtcctttctcatatttccaacatgtcttatattgggggaaccaatcagactggaaaaggattagaatacataatgcaaagccacctcaccaaggctgctggaagccgggccggtgacggagtccctcaggttatcgtagtgttaactgatggacactcgaaggatggccttgctctgccctcagcggaacttaagtctgctgatgttaacgtgtttgcaattggagttgaggatgcagatgaaggagcgttaaaagaaatagcaagtgaaccgctcaatatgcatatgttcaacctagagaattttacctcacttcatgacatagtaggaaacttagtgtcctgtgtgcattcatccgtgagtccagaaagggctggggacacggaaacccttaaagacatcacagcacaagactctgctgacattattttccttattgatggatcaaacaacaccggaagtgtcaatttcgcagtcattctcgacttccttgtaaatctccttgagaaactcccaattggaactcagcagatccgagtgggggtggtccagtttagcgatgagcccagaaccatgttttccttggacacctactccaccaaggcccaggttctgggtgcagtgaaagccctcgggtttgctggtggggagttggccaatatcggcctcgcccttgatttcgtggtggagaaccacttcacccgggcagggggcagccgcgtggaggaaggggttccccaggtgctggtcctcataagtgccgggccttctagtgacgagattcgctacggggtggtagcactgaagcaggctagcgtgttctcattcggccttggagcccaggccgcctccagggcagagcttcagcacatagctaccgatgacaacttggtgtttactgtcccggaattccgtagctttggggacctccaggagaaattactgccgtacattgttggcgtggcccaaaggcacattgtcttgaaaccgccaaccattgtcacacaagtcattgaagtcaacaagagagacatagtcttcctggtggatggctcatctgcactgggactggccaacttcaatgccatccgagacttcattgctaaagtcatccagaggctggaaatcggacaggatcttatccaggtggcagtggcccagtatgcagacactgtgaggcctgaattttatttcaatacccatccaacaaaaagggaagtcataaccgctgtgcggaaaatgaagcccctggacggctcggccctgtacacgggctctgctctagactttgttcgtaacaacctattcacgagttcagccggctaccgggctgccgaggggattcctaagcttttggtgctgatcacaggtggtaagtccctagatgaaatcagccagcctgcccaggagctgaagagaagcagcataatggcctttgccattgggaacaagggtgccgatcaggctgagctggaagagatcgctttcgactcctccctggtgttcatcccagctgagttccgagccgccccattgcaaggcatgctgcctggcttgctggcacctctcaggaccctctctggaacccctgaagttcactcaaacaaaagagatatcatctttcttttggatggatcagccaacgttggaaaaaccaatttcccttatgtgcgcgactttgtaatgaacctagttaacagccttgatattggaaatgacaatattcgtgttggtttagtgcaatttagtgacactcctgtaacggagttctctttaaacacataccagaccaagtcagatatccttggtcatctgaggcagctgcagctccagggaggttcgggcctgaacacaggctcagccctaagctatgtctatgccaaccacttcacggaagctggcggcagcaggatccgtgaacacgtgccgcagctcctgcttctgctcacagctgggcagtctgaggactcctatttgcaagctgccaacgccttgacacgcgcgggcatcctgactttttgtgtgggagctagccaggcgaataaggcagagcttgagcagattgcttttaacccaagcctggtgtatctcatggatgatttcagctccctgccagctttgcctcagcagctgattcagcccctaaccacatatgttagtggaggtgtggaggaagtaccactcgctcagccagagagcaagcgagacattctgttcctctttgacggctcagccaatcttgtgggccagttccctgttgtccgtgactttctctacaagattatcgatgagctcaatgtgaagccagaggggacccgaattgcggtggctcagtacagcgatgatgtcaaggtggagtcccgttttgatgagcaccagagtaagcctgagatcctgaatcttgtgaagagaatgaagatcaagacgggcaaagccctcaacctgggctacgcgctggactatgcacagaggtacatttttgtgaagtctgctggcagccggatcgaggatggagtgcttcagttcctggtgctgctggtcgcaggaaggtcatctgaccgtgtggatgggccagcaagtaacctgaagcagagtggggttgtgcctttcatcttccaagccaagaacgcagaccctgctgagttagagcagatcgtgctgtctccagcgtttatcctggctgcagagtcgcttcccaagattggagatcttcatccacagatagtgaatctcttaaaatcagtgcacaacggagcaccagcaccagtttcaggtgaaaaggacgtggtgtttctgcttgatggctctgagggcgtcaggagcggcttccctctgttgaaagagtttgtccagagagtggtggaaagcctggatgtgggccaggaccgggtccgcgtggccgtggtgcagtacagcgaccggaccaggcccgagttctacctgaattcatacatgaacaagcaggacgtcgtcaacgctgtccgccagctgaccctgctgggagggccgacccccaacaccggggccgccctggagtttgtcctgaggaacatcctggtcagctctgcgggaagcaggataacagaaggtgtgccccagctgctgatcgtcctcacggccgacaggtctggggatgatgtgcggaacccctccgtggtcgtgaagaggggtggggctgtgcccattggcattggcatcgggaacgctgacatcacagagatgcagaccatctccttcatcccggactttgccgtggccattcccacctttcgccagctggggaccgtccaacaggtcatctctgagagggtgacccagctcacccgcgaggagctgagcaggctgcagccggtgttgcagcctctaccgagcccaggtgttggtggcaagagggacgtggtctttctcatcgatgggtcccaaagtgccgggcctgagttccagtacgttcgcaccctcatagagaggctggttgactacctggacgtgggctttgacaccacccgggtggctgtcatccagttcagcgatgaccccaaggcggagttcctgctgaacgcccattccagcaaggatgaagtgcagaacgcggtgcagcggctgaggcccaagggagggcggcagatcaacgtgggcaatgccctggagtacgtgtccaggaacatcttcaagaggcccctggggagccgcattgaagagggcgtcccgcagttcctggtcctcatctcgtctggaaagtctgacgatgaggtggacgacccggcggtggagctcaagcagtttggcgtggcccctttcacgatcgccaggaacgcagaccaggaggagctggtgaagatctcgctgagccccgaatatgtgttctcggtgagcaccttccgggagctgcccagcctggagcagaaactgctgacgcccatcacgaccctgacctcagagcagatccagaagctcttagccagcactcgctatccacctccaggtgagatgggggcgtcggaggttctccttggagcattttccatatgaaaaataacaggctcaaaggccatggtactcataataaattaaattaaaataaaggttgtatgcccttaaaaaaat

SEQ ID NO: 57003 - DNA, 2397 bp, Homo sapiens
gcttaaagaacatgtatttattatatttatttttcacgcaaattacccaaagcattgggggttagtgaatggaaaatagcaatttttacttttccttttttgtcaaggcccggttttgtattccaaactaaagaatgaatttataaaatgatggttggttgtctgtgataagacttccttctggtttaatcaggtgggtcttggggctcaaactgccacagggaatcatacttgagttaaagacagcccaggaaattgtttccccaatctggagcatgctactggcccattcatgatggtctctgagtatggaacttgggctagtgactgggcaccagcagctattgagtgcatgggctcaggtccctggttcccaggtaagtgagtctaccttcctgtattatcagtgaggtgtgaagtgtttagtagcagtatagtgtaaaccaaatttgtttaggaaggctttgcattgataggaagtaattgcttacatagtagaaaaatctaaaccaatgtctttttttaaagatgtcaaaaatggtgcggctgctgatataatatttctagtggattcctcttggaccattggagaggaacatttccaacttgttcgagagtttctatatgatgttgtaaaatccttagctgtgggagaaaatgatttccattttgctctggtccagttcaacggaaacccacataccgagttcctgttaaatacgtatcgtactaaacaagaagtcctttctcatatttccaacatgtcttatattgggggaaccaatcagactggaaaaggattagaatacataatgcaaagccacctcaccaaggctgctggaagccgggccggtgacggagtccctcaggttatcgtagtgttaactgatggacactcgaaggatggccttgctctgccctcagcggaacttaagtctgctgatgttaacgtgtttgcaattggagttgaggatgcagatgaaggagcgttaaaagaaatagcaagtgaaccgctcaatatgcatatgttcaacctagagaattttacctcacttcatgacatagtaggaaacttagtgtcctgtgtgcattcatccgtgagtccagaaagggctggggacacggaaacccttaaagacatcacagcacaagactctgctgacattattttccttattgatggatcaaacaacaccggaagtgtcaatttcgcagtcattctcgacttccttgtaaatctccttgagaaactcccaattggaactcagcagatccgagtgggggtggtccagtttagcgatgagcccagaaccatgttttccttggacacctactccaccaaggcccaggttctgggtgcagtgaaagccctcgggtttgctggtggggagttggccaatatcggcctcgcccttgatttcgtggtggagaaccacttcacccgggcagggggcagccgcgtggaggaaggggttccccaggtgctggtcctcataagtgccgggccttctagtgacgagattcgctacggggtggtagcactgaagcaggctagcgtgttctcattcggccttggagcccaggccgcctccagggcagagcttcagcacatagctaccgatgacaacttggtgtttactgtcccggaattccgtagctttggggacctccaggagaaattactgccgtacattgttggcgtggcccaaaggcacattgtcttgaaaccgccaaccattgtcacacaagtcattgaagtcaacaagagagacatagtcttcctggtggatggctcatctgcactgggactggccaacttcaatgccatccgagacttcattgctaaagtcatccagaggctggaaatcggacaggatcttatccaggtggcagtggcccagtatgcagacactgtgaggcctgaattttatttcaatacccatccaacaaaaagggaagtcataaccgctgtgcggaaaatgaagcccctggacggctcggccctgtacacgggctctgctctagactttgttcgtaacaacctattcacgagttcagccggctaccgggctgccgaggggattcctaagcttttggtgctgatcacaggtggtaagtccctagatgaaatcagccagcctgcccaggagctgaagagaagcagcataatggcctttgccattgggaacaagggtgccgatcaggctgagctggaagagatcgctttcgactcctccctggtgttcatcccagctgagttccgagccgccccattgcaaggcatgctgcctggcttgctggcacctctcaggaccctctctggaacccctgaagttcactcaaacaaaaggaattatctttcttttggactggaaaggtgatactgatggaacggga

SEQ ID NO: 57004 - DNA, 411 bp, Homo sapiens
ctcagcagaatctgtgcctcttagatatttacggaaggtgcttgttaagccaaaggcttgtagaggtgggagtgtactgaagtccggtgcatcctgcaaagtgtgcaactgtcctgcagacgggctcttcctctgtgaatcgacccctttccctgcaatgtcttgtgcagcatttcagagctagacattcttctctgcagatgagaatctcatgctaattttccccacaccagggtgtcccagggagagatggagtacctggaggacctggagaaactgggaagaatgtgagtgccattagggctttggggggctctgtgacaattcttagtgccataagatctgcccaacatgacctggtgcatggttagtccacagctctgcagtgagtgaatgtaaaaggatttctga

SEQ ID NO: 57005 - DNA, 359 bp, Homo sapiens
tgtttggtttcaaggattctgatcacttttgttgtctgtaaacattctaactttgatgttgtagctctctttgagccaacttggttttgtaaactcggctaccaatatgtctcacaaacaccagccaccaccagaggaaaatatgcagccatctgccatattttacaagatggacatgctttgccatgctgactttctctgtgttctaaatgttggcatgtgtgcacgtgttgtaggcacacatgataaaactctccgtggttgtgtatgtctcacttttttttctgtgcttcactgcagttcactcaaacaaaagagatatcatctttcttttggatggatcagccaacgttggaaaa

SEQ ID NO: 57006 - DNA, 10724 bp, Homo sapiens
gcttaaagaacatgtatttattatatttatttttcacgcaaattacccaaagcattgggggttagtgaatggaaaatagcaatttttacttttccttttttgtcaaggcccggttttgtattccaaactaaagaatgaatttataaaatgatggttggttgtctgtgataagacttccttctggtttaatcaggtgggtcttggggctcaaactgccacagggaatcatacttgagttaaagacagcccaggaaattgtttccccaatctggagcatgctactggcccattcatgatggtctctgagtatggaacttgggctagtgactgggcaccagcagctattgagtgcatgggctcaggtccctggttcccaggtaagtgagtctaccttcctgtattatcagtgaggtgtgaagtgtttagtagcagtatagtgtaaaccaaatttgtttaggaaggctttgcattgataggaagtaattgcttacatagtagaaaaatctaaaccaatgtctttttttaaagatgtcaaaaatggtgcggctgctgatataatatttctagtggattcctcttggaccattggagaggaacatttccaacttgttcgagagtttctatatgatgttgtaaaatccttagctgtgggagaaaatgatttccattttgctctggtccagttcaacggaaacccacataccgagttcctgttaaatacgtatcgtactaaacaagaagtcctttctcatatttccaacatgtcttatattgggggaaccaatcagactggaaaaggattagaatacataatgcaaagccacctcaccaaggctgctggaagccgggccggtgacggagtccctcaggttatcgtagtgttaactgatggacactcgaaggatggccttgctctgccctcagcggaacttaagtctgctgatgttaacgtgtttgcaattggagttgaggatgcagatgaaggagcgttaaaagaaatagcaagtgaaccgctcaatatgcatatgttcaacctagagaattttacctcacttcatgacatagtaggaaacttagtgtcctgtgtgcattcatccgtgagtccagaaagggctggggacacggaaacccttaaagacatcacagcacaagactctgctgacattattttccttattgatggatcaaacaacaccggaagtgtcaatttcgcagtcattctcgacttccttgtaaatctccttgagaaactcccaattggaactcagcagatccgagtgggggtggtccagtttagcgatgagcccagaaccatgttttccttggacacctactccaccaaggcccaggttctgggtgcagtgaaagccctcgggtttgctggtggggagttggccaatatcggcctcgcccttgatttcgtggtggagaaccacttcacccgggcagggggcagccgcgtggaggaaggggttccccaggtgctggtcctcataagtgccgggccttctagtgacgagattcgctacggggtggtagcactgaagcaggctagcgtgttctcattcggccttggagcccaggccgcctccagggcagagcttcagcacatagctaccgatgacaacttggtgtttactgtcccggaattccgtagctttggggacctccaggagaaattactgccgtacattgttggcgtggcccaaaggcacattgtcttgaaaccgccaaccattgtcacacaagtcattgaagtcaacaagagagacatagtcttcctggtggatggctcatctgcactgggactggccaacttcaatgccatccgagacttcattgctaaagtcatccagaggctggaaatcggacaggatcttatccaggtggcagtggcccagtatgcagacactgtgaggcctgaattttatttcaatacccatccaacaaaaagggaagtcataaccgctgtgcggaaaatgaagcccctggacggctcggccctgtacacgggctctgctctagactttgttcgtaacaacctattcacgagttcagccggctaccgggctgccgaggggattcctaagcttttggtgctgatcacaggtggtaagtccctagatgaaatcagccagcctgcccaggagctgaagagaagcagcataatggcctttgccattgggaacaagggtgccgatcaggctgagctggaagagatcgctttcgactcctccctggtgttcatcccagctgagttccgagccgccccattgcaaggcatgctgcctggcttgctggcacctctcaggaccctctctggaacccctgaagttcactcaaacaaaagagatatcatctttcttttggatggatcagccaacgttggaaaaaccaatttcccttatgtgcgcgactttgtaatgaacctagttaacagccttgatattggaaatgacaatattcgtgttggtttagtgcaatttagtgacactcctgtaacggagttctctttaaacacataccagaccaagtcagatatccttggtcatctgaggcagctgcagctccagggaggttcgggcctgaacacaggctcagccctaagctatgtctatgccaaccacttcacggaagctggcggcagcaggatccgtgaacacgtgccgcagctcctgcttctgctcacagctgggcagtctgaggactcctatttgcaagctgccaacgccttgacacgcgcgggcatcctgactttttgtgtgggagctagccaggcgaataaggcagagcttgagcagattgcttttaacccaagcctggtgtatctcatggatgatttcagctccctgccagctttgcctcagcagctgattcagcccctaaccacatatgttagtggaggtgtggaggaagtaccactcgctcagccagagagcaagcgagacattctgttcctctttgacggctcagccaatcttgtgggccagttccctgttgtccgtgactttctctacaagattatcgatgagctcaatgtgaagccagaggggacccgaattgcggtggctcagtacagcgatgatgtcaaggtggagtcccgttttgatgagcaccagagtaagcctgagatcctgaatcttgtgaagagaatgaagatcaagacgggcaaagccctcaacctgggctacgcgctggactatgcacagaggtacatttttgtgaagtctgctggcagccggatcgaggatggagtgcttcagttcctggtgctgctggtcgcaggaaggtcatctgaccgtgtggatgggccagcaagtaacctgaagcagagtggggttgtgcctttcatcttccaagccaagaacgcagaccctgctgagttagagcagatcgtgctgtctccagcgtttatcctggctgcagagtcgcttcccaagattggagatcttcatccacagatagtgaatctcttaaaatcagtgcacaacggagcaccagcaccagtttcaggtgaaaaggacgtggtgtttctgcttgatggctctgagggcgtcaggagcggcttccctctgttgaaagagtttgtccagagagtggtggaaagcctggatgtgggccaggaccgggtccgcgtggccgtggtgcagtacagcgaccggaccaggcccgagttctacctgaattcatacatgaacaagcaggacgtcgtcaacgctgtccgccagctgaccctgctgggagggccgacccccaacaccggggccgccctggagtttgtcctgaggaacatcctggtcagctctgcgggaagcaggataacagaaggtgtgccccagctgctgatcgtcctcacggccgacaggtctggggatgatgtgcggaacccctccgtggtcgtgaagaggggtggggctgtgcccattggcattggcatcgggaacgctgacatcacagagatgcagaccatctccttcatcccggactttgccgtggccattcccacctttcgccagctggggaccgtccaacaggtcatctctgagagggtgacccagctcacccgcgaggagctgagcaggctgcagccggtgttgcagcctctaccgagcccaggtgttggtggcaagagggacgtggtctttctcatcgatgggtcccaaagtgccgggcctgagttccagtacgttcgcaccctcatagagaggctggttgactacctggacgtgggctttgacaccacccgggtggctgtcatccagttcagcgatgaccccaaggcggagttcctgctgaacgcccattccagcaaggatgaagtgcagaacgcggtgcagcggctgaggcccaagggagggcggcagatcaacgtgggcaatgccctggagtacgtgtccaggaacatcttcaagaggcccctggggagccgcattgaagagggcgtcccgcagttcctggtcctcatctcgtctggaaagtctgacgatgaggtggacgacccggcggtggagctcaagcagtttggcgtggcccctttcacgatcgccaggaacgcagaccaggaggagctggtgaagatctcgctgagccccgaatatgtgttctcggtgagcaccttccgggagctgcccagcctggagcagaaactgctgacgcccatcacgaccctgacctcagagcagatccagaagctcttagccagcactcgctatccacctccagcagttgagagtgatgctgcagacattgtctttctgatcgacagctctgagggagttaggccagatggctttgcacatattcgagattttgttagcaggattgttcgaagactcaacatcggccccagtaaagtgagagttggggtcgtgcagttcagcaatgatgtcttcccagaattctatctgaaaacctacagatcccaggccccggtgctggacgccatacggcgcctgaggctcagaggggggtccccactgaacactggcaaggctctcgaatttgtggcaagaaacctctttgttaagtctgcggggagtcgcatagaagacggggtgccccaacacctggtcctggtcctgggtggaaaatcccaggacgatgtgtccaggttcgcccaggtgatccgttcctcgggcattgtgagtttaggggtaggagaccggaacatcgacagaacagagctgcagaccatcaccaatgaccccagactggtcttcacagtgcgagagttcagagagcttcccaacatagaagaaagaatcatgaactcgtttggaccctccgcagccactcctgcacctccaggggtggacacccctcctccttcacggccagagaagaagaaagcagacattgtgttcctgttggatggttccatcaacttcaggagggacagtttccaggaagtgcttcgttttgtgtctgaaatagtggacacagtttatgaagatggcgactccatccaagtggggcttgtccagtacaactctgaccccactgacgaattcttcctgaaggacttctctaccaagaggcagattattgacgccatcaacaaagtggtctacaaagggggaagacacgccaacactaaggtgggccttgagcacctgcgggtaaaccactttgtgcctgaggcaggcagccgcctggaccagcgggtccctcagattgcctttgtgatcacgggaggaaagtcggtggaagatgcacaggatgtgagcctggccctcacccagaggggggtcaaagtgtttgctgttggagtgaggaatatcgactcggaggaggttggaaagatagcgtccaacagcgccacagcgttccgcgtgggcaacgtccaggagctgtccgaactgagcgagcaagttttggaaactttgcatgatgcgatgcatgaaaccctttgccctggtgtaactgatgctgccaaagcttgtaatctggatgtgattctggggtttgatggttctagagaccagaatgtttttgtggcccagaagggcttcgagtccaaggtggacgccatcttgaacagaatcagccagatgcacagggtcagctgcagcggtggccgctcgcccaccgtgcgtgtgtcagtggtggccaacacgccctcgggcccggtggaggcctttgactttgacgagtaccagccagagatgctcgagaagttccggaacatgcgcagccagcacccctacgtcctcacggaggacaccctgaaggtctacctgaacaagttcagacagtcctcgccggacagcgtgaaggtggtcattcattttactgatggagcagacggagatctggctgatttacacagagcatctgagaacctccgccaagaaggagtccgtgccttgatcctggtgggccttgaacgagtggtcaacttggagcggctaatgcatctggagtttgggcgagggtttatgtatgacaggcccctgaggcttaacttgctggacttggattatgaactagcggagcagcttgacaacattgccgagaaagcttgctgtggggttccctgcaagtgctctgggcagaggggagaccgcgggcccatcggcagcatcgggccaaagggtattcctggagaagacggctaccgaggctatcctggtgatgagggtggacccggtgagcgtggtccgcctggtgtgaacggcactcaaggtttccagggctgcccgggccagagaggagtaaagggctctcggggattcccaggagagaagggcgaagtaggagaaattggactggatggtctggatggtgaagatggagacaaaggattgcctggttcttctggagagaaagggaatcctggaagaaggggtgataaaggacctcgaggagagaaaggagaaagaggagatgttgggattcgaggggacccgggtaacccaggacaagacagccaggagagaggacccaaaggagaaaccggtgacctcggccccatgggtgtcccagggagagatggagtacctggaggacctggagaaactgggaagaatggtggctttggccgaaggggaccccccggagctaagggcaacaagggcggtcctggccagccgggctttgagggagagcaggggaccagaggtgcacagggcccagctggtcctgctggtcctccagggctgataggagaacaaggcatttctggacctcggggaagcggaggtgccgctggtgctcctggagaacgaggcagaaccggtccactgggaagaaagggtgagcccggagagccaggaccaaaaggaggaatcgggaaccggggccctcgtggggagacgggagatgacgggagagacggagttggcagtgaaggacgcagaggcaaaaaaggagaaagaggattccctggatacccaggaccaaagggtaacccaggtgaacctgggctaaatggaacaacaggacccaaaggcatcagaggccgaaggggaaattcgggacctccagggatagttggacagaagggagaccctggctacccaggaccagctggtcccaagggcaacaggggcgactccatcgatcaatgtgccctcatccaaagcatcaaagataaatgcccttgctgttacgggcccctggagtgccccgtcttcccaacagaactagcctttgctttagacacctctgagggagtcaaccaagacactttcggccggatgcgagatgtggtcttgagtattgtgaatgacctgaccattgctgagagcaactgcccacggggggcccgggtggctgtggtcacctacaacaacgaggtgaccacggagatccggtttgctgactccaagaggaagtcggtcctcctggacaagattaagaaccttcaggtggctctgacatccaaacagcagagtctggagactgccatgtcgtttgtggccaggaacacatttaagcgtgtgaggaacggattcctaatgaggaaagtggctgttttcttcagcaacacacccacaagagcatccccacagctcagagaggctgtgctcaagctctcagatgcggggatcacccccttgttccttacaaggcaggaagaccggcagctcatcaacgctttgcagatcaataacacagcagtggggcatgcgcttgtcctgcctgcagggagagacctcacagacttcctggagaatgtcctcacgtgtcatgtttgcttggacatctgcaacatcgacccatcctgtggatttggcagttggaggccttccttcagggacaggagagcggcagggagcgatgtggacatcgacatggctttcatcttagacagcgctgagaccaccaccctgttccagttcaatgagatgaagaagtacatagcgtacctggtcagacaactggacatgagcccagatcccaaggcctcccagcacttcgccagagtggcagttgtgcagcacgcgccctctgagtccgtggacaatgccagcatgccacctgtgaaggtggaattctccctgactgactatggctccaaggagaagctggtggacttcctcagcaggggaatgacacagttgcagggaaccagggccttaggcagtgccattgaatacaccatagagaatgtctttgaaagtgccccaaacccacgggacctgaaaattgtggtcctgatgctgacgggcgaggtgccggagcagcagctggaggaggcccagagagtcatcctgcaggccaaatgcaagggctacttcttcgtggtcctgggcattggcaggaaggtgaacatcaaggaggtatacaccttcgccagtgagccaaacgacgtcttcttcaaattagtggacaagtccaccgagctcaacgaggagcctttgatgcgcttcgggaggctgttgccgtccttcgtcagcagtgaaaatgctttttacttgtccccagatatcaggaaacagtgtgattggttccaaggggaccaacccacaaagaaccttgtgaagtttggtcacaaacaagtaaatgttccgaataacgttacttcaagtcctacatccaacccagtgacgacaacgaagccggtgactacgacgaagccggtgaccaccacaacaaagcctgtaaccaccacaacaaagcctgtgactattataaatcagccatctgtgaagccagccgctgcaaagccggcccctgcgaaacctgtggctgccaagcctgtggccacaaagacggccactgttagacccccagtggcggtgaagccagcaacagcagcgaagcctgtagcagcaaagccagcagctgtaagaccccccgctgctgctgcaaaaccagtggcgaccaagcctgaggtccctaggccacaggcagccaaaccagctgccaccaagccagccaccactaagcccgtggttaagatgctccgtgaagtccaggtgtttgagataacagagaacagcgccaaactccactgggagaggcctgagccccccggtccttatttttatgacctcaccgtcacctcagcccatgatcagtccctggttctgaagcagaacctcacggtcacggaccgcgtcattggaggcctgctcgctgggcagacataccatgtggctgtggtctgctacctgaggtctcaggtcagagccacctaccacggaagtttcagtacaaagaaatctcagcccccacctccacagccagcaaggtcagcttctagttcaaccatcaatctaatggtgagcacagaaccattggctctcactgaaacagatatatgcaagttgccgaaagacgaaggaacttgcagggatttcatattaaaatggtactatgatccaaacaccaaaagctgtgcaagattctggtatggaggttgtggtggaaacgaaaacaaatttggatcacagaaagaatgtgaaaaggtttgcgctcctgtgctcgccaaacccggagtcatcagtgtgatgggaacctaagcgtgggtggccaacatcatatacctcttgaagaagaaggagtcagccatcgccaacttgtctctgtagaagctccgggtgtagattcccttgcactgtatcatttcatgctttgatttacactcgaactcgggagggaacatcctgctgcatgacctatcagtatggtgctaatgtgtctgtggaccctcgctctctgtctccagcagttctctcgaatactttgaatgttgtgtaacagttagccactgctggtgtttatgtgaacattcctatcaatccaaattccctctggagtttcatgttatgcctgttgcaggcaaatgtaaagtctagaaaataatgcaaatgtcacggctactctatatacttttgcttggttcattttttttcccttttagttaagcatgactttagatgggaagcctgtgtatcgtggagaaacaagagaccaactttttcattccctgcccccaatttcccagactagatttcaagctaattttctttttctgaagcctctaacaaatgatctagttcagaaggaagcaaaatcccttaatctatgtgcaccgttgggaccaatgccttaattaaagaatttaaaaaagttgtaatagagaatatttttggcattcctctcaatgttgtgtgttttttttttttgtgtgctggagggaggggatttaattttaattttaaaatgtttaggaaatttatacaaagaaactttttaataaagtatattgaaagttt

SEQ ID NO: 57007 - DNA, 7773 bp, Homo sapiens
ctctatccttaatctctctatcccaatcttgtgggccagttccctgttgtccgtgactttctctacaagattatcgatgagctcaatgtgaagccagaggggacccgaattgcggtggctcagtacagcgatgatgtcaaggtggagtcccgttttgatgagcaccagagtaagcctgagatcctgaatcttgtgaagagaatgaagatcaagacgggcaaagccctcaacctgggctacgcgctggactatgcacagaggtacatttttgtgaagtctgctggcagccggatcgaggatggagtgcttcagttcctggtgctgctggtcgcaggaaggtcatctgaccgtgtggatgggccagcaagtaacctgaagcagagtggggttgtgcctttcatcttccaagccaagaacgcagaccctgctgagttagagcagatcgtgctgtctccagcgtttatcctggctgcagagtcgcttcccaagattggagatcttcatccacagatagtgaatctcttaaaatcagtgcacaacggagcaccagcaccagtttcaggtgaaaaggacgtggtgtttctgcttgatggctctgagggcgtcaggagcggcttccctctgttgaaagagtttgtccagagagtggtggaaagcctggatgtgggccaggaccgggtccgcgtggccgtggtgcagtacagcgaccggaccaggcccgagttctacctgaattcatacatgaacaagcaggacgtcgtcaacgctgtccgccagctgaccctgctgggagggccgacccccaacaccggggccgccctggagtttgtcctgaggaacatcctggtcagctctgcgggaagcaggataacagaaggtgtgccccagctgctgatcgtcctcacggccgacaggtctggggatgatgtgcggaacccctccgtggtcgtgaagaggggtggggctgtgcccattggcattggcatcgggaacgctgacatcacagagatgcagaccatctccttcatcccggactttgccgtggccattcccacctttcgccagctggggaccgtccaacaggtcatctctgagagggtgacccagctcacccgcgaggagctgagcaggctgcagccggtgttgcagcctctaccgagcccaggtgttggtggcaagagggacgtggtctttctcatcgatgggtcccaaagtgccgggcctgagttccagtacgttcgcaccctcatagagaggctggttgactacctggacgtgggctttgacaccacccgggtggctgtcatccagttcagcgatgaccccaaggcggagttcctgctgaacgcccattccagcaaggatgaagtgcagaacgcggtgcagcggctgaggcccaagggagggcggcagatcaacgtgggcaatgccctggagtacgtgtccaggaacatcttcaagaggcccctggggagccgcattgaagagggcgtcccgcagttcctggtcctcatctcgtctggaaagtctgacgatgaggtggacgacccggcggtggagctcaagcagtttggcgtggcccctttcacgatcgccaggaacgcagaccaggaggagctggtgaagatctcgctgagccccgaatatgtgttctcggtgagcaccttccgggagctgcccagcctggagcagaaactgctgacgcccatcacgaccctgacctcagagcagatccagaagctcttagccagcactcgctatccacctccagcagttgagagtgatgctgcagacattgtctttctgatcgacagctctgagggagttaggccagatggctttgcacatattcgagattttgttagcaggattgttcgaagactcaacatcggccccagtaaagtgagagttggggtcgtgcagttcagcaatgatgtcttcccagaattctatctgaaaacctacagatcccaggccccggtgctggacgccatacggcgcctgaggctcagaggggggtccccactgaacactggcaaggctctcgaatttgtggcaagaaacctctttgttaagtctgcggggagtcgcatagaagacggggtgccccaacacctggtcctggtcctgggtggaaaatcccaggacgatgtgtccaggttcgcccaggtgatccgttcctcgggcattgtgagtttaggggtaggagaccggaacatcgacagaacagagctgcagaccatcaccaatgaccccagactggtcttcacagtgcgagagttcagagagcttcccaacatagaagaaagaatcatgaactcgtttggaccctccgcagccactcctgcacctccaggggtggacacccctcctccttcacggccagagaagaagaaagcagacattgtgttcctgttggatggttccatcaacttcaggagggacagtttccaggaagtgcttcgttttgtgtctgaaatagtggacacagtttatgaagatggcgactccatccaagtggggcttgtccagtacaactctgaccccactgacgaattcttcctgaaggacttctctaccaagaggcagattattgacgccatcaacaaagtggtctacaaagggggaagacacgccaacactaaggtgggccttgagcacctgcgggtaaaccactttgtgcctgaggcaggcagccgcctggaccagcgggtccctcagattgcctttgtgatcacgggaggaaagtcggtggaagatgcacaggatgtgagcctggccctcacccagaggggggtcaaagtgtttgctgttggagtgaggaatatcgactcggaggaggttggaaagatagcgtccaacagcgccacagcgttccgcgtgggcaacgtccaggagctgtccgaactgagcgagcaagttttggaaactttgcatgatgcgatgcatgaaaccctttgccctggtgtaactgatgctgccaaagcttgtaatctggatgtgattctggggtttgatggttctagagaccagaatgtttttgtggcccagaagggcttcgagtccaaggtggacgccatcttgaacagaatcagccagatgcacagggtcagctgcagcggtggccgctcgcccaccgtgcgtgtgtcagtggtggccaacacgccctcgggcccggtggaggcctttgactttgacgagtaccagccagagatgctcgagaagttccggaacatgcgcagccagcacccctacgtcctcacggaggacaccctgaaggtctacctgaacaagttcagacagtcctcgccggacagcgtgaaggtggtcattcattttactgatggagcagacggagatctggctgatttacacagagcatctgagaacctccgccaagaaggagtccgtgccttgatcctggtgggccttgaacgagtggtcaacttggagcggctaatgcatctggagtttgggcgagggtttatgtatgacaggcccctgaggcttaacttgctggacttggattatgaactagcggagcagcttgacaacattgccgagaaagcttgctgtggggttccctgcaagtgctctgggcagaggggagaccgcgggcccatcggcagcatcgggccaaagggtattcctggagaagacggctaccgaggctatcctggtgatgagggtggacccggtgagcgtggtccgcctggtgtgaacggcactcaaggtttccagggctgcccgggccagagaggagtaaagggctctcggggattcccaggagagaagggcgaagtaggagaaattggactggatggtctggatggtgaagatggagacaaaggattgcctggttcttctggagagaaagggaatcctggaagaaggggtgataaaggacctcgaggagagaaaggagaaagaggagatgttgggattcgaggggacccgggtaacccaggacaagacagccaggagagaggacccaaaggagaaaccggtgacctcggccccatgggtgtcccagggagagatggagtacctggaggacctggagaaactgggaagaatggtggctttggccgaaggggaccccccggagctaagggcaacaagggcggtcctggccagccgggctttgagggagagcaggggaccagaggtgcacagggcccagctggtcctgctggtcctccagggctgataggagaacaaggcatttctggacctcggggaagcggaggtgccgctggtgctcctggagaacgaggcagaaccggtccactgggaagaaagggtgagcccggagagccaggaccaaaaggaggaatcgggaaccggggccctcgtggggagacgggagatgacgggagagacggagttggcagtgaaggacgcagaggcaaaaaaggagaaagaggattccctggatacccaggaccaaagggtaacccaggtgaacctgggctaaatggaacaacaggacccaaaggcatcagaggccgaaggggaaattcgggacctccagggatagttggacagaagggagaccctggctacccaggaccagctggtcccaagggcaacaggggcgactccatcgatcaatgtgccctcatccaaagcatcaaagataaatgcccttgctgttacgggcccctggagtgccccgtcttcccaacagaactagcctttgctttagacacctctgagggagtcaaccaagacactttcggccggatgcgagatgtggtcttgagtattgtgaatgacctgaccattgctgagagcaactgcccacggggggcccgggtggctgtggtcacctacaacaacgaggtgaccacggagatccggtttgctgactccaagaggaagtcggtcctcctggacaagattaagaaccttcaggtggctctgacatccaaacagcagagtctggagactgccatgtcgtttgtggccaggaacacatttaagcgtgtgaggaacggattcctaatgaggaaagtggctgttttcttcagcaacacacccacaagagcatccccacagctcagagaggctgtgctcaagctctcagatgcggggatcacccccttgttccttacaaggcaggaagaccggcagctcatcaacgctttgcagatcaataacacagcagtggggcatgcgcttgtcctgcctgcagggagagacctcacagacttcctggagaatgtcctcacgtgtcatgtttgcttggacatctgcaacatcgacccatcctgtggatttggcagttggaggccttccttcagggacaggagagcggcagggagcgatgtggacatcgacatggctttcatcttagacagcgctgagaccaccaccctgttccagttcaatgagatgaagaagtacatagcgtacctggtcagacaactggacatgagcccagatcccaaggcctcccagcacttcgccagagtggcagttgtgcagcacgcgccctctgagtccgtggacaatgccagcatgccacctgtgaaggtggaattctccctgactgactatggctccaaggagaagctggtggacttcctcagcaggggaatgacacagttgcagggaaccagggccttaggcagtgccattgaatacaccatagagaatgtctttgaaagtgccccaaacccacgggacctgaaaattgtggtcctgatgctgacgggcgaggtgccggagcagcagctggaggaggcccagagagtcatcctgcaggccaaatgcaagggctacttcttcgtggtcctgggcattggcaggaaggtgaacatcaaggaggtatacaccttcgccagtgagccaaacgacgtcttcttcaaattagtggacaagtccaccgagctcaacgaggagcctttgatgcgcttcgggaggctgttgccgtccttcgtcagcagtgaaaatgctttttacttgtccccagatatcaggaaacagtgtgattggttccaaggggaccaacccacaaagaaccttgtgaagtttggtcacaaacaagtaaatgttccgaataacgttacttcaagtcctacatccaacccagtgacgacaacgaagccggtgactacgacgaagccggtgaccaccacaacaaagcctgtaaccaccacaacaaagcctgtgactattataaatcagccatctgtgaagccagccgctgcaaagccggcccctgcgaaacctgtggctgccaagcctgtggccacaaagacggccactgttagacccccagtggcggtgaagccagcaacagcagcgaagcctgtagcagcaaagccagcagctgtaagaccccccgctgctgctgcaaaaccagtggcgaccaagcctgaggtccctaggccacaggcagccaaaccagctgccaccaagccagccaccactaagcccgtggttaagatgctccgtgaagtccaggtgtttgagataacagagaacagcgccaaactccactgggagaggcctgagccccccggtccttatttttatgacctcaccgtcacctcagcccatgatcagtccctggttctgaagcagaacctcacggtcacggaccgcgtcattggaggcctgctcgctgggcagacataccatgtggctgtggtctgctacctgaggtctcaggtcagagccacctaccacggaagtttcagtacaaagaaatctcagcccccacctccacagccagcaaggtcagcttctagttcaaccatcaatctaatggtgagcacagaaccattggctctcactgaaacagatatatgcaagttgccgaaagacgaaggaacttgcagggatttcatattaaaatggtactatgatccaaacaccaaaagctgtgcaagattctggtatggaggttgtggtggaaacgaaaacaaatttggatcacagaaagaatgtgaaaaggtttgcgctcctgtgctcgccaaacccggagtcatcagtgtgatgggaacctaagcgtgggtggccaacatcatatacctcttgaagaagaaggagtcagccatcgccaacttgtctctgtagaagctccgggtgtagattcccttgcactgtatcatttcatgctttgatttacactcgaactcgggagggaacatcctgctgcatgacctatcagtatggtgctaatgtgtctgtggaccctcgctctctgtctccagcagttctctcgaatactttgaatgttgtgtaacagttagccactgctggtgtttatgtgaacattcctatcaatccaaattccctctggagtttcatgttatgcctgttgcaggcaaatgtaaagtctagaaaataatgcaaatgtcacggctactctatatacttttgcttggttcattttttttcccttttagttaagcatgactttagatgggaagcctgtgtatcgtggagaaacaagagaccaactttttcattccctgcccccaatttcccagactagatttcaagctaattttctttttctgaagcctctaacaaatgatctagttcagaaggaagcaaaatcccttaatctatgtgcaccgttgggaccaatgccttaattaaagaatttaaaaaagttgtaatagagaatatttttggcattcctctcaatgttgtgtgttttttttttttgtgtgctggagggaggggatttaattttaattttaaaatgtttaggaaatttatacaaagaaactttttaataaagtatattgaaagttt

SEQ ID NO: 57008 - DNA, 7239 bp, Homo sapiens
gcttaaagaacatgtatttattatatttatttttcacgcaaattacccaaagcattgggggttagtgaatggaaaatagcaatttttacttttccttttttgtcaaggcccggttttgtattccaaactaaagaatgaatttataaaatgatggttggttgtctgtgataagacttccttctggtttaatcaggtgggtcttggggctcaaactgccacagggaatcatacttgagttaaagacagcccaggaaattgtttccccaatctggagcatgctactggcccattcatgatggtctctgagtatggaacttgggctagtgactgggcaccagcagctattgagtgcatgggctcaggtccctggttcccaggtaagtgagtctaccttcctgtattatcagtgaggtgtgaagtgtttagtagcagtatagtgtaaaccaaatttgtttaggaaggctttgcattgataggaagtaattgcttacatagtagaaaaatctaaaccaatgtctttttttaaagatgtcaaaaatggtgcggctgctgatataatatttctagtggattcctcttggaccattggagaggaacatttccaacttgttcgagagtttctatatgatgttgtaaaatccttagctgtgggagaaaatgatttccattttgctctggtccagttcaacggaaacccacataccgagttcctgttaaatacgtatcgtactaaacaagaagtcctttctcatatttccaacatgtcttatattgggggaaccaatcagactggaaaaggattagaatacataatgcaaagccacctcaccaaggctgctggaagccgggccggtgacggagtccctcaggttatcgtagtgttaactgatggacactcgaaggatggccttgctctgccctcagcggaacttaagtctgctgatgttaacgtgtttgcaattggagttgaggatgcagatgaaggagcgttaaaagaaatagcaagtgaaccgctcaatatgcatatgttcaacctagagaattttacctcacttcatgacatagtaggaaacttagtgtcctgtgtgcattcatccgtgagtccagaaagggctggggacacggaaacccttaaagacatcacagcacaagactctgctgacattattttccttattgatggatcaaacaacaccggaagtgtcaatttcgcagtcattctcgacttccttgtaaatctccttgagaaactcccaattggaactcagcagatccgagtgggggtggtccagtttagcgatgagcccagaaccatgttttccttggacacctactccaccaaggcccaggttctgggtgcagtgaaagccctcgggtttgctggtggggagttggccaatatcggcctcgcccttgatttcgtggtggagaaccacttcacccgggcagggggcagccgcgtggaggaaggggttccccaggtgctggtcctcataagtgccgggccttctagtgacgagattcgctacggggtggtagcactgaagcaggctagcgtgttctcattcggccttggagcccaggccgcctccagggcagagcttcagcacatagctaccgatgacaacttggtgtttactgtcccggaattccgtagctttggggacctccaggagaaattactgccgtacattgttggcgtggcccaaaggcacattgtcttgaaaccgccaaccattgtcacacaagtcattgaagtcaacaagagagacatagtcttcctggtggatggctcatctgcactgggactggccaacttcaatgccatccgagacttcattgctaaagtcatccagaggctggaaatcggacaggatcttatccaggtggcagtggcccagtatgcagacactgtgaggcctgaattttatttcaatacccatccaacaaaaagggaagtcataaccgctgtgcggaaaatgaagcccctggacggctcggccctgtacacgggctctgctctagactttgttcgtaacaacctattcacgagttcagccggctaccgggctgccgaggggattcctaagcttttggtgctgatcacaggtggtaagtccctagatgaaatcagccagcctgcccaggagctgaagagaagcagcataatggcctttgccattgggaacaagggtgccgatcaggctgagctggaagagatcgctttcgactcctccctggtgttcatcccagctgagttccgagccgccccattgcaaggcatgctgcctggcttgctggcacctctcaggaccctctctggaacccctgaagttcactcaaacaaaagagatatcatctttcttttggatggatcagccaacgttggaaaaaccaatttcccttatgtgcgcgactttgtaatgaacctagttaacagccttgatattggaaatgacaatattcgtgttggtttagtgcaatttagtgacactcctgtaacggagttctctttaaacacataccagaccaagtcagatatccttggtcatctgaggcagctgcagctccagggaggttcgggcctgaacacaggctcagccctaagctatgtctatgccaaccacttcacggaagctggcggcagcaggatccgtgaacacgtgccgcagctcctgcttctgctcacagctgggcagtctgaggactcctatttgcaagctgccaacgccttgacacgcgcgggcatcctgactttttgtgtgggagctagccaggcgaataaggcagagcttgagcagattgcttttaacccaagcctggtgtatctcatggatgatttcagctccctgccagctttgcctcagcagctgattcagcccctaaccacatatgttagtggaggtgtggaggaagtaccactcgctcagccagagagcaagcgagacattctgttcctctttgacggctcagccaatcttgtgggccagttccctgttgtccgtgactttctctacaagattatcgatgagctcaatgtgaagccagaggggacccgaattgcggtggctcagtacagcgatgatgtcaaggtggagtcccgttttgatgagcaccagagtaagcctgagatcctgaatcttgtgaagagaatgaagatcaagacgggcaaagccctcaacctgggctacgcgctggactatgcacagaggtacatttttgtgaagtctgctggcagccggatcgaggatggagtgcttcagttcctggtgctgctggtcgcaggaaggtcatctgaccgtgtggatgggccagcaagtaacctgaagcagagtggggttgtgcctttcatcttccaagccaagaacgcagaccctgctgagttagagcagatcgtgctgtctccagcgtttatcctggctgcagagtcgcttcccaagattggagatcttcatccacagatagtgaatctcttaaaatcagtgcacaacggagcaccagcaccagtttcaggtgaaaaggacgtggtgtttctgcttgatggctctgagggcgtcaggagcggcttccctctgttgaaagagtttgtccagagagtggtggaaagcctggatgtgggccaggaccgggtccgcgtggccgtggtgcagtacagcgaccggaccaggcccgagttctacctgaattcatacatgaacaagcaggacgtcgtcaacgctgtccgccagctgaccctgctgggagggccgacccccaacaccggggccgccctggagtttgtcctgaggaacatcctggtcagctctgcgggaagcaggataacagaaggtgtgccccagctgctgatcgtcctcacggccgacaggtctggggatgatgtgcggaacccctccgtggtcgtgaagaggggtggggctgtgcccattggcattggcatcgggaacgctgacatcacagagatgcagaccatctccttcatcccggactttgccgtggccattcccacctttcgccagctggggaccgtccaacaggtcatctctgagagggtgacccagctcacccgcgaggagctgagcaggctgcagccggtgttgcagcctctaccgagcccaggtgttggtggcaagagggacgtggtctttctcatcgatgggtcccaaagtgccgggcctgagttccagtacgttcgcaccctcatagagaggctggttgactacctggacgtgggctttgacaccacccgggtggctgtcatccagttcagcgatgaccccaaggcggagttcctgctgaacgcccattccagcaaggatgaagtgcagaacgcggtgcagcggctgaggcccaagggagggcggcagatcaacgtgggcaatgccctggagtacgtgtccaggaacatcttcaagaggcccctggggagccgcattgaagagggcgtcccgcagttcctggtcctcatctcgtctggaaagtctgacgatgaggtggacgacccggcggtggagctcaagcagtttggcgtggcccctttcacgatcgccaggaacgcagaccaggaggagctggtgaagatctcgctgagccccgaatatgtgttctcggtgagcaccttccgggagctgcccagcctggagcagaaactgctgacgcccatcacgaccctgacctcagagcagatccagaagctcttagccagcactcgctatccacctccagcagttgagagtgatgctgcagacattgtctttctgatcgacagctctgagggagttaggccagatggctttgcacatattcgagattttgttagcaggattgttcgaagactcaacatcggccccagtaaagtgagagttggggtcgtgcagttcagcaatgatgtcttcccagaattctatctgaaaacctacagatcccaggccccggtgctggacgccatacggcgcctgaggctcagaggggggtccccactgaacactggcaaggctctcgaatttgtggcaagaaacctctttgttaagtctgcggggagtcgcatagaagacggggtgccccaacacctggtcctggtcctgggtggaaaatcccaggacgatgtgtccaggttcgcccaggtgatccgttcctcgggcattgtgagtttaggggtaggagaccggaacatcgacagaacagagctgcagaccatcaccaatgaccccagactggtcttcacagtgcgagagttcagagagcttcccaacatagaagaaagaatcatgaactcgtttggaccctccgcagccactcctgcacctccaggggtggacacccctcctccttcacggccagagaagaagaaagcagacattgtgttcctgttggatggttccatcaacttcaggagggacagtttccaggaagtgcttcgttttgtgtctgaaatagtggacacagtttatgaagatggcgactccatccaagtggggcttgtccagtacaactctgaccccactgacgaattcttcctgaaggacttctctaccaagaggcagattattgacgccatcaacaaagtggtctacaaagggggaagacacgccaacactaaggtgggccttgagcacctgcgggtaaaccactttgtgcctgaggcaggcagccgcctggaccagcgggtccctcagattgcctttgtgatcacgggaggaaagtcggtggaagatgcacaggatgtgagcctggccctcacccagaggggggtcaaagtgtttgctgttggagtgaggaatatcgactcggaggaggttggaaagatagcgtccaacagcgccacagcgttccgcgtgggcaacgtccaggagctgtccgaactgagcgagcaagttttggaaactttgcatgatgcgatgcatgaaaccctttgccctggtgtaactgatgctgccaaagcttgtaatctggatgtgattctggggtttgatggttctagagaccagaatgtttttgtggcccagaagggcttcgagtccaaggtggacgccatcttgaacagaatcagccagatgcacagggtcagctgcagcggtggccgctcgcccaccgtgcgtgtgtcagtggtggccaacacgccctcgggcccggtggaggcctttgactttgacgagtaccagccagagatgctcgagaagttccggaacatgcgcagccagcacccctacgtcctcacggaggacaccctgaaggtctacctgaacaagttcagacagtcctcgccggacagcgtgaaggtggtcattcattttactgatggagcagacggagatctggctgatttacacagagcatctgagaacctccgccaagaaggagtccgtgccttgatcctggtgggccttgaacgagtggtcaacttggagcggctaatgcatctggagtttgggcgagggtttatgtatgacaggcccctgaggcttaacttgctggacttggattatgaactagcggagcagcttgacaacattgccgagaaagcttgctgtggggttccctgcaagtgctctgggcagaggggagaccgcgggcccatcggcagcatcgggccaaagggtattcctggagaagacggctaccgaggctatcctggtgatgagggtggacccggtgagcgtggtccgcctggtgtgaacggcactcaaggtttccagggctgcccgggccagagaggagtaaagggctctcggggattcccaggagagaagggcgaagtaggagaaattggactggatggtctggatggtgaagatggagacaaaggattgcctggttcttctggagagaaagggaatcctggaagaaggggtgataaaggacctcgaggagagaaaggagaaagaggagatgttgggattcgaggggacccgggtaacccaggacaagacagccaggagagaggacccaaaggagaaaccggtgacctcggccccatggtaaggtgctgcacattcctagactctccctgtactgagggcaagagaaaggacacacttctcggctcatcagcagccacagaggccaaagacgtggcctttaacactgcaacgtagcctaagattagcagcagagtccccgtgaaggaagtctccgtggggaaccagagtgacccttgccaagtggggcttctcagcagaatctgtgcctcttagatatttacggaaggtgcttgttaagccaaaggcttgtagaggtgggagt

SEQ ID NO: 57009 - DNA, 6750 bp, Homo sapiens
gcttaaagaacatgtatttattatatttatttttcacgcaaattacccaaagcattgggggttagtgaatggaaaatagcaatttttacttttccttttttgtcaaggcccggttttgtattccaaactaaagaatgaatttataaaatgatggttggttgtctgtgataagacttccttctggtttaatcaggtgggtcttggggctcaaactgccacagggaatcatacttgagttaaagacagcccaggaaattgtttccccaatctggagcatgctactggcccattcatgatggtctctgagtatggaacttgggctagtgactgggcaccagcagctattgagtgcatgggctcaggtccctggttcccaggtaagtgagtctaccttcctgtattatcagtgaggtgtgaagtgtttagtagcagtatagtgtaaaccaaatttgtttaggaaggctttgcattgataggaagtaattgcttacatagtagaaaaatctaaaccaatgtctttttttaaagatgtcaaaaatggtgcggctgctgatataatatttctagtggattcctcttggaccattggagaggaacatttccaacttgttcgagagtttctatatgatgttgtaaaatccttagctgtgggagaaaatgatttccattttgctctggtccagttcaacggaaacccacataccgagttcctgttaaatacgtatcgtactaaacaagaagtcctttctcatatttccaacatgtcttatattgggggaaccaatcagactggaaaaggattagaatacataatgcaaagccacctcaccaaggctgctggaagccgggccggtgacggagtccctcaggttatcgtagtgttaactgatggacactcgaaggatggccttgctctgccctcagcggaacttaagtctgctgatgttaacgtgtttgcaattggagttgaggatgcagatgaaggagcgttaaaagaaatagcaagtgaaccgctcaatatgcatatgttcaacctagagaattttacctcacttcatgacatagtaggaaacttagtgtcctgtgtgcattcatccgtgagtccagaaagggctggggacacggaaacccttaaagacatcacagcacaagactctgctgacattattttccttattgatggatcaaacaacaccggaagtgtcaatttcgcagtcattctcgacttccttgtaaatctccttgagaaactcccaattggaactcagcagatccgagtgggggtggtccagtttagcgatgagcccagaaccatgttttccttggacacctactccaccaaggcccaggttctgggtgcagtgaaagccctcgggtttgctggtggggagttggccaatatcggcctcgcccttgatttcgtggtggagaaccacttcacccgggcagggggcagccgcgtggaggaaggggttccccaggtgctggtcctcataagtgccgggccttctagtgacgagattcgctacggggtggtagcactgaagcaggctagcgtgttctcattcggccttggagcccaggccgcctccagggcagagcttcagcacatagctaccgatgacaacttggtgtttactgtcccggaattccgtagctttggggacctccaggagaaattactgccgtacattgttggcgtggcccaaaggcacattgtcttgaaaccgccaaccattgtcacacaagtcattgaagtcaacaagagagacatagtcttcctggtggatggctcatctgcactgggactggccaacttcaatgccatccgagacttcattgctaaagtcatccagaggctggaaatcggacaggatcttatccaggtggcagtggcccagtatgcagacactgtgaggcctgaattttatttcaatacccatccaacaaaaagggaagtcataaccgctgtgcggaaaatgaagcccctggacggctcggccctgtacacgggctctgctctagactttgttcgtaacaacctattcacgagttcagccggctaccgggctgccgaggggattcctaagcttttggtgctgatcacaggtggtaagtccctagatgaaatcagccagcctgcccaggagctgaagagaagcagcataatggcctttgccattgggaacaagggtgccgatcaggctgagctggaagagatcgctttcgactcctccctggtgttcatcccagctgagttccgagccgccccattgcaaggcatgctgcctggcttgctggcacctctcaggaccctctctggaacccctgaagttcactcaaacaaaagagatatcatctttcttttggatggatcagccaacgttggaaaaaccaatttcccttatgtgcgcgactttgtaatgaacctagttaacagccttgatattggaaatgacaatattcgtgttggtttagtgcaatttagtgacactcctgtaacggagttctctttaaacacataccagaccaagtcagatatccttggtcatctgaggcagctgcagctccagggaggttcgggcctgaacacaggctcagccctaagctatgtctatgccaaccacttcacggaagctggcggcagcaggatccgtgaacacgtgccgcagctcctgcttctgctcacagctgggcagtctgaggactcctatttgcaagctgccaacgccttgacacgcgcgggcatcctgactttttgtgtgggagctagccaggcgaataaggcagagcttgagcagattgcttttaacccaagcctggtgtatctcatggatgatttcagctccctgccagctttgcctcagcagctgattcagcccctaaccacatatgttagtggaggtgtggaggaagtaccactcgctcagccagagagcaagcgagacattctgttcctctttgacggctcagccaatcttgtgggccagttccctgttgtccgtgactttctctacaagattatcgatgagctcaatgtgaagccagaggggacccgaattgcggtggctcagtacagcgatgatgtcaaggtggagtcccgttttgatgagcaccagagtaagcctgagatcctgaatcttgtgaagagaatgaagatcaagacgggcaaagccctcaacctgggctacgcgctggactatgcacagaggtacatttttgtgaagtctgctggcagccggatcgaggatggagtgcttcagttcctggtgctgctggtcgcaggaaggtcatctgaccgtgtggatgggccagcaagtaacctgaagcagagtggggttgtgcctttcatcttccaagccaagaacgcagaccctgctgagttagagcagatcgtgctgtctccagcgtttatcctggctgcagagtcgcttcccaagattggagatcttcatccacagatagtgaatctcttaaaatcagtgcacaacggagcaccagcaccagtttcaggtgaaaaggacgtggtgtttctgcttgatggctctgagggcgtcaggagcggcttccctctgttgaaagagtttgtccagagagtggtggaaagcctggatgtgggccaggaccgggtccgcgtggccgtggtgcagtacagcgaccggaccaggcccgagttctacctgaattcatacatgaacaagcaggacgtcgtcaacgctgtccgccagctgaccctgctgggagggccgacccccaacaccggggccgccctggagtttgtcctgaggaacatcctggtcagctctgcgggaagcaggataacagaaggtgtgccccagctgctgatcgtcctcacggccgacaggtctggggatgatgtgcggaacccctccgtggtcgtgaagaggggtggggctgtgcccattggcattggcatcgggaacgctgacatcacagagatgcagaccatctccttcatcccggactttgccgtggccattcccacctttcgccagctggggaccgtccaacaggtcatctctgagagggtgacccagctcacccgcgaggagctgagcaggctgcagccggtgttgcagcctctaccgagcccaggtgttggtggcaagagggacgtggtctttctcatcgatgggtcccaaagtgccgggcctgagttccagtacgttcgcaccctcatagagaggctggttgactacctggacgtgggctttgacaccacccgggtggctgtcatccagttcagcgatgaccccaaggcggagttcctgctgaacgcccattccagcaaggatgaagtgcagaacgcggtgcagcggctgaggcccaagggagggcggcagatcaacgtgggcaatgccctggagtacgtgtccaggaacatcttcaagaggcccctggggagccgcattgaagagggcgtcccgcagttcctggtcctcatctcgtctggaaagtctgacgatgaggtggacgacccggcggtggagctcaagcagtttggcgtggcccctttcacgatcgccaggaacgcagaccaggaggagctggtgaagatctcgctgagccccgaatatgtgttctcggtgagcaccttccgggagctgcccagcctggagcagaaactgctgacgcccatcacgaccctgacctcagagcagatccagaagctcttagccagcactcgctatccacctccagcagttgagagtgatgctgcagacattgtctttctgatcgacagctctgagggagttaggccagatggctttgcacatattcgagattttgttagcaggattgttcgaagactcaacatcggccccagtaaagtgagagttggggtcgtgcagttcagcaatgatgtcttcccagaattctatctgaaaacctacagatcccaggccccggtgctggacgccatacggcgcctgaggctcagaggggggtccccactgaacactggcaaggctctcgaatttgtggcaagaaacctctttgttaagtctgcggggagtcgcatagaagacggggtgccccaacacctggtcctggtcctgggtggaaaatcccaggacgatgtgtccaggttcgcccaggtgatccgttcctcgggcattgtgagtttaggggtaggagaccggaacatcgacagaacagagctgcagaccatcaccaatgaccccagactggtcttcacagtgcgagagttcagagagcttcccaacatagaagaaagaatcatgaactcgtttggaccctccgcagccactcctgcacctccaggggtggacacccctcctccttcacggccagagaagaagaaagcagacattgtgttcctgttggatggttccatcaacttcaggagggacagtttccaggaagtgcttcgttttgtgtctgaaatagtggacacagtttatgaagatggcgactccatccaagtggggcttgtccagtacaactctgaccccactgacgaattcttcctgaaggacttctctaccaagaggcagattattgacgccatcaacaaagtggtctacaaagggggaagacacgccaacactaaggtgggccttgagcacctgcgggtaaaccactttgtgcctgaggcaggcagccgcctggaccagcgggtccctcagattgcctttgtgatcacgggaggaaagtcggtggaagatgcacaggatgtgagcctggccctcacccagaggggggtcaaagtgtttgctgttggagtgaggaatatcgactcggaggaggttggaaagatagcgtccaacagcgccacagcgttccgcgtgggcaacgtccaggagctgtccgaactgagcgagcaagttttggaaactttgcatgatgcgatgcatgaaaccctttgccctggtgtaactgatgctgccaaagcttgtaatctggatgtgattctggggtttgatggttctagagaccagaatgtttttgtggcccagaagggcttcgagtccaaggtggacgccatcttgaacagaatcagccagatgcacagggtcagctgcagcggtggccgctcgcccaccgtgcgtgtgtcagtggtggccaacacgccctcgggcccggtggaggcctttgactttgacgagtaccagccagagatgctcgagaagttccggaacatgcgcagccagcacccctacgtcctcacggaggacaccctgaaggtctacctgaacaagttcagacagtcctcgccggacagcgtgaaggtggtcattcattttactgatggagcagacggagatctggctgatttacacagagcatctgagaacctccgccaagaaggagtccgtgccttgatcctggtgggccttgaacgagtggtcaacttggagcggctaatgcatctggagtttgggcgagggtttatgtatgacaggcccctgaggcttaacttgctggacttggattatgaactagcggagcagcttgacaacattgccgagaaagcttgctgtggggttccctgcaagtgctctgggcagaggggagaccgcgggcccatcggcagcatcgggccaaagggtattcctggagaagacggctaccgaggctatcctggtgatgagggtggacccggtgagcgtggtccgcctggtgtgaacggcactcaaggtttccagggctgcccgggccagagaggagtaaagctctcgcgagtcccacaaacacagcgcaatt

SEQ ID NO: 57010 - DNA, 3290 bp, Homo sapiens
gccggtaacccgctggccaatggcatccgaggcgtatggggagatcgactccaggatagtggacagaagggagaccctggtacccaggaccagctggtcccaagggcaacaggggcgactccatcgatcaatgtgccctcatccaaagcatcaaagataaatgcccttgctgttacgggcccctggagtgccccgtcttcccaacagaactagcctttgctttagacacctctgagggagtcaaccaagacactttcggccggatgcgagatgtggtcttgagtattgtgaatgacctgaccattgctgagagcaactgcccacggggggcccgggtggctgtggtcacctacaacaacgaggtgaccacggagatccggtttgctgactccaagaggaagtcggtcctcctggacaagattaagaaccttcaggtggctctgacatccaaacagcagagtctggagactgccatgtcgtttgtggccaggaacacatttaagcgtgtgaggaacggattcctaatgaggaaagtggctgttttcttcagcaacacacccacaagagcatccccacagctcagagaggctgtgctcaagctctcagatgcggggatcacccccttgttccttacaaggcaggaagaccggcagctcatcaacgctttgcagatcaataacacagcagtggggcatgcgcttgtcctgcctgcagggagagacctcacagacttcctggagaatgtcctcacgtgtcatgtttgcttggacatctgcaacatcgacccatcctgtggatttggcagttggaggccttccttcagggacaggagagcggcagggagcgatgtggacatcgacatggctttcatcttagacagcgctgagaccaccaccctgttccagttcaatgagatgaagaagtacatagcgtacctggtcagacaactggacatgagcccagatcccaaggcctcccagcacttcgccagagtggcagttgtgcagcacgcgccctctgagtccgtggacaatgccagcatgccacctgtgaaggtggaattctccctgactgactatggctccaaggagaagctggtggacttcctcagcaggggaatgacacagttgcagggaaccagggccttaggcagtgccattgaatacaccatagagaatgtctttgaaagtgccccaaacccacgggacctgaaaattgtggtcctgatgctgacgggcgaggtgccggagcagcagctggaggaggcccagagagtcatcctgcaggccaaatgcaagggctacttcttcgtggtcctgggcattggcaggaaggtgaacatcaaggaggtatacaccttcgccagtgagccaaacgacgtcttcttcaaattagtggacaagtccaccgagctcaacgaggagcctttgatgcgcttcgggaggctgttgccgtccttcgtcagcagtgaaaatgctttttacttgtccccagatatcaggaaacagtgtgattggttccaaggggaccaacccacaaagaaccttgtgaagtttggtcacaaacaagtaaatgttccgaataacgttacttcaagtcctacatccaacccagtgacgacaacgaagccggtgactacgacgaagccggtgaccaccacaacaaagcctgtaaccaccacaacaaagcctgtgactattataaatcagccatctgtgaagccagccgctgcaaagccggcccctgcgaaacctgtggctgccaagcctgtggccacaaagacggccactgttagacccccagtggcggtgaagccagcaacagcagcgaagcctgtagcagcaaagccagcagctgtaagaccccccgctgctgctgcaaaaccagtggcgaccaagcctgaggtccctaggccacaggcagccaaaccagctgccaccaagccagccaccactaagcccgtggttaagatgctccgtgaagtccaggtgtttgagataacagagaacagcgccaaactccactgggagaggcctgagccccccggtccttatttttatgacctcaccgtcacctcagcccatgatcagtccctggttctgaagcagaacctcacggtcacggaccgcgtcattggaggcctgctcgctgggcagacataccatgtggctgtggtctgctacctgaggtctcaggtcagagccacctaccacggaagtttcagtacaaagaaatctcagcccccacctccacagccagcaaggtcagcttctagttcaaccatcaatctaatggtgagcacagaaccattggctctcactgaaacagatatatgcaagttgccgaaagacgaaggaacttgcagggatttcatattaaaatggtactatgatccaaacaccaaaagctgtgcaagattctggtatggaggttgtggtggaaacgaaaacaaatttggatcacagaaagaatgtgaaaaggtttgcgctcctgtgctcgccaaacccggagtcatcagtgtgatgggaacctaagcgtgggtggccaacatcatatacctcttgaagaagaaggagtcagccatcgccaacttgtctctgtagaagctccgggtgtagattcccttgcactgtatcatttcatgctttgatttacactcgaactcgggagggaacatcctgctgcatgacctatcagtatggtgctaatgtgtctgtggaccctcgctctctgtctccagcagttctctcgaatactttgaatgttgtgtaacagttagccactgctggtgtttatgtgaacattcctatcaatccaaattccctctggagtttcatgttatgcctgttgcaggcaaatgtaaagtctagaaaataatgcaaatgtcacggctactctatatacttttgcttggttcattttttttcccttttagttaagcatgactttagatgggaagcctgtgtatcgtggagaaacaagagaccaactttttcattccctgcccccaatttcccagactagatttcaagctaattttctttttctgaagcctctaacaaatgatctagttcagaaggaagcaaaatcccttaatctatgtgcaccgttgggaccaatgccttaattaaagaatttaaaaaagttgtaatagagaatatttttggcattcctctcaatgttgtgtgttttttttttttgtgtgctggagggaggggatttaattttaattttaaaatgtttaggaaatttatacaaagaaactttttaataaagtatattgaaagttt

SEQ ID NO: 57011 - DNA, 4771 bp, Homo sapiens
gcttaaagaacatgtatttattatatttatttttcacgcaaattacccaaagcattgggggttagtgaatggaaaatagcaatttttacttttccttttttgtcaaggcccggttttgtattccaaactaaagaatgaatttataaaatgatggttggttgtctgtgataagacttccttctggtttaatcaggtgggtcttggggctcaaactgccacagggaatcatacttgagttaaagacagcccaggaaattgtttccccaatctggagcatgctactggcccattcatgatggtctctgagtatggaacttgggctagtgactgggcaccagcagctattgagtgcatgggctcaggtccctggttcccaggtaagtgagtctaccttcctgtattatcagtgaggtgtgaagtgtttagtagcagtatagtgtaaaccaaatttgtttaggaaggctttgcattgataggaagtaattgcttacatagtagaaaaatctaaaccaatgtctttttttaaagatgtcaaaaatggtgcggctgctgatataatatttctagtggattcctcttggaccattggagaggaacatttccaacttgttcgagagtttctatatgatgttgtaaaatccttagctgtgggagaaaatgatttccattttgctctggtccagttcaacggaaacccacataccgagttcctgttaaatacgtatcgtactaaacaagaagtcctttctcatatttccaacatgtcttatattgggggaaccaatcagactggaaaaggattagaatacataatgcaaagccacctcaccaaggctgctggaagccgggccggtgacggagtccctcaggttatcgtagtgttaactgatggacactcgaaggatggccttgctctgccctcagcggaacttaagtctgctgatgttaacgtgtttgcaattggagttgaggatgcagatgaaggagcgttaaaagaaatagcaagtgaaccgctcaatatgcatatgttcaacctagagaattttacctcacttcatgacatagtaggaaacttagtgtcctgtgtgcattcatccgtgagtccagaaagggctggggacacggaaacccttaaagacatcacagcacaagactctgctgacattattttccttattgatggatcaaacaacaccggaagtgtcaatttcgcagtcattctcgacttccttgtaaatctccttgagaaactcccaattggaactcagcagatccgagtgggggtggtccagtttagcgatgagcccagaaccatgttttccttggacacctactccaccaaggcccaggttctgggtgcagtgaaagccctcgggtttgctggtggggagttggccaatatcggcctcgcccttgatttcgtggtggagaaccacttcacccgggcagggggcagccgcgtggaggaaggggttccccaggtgctggtcctcataagtgccgggccttctagtgacgagattcgctacggggtggtagcactgaagcaggctagcgtgttctcattcggccttggagcccaggccgcctccagggcagagcttcagcacatagctaccgatgacaacttggtgtttactgtcccggaattccgtagctttggggacctccaggagaaattactgccgtacattgttggcgtggcccaaaggcacattgtcttgaaaccgccaaccattgtcacacaagtcattgaagtcaacaagagagacatagtcttcctggtggatggctcatctgcactgggactggccaacttcaatgccatccgagacttcattgctaaagtcatccagaggctggaaatcggacaggatcttatccaggtggcagtggcccagtatgcagacactgtgaggcctgaattttatttcaatacccatccaacaaaaagggaagtcataaccgctgtgcggaaaatgaagcccctggacggctcggccctgtacacgggctctgctctagactttgttcgtaacaacctattcacgagttcagccggctaccgggctgccgaggggattcctaagcttttggtgctgatcacaggtggtaagtccctagatgaaatcagccagcctgcccaggagctgaagagaagcagcataatggcctttgccattgggaacaagggtgccgatcaggctgagctggaagagatcgctttcgactcctccctggtgttcatcccagctgagttccgagccgccccattgcaaggcatgctgcctggcttgctggcacctctcaggaccctctctggaacccctgaagttcactcaaacaaaagagatatcatctttcttttggatggatcagccaacgttggaaaaaccaatttcccttatgtgcgcgactttgtaatgaacctagttaacagccttgatattggaaatgacaatattcgtgttggtttagtgcaatttagtgacactcctgtaacggagttctctttaaacacataccagaccaagtcagatatccttggtcatctgaggcagctgcagctccagggaggttcgggcctgaacacaggctcagccctaagctatgtctatgccaaccacttcacggaagctggcggcagcaggatccgtgaacacgtgccgcagctcctgcttctgctcacagctgggcagtctgaggactcctatttgcaagctgccaacgccttgacacgcgcgggcatcctgactttttgtgtgggagctagccaggcgaataaggcagagcttgagcagattgcttttaacccaagcctggtgtatctcatggatgatttcagctccctgccagctttgcctcagcagctgattcagcccctaaccacatatgttagtggaggtgtggaggaagtaccactcgctcagccagagagcaagcgagacattctgttcctctttgacggctcagccaatcttgtgggccagttccctgttgtccgtgactttctctacaagattatcgatgagctcaatgtgaagccagaggggacccgaattgcggtggctcagtacagcgatgatgtcaaggtggagtcccgttttgatgagcaccagagtaagcctgagatcctgaatcttgtgaagagaatgaagatcaagacgggcaaagccctcaacctgggctacgcgctggactatgcacagaggtacatttttgtgaagtctgctggcagccggatcgaggatggagtgcttcagttcctggtgctgctggtcgcaggaaggtcatctgaccgtgtggatgggccagcaagtaacctgaagcagagtggggttgtgcctttcatcttccaagccaagaacgcagaccctgctgagttagagcagatcgtgctgtctccagcgtttatcctggctgcagagtcgcttcccaagattggagatcttcatccacagatagtgaatctcttaaaatcagtgcacaacggagcaccagcaccagtttcaggtgaaaaggacgtggtgtttctgcttgatggctctgagggcgtcaggagcggcttccctctgttgaaagagtttgtccagagagtggtggaaagcctggatgtgggccaggaccgggtccgcgtggccgtggtgcagtacagcgaccggaccaggcccgagttctacctgaattcatacatgaacaagcaggacgtcgtcaacgctgtccgccagctgaccctgctgggagggccgacccccaacaccggggccgccctggagtttgtcctgaggaacatcctggtcagctctgcgggaagcaggataacagaaggtgtgccccagctgctgatcgtcctcacggccgacaggtctggggatgatgtgcggaacccctccgtggtcgtgaagaggggtggggctgtgcccattggcattggcatcgggaacgctgacatcacagagatgcagaccatctccttcatcccggactttgccgtggccattcccacctttcgccagctggggaccgtccaacaggtcatctctgagagggtgacccagctcacccgcgaggagctgagcaggctgcagccggtgttgcagcctctaccgagcccaggtgttggtggcaagagggacgtggtctttctcatcgatgggtcccaaagtgccgggcctgagttccagtacgttcgcaccctcatagagaggctggttgactacctggacgtgggctttgacaccacccgggtggctgtcatccagttcagcgatgaccccaaggcggagttcctgctgaacgcccattccagcaaggatgaagtgcagaacgcggtgcagcggctgaggcccaagggagggcggcagatcaacgtgggcaatgccctggagtacgtgtccaggaacatcttcaagaggcccctggggagccgcattgaagagggcgtcccgcagttcctggtcctcatctcgtctggaaagtctgacgatgaggtggacgacccggcggtggagctcaagcagtttggcgtggcccctttcacgatcgccaggaacgcagaccaggaggagctggtgaagatctcgctgagccccgaatatgtgttctcggtgagcaccttccgggagctgcccagcctggagcagaaactgctgacgcccatcacgaccctgacctcagagcagatccagaagctcttagccagcactcgctatccacctccagcagttgagagtgatgctcagacatcgtctgcgctgggtgcgagctccac

SEQ ID NO: 57012 - DNA, 6694 bp, Homo sapiens
taaggctttccctgctgcctcccaggctccgttccccaacccctatttctctgtcccctctgggagttgcagctaccagcaccccctctgtagtgttcctgagagggcctcatgagtcccagcgcccatgcctgcaggtcccaggtgtcctcgcattaagttcccgctgagcatcccaggcatgctgacacgctgagccctctgtggctgcttttagatgtgcagtcaagatgaaaaatgaccagtttctaagagaaagtcatcagccagacactgaaagccttctgggatgggaccccaggcccagcgctggcgcagtgagaacttcgagagacccgtggacctggagggctctggggatgatgactcctttcccgatgatgaactggatgacctctactcggggtcgggctcgggctgtaagtacccccctccctacctctgcctgggggcagtgaccagtctgtatccagcctcaactctgagaagcccacggggggcttgcttcagtgaggcagggggcattcactgcctgggtcaggcaagttcttcttgctctggatccccagaacaagaagggcagaacatccttctggggatagaacaagacctgggaggacctcagggcccagaatgtccaggtctccagggtcccacgtctgcatctttgtgtgtgctatgtggctttctctgcagaccttgcttggttccggtggtcccgtcaggtgcaataagctgtggccaatggtggggttagggcagtgatgacacagggcaggtgcttcaagtggtgcctgggatggccccgccctggggaaggggagccaggtcagctgggtctagcagaatctcgggagagaagggcaccgcgaaccccactctgccatgtagcaactgtgtgcccctcggtgctccccctccctgaatccctgtattttcacctgtggatggtgagaaatacgacttcttctcagtgcctctaggagggtttgggataggaagctggggtctggcacagaggaggagctctcaaaatggtagcaaaaagaaggcagctgagactgggcccagtgagggcacgggctggcatctgaggagatggtacggggtctgcacgccacagagctggctccccacagccctcgcctctggtctcccctccttagccaagtcctttgagcctctttcaaattaatctttgtaaaacccgtttatattgggtcacatctctattcgcaaagttccctggctcccctccctcctgcctggttccgagcccaggagctggctgtggcttctccctcccccatcccctactccccgtctcatttcctcccaagttccttcactgtcccggctttgcgtcagccagattgctcaagcagttcccctgcctcaagggcttcttttcccttttaccctccgcctctgcctctgggggaagcccttagtgtaccacccctgccttgaggcttgtggtaggggtgcctttggggtctgactcttcccagaatgccactcctgtgttcccctgcaagccccagcaagttttgcagccagtagcgcctcagttgctgctgcctggattcaacctcatagaaactgtaggctgggtgggcaggaatagtcaaggaaggcttcccgggagaggcggcccccagaatttttgacttggcagagagaagttggggaacatcagcaactgaccacctttagctgggctgtgccttcctcctttctctcatcttttctgggaaaattgggtaaagagagggggttgggagacctaatcttgatggccattgcttacctgggatcctcatgcccctcacaaccacccagctccctagctctctccctctcccccaccccctcagacttcgagcaggagtcgggcattgagacagccatgcgcttcagcccagatgtagccctggcggtgtccaccacacctgcggtgctgcccaccacgaacatccagcctgtgggcacaccatttgaagagctcccctctgagcgccccaccctggagccagccaccagccccctggtggtgacagaagtcccggaagagcccagccagagagccaccaccgtctccactaccatggctaccactgctgccacaagcacaggggacccgactgtggccacagtgcctgccacagtggccaccgccacccccagcacccctgcagcacccccttttacggccaccactgctgttataaggaccactggcgtacggaggcttctgcctctcccactgaccacagtggctacggcacgggccactacccccgaggcgccctccccgcccaccacggcggctgtcttggacaccgaggccccaacacccaggctggtcagcacagctacctcccggccaagagcccttcccaggccggccaccacccaggagcctgacatccctgagaggagcaccctgcccctggggaccactgcccctggacccacagaggtggctcagaccccaactccagagaccttcctgaccacaatccgggatgagccagaggttccggtgagtggggggcccagtggagacttcgagctgccagaagaagagaccacacaaccagacacagccaatgaggtggtagctgtgggaggggctgcggccaaggcatcatctccacctgggacactgcccaagggtgcccgcccgggccctggcctcctggacaatgccatcgactcgggcagctcagctgctcagctgcctcagaagagtatcctggagcggaaggaggtgctcgtagctgtgattgtgggcggggtggtgggcgccctctttgctgccttcttggtcacactgctcatctatcgtatgaagaaaaaggatgagggcagctacacgctggaggaacccaagcaggcgagcgtcacataccagaagcctgacaagcaggaggagttctatgcctagtggagccacagtgcctccctgcagcctcaacaccaccctgctgtccagtccccagcctggccccaccagcccaagcctgggactgggcctggaacctggccccagttcttctctgccctctctcccaaggtctgcccaggctgccagcctcacacagatcttccccgaggaagaggggctgctgccatctgccccagactgtgcccttacgagctcatctcttgttcccctcatccctgccaccagtctggggcttcaggacctcatgtcagatggatgggaggaagaaagctcctgattggctggtggtggaagaaagggtggggcttgagatgagcctgagccctgacttggcacccacagtgctcactgagatctcctttttggggcagagaggcactcaggctggtttccaggacaaacatttggtaaacacagcccttgaaatcatctagacactgcaacctcttgctcgtatcccagggcctctctctagctgggtgagagggtgtcccttgtcaccagcctgttttgtcctggtctctctggggttgttgaatctctcctcttgcctgccaagtacacatgtacccagacttcatttctttctgcatcttcccccaagaaacagcttcctgagggtgctggggcagccactggtgaggaggggctgctctgatgtccctcctatgaggggactctgcacagacaccattgcccacactatcaccatattttcactcagtcacacacaagacaaaagcatgcaatgacaaaaccatacgcaatcctgaccgcccagccaatcaagacatatcacagaacacacgcgtccttccaagaatgtttatcctcatgcatcacttacacacccccagacacgtactgcaatgcaagtcactagtcatggtcacatgacagtgacagtgtggcctcctcctaccccaaatacacccacactctggcaccacacacattgtctccagctttcaggcttactggggagggtggaatcgagccagaacaatcagcccatattgggtccccctaagttgccccgtcatactcagtcccatgccatggtgcccacaccaaccatgcagccaccaaccccagccagtgtcagacacaatcccatgtggatgcacagtctcactccacatgacctgctctcaatgctggagggaaacaggcaggcccttgcctttctcggaaaaagtgtggggccacagcccttttagggcattgcatgcaggtgggcctggcttcacccctacctgcttcctccccaccgcagctggcagagggggaggtttggggccagacccccactagctgggagcctgggggctcctctaaggctgaggaaggaaatttggccccaggttgttggggggtcttgggtctcccaggacggaaggcccagggcagggagggggcatgtggttgggctcctttatctccctgtgtccccttcctgctttgagctagggggctgactctgcctcccaggacacaagtctccaaagtgcctgtgagggcgggccctccgcaccctctgccctctgcctggcaggccaacctcagcccacctgcccagaggccctccctgtggacaccccctcacctatttggccaaacaattctggctgcagcttcaggggccatggctggaagcagcccctgcagatccctcaggccccgaggtcagggtttgagggatgagaccaggtgatagtgggggaggggttacttcctttgttacctagcaagtagggctatttccatcggtattttaaatgtggggtcacagatcttttggggagggtgtgcttggcagggggcctcttggagccaaagggatgtggtgtgagttgcgattggctggcactcacacccccacccctcacccacatcccagattcaagtcaggaaggcaggttttatttcagggcccttttcaagatgccctggcagcagatttctgcaggatgaggggtagcggtgtgtaggcagtgagggggaggttccaggggctgtcccacagcctgtcttttccaggctgggctccatcttccagtcccaaaaccctccttcacagggcccagaggcttgtgaggaagccaggtggacccagccttagaagagtgggcatggggggcccctgatatctggagggggcgggttggcctcagtcatctttggagcagaagggctgggtcctggggccacagaccacaaggctcagcctccctaccctgctccctggggtgctgctgtcttggagagcacagctctggtgagacggcctgggcaggccgaggctgagaaaccagggaggatagaggagaaaagggcttgggcccccagccccagaagatgctggaccccaggtgggagacccaacagtgggtgcagtttctcagtagggctggagccaatggtgggggtggccccggcaggcctggctcctcacatcccaggggttggcttctgatttggggcttgggctccaggcactggcttctcttctctgtgtccttagcatttgagagaagaggccaggggccttgttcatggatccctggacccaaggcagatgtccaggctttatcctcctgaggatgaggagtctgaccagcccaaatctgccctggccggcctgaccggggcaaggcagtccaagagagttcagtgaggaccagctaggctctcccaggtgcaatgtgggtgcagggccctcatgtccccctacccctgcctgtgatggagtgttctgaggggctttggcatttgctggaagcacagggagttccaaatgagagggagcttctgtggcttgagagcctctggggccttggctgccagagcacgaggcaggccaggacctggagagcccagaccctgtctccaggaggccaggaggccagatgggggccttgcctgaaagactggtccccttgatcgctggaggcatgtgggtggcaaccagggctgggcagggcttagggtgtgtgggccaaacccccctggggttggcaaagccgcctgtcaggcctcctggtgggggcccctggacacagggagcagaccctctgcctcatggggtaggagtggctgcctcctgtgttctctggatttcttctcccaacaactacaaccctggacttgcctccccaggcctcttgcctgtaaatagaagcccgcaaactgtacagatttacagaggcatcgagactgggccctgggagttgccatctgagagccgatggccccagcatcccccaggtgcctgcctggcaccacagtgaccctggcctcagcgtggcaaatgcatgtaaatatttttcgtaggcagcgtggctccagagagccccctgaagacagtgtccctccctcctgtgagtcctttctcctgtacagaacctgcctggggtgggtgggggtctgccattccctcccccaggccttccctgccccttctctcccctgtaacctgtttattaaccatacctgtcctgagttcatggccaaaaccttaaataagaaaaacaaaagaaaaagacagtggaaaaaagagaccaaggcgcctgccccactgcgggtactctcctgttccagccttgtgaaggaactggttttgtttttgtttttgtttttgtttttttttgtttgtttgtttgttttttaacacttcctgtgctgtgcccatttataagaggaaataaaattaagctgaaatga

SEQ ID NO: 57013 - DNA, 6652 bp, Homo sapiens
taaggctttccctgctgcctcccaggctccgttccccaacccctatttctctgtcccctctgggagttgcagctaccagcaccccctctgtagtgttcctgagagggcctcatgagtcccagcgcccatgcctgcaggtcccaggtgtcctcgcattaagttcccgctgagcatcccaggcatgctgacacgctgagccctctgtggctgcttttagatgtgcagtcaagatgaaaaatgaccagtttctaagagaaagtcatcagccagacactgaaagccttctgggatgggaccccaggcccagcgctggcgcagtgagaacttcgagagacccgtggacctggagggctctggggatgatgactcctttcccgatgatgaactggatgacctctactcggggtcgggctcgggctgtaagtacccccctccctacctctgcctgggggcagtgaccagtctgtatccagcctcaactctgagaagcccacggggggcttgcttcagtgaggcagggggcattcactgcctgggtcaggcaagttcttcttgctctggatccccagaacaagaagggcagaacatccttctggggatagaacaagacctgggaggacctcagggcccagaatgtccaggtctccagggtcccacgtctgcatctttgtgtgtgctatgtggctttctctgcagaccttgcttggttccggtggtcccgtcaggtgcaataagctgtggccaatggtggggttagggcagtgatgacacagggcaggtgcttcaagtggtgcctgggatggccccgccctggggaaggggagccaggtcagctgggtctagcagaatctcgggagagaagggcaccgcgaaccccactctgccatgtagcaactgtgtgcccctcggtgctccccctccctgaatccctgtattttcacctgtggatggtgagaaatacgacttcttctcagtgcctctaggagggtttgggataggaagctggggtctggcacagaggaggagctctcaaaatggtagcaaaaagaaggcagctgagactgggcccagtgagggcacgggctggcatctgaggagatggtacggggtctgcacgccacagagctggctccccacagccctcgcctctggtctcccctccttagccaagtcctttgagcctctttcaaattaatctttgtaaaacccgtttatattgggtcacatctctattcgcaaagttccctggctcccctccctcctgcctggttccgagcccaggagctggctgtggcttctccctcccccatcccctactccccgtctcatttcctcccaagttccttcactgtcccggctttgcgtcagccagattgctcaagcagttcccctgcctcaagggcttcttttcccttttaccctccgcctctgcctctgggggaagcccttagtgtaccacccctgccttgaggcttgtggtaggggtgcctttggggtctgactcttcccagaatgccactcctgtgttcccctgcaagccccagcaagttttgcagccagtagcgcctcagttgctgctgcctggattcaacctcatagaaactgtaggctgggtgggcaggaatagtcaaggaaggcttcccgggagaggcggcccccagaatttttgacttggcagagagaagttggggaacatcagcaactgaccacctttagctgggctgtgccttcctcctttctctcatcttttctgggaaaattgggtaaagagagggggttgggagacctaatcttgatggccattgcttacctgggatcctcatgcccctcacaaccacccagctccctagctctctccctctcccccaccccctcagacttcgagcaggagtcgggcattgagacagccatgcgcttcagcccagatgtagccctggcggtgtccaccacaccatttgaagagctcccctctgagcgccccaccctggagccagccaccagccccctggtggtgacagaagtcccggaagagcccagccagagagccaccaccgtctccactaccatggctaccactgctgccacaagcacaggggacccgactgtggccacagtgcctgccacagtggccaccgccacccccagcacccctgcagcacccccttttacggccaccactgctgttataaggaccactggcgtacggaggcttctgcctctcccactgaccacagtggctacggcacgggccactacccccgaggcgccctccccgcccaccacggcggctgtcttggacaccgaggccccaacacccaggctggtcagcacagctacctcccggccaagagcccttcccaggccggccaccacccaggagcctgacatccctgagaggagcaccctgcccctggggaccactgcccctggacccacagaggtggctcagaccccaactccagagaccttcctgaccacaatccgggatgagccagaggttccggtgagtggggggcccagtggagacttcgagctgccagaagaagagaccacacaaccagacacagccaatgaggtggtagctgtgggaggggctgcggccaaggcatcatctccacctgggacactgcccaagggtgcccgcccgggccctggcctcctggacaatgccatcgactcgggcagctcagctgctcagctgcctcagaagagtatcctggagcggaaggaggtgctcgtagctgtgattgtgggcggggtggtgggcgccctctttgctgccttcttggtcacactgctcatctatcgtatgaagaaaaaggatgagggcagctacacgctggaggaacccaagcaggcgagcgtcacataccagaagcctgacaagcaggaggagttctatgcctagtggagccacagtgcctccctgcagcctcaacaccaccctgctgtccagtccccagcctggccccaccagcccaagcctgggactgggcctggaacctggccccagttcttctctgccctctctcccaaggtctgcccaggctgccagcctcacacagatcttccccgaggaagaggggctgctgccatctgccccagactgtgcccttacgagctcatctcttgttcccctcatccctgccaccagtctggggcttcaggacctcatgtcagatggatgggaggaagaaagctcctgattggctggtggtggaagaaagggtggggcttgagatgagcctgagccctgacttggcacccacagtgctcactgagatctcctttttggggcagagaggcactcaggctggtttccaggacaaacatttggtaaacacagcccttgaaatcatctagacactgcaacctcttgctcgtatcccagggcctctctctagctgggtgagagggtgtcccttgtcaccagcctgttttgtcctggtctctctggggttgttgaatctctcctcttgcctgccaagtacacatgtacccagacttcatttctttctgcatcttcccccaagaaacagcttcctgagggtgctggggcagccactggtgaggaggggctgctctgatgtccctcctatgaggggactctgcacagacaccattgcccacactatcaccatattttcactcagtcacacacaagacaaaagcatgcaatgacaaaaccatacgcaatcctgaccgcccagccaatcaagacatatcacagaacacacgcgtccttccaagaatgtttatcctcatgcatcacttacacacccccagacacgtactgcaatgcaagtcactagtcatggtcacatgacagtgacagtgtggcctcctcctaccccaaatacacccacactctggcaccacacacattgtctccagctttcaggcttactggggagggtggaatcgagccagaacaatcagcccatattgggtccccctaagttgccccgtcatactcagtcccatgccatggtgcccacaccaaccatgcagccaccaaccccagccagtgtcagacacaatcccatgtggatgcacagtctcactccacatgacctgctctcaatgctggagggaaacaggcaggcccttgcctttctcggaaaaagtgtggggccacagcccttttagggcattgcatgcaggtgggcctggcttcacccctacctgcttcctccccaccgcagctggcagagggggaggtttggggccagacccccactagctgggagcctgggggctcctctaaggctgaggaaggaaatttggccccaggttgttggggggtcttgggtctcccaggacggaaggcccagggcagggagggggcatgtggttgggctcctttatctccctgtgtccccttcctgctttgagctagggggctgactctgcctcccaggacacaagtctccaaagtgcctgtgagggcgggccctccgcaccctctgccctctgcctggcaggccaacctcagcccacctgcccagaggccctccctgtggacaccccctcacctatttggccaaacaattctggctgcagcttcaggggccatggctggaagcagcccctgcagatccctcaggccccgaggtcagggtttgagggatgagaccaggtgatagtgggggaggggttacttcctttgttacctagcaagtagggctatttccatcggtattttaaatgtggggtcacagatcttttggggagggtgtgcttggcagggggcctcttggagccaaagggatgtggtgtgagttgcgattggctggcactcacacccccacccctcacccacatcccagattcaagtcaggaaggcaggttttatttcagggcccttttcaagatgccctggcagcagatttctgcaggatgaggggtagcggtgtgtaggcagtgagggggaggttccaggggctgtcccacagcctgtcttttccaggctgggctccatcttccagtcccaaaaccctccttcacagggcccagaggcttgtgaggaagccaggtggacccagccttagaagagtgggcatggggggcccctgatatctggagggggcgggttggcctcagtcatctttggagcagaagggctgggtcctggggccacagaccacaaggctcagcctccctaccctgctccctggggtgctgctgtcttggagagcacagctctggtgagacggcctgggcaggccgaggctgagaaaccagggaggatagaggagaaaagggcttgggcccccagccccagaagatgctggaccccaggtgggagacccaacagtgggtgcagtttctcagtagggctggagccaatggtgggggtggccccggcaggcctggctcctcacatcccaggggttggcttctgatttggggcttgggctccaggcactggcttctcttctctgtgtccttagcatttgagagaagaggccaggggccttgttcatggatccctggacccaaggcagatgtccaggctttatcctcctgaggatgaggagtctgaccagcccaaatctgccctggccggcctgaccggggcaaggcagtccaagagagttcagtgaggaccagctaggctctcccaggtgcaatgtgggtgcagggccctcatgtccccctacccctgcctgtgatggagtgttctgaggggctttggcatttgctggaagcacagggagttccaaatgagagggagcttctgtggcttgagagcctctggggccttggctgccagagcacgaggcaggccaggacctggagagcccagaccctgtctccaggaggccaggaggccagatgggggccttgcctgaaagactggtccccttgatcgctggaggcatgtgggtggcaaccagggctgggcagggcttagggtgtgtgggccaaacccccctggggttggcaaagccgcctgtcaggcctcctggtgggggcccctggacacagggagcagaccctctgcctcatggggtaggagtggctgcctcctgtgttctctggatttcttctcccaacaactacaaccctggacttgcctccccaggcctcttgcctgtaaatagaagcccgcaaactgtacagatttacagaggcatcgagactgggccctgggagttgccatctgagagccgatggccccagcatcccccaggtgcctgcctggcaccacagtgaccctggcctcagcgtggcaaatgcatgtaaatatttttcgtaggcagcgtggctccagagagccccctgaagacagtgtccctccctcctgtgagtcctttctcctgtacagaacctgcctggggtgggtgggggtctgccattccctcccccaggccttccctgccccttctctcccctgtaacctgtttattaaccatacctgtcctgagttcatggccaaaaccttaaataagaaaaacaaaagaaaaagacagtggaaaaaagagaccaaggcgcctgccccactgcgggtactctcctgttccagccttgtgaaggaactggttttgtttttgtttttgtttttgtttttttttgtttgtttgtttgttttttaacacttcctgtgctgtgcccatttataagaggaaataaaattaagctgaaatga

SEQ ID NO: 57014 - DNA, 3856 bp, Homo sapiens
gggtgctctagaggatccggaaggatctgtgggcagctacacgctggaggaacccaagcaggcgagcgtcacataccagaagcctgacaagcaggaggagttctatgcctagtggagccacagtgcctccctgcagcctcaacaccaccctgctgtccagtccccagcctggccccaccagcccaagcctgggactgggcctggaacctggccccagttcttctctgccctctctcccaaggtctgcccaggctgccagcctcacacagatcttccccgaggaagaggggctgctgccatctgccccagactgtgcccttacgagctcatctcttgttcccctcatccctgccaccagtctggggcttcaggacctcatgtcagatggatgggaggaagaaagctcctgattggctggtggtggaagaaagggtggggcttgagatgagcctgagccctgacttggcacccacagtgctcactgagatctcctttttggggcagagaggcactcaggctggtttccaggacaaacatttggtaaacacagcccttgaaatcatctagacactgcaacctcttgctcgtatcccagggcctctctctagctgggtgagagggtgtcccttgtcaccagcctgttttgtcctggtctctctggggttgttgaatctctcctcttgcctgccaagtacacatgtacccagacttcatttctttctgcatcttcccccaagaaacagcttcctgagggtgctggggcagccactggtgaggaggggctgctctgatgtccctcctatgaggggactctgcacagacaccattgcccacactatcaccatattttcactcagtcacacacaagacaaaagcatgcaatgacaaaaccatacgcaatcctgaccgcccagccaatcaagacatatcacagaacacacgcgtccttccaagaatgtttatcctcatgcatcacttacacacccccagacacgtactgcaatgcaagtcactagtcatggtcacatgacagtgacagtgtggcctcctcctaccccaaatacacccacactctggcaccacacacattgtctccagctttcaggcttactggggagggtggaatcgagccagaacaatcagcccatattgggtccccctaagttgccccgtcatactcagtcccatgccatggtgcccacaccaaccatgcagccaccaaccccagccagtgtcagacacaatcccatgtggatgcacagtctcactccacatgacctgctctcaatgctggagggaaacaggcaggcccttgcctttctcggaaaaagtgtggggccacagcccttttagggcattgcatgcaggtgggcctggcttcacccctacctgcttcctccccaccgcagctggcagagggggaggtttggggccagacccccactagctgggagcctgggggctcctctaaggctgaggaaggaaatttggccccaggttgttggggggtcttgggtctcccaggacggaaggcccagggcagggagggggcatgtggttgggctcctttatctccctgtgtccccttcctgctttgagctagggggctgactctgcctcccaggacacaagtctccaaagtgcctgtgagggcgggccctccgcaccctctgccctctgcctggcaggccaacctcagcccacctgcccagaggccctccctgtggacaccccctcacctatttggccaaacaattctggctgcagcttcaggggccatggctggaagcagcccctgcagatccctcaggccccgaggtcagggtttgagggatgagaccaggtgatagtgggggaggggttacttcctttgttacctagcaagtagggctatttccatcggtattttaaatgtggggtcacagatcttttggggagggtgtgcttggcagggggcctcttggagccaaagggatgtggtgtgagttgcgattggctggcactcacacccccacccctcacccacatcccagattcaagtcaggaaggcaggttttatttcagggcccttttcaagatgccctggcagcagatttctgcaggatgaggggtagcggtgtgtaggcagtgagggggaggttccaggggctgtcccacagcctgtcttttccaggctgggctccatcttccagtcccaaaaccctccttcacagggcccagaggcttgtgaggaagccaggtggacccagccttagaagagtgggcatggggggcccctgatatctggagggggcgggttggcctcagtcatctttggagcagaagggctgggtcctggggccacagaccacaaggctcagcctccctaccctgctccctggggtgctgctgtcttggagagcacagctctggtgagacggcctgggcaggccgaggctgagaaaccagggaggatagaggagaaaagggcttgggcccccagccccagaagatgctggaccccaggtgggagacccaacagtgggtgcagtttctcagtagggctggagccaatggtgggggtggccccggcaggcctggctcctcacatcccaggggttggcttctgatttggggcttgggctccaggcactggcttctcttctctgtgtccttagcatttgagagaagaggccaggggccttgttcatggatccctggacccaaggcagatgtccaggctttatcctcctgaggatgaggagtctgaccagcccaaatctgccctggccggcctgaccggggcaaggcagtccaagagagttcagtgaggaccagctaggctctcccaggtgcaatgtgggtgcagggccctcatgtccccctacccctgcctgtgatggagtgttctgaggggctttggcatttgctggaagcacagggagttccaaatgagagggagcttctgtggcttgagagcctctggggccttggctgccagagcacgaggcaggccaggacctggagagcccagaccctgtctccaggaggccaggaggccagatgggggccttgcctgaaagactggtccccttgatcgctggaggcatgtgggtggcaaccagggctgggcagggcttagggtgtgtgggccaaacccccctggggttggcaaagccgcctgtcaggcctcctggtgggggcccctggacacagggagcagaccctctgcctcatggggtaggagtggctgcctcctgtgttctctggatttcttctcccaacaactacaaccctggacttgcctccccaggcctcttgcctgtaaatagaagcccgcaaactgtacagatttacagaggcatcgagactgggccctgggagttgccatctgagagccgatggccccagcatcccccaggtgcctgcctggcaccacagtgaccctggcctcagcgtggcaaatgcatgtaaatatttttcgtaggcagcgtggctccagagagccccctgaagacagtgtccctccctcctgtgagtcctttctcctgtacagaacctgcctggggtgggtgggggtctgccattccctcccccaggccttccctgccccttctctcccctgtaacctgtttattaaccatacctgtcctgagttcatggccaaaaccttaaataagaaaaacaaaagaaaaagacagtggaaaaaagagaccaaggcgcctgccccactgcgggtactctcctgttccagccttgtgaaggaactggttttgtttttgtttttgtttttgtttttttttgtttgtttgtttgttttttaacacttcctgtgctgtgcccatttataagaggaaataaaattaagctgaaatga

SEQ ID NO: 57015 - DNA, 5446 bp, Homo sapiens
gaattccacaaaggcgcccgcccgccgcccgccgcccgcgcccgcgccgccgccatgaagccggggccgccgcaccgtgccggggccgcccacggggccggcgccggggccggggccgcggccgggcccggggcccgcgggctgctcctgccaccgctgctgctgctgctgctggcggggcgcgccgcgggggcccagcgctggcgcagtgagaacttcgagagacccgtggacctggagggctctggggatgatgactcctttcccgatgatgaactggatgacctctactcggggtcgggctcgggctacttcgagcaggagtcgggcattgagacagccatgcgcttcagcccagatgtagccctggcggtgtccaccacacctgcggtgctgcccaccacgaacatccagcctgtgggcacaccatttgaagagctcccctctgagcgccccaccctggagccagccaccagccccctggtggtgacagaagtcccggaagagcccagccagagagccaccaccgtctccactaccatggctaccactgctgccacaagcacaggggacccgactgtggccacagtgcctgccacagtggccaccgccacccccagcacccctgcagcacccccttttacggccaccactgctgttataaggaccactggcgtacggaggcttctgcctctcccactgaccacagtggctacggcacgggccactacccccgaggcgccctccccgcccaccacggcggctgtcttggacaccgaggccccaacacccaggctggtcagcacagctacctcccggccaagagcccttcccaggccggccaccacccaggagcctgacatccctgagaggagcaccctgcccctggggaccactgcccctggacccacagaggtggctcagaccccaactccagagaccttcctgaccacaatccgggatgagccagaggttccggtgagtggggggcccagtggagacttcgagctgccagaagaagagaccacacaaccagacacagccaatgaggtggtagctgtgggaggggctgcggccaaggcatcatctccacctgggacactgcccaagggtgcccgcccgggccctggcctcctggacaatgccatcgactcgggcagctcagctgctcagctgcctcagaagagtatcctggagcggaaggaggtgctcgtagctgtgattgtgggcggggtggtgggcgccctctttgctgccttcttggtcacactgctcatctatcgtatgaagaaaaaggatgagggcagctacacgctggaggaacccaagcaggcgagcgtcacataccagaagcctgacaagcaggaggagttctatgcctagtggagccacagtgcctccctgcagcctcaacaccaccctgctgtccagtccccagcctggccccaccagcccaagcctgggactgggcctggaacctggccccagttcttctctgccctctctcccaaggtctgcccaggctgccagcctcacacagatcttccccgaggaagaggggctgctgccatctgccccagactgtgcccttacgagctcatctcttgttcccctcatccctgccaccagtctggggcttcaggacctcatgtcagatggatgggaggaagaaagctcctgattggctggtggtggaagaaagggtggggcttgagatgagcctgagccctgacttggcacccacagtgctcactgagatctcctttttggggcagagaggcactcaggctggtttccaggacaaacatttggtaaacacagcccttgaaatcatctagacactgcaacctcttgctcgtatcccagggcctctctctagctgggtgagagggtgtcccttgtcaccagcctgttttgtcctggtctctctggggttgttgaatctctcctcttgcctgccaagtacacatgtacccagacttcatttctttctgcatcttcccccaagaaacagcttcctgagggtgctggggcagccactggtgaggaggggctgctctgatgtccctcctatgaggggactctgcacagacaccattgcccacactatcaccatattttcactcagtcacacacaagacaaaagcatgcaatgacaaaaccatacgcaatcctgaccgcccagccaatcaagacatatcacagaacacacgcgtccttccaagaatgtttatcctcatgcatcacttacacacccccagacacgtactgcaatgcaagtcactagtcatggtcacatgacagtgacagtgtggcctcctcctaccccaaatacacccacactctggcaccacacacattgtctccagctttcaggcttactggggagggtggaatcgagccagaacaatcagcccatattgggtccccctaagttgccccgtcatactcagtcccatgccatggtgcccacaccaaccatgcagccaccaaccccagccagtgtcagacacaatcccatgtggatgcacagtctcactccacatgacctgctctcaatgctggagggaaacaggcaggcccttgcctttctcggaaaaagtgtggggccacagcccttttagggcattgcatgcaggtgggcctggcttcacccctacctgcttcctccccaccgcagctggcagagggggaggtttggggccagacccccactagctgggagcctgggggctcctctaaggctgaggaaggaaatttggccccaggttgttggggggtcttgggtctcccaggacggaaggcccagggcagggagggggcatgtggttgggctcctttatctccctgtgtccccttcctgctttgagctagggggctgactctgcctcccaggacacaagtctccaaagtgcctgtgagggcgggccctccgcaccctctgccctctgcctggcaggccaacctcagcccacctgcccagaggccctccctgtggacaccccctcacctatttggccaaacaattctggctgcagcttcaggggccatggctggaagcagcccctgcagatccctcaggccccgaggtcagggtttgagggatgagaccaggtgatagtgggggaggggttacttcctttgttacctagcaagtagggctatttccatcggtattttaaatgtggggtcacagatcttttggggagggtgtgcttggcagggggcctcttggagccaaagggatgtggtgtgagttgcgattggctggcactcacacccccacccctcacccacatcccagattcaagtcaggaaggcaggttttatttcagggcccttttcaagatgccctggcagcagatttctgcaggatgaggggtagcggtgtgtaggcagtgagggggaggttccaggggctgtcccacagcctgtcttttccaggctgggctccatcttccagtcccaaaaccctccttcacagggcccagaggcttgtgaggaagccaggtggacccagccttagaagagtgggcatggggggcccctgatatctggagggggcgggttggcctcagtcatctttggagcagaagggctgggtcctggggccacagaccacaaggctcagcctccctaccctgctccctggggtgctgctgtcttggagagcacagctctggtgagacggcctgggcaggccgaggctgagaaaccagggaggatagaggagaaaagggcttgggcccccagccccagaagatgctggaccccaggtgggagacccaacagtgggtgcagtttctcagtagggctggagccaatggtgggggtggccccggcaggcctggctcctcacatcccaggggttggcttctgatttggggcttgggctccaggcactggcttctcttctctgtgtccttagcatttgagagaagaggccaggggccttgttcatggatccctggacccaaggcagatgtccaggctttatcctcctgaggatgaggagtctgaccagcccaaatctgccctggccggcctgaccggggcaaggcagtccaagagagttcagtgaggaccagctaggctctcccaggtgcaatgtgggtgcagggccctcatgtccccctacccctgcctgtgatggagtgttctgaggggctttggcatttgctggaagcacagggagttccaaatgagagggagcttctgtggcttgagagcctctggggccttggctgccagagcacgaggcaggccaggacctggagagcccagaccctgtctccaggaggccaggaggccagatgggggccttgcctgaaagactggtccccttgatcgctggaggcatgtgggtggcaaccagggctgggcagggcttagggtgtgtgggccaaacccccctggggttggcaaagccgcctgtcaggcctcctggtgggggcccctggacacagggagcagaccctctgcctcatggggtaggagtggctgcctcctgtgttctctggatttcttctcccaacaactacaaccctggacttgcctccccaggcctcttgcctgtaaatagaagcccgcaaactgtacagatttacagaggcatcgagactgggccctgggagttgccatctgagagccgatggccccagcatcccccaggtgcctgcctggcaccacagtgaccctggcctcagcgtggcaaatgcatgtaaatatttttcgtaggcagcgtggctccagagagccccctgaagacagtgtccctccctcctgtgagtcctttctcctgtacagaacctgcctggggtgggtgggggtctgccattccctcccccaggccttccctgccccttctctcccctgtaacctgtttattaaccatacctgtcctgagttcatggccaaaaccttaaataagaaaaacaaaagaaaaagacagtggaaaaaagagaccaaggcgcctgccccactgcgggtactctctgtttgtttgttttttaacacttcctgtgctgtgcccatttataagaggaaataaaattaagctgaaatgaaaaaaaaaaaaaaaaaaatatgacttgagataagtcaggattaactgttatcacctctcctgtacacctccctcctttttctcctttgtacccacatgtgcagattttttcagaggtgacaatttagcatttaatgtttttttttctgcttcaagttcttaggtccctttggaggatattgatgggggtggaggtggggatagaacatctttcacactgtttggtacagagatgctcaaagcttttcccagggaaaggaactctctaaaatagtaatctgatttgatgaaagataaaattttaatatagcttcagttaaccttcaggatactttaaatgctacattgtatataaaagtaataaagtacaaatgaacacga

SEQ ID NO: 57016 - DNA, 4943 bp, Homo sapiens
gaattccacaaaggcgcccgcccgccgcccgccgcccgcgcccgcgccgccgccatgaagccggggccgccgcaccgtgccggggccgcccacggggccggcgccggggccggggccgcggccgggcccggggcccgcgggctgctcctgccaccgctgctgctgctgctgctggcggggcgcgccgcgggggcccagcgctggcgcagtgagaacttcgagagacccgtggacctggagggctctggggatgatgactcctttcccgatgatgaactggatgacctctactcggggtcgggctcgggctacttcgagcaggagtcgggcattgagacagccatgcgcttcagcccagatgtagccctggcggtgtccaccacacctgcggtgctgcccaccacgaacatccagcctgtgggcacaccatttgaagagctcccctctgagcgccccaccctggagccagccaccagccccctggtggtgacagaagtcccggaagagcccagccagagagccaccaccgtctccactaccatggctaccactgctgccacaagcacaggggacccgactgtggccacagtgcctgccacagtggccaccgccacccccagcacccctgcagcacccccttttacggccaccactgctgttataaggaccactggcgtacggaggcttctgcctctcccactgaccacagtggctacggcacgggccactacccccgaggcgccctccccgcccaccacggcggctgtcttggacaccgaggccccaacacccaggctggtcagcacagctacctcccggccaagagcccttcccaggccggccaccacccaggagcctgacatccctgagaggagcaccctgcccctggggaccactgcccctggacccacagaggtggctcagaccccaactccagagaccttcctgaccacaatccgggatgagccagaggttccggtgagtggggggcccagtggagacttcgagctgccagaagaagagaccacacaaccagacacagccaatgaggtggtagctgtgggaggggctgcggccaaggcatcatctccacctgggacactgcccaagggtgcccgcccgggccctggcctcctggacaatgccatcgactcgggcagctcagctgctcagctgcctcagaagagtatcctggagcggaaggaggtgctcgtagctgtgattgtgggcggggtggtgggcgccctctttgctgccttcttggtcacactgctcatctatcgtatgaagaaaaaggatgagggcagctacacgctggaggaacccaagcaggcgagcgtcacataccagaagcctgacaagcaggaggagttctatgcctagtggagccacagtgcctccctgcagcctcaacaccaccctgctgtccagtccccagcctggccccaccagcccaagcctgggactgggcctggaacctggccccagttcttctctgccctctctcccaaggtctgcccaggctgccagcctcacacagatcttccccgaggaagaggggctgctgccatctgccccagactgtgcccttacgagctcatctcttgttcccctcatccctgccaccagtctggggcttcaggacctcatgtcagatggatgggaggaagaaagctcctgattggctggtggtggaagaaagggtggggcttgagatgagcctgagccctgacttggcacccacagtgctcactgagatctcctttttggggcagagaggcactcaggctggtttccaggacaaacatttggtaaacacagcccttgaaatcatctagacactgcaacctcttgctcgtatcccagggcctctctctagctgggtgagagggtgtcccttgtcaccagcctgttttgtcctggtctctctggggttgttgaatctctcctcttgcctgccaagtacacatgtacccagacttcatttctttctgcatcttcccccaagaaacagcttcctgagggtgctggggcagccactggtgaggaggggctgctctgatgtccctcctatgaggggactctgcacagacaccattgcccacactatcaccatattttcactcagtcacacacaagacaaaagcatgcaatgacaaaaccatacgcaatcctgaccgcccagccaatcaagacatatcacagaacacacgcgtccttccaagaatgtttatcctcatgcatcacttacacacccccagacacgtactgcaatgcaagtcactagtcatggtcacatgacagtgacagtgtggcctcctcctaccccaaatacacccacactctggcaccacacacattgtctccagctttcaggcttactggggagggtggaatcgagccagaacaatcagcccatattgggtccccctaagttgccccgtcatactcagtcccatgccatggtgcccacaccaaccatgcagccaccaaccccagccagtgtcagacacaatcccatgtggatgcacagtctcactccacatgacctgctctcaatgctggagggaaacaggcaggcccttgcctttctcggaaaaagtgtggggccacagcccttttagggcattgcatgcaggtgggcctggcttcacccctacctgcttcctccccaccgcagctggcagagggggaggtttggggccagacccccactagctgggagcctgggggctcctctaaggctgaggaaggaaatttggccccaggttgttggggggtcttgggtctcccaggacggaaggcccagggcagggagggggcatgtggttgggctcctttatctccctgtgtccccttcctgctttgagctagggggctgactctgcctcccaggacacaagtctccaaagtgcctgtgagggcgggccctccgcaccctctgccctctgcctggcaggccaacctcagcccacctgcccagaggccctccctgtggacaccccctcacctatttggccaaacaattctggctgcagcttcaggggccatggctggaagcagcccctgcagatccctcaggccccgaggtcagggtttgagggatgagaccaggtgatagtgggggaggggttacttcctttgttacctagcaagtagggctatttccatcggtattttaaatgtggggtcacagatcttttggggagggtgtgcttggcagggggcctcttggagccaaagggatgtggtgtgagttgcgattggctggcactcacacccccacccctcacccacatcccagattcaagtcaggaaggcaggttttatttcagggcccttttcaagatgccctggcagcagatttctgcaggatgaggggtagcggtgtgtaggcagtgagggggaggttccaggggctgtcccacagcctgtcttttccaggctgggctccatcttccagtcccaaaaccctccttcacagggcccagaggcttgtgaggaagccaggtggacccagccttagaagagtgggcatggggggcccctgatatctggagggggcgggttggcctcagtcatctttggagcagaagggctgggtcctggggccacagaccacaaggctcagcctccctaccctgctccctggggtgctgctgtcttggagagcacagctctggtgagacggcctgggcaggccgaggctgagaaaccagggaggatagaggagaaaagggcttgggcccccagccccagaagatgctggaccccaggtgggagacccaacagtgggtgcagtttctcagtagggctggagccaatggtgggggtggccccggcaggcctggctcctcacatcccaggggttggcttctgatttggggcttgggctccaggcactggcttctcttctctgtgtccttagcatttgagagaagaggccaggggccttgttcatggatccctggacccaaggcagatgtccaggctttatcctcctgaggatgaggagtctgaccagcccaaatctgccctggccggcctgaccggggcaaggcagtccaagagagttcagtgaggaccagctaggctctcccaggtgcaatgtgggtgcagggccctcatgtccccctacccctgcctgtgatggagtgttctgaggggctttggcatttgctggaagcacagggagttccaaatgagagggagcttctgtggcttgagagcctctggggccttggctgccagagcacgaggcaggccaggacctggagagcccagaccctgtctccaggaggccaggaggccagatgggggccttgcctgaaagactggtccccttgatcgctggaggcatgtgggtggcaaccagggctgggcagggcttagggtgtgtgggccaaacccccctggggttggcaaagccgcctgtcaggcctcctggtgggggcccctggacacagggagcagaccctctgcctcatggggtaggagtggctgcctcctgtgttctctggatttcttctcccaacaactacaaccctggacttgcctccccaggcctcttgcctgtaaatagaagcccgcaaactgtacagatttacagaggcatcgagactgggccctgggagttgccatctgagagccgatggccccagcatcccccaggtgcctgcctggcaccacagtgaccctggcctcagcgtggcaaatgcatgtaaatatttttcgtaggcagcgtggctccagagagccccctgaagacagtgtccctccctcctgtgagtcctttctcctgtacagaacctgcctggggtgggtgggggtctgccattccctcccccaggccttccctgccccttctctcccctgtaacctgtttattaaccatacctgtgctgtgcccatttataagaggaaataaaattaagctgaaatga

SEQ ID NO: 57017 - DNA, 4971 bp, Homo sapiens
taaggctttccctgctgcctcccaggctccgttccccaacccctatttctctgtcccctctgggagttgcagctaccagcaccccctctgtagtgttcctgagagggcctcatgagtcccagcgcccatgcctgcaggtcccaggtgtcctcgcattaagttcccgctgagcatcccaggcatgctgacacgctgagccctctgtggctgcttttagatgtgcagtcaagatgaaaaatgaccagtttctaagagaaagtcatcagccagacactgaaagccttctgggatgggaccccaggcccagcgctggcgcagtgagaacttcgagagacccgtggacctggagggctctggggatgatgactcctttcccgatgatgaactggatgacctctactcggggtcgggctcgggctgtaagtacccccctccctacctctgcctgggggcagtgaccagtctgtatccagcctcaactctgagaagcccacggggggcttgcttcagtgaggcagggggcattcactgcctgggtcaggcaagttcttcttgctctggatccccagaacaagaagggcagaacatccttctggggatagaacaagacctgggaggacctcagggcccagaatgtccaggtctccagggtcccacgtctgcatctttgtgtgtgctatgtggctttctctgcagaccttgcttggttccggtggtcccgtcaggtgcaataagctgtggccaatggtggggttagggcagtgatgacacagggcaggtgcttcaagtggtgcctgggatggccccgccctggggaaggggagccaggtcagctgggtctagcagaatctcgggagagaagggcaccgcgaaccccactctgccatgtagcaactgtgtgcccctcggtgctccccctccctgaatccctgtattttcacctgtggatggtgagaaatacgacttcttctcagtgcctctaggagggtttgggataggaagctggggtctggcacagaggaggagctctcaaaatggtagcaaaaagaaggcagctgagactgggcccagtgagggcacgggctggcatctgaggagatggtacggggtctgcacgccacagagctggctccccacagccctcgcctctggtctcccctccttagccaagtcctttgagcctctttcaaattaatctttgtaaaacccgtttatattgggtcacatctctattcgcaaagttccctggctcccctccctcctgcctggttccgagcccaggagctggctgtggcttctccctcccccatcccctactccccgtctcatttcctcccaagttccttcactgtcccggctttgcgtcagccagattgctcaagcagttcccctgcctcaagggcttcttttcccttttaccctccgcctctgcctctgggggaagcccttagtgtaccacccctgccttgaggcttgtggtaggggtgcctttggggtctgactcttcccagaatgccactcctgtgttcccctgcaagccccagcaagttttgcagccagtagcgcctcagttgctgctgcctggattcaacctcatagaaactgtaggctgggtgggcaggaatagtcaaggaaggcttcccgggagaggcggcccccagaatttttgacttggcagagagaagttggggaacatcagcaactgaccacctttagctgggctgtgccttcctcctttctctcatcttttctgggaaaattgggtaaagagagggggttgggagacctaatcttgatggccattgcttacctgggatcctcatgcccctcacaaccacccagctccctagctctctccctctcccccaccccctcagacttcgagcaggagtcgggcattgagacagccatgcgcttcagcccagatgtagccctggcggtgtccaccacaccatttgaagagctcccctctgagcgccccaccctggagccagccaccagccccctggtggtgacagaagtcccggaagagcccagccagagagccaccaccgtctccactaccatggctaccactgctgccacaagcacaggggacccgactgtggccacagtgcctgccacagtggccaccgccacccccagcacccctgcagcacccccttttacggccaccactgctgttataaggaccactggcgtacggaggcttctgcctctcccactgaccacagtggctacggcacgggccactacccccgaggcgccctccccgcccaccacggcggctgtcttggacaccgaggccccaacacccaggctggtcagcacagctacctcccggccaagagcccttcccaggccggccaccacccaggagcctgacatccctgagaggagcaccctgcccctggggaccactgcccctggacccacagaggtggctcagaccccaactccagagaccttcctgaccacaatccgggatgagccagaggttccggtgagtggggggcccagtggagacttcgagctgccagaagaagagaccacacaaccagacacagccaatgaggtggtagctgtgggaggggctgcggccaaggcatcatctccacctgggacactgcccaagggtgcccgcccgggccctggcctcctggacaatgccatcgactcgggcagctcagctgctcagctgcctcagaagagtatcctggagcggaaggaggtgctcgtagctgtgattgtgggcggggtggtgggcgccctctttgctgccttcttggtcacactgctcatctatcgtatgaagaaaaaggatgagggcagctacacgctggaggaacccaagcaggcgagcgtcacataccagaagcctgacaagcaggaggagttctatgcctagtggagccacagtgcctccctgcagcctcaacaccaccctgctgtccagtccccagcctggccccaccagcccaagcctgggactgggcctggaacctggccccagttcttctctgccctctctcccaaggtctgcccaggctgccagcctcacacagatcttccccgaggaagaggggctgctgccatctgccccagactgtgcccttacgagctcatctcttgttcccctcatccctgccaccagtctggggcttcaggacctcatgtcagatggatgggaggaagaaagctcctgattggctggtggtggaagaaagggtggggcttgagatgagcctgagccctgacttggcacccacagtgctcactgagatctcctttttggggcagagaggcactcaggctggtttccaggacaaacatttggtaaacacagcccttgaaatcatctagacactgcaacctcttgctcgtatcccagggcctctctctagctgggtgagagggtgtcccttgtcaccagcctgttttgtcctggtctctctggggttgttgaatctctcctcttgcctgccaagtacacatgtacccagacttcatttctttctgcatcttcccccaagaaacagcttcctgagggtgctggggcagccactggtgaggaggggctgctctgatgtccctcctatgaggggactctgcacagacaccattgcccacactatcaccatattttcactcagtcacacacaagacaaaagcatgcaatgacaaaaccatacgcaatcctcacatcccaggggttggcttctgatttggggcttgggctccaggcactggcttctcttctctgtgtccttagcatttgagagaagaggccaggggccttgttcatggatccctggacccaaggcagatgtccaggctttatcctcctgaggatgaggagtctgaccagcccaaatctgccctggccggcctgaccggggcaaggcagtccaagagagttcagtgaggaccagctaggctctcccaggtgcaatgtgggtgcagggccctcatgtccccctacccctgcctgtgatggagtgttctgaggggctttggcatttgctggaagcacagggagttccaaatgagagggagcttctgtggcttgagagcctctggggccttggctgccagagcacgaggcaggccaggacctggagagcccagaccctgtctccaggaggccaggaggccagatgggggccttgcctgaaagactggtccccttgatcgctggaggcatgtgggtggcaaccagggctgggcagggcttagggtgtgtgggccaaacccccctggggttggcaaagccgcctgtcaggcctcctggtgggggcccctggacacagggagcagaccctctgcctcatggggtaggagtggctgcctcctgtgttctctggatttcttctcccaacaactacaaccctggacttgcctccccaggcctcttgcctgtaaatagaagcccgcaaactgtacagatttacagaggcatcgagactgggccctgggagttgccatctgagagccgatggccccagcatcccccaggtgcctgcctggcaccacagtgaccctggcctcagcgtggcaaatgcatgtaaatatttttcgtaggcagcgtggctccagagagccccctgaagacagtgtccctccctcctgtgagtcctttctcctgtacagaacctgcctggggtgggtgggggtctgccattccctcccccaggccttccctgccccttctctcccctgtaacctgtttattaaccatacctgtcctgagttcatggccaaaaccttaaataagaaaaacaaaagaaaaagacagtggaaaaaagagaccaaggcgcctgccccactgcgggtactctcctgttccagccttgtgaaggaactggttttgtttttgtttttgtttttgtttttttttgtttgtttgtttgttttttaacacttcctgtgctgtgcccatttataagaggaaataaaattaagctgaaatga

SEQ ID NO: 57018 - DNA, 2937 bp, Homo sapiens
gaattccacaaaggcgcccgcccgccgcccgccgcccgcgcccgcgccgccgccatgaagccggggccgccgcaccgtgccggggccgcccacggggccggcgccggggccggggccgcggccgggcccggggcccgcgggctgctcctgccaccgctgctgctgctgctgctggcggggcgcgccgcgggggcccagcgctggcgcagtgagaacttcgagagacccgtggacctggagggctctggggatgatgactcctttcccgatgatgaactggatgacctctactcggggtcgggctcgggctacttcgagcaggagtcgggcattgagacagccatgcgcttcagcccagatgtagccctggcggtgtccaccacacctgcggtgctgcccaccacgaacatccagcctgtgggcacaccatttgaagagctcccctctgagcgccccaccctggagccagccaccagccccctggtggtgacagaagtcccggaagagcccagccagagagccaccaccgtctccactaccatggctaccactgctgccacaagcacaggggacccgactgtggccacagtgcctgccacagtggccaccgccacccccagcacccctgcagcacccccttttacggccaccactgctgttataaggaccactggcgtacggaggcttctgcctctcccactgaccacagtggctacggcacgggccactacccccgaggcgccctccccgcccaccacggcggctgtcttggacaccgaggccccaacacccaggctggtcagcacagctacctcccggccaagagcccttcccaggccggccaccacccaggagcctgacatccctgagaggagcaccctgcccctggggaccactgcccctggacccacagaggtggctcagaccccaactccagagaccttcctgaccacaatccgggatgagccagaggttccggtgagtggggggcccagtggagacttcgagctgccagaagaagagaccacacaaccagacacagccaatgaggtggtagctgtgggaggggctgcggccaaggcatcatctccacctgggacactgcccaagggtgcccgcccgggccctggcctcctggacaatgccatcgactcgggcagctcagctgctcagctgcctcagaagagtatcctggagcggaaggaggtgctcgtagctgtgattgtgggcggggtggtgggcgccctctttgctgccttcttggtcacactgctcatctatcgtatgaagaaaaaggatgagggcagctacacgctggaggaacccaagcaggcgagcgtcacataccagaagcctgacaagcaggaggagttctatgcctagtggagccacagtgcctccctgcagcctcaacaccaccctgctgtccagtccccagcctggccccaccagcccaagcctgggactgggcctggaacctggccccagttcttctctgccctctctcccaaggtctgcccaggctgccagcctcacacagatcttccccgaggaagaggggctgctgccatctgccccagactgtgcccttacgagctcatctcttgttcccctcatccctgccaccagtctggggcttcaggacctcatgtcagatggatgggaggaagaaagctcctgattggctggtggtggaagaaagggtggggcttgagatgagcctgagccctgacttggcacccacagtgctcactgagatctcctttttggggcagagaggcactcaggctggtttccaggacaaacatttggtaaacacagcccttgaaatcatctagacactgcaacctcttgctcgtatcccagggcctctctctagctgggtgagagggtgtcccttgtcaccagcctgttttgtcctggtctctctggggttgttgaatctctcctcttgcctgccaagtacacatgtacccagacttcatttctttctgcatcttcccccaagaaacagcttcctgagggtgctggggcagccactggtgaggaggggctgctctgatgtccctcctatgaggggactctgcacagacaccattgcccacactatcaccatattttcactcagtcacacacaagacaaaagcatgcaatgacaaaaccatacgcaatcctgaccgcccagccaatcaagacatatcacagaacacacgcgtccttccaagaatgtttatcctcatgcatcacttacacacccccagacacgtactgcaatgcaagtcactagtcatggtcacatgacagtgacagtgtggcctcctcctaccccaaatacacccacactctggcaccacacacattgtctccagctttcaggcttactggggagggtggaatcgagccagaacaatcagcccatattgggtccccctaagttgccccgtcatactcagtcccatgccatggtgcccacaccaaccatgcagccaccaaccccagccagtgtcagacacaatcccatgtggatgcacagtctcactccacatgacctgctctcaatgctggagggaaacaggcaggcccttgcctttctcggaaaaagtgtggggccacagcccttttagggcattgcatgcaggtgggcctggcttcaccccaggccttccctgccccttctctcccctgtaacctgtttattaaccatacctgtcctgagttcatggccaaaaccttaaataagaaaaacaaaagaaaaagacagtggaaaaaagagaccaaggcgcctgccccactgcgggtactctcctgttccagccttgtgaaggaactggttttgtttttgtttttgtttttgtttttttttgtttgtttgtttgttttttaacacttcctgtgctgtgcccatttataagaggaaataaaattaagctgaaatga

SEQ ID NO: 57019 - DNA, 521 bp, Homo sapiens
actctagtaggatcccctataaaagctacccgctctgagtagccgatggccccagcatcccccaggtgcctgcctggcaccacagtgaccctggcctcagcgtggcaaatgcatgtaaatatttttcgtaggcagcgtggctccagagagccccctgaagacagtgtccctccctcctgtgagtcctttctcctgtacagaacctgcctggggtgggtgggggtctgccattccctcccccaggccttccctgccccttctctcccctgtaacctgtttattaaccatacctgtcctgagttcatggccaaaaccttaaataagaaaaacaaaagaaaaagacagtggaaaaaagagaccaaggcgcctgccccactgcgggtactctcctgttccagccttgtgaaggaactggttttgtttttgtttttgtttttgtttttttttgtttgtttgtttgttttttaacacttcctgtgctgtgcccatttataagaggaaataaaattaagctgaaatga

SEQ ID NO: 57020 - DNA, 5127 bp, Homo sapiens
gaattccacaaaggcgcccgcccgccgcccgccgcccgcgcccgcgccgccgccatgaagccggggccgccgcaccgtgccggggccgcccacggggccggcgccggggccggggccgcggccgggcccggggcccgcgggctgctcctgccaccgctgctgctgctgctgctggcggggcgcgccgcgggggcccagcgctggcgcagtgagaacttcgagagacccgtggacctggagggctctggggatgatgactcctttcccgatgatgaactggatgacctctactcggggtcgggctcgggctacttcgagcaggagtcgggcattgagacagccatgcgcttcagcccagatgtagccctggcggtgtccaccacacctgcggtgctgcccaccacgaacatccagcctgtgggcacaccatttgaagagctcccctctgagcgccccaccctggagccagccaccagccccctggtggtgacagaagtcccggaagagcccagccagagagccaccaccgtctccactaccatggctaccactgctgccacaagcacaggggacccgactgtggccacagtgcctgccacagtggccaccgccacccccagcacccctgcagcacccccttttacggccaccactgctgttataaggaccactggcgtacggaggcttctgcctctcccactgaccacagtggctacggcacgggccactacccccgaggcgccctccccgcccaccacggcggctgtcttggacaccgaggccccaacacccaggctggtcagcacagctacctcccggccaagagcccttcccaggccggccaccacccaggagcctgacatccctgagaggagcaccctgcccctggggaccactgcccctggacccacagaggtggctcagaccccaactccagagaccttcctgaccacaatccgggatgagccagaggttccggtgagtggggggcccagtggagacttcgagctgccagaagaagagaccacacaaccagacacagccaatgaggtggtagctgtgggaggggctgcggccaaggcatcatctccacctgggacactgcccaagggtgcccgcccgggccctggcctcctggacaatgccatcgactcgggcagctcagctgctcagctgcctcagaagagtatcctggagcggaaggaggtgctcgtagctgtgattgtgggcggggtggtgggcgccctctttgctgccttcttggtcacactgctcatctatcgtatgaagaaaaaggatgagggcagctacacgctggaggaacccaagcaggcgagcgtcacataccagaagcctgacaagcaggaggagttctatgcctagtggagccacagtgcctccctgcagcctcaacaccaccctgctgtccagtccccagcctggccccaccagcccaagcctgggactgggcctggaacctggccccagttcttctctgccctctctcccaaggtctgcccaggctgccagcctcacacagatcttccccgaggaagaggggctgctgccatctgccccagactgtgcccttacgagctcatctcttgttcccctcatccctgccaccagtctggggcttcaggacctcatgtcagatggatgggaggaagaaagctcctgattggctggtggtggaagaaagggtggggcttgagatgagcctgagccctgacttggcacccacagtgctcactgagatctcctttttggggcagagaggcactcaggctggtttccaggacaaacatttggtaaacacagcccttgaaatcatctagacactgcaacctcttgctcgtatcccagggcctctctctagctgggtgagagggtgtcccttgtcaccagcctgttttgtcctggtctctctggggttgttgaatctctcctcttgcctgccaagtacacatgtacccagacttcatttctttctgcatcttcccccaagaaacagcttcctgagggtgctggggcagccactggtgaggaggggctgctctgatgtccctcctatgaggggactctgcacagacaccattgcccacactatcaccatattttcactcagtcacacacaagacaaaagcatgcaatgacaaaaccatacgcaatcctgaccgcccagccaatcaagacatatcacagaacacacgcgtccttccaagaatgtttatcctcatgcatcacttacacacccccagacacgtactgcaatgcaagtcactagtcatggtcacatgacagtgacagtgtggcctcctcctaccccaaatacacccacactctggcaccacacacattgtctccagctttcaggcttactggggagggtggaatcgagccagaacaatcagcccatattgggtccccctaagttgccccgtcatactcagtcccatgccatggtgcccacaccaaccatgcagccaccaaccccagccagtgtcagacacaatcccatgtggatgcacagtctcactccacatgacctgctctcaatgctggagggaaacaggcaggcccttgcctttctcggaaaaagtgtggggccacagcccttttagggcattgcatgcaggtgggcctggcttcacccctacctgcttcctccccaccgcagctggcagagggggaggtttggggccagacccccactagctgggagcctgggggctcctctaaggctgaggaaggaaatttggccccaggttgttggggggtcttgggtctcccaggacggaaggcccagggcagggagggggcatgtggttgggctcctttatctccctgtgtccccttcctgctttgagctagggggctgactctgcctcccaggacacaagtctccaaagtgcctgtgagggcgggccctccgcaccctctgccctctgcctggcaggccaacctcagcccacctgcccagaggccctccctgtggacaccccctcacctatttggccaaacaattctggctgcagcttcaggggccatggctggaagcagcccctgcagatccctcaggccccgaggtcagggtttgagggatgagaccaggtgatagtgggggaggggttacttcctttgttacctagcaagtagggctatttccatcggtattttaaatgtggggtcacagatcttttggggagggtgtgcttggcagggggcctcttggagccaaagggatgtggtgtgagttgcgattggctggcactcacacccccacccctcacccacatcccagattcaagtcaggaaggcaggttttatttcagggcccttttcaagatgccctggcagcagatttctgcaggatgaggggtagcggtgtgtaggcagtgagggggaggttccaggggctgtcccacagcctgtcttttccaggctgggctccatcttccagtcccaaaaccctccttcacagggcccagaggcttgtgaggaagccaggtggacccagccttagaagagtgggcatggggggcccctgatatctggagggggcgggttggcctcagtcatctttggagcagaagggctgggtcctggggccacagaccacaaggctcagcctccctaccctgctccctggggtgctgctgtcttggagagcacagctctggtgagacggcctgggcaggccgaggctgagaaaccagggaggatagaggagaaaagggcttgggcccccagccccagaagatgctggaccccaggtgggagacccaacagtgggtgcagtttctcagtagggctggagccaatggtgggggtggccccggcaggcctggctcctcacatcccaggggttggcttctgatttggggcttgggctccaggcactggcttctcttctctgtgtccttagcatttgagagaagaggccaggggccttgttcatggatccctggacccaaggcagatgtccaggctttatcctcctgaggatgaggagtctgaccagcccaaatctgccctggccggcctgaccggggcaaggcagtccaagagagttcagtgaggaccagctaggctctcccaggtgcaatgtgggtgcagggccctcatgtccccctacccctgcctgtgatggagtgttctgaggggctttggcatttgctggaagcacagggagttccaaatgagagggagcttctgtggcttgagagcctctggggccttggctgccagagcacgaggcaggccaggacctggagagcccagaccctgtctccaggaggccaggaggccagatgggggccttgcctgaaagactggtccccttgatcgctggaggcatgtgggtggcaaccagggctgggcagggcttagggtgtgtgggccaaacccccctggggttggcaaagccgcctgtcaggcctcctggtgggggcccctggacacagggagcagaccctctgcctcatggggtaggagtggctgcctcctgtgttctctggatttcttctcccaacaactacaaccctggacttgcctccccaggcctcttgcctgtaaatagaagcccgcaaactgtacagatttacagaggcatcgagactgggccctgggagttgccatctgagagccgatggccccagcatcccccaggtgcctgcctggcaccacagtgaccctggcctcagcgtggcaaatgcatgtaaatatttttcgtaggcagcgtggctccagagagccccctgaagacagtgtccctccctcctgtgagtcctttctcctgtacagaacctgcctggggtgggtgggggtctgccattccctcccccaggccttccctgccccttctctcccctgtaacctgtttattaaccatacctgtcctgagttcatggccaaaaccttaaataagaaaaacaaaagaaaaagacagtggaaaaaagagaccaaggcgcctgccccactgcgggtactctcctgttccagccttgtgaaggaactggttttgtttttgtttttgtttttgtttttttttgtttgtttgtttgttttttaacacttcctgtgctgtgcccatttataagaggaaataaaattaagctgaaatga

SEQ ID NO: 57021 - DNA, 5193 bp, Homo sapiens
taaggctttccctgctgcctcccaggctccgttccccaacccctatttctctgtcccctctgggagttgcagctaccagcaccccctctgtagtgttcctgagagggcctcatgagtcccagcgcccatgcctgcaggtcccaggtgtcctcgcattaagttcccgctgagcatcccaggcatgctgacacgctgagccctctgtggctgcttttagatgtgcagtcaagatgaaaaatgaccagtttctaagagaaagtcatcagccagacactgaaagccttctgggatgggaccccaggcccagcgctggcgcagtgagaacttcgagagacccgtggacctggagggctctggggatgatgactcctttcccgatgatgaactggatgacctctactcggggtcgggctcgggctcccagatgtagccctggcggtgtccaccacacctgcggtgctgcccaccacgaacatccagcctgtgggcacaccatttgaagagctcccctctgagcgccccaccctggagccagccaccagccccctggtggtgacagaagtcccggaagagcccagccagagagccaccaccgtctccactaccatggctaccactgctgccacaagcacaggggacccgactgtggccacagtgcctgccacagtggccaccgccacccccagcacccctgcagcacccccttttacggccaccactgctgttataaggaccactggcgtacggaggcttctgcctctcccactgaccacagtggctacggcacgggccactacccccgaggcgccctccccgcccaccacggcggctgtcttggacaccgaggccccaacacccaggctggtcagcacagctacctcccggccaagagcccttcccaggccggccaccacccaggagcctgacatccctgagaggagcaccctgcccctggggaccactgcccctggacccacagaggtggctcagaccccaactccagagaccttcctgaccacaatccgggatgagccagaggttccggtgagtggggggcccagtggagacttcgagctgccagaagaagagaccacacaaccagacacagccaatgaggtggtagctgtgggaggggctgcggccaaggcatcatctccacctgggacactgcccaagggtgcccgcccgggccctggcctcctggacaatgccatcgactcgggcagctcagctgctcagctgcctcagaagagtatcctggagcggaaggaggtgctcgtagctgtgattgtgggcggggtggtgggcgccctctttgctgccttcttggtcacactgctcatctatcgtatgaagaaaaaggatgagggcagctacacgctggaggaacccaagcaggcgagcgtcacataccagaagcctgacaagcaggaggagttctatgcctagtggagccacagtgcctccctgcagcctcaacaccaccctgctgtccagtccccagcctggccccaccagcccaagcctgggactgggcctggaacctggccccagttcttctctgccctctctcccaaggtctgcccaggctgccagcctcacacagatcttccccgaggaagaggggctgctgccatctgccccagactgtgcccttacgagctcatctcttgttcccctcatccctgccaccagtctggggcttcaggacctcatgtcagatggatgggaggaagaaagctcctgattggctggtggtggaagaaagggtggggcttgagatgagcctgagccctgacttggcacccacagtgctcactgagatctcctttttggggcagagaggcactcaggctggtttccaggacaaacatttggtaaacacagcccttgaaatcatctagacactgcaacctcttgctcgtatcccagggcctctctctagctgggtgagagggtgtcccttgtcaccagcctgttttgtcctggtctctctggggttgttgaatctctcctcttgcctgccaagtacacatgtacccagacttcatttctttctgcatcttcccccaagaaacagcttcctgagggtgctggggcagccactggtgaggaggggctgctctgatgtccctcctatgaggggactctgcacagacaccattgcccacactatcaccatattttcactcagtcacacacaagacaaaagcatgcaatgacaaaaccatacgcaatcctgaccgcccagccaatcaagacatatcacagaacacacgcgtccttccaagaatgtttatcctcatgcatcacttacacacccccagacacgtactgcaatgcaagtcactagtcatggtcacatgacagtgacagtgtggcctcctcctaccccaaatacacccacactctggcaccacacacattgtctccagctttcaggcttactggggagggtggaatcgagccagaacaatcagcccatattgggtccccctaagttgccccgtcatactcagtcccatgccatggtgcccacaccaaccatgcagccaccaaccccagccagtgtcagacacaatcccatgtggatgcacagtctcactccacatgacctgctctcaatgctggagggaaacaggcaggcccttgcctttctcggaaaaagtgtggggccacagcccttttagggcattgcatgcaggtgggcctggcttcacccctacctgcttcctccccaccgcagctggcagagggggaggtttggggccagacccccactagctgggagcctgggggctcctctaaggctgaggaaggaaatttggccccaggttgttggggggtcttgggtctcccaggacggaaggcccagggcagggagggggcatgtggttgggctcctttatctccctgtgtccccttcctgctttgagctagggggctgactctgcctcccaggacacaagtctccaaagtgcctgtgagggcgggccctccgcaccctctgccctctgcctggcaggccaacctcagcccacctgcccagaggccctccctgtggacaccccctcacctatttggccaaacaattctggctgcagcttcaggggccatggctggaagcagcccctgcagatccctcaggccccgaggtcagggtttgagggatgagaccaggtgatagtgggggaggggttacttcctttgttacctagcaagtagggctatttccatcggtattttaaatgtggggtcacagatcttttggggagggtgtgcttggcagggggcctcttggagccaaagggatgtggtgtgagttgcgattggctggcactcacacccccacccctcacccacatcccagattcaagtcaggaaggcaggttttatttcagggcccttttcaagatgccctggcagcagatttctgcaggatgaggggtagcggtgtgtaggcagtgagggggaggttccaggggctgtcccacagcctgtcttttccaggctgggctccatcttccagtcccaaaaccctccttcacagggcccagaggcttgtgaggaagccaggtggacccagccttagaagagtgggcatggggggcccctgatatctggagggggcgggttggcctcagtcatctttggagcagaagggctgggtcctggggccacagaccacaaggctcagcctccctaccctgctccctggggtgctgctgtcttggagagcacagctctggtgagacggcctgggcaggccgaggctgagaaaccagggaggatagaggagaaaagggcttgggcccccagccccagaagatgctggaccccaggtgggagacccaacagtgggtgcagtttctcagtagggctggagccaatggtgggggtggccccggcaggcctggctcctcacatcccaggggttggcttctgatttggggcttgggctccaggcactggcttctcttctctgtgtccttagcatttgagagaagaggccaggggccttgttcatggatccctggacccaaggcagatgtccaggctttatcctcctgaggatgaggagtctgaccagcccaaatctgccctggccggcctgaccggggcaaggcagtccaagagagttcagtgaggaccagctaggctctcccaggtgcaatgtgggtgcagggccctcatgtccccctacccctgcctgtgatggagtgttctgaggggctttggcatttgctggaagcacagggagttccaaatgagagggagcttctgtggcttgagagcctctggggccttggctgccagagcacgaggcaggccaggacctggagagcccagaccctgtctccaggaggccaggaggccagatgggggccttgcctgaaagactggtccccttgatcgctggaggcatgtgggtggcaaccagggctgggcagggcttagggtgtgtgggccaaacccccctggggttggcaaagccgcctgtcaggcctcctggtgggggcccctggacacagggagcagaccctctgcctcatggggtaggagtggctgcctcctgtgttctctggatttcttctcccaacaactacaaccctggacttgcctccccaggcctcttgcctgtaaatagaagcccgcaaactgtacagatttacagaggcatcgagactgggccctgggagttgccatctgagagccgatggccccagcatcccccaggtgcctgcctggcaccacagtgaccctggcctcagcgtggcaaatgcatgtaaatatttttcgtaggcagcgtggctccagagagccccctgaagacagtgtccctccctcctgtgagtcctttctcctgtacagaacctgcctggggtgggtgggggtctgccattccctcccccaggccttccctgccccttctctcccctgtaacctgtttattaaccatacctgtcctgagttcatggccaaaaccttaaataagaaaaacaaaagaaaaagacagtggaaaaaagagaccaaggcgcctgccccactgcgggtactctcctgttccagccttgtgaaggaactggttttgtttttgtttttgtttttgtttttttttgtttgtttgtttgttttttaacacttcctgtgctgtgcccatttataagaggaaataaaattaagctgaaatga

SEQ ID NO: 57022 - DNA, 3278 bp, Homo sapiens
tgcagtgtctagatgatttcaagggctgtgtttaccaaatgtttgtcctggaaaccagcctgagtgcctctctgccccaaaaaggagatctcagtgagcactgtggctgccaagtacacatgtacccagacttcatttctttctgcatcttcccccaagaaacagcttcctgagggtgctggggcagccactggtgaggaggggctgctctgatgtccctcctatgaggggactctgcacagacaccattgcccacactatcaccatattttcactcagtcacacacaagacaaaagcatgcaatgacaaaaccatacgcaatcctgaccgcccagccaatcaagacatatcacagaacacacgcgtccttccaagaatgtttatcctcatgcatcacttacacacccccagacacgtactgcaatgcaagtcactagtcatggtcacatgacagtgacagtgtggcctcctcctaccccaaatacacccacactctggcaccacacacattgtctccagctttcaggcttactggggagggtggaatcgagccagaacaatcagcccatattgggtccccctaagttgccccgtcatactcagtcccatgccatggtgcccacaccaaccatgcagccaccaaccccagccagtgtcagacacaatcccatgtggatgcacagtctcactccacatgacctgctctcaatgctggagggaaacaggcaggcccttgcctttctcggaaaaagtgtggggccacagcccttttagggcattgcatgcaggtgggcctggcttcacccctacctgcttcctccccaccgcagctggcagagggggaggtttggggccagacccccactagctgggagcctgggggctcctctaaggctgaggaaggaaatttggccccaggttgttggggggtcttgggtctcccaggacggaaggcccagggcagggagggggcatgtggttgggctcctttatctccctgtgtccccttcctgctttgagctagggggctgactctgcctcccaggacacaagtctccaaagtgcctgtgagggcgggccctccgcaccctctgccctctgcctggcaggccaacctcagcccacctgcccagaggccctccctgtggacaccccctcacctatttggccaaacaattctggctgcagcttcaggggccatggctggaagcagcccctgcagatccctcaggccccgaggtcagggtttgagggatgagaccaggtgatagtgggggaggggttacttcctttgttacctagcaagtagggctatttccatcggtattttaaatgtggggtcacagatcttttggggagggtgtgcttggcagggggcctcttggagccaaagggatgtggtgtgagttgcgattggctggcactcacacccccacccctcacccacatcccagattcaagtcaggaaggcaggttttatttcagggcccttttcaagatgccctggcagcagatttctgcaggatgaggggtagcggtgtgtaggcagtgagggggaggttccaggggctgtcccacagcctgtcttttccaggctgggctccatcttccagtcccaaaaccctccttcacagggcccagaggcttgtgaggaagccaggtggacccagccttagaagagtgggcatggggggcccctgatatctggagggggcgggttggcctcagtcatctttggagcagaagggctgggtcctggggccacagaccacaaggctcagcctccctaccctgctccctggggtgctgctgtcttggagagcacagctctggtgagacggcctgggcaggccgaggctgagaaaccagggaggatagaggagaaaagggcttgggcccccagccccagaagatgctggaccccaggtgggagacccaacagtgggtgcagtttctcagtagggctggagccaatggtgggggtggccccggcaggcctggctcctcacatcccaggggttggcttctgatttggggcttgggctccaggcactggcttctcttctctgtgtccttagcatttgagagaagaggccaggggccttgttcatggatccctggacccaaggcagatgtccaggctttatcctcctgaggatgaggagtctgaccagcccaaatctgccctggccggcctgaccggggcaaggcagtccaagagagttcagtgaggaccagctaggctctcccaggtgcaatgtgggtgcagggccctcatgtccccctacccctgcctgtgatggagtgttctgaggggctttggcatttgctggaagcacagggagttccaaatgagagggagcttctgtggcttgagagcctctggggccttggctgccagagcacgaggcaggccaggacctggagagcccagaccctgtctccaggaggccaggaggccagatgggggccttgcctgaaagactggtccccttgatcgctggaggcatgtgggtggcaaccagggctgggcagggcttagggtgtgtgggccaaacccccctggggttggcaaagccgcctgtcaggcctcctggtgggggcccctggacacagggagcagaccctctgcctcatggggtaggagtggctgcctcctgtgttctctggatttcttctcccaacaactacaaccctggacttgcctccccaggcctcttgcctgtaaatagaagcccgcaaactgtacagatttacagaggcatcgagactgggccctgggagttgccatctgagagccgatggccccagcatcccccaggtgcctgcctggcaccacagtgaccctggcctcagcgtggcaaatgcatgtaaatatttttcgtaggcagcgtggctccagagagccccctgaagacagtgtccctccctcctgtgagtcctttctcctgtacagaacctgcctggggtgggtgggggtctgccattccctcccccaggccttccctgccccttctctcccctgtaacctgtttattaaccatacctgtcctgagttcatggccaaaaccttaaataagaaaaacaaaagaaaaagacagtggaaaaaagagaccaaggcgcctgccccactgcgggtactctcctgttccagccttgtgaaggaactggttttgtttttgtttttgtttttgtttttttttgtttgtttgtttgttttttaacacttcctgtgctgtgcccatttataagaggaaataaaattaagctgaaatga

SEQ ID NO: 57023 - DNA, 4978 bp, Homo sapiens
gaattccacaaaggcgcccgcccgccgcccgccgcccgcgcccgcgccgccgccatgaagccggggccgccgcaccgtgccggggccgcccacggggccggcgccggggccggggccgcggccgggcccggggcccgcgggctgctcctgccaccgctgctgctgctgctgctggcggggcgcgccgcgggggcccagcgctggcgcagtgagaacttcgagagacccgtggacctggagggctctggggatgatgactcctttcccgatgatgaactggatgacctctactcggggtcgggctcgggctacttcgagcaggagtcgggcattgagacagccatgcgcttcagcccagatgtagccctggcggtgtccaccacacctgcggtgctgcccaccacgaacatccagcctgtgggcacaccatttgaagagctcccctctgagcgccccaccctggagccagccaccagccccctggtggtgacagaagtcccggaagagcccagccagagagccaccaccgtctccactaccatggctaccactgctgccacaagcacaggggacccgactgtggccacagtgcctgccacagtggccaccgccacccccagcacccctgcagcacccccttttacggccaccactgctgttataaggaccactggcgtacggaggcttctgcctctcccactgaccacagtggctacggcacgggccactacccccgaggcgccctccccgcccaccacggcggctgtcttggacaccgaggccccaacacccaggctggtcagcacagctacctcccggccaagagcccttcccaggccggccaccacccaggagcctgacatccctgagaggagcaccctgcccctggggaccactgcccctggacccacagaggtggctcagaccccaactccagagaccttcctgaccacaatccgggatgagccagaggttccggtgagtggggggcccagtggagacttcgagctgccagaagaagagaccacacaaccagacacagccaatgaggtggtagctgtgggaggggctgcggccaaggcatcatctccacctgggacactgcccaagggtgcccgcccgggccctggcctcctggacaatgccatcgactcgggcagctcagctgctcagctgcctcagaagagtatcctggagcggaaggaggtgctcgtagctgtgattgtgggcggggtggtgggcgccctctttgctgccttcttggtcacactgctcatctatcgtatgaagaaaaaggatgagggcagctacacgctggaggaacccaagcaggcgagcgtcacataccagaagcctgacaagcaggaggagttctatgcctagtggagccacagtgcctccctgcagcctcaacaccaccctgctgtccagtccccagcctggccccaccagcccaagcctgggactgggcctggaacctggccccagttcttctctgccctctctcccaaggtctgcccaggctgccagcctcacacagatcttccccgaggaagaggggctgctgccatctgccccagactgtgcccttacgagctcatctcttgttcccctcatccctgccaccagtctggggcttcaggacctcatgtcagatggatgggaggaagaaagctcctgattggctggtggtggaagaaagggtggggcttgagatgagcctgagccctgacttggcacccacagtgctcactgagatctcctttttggggcagagaggcactcaggctggtttccaggacaaacatttggtaaacacagcccttgaaatcatctagacactgcaacctcttgctcgtatcccagggcctctctctagctgggtgagagggtgtcccttgtcaccagcctgttttgtcctggtctctctggggttgttgaatctctcctcttgcctgccaagtacacatgtacccagacttcatttctttctgcatcttcccccaagaaacagcttcctgagggtgctggggcagccactggtgaggaggggctgctctgatgtccctcctatgaggggactctgcacagacaccattgcccacactatcaccatattttcactcagtcacacacaagacaaaagcatgcaatgacaaaaccatacgcaatcctgaccgcccagccaatcaagacatatcacagaacacacgcgtccttccaagaatgtttatcctcatgcatcacttacacacccccagacacgtactgcaatgcaagtcactagtcatggtcacatgacagtgacagtgtggcctcctcctaccccaaatacacccacactctggcaccacacacattgtctccagctttcaggcttactggggagggtggaatcgagccagaacaatcagcccatattgggtccccctaagttgccccgtcatactcagtcccatgccatggtgcccacaccaaccatgcagccaccaaccccagccagtgtcagacacaatcccatgtggatgcacagtctcactccacatgacctgctctcaatgctggagggaaacaggcaggcccttgcctttctcggaaaaagtgtggggccacagcccttttagggcattgcatgcaggtgggcctggcttcacccctacctgcttcctccccaccgcagctggcagagggggaggtttggggccagacccccactagctgggagcctgggggctcctctaaggctgaggaaggaaatttggccccaggttgttggggggtcttgggtctcccaggacggaaggcccagggcagggagggggcatgtggttgggctcctttatctccctgtgtccccttcctgctttgagctagggggctgactctgcctcccaggacacaagtctccaaagtgcctgtgagggcgggccctccgcaccctctgccctctgcctggcaggccaacctcagcccacctgcccagaggccctccctgtggacaccccctcacctatttggccaaacaattctggctgcagcttcaggggccatggctggaagcagcccctgcagatccctcaggccccgaggtcagggtttgagggatgagaccaggtgatagtgggggaggggttacttcctttgttacctagcaagtagggctatttccatcggtattttaaatgtggggtcacagatcttttggggagggtgtgcttggcagggggcctcttggagccaaagggatgtggtgtgagttgcgattggctggcactcacacccccacccctcacccacatcccagattcaagtcaggaaggcaggttttatttcagggcccttttcaagatgccctggcagcagatttctgcaggatgaggggtagcggtgtgtaggcagtgagggggaggttccaggggctgtcccacagcctgtcttttccaggctgggctccatcttccagtcccaaaaccctccttcacagggcccagaggcttgtgaggaagccaggtggacccagccttagaagagtgggcatggggggcccctgatatctggagggggcgggttggcctcagtcatctttggagcagaagggctgggtcctggggccacagaccacaaggctcagcctccctaccctgctccctggggtgctgctgtcttggagagcacagctctggtgagacggcctgggcaggccgaggctgagaaaccagggaggatagaggagaaaagggcttgggcccccagccccagaagatgctggaccccaggtgggagacccaacagtgggtgcagtttctcagtagggctggagccaatggtgggggtggccccggcaggcctggctcctcacatcccaggggttggcttctgatttggggcttgggctccaggcactggcttctcttctctgtgtccttagcatttgagagaagaggccaggggccttgttcatggatccctggacccaaggcagatgtccaggctttatcctcctgaggatgaggagtctgaccagcccaaatctgccctggccggcctgaccggggcaaggcagtccaagagagttcagtgaggaccagctaggctctcccaggtgcaatgtgggtgcagggccctcatgtccccctacccctgcctgtgatggagtgttctgaggggctttggcatttgctggaagcacagggagttccaaatgagagggagcttctgtggcttgagagcctctggggccttggctgccagagcacgaggcaggccaggacctggagagcccagaccctgtctcctggtgggggcccctggacacagggagcagaccctctgcctcatggggtaggagtggctgcctcctgtgttctctggatttcttctcccaacaactacaaccctggacttgcctccccaggcctcttgcctgtaaatagaagcccgcaaactgtacagatttacagaggcatcgagactgggccctgggagttgccatctgagagccgatggccccagcatcccccaggtgcctgcctggcaccacagtgaccctggcctcagcgtggcaaatgcatgtaaatatttttcgtaggcagcgtggctccagagagccccctgaagacagtgtccctccctcctgtgagtcctttctcctgtacagaacctgcctggggtgggtgggggtctgccattccctcccccaggccttccctgccccttctctcccctgtaacctgtttattaaccatacctgtcctgagttcatggccaaaaccttaaataagaaaaacaaaagaaaaagacagtggaaaaaagagaccaaggcgcctgccccactgcgggtactctcctgttccagccttgtgaaggaactggttttgtttttgtttttgtttttgtttttttttgtttgtttgtttgttttttaacacttcctgtgctgtgcccatttataagaggaaataaaattaagctgaaatga

SEQ ID NO: 57024 - DNA, 2065 bp, Homo sapiens
ttaagcacgagaccgagcgctcgctgagtcagggtttgagggatgagaccaggtgatagtgggggaggggttacttcctttgttacctagcaagtagggctatttccatcggtattttaaatgtggggtcacagatcttttggggagggtgtgcttggcagggggcctcttggagccaaagggatgtggtgtgagttgcgattggctggcactcacacccccacccctcacccacatcccagattcaagtcaggaaggcaggttttatttcagggcccttttcaagatgccctggcagcagatttctgcaggatgaggggtagcggtgtgtaggcagtgagggggaggttccaggggctgtcccacagcctgtcttttccaggctgggctccatcttccagtcccaaaaccctccttcacagggcccagaggcttgtgaggaagccaggtggacccagccttagaagagtgggcatggggggcccctgatatctggagggggcgggttggcctcagtcatctttggagcagaagggctgggtcctggggccacagaccacaaggctcagcctccctaccctgctccctggggtgctgctgtcttggagagcacagctctggtgagacggcctgggcaggccgaggctgagaaaccagggaggatagaggagaaaagggcttgggcccccagccccagaagatgctggaccccaggtgggagacccaacagtgggtgcagtttctcagtagggctggagccaatggtgggggtggccccggcaggcctggctcctcacatcccaggggttggcttctgatttggggcttgggctccaggcactggcttctcttctctgtgtccttagcatttgagagaagaggccaggggccttgttcatggatccctggacccaaggcagatgtccaggctttatcctcctgaggatgaggagtctgaccagcccaaatctgccctggccggcctgaccggggcaaggcagtccaagagagttcagtgaggaccagctaggctctcccaggtgcaatgtgggtgcagggccctcatgtccccctacccctgcctgtgatggagtgttctgaggggctttggcatttgctggaagcacagggagttccaaatgagagggagcttctgtggcttgagagcctctggggccttggctgccagagcacgaggcaggccaggacctggagagcccagaccctgtctccaggaggccaggaggccagatgggggccttgcctgaaagactggtccccttgatcgctggaggcatgtgggtggcaaccagggctgggcagggcttagggtgtgtgggccaaacccccctggggttggcaaagccgcctgtcaggcctcctggtgggggcccctggacacagggagcagaccctctgcctcatggggtaggagtggctgcctcctgtgttctctggatttcttctcccaacaactacaaccctggacttgcctccccaggcctcttgcctgtaaatagaagcccgcaaactgtacagatttacagaggcatcgagactgggccctgggagttgccatctgagagccgatggccccagcatcccccaggtgcctgcctggcaccacagtgaccctggcctcagcgtggcaaatgcatgtaaatatttttcgtaggcagcgtggctccagagagccccctgaagacagtgtccctccctcctgtgagtcctttctcctgtacagaacctgcctggggtgggtgggggtctgccattccctcccccaggccttccctgccccttctctcccctgtaacctgtttattaaccatacctgtcctgagttcatggccaaaaccttaaataagaaaaacaaaagaaaaagacagtggaaaaaagagaccaaggcgcctgccccactgcgggtactctcctgttccagccttgtgaaggaactggttttgtttttgtttttgtttttgtttttttttgtttgtttgtttgttttttaacacttcctgtgctgtgcccatttataagaggaaataaaattaagctgaaatga

SEQ ID NO: 57025 - DNA, 349 bp, Homo sapiens
gcagtaattatgcttgtctttggctccagagggaggcattatacttgataaagagtgtccagaggggacactctctctgtcttccaaaattctaagcaaagttgtcctgtgctctacgtggaaatactatccttattattcaaggctactcatcgtataaatatccttgaaaagatagtggagaacaaagagcagtcagtgcttctgcttgcaagatatacagaaagttttcacccaataaatatattagtagttatgttaaatataaatagtctaaagaatgtcagattgggaaaaaaatttcaatatatgttactaacaagaggcactccttaaatatggggacatg

SEQ ID NO: 57026 - DNA, 759 bp, Homo sapiens
ggaagccgctggctgggttaacctgtggcgcgctccgcggttccggcgcctgaagttttagctgcggtggcggcggcagtcgggaccgactgcaagatgtcatttgtcagagtgaaccgctgtggtccccgagttggtgtaagaaagacaccgaaagtaaagaagaagaaaacttcagtgaaacaagaatgggataataccgtgactgatctaaccgttcatcgggcaactcccgaagatctggtacgccgtcatgaaatacacaaatcgaagaatagagcattagtacactgggaactccaagaaaaagctttgaagagaaaatggaggaagcagaaaccagaaactttaaatcttgagaaaagaagattgtctatcatgaaggaggtaatgctaaactgcattagagttagaaagaaaaaaaggagataaatagggttctttgtttttcttcaatttgattcacgttggagagactctagtaatcactgcattcttattcaataatctacatgtggacttcaaaaaaagcaacagagtggtgactggagtctggtttggtggtttgaattcctgttctactacttaccagctgtgtgaccctaagtaaattatttaacttttcagcctgaattttctcatatttaaaattattatttgcttgtattgctatgagatttcagtgatataatacttacaaagtgaatagcacaatctttgcttattcctctttttgtatataagctgctataataattt

SEQ ID NO: 57027 - DNA, 3342 bp, Homo sapiens
ggaagccgctggctgggttaacctgtggcgcgctccgcggttccggcgcctgaagttttagctgcggtggcggcggcagtcgggaccgactgcaagatgtcatttgtcagagtgaaccgctgtggtccccgagttggtgtaagaaagacaccgaaagtaaagaagaagaaaacttcagtgaaacaagaatgggataataccgtgactgatctaaccgttcatcgggcaactcccgaagatctggtacgccgtcatgaaatacacaaatcgaagaatagagcattagtacactgggaactccaagaaaaagctttgaagagaaaatggaggaagcagaaaccagaaactttaaatcttgagaaaagaagattgtctatcatgaaggagattctttctgatcaataccagatgcaagatgtgttggagaaatctgatcatctaatagctgcagcaaaagagctgtttcctcgtaggcgcacagggtttccaaatgtaacagtggctcctgattcctctcagggtcccattgtggtaaatcaagaccctatcacccaatctatctttaatgagtctgtcatagaacctcaggctcttaatgatgtagatggtgaagaagaaggaactgttaatagccagtcaggagaaagtgagaatgagaatgagttggataactctctaaactctcagtctaacacgaatacagacaggtttctccaacaactaacagaagagaattttgagttaattagtaagttgtggactgacattcagcagaaaatagcaacccagtcacaaataactcctccaggaacgccatcatctgctctttcatcaggggagcaaagagctgctctgaatgctaccaatgctgtcaagagactccaaaccaggcttcagcctgaagaatctactgagactctagactcaagctacgttgtgggacacgtgctgaactcaaggaagcaaaaacagctgttaaataaagtgaaaaggaaaccgaatttgcatgctctttccaagccgaagaaaaacatatcatcaggtagcacaacctctgcagacttaccaaataggactaattccaacctggatgtcctcaaacacatgatacatgaagtggaacatgaaatggaagaatatgagcggtggacaggtcgcgaggtcaagggtctgcagagcagtcagggtcttacaggcttcactttgtcgctggtgagctccctctgtcgcctggttcggtaccttaaagagagtgagatccagctacgtaaagaagtagagacaaggcaacaactggaacaagtattaggtgatcatcgagagctcattgatgctctgacagctgaaattcttcgtcttagagaagaaaacgctgctacacaggcaagacttcagcagtacatggtcacaacagatgagcaactgatatcactcacacatgctattaagaactgtcctgtgataaataacagacaagaaattcaggcatcagaaagcggagccacaggtagaagagttatggacagtccagagcgtccagttgtaaatgccaatgtctcagtgccattgatgttcagagaggaagtggctgaattcccacaggaagagttgcccgttaaactgtctcaggtgccagaccctccagataacatgaatctggccaagaattttccagcacatatttttgagccagctgtgttgttaacaccacccaggcagaagagcaacttaaaattctctcctcttcaggacgtattgagaaggactgttcaaactcgtcctgctccacgacttcctccaactgtggaaataattgagaaggaacaaaattgggaagagaagaccttacctattgatacagacattcagaattcaagtgaagagaatcgtctcttcactcagagatggagagtctctcacatgggagaagatttggagaacaaaactcaggctccttttgttaacctctcacagcccctctgcaattcccattccaacactcaacagtcaagaagccccacattctcagaagagctcccagtactgggagatgggcagcagctgagaacaaatgagtcattaatacaaagaaaggacataatgacacgaattgctgatttgacattgcagaattcagctatcaaggcacatatgaataatattattgagcccagaggagagcaaggggatggactccgggagttgaacaaacaagaaagtgcaagtgacatgacttctacttttccagtagcacagtctctaacaccaggtagtatggaggaacggattgcagaattgaatcgacaaagtatggaggctcgtggaaaactactgcagttgatagagcagcagaaacttgttggtttgaatctttctccaccaatgtcacctgttcagttacctctcagagcatggactgaaggagcaaagaggacaattgaggtatctattccaggagcagaagccccagaaagctcaaaatgtagtactgtctctcccgtcagcgggataaatacaagaagatcttccggggctactggtaattcttgttctccactaaatgccacctcaggaagtgggagattcacacctcttaatccaagagcaaagattgagaaacagaatgaagaaggctggtttgctctttctacccatgtatcataagtgaagtcaagtctcactgagtttgttcttaataatttattactcccctttccctgctctgacttttaagtttttatatccttctttcagataaaacctacaaagatcctgtgaattagtactaatgaaacagagaaataaagcaattattttttgactttctcaaataagttttcaacaaccaactgacctacagctccctgtgaatgaaactttgactgtagagaagttaaagttttgtattttaatactttcttaagtattttaagggttttttttattaatacatttttacctttatctttattcagggttttttgaggtttagtatatcttagttgatccatttatttatttattttcctgaagaactaatttgctttgcatgtaacttacaataaaattcctctgtgtgattagagtctggctttcaggaatatgtaacacccacttttctttcttttttcttgggaagtcattgctgttcatcactttttccatcaagtgaaatatacagccttaaaaacaataggcctgggagtgtttgtttatatttgcttaagcaggtaagagtggttgcatttattataaaatcttatgtagtttttaaatgtgaaaatgtcatcaataatggtaatgcaaatcaaataaatatgattctagagctcaaaaaataaa

SEQ ID NO: 57028 - DNA, 3293 bp, Homo sapiens
cgagtatgcgcgtgcgcaccgctttcgggagcttttgcacagagctgatgtcatttgtcagagtgaaccgctgtggtccccgagttggtgtaagaaagacaccgaaagtaaagaagaagaaaacttcagtgaaacaagaatgggataataccgtgactgatctaaccgttcatcgggcaactcccgaagatctggtacgccgtcatgaaatacacaaatcgaagaatagagcattagtacactgggaactccaagaaaaagctttgaagagaaaatggaggaagcagaaaccagaaactttaaatcttgagaaaagaagattgtctatcatgaaggagattctttctgatcaataccagatgcaagatgtgttggagaaatctgatcatctaatagctgcagcaaaagagctgtttcctcgtaggcgcacagggtttccaaatgtaacagtggctcctgattcctctcagggtcccattgtggtaaatcaagaccctatcacccaatctatctttaatgagtctgtcatagaacctcaggctcttaatgatgtagatggtgaagaagaaggaactgttaatagccagtcaggagaaagtgagaatgagaatgagttggataactctctaaactctcagtctaacacgaatacagacaggtttctccaacaactaacagaagagaattttgagttaattagtaagttgtggactgacattcagcagaaaatagcaacccagtcacaaataactcctccaggaacgccatcatctgctctttcatcaggggagcaaagagctgctctgaatgctaccaatgctgtcaagagactccaaaccaggcttcagcctgaagaatctactgagactctagactcaagctacgttgtgggacacgtgctgaactcaaggaagcaaaaacagctgttaaataaagtgaaaaggaaaccgaatttgcatgctctttccaagccgaagaaaaacatatcatcaggtagcacaacctctgcagacttaccaaataggactaattccaacctggatgtcctcaaacacatgatacatgaagtggaacatgaaatggaagaatatgagcggtggacaggtcgcgaggtcaagggtctgcagagcagtcagggtcttacaggcttcactttgtcgctggtgagctccctctgtcgcctggttcggtaccttaaagagagtgagatccagctacgtaaagaagtagagacaaggcaacaactggaacaagtattaggtgatcatcgagagctcattgatgctctgacagctgaaattcttcgtcttagagaagaaaacgctgctacacaggcaagacttcagcagtacatggtcacaacagatgagcaactgatatcactcacacatgctattaagaactgtcctgtgataaataacagacaagaaattcaggcatcagaaagcggagccacaggtagaagagttatggacagtccagagcgtccagttgtaaatgccaatgtctcagtgccattgatgttcagagaggaagtggctgaattcccacaggaagagttgcccgttaaactgtctcaggtgccagaccctccagataacatgaatctggccaagaattttccagcacatatttttgagccagctgtgttgttaacaccacccaggcagaagagcaacttaaaattctctcctcttcaggacgtattgagaaggactgttcaaactcgtcctgctccacgacttcctccaactgtggaaataattgagaaggaacaaaattgggaagagaagaccttacctattgatacagacattcagaattcaagtgaagagaatcgtctcttcactcagagatggagagtctctcacatgggagaagatttggagaacaaaactcaggctccttttgttaacctctcacagcccctctgcaattcccattccaacactcaacagtcaagaagccccacattctcagaagagctcccagtactgggagatgggcagcagctgagaacaaatgagtcattaatacaaagaaaggacataatgacacgaattgctgatttgacattgcagaattcagctatcaaggcacatatgaataatattattgagcccagaggagagcaaggggatggactccgggagttgaacaaacaagaaagtgcaagtgacatgacttctacttttccagtagcacagtctctaacaccaggtagtatggaggaacggattgcagaattgaatcgacaaagtatggaggctcgtggaaaactactgcagttgatagagcagcagaaacttgttggtttgaatctttctccaccaatgtcacctgttcagttacctctcagagcatggactgaaggagcaaagaggacaattgaggtatctattccaggagcagaagccccagaaagctcaaaatgtagtactgtctctcccgtcagcgggataaatacaagaagatcttccggggctactggtaattcttgttctccactaaatgccacctcaggaagtgggagattcacacctcttaatccaagagcaaagattgagaaacagaatgaagaaggctggtttgctctttctacccatgtatcataagtgaagtcaagtctcactgagtttgttcttaataatttattactcccctttccctgctctgacttttaagtttttatatccttctttcagataaaacctacaaagatcctgtgaattagtactaatgaaacagagaaataaagcaattattttttgactttctcaaataagttttcaacaaccaactgacctacagctccctgtgaatgaaactttgactgtagagaagttaaagttttgtattttaatactttcttaagtattttaagggttttttttattaatacatttttacctttatctttattcagggttttttgaggtttagtatatcttagttgatccatttatttatttattttcctgaagaactaatttgctttgcatgtaacttacaataaaattcctctgtgtgattagagtctggctttcaggaatatgtaacacccacttttctttcttttttcttgggaagtcattgctgttcatcactttttccatcaagtgaaatatacagccttaaaaacaataggcctgggagtgtttgtttatatttgcttaagcaggtaagagtggttgcatttattataaaatcttatgtagtttttaaatgtgaaaatgtcatcaataatggtaatgcaaatcaaataaatatgattctagagctcaaaaaataaa

SEQ ID NO: 57029 - DNA, 3525 bp, Homo sapiens
ggaagccgctggctgggttaacctgtggcgcgctccgcggttccggcgcctgaagttttagctgcggtggcggcggcagtcgggaccgactgcaaggcaggttgagatgatggatctgaggcttgcagctcgcagtcccaacgagccttagggaccagggctaccaaaagggtggggagaacggtggtggcatctgtctgttgcctgggatccaggcgcccggttggggaatccttacttcaggaagcgcagccgcggctctgtgttttgagagtgcaaatgtcatttgtcagagtgaaccgctgtggtccccgagttggtgtaagaaagacaccgaaagtaaagaagaagaaaacttcagtgaaacaagaatgggataataccgtgactgatctaaccgttcatcgggcaactcccgaagatctggtacgccgtcatgaaatacacaaatcgaagaatagagcattagtacactgggaactccaagaaaaagctttgaagagaaaatggaggaagcagaaaccagaaactttaaatcttgagaaaagaagattgtctatcatgaaggagattctttctgatcaataccagatgcaagatgtgttggagaaatctgatcatctaatagctgcagcaaaagagctgtttcctcgtaggcgcacagggtttccaaatgtaacagtggctcctgattcctctcagggtcccattgtggtaaatcaagaccctatcacccaatctatctttaatgagtctgtcatagaacctcaggctcttaatgatgtagatggtgaagaagaaggaactgttaatagccagtcaggagaaagtgagaatgagaatgagttggataactctctaaactctcagtctaacacgaatacagacaggtttctccaacaactaacagaagagaattttgagttaattagtaagttgtggactgacattcagcagaaaatagcaacccagtcacaaataactcctccaggaacgccatcatctgctctttcatcaggggagcaaagagctgctctgaatgctaccaatgctgtcaagagactccaaaccaggcttcagcctgaagaatctactgagactctagactcaagctacgttgtgggacacgtgctgaactcaaggaagcaaaaacagctgttaaataaagtgaaaaggaaaccgaatttgcatgctctttccaagccgaagaaaaacatatcatcaggtagcacaacctctgcagacttaccaaataggactaattccaacctggatgtcctcaaacacatgatacatgaagtggaacatgaaatggaagaatatgagcggtggacaggtcgcgaggtcaagggtctgcagagcagtcagggtcttacaggcttcactttgtcgctggtgagctccctctgtcgcctggttcggtaccttaaagagagtgagatccagctacgtaaagaagtagagacaaggcaacaactggaacaagtattaggtgatcatcgagagctcattgatgctctgacagctgaaattcttcgtcttagagaagaaaacgctgctacacaggcaagacttcagcagtacatggtcacaacagatgagcaactgatatcactcacacatgctattaagaactgtcctgtgataaataacagacaagaaattcaggcatcagaaagcggagccacaggtagaagagttatggacagtccagagcgtccagttgtaaatgccaatgtctcagtgccattgatgttcagagaggaagtggctgaattcccacaggaagagttgcccgttaaactgtctcaggtgccagaccctccagataacatgaatctggccaagaattttccagcacatatttttgagccagctgtgttgttaacaccacccaggcagaagagcaacttaaaattctctcctcttcaggacgtattgagaaggactgttcaaactcgtcctgctccacgacttcctccaactgtggaaataattgagaaggaacaaaattgggaagagaagaccttacctattgatacagacattcagaattcaagtgaagagaatcgtctcttcactcagagatggagagtctctcacatgggagaagatttggagaacaaaactcaggctccttttgttaacctctcacagcccctctgcaattcccattccaacactcaacagtcaagaagccccacattctcagaagagctcccagtactgggagatgggcagcagctgagaacaaatgagtcattaatacaaagaaaggacataatgacacgaattgctgatttgacattgcagaattcagctatcaaggcacatatgaataatattattgagcccagaggagagcaaggggatggactccgggagttgaacaaacaagaaagtgcaagtgacatgacttctacttttccagtagcacagtctctaacaccaggtagtatggaggaacggattgcagaattgaatcgacaaagtatggaggctcgtggaaaactactgcagttgatagagcagcagaaacttgttggtttgaatctttctccaccaatgtcacctgttcagttacctctcagagcatggactgaaggagcaaagaggacaattgaggtatctattccaggagcagaagccccagaaagctcaaaatgtagtactgtctctcccgtcagcgggataaatacaagaagatcttccggggctactggtaattcttgttctccactaaatgccacctcaggaagtgggagattcacacctcttaatccaagagcaaagattgagaaacagaatgaagaaggctggtttgctctttctacccatgtatcataagtgaagtcaagtctcactgagtttgttcttaataatttattactcccctttccctgctctgacttttaagtttttatatccttctttcagataaaacctacaaagatcctgtgaattagtactaatgaaacagagaaataaagcaattattttttgactttctcaaataagttttcaacaaccaactgacctacagctccctgtgaatgaaactttgactgtagagaagttaaagttttgtattttaatactttcttaagtattttaagggttttttttattaatacatttttacctttatctttattcagggttttttgaggtttagtatatcttagttgatccatttatttatttattttcctgaagaactaatttgctttgcatgtaacttacaataaaattcctctgtgtgattagagtctggctttcaggaatatgtaacacccacttttctttcttttttcttgggaagtcattgctgttcatcactttttccatcaagtgaaatatacagccttaaaaacaataggcctgggagtgtttgtttatatttgcttaagcaggtaagagtggttgcatttattataaaatcttatgtagtttttaaatgtgaaaatgtcatcaataatggtaatgcaaatcaaataaatatgattctagagctcaaaaaataaa

SEQ ID NO: 57030 - DNA, 3369 bp, Homo sapiens
gattgtagcgttgggggagttcaccgtgtagcaggagagaggcaaactatccagggtgctttgggaccgggagcgtcatttaaatcgatggatgtcagaggggcttctcagaaggctcctcctatgtcatttgtcagagtgaaccgctgtggtccccgagttggtgtaagaaagacaccgaaagtaaagaagaagaaaacttcagtgaaacaagaatgggataataccgtgactgatctaaccgttcatcgggcaactcccgaagatctggtacgccgtcatgaaatacacaaatcgaagaatagagcattagtacactgggaactccaagaaaaagctttgaagagaaaatggaggaagcagaaaccagaaactttaaatcttgagaaaagaagattgtctatcatgaaggagattctttctgatcaataccagatgcaagatgtgttggagaaatctgatcatctaatagctgcagcaaaagagctgtttcctcgtaggcgcacagggtttccaaatgtaacagtggctcctgattcctctcagggtcccattgtggtaaatcaagaccctatcacccaatctatctttaatgagtctgtcatagaacctcaggctcttaatgatgtagatggtgaagaagaaggaactgttaatagccagtcaggagaaagtgagaatgagaatgagttggataactctctaaactctcagtctaacacgaatacagacaggtttctccaacaactaacagaagagaattttgagttaattagtaagttgtggactgacattcagcagaaaatagcaacccagtcacaaataactcctccaggaacgccatcatctgctctttcatcaggggagcaaagagctgctctgaatgctaccaatgctgtcaagagactccaaaccaggcttcagcctgaagaatctactgagactctagactcaagctacgttgtgggacacgtgctgaactcaaggaagcaaaaacagctgttaaataaagtgaaaaggaaaccgaatttgcatgctctttccaagccgaagaaaaacatatcatcaggtagcacaacctctgcagacttaccaaataggactaattccaacctggatgtcctcaaacacatgatacatgaagtggaacatgaaatggaagaatatgagcggtggacaggtcgcgaggtcaagggtctgcagagcagtcagggtcttacaggcttcactttgtcgctggtgagctccctctgtcgcctggttcggtaccttaaagagagtgagatccagctacgtaaagaagtagagacaaggcaacaactggaacaagtattaggtgatcatcgagagctcattgatgctctgacagctgaaattcttcgtcttagagaagaaaacgctgctacacaggcaagacttcagcagtacatggtcacaacagatgagcaactgatatcactcacacatgctattaagaactgtcctgtgataaataacagacaagaaattcaggcatcagaaagcggagccacaggtagaagagttatggacagtccagagcgtccagttgtaaatgccaatgtctcagtgccattgatgttcagagaggaagtggctgaattcccacaggaagagttgcccgttaaactgtctcaggtgccagaccctccagataacatgaatctggccaagaattttccagcacatatttttgagccagctgtgttgttaacaccacccaggcagaagagcaacttaaaattctctcctcttcaggacgtattgagaaggactgttcaaactcgtcctgctccacgacttcctccaactgtggaaataattgagaaggaacaaaattgggaagagaagaccttacctattgatacagacattcagaattcaagtgaagagaatcgtctcttcactcagagatggagagtctctcacatgggagaagatttggagaacaaaactcaggctccttttgttaacctctcacagcccctctgcaattcccattccaacactcaacagtcaagaagccccacattctcagaagagctcccagtactgggagatgggcagcagctgagaacaaatgagtcattaatacaaagaaaggacataatgacacgaattgctgatttgacattgcagaattcagctatcaaggcacatatgaataatattattgagcccagaggagagcaaggggatggactccgggagttgaacaaacaagaaagtgcaagtgacatgacttctacttttccagtagcacagtctctaacaccaggtagtatggaggaacggattgcagaattgaatcgacaaagtatggaggctcgtggaaaactactgcagttgatagagcagcagaaacttgttggtttgaatctttctccaccaatgtcacctgttcagttacctctcagagcatggactgaaggagcaaagaggacaattgaggtatctattccaggagcagaagccccagaaagctcaaaatgtagtactgtctctcccgtcagcgggataaatacaagaagatcttccggggctactggtaattcttgttctccactaaatgccacctcaggaagtgggagattcacacctcttaatccaagagcaaagattgagaaacagaatgaagaaggctggtttgctctttctacccatgtatcataagtgaagtcaagtctcactgagtttgttcttaataatttattactcccctttccctgctctgacttttaagtttttatatccttctttcagataaaacctacaaagatcctgtgaattagtactaatgaaacagagaaataaagcaattattttttgactttctcaaataagttttcaacaaccaactgacctacagctccctgtgaatgaaactttgactgtagagaagttaaagttttgtattttaatactttcttaagtattttaagggttttttttattaatacatttttacctttatctttattcagggttttttgaggtttagtatatcttagttgatccatttatttatttattttcctgaagaactaatttgctttgcatgtaacttacaataaaattcctctgtgtgattagagtctggctttcaggaatatgtaacacccacttttctttcttttttcttgggaagtcattgctgttcatcactttttccatcaagtgaaatatacagccttaaaaacaataggcctgggagtgtttgtttatatttgcttaagcaggtaagagtggttgcatttattataaaatcttatgtagtttttaaatgtgaaaatgtcatcaataatggtaatgcaaatcaaataaatatgattctagagctcaaaaaataaa

SEQ ID NO: 57031 - DNA, 1891 bp, Homo sapiens
gacgctccccacatcccagacgatgggcggccaggcagagatgctcctcacttcctagacgggatgatggccgggaagagagcgtccagttgtaaatgccaatgtctcagtgccattgatgttcagagaggaagtggctgaattcccacaggaagagttgcccgttaaactgtctcaggtgccagaccctccagataacatgaatctggccaagaattttccagcacatatttttgagccagctgtgttgttaacaccacccaggcagaagagcaacttaaaattctctcctcttcaggacgtattgagaaggactgttcaaactcgtcctgctccacgacttcctccaactgtggaaataattgagaaggaacaaaattgggaagagaagaccttacctattgatacagacattcagaattcaagtgaagagaatcgtctcttcactcagagatggagagtctctcacatgggagaagatttggagaacaaaactcaggctccttttgttaacctctcacagcccctctgcaattcccattccaacactcaacagtcaagaagccccacattctcagaagagctcccagtactgggagatgggcagcagctgagaacaaatgagtcattaatacaaagaaaggacataatgacacgaattgctgatttgacattgcagaattcagctatcaaggcacatatgaataatattattgagcccagaggagagcaaggggatggactccgggagttgaacaaacaagaaagtgcaagtgacatgacttctacttttccagtagcacagtctctaacaccaggtagtatggaggaacggattgcagaattgaatcgacaaagtatggaggctcgtggaaaactactgcagttgatagagcagcagaaacttgttggtttgaatctttctccaccaatgtcacctgttcagttacctctcagagcatggactgaaggagcaaagaggacaattgaggtatctattccaggagcagaagccccagaaagctcaaaatgtagtactgtctctcccgtcagcgggataaatacaagaagatcttccggggctactggtaattcttgttctccactaaatgccacctcaggaagtgggagattcacacctcttaatccaagagcaaagattgagaaacagaatgaagaaggctggtttgctctttctacccatgtatcataagtgaagtcaagtctcactgagtttgttcttaataatttattactcccctttccctgctctgacttttaagtttttatatccttctttcagataaaacctacaaagatcctgtgaattagtactaatgaaacagagaaataaagcaattattttttgactttctcaaataagttttcaacaaccaactgacctacagctccctgtgaatgaaactttgactgtagagaagttaaagttttgtattttaatactttcttaagtattttaagggttttttttattaatacatttttacctttatctttattcagggttttttgaggtttagtatatcttagttgatccatttatttatttattttcctgaagaactaatttgctttgcatgtaacttacaataaaattcctctgtgtgattagagtctggctttcaggaatatgtaacacccacttttctttcttttttcttgggaagtcattgctgttcatcactttttccatcaagtgaaatatacagccttaaaaacaataggcctgggagtgtttgtttatatttgcttaagcaggtaagagtggttgcatttattataaaatcttatgtagtttttaaatgtgaaaatgtcatcaataatggtaatgcaaatcaaataaatatgattctagagctcaaaaaataaa

SEQ ID NO: 57032 - DNA, 1908 bp, Homo sapiens
ggaagccgctggctgggttaacctgtggcgcgctccgcggttccggcgcctgaagttttagctgcggtggcggcggcagtcgggaccgactgcaagatgtcatttgtcagagtgaaccgctgtggtccccgagttggtgtaagaaagacaccgaaagtaaagaagaagaaaacttcagtgaaacaagaatgggataataccgtgactgatctaaccgttcatcgggcaactcccgaagatctggtacgccgtcatgaaatacacaaatcgaagaatagagcattagtacactgggaactccaagaaaaagctttgaagagaaaatggaggaagcagaaaccagaaactttaaatcttgagaaaagaagattgtctatcatgaaggagattctttctgatcaataccagatgcaagatgtgttggagaaatctgatcatctaatagctgcagcaaaagagctgtttcctcgtaggcgcacagggtttccaaatgtaacagtggctcctgattcctctcagggtcccattgtggtaaatcaagaccctatcacccaatctatctttaatgagtctgtcatagaacctcaggctcttaatgatgtagatggtgaagaagaaggaactgttaatagccagtcaggagaaagtgagaatgagaatgagttggataactctctaaactctcagtctaacacgaatacagacaggtttctccaacaactaacagaagagaattttgagttaattagtaagttgtggactgacattcagcagaaaatagcaacccagtcacaaataactcctccaggaacgccatcatctgctctttcatcaggggagcaaagagctgctctgaatgctaccaatgctgtcaagagactccaaaccaggcttcagcctgaagaatctactgagactctagactcaagctacgttgtgggacacgtgctgaactcaaggaagcaaaaacagctgttaaataaagaaggagcaaagaggacaattgaggtatctattccaggagcagaagccccagaaagctcaaaatgtagtactgtctctcccgtcagcgggataaatacaagaagatcttccggggctactggtaattcttgttctccactaaatgccacctcaggaagtgggagattcacacctcttaatccaagagcaaagattgagaaacagaatgaagaaggctggtttgctctttctacccatgtatcataagtgaagtcaagtctcactgagtttgttcttaataatttattactcccctttccctgctctgacttttaagtttttatatccttctttcagataaaacctacaaagatcctgtgaattagtactaatgaaacagagaaataaagcaattattttttgactttctcaaataagttttcaacaaccaactgacctacagctccctgtgaatgaaactttgactgtagagaagttaaagttttgtattttaatactttcttaagtattttaagggttttttttattaatacatttttacctttatctttattcagggttttttgaggtttagtatatcttagttgatccatttatttatttattttcctgaagaactaatttgctttgcatgtaacttacaataaaattcctctgtgtgattagagtctggctttcaggaatatgtaacacccacttttctttcttttttcttgggaagtcattgctgttcatcactttttccatcaagtgaaatatacagccttaaaaacaataggcctgggagtgtttgtttatatttgcttaagcaggtaagagtggttgcatttattataaaatcttatgtagtttttaaatgtgaaaatgtcatcaataatggtaatgcaaatcaaataaatatgattctagagctcaaaaaataaa

SEQ ID NO: 57033 - DNA, 224 bp, Homo sapiens
caacttctttgtgtctgaaacattcctttatgtacttttctcttctgtataggtacgccgtcatgaaatacacaaatcgaagaatagagcattagtacactgggaactccaagaaaaagctttgaagagaaaatggaggaagcagaaaccagaaactttaaatcttgagaaaagaagattgtctatcatgaaggaggtaatgctaaactgcattagagttagaa

SEQ ID NO: 57034 - DNA, 344 bp, Homo sapiens
accgacgatacatgcacacctacgctgctatcctgcccctgtgcagatgccaccaacctgccttgctggcaccctgcccctgatgtgagtgtgccctgccgcacagcctctgctgtcaacacatttggctagacaccaccttgcctccacagggatgttactaccctatccccaccagtgctctgcttccaccaatgcatgcccgcaccacaagccactgctgctggcatgcacatgtgagtgcaggccctgctgccaccaccccaatgaaacattttagctggcatcctccactgagtgttattgtcagcagaccaggaacgcattcactctttcagcacagc

SEQ ID NO: 57035 - DNA, 386 bp, Homo sapiens
cagcctagggttgttgcccttctctgaggcacccacagacttctgagcaggcacagtcctaacctccccattggggccagctttcagagtacagctttgcctagagcaaagtgagtgtggggcggggcgggggtcacgcagtggctcagctgtgaccaaaaaacgtcagactcttcactcttagatgtttatagaaaactgtaatctcagaatgaaaaggcaaatgttgaaacttctttcaagatgacttctttatttttgggttttgtttgtttgttttgggagagtctctctctgtcgcccaggctagctgtggtgattgatagagctcataaagctcattctccagtggcttttctcctagttaatatgcatgtgaagtgttt

SEQ ID NO: 57036 - DNA, 1039 bp, Homo sapiens
aaaagaaagaaaaaaaagaaaaattttctgcaaagggtgtcaatgttaatattataataattctttaacaatgaattcctctccaaatgcacttagagaaatgtacataagtgtgagaaatcaccattaagtacacttaaatctacacattgactagttctagctgaatttctagtttatgaaaaggtattaatgtttctagtttatgaaaaggtaatgaggaaaactttctttaaaagatgtgtttaacagccaaatcagatatactgaacagacataaaaaagtaacaatatttttttcacctcaggcctttcccctggtttgatctgactgctgtgcatactcaaggaactccgtttagccagcatctctcaagtagtcctgttctccaagaccaccttacccatctatactgtgcttcatttggcatctccctaaccaaagaacagccagtcatttccacaggctttccatcccaataagagaactcaggaatcaggattttttcccactcacagattttccctataatagttgtgccctgattatcacaattgactgtgggagtcttgtggctgtattgtgtttgccacatgatagacatcaggaattataaaactgtactgatgactctttaaaatgtagaataaaacaagtggtcctatccatcaatatgtatctggctctcagaagcaactagtgaaactacacaacctaacttaagtaagctgctcccgcagaaaagtcttgttaatacaaattatttctcttctaaaattaaagaagttataatgttataagttttagacaattacatactgcagcttcttttccaataaatcaagtttcaatccatttgccagcagtaggtagctggaaaaagatacagtttgattttctcacaattttggacagagaagtgaaggtatggtaaaccatcttaattgaattatggcttgtatcatgcttattttgactatatatgactgttctggtactatcttatttacagctgttcccatttaaaccatttaaaaa

SEQ ID NO: 57037 - DNA, 592 bp, Homo sapiens
agtagcagggtatccagtagggactgagggatctgccccagtagtgaagtataaggaggtatcagaaggtttatgcctgtaatcccagcactttgggaggctgaggtgggaggatcacttgaggccaggagctcaagaccagcatgggcggcatagtgagaccctatctctacaaaaaataaaatgaaaaacaaacaaaaaaaataagatggaagctaggcaggcccaagtactaaatgctataggggaaaagaagagtggcattcgttcaacaggcgtgagagagaagccttcatagaagacatgttgtttgctattaatagatctctgatggatgatgaataaaacagaataagcaactacatataagcaggagtaaccataaccctaggattatagtatactaggagaaaaaaaaaatggtatattgttaacctcatcaagccaccaaatgttaatgtggaaggaaaatattgggtctggtttatgtagcttctgctatttgaccccacagttggtttggtttacttcttctattctaaagtaatacagattaagtttagaaaacaatcttgaggtaaacaaataggga

SEQ ID NO: 57038 - DNA, 422 bp, Homo sapiens
tcttgaatacgttaagaaagtcttgtttgtatagaagagtttcaaatcatgtgagtgatgaagggacccttctgttgaaccttggtgtgcattttaggtccattttgggtttactcctttgtgctgcttcatgatgccttaggacaaggacaaggcctaggcctccttgtctcagttccctcctgctctctctgttgccctcctccttccacctggagcatggcccagcatcaggttggcacatgctgtgatcagctacctccatgtaccacaccaagcaaagctctctgggtgacacagttgccaccaccagggcactgacccttactctgtgttctcctagctcctcctgagggtgctgtaggagacatctgcaaaaaagaagatgctggcaatatgccatcaacctcagaggggagtat

SEQ ID NO: 57039 - DNA, 311 bp, Homo sapiens
caaggaaacgaaaaagcaccagctctttggggtcagggttaaggctctaacacagaatctggcatataaaaagtattcaagatacttttaagggccaggcgtcctggctcacacctataatcccagcattttgggaggcagaggtgggcgaatcacttgaggtcaggagtttgagaccagcttggccaacatggtgaaaccctgtctttactaaaaaatacagaaagggcatggtggtgcacacctgtagtcccagctactcgggagactaaggcacaagaatcacttgaacctgggaagcagaagtagtt

SEQ ID NO: 57040 - DNA, 486 bp, Homo sapiens
gaggctgtttttcatttttcggagggttcaagactttaataagattgattctggccatactaggaagttgcctaatactaccttgtctcttacctctccttgttagaaacattcagtcaactatagaggcaatagtagctaggcaaactaccagtcagctaatggctctatgtaaatgtcaacctttgtctaaagaagaaaacttgtctcttcatgcaaaattaaataatagtgatgcctcctattaaatttcttttataaaaggcatcaaaggggggaaactgaggcagaaatttaaaaataaatatgcattcattcactccaagaaaagttaacaggcaaggcaagggttaaaaagaaaagaacaagttttcctcggcctagcaagctcacttcaaggacagttataagataatgttgtttgagaagccaagtccaaaggaatgggttccagacatccctcccctctagaacaaggttgaagga

SEQ ID NO: 57041 - DNA, 611 bp, Homo sapiens
tggtcatattttgacttcatgcatttaatgaaccaaactaaaggtaaatattttattttgattcccaaggcagacttgtgggtacccaagttcctcagcccatctttaactcagtaggatgtggcatctccattgaggctcttcatggaatccctggaggtgaaacctcggtgtccggttgctccaaaccagtgctggtgggattcagttttctggacccatttctgggtgaagtcaaggaatggaggcgggcggctgtcaagcgtctctgttgctcaatggggcaggccagtcccagcggcgacttagaggtggctggctgggcgtccctacaggagaatgggccacagggccagcggggccagcaggatgagcaggcctggtttggggtatgggccgcaggcgtggagctcgatgctgggcaggggcctgctcactgacgagttgccacccgggattggggtaggggtgggcgcggtggtctcgggctctgagcggctctgcaccggcaggagcaggactggcagcagcagcagcagcgccagtgcggatcgggccgccatggccaagcgctccggctcgtcccgtagcagtgccgcggcggcggccgc

SEQ ID NO: 57042 - DNA, 334 bp, Homo sapiens
tgtgtgtgtgtgtgtgtgtgtgtgtgtgtgtgtgtgtgcatctgcaaaccctgcacttcattatccaaaaattatttgatattttataatcagagaaaatgctatttttaaaccctaccactgctgaccaaacaacaatcacaacagcataacactaaatactgttcaacaaatctattttagtgtagtaattaaataattcctaaaattatagacatccctaatattctttcctttagtgttcctcagagtgcaatctgtggagcaactaccttgaagaaatttggggaatgagacctggaaacctaaatgtttagtatgtgctctaggtgac

SEQ ID NO: 57043 - DNA, 738 bp, Homo sapiens
ctcagagtacagacaaaaaggaaggcttgatcagcatgtggtggatctgaagattcaaagaattgccgcggctcaaaagtagacattttggtaaatgtgaagagtgagattcaatgaagatgataagaaatgaaaggtgttaccaaaagtgagtatgtgcagctatgcttgtcacacaaagtaggctttaagtcaaaaaagcacaaaaatagaaaataaaggtcattataaaatgataaagggatcaattcagcaagaaggtaggacagttgtcaatgtaaacacacctgacacaggagccccagttattaaagtaagagttattcgagcaacagacagagacagacaataatagctggggactccaaaacccactttcagcaacagacacaccctctaggcagaaaagtaacaaagaccagactgactccaagagaagtcaaagggacctcacaggtaattacagaacatttcacccaccaactgcagaactgcattcttctcatcagctcacaaaacgttctccaggatagaccacattttaggccacaaaacaaatctcaaaaaagcatttaaaaaatgaaaatcatagcaagtatcttctcagaccaaaatggcataaaattaaaagccaataacaagaggaacgttggaaactctctaggtacatggtatataaataatggtaatggtcagtgaaaaaattaaaaaggaaagtaacaaaaacatttcttgaaa

SEQ ID NO: 57044 - DNA, 437 bp, Homo sapiens
ttgtcatagagtaggagatgattgaatggcatttggaagaggaattcattatccatagtgacaagtggggagaggcattcctagcagaggaagaaaggtgagcaaagggagagagttgtataaacatcatggagaattagaggattgtagggagagagggactggagagacatgtgaggtcttggattttctcaggagttggattttatattctaggatttggattatatttttaaagatatggggtctcactgtatcacacaggctggagtgcagcggcacaatagttgctcactatagcctcgacctcttgggctcaagggatccttgcacctcagcctcctgagtagctgggactccaggcatatgcccacctctggatttggattttattttgtaagcactagagagttatagaagactttaagaattgaagt

SEQ ID NO: 57045 - DNA, 286 bp, Homo sapiens
agacttcatgtgcaaatgtcaacctctctcccaaacgaagctttagaaatttggggcgcatggtttttactaaagccccttctaagtgctgctcatcagaagatttacaacaatcctaaagacaatcagctaacacaagttacaccactgtaaggaaaacagccacgcaaatagagcaaggtgctgggtgatttcgttagaaacaatgttttcaatggacggggtctcagtaaaataccaaacgcagccccctacccttggcccttcaagtaaacagtttccccta

SEQ ID NO: 57046 - DNA, 464 bp, Homo sapiens
ctcccagcaagcacggcatggtgggaaaacgtaaaaatgcccccagcatgcaaggcatggtgggaaaacataattataatgtcccagcaagcacagtatggcaggaaagcctgaagaacgccccagcatgcccggcatggtgagaacacggaaagaacctcccagcatgcaagacatgatgggaaaacgtgaagaacgccccagcacgcatggcatggtgggaaaacgggaagaatgtcccagcaagcccagcgcacagtatagtgggaaaagtataaaaagcatccaagtacacaacgtggggcatgaagggaaacctgtcttcttacaaagatgctattcagaagcataggggcacgcttccctcaagagacttttcaggagctcttttgtggactgcaccaaatcttctacatggacgattgtgtcatccgcaaataaagacttttaattcttccttacca

SEQ ID NO: 57047 - DNA, 327 bp, Homo sapiens
ttgtatttttagtagagacagggtttcaccatgttggccaggctggtctcgaactcctgacctcgtgatccacccacctcggccacccaaagtgctgggattacaggcgtgagtggtttttatttcttaggccggtttcctccatatgatcttgcagtagacattaatttctttcctttttaattaaaatactgtttgtatttcacattttgatgtttgttaagatttgttttatattgttttttgttttgtcttgtgtgatagtcttaaatccctagttagataataactggagagtaccatgtttctatatatctctcagtgact

SEQ ID NO: 57048 - DNA, 1245 bp, Homo sapiens
acgactgcctcactaaaggaagctaaaagctgtgctgatgcctcccagacgagcctcgttggaagcacagaaccttcacggctcggagccgctgacaccgtgacaaagggagccctgctcaggagaaagagcaaatgagaggcagttgcactttttcaggtgtcaggctggaggaagccacttgaagatgaatctacctctgccttaggattgcctgatggcctgtgccattccatgttatatctactgatttgctccctgtattcaaagattttttttttttttacttaattctctcttactgaccctgagagtgaccatatttttaaccaatttggtcttcagcctcaaaacttagctctttccttttgtggtccccgaatcctatcacgtgtcatggtggctgtgaagatgtttgccaagcctgctgagaaggctcatctgtggcatccaaaagcagagatttcaactctggacccctgtgacctgcctttgtaattatggatacccagcactgttttgaaatatcagtggacatccagtttttaaaagccctcagagctttgggagacacccctttatctctctggcatgtcagagaaccgattcaacccttctcatctcctcctccttccctctcttgggccatcaggatgcggcagaacttcactgtgcatgtttttacagctcttctccagtaatgctgccatttccactgcagaccacaggataaaaggaccgcttcaccgtggcccaggatacccttttaagtaggagagggagaagaaagtactgctttgatctaaaattaagcaaacgtttcttcaataaacccaccatgagacttgaccactaatggtgaccagcagtggctttgtcatggccctgcccactgggggcaggcacatgccggggccagggcaggctgccagctggtgagcacgaataggtggctggtggagcgcatgcagtgggaagggcagatggctccattttgatttgttagcaggccacttcctcggaaggggctttcccttcagtcgggtctgcaccgccagcctcagctgtcttggagcagatgtgtatagttagagatggggaccttttcactgtaaatactgctcacatgttcctaggctgactttactatgtgcagagcctcttctcaaatatccaaatcccctctgttgggtactacagaacagatgttaccctgcctcctattacattaatttacgaacttta

SEQ ID NO: 57049 - DNA, 1336 bp, Homo sapiens
acgactgcctcactaaaggaagctaaaagctgtgctgatgcctcccagacgagcctcgttggaagcacagaaccttcacggctcggagccgctgacaccgtgacaaagggagccctgctcaggagaaagagcaaatgagaggcagttgcactttttcaggtgtcaggctggaggaagccacttgaagatgaatctacctctgccttaggattgcctgatggcctgtgccattccatgttatatctactgatttgctccctgtattcaaagattttttttttttttacttaattctctcttactgaccctgagagtgaccatatttttaaccaatttggtcttcagcctcaaaacttagctctttccttttgtggtccccgaatcctatcacgtgtcatggtggctgtgaagatgtttgccaagcctgctgagaaggctcatctgtggcatccaaaagcagagatttcaactctggacccctgtgacctgcctttgtaattatggatacccagcactgttttgaaatatcagtggacatccagtttttaaaagccctcagagctttgggagacacccctttatctctctggcatgtcagagaaccgattcaacccttctcatctcctcctccttccctctcttgggccatcaggatgcggcagaacttcactgtgcatgtttttacagctcttctccagtaatgctgccatttccactgcagaccacaggataaaaggaccgcttcaccgtggcccaggatacccttttaagtaggaggtaactattcagtttcgtagtggcccatacataaacttgattatgttcttcgttgctccaatatactatttgtgtgttttgttttttccagagggagaagaaagtactgctttgatctaaaattaagcaaacgtttcttcaataaacccaccatgagacttgaccactaatggtgaccagcagtggctttgtcatggccctgcccactgggggcaggcacatgccggggccagggcaggctgccagctggtgagcacgaataggtggctggtggagcgcatgcagtgggaagggcagatggctccattttgatttgttagcaggccacttcctcggaaggggctttcccttcagtcgggtctgcaccgccagcctcagctgtcttggagcagatgtgtatagttagagatggggaccttttcactgtaaatactgctcacatgttcctaggctgactttactatgtgcagagcctcttctcaaatatccaaatcccctctgttgggtactacagaacagatgttaccctgcctcctattacattaatttacgaacttta

SEQ ID NO: 57050 - DNA, 1458 bp, Homo sapiens
acgactgcctcactaaaggaagctaaaagctgtgctgatgcctcccagacgagcctcgttggaagcacagaaccttcacggctcggagccgctgacaccgtgacaaagggagccctgctcaggagaaagagcaaatgagaggcagttgcactttttcaggtgtcaggctggaggaagccacttgaagatgaatctacctctgccttaggattgcctgatggcctgtgccattccatgttatatctactgatttgctccctgtattcaaagattttttttttttttacttaattctctcttactgaccctgagagtgaccatatttttaaccaatttggtcttcagcctcaaaacttagctctttccttttgtggtccccgaatcctatcacgtgtcatggtggctgtgaagatgtttgccaagcctgctgagaaggctcatctgtggcatccaaaagcagagatttcaactctggacccctgtgacctgcctttgtaattatggatacccagcactgttttgaaatatcagtggacatccagtttttaaaagccctcagagctttgggagacacccctttatctctctggcatgtcagagaaccgattcaacccttctcatctcctcctccttccctctcttgggccatcaggatgcggcagaacttcactgtgcatgtttttacagctcttctccagtaatgctgccatttccactgcagaccacaggataaaaggaccgcttcaccgtggcccaggatacccttttaagtaggagagggagaagaaagtactgctttgatctaaaattaagcaaacgtttcttcaataaacccaccatgagacttgaccactaatggtgaccagcagtggctttgtcatggccctgcccactgggggcaggcacatgccggggccagggcaggctgccagctggaataaaaacctgaccattagaccgagcgtggtggctcacgcctgtaatcccaacactttgggaggccgaggcaggcggatcacctgaggtcaggagtttgagaccagcctggccaccatgagccagatcaaggaaagagacaggaaagcagatgattttacctgccttccctaagtgcactcgggaagagaaggatcatctcaaaaagggttaaggaatgagatcatggaaatcacttacacacgcggtcgcggcttggacttggctagtgaggccggcctgcccactctgcttccattcactcagacacagcttgggcttttcctccaagtgctggtagcagtcatttatgagggaggaaaggagcagaataaacacacttctcagcaaaaaaaaaaaaacacacaccaaccaaaacccacaacaaaacaaacccggggctctacggggggcaaaaagactgaagccagacgcaagtccgccccctcttccgggaaccccccaaggggacaacacgcgcgc

SEQ ID NO: 57051 - DNA, 953 bp, Homo sapiens
ctctctccacactggcctctagtgtgtttactgtgtcttctcagtttctaagtgctcttccaaaatgtgaattcttttgtggtccccgaatcctatcacgtgtcatggtggctgtgaagatgtttgccaagcctgctgagaaggctcatctgtggcatccaaaagcagagatttcaactctggacccctgtgacctgcctttgtaattatggatacccagcactgttttgaaatatcagtggacatccagtttttaaaagccctcagagctttgggagacacccctttatctctctggcatgtcagagaaccgattcaacccttctcatctcctcctccttccctctcttgggccatcaggatgcggcagaacttcactgtgcatgtttttacagctcttctccagtaatgctgccatttccactgcagaccacaggataaaaggaccgcttcaccgtggcccaggatacccttttaagtaggagagggagaagaaagtactgctttgatctaaaattaagcaaacgtttcttcaataaacccaccatgagacttgaccactaatggtgaccagcagtggctttgtcatggccctgcccactgggggcaggcacatgccggggccagggcaggctgccagctggtgagcacgaataggtggctggtggagcgcatgcagtgggaagggcagatggctccattttgatttgttagcaggccacttcctcggaaggggctttcccttcagtcgggtctgcaccgccagcctcagctgtcttggagcagatgtgtatagttagagatggggaccttttcactgtaaatactgctcacatgttcctaggctgactttactatgtgcagagcctcttctcaaatatccaaatcccctctgttgggtactacagaacagatgttaccctgcctcctattacattaatttacgaacttta

SEQ ID NO: 57052 - DNA, 373 bp, Homo sapiens
acaaaattagtccaaaatagttctcctatttctttttattcccactggatagtactttcttgcttgctctaattgctgttctgttctaaaaaaatgtctgaacttgacttgtgttaattttctttagttcccttaactgtctgggcactgaaacgggtatagctattctcaatgcattctcacttgtcacaaatttgttattttgtatggtttagaaaatcagtgcttatttgaagcagaactaggacttaggagttcttcatttgcatatttgtagttgtcacattgtgataacttgaatgactaagtgtcactaaagtctaccagtatcctataagattgcctcattttctgtgtcagtcttgatagagac

SEQ ID NO: 57053 - DNA, 1896 bp, Homo sapiens
  misc_feature (1)..(1): n is a, c, g, or t
  misc_feature (1776)..(1776): n is a, c, g, or t
  misc_feature (1875)..(1876): n is a, c, g, or t
  misc_feature (1881)..(1881): n is a, c, g, or t
  misc_feature (1883)..(1883): n is a, c, g, or t
ngagtgatactctgcctcaaaaaaacaaaagtattttcaggacaaaggcatgtgagtgtgcagtctctgtaacctggcaggagccagtccatggtcagtggtcctcttatgaggagaaagttactggaatcagtctcttgtccagtcaaagctgtagttacggctggtggaacagggttcccgttcatgtctgtgaactgggtgagctgtgatcattttaacattgcttatctttaggtcagtgcttgtttagttgttgaataaaaagaaaaaccttgtggcagttagaacacagtttgttatttaagtttaggggagtgtgacttaacccttgactggcatggcctttggtcctgtttataatctgggatcttattgccaacaagattctgttctgtaagtcttatgatctctattttaacattgatcttggtcagtttttgtgtctactcaactggttacatttgagttaccacaaaagagggagggtataatgaggtgtgtctgacctcccatcctgtcctggccaggaactcagttttaaggttcttctgggatccccttggacacaaggggtccattcagtcagtgagggggcttaggactttatttttagtttacagatcccaatccagacctacagaataagaatcttcattccaggtgatttgtatgcacagtaaagtttaaaaagcattggtttaggagaatccaagattcctttgggaaagttctcagatgtcaaaataggggctctgcatattatgaatttcacaattaacttctcagcatactatactggttatttggtattcatgttaagttagatggttctcatcatgctaaacagtgcttcagattgcagttactctaagcataagaccctatgtcctagggtttggaaccaactccttcattgctttggtgaattagacccttttaattgtgattgcagtagattagaaaggagtccatctcccaaagagtattcaagttttagaatggaagctgcttttcagtcatcactggaattttcctacgagaatcacttacataatctacacaaccaaatgcagaaagaaaacacagggtgagttaaggaacaaagttaacatttcatctgcttggcctctgagcttgtacctgccagtcccaatgttactcggatcaaaaatgtaggatgttaaggaaaatggtgtttgtatgttttgttagtaagaattaatatggaaataatttgcaaagactggattccagtgaacttcttcaaaatcacaaaagctcagctttaggcaagatacacacatgttcagataactggatatagaagaaagagttcatcatctcaataaaaataatccatacttgtggctccaattaagaaacacaaaactttagtgtacattttggtttcactttgtttctttgttttttaccacttgcatgaacaagtaaatgatgcagaaaaacaagaagggtgattcttgcagccctaatgaacagacaccatcagaacaccaaagagaggcgacttaattttgtgagacagagccattttcctcctttctgtgaagtatctctgataatgtacagttttatgaggaaattatatggtctgggccaggtgtggtggctcacgcctgtaatcctagcacttggggaggctaaggtgggtggatcacttgaggtcagtagttcaaaaccagcctggccaacatggtgaaaccccgtctctacaaaaaatacaaaaaattagcgtggtggcacatgcctgtnatcccagctactctggagactgaggcaggagaatcgcttgaacccgggaggcagaggttgcagtgagccgagattgtgccactgcactccagcctgggnnacagngngagactctgtctc

SEQ ID NO: 57054 - DNA, 2492 bp, Homo sapiens
  misc_feature (1)..(1): n is a, c, g, or t
ngagtgatactctgcctcaaaaaaacaaaagtattttcaggacaaaggcatgtgagtgtgcagtctctgtaacctggcaggagccagtccatggtcagtggtcctcttatgaggagaaagttactggaatcagtctcttgtccagtcaaagctgtagttacggctggtggaacagggttcccgttcatgtctgtgaactgggtgagctgtgatcattttaacattgcttatctttaggtcagtgcttgtttagttgttgaataaaaagaaaaaccttgtggcagttagaacacagtttgttatttaagtttaggggagtgtgacttaacccttgactggcatggcctttggtcctgtttataatctgggatcttattgccaacaagattctgttctgtaagtcttatgatctctattttaacattgatcttggtcagtttttgtgtctactcaactggttacatttgagttaccacaaaagagggagggtataatgaggtgtgtctgacctcccatcctgtcctggccaggaactcagttttaaggttcttctgggatccccttggacacaaggggtccattcagtcagtgagggggcttaggactttatttttagtttacagatcccaatccagacctacagaataagaatcttcattccaggtgatttgtatgcacagtaaagtttaaaaagcattggtttaggagaatccaagattcctttgggaaagttctcagatgtcaaaataggggctctgcatattatgaatttcacaattaacttctcagcatactatactggttatttggtattcatgttaagttagatggttctcatcatgctaaacagtgcttcagattgcagttactctaagcataagaccctatgtcctagggtttggaaccaactccttcattgctttggtgaattagacccttttaattgtgattgcagtagattagaaaggagtccatctcccaaagagtattcaagttttagaatggaagctgcttttcagtcatcactggaattttcctacgagaatcacttacataatctacacaaccaaatgcagaaagaaaacacagggtgagttaaggaacaaagttaacatttcatctgcttggcctctgagcttgtacctgccagtcccaatgttactcggatcaaaaatgtaggatgttaaggaaaatggtgtttgtatgttttgttagtaagaattaatatggaaataatttgcaaagactggattccagtgaacttcttcaaaatcacaaaagctcagctttaggcaagatacacacatgttcagataactggatatagaagaaagagttcatcatctcaataaaaataatccatacttgtggctccaattaagaaacacaaaactttagtgtacattttggtttcactttgtttctttgttttttaccacttgcatgaacaagtaaatgatgcagaaaaacaagaagggtgattcttgcagccctaatgaacagacaccatcagaacaccaaagagaggcgacttaattttgtgagacagagccattttcctcctttctgtgaagtatctctgataatgtacagttttatgaggaaattatatggtctgggccaggtgtggtggctcacgcctgtaatcctagcacttggggaggctaaggtgggtggatcacttgaggtcagtagttcaaaaccagcctggccaacatggtgaaaccccgtctctacaaaaaatacaaaaaaaaaaaaaaaagaaaaaaaaaaggaaaaaaaatttttttgggtctggtggccccctttttaaggggactttcccccgggaaaaattcccgggttttttccaaaggttcctttgggggcccccatctaattttaagggacccttttgtaacaaatttgtgttgtctcaggtcgagaccagggtgggaaaaatttccggcacaaattatattcccaaggggcttgggaagaagccgggggtgggctcttacccctcttatattttccgtggtgtggcggcccccgggcggtttttcactcaaccatatctcttgggggggtcaccaggggtttaaaaaattaggagaaattcaaaagtttgccatataaagaaaatccccggggggggcggcggggcacatattccccaacaccaaagagctctgggcgacgggcacatagggtggacgaaatattaaaaaaggttttaaagggtttgtggaaaactcataaaggcatggggggccatgaggaggggagactactggaacaaaagggaatagaggaactgaaaggggctaagcggggatatgagatggattaaagggttacgctaaccataacgcgttgagtgatagaaacacacggcattggcggtagtgagaactaggtagtagataaataagatgggacgagcgtaaatgagctaacaagcaaatggtagggagatatacgagactgttcatgtgtcgagctcgtgtctt

SEQ ID NO: 57055 - DNA, 164 bp, Homo sapiens
  misc_feature (5)..(5): n is a, c, g, or t
  misc_feature (123)..(123): n is a, c, g, or t
  misc_feature (161)..(161): n is a, c, g, or t
  misc_feature (163)..(164): n is a, c, g, or t
cagtncttaaacctcaaggtactaagaacagtaaagagttaatgtttaaaatggtacctggcaaatggcaaatgctaaatgatagaacgaatgtgtaaggtggactggaaccaggaggaaccncaaatagagatctatcagttgcttactgcaccagcccnann

SEQ ID NO: 57056 - DNA, 246 bp, Homo sapiens
cagtttttatttagaagataagtagaaagttctaactagttggaacttgatcatctttttaaaaataacgtgtaggctgggcacggtggctcgcatctgtaattccaacactttgggaggctgaggtgggcggatcacccaaggtcaggagttcgagaccagcctggccaacatggcgaaactgtgtctctactaaaaatacaacaataagcctggcatggtggcgggcacctgtaatcccagcta

SEQ ID NO: 57057 - DNA, 340 bp, Homo sapiens
aatatataagtacatgtctcatccattagaacaaagatgttatgtcatatagcttttgagaaatctcactgtacagtcatgggagaatatgaataaaatagacaaataatgtcttagtattataaaatgaatcttacacacctgaaatggtcttccccctcacccccaccccagggtctctggaccatactaaagaacccactcatataagaggatattttctgaccacagtggaattaaattagaaatggtttaaataaaaactagacctagcactttgggaggccaaggcgggcggatggcttgagctcaggagtttgagaacagccaggggcaacat

SEQ ID NO: 57058 - DNA, 343 bp, Homo sapiens
tttagtgaaggctgaatgaggactttggaatccagacttcccccaccgcgggtctgagaagcaggtttttgtaagattgtgcttgctgtattcctcactttcctggtaagagacactggttatgcctctggacccctttcttccgccctggggtcttgagatacccagaaaaagagtgagtttatcagcatattacttaagctgggaaatactgctgtaggttcctttgctgcatccatttggctgtaactttcagctatacaacccaatctatcatcagtgtcagggaaaatatgggggatgatgcattacagcatgtgaccccggggagggcactgagagc

SEQ ID NO: 57059 - DNA, 283 bp, Homo sapiens
caggtcctcgccagacaggatttaccagtgctttgatcttggacttccagtctccagaaatgtgagaaatgtttgttgtttaagccacccagtctgtagtatttttcctatagcagcccaagcagactaagacatcgtaaatgggacacccttttctaaacctgacacttattagtagagtataatcaaagtctgagagagtattagttcagagcagcaaaaagcacagatgtaccattatctttgaggttcacattcctacacccagcaatcccattaagga

SEQ ID NO: 57060 - DNA, 170 bp, Homo sapiens
caggtcctcgccagacaggatttaccagtgctttgatcttggacttccagtctccagaaatcatagaccctgacattcagctccaataatggatgtcccagtatgccctgaatccaaacaaatgcctgactgcaataataaacaaattatgtaatctgaaataaataggt

SEQ ID NO: 57061 - DNA, 417 bp, Homo sapiens
aatttcatgtttctaccccacagcttggcagagtaagtttggcaaaaaccaggattccatccagacaattgattccaaagcctgagtccataaccaccatgccagccctcctcccaggctacccacattatagccccatgaagtggcttgaccctattattctccctcttctacagatgaggccttccacattcagggaggggaatcaacttgccaaggacacacagccaggctggggaaaggtcgtgatgtgctcccaggtctctgtgggctggagctttttttcctagcccggtggaacagcagcatccaggacacatttgccctcagccccgccctcggagattcttccagatcccttcgggaatggtctgcttcccatctccggatgggtgacgccaactccacccggacact

SEQ ID NO: 57062 - DNA, 350 bp, Homo sapiens
tcttgccagagaaccatagcttttggatatttacaaagcttctgaataaatgcaaaccaatagtgcacatatgaaatgagaaaatgattcacttctttccatataaactattaattaacttgaataatgagaactcagagccgggatttttaccatttttttttccatttgaatgtcgaagacacttttttctcttcttaaaatgctttaaactgtatttataaaaaaaatgtcggccgggcgcgatggctcacgcctgtaatcccagcactttgggaggccgaggcgggcagatcacaagatcaggagatcgagaccatcctggctaccacggtgaaaccccgtatcta

SEQ ID NO: 57063 - DNA, 981 bp, Homo sapiens
tgaagctgtattcatctcatttttttgctgctttctaattttgcgagtaccctggcatgggaataggaaaaagggggtgggtagtggcaaatttctgaagagaaatatgtcatctctccttttttgcccccgctaacaaaagtcgaattgggagcttttgtgtgttttctttttgttttttggttggttttgtttaaccctttaccttgtgtccccaaacttgggacagtatactttcttttgccccttactacaggtgaaccttcctaaaagattttttctttttattctccgtaaaacatttaaagcattctttaatgaaatagttttttaagcaggttgtgtaatgttttccatgtaacagattggtttatatatagtttggctgcttcttgctaataatgaagggttttctctcctgatattgtctgagaatctatcatagatgaggttagattgcctttggaaagatgcttctagttaattcctgtcctatataattagttgaattcatctgtgaaggatgtgaatttttctttgatctttttatttcatgagcagctttgtgagtacattctcaggtctaaagtcctcaccctcttctcctattcccccagggcccccagtgaaacacacacatacattaaacagtgcagtttgttatttcaggcctttttctttgcatttatgaaagtaggtcggcatgctgcctcacacctgtaattccagcactttgggaggccaaggtgcgtggattacttgagcccaggagctcgagaccagcctggccaacatgatgaaaccacgtctctgctaaaaatacaaaaattagccaggcgtggtggcacgtgcctttaatcccggctacccgggaggctgaggcatgggaatcacttgaacccaggaggtggaggttgcagtgagctgagattacaccactgcactccagcctgggtaacagagtgactgtttcatttaaaa

SEQ ID NO: 57064 - DNA, 302 bp, Homo sapiens
  misc_feature (99)..(99): n is a, c, g, or t
  misc_feature (120)..(120): n is a, c, g, or t
  misc_feature (122)..(123): n is a, c, g, or t
  misc_feature (128)..(128): n is a, c, g, or t
  misc_feature (225)..(225): n is a, c, g, or t
  misc_feature (234)..(234): n is a, c, g, or t
  misc_feature (242)..(242): n is a, c, g, or t
gatcaaatcggagctgtgctggtcactggtttgagttgaaagttggggctcaaggctcaaggactttccttccacccttgtcccccgagacctctgggnatccccaaatcactcccagantnntaggnctctgcaaagtctgcttggaaaaccactattctagaacaatgtaaacctctggcctcatcgtgtctggtattaaaccatgccattccaaggcactgnatggaaacncactttgncagacaccccagaaggcccctgactcaggccactctgggggctggaagacaggcatgatc

SEQ ID NO: 57065 - DNA, 430 bp, Homo sapiens
aagcaaggtcttacatacacttaggttctgccatttacatgcacaagtgagatttgaatagtggaagcaaggcagaggctgccttcctgtcccatttgctgttgttgctggtaagcaagattgaggacagagggcatgtactgtggtagtgtctgtccctagcttcctggcatcaagaggtggtggaggcagcagaggatgtggatccttgggtagcaggcatggcggcgtgtctttgaactcagcagttccagtagtggctttctggaggcccatcctagaatcccgtcctcccaccctttcaatcactttgtattacttcattttctgtattgcatttctgtgtgcttataataaccaactttctgtattctgcatagaacactgcctctacgaggtcataaacaatgaagaaattcctgtcttgctt

SEQ ID NO: 57066 - DNA, 380 bp, Homo sapiens
ctgggacagagacctttgcattgctccatgtgttggcttcagctgggacagagacctttgcattgctccatgtgttggggcaggtcttccatttcaatctcctctgccctaatttattagccatacttgtgctatttattacttttaaaccctaatccttttttccgtaatttgtttacattttgcagagtgccagcattttacaatgtgtcttttatgtctcacagaggtcatcattaagttagacctttggcttcatgtgtctcccgagagatggtttataaaatttgcatccttctggcacaggtggtgtggcttagggattagaacacagcctgcctgagttcacacctcatctctcccacttaacactgataatt

SEQ ID NO: 57067 - DNA, 1012 bp, Homo sapiens
cggccaaacttcggaacgctgcatttgggaccaaatactgacggtaagaccgcgtcacaaggggagtaatcaccccttcccaagcgagcttccttaccgggacccgtgttccaacggtggcaagggacgcaatgcgcggcccagcagatggacaagaaaaggaccgggctgtctcatggaccttctctgaggagaatgtgatccgagaatttaacttaaatgagctataccagcgggcaagaaactatcaaaggctggagacaatatccctgaggagcagcctgtggcttcaacccccaccacagtgtcagatggggaaaacaagaaggataaataagatcctcactttggcagtgcttcctctcctgtcaattccaggctctttccataaccacaagcctgaggctgcagccttttatttatgttttccctttggctgtgactgggtggggcagcatgcagcttctgattttaaagaggcatctagggaattgtcaggcaccctacaggaaggcctgccatgctgtggccaactgtttcactggagcaagaaagagatctcataggacggagggggaaatggtttccctccaagcttgggtcagtgtgttaactgcttatcagctattcagacatctccatggtttctccatgaaactctgtggtttcatcattccttcttagttgacctgcacagcttggttagacctagatttaaccctaaggtaagatgctggggtatagaacgctaagaattttcccccaaggactcttgcttccttaagcccttctggcttcgtttatggtcttcattaaaagtataagcctaactttgtcgctagtcctaaggagaaacctttaaccacaaagtttttatcattgaagacaatattgaacaaccccctattttgtggggattgagaaggggtgaatagaggcttgagactttcctttgtgtggtaggacttggaggagaaatcccctggactttcactaaccctctgacatactc

SEQ ID NO: 57068 - DNA, 2786 bp, Homo sapiens
actgcaggctggggctccgctccccggcgggagcccgcgcgtggttcccagcgaagtccccgcgcggctgggcccagcgtgagtattctccgcccgctgtcctccccctggaggcggcagcgcccgtttatttgaggcttctaatgtgaggaaaaacacggaatgacaagtgtgggaaagagcaagcactaaattactgtcagaaaaataaacggagtagcacagtgctgctcggtgatttacgggggcaattagtcaccaccccacggcgctgctgaggacagcacggcagcagacaagtcaggcccatgaggaagaagaggctttgcactgctctccagacaacttttcaaacaacaagagaggatatttgagcacattaggttttgtgtcttcattctgggtacctactcttcatattattctaccaacttaatacataaacatatttttagcacaatatgaacctgttctatgtgtgtttaaaagcctccagcagcaacttttttctctcccactgtccaaagttgggttttccccatcccttaaaaaacaaaacaaaaaaacctttcttcactccaaattgtccccctggtgtgtggttttggtctttctcattacttcttgcatcttgctacatgttctgcatttgctcagagccactgggtgctaaggaatttggtctgctgctcctctgggaaagtttggtaagctggtacaaggaggtgatgaacaaggctaaatgaaaatcatacataaacttcccaatatttgtgaacatgttctttaacataccatacatagtttctatgtatatgtaacatagcaaaacaaacttgctaaggtataattaattggtatgcatgccttcataaatattcaccatcagaagaaacctagaatgaaaggttgtgaaagaacccaggaatgagaaagactttattgactaaaggccatgtctatgtaggggcaacaatgaagctgtgggtgagcaaatgaagcttcatcaggagtttagtatccttatgtagcattacctaagaatgctaccatagtaaatttctgaagtactttacctgttacaaagaacgtttgtaatctccttttcttatttgatcttgccctggctttagtcaggaacacctgctcagttagaaatgtattcggtgggtatgtacgcagttggagaatgtgccccaacacacgccgcctttggcctgtatgttggagtcctagagaggcagacaatgttgatgagcttggtaccagcatggtgcgccattcatccggacacaatttctgataaagagggtcacaactgggagaaacctcagattctacttgcttctcttctccacgttattagactttttttcccctcttgaattttataagcacactccttttaaaacaattaattaataacgagcactgggatttgatgtagaattgcgtatttgtaactgcaatggcactggttttcaactaccctgtaacaaggaagcaattctaaccagcaaaagaggcagacgtgtttctgtgcaacatcacaggcgtgtgaaattgttcagatattgagatatcaggagtgatataaattggaaatttaaccaaaaatattttccatcagtgaacaaagccgattttaaagtgcctcttgcatttttcagatctttctctttctttttcccaaagtcacattgtagtttctgataaaggaacacactgggaaaactaagcacatatttaatcaatgaaatttaaggtgtaaaaattctgcatttctgacaaatttaatgttcacttttttcttgatttaaatagagcattctaaaaatattacccctataggggataaatttttatatgcatgttatttttctttacaaagtgtgggctagtaaagagtgaaaaagaccttggctattgtacttatttcttgaaagaaataatagcatcttaatgactggattcaaatctctgcttatcacacaacttccgtacagttcaaagagaggacttggattgaatgaaaacagagagctggggcttcctacattcccctgtgtttgtgttcatacagaatatttatgcaatattctgacttggccataatctgtaattcctgcctattattctcagttgcaactataaattctagattaatggttataattttggtaaggcatacatgaaaagttatatgttcctgcttgaaaggaggatcattaaatattcattattaccactcaaattagttgtcatgctctgtgtaatagttacccgttatcatttcactagtttggattcagcagtaagtgaacagcaatatatagctcatagcgccagaggactttttttgtcggggaacagggagagaaatgattttaaaacccatttgacatatttatgttgacaaattatttaaaggaattactgtgttgtaataaacatgtttgtatgttggaataggattgtggctaaatttgcttctagctgtttaattactcttattatgattgtgaaaaacagtgcttcttcaagtagttccaaggaaaaaaatagaaaatggaaaagttgagctatttcagtcttttgcaggtatctaaccttgccatgaaaaagcacttttcatttttgtaagtagatattgaaatcttgctttttcagcgaagctagattgtataatttattagttttctccacctggtaacacatccttaagaaaaaaattgccaaaggtaaagcatgagatggattttaaaataaatgttgtggatgaacac

SEQ ID NO: 57069 - DNA, 931 bp, Homo sapiens
actgcaggctggggctccgctccccggcgggagcccgcgcgtggttcccagcgaagtccccgcgcggctgggcccagcgtgagtattctccgcccgctgtcctccccctggaggcggcagcgcccgtttatttgaggcttctaatgtgaggaaaaacacggaatgacaagtgtgggaaagagcaagcactaaattactgtcagaaaaataaacggagtagcacagtgctgctcggtgatttacgggggcaattagtcaccaccccacggcgctgctgaggacagcacggcagcagacaagtcaggcccatgaggaagaagaggctttgcactgctctccagacaacttttcaaacaacaagagaggatatttgagcacattaggttttgtgtcttcattctgggtacctactcttcatattattctaccaacttaatacataaacatatttttagcacaaaaaaaaaaaaaaaaaaaaaaaaaaaaaagtgggggggggccggggccccaggagaaagacttttacaagaacccattcgcggtgggggcgcgcgggggcccaaggaggagacagagggaacaacgtgggccaaaagcggtggtccaagaggagaaaccgcgggaccgaggacaagagggcgcggggagatcttctccaccaaatattaaaaaaccgccgggggggaaccgaggacgcgttctgtgagaaaaattctccgaagagggaggggccagaggggggccaatcagggggggcctcatctcaacaccaaggggagggtcccacagggagagagacgccagagaatatcaacaaaaattaaacgccccggggcctgtgtgggagggaagacgttatacaacacgcacaaatatacaacacaggacacacacacgagcagaagatcgacaacacaacaaacacagaagc

SEQ ID NO: 57070 - DNA, 2665 bp, Homo sapiens
gaaggctgctaatcatgcacatgtgcatacgcccaaagcatggcccccgctgactctgcacttctatctgaaactgccatattcctctgcctttgtgtgacaatatcaaaggctcatgctagaatgcaaaggtgttatgacgacagtggcagtgactagatcctatagtcatttttatatttacagttgtcttcatgtaataacaactactgctctccagacaacttttcaaacaacaagagaggatatttgagcacattaggttttgtgtcttcattctgggtacctactcttcatattattctaccaacttaatacataaacatatttttagcacaatatgaacctgttctatgtgtgtttaaaagcctccagcagcaacttttttctctcccactgtccaaagttgggttttccccatcccttaaaaaacaaaacaaaaaaacctttcttcactccaaattgtccccctggtgtgtggttttggtctttctcattacttcttgcatcttgctacatgttctgcatttgctcagagccactgggtgctaaggaatttggtctgctgctcctctgggaaagtttggtaagctggtacaaggaggtgatgaacaaggctaaatgaaaatcatacataaacttcccaatatttgtgaacatgttctttaacataccatacatagtttctatgtatatgtaacatagcaaaacaaacttgctaaggtataattaattggtatgcatgccttcataaatattcaccatcagaagaaacctagaatgaaaggttgtgaaagaacccaggaatgagaaagactttattgactaaaggccatgtctatgtaggggcaacaatgaagctgtgggtgagcaaatgaagcttcatcaggagtttagtatccttatgtagcattacctaagaatgctaccatagtaaatttctgaagtactttacctgttacaaagaacgtttgtaatctccttttcttatttgatcttgccctggctttagtcaggaacacctgctcagttagaaatgtattcggtgggtatgtacgcagttggagaatgtgccccaacacacgccgcctttggcctgtatgttggagtcctagagaggcagacaatgttgatgagcttggtaccagcatggtgcgccattcatccggacacaatttctgataaagagggtcacaactgggagaaacctcagattctacttgcttctcttctccacgttattagactttttttcccctcttgaattttataagcacactccttttaaaacaattaattaataacgagcactgggatttgatgtagaattgcgtatttgtaactgcaatggcactggttttcaactaccctgtaacaaggaagcaattctaaccagcaaaagaggcagacgtgtttctgtgcaacatcacaggcgtgtgaaattgttcagatattgagatatcaggagtgatataaattggaaatttaaccaaaaatattttccatcagtgaacaaagccgattttaaagtgcctcttgcatttttcagatctttctctttctttttcccaaagtcacattgtagtttctgataaaggaacacactgggaaaactaagcacatatttaatcaatgaaatttaaggtgtaaaaattctgcatttctgacaaatttaatgttcacttttttcttgatttaaatagagcattctaaaaatattacccctataggggataaatttttatatgcatgttatttttctttacaaagtgtgggctagtaaagagtgaaaaagaccttggctattgtacttatttcttgaaagaaataatagcatcttaatgactggattcaaatctctgcttatcacacaacttccgtacagttcaaagagaggacttggattgaatgaaaacagagagctggggcttcctacattcccctgtgtttgtgttcatacagaatatttatgcaatattctgacttggccataatctgtaattcctgcctattattctcagttgcaactataaattctagattaatggttataattttggtaaggcatacatgaaaagttatatgttcctgcttgaaaggaggatcattaaatattcattattaccactcaaattagttgtcatgctctgtgtaatagttacccgttatcatttcactagtttggattcagcagtaagtgaacagcaatatatagctcatagcgccagaggactttttttgtcggggaacagggagagaaatgattttaaaacccatttgacatatttatgttgacaaattatttaaaggaattactgtgttgtaataaacatgtttgtatgttggaataggattgtggctaaatttgcttctagctgtttaattactcttattatgattgtgaaaaacagtgcttcttcaagtagttccaaggaaaaaaatagaaaatggaaaagttgagctatttcagtcttttgcaggtatctaaccttgccatgaaaaagcacttttcatttttgtaagtagatattgaaatcttgctttttcagcgaagctagattgtataatttattagttttctccacctggtaacacatccttaagaaaaaaattgccaaaggtaaagcatgagatggattttaaaataaatgttgtggatgaacac

SEQ ID NO: 57071 - DNA, 926 bp, Homo sapiens
agcgggcagacagtgcccgtgccggggcggggaggcgagttctccctgcggccgcggaccctggatggtggcgtcgcccgaagacgcgcctcaccggcctgggtggggttgccttttgccctcgaggctggcctaagcgctggggggccgctggctaaccctgaggtagatactcgggaaatgggtggaatagggaaagggactcagcccttccgcccttttccccagtcgaggcccgcgtcactgccctgtgggtgcagacgcctccagtgtcactcccctggatttcgcttgggcagaagaagagattgtaggccggaccccaacgccgaagccctgaggcttctaatgtgaggaaaaacacggaatgacaagtgtgggaaagagcaagcactaaattactgtcagaaaaataaacggagtagcacagtgctgctcggtgatttacgggggcaattagtcaccaccccacggcgctgctgaggacagcacggcagcagacaagtcaggcccatgaggaagaagaggctttgcactgctctccagacaacttttcaaacaacaagagaggatatttgagcacattaggttttgtgtcttcattctgggtacctactcttcatattattctaccaacttaatacataaacatatttttagcacaatatgaacctgttctatgtgtgtttaaaagcctccagcagcaacttttttctctcccactgtccaaagttgggttttccccatcccttaaaaaacaaaagaaaaaaacctttcttcacttccaaattgtccccctggtgtgtggttttggtctttctcattacttcttgcatcttgctacatgttctgcatttgctcagagccactgggtgctaaggaatttggtctgctgctcctctgggaaagtttggtaagctggtaca

SEQ ID NO: 57072 - DNA, 222 bp, Homo sapiens
gaatatggagtatccatcccctcaagcatttatcctttgtgttacaaacaatccaattatactctttcagttattttaacatgtacaattaaattattattgactctagtcaccttgttgtgctatcaagtactaggtcttattcattctttctaactattccaggccctttttaatcaagaaggctccctagaccaaaattttaaaaagaccaatgctagg

SEQ ID NO: 57073 - DNA, 501 bp, Homo sapiens
gtgtgtctgtgagggtgtttctgaaaaagattagcatttgaatcagtagacccaatgaagatctgccctcagcaatgtgggtgaatatcatccaatccactgagggcttgaacagagcaaaggcagaggaagggagaatcctctctccctcttcttgagatgggacatcattcttcttccctcagacataatatttcctggttttggggccttgagactcagattgggccttccaccagccccaccctcaccctatccccacctccccacttagttctcaggcctcagaagagagtctcatcattggcccccaccagttctcaggacatcagactgggaccaaattacacccctgctttcctggttctccagcttacagaggcatctcctggaacttcttagcctctgtcatcacacaaaccaattcccataataaattccctcttatctctgtacctataatgatacatatgaagatactggttctgtttctctggagaa

SEQ ID NO: 57074 - DNA, 389 bp, Homo sapiens
gccagttcaggttcaaagggaggggaattagactcctaacgttggtgcaatgagtagcatatgtcacagagtgggaaagtattaataatggttatcttttattatctactgcacctaacttacagctgactttgggtgagaaataaattttatgtgttaagccattgagatgtccagtgttttttgttgcctcaccatcagcctagcctaagctgattaataaaatgggaattgtagacaatatagaaaagactttaaaaaaaattactatggttacccttttatgtaatttctcctgttcttttttttttttttttttttttttgagatggagtctctctctgtcatcaggccagagtgcagtggcacaatcttggctcactgcaacc

SEQ ID NO: 57075 - DNA, 194 bp, Homo sapiens
attttattgtagtaagaataatacatagaaataacattaaataaatattctcacaaaaacatacacacatagtacaggtagaacatataactggttgatgctaaataacagatccagataatttttcatttgaattagcagcagggagtcattgaatgctatgcccttagaatggcttgcaggctttcacgagt

SEQ ID NO: 57076 - DNA, 395 bp, Homo sapiens
aataagtgtaataatatcatagatagaaagctattataataatatgacattagatatcatagataaaaagctattattttctgttcctattgtaatcaggatctgagccttagactacttcaatacatgcttcacaccgagaggctgtggaaattaggcttcatgtccaaagaaaaagaagaattggaagaagaagtctctttcccaccagcatcgtagtagctgggatttgatggaacgtgtgttctatctctattaatttgctccagttacttttcagataaatacatttgtgatttggtgctgagagaaggctagaggaccccagagggcaagggccgacagacaggcagacactttctccagagagcaacactcgggttcacaagaaaggg

SEQ ID NO: 57077 - DNA, 306 bp, Homo sapiens
ctgactaatgcgatgctcagaaatgtgagactagaaagaccagagcaaatcaaaatggatttgggtacaaataaggtcaattagaaactgttgtatatgactcttaggctagtcagtcattttttcatgattgacttgaatttcaaagccctagctttcaaggaccagaatctcttcgaaattcatcttacctgctttattccttactcgacacccgcggggcacttgtcctgatgagaatttgtcattagtgtgcattttattgctcaatctctaggacttctaaaatgagactgaaatgttaga

SEQ ID NO: 57078 - DNA, 420 bp, Homo sapiens
gcaatattgggctcactctgaaccagatgctgctgctctaagtgccttgcaactgttaacccactgaaagtgcatgacaaccagatggtcattgattatcctcatttcatggacaggaattgatatgacacctttaactgggttccaaagagtatgaataccaatctctcagtattcacaactgcatatttcatcaactgcaatcacaactgatatccacgacgattctcatttcatggataaggacactgaaacagactgcttatgtaacttgcccaacatgcacagccagcgtggtatctgttctccaaagacggctcccattgaacccaacttcgtggcactggtgtccctgtataaataaatcctcccacactgaccctgggctgcccgagactcactttagctaacagcatcagt

SEQ ID NO: 57079 - DNA, 614 bp, Homo sapiens
tcacctataatgatggttagcataaaaattaaggtttagggtattggctttgaattcataaattccatctgggtgggtttaaaaagtataagttggttaaactggttggaaagagtggaaaattatagttctctgttaagataaattgttctaactaaattagtataagaagcgtttgagcagtcactggaaacatacaatacatcccagttaactttccggtactttttctcttagtgaagtatacgtttgttttatagcagcaagaattagggatgcttctagccttctcagccttctgttcaggctctggggtcatcttgtagtatgcttgttaggtccctaagaagacactgtgtttgcctctctgtttatgcctcaggtaaacccattcaataaacatatagcaatcacatttaaagattctcatcttacttatccaaaagtttcagaaattgtccttttaaagtacaaacatccataaaaaccgagaagatgggccgggtgtggtggttcacgcctataatcccagcactttgggaggccgagacgagcagatcacctgaggtcaggactttgagaccagcctggccaacatggcaaaaccctgtctc

SEQ ID NO: 57080 - DNA, 366 bp, Homo sapiens
tatatatatatttggacaaagagaataagagaattgcaggtagaaatagtctactgtgtgtagacaaatccagaaagttgatttctgttcctcaaacaatttctgaaatatttatgtcagaataaataaaagaattgttattgttggacaatgaaacatacctggaccctttgagtgtgtgaatagtaaaggctgtgataactgaaatgcagctaagcaaaaagggctaattagaagacttttgagacatgatttacctaaatggaaatagtttggttttcaatccttcactgtaataacaattatttgcatctattaagtgtttgtagtcactttgtataataaagttttatggcttgtgattat

SEQ ID NO: 57081 - DNA, 209 bp, Homo sapiens
cagttgccaggtcaattggtgggtgttcaggaattcacatgcagatataaagttttctattctttaaggtgagtaaaggcatgaaaaaatcctagaacaagagtcttcaaggatgataataacactgacccagcccagtaatatttccaacctctcccattccgaggcctaaaatgtctttttctggctttggatggatggtaaacatc

SEQ ID NO: 57082 - DNA, 311 bp, Homo sapiens
cgaattagtgaactgtgcttcaggttcaggaacctggtcttagctccttgcctgctgagattttgagttacaagtagaattctccaaaagcaaaacacgtaaaagtcatttttccactcttttggtcaagcacatgtaagctttcaggaccaggtggtatgccgttgctgaaagtgagacacatgccccagggaaagggtaattttaaaattcttcccataggtcctcatcctgttcctctgctatgtccagcatcctttagtcccagctgcagggcctatatttaaataccctcatgcttatcgctttgt

SEQ ID NO: 57083 - DNA, 310 bp, Homo sapiens
gtaacccatcccatagggttgttctatgtattcttgccaggtggggttggagcaccttgtgagctcagcagcccaacatcgatagtaagggagtcagggtttcttcatcttccctagagttagaactcaattctacagccactgtgtcagggaccactttgagcgcccttggcacctgctggctggaaatcaatttagctgtaatggatctggcccagcttttcctctcttgggtcatctgcactcatagtggttgaagcaagatctaccagatggggacattgagatggtccctttctccttctcattt

SEQ ID NO: 57084 - DNA, 120 bp, Homo sapiens
atgcctggcctacaataatcaacttctacagatggaaaaaagttattctacaccataaacctgtcgacagaatatggtaatgtgaatcctgaagatttttcaagtatttggtgtcagagg

SEQ ID NO: 57085 - DNA, 407 bp, Homo sapiens
aaatatttaagaatgtttcaacttctcatgtagtttacttcaaaagtaacctttataatattagactataagttatgctgcagaagtaattaattgacctgattctattcattaattaagactctccctggtatcaaatgagaagcttaacatactgggcagtataacagtaatcattgtgaaagtgctcactttggctttatgattaacataggaacttaagaactgcttagcttaaaaacttgctagagtatatttaacggggcctgaaagagacctagtatatttaatggggcctgaaagagaccttaatatggtccagtttttttttttttgagacggagttttactcttgttgcccaggcttgagtgcaatgatgcaatctccattcactgcaacctccacc

SEQ ID NO: 57086 - DNA, 230 bp, Homo sapiens
ttacctgaatgaatcctgagtctttgcttctctctctctaatttcaggcctatgtgagtatcagtaagggcgaggaaacatggtagagtgcttgagttccctctcgttttgatatatcctatcgcttttagctctctcttggattagaggaagggtatgaacataattccacattagtttatatgtattatgaggcacagatctctgatacaaattacaaaggcagcagc

SEQ ID NO: 57087 - DNA, 448 bp, Homo sapiens
tcagtggaaataaaatccatatggttagcatcctcttcaattatctttatctgcctaagagaaagagtgctgtcttcactgagctaaaaatgttccaatcctcgttctttgcaactggtctgacattcagcctccttcctctaatagcccccgctctgtttattttacccactatcacttcagctggctaatgctcttccaaaggctagttccaaaaatgtgttacagtcatcctggtctgttcatcccagcagcagcatcactgcactttcagtgaccccctcaccttccctgttgcctttgtctgacttgctaatttcccatcatgccttggaaattgcatggacaagaacttcataaaattcttgataggtttttgttatctagtggcttaaaaaatgtctctcactagtgtctgtagatcaggcagtccagaattgtataaagg

SEQ ID NO: 57088 - DNA, 294 bp, Homo sapiens
ctgactgagattgtgcccgagggacctttctgggagctggaaatgttctatatcttgaccaaggaggtggttacatgggtgtagacatggaataattcattgatcttaggattgtatgattaatttgcaagacccaatgcaaaatgaaaacgaggggtctcttgctaaaaaattcttaggactttcaggatagcaacagcagagcattcaatgaaaagcaggcccttctaagtgtggggccctgcattgttgtacagagcccatacccatgaagctgggcctggttaagctgag

SEQ ID NO: 57089 - DNA, 723 bp, Homo sapiens
ctgatttccacattcaagattctgcaatgttgtgagttgcaatggtgtttgcggtggtggtgaatgtttgttgtttgtggtggtggttaatgtttaatattcacctcagccaccaaaacaggtctgaatttcaacacggtactcagagatccttcactccccacagagcaacagcttttggagtcaggggaagtctgggttccaatcccagctctgtgattttgagctctgaaactttccaaacctgtttccttctctgcctttcagggttgcaggggttaaatggatagcattaatcaccttcctttcacaggctgttagcactcaatcaaacctgcttctcccactcaaagatgtttaagacccaggcaagtcacacccgacagaacctcaacagacagggaataattaccaaggggtaccttccacaccatgtcccctactgccctgaaggagaatgcctctaagcttagcaaaaacaagcttgaatttttgctcacatgaacttttctacaaaagcaataaatcaaagaaaagagtttaggaacagattagagcagactcagatgggctcaggttccattacccgcccccgccccgcagggcgctgctcactgctggactccgaaagcccagctggcttttctcctccaagattctccaccgaccacccccgacaaacacgtcaccaccctggccagcactgagcacagtgggtggaag

SEQ ID NO: 57090 - DNA, 687 bp, Homo sapiens
taatggagtagcacgggcctgtaatccaatatgaccgatgttcttatgagaagaaacacagagtcaggcacactgggaaaatgccgtgtgacaatggaggcagagatgggagtgatccgcctgcgggccaaggaacaccagggattgctggcaacaccagaagctaagagaaaaccatggagcagcttctcccctggagccttgattccagatttctagcatccagaactatgagacaatacatgtctgttgtgtaaagcctcccagcttgtgagactagttacggcaactctagaaaatgcagcagccaatatggtggtaccagctcagattgattctttatgatccccaaatctcccctggatagaagatgcttgtgtttcaattcatcccaccaaaatggaaaatcgttttggttgaggctgctctgctgttgcttggctactgtctctaaactcactatcttctaggaacaaggatgacatgctactcaagacgaaacaaatgactcaacagcaggcagtgtaagtggatttacaagtactgcaggcaagaaatgatacaatatccttactggaaacttgagcaaaggcctgctgtgagacatggtaaaacttttatatcagtcaacctgctgcagtcctttgctctgtcgtgaagcaaataataaagaaggctctgagctct

SEQ ID NO: 57091 - DNA, 860 bp, Homo sapiens
gcgcatgcctgtaatcctagctactttggaggctgaggcaggagaacagtttcaacccaggaggcggaagttgcagtgagccgagaccgccacattgcactccagcttgggcaagaggattgaaactccatcacaaaaataaataaataaataaataaataaataaatataaaagaaatagacaaagcaaatcttaatgcatgaactcaaacaaatgctttcactgccaggctccatctttgcaaaactgaacctaggacaatgtgaacgtttctaactagcaattctggaggacagatcagggaggcagcgtgagcttgcttttctgcaatttaattgactggtcagtaaagtcagtgtttgcaggcattttcaatgttctatagtgggcttcagtgcctgtggcaggccaggtttgcaatagcaaccagaacagtttctactaaccctttactataattttgatgaatgcataagttaacgttaaagaaatggagaaactggtgcctgagtatcacggatggaatgtgaaaacaaacccactgagaccccgtctgggttttctcagaccctaaaatctgatcgaataatgatagcgttcgtacacattcacctcggcctgtcttaagattcaaaaactttccaagactctagggaaatctttccagacgctagacccgagttaaagattagatgttgattgaatgaaacactcctgcttgtaggtgcaatcccacatggagcttaagatatatataagcactagaaaaaaaaacttgtaactttgagttgatctggtgatttacctggcgcttctccctgtaagtggctgcagaaataaacttccttctttcccagtc

SEQ ID NO: 57092 - DNA, 284 bp, Homo sapiens
ttcccactgtcatggaaacccgagtgagccaccaggttgacccctttcctcttgcctgtgtgacccaggcctccaccctgcagaagccagggggtgagaggtttgaagagggcagatgggaatgccatccaccacagcctcaccctgactcgatgtgtgacctgggacagccttctaaggccggggctgcagggggctgtcttctgaatacgtggaccactcacggctcagcctgggatcgcagaaggccagacctcagttcctgagacagaacctctgacctc

SEQ ID NO: 57093 - DNA, 185 bp, Homo sapiens
tgtctgtgagatgctgagaaattcactcaatctctctgctcctttcctgtaaaatgagggacttaagtaatccctaagatttcttccagccccagccatgtgagagcagggatttgcagggttttttaatcaattgtattgcaacaaaatttacatagaataaatgcacccatttcaagtccaca

SEQ ID NO: 57094 - DNA, 2411 bp, Homo sapiens
gggacacatgatgctgtgaacctcagggtgctcgccagggaagggccctacccagagggacagaaagaaagccaggaggggtagagtttgaagagaagatcatgttctccctgaagacgcttccatttctgctcttactccatgtgcagatttccaaggcctttcctgtatcttctaaagagaaaaatacaaaaactgttcaggactacctggaaaagttctaccaattaccaagcaaccagtatcagtctacaaggaagaatggcactaatgtgatcgttgaaaagcttaaagaaatgcagcgattttttgggttgaatgtgacggggaagccaaatgaggaaactctggacatgatgaaaaagcctcgctgtggagtgcctgacagtggtggttttatgttaaccccaggaaaccccaagtgggaacgcactaacttgacctacaggattcgaaactataccccacagctgtcagaggctgaggtagaaagagctatcaaggatgcctttgaactctggagtgttgcatcacctctcatcttcaccaggatctcacagggagaggcagatatcaacattgctttttaccaaagagatcacggtgacaattctccatttgatggacccaatggaatccttgctcatgcctttcagccaggccaaggtattggaggagatgctcattttgatgccgaagaaacatggaccaacacctccgcaaattacaacttgtttcttgttgctgctcatgaatttggccattctttggggctcgctcactcctctgaccctggtgccttgatgtatcccaactatgctttcagggaaaccagcaactactcactccctcaagatgacatcgatggcattcaggccatctatggactttcaagcaaccctatccaacctactggaccaagcacacccaaaccctgtgaccccagtttgacatttgatgctatcaccacactccgtggagaaatacttttctttaaagacaggtacttctggagaaggcatcctcagctacaaagagtcgaaatgaattttatttctctattctggccatcccttccaactggtatacaggctgcttatgaagattttgacagagacctcattttcctatttaaaggcaaccaatactgggctctgagtggctatgatattctgcaaggttatcccaaggatatatcaaactatggcttccccagcagcgtccaagcaattgacgcagctgttttctacagaagtaaaacatacttctttgtaaatgaccaattctggagatatgataaccaaagacaattcatggagccaggttatcccaaaagcatatcaggtgcctttccaggaatagagagtaaagttgatgcagttttccagcaagaacatttcttccatgtcttcagtggaccaagatattacgcatttgatcttattgctcagagagttaccagagttgcaagaggcaataaatggcttaactgtagatatggctgaagcaaaatcaaatgtggctgtatccactttcagaatgttgaagggaagttcagcatgcattttcgttacattgtgtcctgcttatacttttctcaatattaagtcattgtttcccatcactgtatccattctacctgtcctccgtgaaaatatgtttggaatattccactatttgcagaggcttattcagttcttacacattccatcttacattagtgattccatcaaagagaaggaaagtaagcctttttgtcacctcaatatttactatttcaatacttacatatctgacttctaggatttattgttatattacttgcctatctgacttcatacatccctcagtttcttaaaatgtcctatgtatatcttctacatgcaatttagaactagattttggttagaagtaaggattataaacaacctagacagtacccttggcctttacagaaaatatggtgctgttttctacccttggaaagaaatgtagatgatatgtttcgtgggttgaattgtgtcccccataaaagatatgttgaagttctaaccccaggtacccatgaatgtgagcttaccagggtctttgcagatgtaattagttaagttaaggtgagatcacactgaattagggtgggctctaaatccattatgactgttgttcttataagaagaagagaggcatagccacctaggggaggaggccgtgtgaagacagaggcagagattggagtgacgcatctccaagccaaggaattccaaggactgtaagccaccagtagaagctttgaagaggcaaggaaggattccctccaatagccttcaagtgtgaccctgctgacacctgcagaattcggacttctatcctccaaaaccgtgagggaataaatttcctttgttttaagccac

SEQ ID NO: 57095 - DNA, 2677 bp, Homo sapiens
gggacacatgatgctgtgaacctcagggtgctcgccagggaagggccctacccagagggacagaaagaaagccaggaggggtagagtttgaagagaagatcatgttctccctgaagacgcttccatttctgctcttactccatgtgcagatttccaaggcctttcctgtatcttctaaagagaaaaatacaaaaactgttcagagacaaaaatatcttaaatcagataaataatgtggccaagtgctcacagttaattcatggcagagttaagatttgaacccaggcctgtctgattccaaagcgtgtgatctgcacaaggccatctcagaagccaaccagatgcagccacctgatcttggacttcccagcctccagaattaataaataagccttttctacagtagtgaagaggataaaaaagaggaactgcactgatgcaacaaatacctcaagagaagtcaattaatgactacctggaaaagttctaccaattaccaagcaaccagtatcagtctacaaggaagaatggcactaatgtgatcgttgaaaagcttaaagaaatgcagcgattttttgggttgaatgtgacggggaagccaaatgaggaaactctggacatgatgaaaaagcctcgctgtggagtgcctgacagtggtggttttatgttaaccccaggaaaccccaagtgggaacgcactaacttgacctacaggattcgaaactataccccacagctgtcagaggctgaggtagaaagagctatcaaggatgcctttgaactctggagtgttgcatcacctctcatcttcaccaggatctcacagggagaggcagatatcaacattgctttttaccaaagagatcacggtgacaattctccatttgatggacccaatggaatccttgctcatgcctttcagccaggccaaggtattggaggagatgctcattttgatgccgaagaaacatggaccaacacctccgcaaattacaacttgtttcttgttgctgctcatgaatttggccattctttggggctcgctcactcctctgaccctggtgccttgatgtatcccaactatgctttcagggaaaccagcaactactcactccctcaagatgacatcgatggcattcaggccatctatggactttcaagcaaccctatccaacctactggaccaagcacacccaaaccctgtgaccccagtttgacatttgatgctatcaccacactccgtggagaaatacttttctttaaagacaggtacttctggagaaggcatcctcagctacaaagagtcgaaatgaattttatttctctattctggccatcccttccaactggtatacaggctgcttatgaagattttgacagagacctcattttcctatttaaaggcaaccaatactgggctctgagtggctatgatattctgcaaggttatcccaaggatatatcaaactatggcttccccagcagcgtccaagcaattgacgcagctgttttctacagaagtaaaacatacttctttgtaaatgaccaattctggagatatgataaccaaagacaattcatggagccaggttatcccaaaagcatatcaggtgcctttccaggaatagagagtaaagttgatgcagttttccagcaagaacatttcttccatgtcttcagtggaccaagatattacgcatttgatcttattgctcagagagttaccagagttgcaagaggcaataaatggcttaactgtagatatggctgaagcaaaatcaaatgtggctgtatccactttcagaatgttgaagggaagttcagcatgcattttcgttacattgtgtcctgcttatacttttctcaatattaagtcattgtttcccatcactgtatccattctacctgtcctccgtgaaaatatgtttggaatattccactatttgcagaggcttattcagttcttacacattccatcttacattagtgattccatcaaagagaaggaaagtaagcctttttgtcacctcaatatttactatttcaatacttacatatctgacttctaggatttattgttatattacttgcctatctgacttcatacatccctcagtttcttaaaatgtcctatgtatatcttctacatgcaatttagaactagattttggttagaagtaaggattataaacaacctagacagtacccttggcctttacagaaaatatggtgctgttttctacccttggaaagaaatgtagatgatatgtttcgtgggttgaattgtgtcccccataaaagatatgttgaagttctaaccccaggtacccatgaatgtgagcttaccagggtctttgcagatgtaattagttaagttaaggtgagatcacactgaattagggtgggctctaaatccattatgactgttgttcttataagaagaagagaggcatagccacctaggggaggaggccgtgtgaagacagaggcagagattggagtgacgcatctccaagccaaggaattccaaggactgtaagccaccagtagaagctttgaagaggcaaggaaggattccctccaatagccttcaagtgtgaccctgctgacacctgcagaattcggacttctatcctccaaaaccgtgagggaataaatttcctttgttttaagccac

SEQ ID NO: 57096 - DNA, 2566 bp, Homo sapiens
gggacacatgatgctgtgaacctcagggtgctcgccagggaagggccctacccagagggacagaaagaaagccaggaggggtagagtttgaagagaagatcatgttctccctgaagacgcttccatttctgctcttactccatgtgcagatttccaaggcctttcctgtatcttctaaagagaaaaatacaaaaactgttcagcacaaggccatctcagaagccaaccagatgcagccacctgatcttggacttcccagcctccagaattaataaataagccttttctacagtagtgaagaggataaaaaagaggaactgcactgatgcaacaaatacctcaagagaagtcaattaatgactacctggaaaagttctaccaattaccaagcaaccagtatcagtctacaaggaagaatggcactaatgtgatcgttgaaaagcttaaagaaatgcagcgattttttgggttgaatgtgacggggaagccaaatgaggaaactctggacatgatgaaaaagcctcgctgtggagtgcctgacagtggtggttttatgttaaccccaggaaaccccaagtgggaacgcactaacttgacctacaggattcgaaactataccccacagctgtcagaggctgaggtagaaagagctatcaaggatgcctttgaactctggagtgttgcatcacctctcatcttcaccaggatctcacagggagaggcagatatcaacattgctttttaccaaagagatcacggtgacaattctccatttgatggacccaatggaatccttgctcatgcctttcagccaggccaaggtattggaggagatgctcattttgatgccgaagaaacatggaccaacacctccgcaaattacaacttgtttcttgttgctgctcatgaatttggccattctttggggctcgctcactcctctgaccctggtgccttgatgtatcccaactatgctttcagggaaaccagcaactactcactccctcaagatgacatcgatggcattcaggccatctatggactttcaagcaaccctatccaacctactggaccaagcacacccaaaccctgtgaccccagtttgacatttgatgctatcaccacactccgtggagaaatacttttctttaaagacaggtacttctggagaaggcatcctcagctacaaagagtcgaaatgaattttatttctctattctggccatcccttccaactggtatacaggctgcttatgaagattttgacagagacctcattttcctatttaaaggcaaccaatactgggctctgagtggctatgatattctgcaaggttatcccaaggatatatcaaactatggcttccccagcagcgtccaagcaattgacgcagctgttttctacagaagtaaaacatacttctttgtaaatgaccaattctggagatatgataaccaaagacaattcatggagccaggttatcccaaaagcatatcaggtgcctttccaggaatagagagtaaagttgatgcagttttccagcaagaacatttcttccatgtcttcagtggaccaagatattacgcatttgatcttattgctcagagagttaccagagttgcaagaggcaataaatggcttaactgtagatatggctgaagcaaaatcaaatgtggctgtatccactttcagaatgttgaagggaagttcagcatgcattttcgttacattgtgtcctgcttatacttttctcaatattaagtcattgtttcccatcactgtatccattctacctgtcctccgtgaaaatatgtttggaatattccactatttgcagaggcttattcagttcttacacattccatcttacattagtgattccatcaaagagaaggaaagtaagcctttttgtcacctcaatatttactatttcaatacttacatatctgacttctaggatttattgttatattacttgcctatctgacttcatacatccctcagtttcttaaaatgtcctatgtatatcttctacatgcaatttagaactagattttggttagaagtaaggattataaacaacctagacagtacccttggcctttacagaaaatatggtgctgttttctacccttggaaagaaatgtagatgatatgtttcgtgggttgaattgtgtcccccataaaagatatgttgaagttctaaccccaggtacccatgaatgtgagcttaccagggtctttgcagatgtaattagttaagttaaggtgagatcacactgaattagggtgggctctaaatccattatgactgttgttcttataagaagaagagaggcatagccacctaggggaggaggccgtgtgaagacagaggcagagattggagtgacgcatctccaagccaaggaattccaaggactgtaagccaccagtagaagctttgaagaggcaaggaaggattccctccaatagccttcaagtgtgaccctgctgacacctgcagaattcggacttctatcctccaaaaccgtgagggaataaatttcctttgttttaagccac

SEQ ID NO: 57097 - DNA, 452 bp, Homo sapiens
tgcagcgattttttgggttgaatgtgacggggaagccaaatgaggaaactctggacatgatgaaaaagcctcgctgtggagtgcctgacagtggtggttttatgttaaccccaggaaaccccaagtgggaacgcactaacttgacctacaggtgatatctctagggtttcaggatacactcatttatccagtatggactgggctcttatatgacagacactgttcttgggatacactaggaacaagtagataaatatccctgcctttgaagagtgtgagtagtgaatgaatatgagaatgaaaatgttgagataccgtgggttctttccactccaaggcttcccgttttagtcttccttctccaacaatctaaagaggactaccagcaatgttaggctgtctctctaagcacttactttaggacccaacaaaggcttaatcattgctggaga

SEQ ID NO: 57098 - DNA, 568 bp, Homo sapiens
gtggggacacatgatgctgtgaacctcagggtgctcgccagggaagggccctacccagagggacagaaagaaagccaggaggggtagagtttgaagagaagatcatgttctccctgaagacgcttccatttctgctcttactccatgtgcagatttccaaggcctttcctgtatcttctaaagagaaaaatacaaaaactgttcaggtaaatgaactatcagttaggtgatgtttgatttgctgattattaggaaatagtgtgggttgttttctcttgttaattaaaacagcctgaaagaaattatttgggtgattagtttgagattgaacatctccttttagtgatttggagggttccaagctggtaaggactaggccttttaaaagccggacatgaaaacaagctgaattctttaaaggctgggaaaatactgctgtagagttacccctagttgggaaacttttgtagaagaaatggttttatttataaaatggtatcattttctttctcatttacctaaggtttttccttccaggatatctgcaatcaagttactatatgtctgg

SEQ ID NO: 57099 - DNA, 1074 bp, Homo sapiens
gtgatggagacaagatttagtgtatagctctgctacctgcctggtgttcctttgagtttctttatccttagatttgacagctgagaaatctaggtggatttcatattcgtaatcattgattaacatgcacatttgggtttgcacatttttgtttatcatacatttttctccgttttctattaaagaacatgctctaggggaactattaatagcccaccagtcgggtaggcagcattcaatccttctatgccttctttcgccacctgttgaggtctttcttctgaaacaaagaagaaatagacaaatcagacttgccctcttggaaatgtggtccagatttctctactcccaagctccaaaaaaggtatacattggatgggctagatcaactcctcctgagagccataaatccgccaagagttgttttccatgtaagggtgtggtacaatggggaacacctgatgttggaggaaagcaggaggactttagagtggagttgcattctaatctctctgccgcttcaactatgtgacctggggcaaatgatataaactctatgagcctctttccttatctttaaaatgaagagaagtaatacctaccttgtagggctgttgtgaggattaaatgaagtaatgcatacagtgcctaacaaagtatttaacatcatattttttaaaagctcatgaaatattagtttttcttccttcccctctttctattttctctcctgttcccttttctctccctcctctgccctctccttccttcagatgttagtctaaaacagcaccttggatctaagcagcacctttgagaaagaaaagactgcttcaagaatgtctagttgcacctcctttccgtatgtggcctaaatgcctaggttggatcaatagtttaatttttttattgaactgtttaatattgactatggacttacattcacttttactgttttctgtatatttacttttgcttgaagtgttttaatattgactatttacctctgctcatttttattgattttctgtattttttcaatgaaaattataataaaaattatttttgttaaat

SEQ ID NO: 57100 - DNA, 436 bp, Homo sapiens
agaaacatgcctttgtgcccaaagtttcattttctccctccttcctatattagaattatgcagacaattagaattccctcattatgggatggcgctgaggcccctgctttaaaataatgaaacaaaactttcagattgtgtaatcattcttggttttcctgtttccccatttttaaatgaagaaactgtagttaagagagtggctgcttttaagtaagctaaaaaaccatgtcgatacagttgtgatgtgattttgattattaccttcaagagatagttaagtgggccaggtgcagtggctcacgcctgtaatcccagcactttgggaggctgaggcggtcggatcacgaggtcaagagatcgagaccatcctggccaacatggtgaaaccctgtctctactaaaaatacaaaaaaattagctggacgtggtggcg

SEQ ID NO: 57101 - DNA, 273 bp, Homo sapiens
ggaggtggggaaaggttcatacacaaagatcagcaatcaaaaatggcatcatattcctgaaaagtagcagtcgaatatggaaggtgatgttgcaattctttcaaaatcctagagggaaggccgtgtgtggtgactcacacctgtaatcccagctactcaggaggctgaggcaggagaatcacctgaacccgggaggcagaggttgcagtgagccaagatgacaccatcacactccagcctgggtgacagagcaagactctgtcaaaaaaaaaa

SEQ ID NO: 57102 - DNA, 329 bp, Homo sapiens
cgtacaggatcagtttttaaaatattactcatgcattttattaaattttctgataagtattagaatctttgaaatcttttcaagataaaaattatattattaagcagaatttaaaatcaatgtaaaataaaattccttaaagagagaagacataattaaataaaatccactaattaaacctcatttagtcaaagcaaagagagaagttcctagcaataataatctaaaaaggaaacaagatttacttacggattacaagcaaatatagaaaaatgacattagtaatatctaagttttcaaagtttattttcaacataaaatgtagagat

SEQ ID NO: 57103 - DNA, 356 bp, Homo sapiens
aagatataagtatttaatctgcaaagacgtggatttgaaaattcagctgccaaatgtaaagaacagattcctagattattattaataatatctctataaatattatatttatcaataatgggtactattcaactttaaaggacacctatggctcagttaggccagggaataaagatacttggataaaagtagtatttataaaatgaagaaaggggcccttctgattcactgtacataaaatgaaacactctaaagtctctagggagaattagagtttctgtctggcacaaaatgaagtcgccctcttgttagtagatataggatacatttaatcaccaagatataaaaggaaattt

SEQ ID NO: 57104 - DNA, 414 bp, Homo sapiens
ctaaaggatccccactaagggctgttcacctgccccagggactcagaacacacatgactctccccacttgagctcaggatcccggcattacacggggcgcgctgagccccagatgtccctaacccctttccagcaccctccagccttgcagaagcagccaccatgccagtctctaagtgcccaaaaaagtcggagtccctgtggaaggggtgggaccggaaggcccagaggaacggcctgcggagccaggtatacgctgtgaatggcgactactatgtgggcgagtggaaggacaacgtgaaacacgggaaaggaacacaggtctggaagaagaaaggagccatctatggagggggactggaagtttggggaagcgagacggctacggcaccctcagccttcctggaccaacag

SEQ ID NO: 57105 - DNA, 421 bp, Homo sapiens
ctaaaggatccccactaagggctgttcacctgccccagggactcagaacacacatgactctccccacttgagctcaggatcccggcattacacggggcgcgctgagccccagatgtccctaacccctttccagcaccctccagccttgcagaagcagccaccatgccagtctctaagtgcccaaaaaagtcggagtccctgtggaaggggtgggaccggaaggcccagaggaacggcctgcggagccaggtatacgctgtgaatggcgactactatgtgggcgagtggaaggacaacgtgaaacacgggtcttcagtgttccgacaaccagcatcactgcactgcagaagacagtgcagtatggtttctgttgggtcgtctggaccccgaaccctcaactgattcagtcacccaaacagta

SEQ ID NO: 57106 - DNA, 11967 bp, Homo sapiens
tgcctagtctccatataaaagcggcgccgcctccccgccctctctcactccccgctcctctccgccgcgcactctccgcggcgctgggagagggcggagggggaggcggcgcgcggcgccagaggaggggggacgcagggggcggagcggagacagtaccttcggagataatcctttctcctgccgcagaggagaggagcggccggagcgagacacttcgccgaggcacagcagccggcaggatggcgaccgtggtggtggaagccaccgagccggagccgtccggcagcatcgccaacccggcggcgtccacctcgcctagcctgtcgcaccgcttccttgacagcaagttctacttgctggtggtcgtcggcgagatcgtgaccgaggagcacctgcggcgtgccatcggcaacatcgagctcggaatccgatcatgggacacaaacctgattgaatgcaacttggaccaagaactcaaactttttgtatctcgacactctgcaagattctctcctgaagtcccaggacaaaagatccttcatcaccgaagtgacgttttagaaacagtggtcctgatcaacccttctgatgaagcagtcagcaccgaggtgcgcttaatgatcactgatgctgcccgacacaagctgctcgtgctgaccgggcagtgctttgaaaataccggagagctcattctccagtccggctctttctccttccagaacttcatagagattttcaccgatcaagagatcggggagttactaagcaccacccatcctgccaacaaagccagcttaaccctgttctgtcctgaagaaggggactggaagaactccaatcttgacagacacaatctccaagacttcatcaatattaaactcaattcagcttctatcttgccagaaatggaaggactttctgagtttaccgagtatctctcagaatcagtggaagtcccatctccctttgacatcttggaacctcccacatcgggtggatttctgaagctctccaagccctgctgttatatttttccaggagggaggggcgattctgccttgtttgcagtgaatggtttcaatatgctcatcaatggcggatcagagagaaaatcctgcttctggaagctcatccgacacttagaccgagtggactccatcctgctcacccacattggggatgacaatttgcctggaataaacagcatgttacagcggaaaattgcagagctcgaggaagaacagtcccagggctccaccacaaatagtgactggatgaaaaacctcatctcccctgacttaggagttgtatttctcaatgtacctgaaaatctcaaaaatccagagccaaacatcaagatgaagagaagcatagaagaagcctgcttcactctccagtacctaaacaaattgtccatgaaaccagaacctctgtttagaagtgtaggcaatactattgatcctgtcattcttttccaaaaaatgggagtaggtaaacttgagatgtatgtgcttaatccagtcaagagcagcaaggaaatgcagtattttatgcagcagtggactggtaccaacaaagacaaggctgaattcattctgcctaatggtcaagaagtagatctcccgatttcctacttaacttcagtctcatctttgattgtgtggcatccagcaaaccctgcggagaaaatcatccgagtcctgtttcctgggaacagcacccagtacaacatcctggaagggttggaaaagctcaaacatctagactttctgaagcagccactggccacccaaaaggatctcactggccaggtgcccactcctgtggtgaaacaaacaaaactgaaacagagggctgatagccgagaaagtctgaagccagccgcaaaaccacttcctagcaaatccgtgcgcaaggagtcaaaagaagaaacccctgaggtcacaaaagtgaatcacgtggaaaagccacccaaagttgaaagcaaagaaaaggtaatggtgaaaaaagacaagccagtaaaaacagagaccaaaccttcagtgactgaaaaggaggttcccagcaaagaagagccatctccagtgaaagccgaggtggctgagaagcaagccacagatgtcaaacccaaagctgccaaggagaagacggtgaaaaaggaaacaaaggtaaagcctgaagacaagaaagaggagaaagaaaagccaaagaaagaagtggctaaaaaggaggacaaaacacctatcaagaaggaggaaaaaccaaaaaaggaagaggtgaaaaaagaagtcaaaaaagagatcaagaaagaagagaaaaaagaacccaagaaagaggttaagaaagaaacaccgccaaaggaagtcaagaaggaagttaagaaggaagagaagaaggaagtgaaaaaggaagaaaaggaacccaaaaaagaaattaagaagctccctaaagacgcaaagaaatcatctactcctctgtctgaagcaaaaaaaccagctgctttaaaaccaaaagtacccaagaaggaagagtctgtcaagaaagattctgttgctgccggaaagccaaaggagaaggggaaaataaaagtcattaagaaggaaggcaaggccgcagaggctgtcgctgcagctgtcggcactggagccaccacagcagctgtcatggcggcagctggaatagcagccattggccctgccaaagaactcgaagctgagaggtcccttatgtcatctcctgaggatctaaccaaggactttgaagagttaaaggctgaagaggtcgatgtaacaaaggacatcaagcctcagctggagctaatcgaagacgaagagaaactgaaggaaactgagccagtcgaagcctacgtcatccagaaggagagagaagtcaccaaaggtcctgccgagtcccctgatgagggaatcactaccactgaaggggagggcgaatgtgaacagacacctgaggagctggagcccgtcgagaagcagggagtagacgacattgaaaaatttgaagatgaaggagccggttttgaagaatcttcagagactggagactatgaagagaaggcagaaactgaggaggctgaggagccagaagaggatggggaggaacacgtatgtgtgagcgcctccaagcacagccccactgaggatgaggaaagtgccaaggcggaggctgatgcatacatcagggagaagagggagtctgtggccagtggggatgaccgagccgaagaagacatggatgaggccattgagaaaggagaggctgaacaatctgaagaggaggctgatgaggaggacaaagctgaagatgccagagaggaggaatatgagccggaaaaaatggaagctgaagactatgtgatggctgtggtcgacaaggctgcagaggctggtggtgccgaggagcagtatggattcctcaccacaccaaccaagcaactaggagcccagtctcctggccgagaacctgcatcttcaattcatgatgagactttacctggaggctcagagagcgaggccaccgcttctgatgaggagaatcgagaagaccagcctgaggaattcactgccacctctggctacactcagtctactattgagatatccagtgagcccacccccatggatgagatgtctacccctcgagacgtgatgagtgatgagaccaacaatgaagagacggagtccccttctcaggaattcgtaaatatcaccaaatatgaatcttcattgtattctcaggaatactctaaacctgctgatgttacaccgctcaacggattttctgaaggatcaaaaacagatgccactgatggcaaggattacaatgcttcagcctctaccatatcaccaccctcttccatggaggaagacaaattcagcagatctgctttacgtgatgcttactgctctgaagtgaaagccagcaccactttggacatcaaagatagcatctcagctgtttcaagtgaaaaggtcagcccatcgaagagcccgtccctgagtccatctccaccatcacccttagaaaagacccccctgggtgaacgtagtgtgaacttctctctgacgcccaatgagattaaagtctctgcagaggcagaagtagccccggtgtctcctgaggtgacccaagaagtagttgaagaacattgtgctagtcctgaggacaagactctggaagtggtgtcaccatctcagtccgtgactggcagtgctggtcacacaccttactatcaatctcctactgacgagaaatccagtcatctccctacagaagtcattgaaaaaccaccagcagttccagtgagttttgaattcagtgatgccaaagatgagaatgaaagggcttcagtaagccccatggatgagcccgtgcctgactcagagtctcctattgaaaaagttttgtctcctttacgcagcccgcccctcattggatccgagtctgcttatgaaagttttctaagtgctgatgacaaggcttctggcagaggtgccgaaagtccttttgaagaaaagagtggaaaacaaggctctccagaccaagtaagtccagtttctgaaatgacttctactagtctttaccaagacaaacaggaagggaaaagcacagactttgcaccaataaaagaagactttggccaagaaaagaaaactgatgatgttgaagccatgagttctcaaccagcactggctctggatgaaaggaaattaggagatgtttctcccacacaaatagatgtcagtcagtttggatcttttaaagaagacactaagatgtccatttctgaaggtactgtctcagacaagtcagctactcctgttgatgagggcgtagcagaagacacgtactctcatatggagggtgtggcctcagtgtccacagcctcagtggctacgagctcatttccagagccaacaacagatgatgtgtctccatctctgcatgctgaggttggctccccacattccacagaagtagatgactccctttcagtgtctgttgtgcaaacacctaccacattccaggaaacagaaatgtctccatctaaagaagaatgcccaagaccgatgtcaatttctccaccagatttctcccctaaaactgcaaagtccaggacacccgttcaagatcacagatctgaacagtcctcaatgtctattgaatttggccaagaatctcctgagcaatcccttgctatggacttcagtcgacagtctccagatcaccctacagtgggtgcaggcgtgcttcacatcactgaaaatgggccaactgaagtggactacagtccttctgacatgcaggactccagtttatcacataagataccacctatggaggagccgtcctacacccaagataatgatctttctgagctcatctcagtatctcaggtagaggcctccccgtccacctcttctgctcataccccttctcagatcgcttctcctctccaagaagatactctatccgatgttgctcctcccagagatatgtccttatatgcctcactcacctctgaaaaagtgcaaagtctggaaggagagaagctctctccaaaatctgatatctctccactcaccccacgagagtcctctcctttatattcacctactttttcagattctacctctgcagtcaaagagaaaacagcaacttgccacagttcctcttctccaccaatagatgcagcatccgcagagccctatggcttccgtgcctcagtgttattcgatacaatgcaacaccatctagccttgaatagagatttgtccacacctggcctggagaaggacagtggagggaagacacctggtgactttagctatgcctatcaaaagcctgaggaaacaaccaggtccccagatgaagaagattatgactatgagtcttatgagaagaccacccggacctcagatgtgggtggctattactatgagaagatagagagaaccacaaaatctccaagtgacagtggctactcctatgagaccattgggaaaactaccaagacccctgaagatggtgactattcctatgaaattattgagaagaccacacggacccctgaagagggtgggtactcatatgacataagtgaaaagaccaccagcccccccgaagtgagtggttacagctatgaaaagactgagaggtctagaaggcttctggatgacatcagcaatggctatgatgactctgaggatggtggccacacacttggggaccccagctactcttatgaaaccactgagaaaattaccagtttccctgagtctgaaggttattcctatgagacatctacaaagacaacacgaacccctgatacttccacatactgttacgagactgcagagaaaatcactagaacccctcaggcatccacatattcctacgagacttcagacctatgctacactgcagaaaagaagtccccctcagaagcccgtcaggatgtcgatttatgcctcgtgtcctcttgtgaatacaagcaccccaagacagagctttcaccctctttcattaatcccaatcctcttgagtggtttgccagtgaagaacccactgaagaatctgaaaagcccctcactcaatcagggggagccccaccgcctccaggaggaaagcaacagggccgacagtgtgatgaaacccctcccacctcagtcagcgagtcagccccatcccagaccgactctgatgttcccccggagactgaagagtgcccctccatcacggccgatgccaatatcgactctgaagacgagtcggaaaccatccccacagacaaaactgtcacgtacaaacacatggacccacctccagctcccgtgcaagaccgcagcccttcgccacgccaccctgatgtgtccatggtggacccagaggccttggccattgagcagaacctgggcaaagctctaaagaaagatctgaaagagaagaccaaaaccaaaaagccaggtacaaagaccaagtcatcttcacctgtcaaaaagagtgatgggaagtctaagcccttggcagcttcaccaaaaccagcgggcttgaaagaatcctcggataaagtgtccagggtggcttctcctaagaagaaagaatctgtggaaaaggcagcaaaacccaccaccactcctgaggtcaaagctgcacgtggggaagagaaagacaaggagaccaagaatgctgccaatgcctctgcatccaagtcggccaagaccgccactgcaggaccaggaactaccaagacgaccaagtcatctgctgtgcccccaggcctccctgtgtatttggacctgtgctacattcctaaccacagcaatagtaagaatgttgatgtggaatttttcaagagagtgcggtcttcctactacgtggtgagtgggaatgaccctgctgctgaggagcccagccgggctgtcctggacgctttgttggaaggaaaggctcagtggggcagcaacatgcaggtgacactgatcccaactcatgactcagaagtgatgagggaatggtaccaggagacccatgagaaacagcaagatctcaacatcatggttttagcaagcagcagcacagtggttatgcaagatgaatccttccctgcatgcaagattgaactgtaaaaaccaaggccagccacaccacaggatctgaactttgtttccagaaattcttcaatttgaaatcaccttttctaaaaagtcaattcatctagttaagtcgctgaacaattacctgccaaatgctatactgtgtcatggtgatgcaagtcactaaatttctcagtttttgctgattgctaagggaaataacagtatttccacaatagggttcaaattcctgcaaaattacctaccccagttcatctctgctgaacatttggaaaccatgcactagccaacccaactgacttctgctaggtagaggcatttgtcttagagagagagagagcgcgggagagagtgagagagagtgagagcacaaagataacgcaggagagagagagagaaagaatgagaaagaaaaggaatgcaagagaaggagatgtaatgacagagagttctggtgagatacccagagagaaaaagagagagcagggtggggtaaggaggagaaaataaaccaacaattaggtctgcattttctcaggcagtaggcattctttagtctacataggcaaagttttccatttttgtcagtctgagtcatcaaaaagagtcttaattttctaaaacaagttggctagaagaaagtaaaaagaacaacacttgttatgagggcatgtgatattttcacatcttaattaagctccttcagtttgaaggctgcacactgacataatgtagtgagtgtagactggccatgcaagtggtttgggccccattcagaactctcagactctaaacacacaagtagattgatctaaggcatgctcccagcatttgtccacccacttagtccactctgagtcgattaacctgcatgcagcaacacccaagtccaccccaattaactgaagcaaataccaaagcagttgggagtacatatggtagacaatttgccttaggaagtgacttgaatgtacaaagatacttgatgcacttattttttaatgtgagacagcaagtttataaaacatccatataggattatagatacttaaaggaacacgtgggtgagcgtgtgtgggggtactagaagctgatctgattggtccaacagtttgatgctgagtcatgcgtgttgaatcccacttcagtgcacctgtggcctctcagtcaaacaagttgtgcctttcacagcttctttactactgcaagttcaagactgaaatggcttctatgatcagaactgggaaaacagtgaatcttatggtggaagaggttctcagcaagtgtacagtatttaccttcctttgtcttacattggctttttaaattttccattaatttcaacataattatgggaacaagtgtacagaagaattttttttttaagatatgtgagaacttttcatagatgaactttttaacaaatgttttcatttacaggaaattgcaaagaaaattctcaagtgatagtctttttttttaagtgtttcgtaagacaaaaattgaataatgttttttgaagttctggcaagattgaagtctgatattgcagtaatgatatttattaaaaacccataactaccaggaataatgatacctcccaccccttgattcccataacataaaagtgctacttgagagtgggggagaatggcatggtaggctacttttcagggccttgacaagtacatcacccagtggtatcctacatacttctttcaagatcttcaaccatgaggtaaaagagccaagttcaaagaaccctagcacaaatttgctttgggattttcttttctggaaaaaaaaaataaaagaaatagtacattgaaaacaaatgaattctcaactcctacggttcatgtagagtttagagaaaatttccatcattgtcatcattgaactgtgaacctgggaagccagatcatgattaacactgacatcaagtttcaagttgcagatcaatgcacccagtgttcagatgaggcaaacttctccgtgacaactgtgctgtgctctgtcacattacatttcctgcagactctaagatctacggagtagagaacaatgacctcattttattttctatgttagttatttatttcaaaattaacattttagttgatttttgtctgataagtctatgttttgcactgctaactatgatgagggtttaaaaaaatgcttcttcagggtcctttcactgaggacctatgcagtctacttaatgctgtgaattacatttttcaaatgtttaattttttaaagaaaattaatattctatttttgttaggcttctctagaaatgcagcttttatttattaccccatttctttcaagtccttggaaaataacatattaagggtacaagaaattaacacatgatggaaaagtcattgtgacgccaatgaatttcattgagtataaactcatctacttcaaatttattttataagacaacctaagatactcaagataattatttaatggttagctcttaagttgaattggtctacataatgcgtgggaagaaaaccagatttttagccttcttgccaaatccagacctctggttgatttttctttgacagaagatgcaagttattttccaatttcacaattaaatgtatttaacctgaacattattttgctttaaaaactataaacattgtaggagaattatagccagtcttcagttataaccactccaccctcctcactttctctctctctctctctttttttttgctatgggatttaatgggaaaaatatgtaaaaactgtcactagtcagctggctctttttcctatgaaatctatcagtacctttctccatccgttgttctcaataatgaccacagagcctgagtataccaagaaaaccaatattcgcattacaggttgctcctgtccttccagacacctttcctgcctgtgtgactaacctaattttgctagttccataaatacacgattagtttagtaacagccatcacaatgtaccatgtacattcatggtgagagctaaagatcgacacagacttctaggagctttgttcatactgattacttaatccaattgtatagattgaatatttgagtggaaggaatttacactctgtttaaatgatgggattctatcgagatagcactcatgatcatgacctttttggtagtattcttaaacaaaattctacagagactaaatgttagcgatgatcctccattttcaattttaaccaattctgtcccctttctcaaaaccctgagccctgtgcatgctttctcagtcttgtggtgggactggatacaatgactaacttcccctcctcccctctttaaacaccattttccatggagttcaaaaaaattttttttcttaacgttacatatcatagtgaatggtttccccagtgtatatgaatgttttaagtgtctccaatagcttatgcagtctaggagctttccaatactcatttaattaagatttaatcatttgctaatggaaatcttaccacctttcattttccctctgttaccaaatttcagctcttaggagctgctctacaattctgaatttgcttttcttgcctctctttagtcacctgtcacaggaggttcctgctcagtaatgatattgtgagttaggataataactttttttttttgtgcttcagatttagaagaaaagatcctgtttccatttgaaaggaactgtaagcttttatcttttaaccaactgaacaatacaccaaaagcagcctagggatgagcatttctttgaaagcaattaggttattcacctggtattaaaactatttactgttaaaaaatctgtgacttcatgaagttgatttttaaaggcagcatcaaaaactgaaaaggaagggaaaaaataggcagcttctctgcacttgtttggagctccccaaaacaggagccatggagaagtggcatcaagaccgggctgccctttcgagaacaccctgtggcagttcagagacacgcttttcctacactgcatgcagcccctctttccagcactggaaagaagtggtcttgagcccagctgagaagcacttcacactcctctctcttgttctgaatggtgtttgtgtcagtctgcagctgtgtatggtattatgtcttataatcctgcatcacttctatcctatccagtcatatctaatgtagaaaattagtttccagtgaaagtaatatgtagtgcttttatgatatttgtgtgcaatatcccctcttccattgaggatatttgatgtaaaggaaaaaaaaaaactcagttccacaataaaatacaaaagtggcaaaagtt

SEQ ID NO: 57107 - DNA, 11913 bp, Homo sapiens
tgcctagtctccatataaaagcggcgccgcctccccgccctctctcactccccgctcctctccgccgcgcactctccgcggcgctgggagagggcggagggggaggcggcgcgcggcgccagaggaggggggacgcagggggcggagcggagacagtaccttcggagataatcctttctcctgccgcagaggagaggagcggccggagcgagacacttcgccgaggcacagcagccggcaggatggcgaccgtggtggtggaagccaccgagccggagccgtccggcagcatcgccaacccggcggcgtccacctcgcctagcctgtcgcaccgcttccttgacagcaagttctacttgctggtggtcgtcggcgagatcgtgaccgaggagcacctgcggcgtgccatcggcaacatcgagctcggaatccgatcatgggacacaaacctgattgaatgcaacttggaccaagaactcaaactttttgtatctcgacactctgcaagattctctcctgaagtcccaggacaaaagatccttcatcaccgaagtgacgttttagaaacagtggtcctgatcaacccttctgatgaagcagtcagcaccgaggtgcgcttaatgatcactgatgctgcccgacacaagctgctcgtgctgaccgggcagtgctttgaaaataccggagagctcattctccagtccggctctttctccttccagaacttcatagagattttcaccgatcaagagatcggggagttactaagcaccacccatcctgccaacaaagccagcttaaccctgttctgtcctgaagaaggggactggaagaactccaatcttgacagacacaatctccaagacttcatcaatattaaactcaattcagcttctatcttgccagaaatggaaggactttctgagtttaccgagtatctctcagaatcagtggaagtcccatctccctttgacatcttggaacctcccacatcgggtggatttctgaagctctccaagccctgctgttatatttttccaggagggaggggcgattctgccttgtttgcagtgaatggtttcaatatgctcatcaatggcggatcagagagaaaatcctgcttctggaagctcatccgacacttagaccgagtggactccatcctgctcacccacattggggatgacaatttgcctggaataaacagcatgttacagcggaaaattgcagagctcgaggaagaacagtcccagggctccaccacaaatagtgactggatgaaaaacctcatctcccctgacttaggagttgtatttctcaatgtacctgaaaatctcaaaaatccagagccaaacatcaagatgaagagaagcatagaagaagcctgcttcactctccagtacctaaacaaattgtccatgaaaccagaacctctgtttagaagtgtaggcaatactattgatcctgtcattcttttccaaaaaatgggagtaggtaaacttgagatgtatgtgcttaatccagtcaagagcagcaaggaaatgcagtattttatgcagcagtggactggtaccaacaaagacaaggctgaattcattctgcctaatggtcaagaagtagatctcccgatttcctacttaacttcagtctcatctttgattgtgtggcatccagcaaaccctgcggagaaaatcatccgagtcctgtttcctgggaacagcacccagtacaacatcctggaagggttggaaaagctcaaacatctagactttctgaagcagccactggccacccaaaaggatctcactggccaggtgcccactcctgtggtgaaacaaacaaaactgaaacagagggctgatagccgagaaagtctgaagccagccgcaaaaccacttcctagcaaatccgtgcgcaaggagtcaaaagaagaaacccctgaggtcacaaaagtgaatcacgtggaaaagccacccaaagttgaaagcaaagaaaaggtaatggtgaaaaaagacaagccagtaaaaacagagaccaaaccttcagtgactgaaaaggaggttcccagcaaagaagagccatctccagtgaaagccgaggtggctgagaagcaagccacagatgtcaaacccaaagctgccaaggagaagacggtgaaaaaggaaacaaaggtaaagcctgaagacaagaaagaggagaaagaaaagccaaagaaagaagtggctaaaaaggaggacaaaacacctatcaagaaggaggaaaaaccaaaaaaggaagaggtgaaaaaagaagtcaaaaaagagatcaagaaagaagagaaaaaagaacccaagaaagaggttaagaaagaaacaccgccaaaggaagtcaagaaggaagttaagaaggaagagaagaaggaagtgaaaaaggaagaaaaggaacccaaaaaagaaattaagaagctccctaaagacgcaaagaaatcatctactcctctgtctgaagcaaaaaaaccagctgctttaaaaccaaaagtacccaagaaggaagagtctgtcaagaaagattctgttgctgccggaaagccaaaggagaaggggaaaataaaagtcattaagaaggaaggcaaggccgcagaggctgtcgctgcagctgtcggcactggagccaccacagcagctgtcatggcggcagctggaatagcagccattggccctgccaaagaactcgaagctgagaggtcccttatgtcatctcctgaggatctaaccaaggactttgaagagttaaaggctgaagaggtcgatgtaacaaaggacatcaagcctcagctggagctaatcgaagacgaagagaaactgaaggaaactgagccagtcgaagcctacgtcatccagaaggagagagaagtcaccaaaggtcctgccgagtcccctgatgagggaatcactaccactgaaggggagggcgaatgtgaacagacacctgaggagctggagcccgtcgagaagcagggagtagacgacattgaaaaatttgaagatgaaggagccggttttgaagaatcttcagagactggagactatgaagagaaggcagaaactgaggaggctgaggagccagaagaggatggggaggaacacgtatgtgtgagcgcctccaagcacagccccactgaggatgaggaaagtgccaaggcggaggctgatgcatacatcagggagaagagggagtctgtggccagtggggatgaccgagccgaagaagacatggatgaggccattgagaaaggagaggctgaacaatctgaagaggaggctgatgaggaggacaaagctgaagatgccagagaggaggaatatgagccggaaaaaatggaagctgaagactatgtgatggctgtggtcgacaaggctgcagaggctggtggtgccgaggagcagtatggattcctcaccacaccaaccaagcaactaggagcccagtctcctggccgagaacctgcatcttcaattcatgatgagactttacctggaggctcagagagcgaggccaccgcttctgatgaggagaatcgagaagaccagcctgaggaattcactgccacctctggctacactcagtctactattgagatatccagtgagcccacccccatggatgagatgtctacccctcgagacgtgatgagtgatgagaccaacaatgaagagacggagtccccttctcaggaattcgtaaatatcaccaaatatgaatcttcattgtattctcaggaatactctaaacctgctgatgttacaccgctcaacggattttctgaaggatcaaaaacagatgccactgatggcaaggattacaatgcttcagcctctaccatatcaccaccctcttccatggaggaagacaaattcagcagatctgctttacgtgatgcttactgctctgaagtgaaagccagcaccactttggacatcaaagatagcatctcagctgtttcaagtgaaaaggtcagcccatcgaagagcccgtccctgagtccatctccaccatcacccttagaaaagacccccctgggtgaacgtagtgtgaacttctctctgacgcccaatgagattaaagtctctgcagaggcagaagtagccccggtgtctcctgaggtgacccaagaagtagttgaagaacattgtgctagtcctgaggacaagactctggaagtggtgtcaccatctcagtccgtgactggcagtgctggtcacacaccttactatcaatctcctactgacgagaaatccagtcatctccctacagaagtcattgaaaaaccaccagcagttccagtgagttttgaattcagtgatgccaaagatgagaatgaaagggcttcagtaagccccatggatgagcccgtgcctgactcagagtctcctattgaaaaagttttgtctcctttacgcagcccgcccctcattggatccgagtctgcttatgaaagttttctaagtgctgatgacaaggcttctggcagaggtgccgaaagtccttttgaagaaaagagtggaaaacaaggctctccagaccaagtaagtccagtttctgaaatgacttctactagtctttaccaagacaaacaggaagggaaaagcacagactttgcaccaataaaagaagactttggccaagaaaagaaaactgatgatgttgaagccatgagttctcaaccagcactggctctggatgaaaggaaattaggagatgtttctcccacacaaatagatgtcagtcagtttggatcttttaaagaagacactaagatgtccatttctgaaggtactgtctcagacaagtcagctactcctgttgatgagggcgtagcagaagacacgtactctcatatggagggtgtggcctcagtgtccacagcctcagtggctacgagctcatttccagagccaacaacagatgatgtgtctccatctctgcatgctgaggttggctccccacattccacagaagtagatgactccctttcagtgtctgttgtgcaaacacctaccacattccaggaaacagaaatgtctccatctaaagaagaatgcccaagaccgatgtcaatttctccaccagatttctcccctaaaactgcaaagtccaggacacccgttcaagatcacagatctgaacagtcctcaatgtctattgaatttggccaagaatctcctgagcaatcccttgctatggacttcagtcgacagtctccagatcaccctacagtgggtgcaggcgtgcttcacatcactgaaaatgggccaactgaagtggactacagtccttctgacatgcaggactccagtttatcacataagataccacctatggaggagccgtcctacacccaagataatgatctttctgagctcatctcagtatctcaggtagaggcctccccgtccacctcttctgctcataccccttctcagatcgcttctcctctccaagaagatactctatccgatgttgctcctcccagagatatgtccttatatgcctcactcacctctgaaaaagtgcaaagtctggaaggagagaagctctctccaaaatctgatatctctccactcaccccacgagagtcctctcctttatattcacctactttttcagattctacctctgcagtcaaagagaaaacagcaacttgccacagttcctcttctccaccaatagatgcagcatccgcagagccctatggcttccgtgcctcagtgttattcgatacaatgcaacaccatctagccttgaatagagatttgtccacacctggcctggagaaggacagtggagggaagacacctggtgactttagctatgcctatcaaaagcctgaggaaacaaccaggtccccagatgaagaagattatgactatgagtcttatgagaagaccacccggacctcagatgtgggtggctattactatgagaagatagagagaaccacaaaatctccaagtgacagtggctactcctatgagaccattgggaaaactaccaagacccctgaagatggtgactattcctatgaaattattgagaagaccacacggacccctgaagagggtgggtactcatatgacataagtgaaaagaccaccagcccccccgaagtgagtggttacagctatgaaaagactgagaggtctagaaggcttctggatgacatcagcaatggctatgatgactctgaggatggtggccacacacttggggaccccagctactcttatgaaaccactgagaaaattaccagtttccctgagtctgaaggttattcctatgagacatctacaaagacaacacgaacccctgatacttccacatactgttacgagactgcagagaaaatcactagaacccctcaggcatccacatattcctacgagacttcagacctatgctacactgcagaaaagaagtccccctcagaagcccgtcaggatgtcgatttatgcctcgtgtcctcttgtgaatacaagcaccccaagacagagctttcaccctctttcattaatcccaatcctcttgagtggtttgccagtgaagaacccactgaagaatctgaaaagcccctcactcaatcagggggagccccaccgcctccaggaggaaagcaacagggccgacagtgtgatgaaacccctcccacctcagtcagcgagtcagccccatcccagaccgactctgatgttcccccggagactgaagagtgcccctccatcacggccgatgccaatatcgactctgaagacgagtcggaaaccatccccacagacaaaactgtcacgtacaaacacatggacccacctccagctcccgtgcaagaccgcagcccttcgccacgccaccctgatgtgtccatggtggacccagaggccttggccattgagcagaacctgggcaaagctctaaagaaagatctgaaagagaagaccaaaaccaaaaagccaggtacaaagaccaagtcatcttcacctgtcaaaaagagtgatgggaagtctaagcccttggcagcttcaccaaaaccagcgggcttgaaagaatcctcggataaagtgtccagggtggcttctcctaagaagaaagaatctgtggaaaaggcagcaaaacccaccaccactcctgaggtcaaagctgcacgtggggaagagaaagacaaggagaccaagaatgctgccaatgcctctgcatccaagtcggccaagaccgccactgcaggaccaggaactaccaagacgaccaagtcatctgctgtgcccccaggcctccctgtgtatttggacctgtgctacattcctaaccacagcaatagtaagaatgttgatgtggaatttttcaagagagtgcggtcttcctactacgtggtgagtgggaatgaccctgctgctgaggagcccagccgggctgtcctggacgctttgttggaaggaaaggctcagtggggcagcaacatgcaggtgacactgatcccaactcatgactcagaagtgatgagggaatggtaccaggagacccatgagaaacagcaagatctcaacatcatggttttagcaagcagcagcacagtggttatgcaagatgaatccttccctgcatgcaagattgaactgtaaaaaccaaggccagccacaccacaggatctgaactttgtttccagaaattcttcaatttgaaatcaccttttctaaaaagtcaattcatctagttaagtcgctgaacaattacctgccaaatgctatactgtgtcatggtgatgcaagtcactaaatttctcagtttttgctgattgctaagggaaataacagtatttccacaatagggttcaaattcctgcaaaattacctaccccagttcatctctgctgaacatttggaaaccatgcactagccaacccaactgacttctgctaggtagaggcatttgtcttagagagagagagagcgcgggagagagtgagagagagtgagagcacaaagataacgcaggagagagagagagaaagaatgagaaagaaaaggaatgcaagagaaggagatgtaatgacagagagttctggtgagatacccagagagaaaaagagagagcagggtggggtaaggaggagaaaataaaccaacaattaggtctgcattttctcaggcagtaggcattctttagtctacataggcaaagttttccatttttgtcagtctgagtcatcaaaaagagtcttaattttctaaaacaagttggctagaagaaagtaaaaagaacaacacttgttatgagggcatgtgatattttcacatcttaattaagctccttcagtttgaaggctgcacactgacataatgtagtgagtgtagactggccatgcaagtggtttgggccccattcagaactctcagactctaaacacacaagtagattgatctaaggcatgctcccagcatttgtccacccacttagtccactctgagtcgattaacctgcatgcagcaacacccaagtccaccccaattaactgaagcaaataccaaagcagttgggagtacatatggtagacaatttgccttaggaagtgacttgaatgtacaaagatacttgatgcacttattttttaatgtgagacagcaagtttataaaacatccatataggattatagatacttaaaggaacacgtgggtgagcgtgtgtgggggtactagaagctgatctgattggtccaacagtttgatgctgagtcatgcgtgttgaatcccacttcagtgcacctgtggcctctcagtcaaacaagttgtgcctttcacagcttctttactactgcaagttcaagactgaaatggcttctatgatcagaactgggaaaacagtgaatcttatggtggaagaggttctcagcaagtgtacagtatttaccttcctttgtcttacattggctttttaaattttccattaatttcaacataattatgggaacaagtgtacagaagaattttttttttaagatatgtgagaacttttcatagatgaactttttaacaaatgttttcatttacaggaaattgcaaagaaaattctcaagtgatagtctttttttttaagtgtttcgtaagacaaaaattgaataatgttttttgaagttctggcaagattgaagtctgatattgcagtaatgatatttattaaaaacccataactaccaggaataatgatacctcccaccccttgattcccataacataaaagtgctacttgagagtgggggagaatggcatggtaggctacttttcagggccttgacaagtacatcacccagtggtatcctacatacttctttcaagatcttcaaccatgaggtaaaagagccaagttcaaagaaccctagcacaaatttgctttgggattttcttttctggaaaaaaaaaataaaagaaatagtacattgaaaacaaatgaattctcaactcctacggttcatgtagagtttagagaaaatttccatcattgtcatcattgaactgtgaacctgggaagccagatcatgattaacactgacatcaagtttcaagttgcagatcaatgcacccagtgttcagatgaggcaaacttctccgtgacaactgtgctgtgctctgtcacattacatttcctgcagactctaagatctacggagtagagaacaatgacctcattttattttctatgttagttatttatttcaaaattaacattttagttgatttttgtctgataagtctatgttttgcactgctaactatgatgagggtttaaaaaaatgcttcttcagggtcctttcactgaggacctatgcagtctacttaatgctgtgaattacatttttcaaatgtttaattttttaaagaaaattaatattctatttttgttaggcttctctagaaatgcagcttttatttattaccccatttctttcaagtccttggaaaataacatattaagggtacaagaaattaacacatgatggaaaagtcatataagacaacctaagatactcaagataattatttaatggttagctcttaagttgaattggtctacataatgcgtgggaagaaaaccagatttttagccttcttgccaaatccagacctctggttgatttttctttgacagaagatgcaagttattttccaatttcacaattaaatgtatttaacctgaacattattttgctttaaaaactataaacattgtaggagaattatagccagtcttcagttataaccactccaccctcctcactttctctctctctctctctttttttttgctatgggatttaatgggaaaaatatgtaaaaactgtcactagtcagctggctctttttcctatgaaatctatcagtacctttctccatccgttgttctcaataatgaccacagagcctgagtataccaagaaaaccaatattcgcattacaggttgctcctgtccttccagacacctttcctgcctgtgtgactaacctaattttgctagttccataaatacacgattagtttagtaacagccatcacaatgtaccatgtacattcatggtgagagctaaagatcgacacagacttctaggagctttgttcatactgattacttaatccaattgtatagattgaatatttgagtggaaggaatttacactctgtttaaatgatgggattctatcgagatagcactcatgatcatgacctttttggtagtattcttaaacaaaattctacagagactaaatgttagcgatgatcctccattttcaattttaaccaattctgtcccctttctcaaaaccctgagccctgtgcatgctttctcagtcttgtggtgggactggatacaatgactaacttcccctcctcccctctttaaacaccattttccatggagttcaaaaaaattttttttcttaacgttacatatcatagtgaatggtttccccagtgtatatgaatgttttaagtgtctccaatagcttatgcagtctaggagctttccaatactcatttaattaagatttaatcatttgctaatggaaatcttaccacctttcattttccctctgttaccaaatttcagctcttaggagctgctctacaattctgaatttgcttttcttgcctctctttagtcacctgtcacaggaggttcctgctcagtaatgatattgtgagttaggataataactttttttttttgtgcttcagatttagaagaaaagatcctgtttccatttgaaaggaactgtaagcttttatcttttaaccaactgaacaatacaccaaaagcagcctagggatgagcatttctttgaaagcaattaggttattcacctggtattaaaactatttactgttaaaaaatctgtgacttcatgaagttgatttttaaaggcagcatcaaaaactgaaaaggaagggaaaaaataggcagcttctctgcacttgtttggagctccccaaaacaggagccatggagaagtggcatcaagaccgggctgccctttcgagaacaccctgtggcagttcagagacacgcttttcctacactgcatgcagcccctctttccagcactggaaagaagtggtcttgagcccagctgagaagcacttcacactcctctctcttgttctgaatggtgtttgtgtcagtctgcagctgtgtatggtattatgtcttataatcctgcatcacttctatcctatccagtcatatctaatgtagaaaattagtttccagtgaaagtaatatgtagtgcttttatgatatttgtgtgcaatatcccctcttccattgaggatatttgatgtaaaggaaaaaaaaaaactcagttccacaataaaatacaaaagtggcaaaagtt

SEQ ID NO: 57108 - DNA, 11690 bp, Homo sapiens
ctgaaaactggagagtgtgagagcgggaggagcccccgaccacacaaacccagcctggggaggaacctactagtggctgcaccctcttttttaatagcaccaattgtgtttcccaagatgatgtagagaatttcagtgctgtgtaccacgtcggaggcagaaattcctctgctgtcccaggagcaggcagggcagtttttatctggaaaagctaaaggtctcctcttttgtttgtgtttttgtgcctgcaggacaaaagatccttcatcaccgaagtgacgttttagaaacagtggtcctgatcaacccttctgatgaagcagtcagcaccgaggtgcgcttaatgatcactgatgctgcccgacacaagctgctcgtgctgaccgggcagtgctttgaaaataccggagagctcattctccagtccggctctttctccttccagaacttcatagagattttcaccgatcaagagatcggggagttactaagcaccacccatcctgccaacaaagccagcttaaccctgttctgtcctgaagaaggggactggaagaactccaatcttgacagacacaatctccaagacttcatcaatattaaactcaattcagcttctatcttgccagaaatggaaggactttctgagtttaccgagtatctctcagaatcagtggaagtcccatctccctttgacatcttggaacctcccacatcgggtggatttctgaagctctccaagccctgctgttatatttttccaggagggaggggcgattctgccttgtttgcagtgaatggtttcaatatgctcatcaatggcggatcagagagaaaatcctgcttctggaagctcatccgacacttagaccgagtggactccatcctgctcacccacattggggatgacaatttgcctggaataaacagcatgttacagcggaaaattgcagagctcgaggaagaacagtcccagggctccaccacaaatagtgactggatgaaaaacctcatctcccctgacttaggagttgtatttctcaatgtacctgaaaatctcaaaaatccagagccaaacatcaagatgaagagaagcatagaagaagcctgcttcactctccagtacctaaacaaattgtccatgaaaccagaacctctgtttagaagtgtaggcaatactattgatcctgtcattcttttccaaaaaatgggagtaggtaaacttgagatgtatgtgcttaatccagtcaagagcagcaaggaaatgcagtattttatgcagcagtggactggtaccaacaaagacaaggctgaattcattctgcctaatggtcaagaagtagatctcccgatttcctacttaacttcagtctcatctttgattgtgtggcatccagcaaaccctgcggagaaaatcatccgagtcctgtttcctgggaacagcacccagtacaacatcctggaagggttggaaaagctcaaacatctagactttctgaagcagccactggccacccaaaaggatctcactggccaggtgcccactcctgtggtgaaacaaacaaaactgaaacagagggctgatagccgagaaagtctgaagccagccgcaaaaccacttcctagcaaatccgtgcgcaaggagtcaaaagaagaaacccctgaggtcacaaaagtgaatcacgtggaaaagccacccaaagttgaaagcaaagaaaaggtaatggtgaaaaaagacaagccagtaaaaacagagaccaaaccttcagtgactgaaaaggaggttcccagcaaagaagagccatctccagtgaaagccgaggtggctgagaagcaagccacagatgtcaaacccaaagctgccaaggagaagacggtgaaaaaggaaacaaaggtaaagcctgaagacaagaaagaggagaaagaaaagccaaagaaagaagtggctaaaaaggaggacaaaacacctatcaagaaggaggaaaaaccaaaaaaggaagaggtgaaaaaagaagtcaaaaaagagatcaagaaagaagagaaaaaagaacccaagaaagaggttaagaaagaaacaccgccaaaggaagtcaagaaggaagttaagaaggaagagaagaaggaagtgaaaaaggaagaaaaggaacccaaaaaagaaattaagaagctccctaaagacgcaaagaaatcatctactcctctgtctgaagcaaaaaaaccagctgctttaaaaccaaaagtacccaagaaggaagagtctgtcaagaaagattctgttgctgccggaaagccaaaggagaaggggaaaataaaagtcattaagaaggaaggcaaggccgcagaggctgtcgctgcagctgtcggcactggagccaccacagcagctgtcatggcggcagctggaatagcagccattggccctgccaaagaactcgaagctgagaggtcccttatgtcatctcctgaggatctaaccaaggactttgaagagttaaaggctgaagaggtcgatgtaacaaaggacatcaagcctcagctggagctaatcgaagacgaagagaaactgaaggaaactgagccagtcgaagcctacgtcatccagaaggagagagaagtcaccaaaggtcctgccgagtcccctgatgagggaatcactaccactgaaggggagggcgaatgtgaacagacacctgaggagctggagcccgtcgagaagcagggagtagacgacattgaaaaatttgaagatgaaggagccggttttgaagaatcttcagagactggagactatgaagagaaggcagaaactgaggaggctgaggagccagaagaggatggggaggaacacgtatgtgtgagcgcctccaagcacagccccactgaggatgaggaaagtgccaaggcggaggctgatgcatacatcagggagaagagggagtctgtggccagtggggatgaccgagccgaagaagacatggatgaggccattgagaaaggagaggctgaacaatctgaagaggaggctgatgaggaggacaaagctgaagatgccagagaggaggaatatgagccggaaaaaatggaagctgaagactatgtgatggctgtggtcgacaaggctgcagaggctggtggtgccgaggagcagtatggattcctcaccacaccaaccaagcaactaggagcccagtctcctggccgagaacctgcatcttcaattcatgatgagactttacctggaggctcagagagcgaggccaccgcttctgatgaggagaatcgagaagaccagcctgaggaattcactgccacctctggctacactcagtctactattgagatatccagtgagcccacccccatggatgagatgtctacccctcgagacgtgatgagtgatgagaccaacaatgaagagacggagtccccttctcaggaattcgtaaatatcaccaaatatgaatcttcattgtattctcaggaatactctaaacctgctgatgttacaccgctcaacggattttctgaaggatcaaaaacagatgccactgatggcaaggattacaatgcttcagcctctaccatatcaccaccctcttccatggaggaagacaaattcagcagatctgctttacgtgatgcttactgctctgaagtgaaagccagcaccactttggacatcaaagatagcatctcagctgtttcaagtgaaaaggtcagcccatcgaagagcccgtccctgagtccatctccaccatcacccttagaaaagacccccctgggtgaacgtagtgtgaacttctctctgacgcccaatgagattaaagtctctgcagaggcagaagtagccccggtgtctcctgaggtgacccaagaagtagttgaagaacattgtgctagtcctgaggacaagactctggaagtggtgtcaccatctcagtccgtgactggcagtgctggtcacacaccttactatcaatctcctactgacgagaaatccagtcatctccctacagaagtcattgaaaaaccaccagcagttccagtgagttttgaattcagtgatgccaaagatgagaatgaaagggcttcagtaagccccatggatgagcccgtgcctgactcagagtctcctattgaaaaagttttgtctcctttacgcagcccgcccctcattggatccgagtctgcttatgaaagttttctaagtgctgatgacaaggcttctggcagaggtgccgaaagtccttttgaagaaaagagtggaaaacaaggctctccagaccaagtaagtccagtttctgaaatgacttctactagtctttaccaagacaaacaggaagggaaaagcacagactttgcaccaataaaagaagactttggccaagaaaagaaaactgatgatgttgaagccatgagttctcaaccagcactggctctggatgaaaggaaattaggagatgtttctcccacacaaatagatgtcagtcagtttggatcttttaaagaagacactaagatgtccatttctgaaggtactgtctcagacaagtcagctactcctgttgatgagggcgtagcagaagacacgtactctcatatggagggtgtggcctcagtgtccacagcctcagtggctacgagctcatttccagagccaacaacagatgatgtgtctccatctctgcatgctgaggttggctccccacattccacagaagtagatgactccctttcagtgtctgttgtgcaaacacctaccacattccaggaaacagaaatgtctccatctaaagaagaatgcccaagaccgatgtcaatttctccaccagatttctcccctaaaactgcaaagtccaggacacccgttcaagatcacagatctgaacagtcctcaatgtctattgaatttggccaagaatctcctgagcaatcccttgctatggacttcagtcgacagtctccagatcaccctacagtgggtgcaggcgtgcttcacatcactgaaaatgggccaactgaagtggactacagtccttctgacatgcaggactccagtttatcacataagataccacctatggaggagccgtcctacacccaagataatgatctttctgagctcatctcagtatctcaggtagaggcctccccgtccacctcttctgctcataccccttctcagatcgcttctcctctccaagaagatactctatccgatgttgctcctcccagagatatgtccttatatgcctcactcacctctgaaaaagtgcaaagtctggaaggagagaagctctctccaaaatctgatatctctccactcaccccacgagagtcctctcctttatattcacctactttttcagattctacctctgcagtcaaagagaaaacagcaacttgccacagttcctcttctccaccaatagatgcagcatccgcagagccctatggcttccgtgcctcagtgttattcgatacaatgcaacaccatctagccttgaatagagatttgtccacacctggcctggagaaggacagtggagggaagacacctggtgactttagctatgcctatcaaaagcctgaggaaacaaccaggtccccagatgaagaagattatgactatgagtcttatgagaagaccacccggacctcagatgtgggtggctattactatgagaagatagagagaaccacaaaatctccaagtgacagtggctactcctatgagaccattgggaaaactaccaagacccctgaagatggtgactattcctatgaaattattgagaagaccacacggacccctgaagagggtgggtactcatatgacataagtgaaaagaccaccagcccccccgaagtgagtggttacagctatgaaaagactgagaggtctagaaggcttctggatgacatcagcaatggctatgatgactctgaggatggtggccacacacttggggaccccagctactcttatgaaaccactgagaaaattaccagtttccctgagtctgaaggttattcctatgagacatctacaaagacaacacgaacccctgatacttccacatactgttacgagactgcagagaaaatcactagaacccctcaggcatccacatattcctacgagacttcagacctatgctacactgcagaaaagaagtccccctcagaagcccgtcaggatgtcgatttatgcctcgtgtcctcttgtgaatacaagcaccccaagacagagctttcaccctctttcattaatcccaatcctcttgagtggtttgccagtgaagaacccactgaagaatctgaaaagcccctcactcaatcagggggagccccaccgcctccaggaggaaagcaacagggccgacagtgtgatgaaacccctcccacctcagtcagcgagtcagccccatcccagaccgactctgatgttcccccggagactgaagagtgcccctccatcacggccgatgccaatatcgactctgaagacgagtcggaaaccatccccacagacaaaactgtcacgtacaaacacatggacccacctccagctcccgtgcaagaccgcagcccttcgccacgccaccctgatgtgtccatggtggacccagaggccttggccattgagcagaacctgggcaaagctctaaagaaagatctgaaagagaagaccaaaaccaaaaagccaggtacaaagaccaagtcatcttcacctgtcaaaaagagtgatgggaagtctaagcccttggcagcttcaccaaaaccagcgggcttgaaagaatcctcggataaagtgtccagggtggcttctcctaagaagaaagaatctgtggaaaaggcagcaaaacccaccaccactcctgaggtcaaagctgcacgtggggaagagaaagacaaggagaccaagaatgctgccaatgcctctgcatccaagtcggccaagaccgccactgcaggaccaggaactaccaagacgaccaagtcatctgctgtgcccccaggcctccctgtgtatttggacctgtgctacattcctaaccacagcaatagtaagaatgttgatgtggaatttttcaagagagtgcggtcttcctactacgtggtgagtgggaatgaccctgctgctgaggagcccagccgggctgtcctggacgctttgttggaaggaaaggctcagtggggcagcaacatgcaggtgacactgatcccaactcatgactcagaagtgatgagggaatggtaccaggagacccatgagaaacagcaagatctcaacatcatggttttagcaagcagcagcacagtggttatgcaagatgaatccttccctgcatgcaagattgaactgtaaaaaccaaggccagccacaccacaggatctgaactttgtttccagaaattcttcaatttgaaatcaccttttctaaaaagtcaattcatctagttaagtcgctgaacaattacctgccaaatgctatactgtgtcatggtgatgcaagtcactaaatttctcagtttttgctgattgctaagggaaataacagtatttccacaatagggttcaaattcctgcaaaattacctaccccagttcatctctgctgaacatttggaaaccatgcactagccaacccaactgacttctgctaggtagaggcatttgtcttagagagagagagagcgcgggagagagtgagagagagtgagagcacaaagataacgcaggagagagagagagaaagaatgagaaagaaaaggaatgcaagagaaggagatgtaatgacagagagttctggtgagatacccagagagaaaaagagagagcagggtggggtaaggaggagaaaataaaccaacaattaggtctgcattttctcaggcagtaggcattctttagtctacataggcaaagttttccatttttgtcagtctgagtcatcaaaaagagtcttaattttctaaaacaagttggctagaagaaagtaaaaagaacaacacttgttatgagggcatgtgatattttcacatcttaattaagctccttcagtttgaaggctgcacactgacataatgtagtgagtgtagactggccatgcaagtggtttgggccccattcagaactctcagactctaaacacacaagtagattgatctaaggcatgctcccagcatttgtccacccacttagtccactctgagtcgattaacctgcatgcagcaacacccaagtccaccccaattaactgaagcaaataccaaagcagttgggagtacatatggtagacaatttgccttaggaagtgacttgaatgtacaaagatacttgatgcacttattttttaatgtgagacagcaagtttataaaacatccatataggattatagatacttaaaggaacacgtgggtgagcgtgtgtgggggtactagaagctgatctgattggtccaacagtttgatgctgagtcatgcgtgttgaatcccacttcagtgcacctgtggcctctcagtcaaacaagttgtgcctttcacagcttctttactactgcaagttcaagactgaaatggcttctatgatcagaactgggaaaacagtgaatcttatggtggaagaggttctcagcaagtgtacagtatttaccttcctttgtcttacattggctttttaaattttccattaatttcaacataattatgggaacaagtgtacagaagaattttttttttaagatatgtgagaacttttcatagatgaactttttaacaaatgttttcatttacaggaaattgcaaagaaaattctcaagtgatagtctttttttttaagtgtttcgtaagacaaaaattgaataatgttttttgaagttctggcaagattgaagtctgatattgcagtaatgatatttattaaaaacccataactaccaggaataatgatacctcccaccccttgattcccataacataaaagtgctacttgagagtgggggagaatggcatggtaggctacttttcagggccttgacaagtacatcacccagtggtatcctacatacttctttcaagatcttcaaccatgaggtaaaagagccaagttcaaagaaccctagcacaaatttgctttgggattttcttttctggaaaaaaaaaataaaagaaatagtacattgaaaacaaatgaattctcaactcctacggttcatgtagagtttagagaaaatttccatcattgtcatcattgaactgtgaacctgggaagccagatcatgattaacactgacatcaagtttcaagttgcagatcaatgcacccagtgttcagatgaggcaaacttctccgtgacaactgtgctgtgctctgtcacattacatttcctgcagactctaagatctacggagtagagaacaatgacctcattttattttctatgttagttatttatttcaaaattaacattttagttgatttttgtctgataagtctatgttttgcactgctaactatgatgagggtttaaaaaaatgcttcttcagggtcctttcactgaggacctatgcagtctacttaatgctgtgaattacatttttcaaatgtttaattttttaaagaaaattaatattctatttttgttaggcttctctagaaatgcagcttttatttattaccccatttctttcaagtccttggaaaataacatattaagggtacaagaaattaacacatgatggaaaagtcattgtgacgccaatgaatttcattgagtataaactcatctacttcaaatttattttataagacaacctaagatactcaagataattatttaatggttagctcttaagttgaattggtctacataatgcgtgggaagaaaaccagatttttagccttcttgccaaatccagacctctggttgatttttctttgacagaagatgcaagttattttccaatttcacaattaaatgtatttaacctgaacattattttgctttaaaaactataaacattgtaggagaattatagccagtcttcagttataaccactccaccctcctcactttctctctctctctctctttttttttgctatgggatttaatgggaaaaatatgtaaaaactgtcactagtcagctggctctttttcctatgaaatctatcagtacctttctccatccgttgttctcaataatgaccacagagcctgagtataccaagaaaaccaatattcgcattacaggttgctcctgtccttccagacacctttcctgcctgtgtgactaacctaattttgctagttccataaatacacgattagtttagtaacagccatcacaatgtaccatgtacattcatggtgagagctaaagatcgacacagacttctaggagctttgttcatactgattacttaatccaattgtatagattgaatatttgagtggaaggaatttacactctgtttaaatgatgggattctatcgagatagcactcatgatcatgacctttttggtagtattcttaaacaaaattctacagagactaaatgttagcgatgatcctccattttcaattttaaccaattctgtcccctttctcaaaaccctgagccctgtgcatgctttctcagtcttgtggtgggactggatacaatgactaacttcccctcctcccctctttaaacaccattttccatggagttcaaaaaaattttttttcttaacgttacatatcatagtgaatggtttccccagtgtatatgaatgttttaagtgtctccaatagcttatgcagtctaggagctttccaatactcatttaattaagatttaatcatttgctaatggaaatcttaccacctttcattttccctctgttaccaaatttcagctcttaggagctgctctacaattctgaatttgcttttcttgcctctctttagtcacctgtcacaggaggttcctgctcagtaatgatattgtgagttaggataataactttttttttttgtgcttcagatttagaagaaaagatcctgtttccatttgaaaggaactgtaagcttttatcttttaaccaactgaacaatacaccaaaagcagcctagggatgagcatttctttgaaagcaattaggttattcacctggtattaaaactatttactgttaaaaaatctgtgacttcatgaagttgatttttaaaggcagcatcaaaaactgaaaaggaagggaaaaaataggcagcttctctgcacttgtttggagctccccaaaacaggagccatggagaagtggcatcaagaccgggctgccctttcgagaacaccctgtggcagttcagagacacgcttttcctacactgcatgcagcccctctttccagcactggaaagaagtggtcttgagcccagctgagaagcacttcacactcctctctcttgttctgaatggtgtttgtgtcagtctgcagctgtgtatggtattatgtcttataatcctgcatcacttctatcctatccagtcatatctaatgtagaaaattagtttccagtgaaagtaatatgtagtgcttttatgatatttgtgtgcaatatcccctcttccattgaggatatttgatgtaaaggaaaaaaaaaaactcagttccacaataaaatacaaaagtggcaaaagtt

SEQ ID NO: 57109 - DNA, 11747 bp, Homo sapiens
aaagaatgagctcggtaccagcaggggtggcgtggtggtggaagccaccgagccggagccgtccggcagcatcgccaacccggcggcgtccacctcgcctagcctgtcgcaccgcttccttgacagcaagttctacttgctggtggtcgtcggcgagatcgtgaccgaggagcacctgcggcgtgccatcggcaacatcgagctcggaatccgatcatgggacacaaacctgattgaatgcaacttggaccaagaactcaaactttttgtatctcgacactctgcaagattctctcctgaagtcccaggacaaaagatccttcatcaccgaagtgacgttttagaaacagtggtcctgatcaacccttctgatgaagcagtcagcaccgaggtgcgcttaatgatcactgatgctgcccgacacaagctgctcgtgctgaccgggcagtgctttgaaaataccggagagctcattctccagtccggctctttctccttccagaacttcatagagattttcaccgatcaagagatcggggagttactaagcaccacccatcctgccaacaaagccagcttaaccctgttctgtcctgaagaaggggactggaagaactccaatcttgacagacacaatctccaagacttcatcaatattaaactcaattcagcttctatcttgccagaaatggaaggactttctgagtttaccgagtatctctcagaatcagtggaagtcccatctccctttgacatcttggaacctcccacatcgggtggatttctgaagctctccaagccctgctgttatatttttccaggagggaggggcgattctgccttgtttgcagtgaatggtttcaatatgctcatcaatggcggatcagagagaaaatcctgcttctggaagctcatccgacacttagaccgagtggactccatcctgctcacccacattggggatgacaatttgcctggaataaacagcatgttacagcggaaaattgcagagctcgaggaagaacagtcccagggctccaccacaaatagtgactggatgaaaaacctcatctcccctgacttaggagttgtatttctcaatgtacctgaaaatctcaaaaatccagagccaaacatcaagatgaagagaagcatagaagaagcctgcttcactctccagtacctaaacaaattgtccatgaaaccagaacctctgtttagaagtgtaggcaatactattgatcctgtcattcttttccaaaaaatgggagtaggtaaacttgagatgtatgtgcttaatccagtcaagagcagcaaggaaatgcagtattttatgcagcagtggactggtaccaacaaagacaaggctgaattcattctgcctaatggtcaagaagtagatctcccgatttcctacttaacttcagtctcatctttgattgtgtggcatccagcaaaccctgcggagaaaatcatccgagtcctgtttcctgggaacagcacccagtacaacatcctggaagggttggaaaagctcaaacatctagactttctgaagcagccactggccacccaaaaggatctcactggccaggtgcccactcctgtggtgaaacaaacaaaactgaaacagagggctgatagccgagaaagtctgaagccagccgcaaaaccacttcctagcaaatccgtgcgcaaggagtcaaaagaagaaacccctgaggtcacaaaagtgaatcacgtggaaaagccacccaaagttgaaagcaaagaaaaggtaatggtgaaaaaagacaagccagtaaaaacagagaccaaaccttcagtgactgaaaaggaggttcccagcaaagaagagccatctccagtgaaagccgaggtggctgagaagcaagccacagatgtcaaacccaaagctgccaaggagaagacggtgaaaaaggaaacaaaggtaaagcctgaagacaagaaagaggagaaagaaaagccaaagaaagaagtggctaaaaaggaggacaaaacacctatcaagaaggaggaaaaaccaaaaaaggaagaggtgaaaaaagaagtcaaaaaagagatcaagaaagaagagaaaaaagaacccaagaaagaggttaagaaagaaacaccgccaaaggaagtcaagaaggaagttaagaaggaagagaagaaggaagtgaaaaaggaagaaaaggaacccaaaaaagaaattaagaagctccctaaagacgcaaagaaatcatctactcctctgtctgaagcaaaaaaaccagctgctttaaaaccaaaagtacccaagaaggaagagtctgtcaagaaagattctgttgctgccggaaagccaaaggagaaggggaaaataaaagtcattaagaaggaaggcaaggccgcagaggctgtcgctgcagctgtcggcactggagccaccacagcagctgtcatggcggcagctggaatagcagccattggccctgccaaagaactcgaagctgagaggtcccttatgtcatctcctgaggatctaaccaaggactttgaagagttaaaggctgaagaggtcgatgtaacaaaggacatcaagcctcagctggagctaatcgaagacgaagagaaactgaaggaaactgagccagtcgaagcctacgtcatccagaaggagagagaagtcaccaaaggtcctgccgagtcccctgatgagggaatcactaccactgaaggggagggcgaatgtgaacagacacctgaggagctggagcccgtcgagaagcagggagtagacgacattgaaaaatttgaagatgaaggagccggttttgaagaatcttcagagactggagactatgaagagaaggcagaaactgaggaggctgaggagccagaagaggatggggaggaacacgtatgtgtgagcgcctccaagcacagccccactgaggatgaggaaagtgccaaggcggaggctgatgcatacatcagggagaagagggagtctgtggccagtggggatgaccgagccgaagaagacatggatgaggccattgagaaaggagaggctgaacaatctgaagaggaggctgatgaggaggacaaagctgaagatgccagagaggaggaatatgagccggaaaaaatggaagctgaagactatgtgatggctgtggtcgacaaggctgcagaggctggtggtgccgaggagcagtatggattcctcaccacaccaaccaagcaactaggagcccagtctcctggccgagaacctgcatcttcaattcatgatgagactttacctggaggctcagagagcgaggccaccgcttctgatgaggagaatcgagaagaccagcctgaggaattcactgccacctctggctacactcagtctactattgagatatccagtgagcccacccccatggatgagatgtctacccctcgagacgtgatgagtgatgagaccaacaatgaagagacggagtccccttctcaggaattcgtaaatatcaccaaatatgaatcttcattgtattctcaggaatactctaaacctgctgatgttacaccgctcaacggattttctgaaggatcaaaaacagatgccactgatggcaaggattacaatgcttcagcctctaccatatcaccaccctcttccatggaggaagacaaattcagcagatctgctttacgtgatgcttactgctctgaagtgaaagccagcaccactttggacatcaaagatagcatctcagctgtttcaagtgaaaaggtcagcccatcgaagagcccgtccctgagtccatctccaccatcacccttagaaaagacccccctgggtgaacgtagtgtgaacttctctctgacgcccaatgagattaaagtctctgcagaggcagaagtagccccggtgtctcctgaggtgacccaagaagtagttgaagaacattgtgctagtcctgaggacaagactctggaagtggtgtcaccatctcagtccgtgactggcagtgctggtcacacaccttactatcaatctcctactgacgagaaatccagtcatctccctacagaagtcattgaaaaaccaccagcagttccagtgagttttgaattcagtgatgccaaagatgagaatgaaagggcttcagtaagccccatggatgagcccgtgcctgactcagagtctcctattgaaaaagttttgtctcctttacgcagcccgcccctcattggatccgagtctgcttatgaaagttttctaagtgctgatgacaaggcttctggcagaggtgccgaaagtccttttgaagaaaagagtggaaaacaaggctctccagaccaagtaagtccagtttctgaaatgacttctactagtctttaccaagacaaacaggaagggaaaagcacagactttgcaccaataaaagaagactttggccaagaaaagaaaactgatgatgttgaagccatgagttctcaaccagcactggctctggatgaaaggaaattaggagatgtttctcccacacaaatagatgtcagtcagtttggatcttttaaagaagacactaagatgtccatttctgaaggtactgtctcagacaagtcagctactcctgttgatgagggcgtagcagaagacacgtactctcatatggagggtgtggcctcagtgtccacagcctcagtggctacgagctcatttccagagccaacaacagatgatgtgtctccatctctgcatgctgaggttggctccccacattccacagaagtagatgactccctttcagtgtctgttgtgcaaacacctaccacattccaggaaacagaaatgtctccatctaaagaagaatgcccaagaccgatgtcaatttctccaccagatttctcccctaaaactgcaaagtccaggacacccgttcaagatcacagatctgaacagtcctcaatgtctattgaatttggccaagaatctcctgagcaatcccttgctatggacttcagtcgacagtctccagatcaccctacagtgggtgcaggcgtgcttcacatcactgaaaatgggccaactgaagtggactacagtccttctgacatgcaggactccagtttatcacataagataccacctatggaggagccgtcctacacccaagataatgatctttctgagctcatctcagtatctcaggtagaggcctccccgtccacctcttctgctcataccccttctcagatcgcttctcctctccaagaagatactctatccgatgttgctcctcccagagatatgtccttatatgcctcactcacctctgaaaaagtgcaaagtctggaaggagagaagctctctccaaaatctgatatctctccactcaccccacgagagtcctctcctttatattcacctactttttcagattctacctctgcagtcaaagagaaaacagcaacttgccacagttcctcttctccaccaatagatgcagcatccgcagagccctatggcttccgtgcctcagtgttattcgatacaatgcaacaccatctagccttgaatagagatttgtccacacctggcctggagaaggacagtggagggaagacacctggtgactttagctatgcctatcaaaagcctgaggaaacaaccaggtccccagatgaagaagattatgactatgagtcttatgagaagaccacccggacctcagatgtgggtggctattactatgagaagatagagagaaccacaaaatctccaagtgacagtggctactcctatgagaccattgggaaaactaccaagacccctgaagatggtgactattcctatgaaattattgagaagaccacacggacccctgaagagggtgggtactcatatgacataagtgaaaagaccaccagcccccccgaagtgagtggttacagctatgaaaagactgagaggtctagaaggcttctggatgacatcagcaatggctatgatgactctgaggatggtggccacacacttggggaccccagctactcttatgaaaccactgagaaaattaccagtttccctgagtctgaaggttattcctatgagacatctacaaagacaacacgaacccctgatacttccacatactgttacgagactgcagagaaaatcactagaacccctcaggcatccacatattcctacgagacttcagacctatgctacactgcagaaaagaagtccccctcagaagcccgtcaggatgtcgatttatgcctcgtgtcctcttgtgaatacaagcaccccaagacagagctttcaccctctttcattaatcccaatcctcttgagtggtttgccagtgaagaacccactgaagaatctgaaaagcccctcactcaatcagggggagccccaccgcctccaggaggaaagcaacagggccgacagtgtgatgaaacccctcccacctcagtcagcgagtcagccccatcccagaccgactctgatgttcccccggagactgaagagtgcccctccatcacggccgatgccaatatcgactctgaagacgagtcggaaaccatccccacagacaaaactgtcacgtacaaacacatggacccacctccagctcccgtgcaagaccgcagcccttcgccacgccaccctgatgtgtccatggtggacccagaggccttggccattgagcagaacctgggcaaagctctaaagaaagatctgaaagagaagaccaaaaccaaaaagccaggtacaaagaccaagtcatcttcacctgtcaaaaagagtgatgggaagtctaagcccttggcagcttcaccaaaaccagcgggcttgaaagaatcctcggataaagtgtccagggtggcttctcctaagaagaaagaatctgtggaaaaggcagcaaaacccaccaccactcctgaggtcaaagctgcacgtggggaagagaaagacaaggagaccaagaatgctgccaatgcctctgcatccaagtcggccaagaccgccactgcaggaccaggaactaccaagacgaccaagtcatctgctgtgcccccaggcctccctgtgtatttggacctgtgctacattcctaaccacagcaatagtaagaatgttgatgtggaatttttcaagagagtgcggtcttcctactacgtggtgagtgggaatgaccctgctgctgaggagcccagccgggctgtcctggacgctttgttggaaggaaaggctcagtggggcagcaacatgcaggtgacactgatcccaactcatgactcagaagtgatgagggaatggtaccaggagacccatgagaaacagcaagatctcaacatcatggttttagcaagcagcagcacagtggttatgcaagatgaatccttccctgcatgcaagattgaactgtaaaaaccaaggccagccacaccacaggatctgaactttgtttccagaaattcttcaatttgaaatcaccttttctaaaaagtcaattcatctagttaagtcgctgaacaattacctgccaaatgctatactgtgtcatggtgatgcaagtcactaaatttctcagtttttgctgattgctaagggaaataacagtatttccacaatagggttcaaattcctgcaaaattacctaccccagttcatctctgctgaacatttggaaaccatgcactagccaacccaactgacttctgctaggtagaggcatttgtcttagagagagagagagcgcgggagagagtgagagagagtgagagcacaaagataacgcaggagagagagagagaaagaatgagaaagaaaaggaatgcaagagaaggagatgtaatgacagagagttctggtgagatacccagagagaaaaagagagagcagggtggggtaaggaggagaaaataaaccaacaattaggtctgcattttctcaggcagtaggcattctttagtctacataggcaaagttttccatttttgtcagtctgagtcatcaaaaagagtcttaattttctaaaacaagttggctagaagaaagtaaaaagaacaacacttgttatgagggcatgtgatattttcacatcttaattaagctccttcagtttgaaggctgcacactgacataatgtagtgagtgtagactggccatgcaagtggtttgggccccattcagaactctcagactctaaacacacaagtagattgatctaaggcatgctcccagcatttgtccacccacttagtccactctgagtcgattaacctgcatgcagcaacacccaagtccaccccaattaactgaagcaaataccaaagcagttgggagtacatatggtagacaatttgccttaggaagtgacttgaatgtacaaagatacttgatgcacttattttttaatgtgagacagcaagtttataaaacatccatataggattatagatacttaaaggaacacgtgggtgagcgtgtgtgggggtactagaagctgatctgattggtccaacagtttgatgctgagtcatgcgtgttgaatcccacttcagtgcacctgtggcctctcagtcaaacaagttgtgcctttcacagcttctttactactgcaagttcaagactgaaatggcttctatgatcagaactgggaaaacagtgaatcttatggtggaagaggttctcagcaagtgtacagtatttaccttcctttgtcttacattggctttttaaattttccattaatttcaacataattatgggaacaagtgtacagaagaattttttttttaagatatgtgagaacttttcatagatgaactttttaacaaatgttttcatttacaggaaattgcaaagaaaattctcaagtgatagtctttttttttaagtgtttcgtaagacaaaaattgaataatgttttttgaagttctggcaagattgaagtctgatattgcagtaatgatatttattaaaaacccataactaccaggaataatgatacctcccaccccttgattcccataacataaaagtgctacttgagagtgggggagaatggcatggtaggctacttttcagggccttgacaagtacatcacccagtggtatcctacatacttctttcaagatcttcaaccatgaggtaaaagagccaagttcaaagaaccctagcacaaatttgctttgggattttcttttctggaaaaaaaaaataaaagaaatagtacattgaaaacaaatgaattctcaactcctacggttcatgtagagtttagagaaaatttccatcattgtcatcattgaactgtgaacctgggaagccagatcatgattaacactgacatcaagtttcaagttgcagatcaatgcacccagtgttcagatgaggcaaacttctccgtgacaactgtgctgtgctctgtcacattacatttcctgcagactctaagatctacggagtagagaacaatgacctcattttattttctatgttagttatttatttcaaaattaacattttagttgatttttgtctgataagtctatgttttgcactgctaactatgatgagggtttaaaaaaatgcttcttcagggtcctttcactgaggacctatgcagtctacttaatgctgtgaattacatttttcaaatgtttaattttttaaagaaaattaatattctatttttgttaggcttctctagaaatgcagcttttatttattaccccatttctttcaagtccttggaaaataacatattaagggtacaagaaattaacacatgatggaaaagtcattgtgacgccaatgaatttcattgagtataaactcatctacttcaaatttattttataagacaacctaagatactcaagataattatttaatggttagctcttaagttgaattggtctacataatgcgtgggaagaaaaccagatttttagccttcttgccaaatccagacctctggttgatttttctttgacagaagatgcaagttattttccaatttcacaattaaatgtatttaacctgaacattattttgctttaaaaactataaacattgtaggagaattatagccagtcttcagttataaccactccaccctcctcactttctctctctctctctctttttttttgctatgggatttaatgggaaaaatatgtaaaaactgtcactagtcagctggctctttttcctatgaaatctatcagtacctttctccatccgttgttctcaataatgaccacagagcctgagtataccaagaaaaccaatattcgcattacaggttgctcctgtccttccagacacctttcctgcctgtgtgactaacctaattttgctagttccataaatacacgattagtttagtaacagccatcacaatgtaccatgtacattcatggtgagagctaaagatcgacacagacttctaggagctttgttcatactgattacttaatccaattgtatagattgaatatttgagtggaaggaatttacactctgtttaaatgatgggattctatcgagatagcactcatgatcatgacctttttggtagtattcttaaacaaaattctacagagactaaatgttagcgatgatcctccattttcaattttaaccaattctgtcccctttctcaaaaccctgagccctgtgcatgctttctcagtcttgtggtgggactggatacaatgactaacttcccctcctcccctctttaaacaccattttccatggagttcaaaaaaattttttttcttaacgttacatatcatagtgaatggtttccccagtgtatatgaatgttttaagtgtctccaatagcttatgcagtctaggagctttccaatactcatttaattaagatttaatcatttgctaatggaaatcttaccacctttcattttccctctgttaccaaatttcagctcttaggagctgctctacaattctgaatttgcttttcttgcctctctttagtcacctgtcacaggaggttcctgctcagtaatgatattgtgagttaggataataactttttttttttgtgcttcagatttagaagaaaagatcctgtttccatttgaaaggaactgtaagcttttatcttttaaccaactgaacaatacaccaaaagcagcctagggatgagcatttctttgaaagcaattaggttattcacctggtattaaaactatttactgttaaaaaatctgtgacttcatgaagttgatttttaaaggcagcatcaaaaactgaaaaggaagggaaaaaataggcagcttctctgcacttgtttggagctccccaaaacaggagccatggagaagtggcatcaagaccgggctgccctttcgagaacaccctgtggcagttcagagacacgcttttcctacactgcatgcagcccctctttccagcactggaaagaagtggtcttgagcccagctgagaagcacttcacactcctctctcttgttctgaatggtgtttgtgtcagtctgcagctgtgtatggtattatgtcttataatcctgcatcacttctatcctatccagtcatatctaatgtagaaaattagtttccagtgaaagtaatatgtagtgcttttatgatatttgtgtgcaatatcccctcttccattgaggatatttgatgtaaaggaaaaaaaaaaactcagttccacaataaaatacaaaagtggcaaaagtt

SEQ ID NO: 57110 - DNA, 11691 bp, Homo sapiens
tgcctagtctccatataaaagcggcgccgcctccccgccctctctcactccccgctcctctccgccgcgcactctccgcggcgctgggagagggcggagggggaggcggcgcgcggcgccagaggaggggggacgcagggggcggagcggagacagtaccttcggagataatcctttctcctgccgcagaggagaggagcggccggagcgagacacttcgccgaggcacagcagccggcaggatggcgaccgtggtggtggaagccaccgagccggagccgtccggcagcatcgccaacccggcggcgtccacctcgcctagcctgtcgcaccgcttccttgacagcaagttctacttgctggtggtcgtcggcgagatcgtgaccgaggagcacctgcggcgtgccatcggcaacatcgagctcggaatccgatcatgggacacaaacctgattgaatgcaacttggaccaagaactcaaactttttgtatctcgacactctgcaagattctctcctgaagtcccaggacaaaagatccttcatcaccgaagtgacgttttagaaacagtggtcctgatcaacccttctgatgaagcagtcagcaccgaggtgcgcttaatgatcactgatgctgcccgacacaagctgctcgtgctgaccgggcagtgctttgaaaataccggagagctcattctccagtccggctctttctccttccagaacttcatagagattttcaccgatcaagagatcggggagttactaagcaccacccatcctgccaacaaagccagcttaaccctgttctgtcctgaagaaggggactggaagaactccaatcttgacagacacaatctccaagacttcatcaatattaaactcaattcagcttctatcttgccagaaatggaaggactttctgagtttaccgagtatctctcagaatcagtggaagtcccatctccctttgacatcttggaacctcccacatcgggtggatttctgaagctctccaagccctgctgttatatttttccaggagggaggggcgattctgccttgtttgcagtgaatggtttcaatatgctcatcaatggcggatcagagagaaaatcctgcttctggaagctcatccgacacttagaccgagtggactccatcctgctcacccacattggggatgacaatttgcctggaataaacagcatgttacagcggaaaattgcagagctcgaggaagaacagtcccagggctccaccacaaatagtgactggatgaaaaacctcatctcccctgacttaggagttgtatttctcaatgtacctgaaaatctcaaaaatccagagccaaacatcaagatgaagagaagcatagaagaagcctgcttcactctccagtacctaaacaaattgtccatgaaaccagaacctctgtttagaagtgtaggcaatactattgatcctgtcattcttttccaaaaaatgggagtaggtaaacttgagatgtatgtgcttaatccagtcaagagcagcaaggaaatgcagtattttatgcagcagtggactggtaccaacaaagacaaggctgaattcattctgcctaatggtcaagaagtagatctcccgatttcctacttaacttcagtctcatctttgattgtgtggcatccagcaaaccctgcggagaaaatcatccgagtcctgtttcctgggaacagcacccagtacaacatcctggaagggttggaaaagctcaaacatctagactttctgaagcagccactggccacccaaaaggatctcactggccaggtgcccactcctgtggtgaaacaaacaaaactgaaacagagggctgatagccgagaaagtctgaagccagccgcaaaaccacttcctagcaaatccgtgcgcaaggagtcaaaagaagaaacccctgaggtcacaaaagtgaatcacgtggaaaagccacccaaagttgaaaaaccaaaaaaggaagaggtgaaaaaagaagtcaaaaaagagatcaagaaagaagagaaaaaagaacccaagaaagaggttaagaaagaaacaccgccaaaggaagtcaagaaggaagttaagaaggaagagaagaaggaagtgaaaaaggaagaaaaggaacccaaaaaagaaattaagaagctccctaaagacgcaaagaaatcatctactcctctgtctgaagcaaaaaaaccagctgctttaaaaccaaaagtacccaagaaggaagagtctgtcaagaaagattctgttgctgccggaaagccaaaggagaaggggaaaataaaagtcattaagaaggaaggcaaggccgcagaggctgtcgctgcagctgtcggcactggagccaccacagcagctgtcatggcggcagctggaatagcagccattggccctgccaaagaactcgaagctgagaggtcccttatgtcatctcctgaggatctaaccaaggactttgaagagttaaaggctgaagaggtcgatgtaacaaaggacatcaagcctcagctggagctaatcgaagacgaagagaaactgaaggaaactgagccagtcgaagcctacgtcatccagaaggagagagaagtcaccaaaggtcctgccgagtcccctgatgagggaatcactaccactgaaggggagggcgaatgtgaacagacacctgaggagctggagcccgtcgagaagcagggagtagacgacattgaaaaatttgaagatgaaggagccggttttgaagaatcttcagagactggagactatgaagagaaggcagaaactgaggaggctgaggagccagaagaggatggggaggaacacgtatgtgtgagcgcctccaagcacagccccactgaggatgaggaaagtgccaaggcggaggctgatgcatacatcagggagaagagggagtctgtggccagtggggatgaccgagccgaagaagacatggatgaggccattgagaaaggagaggctgaacaatctgaagaggaggctgatgaggaggacaaagctgaagatgccagagaggaggaatatgagccggaaaaaatggaagctgaagactatgtgatggctgtggtcgacaaggctgcagaggctggtggtgccgaggagcagtatggattcctcaccacaccaaccaagcaactaggagcccagtctcctggccgagaacctgcatcttcaattcatgatgagactttacctggaggctcagagagcgaggccaccgcttctgatgaggagaatcgagaagaccagcctgaggaattcactgccacctctggctacactcagtctactattgagatatccagtgagcccacccccatggatgagatgtctacccctcgagacgtgatgagtgatgagaccaacaatgaagagacggagtccccttctcaggaattcgtaaatatcaccaaatatgaatcttcattgtattctcaggaatactctaaacctgctgatgttacaccgctcaacggattttctgaaggatcaaaaacagatgccactgatggcaaggattacaatgcttcagcctctaccatatcaccaccctcttccatggaggaagacaaattcagcagatctgctttacgtgatgcttactgctctgaagtgaaagccagcaccactttggacatcaaagatagcatctcagctgtttcaagtgaaaaggtcagcccatcgaagagcccgtccctgagtccatctccaccatcacccttagaaaagacccccctgggtgaacgtagtgtgaacttctctctgacgcccaatgagattaaagtctctgcagaggcagaagtagccccggtgtctcctgaggtgacccaagaagtagttgaagaacattgtgctagtcctgaggacaagactctggaagtggtgtcaccatctcagtccgtgactggcagtgctggtcacacaccttactatcaatctcctactgacgagaaatccagtcatctccctacagaagtcattgaaaaaccaccagcagttccagtgagttttgaattcagtgatgccaaagatgagaatgaaagggcttcagtaagccccatggatgagcccgtgcctgactcagagtctcctattgaaaaagttttgtctcctttacgcagcccgcccctcattggatccgagtctgcttatgaaagttttctaagtgctgatgacaaggcttctggcagaggtgccgaaagtccttttgaagaaaagagtggaaaacaaggctctccagaccaagtaagtccagtttctgaaatgacttctactagtctttaccaagacaaacaggaagggaaaagcacagactttgcaccaataaaagaagactttggccaagaaaagaaaactgatgatgttgaagccatgagttctcaaccagcactggctctggatgaaaggaaattaggagatgtttctcccacacaaatagatgtcagtcagtttggatcttttaaagaagacactaagatgtccatttctgaaggtactgtctcagacaagtcagctactcctgttgatgagggcgtagcagaagacacgtactctcatatggagggtgtggcctcagtgtccacagcctcagtggctacgagctcatttccagagccaacaacagatgatgtgtctccatctctgcatgctgaggttggctccccacattccacagaagtagatgactccctttcagtgtctgttgtgcaaacacctaccacattccaggaaacagaaatgtctccatctaaagaagaatgcccaagaccgatgtcaatttctccaccagatttctcccctaaaactgcaaagtccaggacacccgttcaagatcacagatctgaacagtcctcaatgtctattgaatttggccaagaatctcctgagcaatcccttgctatggacttcagtcgacagtctccagatcaccctacagtgggtgcaggcgtgcttcacatcactgaaaatgggccaactgaagtggactacagtccttctgacatgcaggactccagtttatcacataagataccacctatggaggagccgtcctacacccaagataatgatctttctgagctcatctcagtatctcaggtagaggcctccccgtccacctcttctgctcataccccttctcagatcgcttctcctctccaagaagatactctatccgatgttgctcctcccagagatatgtccttatatgcctcactcacctctgaaaaagtgcaaagtctggaaggagagaagctctctccaaaatctgatatctctccactcaccccacgagagtcctctcctttatattcacctactttttcagattctacctctgcagtcaaagagaaaacagcaacttgccacagttcctcttctccaccaatagatgcagcatccgcagagccctatggcttccgtgcctcagtgttattcgatacaatgcaacaccatctagccttgaatagagatttgtccacacctggcctggagaaggacagtggagggaagacacctggtgactttagctatgcctatcaaaagcctgaggaaacaaccaggtccccagatgaagaagattatgactatgagtcttatgagaagaccacccggacctcagatgtgggtggctattactatgagaagatagagagaaccacaaaatctccaagtgacagtggctactcctatgagaccattgggaaaactaccaagacccctgaagatggtgactattcctatgaaattattgagaagaccacacggacccctgaagagggtgggtactcatatgacataagtgaaaagaccaccagcccccccgaagtgagtggttacagctatgaaaagactgagaggtctagaaggcttctggatgacatcagcaatggctatgatgactctgaggatggtggccacacacttggggaccccagctactcttatgaaaccactgagaaaattaccagtttccctgagtctgaaggttattcctatgagacatctacaaagacaacacgaacccctgatacttccacatactgttacgagactgcagagaaaatcactagaacccctcaggcatccacatattcctacgagacttcagacctatgctacactgcagaaaagaagtccccctcagaagcccgtcaggatgtcgatttatgcctcgtgtcctcttgtgaatacaagcaccccaagacagagctttcaccctctttcattaatcccaatcctcttgagtggtttgccagtgaagaacccactgaagaatctgaaaagcccctcactcaatcagggggagccccaccgcctccaggaggaaagcaacagggccgacagtgtgatgaaacccctcccacctcagtcagcgagtcagccccatcccagaccgactctgatgttcccccggagactgaagagtgcccctccatcacggccgatgccaatatcgactctgaagacgagtcggaaaccatccccacagacaaaactgtcacgtacaaacacatggacccacctccagctcccgtgcaagaccgcagcccttcgccacgccaccctgatgtgtccatggtggacccagaggccttggccattgagcagaacctgggcaaagctctaaagaaagatctgaaagagaagaccaaaaccaaaaagccaggtacaaagaccaagtcatcttcacctgtcaaaaagagtgatgggaagtctaagcccttggcagcttcaccaaaaccagcgggcttgaaagaatcctcggataaagtgtccagggtggcttctcctaagaagaaagaatctgtggaaaaggcagcaaaacccaccaccactcctgaggtcaaagctgcacgtggggaagagaaagacaaggagaccaagaatgctgccaatgcctctgcatccaagtcggccaagaccgccactgcaggaccaggaactaccaagacgaccaagtcatctgctgtgcccccaggcctccctgtgtatttggacctgtgctacattcctaaccacagcaatagtaagaatgttgatgtggaatttttcaagagagtgcggtcttcctactacgtggtgagtgggaatgaccctgctgctgaggagcccagccgggctgtcctggacgctttgttggaaggaaaggctcagtggggcagcaacatgcaggtgacactgatcccaactcatgactcagaagtgatgagggaatggtaccaggagacccatgagaaacagcaagatctcaacatcatggttttagcaagcagcagcacagtggttatgcaagatgaatccttccctgcatgcaagattgaactgtaaaaaccaaggccagccacaccacaggatctgaactttgtttccagaaattcttcaatttgaaatcaccttttctaaaaagtcaattcatctagttaagtcgctgaacaattacctgccaaatgctatactgtgtcatggtgatgcaagtcactaaatttctcagtttttgctgattgctaagggaaataacagtatttccacaatagggttcaaattcctgcaaaattacctaccccagttcatctctgctgaacatttggaaaccatgcactagccaacccaactgacttctgctaggtagaggcatttgtcttagagagagagagagcgcgggagagagtgagagagagtgagagcacaaagataacgcaggagagagagagagaaagaatgagaaagaaaaggaatgcaagagaaggagatgtaatgacagagagttctggtgagatacccagagagaaaaagagagagcagggtggggtaaggaggagaaaataaaccaacaattaggtctgcattttctcaggcagtaggcattctttagtctacataggcaaagttttccatttttgtcagtctgagtcatcaaaaagagtcttaattttctaaaacaagttggctagaagaaagtaaaaagaacaacacttgttatgagggcatgtgatattttcacatcttaattaagctccttcagtttgaaggctgcacactgacataatgtagtgagtgtagactggccatgcaagtggtttgggccccattcagaactctcagactctaaacacacaagtagattgatctaaggcatgctcccagcatttgtccacccacttagtccactctgagtcgattaacctgcatgcagcaacacccaagtccaccccaattaactgaagcaaataccaaagcagttgggagtacatatggtagacaatttgccttaggaagtgacttgaatgtacaaagatacttgatgcacttattttttaatgtgagacagcaagtttataaaacatccatataggattatagatacttaaaggaacacgtgggtgagcgtgtgtgggggtactagaagctgatctgattggtccaacagtttgatgctgagtcatgcgtgttgaatcccacttcagtgcacctgtggcctctcagtcaaacaagttgtgcctttcacagcttctttactactgcaagttcaagactgaaatggcttctatgatcagaactgggaaaacagtgaatcttatggtggaagaggttctcagcaagtgtacagtatttaccttcctttgtcttacattggctttttaaattttccattaatttcaacataattatgggaacaagtgtacagaagaattttttttttaagatatgtgagaacttttcatagatgaactttttaacaaatgttttcatttacaggaaattgcaaagaaaattctcaagtgatagtctttttttttaagtgtttcgtaagacaaaaattgaataatgttttttgaagttctggcaagattgaagtctgatattgcagtaatgatatttattaaaaacccataactaccaggaataatgatacctcccaccccttgattcccataacataaaagtgctacttgagagtgggggagaatggcatggtaggctacttttcagggccttgacaagtacatcacccagtggtatcctacatacttctttcaagatcttcaaccatgaggtaaaagagccaagttcaaagaaccctagcacaaatttgctttgggattttcttttctggaaaaaaaaaataaaagaaatagtacattgaaaacaaatgaattctcaactcctacggttcatgtagagtttagagaaaatttccatcattgtcatcattgaactgtgaacctgggaagccagatcatgattaacactgacatcaagtttcaagttgcagatcaatgcacccagtgttcagatgaggcaaacttctccgtgacaactgtgctgtgctctgtcacattacatttcctgcagactctaagatctacggagtagagaacaatgacctcattttattttctatgttagttatttatttcaaaattaacattttagttgatttttgtctgataagtctatgttttgcactgctaactatgatgagggtttaaaaaaatgcttcttcagggtcctttcactgaggacctatgcagtctacttaatgctgtgaattacatttttcaaatgtttaattttttaaagaaaattaatattctatttttgttaggcttctctagaaatgcagcttttatttattaccccatttctttcaagtccttggaaaataacatattaagggtacaagaaattaacacatgatggaaaagtcattgtgacgccaatgaatttcattgagtataaactcatctacttcaaatttattttataagacaacctaagatactcaagataattatttaatggttagctcttaagttgaattggtctacataatgcgtgggaagaaaaccagatttttagccttcttgccaaatccagacctctggttgatttttctttgacagaagatgcaagttattttccaatttcacaattaaatgtatttaacctgaacattattttgctttaaaaactataaacattgtaggagaattatagccagtcttcagttataaccactccaccctcctcactttctctctctctctctctttttttttgctatgggatttaatgggaaaaatatgtaaaaactgtcactagtcagctggctctttttcctatgaaatctatcagtacctttctccatccgttgttctcaataatgaccacagagcctgagtataccaagaaaaccaatattcgcattacaggttgctcctgtccttccagacacctttcctgcctgtgtgactaacctaattttgctagttccataaatacacgattagtttagtaacagccatcacaatgtaccatgtacattcatggtgagagctaaagatcgacacagacttctaggagctttgttcatactgattacttaatccaattgtatagattgaatatttgagtggaaggaatttacactctgtttaaatgatgggattctatcgagatagcactcatgatcatgacctttttggtagtattcttaaacaaaattctacagagactaaatgttagcgatgatcctccattttcaattttaaccaattctgtcccctttctcaaaaccctgagccctgtgcatgctttctcagtcttgtggtgggactggatacaatgactaacttcccctcctcccctctttaaacaccattttccatggagttcaaaaaaattttttttcttaacgttacatatcatagtgaatggtttccccagtgtatatgaatgttttaagtgtctccaatagcttatgcagtctaggagctttccaatactcatttaattaagatttaatcatttgctaatggaaatcttaccacctttcattttccctctgttaccaaatttcagctcttaggagctgctctacaattctgaatttgcttttcttgcctctctttagtcacctgtcacaggaggttcctgctcagtaatgatattgtgagttaggataataactttttttttttgtgcttcagatttagaagaaaagatcctgtttccatttgaaaggaactgtaagcttttatcttttaaccaactgaacaatacaccaaaagcagcctagggatgagcatttctttgaaagcaattaggttattcacctggtattaaaactatttactgttaaaaaatctgtgacttcatgaagttgatttttaaaggcagcatcaaaaactgaaaaggaagggaaaaaataggcagcttctctgcacttgtttggagctccccaaaacaggagccatggagaagtggcatcaagaccgggctgccctttcgagaacaccctgtggcagttcagagacacgcttttcctacactgcatgcagcccctctttccagcactggaaagaagtggtcttgagcccagctgagaagcacttcacactcctctctcttgttctgaatggtgtttgtgtcagtctgcagctgtgtatggtattatgtcttataatcctgcatcacttctatcctatccagtcatatctaatgtagaaaattagtttccagtgaaagtaatatgtagtgcttttatgatatttgtgtgcaatatcccctcttccattgaggatatttgatgtaaaggaaaaaaaaaaactcagttccacaataaaatacaaaagtggcaaaagtt

SEQ ID NO: 57111 - DNA, 10790 bp, Homo sapiens
tgcctagtctccatataaaagcggcgccgcctccccgccctctctcactccccgctcctctccgccgcgcactctccgcggcgctgggagagggcggagggggaggcggcgcgcggcgccagaggaggggggacgcagggggcggagcggagacagtaccttcggagataatcctttctcctgccgcagaggagaggagcggccggagcgagacacttcgccgaggcacagcagccggcaggatggcgaccgtggtggtggaagccaccgagccggagccgtccggcagcatcgccaacccggcggcgtccacctcgcctagcctgtcgcaccgcttccttgacagcaagttctacttgctggtggtcgtcggcgagatcgtgaccgaggagcacctgcggcgtgccatcggcaacatcgagctcggaatccgatcatgggacacaaacctgattgaatgcaacttggaccaagaactcaaactttttgtatctcgacactctgcaagattctctcctgaagtcccaggacaaaagatccttcatcaccgaagtgacgttttagaaacagtggtcctgatcaacccttctgatgaagcagtcagcaccgaggtgcgcttaatgatcactgatgctgcccgacacaagctgctcgtgctgaccgggcagtgctttgaaaataccggagagctcattctccagtccggctctttctccttccagaacttcatagagattttcaccgatcaagagatcggggagttactaagcaccacccatcctgccaacaaagccagcttaaccctgttctgtcctgaagaaggggactggaagaactccaatcttgacagacacaatctccaagacttcatcaatattaaactcaattcagcttctatcttgccagaaatggaaggactttctgagtttaccgagtatctctcagaatcagtggaagtcccatctccctttgacatcttggaacctcccacatcgggtggatttctgaagctctccaagccctgctgttatatttttccaggagggaggggcgattctgccttgtttgcagtgaatggtttcaatatgctcatcaatggcggatcagagagaaaatcctgcttctggaagctcatccgacacttagaccgagtggactccatcctgctcacccacattggggatgacaatttgcctggaataaacagcatgttacagcggaaaattgcagagctcgaggaagaacagtcccagggctccaccacaaatagtgactggatgaaaaacctcatctcccctgacttaggagttgtatttctcaatgtacctgaaaatctcaaaaatccagagccaaacatcaagatgaagagaagcatagaagaagcctgcttcactctccagtacctaaacaaattgtccatgaaaccagaacctctgtttagaagtgtaggcaatactattgatcctgtcattcttttccaaaaaatgggagtaggtaaacttgagatgtatgtgcttaatccagtcaagagcagcaaggaaatgcagtattttatgcagcagtggactggtaccaacaaagacaaggctgaattcattctgcctaatggtcaagaagtagatctcccgatttcctacttaacttcagtctcatctttgattgtgtggcatccagcaaaccctgcggagaaaatcatccgagtcctgtttcctgggaacagcacccagtacaacatcctggaagggttggaaaagctcaaacatctagactttctgaagcagccactggccacccaaaaggatctcactggccaggtgcccactcctgtggtgaaacaaacaaaactgaaacagagggctgatagccgagaaagtctgaagccagccgcaaaaccacttcctagcaaatccgtgcgcaaggagtcaaaagaagaaacccctgaggtcacaaaagtgaatcacgtggaaaagccacccaaagttgaaagcaaagaaaaggtaatggtgaaaaaagacaagccagtaaaaacagagaccaaaccttcagtgactgaaaaggaggttcccagcaaagaagagccatctccagtgaaagccgaggtggctgagaagcaagccacagatgtcaaacccaaagctgccaaggagaagacggtgaaaaaggaaacaaaggtaaagcctgaagacaagaaagaggagaaagaaaagccaaagaaagaagtggctaaaaaggaggacaaaacacctatcaagaaggaggaaaaaccaaaaaaggaagaggtgaaaaaagaagtcaaaaaagagatcaagaaagaagagaaaaaagaacccaagaaagaggttaagaaagaaacaccgccaaaggaagtcaagaaggaagttaagaaggaagagaagaaggaagtgaaaaaggaagaaaaggaacccaaaaaagaaattaagaagctccctaaagacgcaaagaaatcatctactcctctgtctgaagcaaaaaaaccagctgctttaaaaccaaaagtacccaagaaggaagagtctgtcaagaaagattctgttgctgccggaaagccaaaggagaaggggaaaataaaagtcattaagaaggaaggcaaggccgcagaggctgtcgctgcagctgtcggcactggagccaccacagcagctgtcatggcggcagctggaatagcagccattggccctgccaaagaactcgaagctgagaggtcccttatgtcatctcctgaggatctaaccaaggactttgaagagttaaaggctgaagaggtcgatgtaacaaaggacatcaagcctcagctggagctaatcgaagacgaagagaaactgaaggaaactgagccagtcgaagcctacgtcatccagaaggagagagaagtcaccaaaggtcctgccgagtcccctgatgagggaatcactaccactgaaggggagggcgaatgtgaacagacacctgaggagctggagcccgtcgagaagcagggagtagacgacattgaaaaatttgaagatgaaggagccggttttgaagaatcttcagagactggagactatgaagagaaggcagaaactgaggaggctgaggagccagaagaggatggggaggaacacgtatgtgtgagcgcctccaagcacagccccactgaggatgaggaaagtgccaaggcggaggctgatgcatacatcagggagaagagggagtctgtggccagtggggatgaccgagccgaagaagacatggatgaggccattgagaaaggagaggctgaacaatctgaagaggaggctgatgaggaggacaaagctgaagatgccagagaggaggaatatgagccggaaaaaatggaagctgaagactatgtgatggctgtggtcgacaaggctgcagaggctggtggtgccgaggagcagtatggattcctcaccacaccaaccaagcaactaggagcccagtctcctggccgagaacctgcatcttcaattcatgatgagactttacctggaggctcagagagcgaggccaccgcttctgatgaggagaatcgagaagaccagcctgaggaattcactgccacctctggctacactcagtctactattgagatatccagtgagcccacccccatggatgagatgtctacccctcgagacgtgatgagtgatgagaccaacaatgaagagacggagtccccttctcaggaattcgtaaatatcaccaaatatgaatcttcattgtattctcaggaatactctaaacctgctgatgttacaccgctcaacggattttctgaaggatcaaaaacagatgccactgatggcaaggattacaatgcttcagcctctaccatatcaccaccctcttccatggaggaagacaaattcagcagatctgctttacgtgatgcttactgctctgaagtgaaagccagcaccactttggacatcaaagatagcatctcagctgtttcaagtgaaaaggtcagcccatcgaagagcccgtccctgagtccatctccaccatcacccttagaaaagacccccctgggtgaacgtagtgtgaacttctctctgacgcccaatgagattaaagtctctgcagaggcagaagtagccccggtgtctcctgaggtgacccaagaagtagttgaagaacattgtgctagtcctgaggacaagactctggaagtggtgtcaccatctcagtccgtgactggcagtgctggtcacacaccttactatcaatctcctactgacgagaaatccagtcatctccctacagaagtcattgaaaaaccaccagcagttccagtgagttttgaattcagtgatgccaaagatgagaatgaaagggcttcagtaagccccatggatgagcccgtgcctgactcagagtctcctattgaaaaagttttgtctcctttacgcagcccgcccctcattggatccgagtctgcttatgaaagttttctaagtgctgatgacaaggcttctggcagaggtgccgaaagtccttttgaagaaaagagtggaaaacaaggctctccagaccaagtaagtccagtttctgaaatgacttctactagtctttaccaagacaaacaggaagggaaaagcacagactttgcaccaataaaagaagactttggccaagaaaagaaaactgatgatgttgaagccatgagttctcaaccagcactggctctggatgaaaggaaattaggagatgtttctcccacacaaatagatgtcagtcagtttggatcttttaaagaagacactaagatgtccatttctgaaggtactgtctcagacaagtcagctactcctgttgatgagggcgtagcagaagacacgtactctcatatggagggtgtggcctcagtgtccacagcctcagtggctacgagctcatttccagagccaacaacagatgatgtgtctccatctctgcatgctgaggttggctccccacattccacagaagtagatgactccctttcagtgtctgttgtgcaaacacctaccacattccaggaaacagaaatgtctccatctaaagaagaatgcccaagaccgatgtcaatttctccaccagatttctcccctaaaactgcaaagtccaggacacccgttcaagatcacagatctgaacagtcctcaatgtctattgaatttggccaagaatctcctgagcaatcccttgctatggacttcagtcgacagtctccagatcaccctacagtgggtgcaggcgtgcttcacatcactgaaaatgggccaactgaagtggactacagtccttctgacatgcaggactccagtttatcacataagataccacctatggaggagccgtcctacacccaagataatgatctttctgagctcatctcagtatctcaggtagaggcctccccgtccacctcttctgctcataccccttctcagatcgcttctcctctccaagaagatactctatccgatgttgctcctcccagagatatgtccttatatgcctcactcacctctgaaaaagtgcaaagtctggaaggagagaagctctctccaaaatctgatatctctccactcaccccacgagagtcctctcctttatattcacctactttttcagattctacctctgcagtcaaagagaaaacagcaacttgccacagttcctcttctccaccaatagatgcagcatccgcagagccctatggcttccgtgcctcagtgttattcgatacaatgcaacaccatctagccttgaatagagatttgtccacacctggcctggagaaggacagtggagggaagacacctggtgactttagctatgcctatcaaaagcctgaggaaacaaccaggtccccagatgaagaagattatgactatgagtcttatgagaagaccacccggacctcagatgtgggtggctattactatgagaagatagagagaaccacaaaatctccaagtgacagtggctactcctatgagaccattgggaaaactaccaagacccctgaagatggtgactattcctatgaaattattgagaagaccacacggacccctgaagagggtgggtactcatatgacataagtgaaaagaccaccagcccccccgaagtgagtggttacagctatgaaaagactgagaggtctagaaggcttctggatgacatcagcaatggctatgatgactctgaggatggtggccacacacttggggaccccagctactcttatgaaaccactgagaaaattaccagtttccctgagtctgaaggttattcctatgagacatctacaaagacaacacgaacccctgatacttccacatactgttacgagactgcagagaaaatcactagaacccctcaggcatccacatattcctacgagacttcagacctatgctacactgcagaaaagaagtccccctcagaagcccgtcaggatgtcgatttatgcctcgtgtcctcttgtgaatacaagcaccccaagacagagctttcacccttttctaaaaagtcaattcatctagttaagtcgctgaacaattacctgccaaatgctatactgtgtcatggtgatgcaagtcactaaatttctcagtttttgctgattgctaagggaaataacagtatttccacaatagggttcaaattcctgcaaaattacctaccccagttcatctctgctgaacatttggaaaccatgcactagccaacccaactgacttctgctaggtagaggcatttgtcttagagagagagagagcgcgggagagagtgagagagagtgagagcacaaagataacgcaggagagagagagagaaagaatgagaaagaaaaggaatgcaagagaaggagatgtaatgacagagagttctggtgagatacccagagagaaaaagagagagcagggtggggtaaggaggagaaaataaaccaacaattaggtctgcattttctcaggcagtaggcattctttagtctacataggcaaagttttccatttttgtcagtctgagtcatcaaaaagagtcttaattttctaaaacaagttggctagaagaaagtaaaaagaacaacacttgttatgagggcatgtgatattttcacatcttaattaagctccttcagtttgaaggctgcacactgacataatgtagtgagtgtagactggccatgcaagtggtttgggccccattcagaactctcagactctaaacacacaagtagattgatctaaggcatgctcccagcatttgtccacccacttagtccactctgagtcgattaacctgcatgcagcaacacccaagtccaccccaattaactgaagcaaataccaaagcagttgggagtacatatggtagacaatttgccttaggaagtgacttgaatgtacaaagatacttgatgcacttattttttaatgtgagacagcaagtttataaaacatccatataggattatagatacttaaaggaacacgtgggtgagcgtgtgtgggggtactagaagctgatctgattggtccaacagtttgatgctgagtcatgcgtgttgaatcccacttcagtgcacctgtggcctctcagtcaaacaagttgtgcctttcacagcttctttactactgcaagttcaagactgaaatggcttctatgatcagaactgggaaaacagtgaatcttatggtggaagaggttctcagcaagtgtacagtatttaccttcctttgtcttacattggctttttaaattttccattaatttcaacataattatgggaacaagtgtacagaagaattttttttttaagatatgtgagaacttttcatagatgaactttttaacaaatgttttcatttacaggaaattgcaaagaaaattctcaagtgatagtctttttttttaagtgtttcgtaagacaaaaattgaataatgttttttgaagttctggcaagattgaagtctgatattgcagtaatgatatttattaaaaacccataactaccaggaataatgatacctcccaccccttgattcccataacataaaagtgctacttgagagtgggggagaatggcatggtaggctacttttcagggccttgacaagtacatcacccagtggtatcctacatacttctttcaagatcttcaaccatgaggtaaaagagccaagttcaaagaaccctagcacaaatttgctttgggattttcttttctggaaaaaaaaaataaaagaaatagtacattgaaaacaaatgaattctcaactcctacggttcatgtagagtttagagaaaatttccatcattgtcatcattgaactgtgaacctgggaagccagatcatgattaacactgacatcaagtttcaagttgcagatcaatgcacccagtgttcagatgaggcaaacttctccgtgacaactgtgctgtgctctgtcacattacatttcctgcagactctaagatctacggagtagagaacaatgacctcattttattttctatgttagttatttatttcaaaattaacattttagttgatttttgtctgataagtctatgttttgcactgctaactatgatgagggtttaaaaaaatgcttcttcagggtcctttcactgaggacctatgcagtctacttaatgctgtgaattacatttttcaaatgtttaattttttaaagaaaattaatattctatttttgttaggcttctctagaaatgcagcttttatttattaccccatttctttcaagtccttggaaaataacatattaagggtacaagaaattaacacatgatggaaaagtcattgtgacgccaatgaatttcattgagtataaactcatctacttcaaatttattttataagacaacctaagatactcaagataattatttaatggttagctcttaagttgaattggtctacataatgcgtgggaagaaaaccagatttttagccttcttgccaaatccagacctctggttgatttttctttgacagaagatgcaagttattttccaatttcacaattaaatgtatttaacctgaacattattttgctttaaaaactataaacattgtaggagaattatagccagtcttcagttataaccactccaccctcctcactttctctctctctctctctttttttttgctatgggatttaatgggaaaaatatgtaaaaactgtcactagtcagctggctctttttcctatgaaatctatcagtacctttctccatccgttgttctcaataatgaccacagagcctgagtataccaagaaaaccaatattcgcattacaggttgctcctgtccttccagacacctttcctgcctgtgtgactaacctaattttgctagttccataaatacacgattagtttagtaacagccatcacaatgtaccatgtacattcatggtgagagctaaagatcgacacagacttctaggagctttgttcatactgattacttaatccaattgtatagattgaatatttgagtggaaggaatttacactctgtttaaatgatgggattctatcgagatagcactcatgatcatgacctttttggtagtattcttaaacaaaattctacagagactaaatgttagcgatgatcctccattttcaattttaaccaattctgtcccctttctcaaaaccctgagccctgtgcatgctttctcagtcttgtggtgggactggatacaatgactaacttcccctcctcccctctttaaacaccattttccatggagttcaaaaaaattttttttcttaacgttacatatcatagtgaatggtttccccagtgtatatgaatgttttaagtgtctccaatagcttatgcagtctaggagctttccaatactcatttaattaagatttaatcatttgctaatggaaatcttaccacctttcattttccctctgttaccaaatttcagctcttaggagctgctctacaattctgaatttgcttttcttgcctctctttagtcacctgtcacaggaggttcctgctcagtaatgatattgtgagttaggataataactttttttttttgtgcttcagatttagaagaaaagatcctgtttccatttgaaaggaactgtaagcttttatcttttaaccaactgaacaatacaccaaaagcagcctagggatgagcatttctttgaaagcaattaggttattcacctggtattaaaactatttactgttaaaaaatctgtgacttcatgaagttgatttttaaaggcagcatcaaaaactgaaaaggaagggaaaaaataggcagcttctctgcacttgtttggagctccccaaaacaggagccatggagaagtggcatcaagaccgggctgccctttcgagaacaccctgtggcagttcagagacacgcttttcctacactgcatgcagcccctctttccagcactggaaagaagtggtcttgagcccagctgagaagcacttcacactcctctctcttgttctgaatggtgtttgtgtcagtctgcagctgtgtatggtattatgtcttataatcctgcatcacttctatcctatccagtcatatctaatgtagaaaattagtttccagtgaaagtaatatgtagtgcttttatgatatttgtgtgcaatatcccctcttccattgaggatatttgatgtaaaggaaaaaaaaaaactcagttccacaataaaatacaaaagtggcaaaagtt

SEQ ID NO: 57112 - DNA, 11646 bp, Homo sapiens
  misc_feature (11621)..(11621): n is a, c, g, or t
tgcctagtctccatataaaagcggcgccgcctccccgccctctctcactccccgctcctctccgccgcgcactctccgcggcgctgggagagggcggagggggaggcggcgcgcggcgccagaggaggggggacgcagggggcggagcggagacagtaccttcggagataatcctttctcctgccgcagaggagaggagcggccggagcgagacacttcgccgaggcacagcagccggcaggatggcgaccgtggtggtggaagccaccgagccggagccgtccggcagcatcgccaacccggcggcgtccacctcgcctagcctgtcgcaccgcttccttgacagcaagttctacttgctggtggtcgtcggcgagatcgtgaccgaggagcacctgcggcgtgccatcggcaacatcgagctcggaatccgatcatgggacacaaacctgattgaatgcaacttggaccaagaactcaaactttttgtatctcgacactctgcaagattctctcctgaagtcccaggacaaaagatccttcatcaccgaagtgacgttttagaaacagtggtcctgatcaacccttctgatgaagcagtcagcaccgaggtgcgcttaatgatcactgatgctgcccgacacaagctgctcgtgctgaccgggcagtgctttgaaaataccggagagctcattctccagtccggctctttctccttccagaacttcatagagattttcaccgatcaagagatcggggagttactaagcaccacccatcctgccaacaaagccagcttaaccctgttctgtcctgaagaaggggactggaagaactccaatcttgacagacacaatctccaagacttcatcaatattaaactcaattcagcttctatcttgccagaaatggaaggactttctgagtttaccgagtatctctcagaatcagtggaagtcccatctccctttgacatcttggaacctcccacatcgggtggatttctgaagctctccaagccctgctgttatatttttccaggagggaggggcgattctgccttgtttgcagtgaatggtttcaatatgctcatcaatggcggatcagagagaaaatcctgcttctggaagctcatccgacacttagaccgagtggactccatcctgctcacccacattggggatgacaatttgcctggaataaacagcatgttacagcggaaaattgcagagctcgaggaagaacagtcccagggctccaccacaaatagtgactggatgaaaaacctcatctcccctgacttaggagttgtatttctcaatgtacctgaaaatctcaaaaatccagagccaaacatcaagatgaagagaagcatagaagaagcctgcttcactctccagtacctaaacaaattgtccatgaaaccagaacctctgtttagaagtgtaggcaatactattgatcctgtcattcttttccaaaaaatgggagtaggtaaacttgagatgtatgtgcttaatccagtcaagagcagcaaggaaatgcagtattttatgcagcagtggactggtaccaacaaagacaaggctgaattcattctgcctaatggtcaagaagtagatctcccgatttcctacttaacttcagtctcatctttgattgtgtggcatccagcaaaccctgcggagaaaatcatccgagtcctgtttcctgggaacagcacccagtacaacatcctggaagggttggaaaagctcaaacatctagactttctgaagcagccactggccacccaaaaggatctcactggccaggtgcccactcctgtggtgaaacaaacaaaactgaaacagagggctgatagccgagaaagtctgaagccagccgcaaaaccacttcctagcaaatccgtgcgcaaggagtcaaaagaagaaacccctgaggtcacaaaagtgaatcacgtggaaaagccacccaaagttgaaagcaaagaaaaggtaatggtgaaaaaagacaagccagtaaaaacagagaccaaaccttcagtgactgaaaaggaggttcccagcaaagaagagccatctccagtgaaagccgaggtggctgagaagcaagccacagatgtcaaacccaaagctgccaaggagaagacggtgaaaaaggaaacaaaggtaaagcctgaagacaagaaagaggagaaagaaaagccaaagaaagaagtggctaaaaaggaggacaaaacacctatcaagaaggaggaaaaaccaaaaaaggaagaggtgaaaaaagaagtcaaaaaagagatcaagaaagaagagaaaaaagaacccaagaaagaggttaagaaagaaacaccgccaaaggaagtcaagaaggaagttaagaaggaagagaagaaggaagtgaaaaaggaagaaaaggaacccaaaaaagaaattaagaagctccctaaagacgcaaagaaatcatctactcctctgtctgaagcaaaaaaaccagctgctttaaaaccaaaagtacccaagaaggaagagtctgtcaagaaagattctgttgctgccggaaagccaaaggagaaggggaaaataaaagtcattaagaaggaaggcaaggccgcagaggctgtcgctgcagctgtcggcactggagccaccacagcagctgtcatggcggcagctggaatagcagccattggccctgccaaagaactcgaagctgagaggtcccttatgtcatctcctgaggatctaaccaaggactttgaagagttaaaggctgaagaggtcgatgtaacaaaggacatcaagcctcagctggagctaatcgaagacgaagagaaactgaaggaaactgagccagtcgaagcctacgtcatccagaaggagagagaagtcaccaaaggtcctgccgagtcccctgatgagggaatcactaccactgaaggggagggcgaatgtgaacagacacctgaggagctggagcccgtcgagaagcagggagtagacgacattgaaaaatttgaagatgaaggagccggttttgaagaatcttcagagactggagactatgaagagaaggcagaaactgaggaggctgaggagccagaagaggatggggaggaacacgtatgtgtgagcgcctccaagcacagccccactgaggatgaggaaagtgccaaggcggaggctgatgcatacatcagggagaagagggagtctgtggccagtggggatgaccgagccgaagaagacatggatgaggccattgagaaaggagaggctgaacaatctgaagaggaggctgatgaggaggacaaagctgaagatgccagagaggaggaatatgagccggaaaaaatggaagctgaagactatgtgatggctgtggtcgacaaggctgcagaggctggtggtgccgaggagcagtatggattcctcaccacaccaaccaagcaactaggagcccagtctcctggccgagaacctgcatcttcaattcatgatgagactttacctggaggctcagagagcgaggccaccgcttctgatgaggagaatcgagaagaccagcctgaggaattcactgccacctctggctacactcagtctactattgagatatccagtgagcccacccccatggatgagatgtctacccctcgagacgtgatgagtgatgagaccaacaatgaagagacggagtccccttctcaggaattcgtaaatatcaccaaatatgaatcttcattgtattctcaggaatactctaaacctgctgatgttacaccgctcaacggattttctgaaggatcaaaaacagatgccactgatggcaaggattacaatgcttcagcctctaccatatcaccaccctcttccatggaggaagacaaattcagcagatctgctttacgtgatgcttactgctctgaagtgaaagccagcaccactttggacatcaaagatagcatctcagctgtttcaagtgaaaaggtcagcccatcgaagagcccgtccctgagtccatctccaccatcacccttagaaaagacccccctgggtgaacgtagtgtgaacttctctctgacgcccaatgagattaaagtctctgcagaggcagaagtagccccggtgtctcctgaggtgacccaagaagtagttgaagaacattgtgctagtcctgaggacaagactctggaagtggtgtcaccatctcagtccgtgactggcagtgctggtcacacaccttactatcaatctcctactgacgagaaatccagtcatctccctacagaagtcattgaaaaaccaccagcagttccagtgagttttgaattcagtgatgccaaagatgagaatgaaagggcttcagtaagccccatggatgagcccgtgcctgactcagagtctcctattgaaaaagttttgtctcctttacgcagcccgcccctcattggatccgagtctgcttatgaaagttttctaagtgctgatgacaaggcttctggcagaggtgccgaaagtccttttgaagaaaagagtggaaaacaaggctctccagaccaagtaagtccagtttctgaaatgacttctactagtctttaccaagacaaacaggaagggaaaagcacagactttgcaccaataaaagaagactttggccaagaaaagaaaactgatgatgttgaagccatgagttctcaaccagcactggctctggatgaaaggaaattaggagatgtttctcccacacaaatagatgtcagtcagtttggatcttttaaagaagacactaagatgtccatttctgaaggtactgtctcagacaagtcagctactcctgttgatgagggcgtagcagaagacacgtactctcatatggagggtgtggcctcagtgtccacagcctcagtggctacgagctcatttccagagccaacaacagatgatgtgtctccatctctgcatgctgaggttggctccccacattccacagaagtagatgactccctttcagtgtctgttgtgcaaacacctaccacattccaggaaacagaaatgtctccatctaaagaagaatgcccaagaccgatgtcaatttctccaccagatttctcccctaaaactgcaaagtccaggacacccgttcaagatcacagatctgaacagtcctcaatgtctattgaatttggccaagaatctcctgagcaatcccttgctatggacttcagtcgacagtctccagatcaccctacagtgggtgcaggcgtgcttcacatcactgaaaatgggccaactgaagtggactacagtccttctgacatgcaggactccagtttatcacataagataccacctatggaggagccgtcctacacccaagataatgatctttctgagctcatctcagtatctcaggtagaggcctccccgtccacctcttctgctcataccccttctcagatcgcttctcctctccaagaagatactctatccgatgttgctcctcccagagatatgtccttatatgcctcactcacctctgaaaaagtgcaaagtctggaaggagagaagctctctccaaaatctgatatctctccactcaccccacgagagtcctctcctttatattcacctactttttcagattctacctctgcagtcaaagagaaaacagcaacttgccacagttcctcttctccaccaatagatgcagcatccgcagagccctatggcttccgtgcctcagtgttattcgatacaatgcaacaccatctagccttgaatagagatttgtccacacctggcctggagaaggacagtggagggaagacacctggtgactttagctatgcctatcaaaagcctgaggaaacaaccaggtccccagatgaagaagattatgactatgagtcttatgagaagaccacccggacctcagatgtgggtggctattactatgagaagatagagagaaccacaaaatctccaagtgacagtggctactcctatgagaccattgggaaaactaccaagacccctgaagatggtgactattcctatgaaattattgagaagaccacacggacccctgaagagggtgggtactcatatgacataagtgaaaagaccaccagcccccccgaagtgagtggttacagctatgaaaagactgagaggtctagaaggcttctggatgacatcagcaatggctatgatgactctgaggatggtggccacacacttggggaccccagctactcttatgaaaccactgagaaaattaccagtttccctgagtctgaaggttattcctatgagacatctacaaagacaacacgaacccctgatacttccacatactgttacgagactgcagagaaaatcactagaacccctcaggcatccacatattcctacgagacttcagacctatgctacactgcagaaaagaagtccccctcagaagcccgtcaggatgtcgatttatgcctcgtgtcctcttgtgaatacaagcaccccaagacagagctttcaccctctttcattaatcccaatcctcttgagtggtttgccagtgaagaacccactgaagaatctgaaaagcccctcactcaatcagggggagccccaccgcctccaggaggaaagcaacagggccgacagtgtgatgaaacccctcccacctcagtcagcgagtcagccccatcccagaccgactctgatgttcccccggagactgaagagtgcccctccatcacggccgatgccaatatcgactctgaagacgagtcggaaaccatccccacagacaaaactgtcacgtacaaacacatggacccacctccagctcccgtgcaagaccgcagcccttcgccacgccaccctgatgtgtccatggtggacccagaggccttggccattgagcagaacctgggcaaagctctaaagaaagatctgaaagagaagaccaaaaccaaaaagccaggtacaaagaccaagtcatcttcacctgtcaaaaagagtgatgggaagtctaagcccttggcagcttcaccaaaaccagcgggcttgaaagaatcctcggataaagtgtccagggtggcttctcctaagaagaaagaatctgtggaaaaggcagcaaaacccaccaccactcctgaggtcaaagctgcacgtggggaagagaaagacaaggagaccaagaatgctgccaatgcctctgcatccaagtcggccaagaccgccactgcaggaccaggaactaccaagacgaccaagtcatctgctgtgcccccaggcctccctgtgtatttggacctgtgctacattcctaaccacagcaatagtaagaatgttgatgtggaatttttcaagagagtgcggtcttcctactacgtggtgagtgggaatgaccctgctgctgaggagcccagccgggctgtcctggacgctttgttggaaggaaaggctcagtggggcagcaacatgcaggtgacactgatcccaactcatgactcagaagtgatgagggaatggtaccaggagacccatgagaaacagcaagatctcaacatcatggttttagcaagcagcagcacagtggttatgcaagatgaatccttccctgcatgcaagattgaactgtaaaaaccaaggccagccacaccacaggatctgaactttgtttccagaaattcttcaatttgaaatcaccttttctaaaaagtcaattcatctagttaagtcgctgaacaattacctgccaaatgctatactgtgtcatggtgatgcaagtcactaaatttctcagtttttgctgattgctaagggaaataacagtatttccacaatagggttcaaattcctgcaaaattacctaccccagttcatctctgctgaacatttggaaaccatgcactagccaacccaactgacttctgctaggtagaggcatttgtcttagagagagagagagcgcgggagagagtgagagagagtgagagcacaaagataacgcaggagagagagagagaaagaatgagaaagaaaaggaatgcaagagaaggagatgtaatgacagagagttctggtgagatacccagagagaaaaagagagagcagggtggggtaaggaggagaaaataaaccaacaattaggtctgcattttctcaggcagtaggcattctttagtctacataggcaaagttttccatttttgtcagtctgagtcatcaaaaagagtcttaattttctaaaacaagttggctagaagaaagtaaaaagaacaacacttgttatgagggcatgtgatattttcacatcttaattaagctccttcagtttgaaggctgcacactgacataatgtagtgagtgtagactggccatgcaagtggtttgggccccattcagaactctcagactctaaacacacaagtagattgatctaaggcatgctcccagcatttgtccacccacttagtccactctgagtcgattaacctgcatgcagcaacacccaagtccaccccaattaactgaagcaaataccaaagcagttgggagtacatatggtagacaatttgccttaggaagtgacttgaatgtacaaagatacttgatgcacttattttttaatgtgagacagcaagtttataaaacatccatataggattatagatacttaaaggaacacgtgggtgagcgtgtgtgggggtactagaagctgatctgattggtccaacagtttgatgctgagtcatgcgtgttgaatcccacttcagtgcacctgtggcctctcagtcaaacaagttgtgcctttcacagcttctttactactgcaagttcaagactgaaatggcttctatgatcagaactgggaaaacagtgaatcttatggtggaagaggttctcagcaagtgtacagtatttaccttcctttgtcttacattggctttttaaattttccattaatttcaacataattatgggaacaagtgtacagaagaattttttttttaagatatgtgagaacttttcatagatgaactttttaacaaatgttttcatttacaggaaattgcaaagaaaattctcaagtgatagtctttttttttaagtgtttcgtaagacaaaaattgaataatgttttttgaagttctggcaagattgaagtctgatattgcagtaatgatatttattaaaaacccataactaccaggaataatgatacctcccaccccttgattcccataacataaaagtgctacttgagagtgggggagaatggcatggtaggctacttttcagggccttgacaagtacatcacccagtggtatcctacatacttctttcaagatcttcaaccatgaggtaaaagagccaagttcaaagaaccctagcacaaatttgctttgggattttcttttctggaaaaaaaaaataaaagaaatagtacattgaaaacaaatgaattctcaactcctacggttcatgtagagtttagagaaaatttccatcattgtcatcattgaactgtgaacctgggaagccagatcatgattaacactgacatcaagtttcaagttgcagatcaatgcacccagtgttcagatgaggcaaacttctccgtgacaactgtgctgtgctctgtcacattacatttcctgcagactctaagatctacggagtagagaacaatgacctcattttattttctatgttagttatttatttcaaaattaacattttagttgatttttgtctgataagtctatgttttgcactgctaactatgatgagggtttaaaaaaatgcttcttcagggtcctttcactgaggacctatgcagtctacttaatgctgtgaattacatttttcaaatgtttaattttttaaagaaaattaatattctatttttgttaggcttctctagaaatgcagcttttatttattaccccatttctttcaagtccttggaaaataacatattaagggtacaagaaattaacacatgatggaaaagtcattgtgacgccaatgaatttcattgagtataaactcatctacttcaaatttattttataagacaacctaagatactcaagataattatttaatggttagctcttaagttgaattggtctacataatgcgtgggaagaaaaccagatttttagccttcttgccaaatccagacctctggttgatttttctttgacagaagatgcaagttattttccaatttcacaattaaatgtatttaacctgaacattattttgctttaaaaactataaacattgtaggagaattatagccagtcttcagttataaccactccaccctcctcactttctctctctctctctctttttttttgctatgggatttaatgggaaaaatatgtaaaaactgtcactagtcagctggctctttttcctatgaaatctatcagtacctttctccatccgttgttctcaataatgaccacagagcctgagtataccaagaaaaccaatattcgcattacaggttgctcctgtccttccagacacctttcctgcctgtgtgactaacctaattttgctagttccataaatacacgattagtttagtaacagccatcacaatgtaccatgtacattcatggtgagagctaaagatcgacacagacttctaggagctttgttcatactgattacttaatccaattgtatagattgaatatttgagtggaaggaatttacactctgtttaaatgatgggattctatcgagatagcactcatgatcatgacctttttggtagtattcttaaacaaaattctacagagactaaatgttagcgatgatcctccattttcaattttaaccaattctgtcccctttctcaaaaccctgagccctgtgcatgctttctcagtcttgtggtgggactggatacaatgactaacttcccctcctcccctctttaaacaccattttccatggagttcaaaaaaattttttttcttaacgttacatatcatagtgaatggtttccccagtgtatatgaatgttttaagtgtctccaatagcttatgcagtctaggagctttccaatactcatttaattaagatttaatcatttgctaatggaaatcttaccacctttcattttccctctgttaccaaatttcagctcttaggagctgctctacaattctgaatttgcttttcttgcctctctttagtcacctgtcacaggaggttcctgctcagtaatgatattgtgagttaggataataactttttttttttgtgcttcagatttagaagaaaagatcctgtttccatttgaaaggaactgtaagcttttatcttttaaccaactgaacaatacaccaaaagcagcctagggatgagcatttctttgaaagcaattaggttattcacctggtattaaaactatttactgttaaaaaatctgtgacttcatgaagttgatttaaggcgctcaaacggaggggaaagggctcttcctttggggcccaaggcaggaaggttacagggctttacacgtggaaattattgggctcacgaaaaggaggaaaaacctctgggtgggggtttattgtancacaaggttttatgtaaaatacgct

SEQ ID NO: 57113 - DNA, 11200 bp, Homo sapiens
tgcctagtctccatataaaagcggcgccgcctccccgccctctctcactccccgctcctctccgccgcgcactctccgcggcgctgggagagggcggagggggaggcggcgcgcggcgccagaggaggggggacgcagggggcggagcggagacagtaccttcggagataatcctttctcctgccgcagaggagaggagcggccggagcgagacacttcgccgaggcacagcagccggcaggatggcgaccgtggtggtggaagccaccgagccggagccgtccggcagcatcgccaacccggcggcgtccacctcgcctagcctgtcgcaccgcttccttgacagcaagttctacttgctggtggtcgtcggcgagatcgtgaccgaggagcacctgcggcgtgccatcggcaacatcgagctcggaatccgatcatgggacacaaacctgattgaatgcaacttggaccaagaactcaaactttttgtatctcgacactctgcaagattctctcctgaagtcccaggacaaaagatccttcatcaccgaagtgacgttttagaaacagtggtcctgatcaacccttctgatgaagcagtcagcaccgaggtgcgcttaatgatcactgatgctgcccgacacaagctgctcgtgctgaccgggcagtgctttgaaaataccggagagctcattctccagtccggctctttctccttccagaacttcatagagattttcaccgatcaagagatcggggagttactaagcaccacccatcctgccaacaaagccagcttaaccctgttctgtcctgaagaaggggactggaagaactccaatcttgacagacacaatctccaagacttcatcaatattaaactcaattcagcttctatcttgccagaaatggaaggactttctgagtttaccgagtatctctcagaatcagtggaagtcccatctccctttgacatcttggaacctcccacatcgggtggatttctgaagctctccaagccctgctgttatatttttccaggagggaggggcgattctgccttgtttgcagtgaatggtttcaatatgctcatcaatggcggatcagagagaaaatcctgcttctggaagctcatccgacacttagaccgagtggactccatcctgctcacccacattggggatgacaatttgcctggaataaacagcatgttacagcggaaaattgcagagctcgaggaagaacagtcccagggctccaccacaaatagtgactggatgaaaaacctcatctcccctgacttaggagttgtatttctcaatgtacctgaaaatctcaaaaatccagagccaaacatcaagatgaagagaagcatagaagaagcctgcttcactctccagtacctaaacaaattgtccatgaaaccagaacctctgtttagaagtgtaggcaatactattgatcctgtcattcttttccaaaaaatgggagtaggtaaacttgagatgtatgtgcttaatccagtcaagagcagcaaggaaatgcagtattttatgcagcagtggactggtaccaacaaagacaaggctgaattcattctgcctaatggtcaagaagtagatctcccgatttcctacttaacttcagtctcatctttgattgtgtggcatccagcaaaccctgcggagaaaatcatccgagtcctgtttcctgggaacagcacccagtacaacatcctggaagggttggaaaagctcaaacatctagactttctgaagcagccactggccacccaaaaggatctcactggccaggtgcccactcctgtggtgaaacaaacaaaactgaaacagagggctgatagccgagaaagtctgaagccagccgcaaaaccacttcctagcaaatccgtgcgcaaggagtcaaaagaagaaacccctgaggtcacaaaagtgaatcacgtggaaaagccacccaaagttgaaagcaaagaaaaggtaatggtgaaaaaagacaagccagtaaaaacagagaccaaaccttcagtgactgaaaaggaggttcccagcaaagaagagccatctccagtgaaagccgaggtggctgagaagcaagccacagatgtcaaacccaaagctgccaaggagaagacggtgaaaaaggaaacaaaggtaaagcctgaagacaagaaagaggagaaagaaaagccaaagaaagaagtggctaaaaaggaggacaaaacacctatcaagaaggaggaaaaaccaaaaaaggaagaggtgaaaaaagaagtcaaaaaagagatcaagaaagaagagaaaaaagaacccaagaaagaggttaagaaagaaacaccgccaaaggaagtcaagaaggaagttaagaaggaagagaagaaggaagtgaaaaaggaagaaaaggaacccaaaaaagaaattaagaagctccctaaagacgcaaagaaatcatctactcctctgtctgaagcaaaaaaaccagctgctttaaaaccaaaagtacccaagaaggaagagtctgtcaagaaagattctgttgctgccggaaagccaaaggagaaggggaaaataaaagtcattaagaaggaaggcaaggccgcagaggctgtcgctgcagctgtcggcactggagccaccacagcagctgtcatggcggcagctggaatagcagccattggccctgccaaagaactcgaagctgagaggtcccttatgtcatctcctgaggatctaaccaaggactttgaagagttaaaggctgaagaggtcgatgtaacaaaggacatcaagcctcagctggagctaatcgaagacgaagagaaactgaaggaaactgagccagtcgaagcctacgtcatccagaaggagagagaagtcaccaaaggtcctgccgagtcccctgatgagggaatcactaccactgaaggggagggcgaatgtgaacagacacctgaggagctggagcccgtcgagaagcagggagtagacgacattgaaaaatttgaagatgaaggagccggttttgaagaatcttcagagactggagactatgaagagaaggcagaaactgaggaggctgaggagccagaagaggatggggaggaacacgtatgtgtgagcgcctccaagcacagccccactgaggatgaggaaagtgccaaggcggaggctgatgcatacatcagggagaagagggagtctgtggccagtggggatgaccgagccgaagaagacatggatgaggccattgagaaaggagaggctgaacaatctgaagaggaggctgatgaggaggacaaagctgaagatgccagagaggaggaatatgagccggaaaaaatggaagctgaagactatgtgatggctgtggtcgacaaggctgcagaggctggtggtgccgaggagcagtatggattcctcaccacaccaaccaagcaactaggagcccagtctcctggccgagaacctgcatcttcaattcatgatgagactttacctggaggctcagagagcgaggccaccgcttctgatgaggagaatcgagaagaccagcctgaggaattcactgccacctctggctacactcagtctactattgagatatccagtgagcccacccccatggatgagatgtctacccctcgagacgtgatgagtgatgagaccaacaatgaagagacggagtccccttctcaggaattcgtaaatatcaccaaatatgaatcttcattgtattctcaggaatactctaaacctgctgatgttacaccgctcaacggattttctgaaggatcaaaaacagatgccactgatggcaaggattacaatgcttcagcctctaccatatcaccaccctcttccatggaggaagacaaattcagcagatctgctttacgtgatgcttactgctctgaagtgaaagccagcaccactttggacatcaaagatagcatctcagctgtttcaagtgaaaaggtcagcccatcgaagagcccgtccctgagtccatctccaccatcacccttagaaaagacccccctgggtgaacgtagtgtgaacttctctctgacgcccaatgagattaaagtctctgcagaggcagaagtagccccggtgtctcctgaggtgacccaagaagtagttgaagaacattgtgctagtcctgaggacaagactctggaagtggtgtcaccatctcagtccgtgactggcagtgctggtcacacaccttactatcaatctcctactgacgagaaatccagtcatctccctacagaagtcattgaaaaaccaccagcagttccagtgagttttgaattcagtgatgccaaagatgagaatgaaagggcttcagtaagccccatggatgagcccgtgcctgactcagagtctcctattgaaaaagttttgtctcctttacgcagcccgcccctcattggatccgagtctgcttatgaaagttttctaagtgctgatgacaaggcttctggcagaggtgccgaaagtccttttgaagaaaagagtggaaaacaaggctctccagaccaagtaagtccagtttctgaaatgacttctactagtctttaccaagacaaacaggaagggaaaagcacagactttgcaccaataaaagaagactttggccaagaaaagaaaactgatgatgttgaagccatgagttctcaaccagcactggctctggatgaaaggaaattaggagatgtttctcccacacaaatagatgtcagtcagtttggatcttttaaagaagacactaagatgtccatttctgaaggtactgtctcagacaagtcagctactcctgttgatgagggcgtagcagaagacacgtactctcatatggagggtgtggcctcagtgtccacagcctcagtggctacgagctcatttccagagccaacaacagatgatgtgtctccatctctgcatgctgaggttggctccccacattccacagaagtagatgactccctttcagtgtctgttgtgcaaacacctaccacattccaggaaacagaaatgtctccatctaaagaagaatgcccaagaccgatgtcaatttctccaccagatttctcccctaaaactgcaaagtccaggacacccgttcaagatcacagatctgaacagtcctcaatgtctattgaatttggccaagaatctcctgagcaatcccttgctatggacttcagtcgacagtctccagatcaccctacagtgggtgcaggcgtgcttcacatcactgaaaatgggccaactgaagtggactacagtccttctgacatgcaggactccagtttatcacataagataccacctatggaggagccgtcctacacccaagataatgatctttctgagctcatctcagtatctcaggtagaggcctccccgtccacctcttctgctcataccccttctcagatcgcttctcctctccaagaagatactctatccgatgttgctcctcccagagatatgtccttatatgcctcactcacctctgaaaaagtgcaaagtctggaaggagagaagctctctccaaaatctgatatctctccactcaccccacgagagtcctctcctttatattcacctactttttcagattctacctctgcagtcaaagagaaaacagcaacttgccacagttcctcttctccaccaatagatgcagcatccgcagagccctatggcttccgtgcctcagtgttattcgatacaatgcaacaccatctagccttgaatagagatttgtccacacctggcctggagaaggacagtggagggaagacacctggtgactttagctatgcctatcaaaagcctgaggaaacaaccaggtccccagatgaagaagattatgactatgagtcttatgagaagaccacccggacctcagatgtgggtggctattactatgagaagatagagagaaccacaaaatctccaagtgacagtggctactcctatgagaccattgggaaaactaccaagacccctgaagatggtgactattcctatgaaattattgagaagaccacacggacccctgaagagggtgggtactcatatgacataagtgaaaagaccaccagcccccccgaagtgagtggttacagctatgaaaagactgagaggtctagaaggcttctggatgacatcagcaatggctatgatgactctgaggatggtggccacacacttggggaccccagctactcttatgaaaccactgagaaaattaccagtttccctgagtctgaaggttattcctatgagacatctacaaagacaacacgaacccctgatacttccacatactgttacgagactgcagagaaaatcactagaacccctcaggcatccacatattcctacgagacttcagacctatgctacactgcagaaaagaagtccccctcagaagcccgtcaggatgtcgatttatgcctcgtgtcctcttgtgaatacaagcaccccaagacagagctttcaccctctttcattaatcccaatcctcttgagtggtttgccagtgaagaacccactgaagaatctgaaaagcccctcactcaatcagggggagccccaccgcctccaggaggaaagcaacagggccgacagtgtgatgaaacccctcccacctcagtcagcgagtcagccccatcccagaccgactctgatgttcccccggagactgaagagtgcccctccatcacggccgatgccaatatcgactctgaagacgagtcggaaaccatccccacagacaaaactgtcacgtacaaacacatggacccacctccagctcccgtgcaagaccgcagcccttcgccacgccaccctgatgtgtccatggtggacccagaggccttggccattgagcagaacctgggcaaagctctaaagaaagatctgaaagagaagaccaaaaccaaaaagccaggtacaaagaccaagtcatcttcacctgtcaaaaagagtgatgggaagtctaagcccttggcagcttcaccaaaaccagcgggcttgaaagaatcctcggataaagtgtccagggtggcttctcctaagaagaaagaatctgtggaaaaggcagcaaaacccaccaccactcctgaggtcaaagctgcacgtggggaagagaaagacaaggagaccaagaatgctgccaatgcctctgcatccaagtcggccaagaccgccactgcaggaccaggaactaccaagacgaccaagtcatctgctgtgcccccaggcctccctgtgtatttggacctgtgctacattcctaaccacagcaatagtaagaatgttgatgtggaatttttcaagagagtgcggtcttcctactacgtggtgagtgggaatgaccctgctgctgaggagcccagccgggctgtcctggacgctttgttggaaggaaaggctcagtggggcagcaacatgcaggtgacactgatcccaactcatgactcagaagtgatgagggaatggtaccaggagacccatgagaaacagcaagatctcaacatcatggttttagcaagcagcagcacagtggttatgcaagatgaatccttccctgcatgcaagattgaactgtaaaaaccaaggccagccacaccacaggatctgaactttgtttccagaaattcttcaatttgaaatcaccttttctaaaaagtcaattcatctagttaagtcgctgaacaattacctgccaaatgctatactgtgtcatggtgatgcaagtcactaaatttctcagtttttgctgattgctaagggaaataacagtatttccacaatagggttcaaattcctgcaaaattacctaccccagttcatctctgctgaacatttggaaaccatgcactagccaacccaactgacttctgctaggtagaggcatttgtcttagagagagagagagcgcgggagagagtgagagagagtgagagcacaaagataacgcaggagagagagagagaaagaatgagaaagaaaaggaatgcaagagaaggagatgtaatgacagagagttctggtgagatacccagagagaaaaagagagagcagggtggggtaaggaggagaaaataaaccaacaattaggtctgcattttctcaggcagtaggcattctttagtctacataggcaaagttttccatttttgtcagtctgagtcatcaaaaagagtcttaattttctaaaacaagttggctagaagaaagtaaaaagaacaacacttgttatgagggcatgtgatattttcacatcttaattaagctccttcagtttgaaggctgcacactgacataatgtagtgagtgtagactggccatgcaagtggtttgggccccattcagaactctcagactctaaacacacaagtagattgatctaaggcatgctcccagcatttgtccacccacttagtccactctgagtcgattaacctgcatgcagcaacacccaagtccaccccaattaactgaagcaaataccaaagcagttgggagtacatatggtagacaatttgccttaggaagtgacttgaatgtacaaagatacttgatgcacttattttttaatgtgagacagcaagtttataaaacatccatataggattatagatacttaaaggaacacgtgggtgagcgtgtgtgggggtactagaagctgatctgattggtccaacagtttgatgctgagtcatgcgtgttgaatcccacttcagtgcacctgtggcctctcagtcaaacaagttgtgcctttcacagcttctttactactgcaagttcaagactgaaatggcttctatgatcagaactgggaaaacagtgaatcttatggtggaagaggttctcagcaagtgtacagtatttaccttcctttgtcttacattggctttttaaattttccattaatttcaacataattatgggaacaagtgtacagaagaattttttttttaagatatgtgagaacttttcatagatgaactttttaacaaatgttttcatttacaggaaattgcaaagaaaattctcaagtgatagtctttttttttaagtgtttcgtaagacaaaaattgaataatgttttttgaagttctggcaagattgaagtctgatattgcagtaatgatatttattaaaaacccataactaccaggaataatgatacctcccaccccttgattcccataacataaaagtgctacttgagagtgggggagaatggcatggtaggctacttttcagggccttgacaagtacatcacccagtggtatcctacatacttctttcaagatcttcaaccatgaggtaaaagagccaagttcaaagaaccctagcacaaatttgctttgggattttcttttctggaaaaaaaaaataaaagaaatagtacattgaaaacaaatgaattctcaactcctacggttcatgtagagtttagagaaaatttccatcattgtcatcattgaactgtgaacctgggaagccagatcatgattaacactgacatcaagtttcaagttgcagatcaatgcacccagtgttcagatgaggcaaacttctccgtgacaactgtgctgtgctctgtcacattacatttcctgcagactctaagatctacggagtagagaacaatgacctcattttattttctatgttagttatttatttcaaaattaacattttagttgatttttgtctgataagtctatgttttgcactgctaactatgatgagggtttaaaaaaatgcttcttcagggtcctttcactgaggacctatgcagtctacttaatgctgtgaattacatttttcaaatgtttaattttttaaagaaaattaatattctatttttgttaggcttctctagaaatgcagcttttatttattaccccatttctttcaagtccttggaaaataacatattaagggtacaagaaattaacacatgatggaaaagtcattgtgacgccaatgaatttcattgagtataaactcatctacttcaaatttattttataagacaacctaagatactcaagataattatttaatggttagctcttaagttgaattggtctacataatgcgtgggaagaaaaccagatttttagccttcttgccaaatccagacctctggttgatttttctttgacagaagatgcaagttattttccaatttcacaattaaatgtatttaacctgaacattattttgctttaaaaactataaacattgtaggagaattatagccagtcttcagttataaccactccaccctcctcactttctctctctctctctctttttttttgctatgggatttaatgggaaaaatatgtaaaaactgtcactagtcagctggctctttttcctatgaaatctatcagtacctttctccatccgttgttctcaataatgaccacagagcctgagtataccaagaaaaccaatattcgcattacaggttgctcctgtccttccagacacctttcctgcctgtgtgactaacctaattttgctagttccataaatacacgattagtttagtaacagccatcacaatgtaccatgtacattcatggtgagagctaaagatcgacacagacttctaggagctttgttcatactgattacttaatccaattgtatagattgaatatttgagtggaaggaatttacactctgtttaaatgatgggattctatcgagatagcactcatgatcatgacctttttggtagtattcttaaacaaaattctacagagactaaatgttagcgatgatcctccattttcaattttaaccaattctgtcccctttctcaaaaccctgagccctgtgcatgctttctcagtcttgtggtgggactggatacaatgactaacttcccctcctcccctctttaaacaccattttccatggagttcaaaaaaattttttttcttaacgttacatatcatagtgaatggtttccccagtgtatatgaatgttttaagtgtctccaatagcttatgcagtctaggagctttccaatactcatttaattaagatttaatcatttgctaatggaaatcttaccacctttcatttttagcccgcaccgcattttaccctctagagtcagctatg

SEQ ID NO: 57114 - DNA, 9934 bp, Homo sapiens
  misc_feature (173)..(173): n is a, c, g, or t
atggggaggaacccgtatgtgtgagcgcctccaagcacagccccactgaaggatgaggaaagtgccaaggcggaggctgatgcatacatcagggagaagagggagtctgtggccagtggggatgaccgagccgaagaagacatggatgaggccattgagaaaggagaggctgnacaatctaaagaagtggctaaaaaggaggacaaaacacctatcaagaaggaggaaaaaccaaaaaaggaagaggtgaaaaaagaagtcaaaaaagagatcaagaaagaagagaaaaaagaacccaagaaagaggttaagaaagaaacaccgccaaaggaagtcaagaaggaagttaagaaggaagagaagaaggaagtgaaaaaggaagaaaaggaacccaaaaaagaaattaagaagctccctaaagacgcaaagaaatcatctactcctctgtctgaagcaaaaaaaccagctgctttaaaaccaaaagtacccaagaaggaagagtctgtcaagaaagattctgttgctgccggaaagccaaaggagaaggggaaaataaaagtcattaagaaggaaggcaaggccgcagaggctgtcgctgcagctgtcggcactggagccaccacagcagctgtcatggcggcagctggaatagcagccattggccctgccaaagaactcgaagctgagaggtcccttatgtcatctcctgaggatctaaccaaggactttgaagagttaaaggctgaagaggtcgatgtaacaaaggacatcaagcctcagctggagctaatcgaagacgaagagaaactgaaggaaactgagccagtcgaagcctacgtcatccagaaggagagagaagtcaccaaaggtcctgccgagtcccctgatgagggaatcactaccactgaaggggagggcgaatgtgaacagacacctgaggagctggagcccgtcgagaagcagggagtagacgacattgaaaaatttgaagatgaaggagccggttttgaagaatcttcagagactggagactatgaagagaaggcagaaactgaggaggctgaggagccagaagaggatggggaggaacacgtatgtgtgagcgcctccaagcacagccccactgaggatgaggaaagtgccaaggcggaggctgatgcatacatcagggagaagagggagtctgtggccagtggggatgaccgagccgaagaagacatggatgaggccattgagaaaggagaggctgaacaatctgaagaggaggctgatgaggaggacaaagctgaagatgccagagaggaggaatatgagccggaaaaaatggaagctgaagactatgtgatggctgtggtcgacaaggctgcagaggctggtggtgccgaggagcagtatggattcctcaccacaccaaccaagcaactaggagcccagtctcctggccgagaacctgcatcttcaattcatgatgagactttacctggaggctcagagagcgaggccaccgcttctgatgaggagaatcgagaagaccagcctgaggaattcactgccacctctggctacactcagtctactattgagatatccagtgagcccacccccatggatgagatgtctacccctcgagacgtgatgagtgatgagaccaacaatgaagagacggagtccccttctcaggaattcgtaaatatcaccaaatatgaatcttcattgtattctcaggaatactctaaacctgctgatgttacaccgctcaacggattttctgaaggatcaaaaacagatgccactgatggcaaggattacaatgcttcagcctctaccatatcaccaccctcttccatggaggaagacaaattcagcagatctgctttacgtgatgcttactgctctgaagtgaaagccagcaccactttggacatcaaagatagcatctcagctgtttcaagtgaaaaggtcagcccatcgaagagcccgtccctgagtccatctccaccatcacccttagaaaagacccccctgggtgaacgtagtgtgaacttctctctgacgcccaatgagattaaagtctctgcagaggcagaagtagccccggtgtctcctgaggtgacccaagaagtagttgaagaacattgtgctagtcctgaggacaagactctggaagtggtgtcaccatctcagtccgtgactggcagtgctggtcacacaccttactatcaatctcctactgacgagaaatccagtcatctccctacagaagtcattgaaaaaccaccagcagttccagtgagttttgaattcagtgatgccaaagatgagaatgaaagggcttcagtaagccccatggatgagcccgtgcctgactcagagtctcctattgaaaaagttttgtctcctttacgcagcccgcccctcattggatccgagtctgcttatgaaagttttctaagtgctgatgacaaggcttctggcagaggtgccgaaagtccttttgaagaaaagagtggaaaacaaggctctccagaccaagtaagtccagtttctgaaatgacttctactagtctttaccaagacaaacaggaagggaaaagcacagactttgcaccaataaaagaagactttggccaagaaaagaaaactgatgatgttgaagccatgagttctcaaccagcactggctctggatgaaaggaaattaggagatgtttctcccacacaaatagatgtcagtcagtttggatcttttaaagaagacactaagatgtccatttctgaaggtactgtctcagacaagtcagctactcctgttgatgagggcgtagcagaagacacgtactctcatatggagggtgtggcctcagtgtccacagcctcagtggctacgagctcatttccagagccaacaacagatgatgtgtctccatctctgcatgctgaggttggctccccacattccacagaagtagatgactccctttcagtgtctgttgtgcaaacacctaccacattccaggaaacagaaatgtctccatctaaagaagaatgcccaagaccgatgtcaatttctccaccagatttctcccctaaaactgcaaagtccaggacacccgttcaagatcacagatctgaacagtcctcaatgtctattgaatttggccaagaatctcctgagcaatcccttgctatggacttcagtcgacagtctccagatcaccctacagtgggtgcaggcgtgcttcacatcactgaaaatgggccaactgaagtggactacagtccttctgacatgcaggactccagtttatcacataagataccacctatggaggagccgtcctacacccaagataatgatctttctgagctcatctcagtatctcaggtagaggcctccccgtccacctcttctgctcataccccttctcagatcgcttctcctctccaagaagatactctatccgatgttgctcctcccagagatatgtccttatatgcctcactcacctctgaaaaagtgcaaagtctggaaggagagaagctctctccaaaatctgatatctctccactcaccccacgagagtcctctcctttatattcacctactttttcagattctacctctgcagtcaaagagaaaacagcaacttgccacagttcctcttctccaccaatagatgcagcatccgcagagccctatggcttccgtgcctcagtgttattcgatacaatgcaacaccatctagccttgaatagagatttgtccacacctggcctggagaaggacagtggagggaagacacctggtgactttagctatgcctatcaaaagcctgaggaaacaaccaggtccccagatgaagaagattatgactatgagtcttatgagaagaccacccggacctcagatgtgggtggctattactatgagaagatagagagaaccacaaaatctccaagtgacagtggctactcctatgagaccattgggaaaactaccaagacccctgaagatggtgactattcctatgaaattattgagaagaccacacggacccctgaagagggtgggtactcatatgacataagtgaaaagaccaccagcccccccgaagtgagtggttacagctatgaaaagactgagaggtctagaaggcttctggatgacatcagcaatggctatgatgactctgaggatggtggccacacacttggggaccccagctactcttatgaaaccactgagaaaattaccagtttccctgagtctgaaggttattcctatgagacatctacaaagacaacacgaacccctgatacttccacatactgttacgagactgcagagaaaatcactagaacccctcaggcatccacatattcctacgagacttcagacctatgctacactgcagaaaagaagtccccctcagaagcccgtcaggatgtcgatttatgcctcgtgtcctcttgtgaatacaagcaccccaagacagagctttcaccctctttcattaatcccaatcctcttgagtggtttgccagtgaagaacccactgaagaatctgaaaagcccctcactcaatcagggggagccccaccgcctccaggaggaaagcaacagggccgacagtgtgatgaaacccctcccacctcagtcagcgagtcagccccatcccagaccgactctgatgttcccccggagactgaagagtgcccctccatcacggccgatgccaatatcgactctgaagacgagtcggaaaccatccccacagacaaaactgtcacgtacaaacacatggacccacctccagctcccgtgcaagaccgcagcccttcgccacgccaccctgatgtgtccatggtggacccagaggccttggccattgagcagaacctgggcaaagctctaaagaaagatctgaaagagaagaccaaaaccaaaaagccaggtacaaagaccaagtcatcttcacctgtcaaaaagagtgatgggaagtctaagcccttggcagcttcaccaaaaccagcgggcttgaaagaatcctcggataaagtgtccagggtggcttctcctaagaagaaagaatctgtggaaaaggcagcaaaacccaccaccactcctgaggtcaaagctgcacgtggggaagagaaagacaaggagaccaagaatgctgccaatgcctctgcatccaagtcggccaagaccgccactgcaggaccaggaactaccaagacgaccaagtcatctgctgtgcccccaggcctccctgtgtatttggacctgtgctacattcctaaccacagcaatagtaagaatgttgatgtggaatttttcaagagagtgcggtcttcctactacgtggtgagtgggaatgaccctgctgctgaggagcccagccgggctgtcctggacgctttgttggaaggaaaggctcagtggggcagcaacatgcaggtgacactgatcccaactcatgactcagaagtgatgagggaatggtaccaggagacccatgagaaacagcaagatctcaacatcatggttttagcaagcagcagcacagtggttatgcaagatgaatccttccctgcatgcaagattgaactgtaaaaaccaaggccagccacaccacaggatctgaactttgtttccagaaattcttcaatttgaaatcaccttttctaaaaagtcaattcatctagttaagtcgctgaacaattacctgccaaatgctatactgtgtcatggtgatgcaagtcactaaatttctcagtttttgctgattgctaagggaaataacagtatttccacaatagggttcaaattcctgcaaaattacctaccccagttcatctctgctgaacatttggaaaccatgcactagccaacccaactgacttctgctaggtagaggcatttgtcttagagagagagagagcgcgggagagagtgagagagagtgagagcacaaagataacgcaggagagagagagagaaagaatgagaaagaaaaggaatgcaagagaaggagatgtaatgacagagagttctggtgagatacccagagagaaaaagagagagcagggtggggtaaggaggagaaaataaaccaacaattaggtctgcattttctcaggcagtaggcattctttagtctacataggcaaagttttccatttttgtcagtctgagtcatcaaaaagagtcttaattttctaaaacaagttggctagaagaaagtaaaaagaacaacacttgttatgagggcatgtgatattttcacatcttaattaagctccttcagtttgaaggctgcacactgacataatgtagtgagtgtagactggccatgcaagtggtttgggccccattcagaactctcagactctaaacacacaagtagattgatctaaggcatgctcccagcatttgtccacccacttagtccactctgagtcgattaacctgcatgcagcaacacccaagtccaccccaattaactgaagcaaataccaaagcagttgggagtacatatggtagacaatttgccttaggaagtgacttgaatgtacaaagatacttgatgcacttattttttaatgtgagacagcaagtttataaaacatccatataggattatagatacttaaaggaacacgtgggtgagcgtgtgtgggggtactagaagctgatctgattggtccaacagtttgatgctgagtcatgcgtgttgaatcccacttcagtgcacctgtggcctctcagtcaaacaagttgtgcctttcacagcttctttactactgcaagttcaagactgaaatggcttctatgatcagaactgggaaaacagtgaatcttatggtggaagaggttctcagcaagtgtacagtatttaccttcctttgtcttacattggctttttaaattttccattaatttcaacataattatgggaacaagtgtacagaagaattttttttttaagatatgtgagaacttttcatagatgaactttttaacaaatgttttcatttacaggaaattgcaaagaaaattctcaagtgatagtctttttttttaagtgtttcgtaagacaaaaattgaataatgttttttgaagttctggcaagattgaagtctgatattgcagtaatgatatttattaaaaacccataactaccaggaataatgatacctcccaccccttgattcccataacataaaagtgctacttgagagtgggggagaatggcatggtaggctacttttcagggccttgacaagtacatcacccagtggtatcctacatacttctttcaagatcttcaaccatgaggtaaaagagccaagttcaaagaaccctagcacaaatttgctttgggattttcttttctggaaaaaaaaaataaaagaaatagtacattgaaaacaaatgaattctcaactcctacggttcatgtagagtttagagaaaatttccatcattgtcatcattgaactgtgaacctgggaagccagatcatgattaacactgacatcaagtttcaagttgcagatcaatgcacccagtgttcagatgaggcaaacttctccgtgacaactgtgctgtgctctgtcacattacatttcctgcagactctaagatctacggagtagagaacaatgacctcattttattttctatgttagttatttatttcaaaattaacattttagttgatttttgtctgataagtctatgttttgcactgctaactatgatgagggtttaaaaaaatgcttcttcagggtcctttcactgaggacctatgcagtctacttaatgctgtgaattacatttttcaaatgtttaattttttaaagaaaattaatattctatttttgttaggcttctctagaaatgcagcttttatttattaccccatttctttcaagtccttggaaaataacatattaagggtacaagaaattaacacatgatggaaaagtcattgtgacgccaatgaatttcattgagtataaactcatctacttcaaatttattttataagacaacctaagatactcaagataattatttaatggttagctcttaagttgaattggtctacataatgcgtgggaagaaaaccagatttttagccttcttgccaaatccagacctctggttgatttttctttgacagaagatgcaagttattttccaatttcacaattaaatgtatttaacctgaacattattttgctttaaaaactataaacattgtaggagaattatagccagtcttcagttataaccactccaccctcctcactttctctctctctctctctttttttttgctatgggatttaatgggaaaaatatgtaaaaactgtcactagtcagctggctctttttcctatgaaatctatcagtacctttctccatccgttgttctcaataatgaccacagagcctgagtataccaagaaaaccaatattcgcattacaggttgctcctgtccttccagacacctttcctgcctgtgtgactaacctaattttgctagttccataaatacacgattagtttagtaacagccatcacaatgtaccatgtacattcatggtgagagctaaagatcgacacagacttctaggagctttgttcatactgattacttaatccaattgtatagattgaatatttgagtggaaggaatttacactctgtttaaatgatgggattctatcgagatagcactcatgatcatgacctttttggtagtattcttaaacaaaattctacagagactaaatgttagcgatgatcctccattttcaattttaaccaattctgtcccctttctcaaaaccctgagccctgtgcatgctttctcagtcttgtggtgggactggatacaatgactaacttcccctcctcccctctttaaacaccattttccatggagttcaaaaaaattttttttcttaacgttacatatcatagtgaatggtttccccagtgtatatgaatgttttaagtgtctccaatagcttatgcagtctaggagctttccaatactcatttaattaagatttaatcatttgctaatggaaatcttaccacctttcattttccctctgttaccaaatttcagctcttaggagctgctctacaattctgaatttgcttttcttgcctctctttagtcacctgtcacaggaggttcctgctcagtaatgatattgtgagttaggataataactttttttttttgtgcttcagatttagaagaaaagatcctgtttccatttgaaaggaactgtaagcttttatcttttaaccaactgaacaatacaccaaaagcagcctagggatgagcatttctttgaaagcaattaggttattcacctggtattaaaactatttactgttaaaaaatctgtgacttcatgaagttgatttttaaaggcagcatcaaaaactgaaaaggaagggaaaaaataggcagcttctctgcacttgtttggagctccccaaaacaggagccatggagaagtggcatcaagaccgggctgccctttcgagaacaccctgtggcagttcagagacacgcttttcctacactgcatgcagcccctctttccagcactggaaagaagtggtcttgagcccagctgagaagcacttcacactcctctctcttgttctgaatggtgtttgtgtcagtctgcagctgtgtatggtattatgtcttataatcctgcatcacttctatcctatccagtcatatctaatgtagaaaattagtttccagtgaaagtaatatgtagtgcttttatgatatttgtgtgcaatatcccctcttccattgaggatatttgatgtaaaggaaaaaaaaaaactcagttccacaataaaatacaaaagtggcaaaagtt

SEQ ID NO: 57115 - DNA, 8016 bp, Homo sapiens
gtcactcaggagacaccggactacttctgcctctgcagagactttaatctcattgggcgtcagagagaagtccatctccaccatcacccttagaaaagacccccctgggtgaacgtagtgtgaacttctctctgacgcccaatgagattaaagtctctgcagaggcagaagtagccccggtgtctcctgaggtgacccaagaagtagttgaagaacattgtgctagtcctgaggacaagactctggaagtggtgtcaccatctcagtccgtgactggcagtgctggtcacacaccttactatcaatctcctactgacgagaaatccagtcatctccctacagaagtcattgaaaaaccaccagcagttccagtgagttttgaattcagtgatgccaaagatgagaatgaaagggcttcagtaagccccatggatgagcccgtgcctgactcagagtctcctattgaaaaagttttgtctcctttacgcagcccgcccctcattggatccgagtctgcttatgaaagttttctaagtgctgatgacaaggcttctggcagaggtgccgaaagtccttttgaagaaaagagtggaaaacaaggctctccagaccaagtaagtccagtttctgaaatgacttctactagtctttaccaagacaaacaggaagggaaaagcacagactttgcaccaataaaagaagactttggccaagaaaagaaaactgatgatgttgaagccatgagttctcaaccagcactggctctggatgaaaggaaattaggagatgtttctcccacacaaatagatgtcagtcagtttggatcttttaaagaagacactaagatgtccatttctgaaggtactgtctcagacaagtcagctactcctgttgatgagggcgtagcagaagacacgtactctcatatggagggtgtggcctcagtgtccacagcctcagtggctacgagctcatttccagagccaacaacagatgatgtgtctccatctctgcatgctgaggttggctccccacattccacagaagtagatgactccctttcagtgtctgttgtgcaaacacctaccacattccaggaaacagaaatgtctccatctaaagaagaatgcccaagaccgatgtcaatttctccaccagatttctcccctaaaactgcaaagtccaggacacccgttcaagatcacagatctgaacagtcctcaatgtctattgaatttggccaagaatctcctgagcaatcccttgctatggacttcagtcgacagtctccagatcaccctacagtgggtgcaggcgtgcttcacatcactgaaaatgggccaactgaagtggactacagtccttctgacatgcaggactccagtttatcacataagataccacctatggaggagccgtcctacacccaagataatgatctttctgagctcatctcagtatctcaggtagaggcctccccgtccacctcttctgctcataccccttctcagatcgcttctcctctccaagaagatactctatccgatgttgctcctcccagagatatgtccttatatgcctcactcacctctgaaaaagtgcaaagtctggaaggagagaagctctctccaaaatctgatatctctccactcaccccacgagagtcctctcctttatattcacctactttttcagattctacctctgcagtcaaagagaaaacagcaacttgccacagttcctcttctccaccaatagatgcagcatccgcagagccctatggcttccgtgcctcagtgttattcgatacaatgcaacaccatctagccttgaatagagatttgtccacacctggcctggagaaggacagtggagggaagacacctggtgactttagctatgcctatcaaaagcctgaggaaacaaccaggtccccagatgaagaagattatgactatgagtcttatgagaagaccacccggacctcagatgtgggtggctattactatgagaagatagagagaaccacaaaatctccaagtgacagtggctactcctatgagaccattgggaaaactaccaagacccctgaagatggtgactattcctatgaaattattgagaagaccacacggacccctgaagagggtgggtactcatatgacataagtgaaaagaccaccagcccccccgaagtgagtggttacagctatgaaaagactgagaggtctagaaggcttctggatgacatcagcaatggctatgatgactctgaggatggtggccacacacttggggaccccagctactcttatgaaaccactgagaaaattaccagtttccctgagtctgaaggttattcctatgagacatctacaaagacaacacgaacccctgatacttccacatactgttacgagactgcagagaaaatcactagaacccctcaggcatccacatattcctacgagacttcagacctatgctacactgcagaaaagaagtccccctcagaagcccgtcaggatgtcgatttatgcctcgtgtcctcttgtgaatacaagcaccccaagacagagctttcaccctctttcattaatcccaatcctcttgagtggtttgccagtgaagaacccactgaagaatctgaaaagcccctcactcaatcagggggagccccaccgcctccaggaggaaagcaacagggccgacagtgtgatgaaacccctcccacctcagtcagcgagtcagccccatcccagaccgactctgatgttcccccggagactgaagagtgcccctccatcacggccgatgccaatatcgactctgaagacgagtcggaaaccatccccacagacaaaactgtcacgtacaaacacatggacccacctccagctcccgtgcaagaccgcagcccttcgccacgccaccctgatgtgtccatggtggacccagaggccttggccattgagcagaacctgggcaaagctctaaagaaagatctgaaagagaagaccaaaaccaaaaagccaggtacaaagaccaagtcatcttcacctgtcaaaaagagtgatgggaagtctaagcccttggcagcttcaccaaaaccagcgggcttgaaagaatcctcggataaagtgtccagggtggcttctcctaagaagaaagaatctgtggaaaaggcagcaaaacccaccaccactcctgaggtcaaagctgcacgtggggaagagaaagacaaggagaccaagaatgctgccaatgcctctgcatccaagtcggccaagaccgccactgcaggaccaggaactaccaagacgaccaagtcatctgctgtgcccccaggcctccctgtgtatttggacctgtgctacattcctaaccacagcaatagtaagaatgttgatgtggaatttttcaagagagtgcggtcttcctactacgtggtgagtgggaatgaccctgctgctgaggagcccagccgggctgtcctggacgctttgttggaaggaaaggctcagtggggcagcaacatgcaggtgacactgatcccaactcatgactcagaagtgatgagggaatggtaccaggagacccatgagaaacagcaagatctcaacatcatggttttagcaagcagcagcacagtggttatgcaagatgaatccttccctgcatgcaagattgaactgtaaaaaccaaggccagccacaccacaggatctgaactttgtttccagaaattcttcaatttgaaatcaccttttctaaaaagtcaattcatctagttaagtcgctgaacaattacctgccaaatgctatactgtgtcatggtgatgcaagtcactaaatttctcagtttttgctgattgctaagggaaataacagtatttccacaatagggttcaaattcctgcaaaattacctaccccagttcatctctgctgaacatttggaaaccatgcactagccaacccaactgacttctgctaggtagaggcatttgtcttagagagagagagagcgcgggagagagtgagagagagtgagagcacaaagataacgcaggagagagagagagaaagaatgagaaagaaaaggaatgcaagagaaggagatgtaatgacagagagttctggtgagatacccagagagaaaaagagagagcagggtggggtaaggaggagaaaataaaccaacaattaggtctgcattttctcaggcagtaggcattctttagtctacataggcaaagttttccatttttgtcagtctgagtcatcaaaaagagtcttaattttctaaaacaagttggctagaagaaagtaaaaagaacaacacttgttatgagggcatgtgatattttcacatcttaattaagctccttcagtttgaaggctgcacactgacataatgtagtgagtgtagactggccatgcaagtggtttgggccccattcagaactctcagactctaaacacacaagtagattgatctaaggcatgctcccagcatttgtccacccacttagtccactctgagtcgattaacctgcatgcagcaacacccaagtccaccccaattaactgaagcaaataccaaagcagttgggagtacatatggtagacaatttgccttaggaagtgacttgaatgtacaaagatacttgatgcacttattttttaatgtgagacagcaagtttataaaacatccatataggattatagatacttaaaggaacacgtgggtgagcgtgtgtgggggtactagaagctgatctgattggtccaacagtttgatgctgagtcatgcgtgttgaatcccacttcagtgcacctgtggcctctcagtcaaacaagttgtgcctttcacagcttctttactactgcaagttcaagactgaaatggcttctatgatcagaactgggaaaacagtgaatcttatggtggaagaggttctcagcaagtgtacagtatttaccttcctttgtcttacattggctttttaaattttccattaatttcaacataattatgggaacaagtgtacagaagaattttttttttaagatatgtgagaacttttcatagatgaactttttaacaaatgttttcatttacaggaaattgcaaagaaaattctcaagtgatagtctttttttttaagtgtttcgtaagacaaaaattgaataatgttttttgaagttctggcaagattgaagtctgatattgcagtaatgatatttattaaaaacccataactaccaggaataatgatacctcccaccccttgattcccataacataaaagtgctacttgagagtgggggagaatggcatggtaggctacttttcagggccttgacaagtacatcacccagtggtatcctacatacttctttcaagatcttcaaccatgaggtaaaagagccaagttcaaagaaccctagcacaaatttgctttgggattttcttttctggaaaaaaaaaataaaagaaatagtacattgaaaacaaatgaattctcaactcctacggttcatgtagagtttagagaaaatttccatcattgtcatcattgaactgtgaacctgggaagccagatcatgattaacactgacatcaagtttcaagttgcagatcaatgcacccagtgttcagatgaggcaaacttctccgtgacaactgtgctgtgctctgtcacattacatttcctgcagactctaagatctacggagtagagaacaatgacctcattttattttctatgttagttatttatttcaaaattaacattttagttgatttttgtctgataagtctatgttttgcactgctaactatgatgagggtttaaaaaaatgcttcttcagggtcctttcactgaggacctatgcagtctacttaatgctgtgaattacatttttcaaatgtttaattttttaaagaaaattaatattctatttttgttaggcttctctagaaatgcagcttttatttattaccccatttctttcaagtccttggaaaataacatattaagggtacaagaaattaacacatgatggaaaagtcattgtgacgccaatgaatttcattgagtataaactcatctacttcaaatttattttataagacaacctaagatactcaagataattatttaatggttagctcttaagttgaattggtctacataatgcgtgggaagaaaaccagatttttagccttcttgccaaatccagacctctggttgatttttctttgacagaagatgcaagttattttccaatttcacaattaaatgtatttaacctgaacattattttgctttaaaaactataaacattgtaggagaattatagccagtcttcagttataaccactccaccctcctcactttctctctctctctctctttttttttgctatgggatttaatgggaaaaatatgtaaaaactgtcactagtcagctggctctttttcctatgaaatctatcagtacctttctccatccgttgttctcaataatgaccacagagcctgagtataccaagaaaaccaatattcgcattacaggttgctcctgtccttccagacacctttcctgcctgtgtgactaacctaattttgctagttccataaatacacgattagtttagtaacagccatcacaatgtaccatgtacattcatggtgagagctaaagatcgacacagacttctaggagctttgttcatactgattacttaatccaattgtatagattgaatatttgagtggaaggaatttacactctgtttaaatgatgggattctatcgagatagcactcatgatcatgacctttttggtagtattcttaaacaaaattctacagagactaaatgttagcgatgatcctccattttcaattttaaccaattctgtcccctttctcaaaaccctgagccctgtgcatgctttctcagtcttgtggtgggactggatacaatgactaacttcccctcctcccctctttaaacaccattttccatggagttcaaaaaaattttttttcttaacgttacatatcatagtgaatggtttccccagtgtatatgaatgttttaagtgtctccaatagcttatgcagtctaggagctttccaatactcatttaattaagatttaatcatttgctaatggaaatcttaccacctttcattttccctctgttaccaaatttcagctcttaggagctgctctacaattctgaatttgcttttcttgcctctctttagtcacctgtcacaggaggttcctgctcagtaatgatattgtgagttaggataataactttttttttttgtgcttcagatttagaagaaaagatcctgtttccatttgaaaggaactgtaagcttttatcttttaaccaactgaacaatacaccaaaagcagcctagggatgagcatttctttgaaagcaattaggttattcacctggtattaaaactatttactgttaaaaaatctgtgacttcatgaagttgatttttaaaggcagcatcaaaaactgaaaaggaagggaaaaaataggcagcttctctgcacttgtttggagctccccaaaacaggagccatggagaagtggcatcaagaccgggctgccctttcgagaacaccctgtggcagttcagagacacgcttttcctacactgcatgcagcccctctttccagcactggaaagaagtggtcttgagcccagctgagaagcacttcacactcctctctcttgttctgaatggtgtttgtgtcagtctgcagctgtgtatggtattatgtcttataatcctgcatcacttctatcctatccagtcatatctaatgtagaaaattagtttccagtgaaagtaatatgtagtgcttttatgatatttgtgtgcaatatcccctcttccattgaggatatttgatgtaaaggaaaaaaaaaaactcagttccacaataaaatacaaaagtggcaaaagtt

SEQ ID NO: 57116 - DNA, 3981 bp, Homo sapiens
agttcccttacccgtacgcccaaaagataacgcaggagagagagagagaaagaatgagaaagaaaaggaatgcaagagaaggagatgtaatgacagagagttctggtgagatacccagagagaaaaagagagagcagggtggggtaaggaggagaaaataaaccaacaattaggtctgcattttctcaggcagtaggcattctttagtctacataggcaaagttttccatttttgtcagtctgagtcatcaaaaagagtcttaattttctaaaacaagttggctagaagaaagtaaaaagaacaacacttgttatgagggcatgtgatattttcacatcttaattaagctccttcagtttgaaggctgcacactgacataatgtagtgagtgtagactggccatgcaagtggtttgggccccattcagaactctcagactctaaacacacaagtagattgatctaaggcatgctcccagcatttgtccacccacttagtccactctgagtcgattaacctgcatgcagcaacacccaagtccaccccaattaactgaagcaaataccaaagcagttgggagtacatatggtagacaatttgccttaggaagtgacttgaatgtacaaagatacttgatgcacttattttttaatgtgagacagcaagtttataaaacatccatataggattatagatacttaaaggaacacgtgggtgagcgtgtgtgggggtactagaagctgatctgattggtccaacagtttgatgctgagtcatgcgtgttgaatcccacttcagtgcacctgtggcctctcagtcaaacaagttgtgcctttcacagcttctttactactgcaagttcaagactgaaatggcttctatgatcagaactgggaaaacagtgaatcttatggtggaagaggttctcagcaagtgtacagtatttaccttcctttgtcttacattggctttttaaattttccattaatttcaacataattatgggaacaagtgtacagaagaattttttttttaagatatgtgagaacttttcatagatgaactttttaacaaatgttttcatttacaggaaattgcaaagaaaattctcaagtgatagtctttttttttaagtgtttcgtaagacaaaaattgaataatgttttttgaagttctggcaagattgaagtctgatattgcagtaatgatatttattaaaaacccataactaccaggaataatgatacctcccaccccttgattcccataacataaaagtgctacttgagagtgggggagaatggcatggtaggctacttttcagggccttgacaagtacatcacccagtggtatcctacatacttctttcaagatcttcaaccatgaggtaaaagagccaagttcaaagaaccctagcacaaatttgctttgggattttcttttctggaaaaaaaaaataaaagaaatagtacattgaaaacaaatgaattctcaactcctacggttcatgtagagtttagagaaaatttccatcattgtcatcattgaactgtgaacctgggaagccagatcatgattaacactgacatcaagtttcaagttgcagatcaatgcacccagtgttcagatgaggcaaacttctccgtgacaactgtgctgtgctctgtcacattacatttcctgcagactctaagatctacggagtagagaacaatgacctcattttattttctatgttagttatttatttcaaaattaacattttagttgatttttgtctgataagtctatgttttgcactgctaactatgatgagggtttaaaaaaatgcttcttcagggtcctttcactgaggacctatgcagtctacttaatgctgtgaattacatttttcaaatgtttaattttttaaagaaaattaatattctatttttgttaggcttctctagaaatgcagcttttatttattaccccatttctttcaagtccttggaaaataacatattaagggtacaagaaattaacacatgatggaaaagtcattgtgacgccaatgaatttcattgagtataaactcatctacttcaaatttattttataagacaacctaagatactcaagataattatttaatggttagctcttaagttgaattggtctacataatgcgtgggaagaaaaccagatttttagccttcttgccaaatccagacctctggttgatttttctttgacagaagatgcaagttattttccaatttcacaattaaatgtatttaacctgaacattattttgctttaaaaactataaacattgtaggagaattatagccagtcttcagttataaccactccaccctcctcactttctctctctctctctctttttttttgctatgggatttaatgggaaaaatatgtaaaaactgtcactagtcagctggctctttttcctatgaaatctatcagtacctttctccatccgttgttctcaataatgaccacagagcctgagtataccaagaaaaccaatattcgcattacaggttgctcctgtccttccagacacctttcctgcctgtgtgactaacctaattttgctagttccataaatacacgattagtttagtaacagccatcacaatgtaccatgtacattcatggtgagagctaaagatcgacacagacttctaggagctttgttcatactgattacttaatccaattgtatagattgaatatttgagtggaaggaatttacactctgtttaaatgatgggattctatcgagatagcactcatgatcatgacctttttggtagtattcttaaacaaaattctacagagactaaatgttagcgatgatcctccattttcaattttaaccaattctgtcccctttctcaaaaccctgagccctgtgcatgctttctcagtcttgtggtgggactggatacaatgactaacttcccctcctcccctctttaaacaccattttccatggagttcaaaaaaattttttttcttaacgttacatatcatagtgaatggtttccccagtgtatatgaatgttttaagtgtctccaatagcttatgcagtctaggagctttccaatactcatttaattaagatttaatcatttgctaatggaaatcttaccacctttcattttccctctgttaccaaatttcagctcttaggagctgctctacaattctgaatttgcttttcttgcctctctttagtcacctgtcacaggaggttcctgctcagtaatgatattgtgagttaggataataactttttttttttgtgcttcagatttagaagaaaagatcctgtttccatttgaaaggaactgtaagcttttatcttttaaccaactgaacaatacaccaaaagcagcctagggatgagcatttctttgaaagcaattaggttattcacctggtattaaaactatttactgttaaaaaatctgtgacttcatgaagttgatttttaaaggcagcatcaaaaactgaaaaggaagggaaaaaataggcagcttctctgcacttgtttggagctccccaaaacaggagccatggagaagtggcatcaagaccgggctgccctttcgagaacaccctgtggcagttcagagacacgcttttcctacactgcatgcagcccctctttccagcactggaaagaagtggtcttgagcccagctgagaagcacttcacactcctctctcttgttctgaatggtgtttgtgtcagtctgcagctgtgtatggtattatgtcttataatcctgcatcacttctatcctatccagtcatatctaatgtagaaaattagtttccagtgaaagtaatatgtagtgcttttatgatatttgtgtgcaatatcccctcttccattgaggatatttgatgtaaaggaaaaaaaaaaactcagttccacaataaaatacaaaagtggcaaaagtt

SEQ ID NO: 57117 - DNA, 2129 bp, Homo sapiens
ctctaacctcccagaagaataccagtagacgaattacatttttcaaatgtttaattttttaaagaaaattaatattctatttttgttaggcttctctagaaatgcagcttttatttattaccccatttctttcaagtccttggaaaataacatattaagggtacaagaaattaacacatgatggaaaagtcattgtgacgccaatgaatttcattgagtataaactcatctacttcaaatttattttataagacaacctaagatactcaagataattatttaatggttagctcttaagttgaattggtctacataatgcgtgggaagaaaaccagatttttagccttcttgccaaatccagacctctggttgatttttctttgacagaagatgcaagttattttccaatttcacaattaaatgtatttaacctgaacattattttgctttaaaaactataaacattgtaggagaattatagccagtcttcagttataaccactccaccctcctcactttctctctctctctctctttttttttgctatgggatttaatgggaaaaatatgtaaaaactgtcactagtcagctggctctttttcctatgaaatctatcagtacctttctccatccgttgttctcaataatgaccacagagcctgagtataccaagaaaaccaatattcgcattacaggttgctcctgtccttccagacacctttcctgcctgtgtgactaacctaattttgctagttccataaatacacgattagtttagtaacagccatcacaatgtaccatgtacattcatggtgagagctaaagatcgacacagacttctaggagctttgttcatactgattacttaatccaattgtatagattgaatatttgagtggaaggaatttacactctgtttaaatgatgggattctatcgagatagcactcatgatcatgacctttttggtagtattcttaaacaaaattctacagagactaaatgttagcgatgatcctccattttcaattttaaccaattctgtcccctttctcaaaaccctgagccctgtgcatgctttctcagtcttgtggtgggactggatacaatgactaacttcccctcctcccctctttaaacaccattttccatggagttcaaaaaaattttttttcttaacgttacatatcatagtgaatggtttccccagtgtatatgaatgttttaagtgtctccaatagcttatgcagtctaggagctttccaatactcatttaattaagatttaatcatttgctaatggaaatcttaccacctttcattttccctctgttaccaaatttcagctcttaggagctgctctacaattctgaatttgcttttcttgcctctctttagtcacctgtcacaggaggttcctgctcagtaatgatattgtgagttaggataataactttttttttttgtgcttcagatttagaagaaaagatcctgtttccatttgaaaggaactgtaagcttttatcttttaaccaactgaacaatacaccaaaagcagcctagggatgagcatttctttgaaagcaattaggttattcacctggtattaaaactatttactgttaaaaaatctgtgacttcatgaagttgatttttaaaggcagcatcaaaaactgaaaaggaagggaaaaaataggcagcttctctgcacttgtttggagctccccaaaacaggagccatggagaagtggcatcaagaccgggctgccctttcgagaacaccctgtggcagttcagagacacgcttttcctacactgcatgcagcccctctttccagcactggaaagaagtggtcttgagcccagctgagaagcacttcacactcctctctcttgttctgaatggtgtttgtgtcagtctgcagctgtgtatggtattatgtcttataatcctgcatcacttctatcctatccagtcatatctaatgtagaaaattagtttccagtgaaagtaatatgtagtgcttttatgatatttgtgtgcaatatcccctcttccattgaggatatttgatgtaaaggaaaaaaaaaaactcagttccacaataaaatacaaaagtggcaaaagtt

SEQ ID NO: 57118 - DNA, 1810 bp, Homo sapiens
tcccagtggcaattcaatggaatccccgaatggaatcctccagactctggttgatttttctttgacagaagatgcaagttattttccaatttcacaattaaatgtatttaacctgaacattattttgctttaaaaactataaacattgtaggagaattatagccagtcttcagttataaccactccaccctcctcactttctctctctctctctctttttttttgctatgggatttaatgggaaaaatatgtaaaaactgtcactagtcagctggctctttttcctatgaaatctatcagtacctttctccatccgttgttctcaataatgaccacagagcctgagtataccaagaaaaccaatattcgcattacaggttgctcctgtccttccagacacctttcctgcctgtgtgactaacctaattttgctagttccataaatacacgattagtttagtaacagccatcacaatgtaccatgtacattcatggtgagagctaaagatcgacacagacttctaggagctttgttcatactgattacttaatccaattgtatagattgaatatttgagtggaaggaatttacactctgtttaaatgatgggattctatcgagatagcactcatgatcatgacctttttggtagtattcttaaacaaaattctacagagactaaatgttagcgatgatcctccattttcaattttaaccaattctgtcccctttctcaaaaccctgagccctgtgcatgctttctcagtcttgtggtgggactggatacaatgactaacttcccctcctcccctctttaaacaccattttccatggagttcaaaaaaattttttttcttaacgttacatatcatagtgaatggtttccccagtgtatatgaatgttttaagtgtctccaatagcttatgcagtctaggagctttccaatactcatttaattaagatttaatcatttgctaatggaaatcttaccacctttcattttccctctgttaccaaatttcagctcttaggagctgctctacaattctgaatttgcttttcttgcctctctttagtcacctgtcacaggaggttcctgctcagtaatgatattgtgagttaggataataactttttttttttgtgcttcagatttagaagaaaagatcctgtttccatttgaaaggaactgtaagcttttatcttttaaccaactgaacaatacaccaaaagcagcctagggatgagcatttctttgaaagcaattaggttattcacctggtattaaaactatttactgttaaaaaatctgtgacttcatgaagttgatttttaaaggcagcatcaaaaactgaaaaggaagggaaaaaataggcagcttctctgcacttgtttggagctccccaaaacaggagccatggagaagtggcatcaagaccgggctgccctttcgagaacaccctgtggcagttcagagacacgcttttcctacactgcatgcagcccctctttccagcactggaaagaagtggtcttgagcccagctgagaagcacttcacactcctctctcttgttctgaatggtgtttgtgtcagtctgcagctgtgtatggtattatgtcttataatcctgcatcacttctatcctatccagtcatatctaatgtagaaaattagtttccagtgaaagtaatatgtagtgcttttatgatatttgtgtgcaatatcccctcttccattgaggatatttgatgtaaaggaaaaaaaaaaactcagttccacaataaaatacaaaagtggcaaaagtt

SEQ ID NO: 57119 - DNA, 1622 bp, Homo sapiens
  misc_feature (16)..(16): n is a, c, g, or t
  misc_feature (23)..(25): n is a, c, g, or t
  misc_feature (28)..(29): n is a, c, g, or t
gaactagtctcgagtntcccccnnnccnntttttttgctatgggatttaatgggaaaaatatgtaaaaactgtcactagtcagctggctctttttcctatgaaatctatcagtacctttctccatccgttgttctcaataatgaccacagagcctgagtataccaagaaaaccaatattcgcattacaggttgctcctgtccttccagacacctttcctgcctgtgtgactaacctaattttgctagttccataaatacacgattagtttagtaacagccatcacaatgtaccatgtacattcatggtgagagctaaagatcgacacagacttctaggagctttgttcatactgattacttaatccaattgtatagattgaatatttgagtggaaggaatttacactctgtttaaatgatgggattctatcgagatagcactcatgatcatgacctttttggtagtattcttaaacaaaattctacagagactaaatgttagcgatgatcctccattttcaattttaaccaattctgtcccctttctcaaaaccctgagccctgtgcatgctttctcagtcttgtggtgggactggatacaatgactaacttcccctcctcccctctttaaacaccattttccatggagttcaaaaaaattttttttcttaacgttacatatcatagtgaatggtttccccagtgtatatgaatgttttaagtgtctccaatagcttatgcagtctaggagctttccaatactcatttaattaagatttaatcatttgctaatggaaatcttaccacctttcattttccctctgttaccaaatttcagctcttaggagctgctctacaattctgaatttgcttttcttgcctctctttagtcacctgtcacaggaggttcctgctcagtaatgatattgtgagttaggataataactttttttttttgtgcttcagatttagaagaaaagatcctgtttccatttgaaaggaactgtaagcttttatcttttaaccaactgaacaatacaccaaaagcagcctagggatgagcatttctttgaaagcaattaggttattcacctggtattaaaactatttactgttaaaaaatctgtgacttcatgaagttgatttttaaaggcagcatcaaaaactgaaaaggaagggaaaaaataggcagcttctctgcacttgtttggagctccccaaaacaggagccatggagaagtggcatcaagaccgggctgccctttcgagaacaccctgtggcagttcagagacacgcttttcctacactgcatgcagcccctctttccagcactggaaagaagtggtcttgagcccagctgagaagcacttcacactcctctctcttgttctgaatggtgtttgtgtcagtctgcagctgtgtatggtattatgtcttataatcctgcatcacttctatcctatccagtcatatctaatgtagaaaattagtttccagtgaaagtaatatgtagtgcttttatgatatttgtgtgcaatatcccctcttccattgaggatatttgatgtaaaggaaaaaaaaaaactcagttccacaataaaatacaaaagtggcaaaagtt

SEQ ID NO: 57120 - DNA, 7016 bp, Homo sapiens
tgcctagtctccatataaaagcggcgccgcctccccgccctctctcactccccgctcctctccgccgcgcactctccgcggcgctgggagagggcggagggggaggcggcgcgcggcgccagaggaggggggacgcagggggcggagcggagacagtaccttcggagataatcctttctcctgccgcagaggagaggagcggccggagcgagacacttcgccgaggcacagcagccggcaggatggcgaccgtggtggtggaagccaccgagccggagccgtccggcagcatcgccaacccggcggcgtccacctcgcctagcctgtcgcaccgcttccttgacagcaagttctacttgctggtggtcgtcggcgagatcgtgaccgaggagcacctgcggcgtgccatcggcaacatcgagctcggaatccgatcatgggacacaaacctgattgaatgcaacttggaccaagaactcaaactttttgtatctcgacactctgcaagattctctcctgaagtcccaggacaaaagatccttcatcaccgaagtgacgttttagaaacagtggtcctgatcaacccttctgatgaagcagtcagcaccgaggtgcgcttaatgatcactgatgctgcccgacacaagctgctcgtgctgaccgggcagtgctttgaaaataccggagagctcattctccagtccggctctttctccttccagaacttcatagagattttcaccgatcaagagatcggggagttactaagcaccacccatcctgccaacaaagccagcttaaccctgttctgtcctgaagaaggggactggaagaactccaatcttgacagacacaatctccaagacttcatcaatattaaactcaattcagcttctatcttgccagaaatggaaggactttctgagtttaccgagtatctctcagaatcagtggaagtcccatctccctttgacatcttggaacctcccacatcgggtggatttctgaagctctccaagccctgctgttatatttttccaggagggaggggcgattctgccttgtttgcagtgaatggtttcaatatgctcatcaatggcggatcagagagaaaatcctgcttctggaagctcatccgacacttagaccgagtggactccatcctgctcacccacattggggatgacaatttgcctggaataaacagcatgttacagcggaaaattgcagagctcgaggaagaacagtcccagggctccaccacaaatagtgactggatgaaaaacctcatctcccctgacttaggagttgtatttctcaatgtacctgaaaatctcaaaaatccagagccaaacatcaagatgaagagaagcatagaagaagcctgcttcactctccagtacctaaacaaattgtccatgaaaccagaacctctgtttagaagtgtaggcaatactattgatcctgtcattcttttccaaaaaatgggagtaggtaaacttgagatgtatgtgcttaatccagtcaagagcagcaaggaaatgcagtattttatgcagcagtggactggtaccaacaaagacaaggctgaattcattctgcctaatggtcaagaagtagatctcccgatttcctacttaacttcagtctcatctttgattgtgtggcatccagcaaaccctgcggagaaaatcatccgagtcctgtttcctgggaacagcacccagtacaacatcctggaagggttggaaaagctcaaacatctagactttctgaagcagccactggccacccaaaaggatctcactggccaggtgcccactcctgtggtgaaacaaacaaaactgaaacagagggctgatagccgagaaagtctgaagccagccgcaaaaccacttcctagcaaatccgtgcgcaaggagtcaaaagaagaaacccctgaggtcacaaaagtgaatcacgtggaaaagccacccaaagttgaaagcaaagaaaaggtaatggtgaaaaaagacaagccagtaaaaacagagaccaaaccttcagtgactgaaaaggaggttcccagcaaagaagagccatctccagtgaaagccgaggtggctgagaagcaagccacagatgtcaaacccaaagctgccaaggagaagacggtgaaaaaggaaacaaaggtaaagcctgaagacaagaaagaggagaaagaaaagccaaagaaagaagtggctaaaaaggaggacaaaacacctatcaagaaggaggaaaaaccaaaaaaggaagaggtgaaaaaagaagtcaaaaaagagatcaagaaagaagagaaaaaagaacccaagaaagaggttaagaaagaaacaccgccaaaggaagtcaagaaggaagttaagaaggaagagaagaaggaagtgaaaaaggaagaaaaggaacccaaaaaagaaattaagaagctccctaaagacgcaaagaaatcatctactcctctgtctgaagcaaaaaaaccagctgctttaaaaccaaaagtacccaagaaggaagagtctgtcaagaaagattctgttgctgccggaaagccaaaggagaaggggaaaataaaagtcattaagaaggaaggcaaggccgcagaggctgtcgctgcagctgtcggcactggagccaccacagcagctgtcatggcggcagctggaatagcagccattggccctgccaaagaactcgaagctgagaggtcccttatgtcatctcctgaggatctaaccaaggactttgaagagttaaaggctgaagaggtcgatgtaacaaaggacatcaagcctcagctggagctaatcgaagacgaagagaaactgaaggaaactgagccagtcgaagcctacgtcatccagaaggagagagaagtcaccaaaggtcctgccgagtcccctgatgagggaatcactaccactgaaggggagggcgaatgtgaacagacacctgaggagctggagcccgtcgagaagcagggagtagacgacattgaaaaatttgaagatgaaggagccggttttgaagaatcttcagagactggagactatgaagagaaggcagaaactgaggaggctgaggagccagaagaggatggggaggaacacgtatgtgtgagcgcctccaagcacagccccactgaggatgaggaaagtgccaaggcggaggctgatgcatacatcagggagaagagggagtctgtggccagtggggatgaccgagccgaagaagacatggatgaggccattgagaaaggagaggctgaacaatctgaagaggaggctgatgaggaggacaaagctgaagatgccagagaggaggaatatgagccggaaaaaatggaagctgaagactatgtgatggctgtggtcgacaaggctgcagaggctggtggtgccgaggagcagtatggattcctcaccacaccaaccaagcaactaggagcccagtctcctggccgagaacctgcatcttcaattcatgatgagactttacctggaggctcagagagcgaggccaccgcttctgatgaggagaatcgagaagaccagcctgaggaattcactgccacctctggctacactcagtctactattgagatatccagtgagcccacccccatggatgagatgtctacccctcgagacgtgatgagtgatgagaccaacaatgaagagacggagtccccttctcaggaattcgtaaatatcaccaaatatgaatcttcattgtattctcaggaatactctaaacctgctgatgttacaccgctcaacggattttctgaaggatcaaaaacagatgccactgatggcaaggattacaatgcttcagcctctaccatatcaccaccctcttccatggaggaagacaaattcagcagatctgctttacgtgatgcttactgctctgaagtgaaagccagcaccactttggacatcaaagatagcatctcagctgtttcaagtgaaaaggtcagcccatcgaagagcccgtccctgagtccatctccaccatcacccttagaaaagacccccctgggtgaacgtagtgtgaacttctctctgacgcccaatgagattaaagtctctgcagaggcagaagtagccccggtgtctcctgaggtgacccaagaagtagttgaagaacattgtgctagtcctgaggacaagactctggaagtggtgtcaccatctcagtccgtgactggcagtgctggtcacacaccttactatcaatctcctactgacgagaaatccagtcatctccctacagaagtcattgaaaaaccaccagcagttccagtgagttttgaattcagtgatgccaaagatgagaatgaaagggcttcagtaagccccatggatgagcccgtgcctgactcagagtctcctattgaaaaagttttgtctcctttacgcagcccgcccctcattggatccgagtctgcttatgaaagttttctaagtgctgatgacaaggcttctggcagaggtgccgaaagtccttttgaagaaaagagtggaaaacaaggctctccagaccaagtaagtccagtttctgaaatgacttctactagtctttaccaagacaaacaggaagggaaaagcacagactttgcaccaataaaagaagactttggccaagaaaagaaaactgatgatgttgaagccatgagttctcaaccagcactggctctggatgaaaggaaattaggagatgtttctcccacacaaatagatgtcagtcagtttggatcttttaaagaagacactaagatgtccatttctgaaggtactgtctcagacaagtcagctactcctgttgatgagggcgtagcagaagacacgtactctcatatggagggtgtggcctcagtgtccacagcctcagtggctacgagctcatttccagagccaacaacagatgatgtgtctccatctctgcatgctgaggttggctccccacattccacagaagtagatgactccctttcagtgtctgttgtgcaaacacctaccacattccaggaaacagaaatgtctccatctaaagaagaatgcccaagaccgatgtcaatttctccaccagatttctcccctaaaactgcaaagtccaggacacccgttcaagatcacagatctgaacagtcctcaatgtctattgaatttggccaagaatctcctgagcaatcccttgctatggacttcagtcgacagtctccagatcaccctacagtgggtgcaggcgtgcttcacatcactgaaaatgggccaactgaagtggactacagtccttctgacatgcaggactccagtttatcacataagataccacctatggaggagccgtcctacacccaagataatgatctttctgagctcatctcagtatctcaggtagaggcctccccgtccacctcttctgctcataccccttctcagatcgcttctcctctccaagaagatactctatccgatgttgctcctcccagagatatgtccttatatgcctcactcacctctgaaaaagtgcaaagtctggaaggagagaagctctctccaaaatctgatatctctccactcaccccacgagagtcctctcctttatattcacctactttttcagattctacctctgcagtcaaagagaaaacagcaacttgccacagttcctcttctccaccaatagatgcagcatccgcagagccctatggcttccgtgcctcagtgttattcgatacaatgcaacaccatctagccttgaatagagatttgtccacacctggcctggagaaggacagtggagggaagacacctggtgactttagctatgcctatcaaaagcctgaggaaacaaccaggtccccagatgaagaagattatgactatgagtcttatgagaagaccacccggacctcagatgtgggtggctattactatgagaagatagagagaaccacaaaatctccaagtgacagtggctactcctatgagaccattgggaaaactaccaagacccctgaagatggtgactattcctatgaaattattgagaagaccacacggacccctgaagagggtgggtactcatatgacataagtgaaaagaccaccagcccccccgaagtgagtggttacagctatgaaaagactgagaggtctagaaggcttctggatgacatcagcaatggctatgatgactctgaggatggtggccacacacttggggaccccagctactcttatgaaaccactgagaaaattaccagtttccctgagtctgaaggttattcctatgagacatctacaaagacaacacgaacccctgatacttccacatactgttacgagactgcagagaaaatcactagaacccctcaggcatccacatattcctacgagacttcagacctatgctacactgcagaaaagaagtccccctcagaagcccgtcaggatgtcgatttatgcctcgtgtcctcttgtgaatacaagcaccccaagacagagctttcaccctctttcattaatcccaatcctcttgagtggtttgccagtgaagaacccactgaagaatctgaaaagcccctcactcaatcagggggagccccaccgcctccaggaggaaagcaacagggccgacagtgtgatgaaacccctcccacctcagtcagcgagtcagccccatcccagaccgactctgatgttcccccggagactgaagagtgcccctccatcacggccgatgccaatatcgactctgaagacgagtcggaaaccatccccacagacaaaactgtcacgtacaaaacacctatcaagaaggaggaaaaaccaaaaaaggaagaggtgaaaaaagaagtcaaaaaagagatcaagaaagaagagaaaaaagaacccaagaaagaggttaagaaagaaacaccgccaaaggaagtcaagaaggaagttaagaaggaagagaagaaggaagtgaaaaaggaagaaaaggaaccc

SEQ ID NO: 57121 - DNA, 1175 bp, Homo sapiens
tattacaccatacaactactttatttattagttctgcctgacctgtaatgtaatctgcatgatgcgctggctgttttctgattcagactacatatttcagattggatctacttgttgtattttttttttctcctgcaacctgaaggccaggcagagagggttcattgaaatctaggatttgttagattgtattttaatcagtttcacagcataccctccttctcccaagcctattgcccaatctcagaatgagatcaaaataaactgaaattgtccttactcactttcacaaagttgctagttagaagcaaaatgtccaatccatcctgtaggaagaaagtccattataatggactttcttcaaaacaccccctctgttaccaaatttcagctcttaggagctgctctacaattctgaatttgcttttcttgcctctctttagtcacctgtcacaggaggttcctgctcagtaatgatattgtgagttaggataataactttttttttttgtgcttcagatttagaagaaaagatcctgtttccatttgaaaggaactgtaagcttttatcttttaaccaactgaacaatacaccaaaagcagcctagggatgagcatttctttgaaagcaattaggttattcacctggtattaaaactatttactgttaaaaaatctgtgacttcatgaagttgatttttaaaggcagcatcaaaaactgaaaaggaagggaaaaaataggcagcttctctgcacttgtttggagctccccaaaacaggagccatggagaagtggcatcaagaccgggctgccctttcgagaacaccctgtggcagttcagagacacgcttttcctacactgcatgcagcccctctttccagcactggaaagaagtggtcttgagcccagctgagaagcacttcacactcctctctcttgttctgaatggtgtttgtgtcagtctgcagctgtgtatggtattatgtcttataatcctgcatcacttctatcctatccagtcatatctaatgtagaaaattagtttccagtgaaagtaatatgtagtgcttttatgatatttgtgtgcaatatcccctcttccattgaggatatttgatgtaaaggaaaaaaaaaaactcagttccacaataaaatacaaaagtggcaaaagtt

SEQ ID NO: 57122 - DNA, 3806 bp, Homo sapiens
tgcctagtctccatataaaagcggcgccgcctccccgccctctctcactccccgctcctctccgccgcgcactctccgcggcgctgggagagggcggagggggaggcggcgcgcggcgccagaggaggggggacgcagggggcggagcggagacagtaccttcggagataatcctttctcctgccgcagaggagaggagcggccggagcgagacacttcgccgaggcacagcagccggcaggatggcgaccgtggtggtggaagccaccgagccggagccgtccggcagcatcgccaacccggcggcgtccacctcgcctagcctgtcgcaccgcttccttgacagcaagttctacttgctggtggtcgtcggcgagatcgtgaccgaggagcacctgcggcgtgccatcggcaacatcgagctcggaatccgatcatgggacacaaacctgattgaatgcaacttggaccaagaactcaaactttttgtatctcgacactctgcaagattctctcctgaagtcccaggacaaaagatccttcatcaccgaagtgacgttttagaaacagtggtcctgatcaacccttctgatgaagcagtcagcaccgaggtgcgcttaatgatcactgatgctgcccgacacaagctgctcgtgctgaccgggcagtgctttgaaaataccggagagctcattctccagtccggctctttctccttccagaacttcatagagattttcaccgatcaagagatcggggagttactaagcaccacccatcctgccaacaaagccagcttaaccctgttctgtcctgaagaaggggactggaagaactccaatcttgacagacacaatctccaagacttcatcaatattaaactcaattcagcttctatcttgccagaaatggaaggactttctgagtttaccgagtatctctcagaatcagtggaagtcccatctccctttgacatcttggaacctcccacatcgggtggatttctgaagctctccaagccctgctgttatatttttccaggagggaggggcgattctgccttgtttgcagtgaatggtttcaatatgctcatcaatggcggatcagagagaaaatcctgcttctggaagctcatccgacacttagaccgagtggactccatcctgctcacccacattggggatgacaatttgcctggaataaacagcatgttacagcggaaaattgcagagctcgaggaagaacagtcccagggctccaccacaaatagtgactggatgaaaaacctcatctcccctgacttaggagttgtatttctcaatgtacctgaaaatctcaaaaatccagagccaaacatcaagatgaagagaagcatagaagaagcctgcttcactctccagtacctaaacaaattgtccatgaaaccagaacctctgtttagaagtgtaggcaatactattgatcctgtcattcttttccaaaaaatgggagtaggtaaacttgagatgtatgtgcttaatccagtcaagagcagcaaggaaatgcagtattttatgcagcagtggactggtaccaacaaagacaaggctgaattcattctgcctaatggtcaagaagtagatctcccgatttcctacttaacttcagtctcatctttgattgtgtggcatccagcaaaccctgcggagaaaatcatccgagtcctgtttcctgggaacagcacccagtacaacatcctggaagggttggaaaagctcaaacatctagactttctgaagcagccactggccacccaaaaggatctcactggccaggtgcccactcctgtggtgaaacaaacaaaactgaaacagagggctgatagccgagaaagtctgaagccagccgcaaaaccacttcctagcaaatccgtgcgcaaggagtcaaaagaagaaacccctgaggtcacaaaagtgaatcacgtggaaaagccacccaaagttgaaagcaaagaaaaggtaatggtgaaaaaagacaagccagtaaaaacagagaccaaaccttcagtgactgaaaaggaggttcccagcaaagaagagccatctccagtgaaagccgaggtggctgagaagcaagccacagatgtcaaacccaaagctgccaaggagaagacggtgaaaaaggaaacaaaggtaaagcctgaagacaagaaagaggagaaagaaaagccaaagaaagaagtggctaaaaaggaggacaaaacacctatcaagaaggaggaaaaaccaaaaaaggaagaggtgaaaaaagaagtcaaaaaagagatcaagaaagaagagaaaaaagaacccaagaaagaggttaagaaagaaacaccgccaaaggaagtcaagaaggaagttaagaaggaagagaagaaggaagtgaaaaaggaagaaaaggaacccaaaaaagaaattaagaagctccctaaagacgcaaagaaatcatctactcctctgtctgaagcaaaaaaaccagctgctttaaaaccaaaagtacccaagaaggaagagtctgtcaagaaagattctgttgctgccggaaagccaaaggagaaggggaaaataaaagtcattaagaaggaaggcaaggccgcagaggctgtcgctgcagctgtcggcactggagccaccacagcagctgtcatggcggcagctggaatagcagccattggccctgccaaagaactcgaagctgagaggtcccttatgtcatctcctgaggatctaaccaaggactttgaagagttaaaggctgaagaggtcgatgtaacaaaggacatcaagcctcagctggagctaatcgaagacgaagagaaactgaaggaaactgagccagtcgaagcctacgtcatccagaaggagagagaagtcaccaaaggtcctgccgagtcccctgatgagggaatcactaccactgaaggggagggcgaatgtgaacagacacctgaggagctggagcccgtcgagaagcagggagtagacgacattgaaaaatttgaagatgaaggagccggttttgaagaatcttcagagactggagactatgaagagaaggcagaaactgaggaggctgaggagccagaagaggatggggaggaacacgtatgtgtgagcgcctccaagcacagccccactgaggatgaggaaagtgccaaggcggaggctgatgcatacatcagggagaagagggagtctgtggccagtggggatgaccgagccgaagaagacatggatgaggccattgagaaaggagaggctgaacaatctgaagaggaggctgatgaggaggacaaagctgaagatgccagagaggaggaatatgagccggaaaaaatggaagctgaagactatgtgatggctgtggtcgacaaggctgcagaggctggtggtgccgaggagcagtatggattcctcaccacaccaaccaagcaactaggagcccagtctcctggccgagaacctgcatcttcaattcatgatgagactttacctggaggctcagagagcgaggccaccgcttctgatgaggagaatcgagaagaccagcctgaggaattcactgccacctctggctacactcagtctactattgagatatccagtgagcccacccccatggatgagatgtctacccctcgagacgtgatgagtgatgagaccaacaatgaagagacggagtccccttctcaggaattcgtaaatatcaccaaatatgaatcttcattgtattctcaggaatactctaaacctgctgatgttacacatccgtactgcccgggtacc

SEQ ID NO: 57123 - DNA, 2500 bp, Homo sapiens
tgcctagtctccatataaaagcggcgccgcctccccgccctctctcactccccgctcctctccgccgcgcactctccgcggcgctgggagagggcggagggggaggcggcgcgcggcgccagaggaggggggacgcagggggcggagcggagacagtaccttcggagataatcctttctcctgccgcagaggagaggagcggccggagcgagacacttcgccgaggcacagcagccggcaggatggcgaccgtggtggtggaagccaccgagccggagccgtccggcagcatcgccaacccggcggcgtccacctcgcctagcctgtcgcaccgcttccttgacagcaagttctacttgctggtggtcgtcggcgagatcgtgaccgaggagcacctgcggcgtgccatcggcaacatcgagctcggaatccgatcatgggacacaaacctgattgaatgcaacttggaccaagaactcaaactttttgtatctcgacactctgcaagattctctcctgaagtcccaggacaaaagatccttcatcaccgaagtgacgttttagaaacagtggtcctgatcaacccttctgatgaagcagtcagcaccgaggtgcgcttaatgatcactgatgctgcccgacacaagctgctcgtgctgaccgggcagtgctttgaaaataccggagagctcattctccagtccggctctttctccttccagaacttcatagagattttcaccgatcaagagatcggggagttactaagcaccacccatcctgccaacaaagccagcttaaccctgttctgtcctgaagaaggggactggaagaactccaatcttgacagacacaatctccaagacttcatcaatattaaactcaattcagcttctatcttgccagaaatggaaggactttctgagtttaccgagtatctctcagaatcagtggaagtcccatctccctttgacatcttggaacctcccacatcgggtggatttctgaagctctccaagccctgctgttatatttttccaggagggaggggcgattctgccttgtttgcagtgaatggtttcaatatgctcatcaatggcggatcagagagaaaatcctgcttctggaagctcatccgacacttagaccgagtggactccatcctgctcacccacattggggatgacaatttgcctggaataaacagcatgttacagcggaaaattgcagagctcgaggaagaacagtcccagggctccaccacaaatagtgactggatgaaaaacctcatctcccctgacttaggagttgtatttctcaatgtacctgaaaatctcaaaaatccagagccaaacatcaagatgaagagaagcatagaagaagcctgcttcactctccagtacctaaacaaattgtccatgaaaccagaacctctgtttagaagtgtaggcaatactattgatcctgtcattcttttccaaaaaatgggagtaggtaaacttgagatgtatgtgcttaatccagtcaagagcagcaaggaaatgcagtattttatgcagcagtggactggtaccaacaaagacaaggctgaattcattctgcctaatggtcaagaagtagatctcccgatttcctacttaacttcagtctcatctttgattgtgtggcatccagcaaaccctgcggagaaaatcatccgagtcctgtttcctgggaacagcacccagtacaacatcctggaagggttggaaaagctcaaacatctagactttctgaagcagccactggccacccaaaaggatctcactggccaggtgcccactcctgtggtgaaacaaacaaaactgaaacagagggctgatagccgagaaagtctgaagccagccgcaaaaccacttcctagcaaatccgtgcgcaaggagtcaaaagaagaaacccctgaggtcacaaaagtgaatcacgtggaaaagccacccaaagttgaaagcaaagaaaaggtaatggtgaaaaaagacaagccagtaaaaacagagaccaaaccttcagtgactgaaaaggaggttcccagcaaagaagagccatctccagtgaaagccgaggtggctgagaagcaagccacagatgtcaaacccaaagctgccaaggagaagacggtgaaaaaggaaacaaaggtaaagcctgaagacaagaaagaggagaaagaaaagccaaagaaagaagtggctaaaaaggaggacaaaacacctatcaagaaggaggaaaaaccaaaaaaggaagaggtgaaaaaagaagtcaaaaaagagatcaagaaagaagagaaaaaagaacccaagaaagaggttaagaaagaaacaccgccaaaggaagtcaagaaggaagttaagaaggaagagaagaaggaagtgaaaaaggaagaaaaggaacccaaaacaaaaaaaaaaaaaaaaaaaaaaaaaaaaaaaaaaaaaaacaaaaaaaaaaaaaacgaaaaaaaaaaaga

SEQ ID NO: 57124 - DNA, 1641 bp, Homo sapiens
  misc_feature (1641)..(1641): n is a, c, g, or t
tgcctagtctccatataaaagcggcgccgcctccccgccctctctcactccccgctcctctccgccgcgcactctccgcggcgctgggagagggcggagggggaggcggcgcgcggcgccagaggaggggggacgcagggggcggagcggagacagtaccttcggagataatcctttctcctgccgcagaggagaggagcggccggagcgagacacttcgccgaggcacagcagccggcaggatggcgaccgtggtggtggaagccaccgagccggagccgtccggcagcatcgccaacccggcggcgtccacctcgcctagcctgtcgcaccgcttccttgacagcaagttctacttgctggtggtcgtcggcgagatcgtgaccgaggagcacctgcggcgtgccatcggcaacatcgagctcggaatccgatcatgggacacaaacctgattgaatgcaacttggaccaagaactcaaactttttgtatctcgacactctgcaagattctctcctgaagtcccaggacaaaagatccttcatcaccgaagtgacgttttagaaacagtggtcctgatcaacccttctgatgaagcagtcagcaccgaggtgcgcttaatgatcactgatgctgcccgacacaagctgctcgtgctgaccgggcagtgctttgaaaataccggagagctcattctccagtccggctctttctccttccagaacttcatagagattttcaccgatcaagagatcggggagttactaagcaccacccatcctgccaacaaagccagcttaaccctgttctgtcctgaagaaggggactggaagaactccaatcttgacagacacaatctccaagacttcatcaatattaaactcaattcagcttctatcttgccagaaatggaaggactttctgagtttaccgagtatctctcagaatcagtggaagtcccatctccctttgacatcttggaacctcccacatcgggtggatttctgaagctctccaagccctgctgttatatttttccaggagggaggggcgattctgccttgtttgcagtgaatggtttcaatatgctcatcaatggcggatcagagagaaaatcctgcttctggaagctcatccgacacttagaccgagtggactccatcctgctcacccacattggggatgacaatttgcctggaataaacagcatgttacagcggaaaattgcagagctcgaggaagaacagtcccagggctccaccacaaatagtgactggatgaaaaacctcatctcccctgacttaggagttgtatttctcaatgtacctgaaaatctcaaaaatccagagccaaacatcaagatgaagagaagcatagaagaagcctgcttcactctccagtacctaaacaaattgtccatgaaaccagaacctctgtttagaagtgtaggcaatactattgatcctgtcattcttttccaaaaaatgggagtaggtaaacttgagatgtatgtgcttaatccagtcaagagcagcaaggaaatgcagtattttatgcagcaaaccaatatggcgcatgcgtacctacgtatcaaacctgcacgttgtgcacatgtaccctagaacttaaagtattcatttn

SEQ ID NO: 57125 - DNA, 238 bp, Homo sapiens
ccagacctctggttgatttttctttgacagaagatgcaagttattttccaatttcacaattaaatgtatttaacctgaacattattttgctttaaaaactataaacattgtaggagaattatagccagtcttcagttataaccactccaccctcctcactttctctctctctctctctttttttttttttttttttttgctatgggatttaatgggaaaaatatgtaaaaactgtcac

SEQ ID NO: 57126 - DNA, 585 bp, Homo sapiens
aaagaatgagctcggtaccagcaggggtggcgtggtggtggaagccaccgagccggagccgtccggcagcatcgccaacccggcggcgtccacctcgcctagcctgtcgcaccgcttccttgacagcaagttctacttgctggtggtcgtcggcgagatcgtgaccgaggagcacctgcggcgtgccatcggcaacatcgagctcggaatccgatcatgggacacaaacctgattgaatgcaacttggaccaagaactcaaactttttgtatctcgacactctgcaagattctctcctgaagtcccaggacaaaagatccttcatcaccgaagtgacgttttagaaacagtggtcctgatcaacccttctgatgaagcagtcagcaccgaggtgcgcttaatgatcactgatgctgcccgacacaagctgctcgtgctgaccgggcagtgctttgaaaataccggagagctcattctccagtccggctctttctccttccagaacttcatagagattttcaccgatcaagagatcggggagtactaagcaccacgccacccctgctggtaccgagctcgattcta

SEQ ID NO: 57127 - DNA, 12083 bp, Homo sapiens
tgcctagtctccatataaaagcggcgccgcctccccgccctctctcactccccgctcctctccgccgcgcactctccgcggcgctgggagagggcggagggggaggcggcgcgcggcgccagaggaggggggacgcagggggcggagcggagacagtaccttcggagataatcctttctcctgccgcagaggagaggagcggccggagcgagacacttcgccgaggcacagcagccggcaggatggcgaccgtggtggtggaagccaccgagccggagccgtccggcagcatcgccaacccggcggcgtccacctcgcctagcctgtcgcaccgcttccttgacagcaagttctacttgctggtggtcgtcggcgagatcgtgaccgaggagcacctgcggcgtgccatcggcaacatcgagctcggaatccgatcatgggacacaaacctgattgaatgcaacttggaccaagaactcaaactttttgtatctcgacactctgcaagattctctcctgaagtcccaggacaaaagatccttcatcaccgaagtgacgttttagaaacagtggtcctgatcaacccttctgatgaagcagtcagcaccgaggtgcgcttaatgatcactgatgctgcccgacacaagctgctcgtgctgaccgggcagtgctttgaaaataccggagagctcattctccagtccggctctttctccttccagaacttcatagagattttcaccgatcaagagatcggggagttactaagcaccacccatcctgccaacaaagccagcttaaccctgttctgtcctgaagaaggggactggaagaactccaatcttgacagacacaatctccaagacttcatcaatattaaactcaattcagcttctatcttgccagaaatggaaggactttctgagtttaccgagtatctctcagaatcagtggaagtcccatctccctttgacatcttggaacctcccacatcgggtggatttctgaagctctccaagccctgctgttatatttttccaggagggaggggcgattctgccttgtttgcagtgaatggtttcaatatgctcatcaatggcggatcagagagaaaatcctgcttctggaagctcatccgacacttagaccgagtggactccatcctgctcacccacattggggatgacaatttgcctggaataaacagcatgttacagcggaaaattgcagagctcgaggaagaacagtcccagggctccaccacaaatagtgactggatgaaaaacctcatctcccctgacttaggagttgtatttctcaatgtacctgaaaatctcaaaaatccagagccaaacatcaagatgaagagaagcatagaagaagcctgcttcactctccagtacctaaacaaattgtccatgaaaccagaacctctgtttagaagtgtaggcaatactattgatcctgtcattcttttccaaaaaatgggagtaggtaaacttgagatgtatgtgcttaatccagtcaagagcagcaaggaaatgcagtattttatgcagcagtggactggtaccaacaaagacaaggctgaattcattctgcctaatggtcaagaagtagatctcccgatttcctacttaacttcagtctcatctttgattgtgtggcatccagcaaaccctgcggagaaaatcatccgagtcctgtttcctgggaacagcacccagtacaacatcctggaagggttggaaaagctcaaacatctagactttctgaagcagccactggccacccaaaaggatctcactggccaggtgcccactcctgtggtgaaacaaacaaaactgaaacagagggctgatagccgagaaagtctgaagccagccgcaaaaccacttcctagcaaatccgtgcgcaaggagtcaaaagaagaaacccctgaggtcacaaaagtgaatcacgtggaaaagccacccaaagttgaaagcaaagaaaaggtaatggtgaaaaaagacaagccagtaaaaacagagaccaaaccttcagtgactgaaaaggaggttcccagcaaagaagagccatctccagtgaaagccgaggtggctgagaagcaagccacagatgtcaaacccaaagctgccaaggagaagacggtgaaaaaggaaacaaaggtaaagcctgaagacaagaaagaggagaaagaaaagccaaagaaagaagtggctaaaaaggaggacaaaacacctatcaagaaggaggaaaaaccaaaaaaggaagaggtgaaaaaagaagtcaaaaaagagatcaagaaagaagagaaaaaagaacccaagaaagaggttaagaaagaaacaccgccaaaggaagtcaagaaggaagttaagaaggaagagaagaaggaagtgaaaaaggaagaaaaggaacccaaaaaagaaattaagaagctccctaaagacgcaaagaaatcatctactcctctgtctgaagcaaaaaaaccagctgctttaaaaccaaaagtacccaagaaggaagagtctgtcaagaaagattctgttgctgccggaaagccaaaggagaaggggaaaataaaagtcattaagaaggaaggcaaggccgcagaggctgtcgctgcagctgtcggcactggagccaccacagcagctgtcatggcggcagctggaatagcagccattggccctgccaaagaactcgaagctgagaggtcccttatgtcatctcctgaggatctaaccaaggactttgaagagttaaaggctgaagaggtcgatgtaacaaaggacatcaagcctcagctggagctaatcgaagacgaagagaaactgaaggaaactgagccagtcgaagcctacgtcatccagaaggagagagaagtcaccaaaggtcctgccgagtcccctgatgagggaatcactaccactgaaggggagggcgaatgtgaacagacacctgaggagctggagcccgtcgagaagcagggagtagacgacattgaaaaatttgaagatgaaggagccggttttgaagaatcttcagagactggagactatgaagagaaggcagaaactgaggaggctgaggagccagaagaggatggggaggaacacgtatgtgtgagcgcctccaagcacagccccactgaggatgaggaaagtgccaaggcggaggctgatgcatacatcagggagaagagggagtctgtggccagtggggatgaccgagccgaagaagacatggatgaggccattgagaaaggagaggctgaacaatctgaagaggaggctgatgaggaggacaaagctgaagatgccagagaggaggaatatgagccggaaaaaatggaagctgaagactatgtgatggctgtggtcgacaaggctgcagaggctggtggtgccgaggagcagtatggattcctcaccacaccaaccaagcaactaggagcccagtctcctggccgagaacctgcatcttcaattcatgatgagactttacctggaggctcagagagcgaggccaccgcttctgatgaggagaatcgagaagaccagcctgaggaattcactgccacctctggctacactcagtctactattgagatatccagtgagcccacccccatggatgagatgtctacccctcgagacgtgatgagtgatgagaccaacaatgaagagacggagtccccttctcaggaattcgtaaatatcaccaaatatgaatcttcattgtattctcaggaatactctaaacctgctgatgttacaccgctcaacggattttctgaaggatcaaaaacagatgccactgatggcaaggattacaatgcttcagcctctaccatatcaccaccctcttccatggaggaagacaaattcagcagatctgctttacgtgatgcttactgctctgaagtgaaagccagcaccactttggacatcaaagatagcatctcagctgtttcaagtgaaaaggtcagcccatcgaagagcccgtccctgagtccatctccaccatcacccttagaaaagacccccctgggtgaacgtagtgtgaacttctctctgacgcccaatgagattaaagtctctgcagaggcagaagtagccccggtgtctcctgaggtgacccaagaagtagttgaagaacattgtgctagtcctgaggacaagactctggaagtggtgtcaccatctcagtccgtgactggcagtgctggtcacacaccttactatcaatctcctactgacgagaaatccagtcatctccctacagaagtcattgaaaaaccaccagcagttccagtgagttttgaattcagtgatgccaaagatgagaatgaaagggcttcagtaagccccatggatgagcccgtgcctgactcagagtctcctattgaaaaagttttgtctcctttacgcagcccgcccctcattggatccgagtctgcttatgaaagttttctaagtgctgatgacaaggcttctggcagaggtgccgaaagtccttttgaagaaaagagtggaaaacaaggctctccagaccaagtaagtccagtttctgaaatgacttctactagtctttaccaagacaaacaggaagggaaaagcacagactttgcaccaataaaagaagactttggccaagaaaagaaaactgatgatgttgaagccatgagttctcaaccagcactggctctggatgaaaggaaattaggagatgtttctcccacacaaatagatgtcagtcagtttggatcttttaaagaagacactaagatgtccatttctgaaggtactgtctcagacaagtcagctactcctgttgatgagggcgtagcagaagacacgtactctcatatggagggtgtggcctcagtgtccacagcctcagtggctacgagctcatttccagagccaacaacagatgatgtgtctccatctctgcatgctgaggttggctccccacattccacagaagtagatgactccctttcagtgtctgttgtgcaaacacctaccacattccaggaaacagaaatgtctccatctaaagaagaatgcccaagaccgatgtcaatttctccaccagatttctcccctaaaactgcaaagtccaggacacccgttcaagatcacagatctgaacagtcctcaatgtctattgaatttggccaagaatctcctgagcaatcccttgctatggacttcagtcgacagtctccagatcaccctacagtgggtgcaggcgtgcttcacatcactgaaaatgggccaactgaagtggactacagtccttctgacatgcaggactccagtttatcacataagataccacctatggaggagccgtcctacacccaagataatgatctttctgagctcatctcagtatctcaggtagaggcctccccgtccacctcttctgctcataccccttctcagatcgcttctcctctccaagaagatactctatccgatgttgctcctcccagagatatgtccttatatgcctcactcacctctgaaaaagtgcaaagtctggaaggagagaagctctctccaaaatctgatatctctccactcaccccacgagagtcctctcctttatattcacctactttttcagattctacctctgcagtcaaagagaaaacagcaacttgccacagttcctcttctccaccaatagatgcagcatccgcagagccctatggcttccgtgcctcagtgttattcgatacaatgcaacaccatctagccttgaatagagatttgtccacacctggcctggagaaggacagtggagggaagacacctggtgactttagctatgcctatcaaaagcctgaggaaacaaccaggtccccagatgaagaagattatgactatgagtcttatgagaagaccacccggacctcagatgtgggtggctattactatgagaagatagagagaaccacaaaatctccaagtgacagtggctactcctatgagaccattgggaaaactaccaagacccctgaagatggtgactattcctatgaaattattgagaagaccacacggacccctgaagagggtgggtactcatatgacataagtgaaaagaccaccagcccccccgaagtgagtggttacagctatgaaaagactgagaggtctagaaggcttctggatgacatcagcaatggctatgatgactctgaggatggtggccacacacttggggaccccagctactcttatgaaaccactgagaaaattaccagtttccctgagtctgaaggttattcctatgagacatctacaaagacaacacgaacccctgatacttccacatactgttacgagactgcagagaaaatcactagaacccctcaggcatccacatattcctacgagacttcagacctatgctacactgcagaaaagaagtccccctcagaagcccgtcaggatgtcgatttatgcctcgtgtcctcttgtgaatacaagcaccccaagacagagctttcaccctctttcattaatcccaatcctcttgagtggtttgccagtgaagaacccactgaagaatctgaaaagcccctcactcaatcagggggagccccaccgcctccaggaggaaagcaacagggccgacagtgtgatgaaacccctcccacctcagtcagcgagtcagccccatcccagaccgactctgatgttcccccggagactgaagagtgcccctccatcacggccgatgccaatatcgactctgaagacgagtcggaaaccatccccacagacaaaactgtcacgtacaaacacatggacccacctccagctcccgtgcaagaccgcagcccttcgccacgccaccctgatgtgtccatggtggacccagaggccttggccattgagcagaacctgggcaaagctctaaagaaagatctgaaagagaagaccaaaaccaaaaagccaggtacaaagaccaagtcatcttcacctgtcaaaaagagtgatgggaagtctaagcccttggcagcttcaccaaaaccagcgggcttgaaagaatcctcggataaagtgtccagggtggcttctcctaagaagaaagaatctgtggaaaaggcagcaaaacccaccaccactcctgaggtcaaagctgcacgtggggaagagaaagacaaggagaccaagaatgctgccaatgcctctgcatccaagtcggccaagaccgccactgcaggaccaggaactaccaagacgaccaagtcatctgctgtgcccccaggcctccctgtgtatttggacctgtgctacattcctaaccacagcaatagtaagaatgttgatgtggaatttttcaagagagtgcggtcttcctactacgtggtgagtgggaatgaccctgctgctgaggagcccagccgggctgtcctggacgctttgttggaaggaaaggctcagtggggcagcaacatgcaggtgacactgatcccaactcatgactcagaagtgatgagggaatggtaccaggagacccatgagaaacagcaagatctcaacatcatggttttagcaagcagcagcacagtggttatgcaagatgaatccttccctgcatgcaagattgaactgtaaaaaccaaggccagccacaccacaggatctgaactttgtttccagaaattcttcaatttgaaatcaccttttctaaaaagtcaattcatctagttaagtcgctgaacaattacctgccaaatgctatactgtgtcatggtgatgcaagtcactaaatttctcagtttttgctgattgctaagggaaataacagtatttccacaatagggttcaaattcctgcaaaattacctaccccagttcatctctgctgaacatttggaaaccatgcactagccaacccaactgacttctgctaggtagaggcatttgtcttagagagagagagagcgcgggagagagtgagagagagtgagagcacaaagataacgcaggagagagagagagaaagaatgagaaagaaaaggaatgcaagagaaggagatgtaatgacagagagttctggtgagatacccagagagaaaaagagagagcagggtggggtaaggaggagaaaataaaccaacaattaggtctgcattttctcaggcagtaggcattctttagtctacataggcaaagttttccatttttgtcagtctgagtcatcaaaaagagtcttaattttctaaaacaagttggctagaagaaagtaaaaagaacaacacttgttatgagggcatgtgatattttcacatcttaattaagctccttcagtttgaaggctgcacactgacataatgtagtgagtgtagactggccatgcaagtggtttgggccccattcagaactctcagactctaaacacacaagtagattgatctaaggcatgctcccagcatttgtccacccacttagtccactctgagtcgattaacctgcatgcagcaacacccaagtccaccccaattaactgaagcaaataccaaagcagttgggagtacatatggtagacaatttgccttaggaagtgacttgaatgtacaaagatacttgatgcacttattttttaatgtgagacagcaagtttataaaacatccatataggattatagatacttaaaggaacacgtgggtgagcgtgtgtgggggtactagaagctgatctgattggtccaacagtttgatgctgagtcatgcgtgttgaatcccacttcagtgcacctgtggcctctcagtcaaacaagttgtgcctttcacagcttctttactactgcaagttcaagactgaaatggcttctatgatcagaactgggaaaacagtgaatcttatggtggaagaggttctcagcaagtgtacagtatttaccttcctttgtcttacattggctttttaaattttccattaatttcaacataattatgggaacaagtgtacagaagaattttttttttaagatatgtgagaacttttcatagatgaactttttaacaaatgttttcatttacaggaaattgcaaagaaaattctcaagtgatagtctttttttttaagtgtttcgtaagacaaaaattgaataatgttttttgaagttctggcaagattgaagtctgatattgcagtaatgatatttattaaaaacccataactaccaggaataatgatacctcccaccccttgattcccataacataaaagtgctacttgagagtgggggagaatggcatggtaggctacttttcagggccttgacaagtacatcacccagtggtatcctacatacttctttcaagatcttcaaccatgaggtaaaagagccaagttcaaagaaccctagcacaaatttgctttgggattttcttttctggaaaaaaaaaataaaagaaatagtacattgaaaacaaatgaattctcaactcctacggttcatgtagagtttagagaaaatttccatcattgtcatcattgaactgtgaacctgggaagccagatcatgattaacactgacatcaagtttcaagttgcagatcaatgcacccagtgttcagatgaggcaaacttctccgtgacaactgtgctgtgctctgtcacattacatttcctgcagactctaagatctacggagtagagaacaatgacctcattttattttctatgttagttatttatttcaaaattaacattttagttgatttttgtctgataagtctatgttttgcactgctaactatgatgagggtttaaaaaaatgcttcttcagggtcctttcactgaggacctatgcagtctacttaatgctgtgaattacatttttcaaatgtttaattttttaaagaaaattaatattctatttttgttaggcttctctagaaatgcagcttttatttattaccccatttctttcaagtccttggaaaataacatattaagggtacaagaaattaacacatgatggaaaagtcattgtgacgccaatgaatttcattgagtataaactcatctacttcaaatttattttataagacaacctaagatactcaagataattatttaatggttagctcttaagttgaattggtctacataatgcgtgggaagaaaaccagatttttagccttcttgccaaatccagacctctggttgatttttctttgacagaagatgcaagttattttccaatttcacaattaaatgtatttaacctgaacattattttgctttaaaaactataaacattgtaggagaattatagccagtcttcagttataaccactccaccctcctcactttctctctctctctctctttttttttgctatgggatttaatgggaaaaatatgtaaaaactgtcactagtcagctggctctttttcctatgaaatctatcagtacctttctccatccgttgttctcaataatgaccacagagcctgagtataccaagaaaaccaatattcgcattacaggttgctcctgtccttccagacacctttcctgcctgtgtgactaacctaattttgctagttccataaatacacgattagtttagtaacagccatcacaatgtaccatgtacattcatggtgagagctaaagatcgacacagacttctaggagctttgttcatactgattacttaatccaattgtatagattgaatatttgagtggaaggaatttacactctgtttaaatgatgggattctatcgagatagcactcatgatcatgacctttttggtagtattcttaaacaaaattctacagagactaaatgttagcgatgatcctccattttcaattttaaccaattctgtcccctttctcaaaaccctgagccctgtgcatgctttctcagtcttgtggtgggactggatacaatgactaacttcccctcctcccctctttaaacaccattttccatggagttcaaaaaaattttttttcttaacgttacatatcatagtgaatggtttccccagtgtatatgaatgttttaagtgtctccaatagcttatgcagtctaggagctttccaatactcatttaattaagatttaatcatttgctaatggaaatcttaccacctttcattttccctctgttaccaaatttcagctcttaggagctgctctacaattctgaatttgcttttcttgcctctctttagtcacctgtcacaggaggttcctgctcagtaatgatattgtgagttaggataataactttttttttttgtgcttcagatttagaagaaaagatcctgtttccatttgaaaggaactgtaagcttttatcttttaaccaactgaacaatacaccaaaagcagcctagggatgagcatttctttgaaagcaattaggttattcacctggtattaaaactatttactgttaaaaaatctgtgacttcatgaagttgatttttaaaggcagcatcaaaaactgaaaaggaagggaaaaaataggcagcttctctgcacttgtttggagctccccaaaacaggagccatggagaagtggcatcaagaccgggctgccctttcgagaacaccctgtggcagttcagagacacgcttttcctacactgcatgcagcccctctttccagcactggaaagaagtggtcttgagcccagctgagaagcacttcacactcctctctcttgttctgaatggtgtttgtgtcagtctgcagctgtgtatggtattatgtcttataatcctgcatcacttctatcctatccagtcatatctaatgtagaaaattagtttccagtgaaagtaatatgtagtgcttttatgatatttgtgtgcaatatcccctcttccattgaggatatttgatgtaaaggaaaaaaaaaaactcagttccacaataaaatacaaaagtggcaaaagttaaaaaaaaaaattcacttgccgacgtttacaacgtcgtgactgggccctggcgtacccacttaatcgccttgagacatcccctttcgcagctgcgttaccgcccgaccgtcgcctt

SEQ ID NO: 57128 - DNA, 11989 bp, Homo sapiens
tgcctagtctccatataaaagcggcgccgcctccccgccctctctcactccccgctcctctccgccgcgcactctccgcggcgctgggagagggcggagggggaggcggcgcgcggcgccagaggaggggggacgcagggggcggagcggagacagtaccttcggagataatcctttctcctgccgcagaggagaggagcggccggagcgagacacttcgccgaggcacagcagccggcaggatggcgaccgtggtggtggaagccaccgagccggagccgtccggcagcatcgccaacccggcggcgtccacctcgcctagcctgtcgcaccgcttccttgacagcaagttctacttgctggtggtcgtcggcgagatcgtgaccgaggagcacctgcggcgtgccatcggcaacatcgagctcggaatccgatcatgggacacaaacctgattgaatgcaacttggaccaagaactcaaactttttgtatctcgacactctgcaagattctctcctgaagtcccaggacaaaagatccttcatcaccgaagtgacgttttagaaacagtggtcctgatcaacccttctgatgaagcagtcagcaccgaggtgcgcttaatgatcactgatgctgcccgacacaagctgctcgtgctgaccgggcagtgctttgaaaataccggagagctcattctccagtccggctctttctccttccagaacttcatagagattttcaccgatcaagagatcggggagttactaagcaccacccatcctgccaacaaagccagcttaaccctgttctgtcctgaagaaggggactggaagaactccaatcttgacagacacaatctccaagacttcatcaatattaaactcaattcagcttctatcttgccagaaatggaaggactttctgagtttaccgagtatctctcagaatcagtggaagtcccatctccctttgacatcttggaacctcccacatcgggtggatttctgaagctctccaagccctgctgttatatttttccaggagggaggggcgattctgccttgtttgcagtgaatggtttcaatatgctcatcaatggcggatcagagagaaaatcctgcttctggaagctcatccgacacttagaccgagtggactccatcctgctcacccacattggggatgacaatttgcctggaataaacagcatgttacagcggaaaattgcagagctcgaggaagaacagtcccagggctccaccacaaatagtgactggatgaaaaacctcatctcccctgacttaggagttgtatttctcaatgtacctgaaaatctcaaaaatccagagccaaacatcaagatgaagagaagcatagaagaagcctgcttcactctccagtacctaaacaaattgtccatgaaaccagaacctctgtttagaagtgtaggcaatactattgatcctgtcattcttttccaaaaaatgggagtaggtaaacttgagatgtatgtgcttaatccagtcaagagcagcaaggaaatgcagtattttatgcagcagtggactggtaccaacaaagacaaggctgaattcattctgcctaatggtcaagaagtagatctcccgatttcctacttaacttcagtctcatctttgattgtgtggcatccagcaaaccctgcggagaaaatcatccgagtcctgtttcctgggaacagcacccagtacaacatcctggaagggttggaaaagctcaaacatctagactttctgaagcagccactggccacccaaaaggatctcactggccaggtgcccactcctgtggtgaaacaaacaaaactgaaacagagggctgatagccgagaaagtctgaagccagccgcaaaaccacttcctagcaaatccgtgcgcaaggagtcaaaagaagaaacccctgaggtcacaaaagtgaatcacgtggaaaagccacccaaagttgaaagcaaagaaaaggtaatggtgaaaaaagacaagccagtaaaaacagagaccaaaccttcagtgactgaaaaggaggttcccagcaaagaagagccatctccagtgaaagccgaggtggctgagaagcaagccacagatgtcaaacccaaagctgccaaggagaagacggtgaaaaaggaaacaaaggtaaagcctgaagacaagaaagaggagaaagaaaagccaaagaaagaagtggctaaaaaggaggacaaaacacctatcaagaaggaggaaaaaccaaaaaaggaagaggtgaaaaaagaagtcaaaaaagagatcaagaaagaagagaaaaaagaacccaagaaagaggttaagaaagaaacaccgccaaaggaagtcaagaaggaagttaagaaggaagagaagaaggaagtgaaaaaggaagaaaaggaacccaaaaaagaaattaagaagctccctaaagacgcaaagaaatcatctactcctctgtctgaagcaaaaaaaccagctgctttaaaaccaaaagtacccaagaaggaagagtctgtcaagaaagattctgttgctgccggaaagccaaaggagaaggggaaaataaaagtcattaagaaggaaggcaaggccgcagaggctgtcgctgcagctgtcggcactggagccaccacagcagctgtcatggcggcagctggaatagcagccattggccctgccaaagaactcgaagctgagaggtcccttatgtcatctcctgaggatctaaccaaggactttgaagagttaaaggctgaagaggtcgatgtaacaaaggacatcaagcctcagctggagctaatcgaagacgaagagaaactgaaggaaactgagccagtcgaagcctacgtcatccagaaggagagagaagtcaccaaaggtcctgccgagtcccctgatgagggaatcactaccactgaaggggagggcgaatgtgaacagacacctgaggagctggagcccgtcgagaagcagggagtagacgacattgaaaaatttgaagatgaaggagccggttttgaagaatcttcagagactggagactatgaagagaaggcagaaactgaggaggctgaggagccagaagaggatggggaggaacacgtatgtgtgagcgcctccaagcacagccccactgaggatgaggaaagtgccaaggcggaggctgatgcatacatcagggagaagagggagtctgtggccagtggggatgaccgagccgaagaagacatggatgaggccattgagaaaggagaggctgaacaatctgaagaggaggctgatgaggaggacaaagctgaagatgccagagaggaggaatatgagccggaaaaaatggaagctgaagactatgtgatggctgtggtcgacaaggctgcagaggctggtggtgccgaggagcagtatggattcctcaccacaccaaccaagcaactaggagcccagtctcctggccgagaacctgcatcttcaattcatgatgagactttacctggaggctcagagagcgaggccaccgcttctgatgaggagaatcgagaagaccagcctgaggaattcactgccacctctggctacactcagtctactattgagatatccagtgagcccacccccatggatgagatgtctacccctcgagacgtgatgagtgatgagaccaacaatgaagagacggagtccccttctcaggaattcgtaaatatcaccaaatatgaatcttcattgtattctcaggaatactctaaacctgctgatgttacaccgctcaacggattttctgaaggatcaaaaacagatgccactgatggcaaggattacaatgcttcagcctctaccatatcaccaccctcttccatggaggaagacaaattcagcagatctgctttacgtgatgcttactgctctgaagtgaaagccagcaccactttggacatcaaagatagcatctcagctgtttcaagtgaaaaggtcagcccatcgaagagcccgtccctgagtccatctccaccatcacccttagaaaagacccccctgggtgaacgtagtgtgaacttctctctgacgcccaatgagattaaagtctctgcagaggcagaagtagccccggtgtctcctgaggtgacccaagaagtagttgaagaacattgtgctagtcctgaggacaagactctggaagtggtgtcaccatctcagtccgtgactggcagtgctggtcacacaccttactatcaatctcctactgacgagaaatccagtcatctccctacagaagtcattgaaaaaccaccagcagttccagtgagttttgaattcagtgatgccaaagatgagaatgaaagggcttcagtaagccccatggatgagcccgtgcctgactcagagtctcctattgaaaaagttttgtctcctttacgcagcccgcccctcattggatccgagtctgcttatgaaagttttctaagtgctgatgacaaggcttctggcagaggtgccgaaagtccttttgaagaaaagagtggaaaacaaggctctccagaccaagtaagtccagtttctgaaatgacttctactagtctttaccaagacaaacaggaagggaaaagcacagactttgcaccaataaaagaagactttggccaagaaaagaaaactgatgatgttgaagccatgagttctcaaccagcactggctctggatgaaaggaaattaggagatgtttctcccacacaaatagatgtcagtcagtttggatcttttaaagaagacactaagatgtccatttctgaaggtactgtctcagacaagtcagctactcctgttgatgagggcgtagcagaagacacgtactctcatatggagggtgtggcctcagtgtccacagcctcagtggctacgagctcatttccagagccaacaacagatgatgtgtctccatctctgcatgctgaggttggctccccacattccacagaagtagatgactccctttcagtgtctgttgtgcaaacacctaccacattccaggaaacagaaatgtctccatctaaagaagaatgcccaagaccgatgtcaatttctccaccagatttctcccctaaaactgcaaagtccaggacacccgttcaagatcacagatctgaacagtcctcaatgtctattgaatttggccaagaatctcctgagcaatcccttgctatggacttcagtcgacagtctccagatcaccctacagtgggtgcaggcgtgcttcacatcactgaaaatgggccaactgaagtggactacagtccttctgacatgcaggactccagtttatcacataagataccacctatggaggagccgtcctacacccaagataatgatctttctgagctcatctcagtatctcaggtagaggcctccccgtccacctcttctgctcataccccttctcagatcgcttctcctctccaagaagatactctatccgatgttgctcctcccagagatatgtccttatatgcctcactcacctctgaaaaagtgcaaagtctggaaggagagaagctctctccaaaatctgatatctctccactcaccccacgagagtcctctcctttatattcacctactttttcagattctacctctgcagtcaaagagaaaacagcaacttgccacagttcctcttctccaccaatagatgcagcatccgcagagccctatggcttccgtgcctcagtgttattcgatacaatgcaacaccatctagccttgaatagagatttgtccacacctggcctggagaaggacagtggagggaagacacctggtgactttagctatgcctatcaaaagcctgaggaaacaaccaggtccccagatgaagaagattatgactatgagtcttatgagaagaccacccggacctcagatgtgggtggctattactatgagaagatagagagaaccacaaaatctccaagtgacagtggctactcctatgagaccattgggaaaactaccaagacccctgaagatggtgactattcctatgaaattattgagaagaccacacggacccctgaagagggtgggtactcatatgacataagtgaaaagaccaccagcccccccgaagtgagtggttacagctatgaaaagactgagaggtctagaaggcttctggatgacatcagcaatggctatgatgactctgaggatggtggccacacacttggggaccccagctactcttatgaaaccactgagaaaattaccagtttccctgagtctgaaggttattcctatgagacatctacaaagacaacacgaacccctgatacttccacatactgttacgagactgcagagaaaatcactagaacccctcaggcatccacatattcctacgagacttcagacctatgctacactgcagaaaagaagtccccctcagaagcccgtcaggatgtcgatttatgcctcgtgtcctcttgtgaatacaagcaccccaagacagagctttcaccctctttcattaatcccaatcctcttgagtggtttgccagtgaagaacccactgaagaatctgaaaagcccctcactcaatcagggggagccccaccgcctccaggaggaaagcaacagggccgacagtgtgatgaaacccctcccacctcagtcagcgagtcagccccatcccagaccgactctgatgttcccccggagactgaagagtgcccctccatcacggccgatgccaatatcgactctgaagacgagtcggaaaccatccccacagacaaaactgtcacgtacaaacacatggacccacctccagctcccgtgcaagaccgcagcccttcgccacgccaccctgatgtgtccatggtggacccagaggccttggccattgagcagaacctgggcaaagctctaaagaaagatctgaaagagaagaccaaaaccaaaaagccaggtacaaagaccaagtcatcttcacctgtcaaaaagagtgatgggaagtctaagcccttggcagcttcaccaaaaccagcgggcttgaaagaatcctcggataaagtgtccagggtggcttctcctaagaagaaagaatctgtggaaaaggcagcaaaacccaccaccactcctgaggtcaaagctgcacgtggggaagagaaagacaaggagaccaagaatgctgccaatgcctctgcatccaagtcggccaagaccgccactgcaggaccaggaactaccaagacgaccaagtcatctgctgtgcccccaggcctccctgtgtatttggacctgtgctacattcctaaccacagcaatagtaagaatgttgatgtggaatttttcaagagagtgcggtcttcctactacgtggtgagtgggaatgaccctgctgctgaggagcccagccgggctgtcctggacgctttgttggaaggaaaggctcagtggggcagcaacatgcaggtgacactgatcccaactcatgactcagaagtgatgagggaatggtaccaggagacccatgagaaacagcaagatctcaacatcatggttttagcaagcagcagcacagtggttatgcaagatgaatccttccctgcatgcaagattgaactgtaaaaaccaaggccagccacaccacaggatctgaactttgtttccagaaattcttcaatttgaaatcaccttttctaaaaagtcaattcatctagttaagtcgctgaacaattacctgccaaatgctatactgtgtcatggtgatgcaagtcactaaatttctcagtttttgctgattgctaagggaaataacagtatttccacaatagggttcaaattcctgcaaaattacctaccccagttcatctctgctgaacatttggaaaccatgcactagccaacccaactgacttctgctaggtagaggcatttgtcttagagagagagagagcgcgggagagagtgagagagagtgagagcacaaagataacgcaggagagagagagagaaagaatgagaaagaaaaggaatgcaagagaaggagatgtaatgacagagagttctggtgagatacccagagagaaaaagagagagcagggtggggtaaggaggagaaaataaaccaacaattaggtctgcattttctcaggcagtaggcattctttagtctacataggcaaagttttccatttttgtcagtctgagtcatcaaaaagagtcttaattttctaaaacaagttggctagaagaaagtaaaaagaacaacacttgttatgagggcatgtgatattttcacatcttaattaagctccttcagtttgaaggctgcacactgacataatgtagtgagtgtagactggccatgcaagtggtttgggccccattcagaactctcagactctaaacacacaagtagattgatctaaggcatgctcccagcatttgtccacccacttagtccactctgagtcgattaacctgcatgcagcaacacccaagtccaccccaattaactgaagcaaataccaaagcagttgggagtacatatggtagacaatttgccttaggaagtgacttgaatgtacaaagatacttgatgcacttattttttaatgtgagacagcaagtttataaaacatccatataggattatagatacttaaaggaacacgtgggtgagcgtgtgtgggggtactagaagctgatctgattggtccaacagtttgatgctgagtcatgcgtgttgaatcccacttcagtgcacctgtggcctctcagtcaaacaagttgtgcctttcacagcttctttactactgcaagttcaagactgaaatggcttctatgatcagaactgggaaaacagtgaatcttatggtggaagaggttctcagcaagtgtacagtatttaccttcctttgtcttacattggctttttaaattttccattaatttcaacataattatgggaacaagtgtacagaagaattttttttttaagatatgtgagaacttttcatagatgaactttttaacaaatgttttcatttacaggaaattgcaaagaaaattctcaagtgatagtctttttttttaagtgtttcgtaagacaaaaattgaataatgttttttgaagttctggcaagattgaagtctgatattgcagtaatgatatttattaaaaacccataactaccaggaataatgatacctcccaccccttgattcccataacataaaagtgctacttgagagtgggggagaatggcatggtaggctacttttcagggccttgacaagtacatcacccagtggtatcctacatacttctttcaagatcttcaaccatgaggtaaaagagccaagttcaaagaaccctagcacaaatttgctttgggattttcttttctggaaaaaaaaaataaaagaaatagtacattgaaaacaaatgaattctcaactcctacggttcatgtagagtttagagaaaatttccatcattgtcatcattgaactgtgaacctgggaagccagatcatgattaacactgacatcaagtttcaagttgcagatcaatgcacccagtgttcagatgaggcaaacttctccgtgacaactgtgctgtgctctgtcacattacatttcctgcagactctaagatctacggagtagagaacaatgacctcattttattttctatgttagttatttatttcaaaattaacattttagttgatttttgtctgataagtctatgttttgcactgctaactatgatgagggtttaaaaaaatgcttcttcagggtcctttcactgaggacctatgcagtctacttaatgctgtgaattacatttttcaaatgtttaattttttaaagaaaattaatattctatttttgttaggcttctctagaaatgcagcttttatttattaccccatttctttcaagtccttggaaaataacatattaagggtacaagaaattaacacatgatggaaaagtcattgtgacgccaatgaatttcattgagtataaactcatctacttcaaatttattttataagacaacctaagatactcaagataattatttaatggttagctcttaagttgaattggtctacataatgcgtgggaagaaaaccagatttttagccttcttgccaaatccagacctctggttgatttttctttgacagaagatgcaagttattttccaatttcacaattaaatgtatttaacctgaacattattttgctttaaaaactataaacattgtaggagaattatagccagtcttcagttataaccactccaccctcctcactttctctctctctctctctttttttttgctatgggatttaatgggaaaaatatgtaaaaactgtcactagtcagctggctctttttcctatgaaatctatcagtacctttctccatccgttgttctcaataatgaccacagagcctgagtataccaagaaaaccaatattcgcattacaggttgctcctgtccttccagacacctttcctgcctgtgtgactaacctaattttgctagttccataaatacacgattagtttagtaacagccatcacaatgtaccatgtacattcatggtgagagctaaagatcgacacagacttctaggagctttgttcatactgattacttaatccaattgtatagattgaatatttgagtggaaggaatttacactctgtttaaatgatgggattctatcgagatagcactcatgatcatgacctttttggtagtattcttaaacaaaattctacagagactaaatgttagcgatgatcctccattttcaattttaaccaattctgtcccctttctcaaaaccctgagccctgtgcatgctttctcagtcttgtggtgggactggatacaatgactaacttcccctcctcccctctttaaacaccattttccatggagttcaaaaaaattttttttcttaacgttacatatcatagtgaatggtttccccagtgtatatgaatgttttaagtgtctccaatagcttatgcagtctaggagctttccaatactcatttaattaagatttaatcatttgctaatggaaatcttaccacctttcattttccctctgttaccaaatttcagctcttaggagctgctctacaattctgaatttgcttttcttgcctctctttagtcacctgtcacaggaggttcctgctcagtaatgatattgtgagttaggataataactttttttttttgtgcttcagatttagaagaaaagatcctgtttccatttgaaaggaactgtaagcttttatcttttaaccaactgaacaatacaccaaaagcagcctagggatgagcatttctttgaaagcaattaggttattcacctggtattaaaactatttactgttaaaaaatctgtgacttcatgaagttgatttttaaaggcagcatcaaaaactgaaaaggaagggaaaaaataggcagcttctctgcacttgtttggagctccccaaaacaggagccatggagaagtggcatcaagaccgggctgccctttcgagaacaccctgtggcagttcagagacacgcttttcctacactgcatgcagcccctctttccagcactggaaagaagtggtcttgagcccagctgagaagcacttcacactcctctctcttgttctgaatggtgtttgtgtcagtctgcagctgtgtatggtattatgtcttataatcctgcatcacttctatcctatccagtcatatctaatgtagaaaattagtttccagtgaaagtaatatgtagtgcttttatgatatttgtgtgcaatatcccctcttccattgaggatatttgatgtaaaggaaaaaaaaaaactcagttccacaataaaatacaaaagtggcaaaagttaaaaaaacgaaaaaaaaaaaga

SEQ ID NO: 57129 - DNA, 11724 bp, Homo sapiens
tgcctagtctccatataaaagcggcgccgcctccccgccctctctcactccccgctcctctccgccgcgcactctccgcggcgctgggagagggcggagggggaggcggcgcgcggcgccagaggaggggggacgcagggggcggagcggagacagtaccttcggagataatcctttctcctgccgcagaggagaggagcggccggagcgagacacttcgccgaggcacagcagccggcaggatggcgaccgtggtggtggaagccaccgagccggagccgtccggcagcatcgccaacccggcggcgtccacctcgcctagcctgtcgcaccgcttccttgacagcaagttctacttgctggtggtcgtcggcgagatcgtgaccgaggagcacctgcggcgtgccatcggcaacatcgagctcggaatccgatcatgggacacaaacctgattgaatgcaacttggaccaagaactcaaactttttgtatctcgacactctgcaagattctctcctgaagtcccaggacaaaagatccttcatcaccgaagtgacgttttagaaacagtggtcctgatcaacccttctgatgaagcagtcagcaccgaggtgcgcttaatgatcactgatgctgcccgacacaagctgctcgtgctgaccgggcagtgctttgaaaataccggagagctcattctccagtccggctctttctccttccagaacttcatagagattttcaccgatcaagagatcggggagttactaagcaccacccatcctgccaacaaagccagcttaaccctgttctgtcctgaagaaggggactggaagaactccaatcttgacagacacaatctccaagacttcatcaatattaaactcaattcagcttctatcttgccagaaatggaaggactttctgagtttaccgagtatctctcagaatcagtggaagtcccatctccctttgacatcttggaacctcccacatcgggtggatttctgaagctctccaagccctgctgttatatttttccaggagggaggggcgattctgccttgtttgcagtgaatggtttcaatatgctcatcaatggcggatcagagagaaaatcctgcttctggaagctcatccgacacttagaccgagtggactccatcctgctcacccacattggggatgacaatttgcctggaataaacagcatgttacagcggaaaattgcagagctcgaggaagaacagtcccagggctccaccacaaatagtgactggatgaaaaacctcatctcccctgacttaggagttgtatttctcaatgtacctgaaaatctcaaaaatccagagccaaacatcaagatgaagagaagcatagaagaagcctgcttcactctccagtacctaaacaaattgtccatgaaaccagaacctctgtttagaagtgtaggcaatactattgatcctgtcattcttttccaaaaaatgggagtaggtaaacttgagatgtatgtgcttaatccagtcaagagcagcaaggaaatgcagtattttatgcagcagtggactggtaccaacaaagacaaggctgaattcattctgcctaatggtcaagaagtagatctcccgatttcctacttaacttcagtctcatctttgattgtgtggcatccagcaaaccctgcggagaaaatcatccgagtcctgtttcctgggaacagcacccagtacaacatcctggaagggttggaaaagctcaaacatctagactttctgaagcagccactggccacccaaaaggatctcactggccaggtgcccactcctgtggtgaaacaaacaaaactgaaacagagggctgatagccgagaaagtctgaagccagccgcaaaaccacttcctagcaaatccgtgcgcaaggagtcaaaagaagaaacccctgaggtcacaaaagtgaatcacgtggaaaagccacccaaagttgaaagcaaagaaaaggtaatggtgaaaaaagacaagccagtaaaaacagagaccaaaccttcagtgactgaaaaggaggttcccagcaaagaagagccatctccagtgaaagccgaggtggctgagaagcaagccacagatgtcaaacccaaagctgccaaggagaagacggtgaaaaaggaaacaaaggtaaagcctgaagacaagaaagaggagaaagaaaagccaaagaaagaagtggctaaaaaggaggacaaaacacctatcaagaaggaggaaaaaccaaaaaaggaagaggtgaaaaaagaagtcaaaaaagagatcaagaaagaagagaaaaaagaacccaagaaagaggttaagaaagaaacaccgccaaaggaagtcaagaaggaagttaagaaggaagagaagaaggaagtgaaaaaggaagaaaaggaacccaaaaaagaaattaagaagctccctaaagacgcaaagaaatcatctactcctctgtctgaagcaaaaaaaccagctgctttaaaaccaaaagtacccaagaaggaagagtctgtcaagaaagattctgttgctgccggaaagccaaaggagaaggggaaaataaaagtcattaagaaggaaggcaaggccgcagaggctgtcgctgcagctgtcggcactggagccaccacagcagctgtcatggcggcagctggaatagcagccattggccctgccaaagaactcgaagctgagaggtcccttatgtcatctcctgaggatctaaccaaggactttgaagagttaaaggctgaagaggtcgatgtaacaaaggacatcaagcctcagctggagctaatcgaagacgaagagaaactgaaggaaactgagccagtcgaagcctacgtcatccagaaggagagagaagtcaccaaaggtcctgccgagtcccctgatgagggaatcactaccactgaaggggagggcgaatgtgaacagacacctgaggagctggagcccgtcgagaagcagggagtagacgacattgaaaaatttgaagatgaaggagccggttttgaagaatcttcagagactggagactatgaagagaaggcagaaactgaggaggctgaggagccagaagaggatggggaggaacacgtatgtgtgagcgcctccaagcacagccccactgaggatgaggaaagtgccaaggcggaggctgatgcatacatcagggagaagagggagtctgtggccagtggggatgaccgagccgaagaagacatggatgaggccattgagaaaggagaggctgaacaatctgaagaggaggctgatgaggagaatcgagaagaccagcctgaggaattcactgccacctctggctacactcagtctactattgagatatccagtgagcccacccccatggatgagatgtctacccctcgagacgtgatgagtgatgagaccaacaatgaagagacggagtccccttctcaggaattcgtaaatatcaccaaatatgaatcttcattgtattctcaggaatactctaaacctgctgatgttacaccgctcaacggattttctgaaggatcaaaaacagatgccactgatggcaaggattacaatgcttcagcctctaccatatcaccaccctcttccatggaggaagacaaattcagcagatctgctttacgtgatgcttactgctctgaagtgaaagccagcaccactttggacatcaaagatagcatctcagctgtttcaagtgaaaaggtcagcccatcgaagagcccgtccctgagtccatctccaccatcacccttagaaaagacccccctgggtgaacgtagtgtgaacttctctctgacgcccaatgagattaaagtctctgcagaggcagaagtagccccggtgtctcctgaggtgacccaagaagtagttgaagaacattgtgctagtcctgaggacaagactctggaagtggtgtcaccatctcagtccgtgactggcagtgctggtcacacaccttactatcaatctcctactgacgagaaatccagtcatctccctacagaagtcattgaaaaaccaccagcagttccagtgagttttgaattcagtgatgccaaagatgagaatgaaagggcttcagtaagccccatggatgagcccgtgcctgactcagagtctcctattgaaaaagttttgtctcctttacgcagcccgcccctcattggatccgagtctgcttatgaaagttttctaagtgctgatgacaaggcttctggcagaggtgccgaaagtccttttgaagaaaagagtggaaaacaaggctctccagaccaagtaagtccagtttctgaaatgacttctactagtctttaccaagacaaacaggaagggaaaagcacagactttgcaccaataaaagaagactttggccaagaaaagaaaactgatgatgttgaagccatgagttctcaaccagcactggctctggatgaaaggaaattaggagatgtttctcccacacaaatagatgtcagtcagtttggatcttttaaagaagacactaagatgtccatttctgaaggtactgtctcagacaagtcagctactcctgttgatgagggcgtagcagaagacacgtactctcatatggagggtgtggcctcagtgtccacagcctcagtggctacgagctcatttccagagccaacaacagatgatgtgtctccatctctgcatgctgaggttggctccccacattccacagaagtagatgactccctttcagtgtctgttgtgcaaacacctaccacattccaggaaacagaaatgtctccatctaaagaagaatgcccaagaccgatgtcaatttctccaccagatttctcccctaaaactgcaaagtccaggacacccgttcaagatcacagatctgaacagtcctcaatgtctattgaatttggccaagaatctcctgagcaatcccttgctatggacttcagtcgacagtctccagatcaccctacagtgggtgcaggcgtgcttcacatcactgaaaatgggccaactgaagtggactacagtccttctgacatgcaggactccagtttatcacataagataccacctatggaggagccgtcctacacccaagataatgatctttctgagctcatctcagtatctcaggtagaggcctccccgtccacctcttctgctcataccccttctcagatcgcttctcctctccaagaagatactctatccgatgttgctcctcccagagatatgtccttatatgcctcactcacctctgaaaaagtgcaaagtctggaaggagagaagctctctccaaaatctgatatctctccactcaccccacgagagtcctctcctttatattcacctactttttcagattctacctctgcagtcaaagagaaaacagcaacttgccacagttcctcttctccaccaatagatgcagcatccgcagagccctatggcttccgtgcctcagtgttattcgatacaatgcaacaccatctagccttgaatagagatttgtccacacctggcctggagaaggacagtggagggaagacacctggtgactttagctatgcctatcaaaagcctgaggaaacaaccaggtccccagatgaagaagattatgactatgagtcttatgagaagaccacccggacctcagatgtgggtggctattactatgagaagatagagagaaccacaaaatctccaagtgacagtggctactcctatgagaccattgggaaaactaccaagacccctgaagatggtgactattcctatgaaattattgagaagaccacacggacccctgaagagggtgggtactcatatgacataagtgaaaagaccaccagcccccccgaagtgagtggttacagctatgaaaagactgagaggtctagaaggcttctggatgacatcagcaatggctatgatgactctgaggatggtggccacacacttggggaccccagctactcttatgaaaccactgagaaaattaccagtttccctgagtctgaaggttattcctatgagacatctacaaagacaacacgaacccctgatacttccacatactgttacgagactgcagagaaaatcactagaacccctcaggcatccacatattcctacgagacttcagacctatgctacactgcagaaaagaagtccccctcagaagcccgtcaggatgtcgatttatgcctcgtgtcctcttgtgaatacaagcaccccaagacagagctttcaccctctttcattaatcccaatcctcttgagtggtttgccagtgaagaacccactgaagaatctgaaaagcccctcactcaatcagggggagccccaccgcctccaggaggaaagcaacagggccgacagtgtgatgaaacccctcccacctcagtcagcgagtcagccccatcccagaccgactctgatgttcccccggagactgaagagtgcccctccatcacggccgatgccaatatcgactctgaagacgagtcggaaaccatccccacagacaaaactgtcacgtacaaacacatggacccacctccagctcccgtgcaagaccgcagcccttcgccacgccaccctgatgtgtccatggtggacccagaggccttggccattgagcagaacctgggcaaagctctaaagaaagatctgaaagagaagaccaaaaccaaaaagccaggtacaaagaccaagtcatcttcacctgtcaaaaagagtgatgggaagtctaagcccttggcagcttcaccaaaaccagcgggcttgaaagaatcctcggataaagtgtccagggtggcttctcctaagaagaaagaatctgtggaaaaggcagcaaaacccaccaccactcctgaggtcaaagctgcacgtggggaagagaaagacaaggagaccaagaatgctgccaatgcctctgcatccaagtcggccaagaccgccactgcaggaccaggaactaccaagacgaccaagtcatctgctgtgcccccaggcctccctgtgtatttggacctgtgctacattcctaaccacagcaatagtaagaatgttgatgtggaatttttcaagagagtgcggtcttcctactacgtggtgagtgggaatgaccctgctgctgaggagcccagccgggctgtcctggacgctttgttggaaggaaaggctcagtggggcagcaacatgcaggtgacactgatcccaactcatgactcagaagtgatgagggaatggtaccaggagacccatgagaaacagcaagatctcaacatcatggttttagcaagcagcagcacagtggttatgcaagatgaatccttccctgcatgcaagattgaactgtaaaaaccaaggccagccacaccacaggatctgaactttgtttccagaaattcttcaatttgaaatcaccttttctaaaaagtcaattcatctagttaagtcgctgaacaattacctgccaaatgctatactgtgtcatggtgatgcaagtcactaaatttctcagtttttgctgattgctaagggaaataacagtatttccacaatagggttcaaattcctgcaaaattacctaccccagttcatctctgctgaacatttggaaaccatgcactagccaacccaactgacttctgctaggtagaggcatttgtcttagagagagagagagcgcgggagagagtgagagagagtgagagcacaaagataacgcaggagagagagagagaaagaatgagaaagaaaaggaatgcaagagaaggagatgtaatgacagagagttctggtgagatacccagagagaaaaagagagagcagggtggggtaaggaggagaaaataaaccaacaattaggtctgcattttctcaggcagtaggcattctttagtctacataggcaaagttttccatttttgtcagtctgagtcatcaaaaagagtcttaattttctaaaacaagttggctagaagaaagtaaaaagaacaacacttgttatgagggcatgtgatattttcacatcttaattaagctccttcagtttgaaggctgcacactgacataatgtagtgagtgtagactggccatgcaagtggtttgggccccattcagaactctcagactctaaacacacaagtagattgatctaaggcatgctcccagcatttgtccacccacttagtccactctgagtcgattaacctgcatgcagcaacacccaagtccaccccaattaactgaagcaaataccaaagcagttgggagtacatatggtagacaatttgccttaggaagtgacttgaatgtacaaagatacttgatgcacttattttttaatgtgagacagcaagtttataaaacatccatataggattatagatacttaaaggaacacgtgggtgagcgtgtgtgggggtactagaagctgatctgattggtccaacagtttgatgctgagtcatgcgtgttgaatcccacttcagtgcacctgtggcctctcagtcaaacaagttgtgcctttcacagcttctttactactgcaagttcaagactgaaatggcttctatgatcagaactgggaaaacagtgaatcttatggtggaagaggttctcagcaagtgtacagtatttaccttcctttgtcttacattggctttttaaattttccattaatttcaacataattatgggaacaagtgtacagaagaattttttttttaagatatgtgagaacttttcatagatgaactttttaacaaatgttttcatttacaggaaattgcaaagaaaattctcaagtgatagtctttttttttaagtgtttcgtaagacaaaaattgaataatgttttttgaagttctggcaagattgaagtctgatattgcagtaatgatatttattaaaaacccataactaccaggaataatgatacctcccaccccttgattcccataacataaaagtgctacttgagagtgggggagaatggcatggtaggctacttttcagggccttgacaagtacatcacccagtggtatcctacatacttctttcaagatcttcaaccatgaggtaaaagagccaagttcaaagaaccctagcacaaatttgctttgggattttcttttctggaaaaaaaaaataaaagaaatagtacattgaaaacaaatgaattctcaactcctacggttcatgtagagtttagagaaaatttccatcattgtcatcattgaactgtgaacctgggaagccagatcatgattaacactgacatcaagtttcaagttgcagatcaatgcacccagtgttcagatgaggcaaacttctccgtgacaactgtgctgtgctctgtcacattacatttcctgcagactctaagatctacggagtagagaacaatgacctcattttattttctatgttagttatttatttcaaaattaacattttagttgatttttgtctgataagtctatgttttgcactgctaactatgatgagggtttaaaaaaatgcttcttcagggtcctttcactgaggacctatgcagtctacttaatgctgtgaattacatttttcaaatgtttaattttttaaagaaaattaatattctatttttgttaggcttctctagaaatgcagcttttatttattaccccatttctttcaagtccttggaaaataacatattaagggtacaagaaattaacacatgatggaaaagtcattgtgacgccaatgaatttcattgagtataaactcatctacttcaaatttattttataagacaacctaagatactcaagataattatttaatggttagctcttaagttgaattggtctacataatgcgtgggaagaaaaccagatttttagccttcttgccaaatccagacctctggttgatttttctttgacagaagatgcaagttattttccaatttcacaattaaatgtatttaacctgaacattattttgctttaaaaactataaacattgtaggagaattatagccagtcttcagttataaccactccaccctcctcactttctctctctctctctctttttttttgctatgggatttaatgggaaaaatatgtaaaaactgtcactagtcagctggctctttttcctatgaaatctatcagtacctttctccatccgttgttctcaataatgaccacagagcctgagtataccaagaaaaccaatattcgcattacaggttgctcctgtccttccagacacctttcctgcctgtgtgactaacctaattttgctagttccataaatacacgattagtttagtaacagccatcacaatgtaccatgtacattcatggtgagagctaaagatcgacacagacttctaggagctttgttcatactgattacttaatccaattgtatagattgaatatttgagtggaaggaatttacactctgtttaaatgatgggattctatcgagatagcactcatgatcatgacctttttggtagtattcttaaacaaaattctacagagactaaatgttagcgatgatcctccattttcaattttaaccaattctgtcccctttctcaaaaccctgagccctgtgcatgctttctcagtcttgtggtgggactggatacaatgactaacttcccctcctcccctctttaaacaccattttccatggagttcaaaaaaattttttttcttaacgttacatatcatagtgaatggtttccccagtgtatatgaatgttttaagtgtctccaatagcttatgcagtctaggagctttccaatactcatttaattaagatttaatcatttgctaatggaaatcttaccacctttcattttccctctgttaccaaatttcagctcttaggagctgctctacaattctgaatttgcttttcttgcctctctttagtcacctgtcacaggaggttcctgctcagtaatgatattgtgagttaggataataactttttttttttgtgcttcagatttagaagaaaagatcctgtttccatttgaaaggaactgtaagcttttatcttttaaccaactgaacaatacaccaaaagcagcctagggatgagcatttctttgaaagcaattaggttattcacctggtattaaaactatttactgttaaaaaatctgtgacttcatgaagttgatttttaaaggcagcatcaaaaactgaaaaggaagggaaaaaataggcagcttctctgcacttgtttggagctccccaaaacaggagccatggagaagtggcatcaagaccgggctgccctttcgagaacaccctgtggcagttcagagacacgcttttcctacactgcatgcagcccctctttccagcactggaaagaagtggtcttgagcccagctgagaagcacttcacactcctctctcttgttctgaatggtgtttgtgtcagtctgcagctgtgtatggtattatgtcttataatcctgcatcacttctatcctatccagtcatatctaatgtagaaaattagtttccagtgaaagtaatatgtagtgcttttatgatatttgtgtgcaatatcccctcttccattgaggatatttgatgtaaaggaaaaaaaaaaactcagttccacaataaaatacaaaagtggcaaaagtt

SEQ ID NO: 57130 - DNA, 11872 bp, Homo sapiens
tgcctagtctccatataaaagcggcgccgcctccccgccctctctcactccccgctcctctccgccgcgcactctccgcggcgctgggagagggcggagggggaggcggcgcgcggcgccagaggaggggggacgcagggggcggagcggagacagtaccttcggagataatcctttctcctgccgcagaggagaggagcggccggagcgagacacttcgccgaggcacagcagccggcaggatggcgaccgtggtggtggaagccaccgagccggagccgtccggcagcatcgccaacccggcggcgtccacctcgcctagcctgtcgcaccgcttccttgacagcaagttctacttgctggtggtcgtcggcgagatcgtgaccgaggagcacctgcggcgtgccatcggcaacatcgagctcggaatccgatcatgggacacaaacctgattgaatgcaacttggaccaagaactcaaactttttgtatctcgacactctgcaagattctctcctgaagtcccaggacaaaagatccttcatcaccgaagtgacgttttagaaacagtggtcctgatcaacccttctgatgaagcagtcagcaccgaggtgcgcttaatgatcactgatgctgcccgacacaagctgctcgtgctgaccgggcagtgctttgaaaataccggagagctcattctccagtccggctctttctccttccagaacttcatagagattttcaccgatcaagagatcggggagttactaagcaccacccatcctgccaacaaagccagcttaaccctgttctgtcctgaagaaggggactggaagaactccaatcttgacagacacaatctccaagacttcatcaatattaaactcaattcagcttctatcttgccagaaatggaaggactttctgagtttaccgagtatctctcagaatcagtggaagtcccatctccctttgacatcttggaacctcccacatcgggtggatttctgaagctctccaagccctgctgttatatttttccaggagggaggggcgattctgccttgtttgcagtgaatggtttcaatatgctcatcaatggcggatcagagagaaaatcctgcttctggaagctcatccgacacttagaccgagtggactccatcctgctcacccacattggggatgacaatttgcctggaataaacagcatgttacagcggaaaattgcagagctcgaggaagaacagtcccagggctccaccacaaatagtgactggatgaaaaacctcatctcccctgacttaggagttgtatttctcaatgtacctgaaaatctcaaaaatccagagccaaacatcaagatgaagagaagcatagaagaagcctgcttcactctccagtacctaaacaaattgtccatgaaaccagaacctctgtttagaagtgtaggcaatactattgatcctgtcattcttttccaaaaaatgggagtaggtaaacttgagatgtatgtgcttaatccagtcaagagcagcaaggaaatgcagtattttatgcagcagtggactggtaccaacaaagacaaggctgaattcattctgcctaatggtcaagaagtagatctcccgatttcctacttaacttcagtctcatctttgattgtgtggcatccagcaaaccctgcggagaaaatcatccgagtcctgtttcctgggaacagcacccagtacaacatcctggaagggttggaaaagctcaaacatctagactttctgaagcagccactggccacccaaaaggatctcactggccaggtgcccactcctgtggtgaaacaaacaaaactgaaacagagggctgatagccgagaaagtctgaagccagccgcaaaaccacttcctagcaaatccgtgcgcaaggagtcaaaagaagaaacccctgaggtcacaaaagtgaatcacgtggaaaagccacccaaagttgaaagcaaagaaaaggtaatggtgaaaaaagacaagccagtaaaaacagagaccaaaccttcagtgactgaaaaggaggttcccagcaaagaagagccatctccagtgaaagccgaggtggctgagaagcaagccacagatgtcaaacccaaagctgccaaggagaagacggtgaaaaaggaaacaaaggtaaagcctgaagacaagaaagaggagaaagaaaagccaaagaaagaagtggctaaaaaggaggacaaaacacctatcaagaaggaggaaaaaccaaaaaaggaagaggtgaaaaaagaagtcaaaaaagagatcaagaaagaagagaaaaaagaacccaagaaagaggttaagaaagaaacaccgccaaaggaagtcaagaaggaagttaagaaggaagagaagaaggaagtgaaaaaggaagaaaaggaacccaaaaaagaaattaagaagctccctaaagacgcaaagaaatcatctactcctctgtctgaagcaaaaaaaccagctgctttaaaaccaaaagtacccaagaaggaagagtctgtcaagaaagattctgttgctgccggaaagccaaaggagaaggggaaaataaaagtcattaagaaggaaggcaaggccgcagaggctgtcgctgcagctgtcggcactggagccaccacagcagctgtcatggcggcagctggaatagcagccattggccctgccaaagaactcgaagctgagaggtcccttatgtcatctcctgaggatctaaccaaggactttgaagagttaaaggctgaagaggtcgatgtaacaaaggacatcaagcctcagctggagctaatcgaagacgaagagaaactgaaggaaactgagccagtcgaagcctacgtcatccagaaggagagagaagtcaccaaaggtcctgccgagtcccctgatgagggaatcactaccactgaaggggagggcgaatgtgaacagacacctgaggagctggagcccgtcgagaagcagggagtagacgacattgaaaaatttgaagatgaaggagccggttttgaagaatcttcagagactggagactatgaagagaaggcagaaactgaggaggctgaggagccagaagaggatggggaggaacacgtatgtgtgagcgcctccaagcacagccccactgaggatgaggaaagtgccaaggcggaggctgatgcatacatcagggagaagagggagtctgtggccagtggggatgaccgagccgaagaagacatggatgaggccattgagaaaggagaggctgaacaatctgaagaggaggctgatgaggaggacaaagctgaagatgccagagaggaggaatatgagccggaaaaaatggaagctgaagactatgtgatggctgtggtcgacaaggctgcagaggctggtggtgccgaggagcagtatggattcctcaccacaccaaccaagcaactaggagcccagtctcctggccgagaacctgcatcttcaattcatgatgagactttacctggaggctcagagagcgaggccaccgcttctgatgaggagaatcgagaagaccagcctgaggaattcactgccacctctggctacactcagtctactattgagatatccagtgagcccacccccatggatgagatgtctacccctcgagacgtgatgagtgatgagaccaacaatgaagagacggagtccccttctcaggaattcgtaaatatcaccaaatatgaatcttcattgtattctcaggaatactctaaacctgctgatgttacaccgctcaacggattttctgaaggatcaaaaacagatgccactgatggcaaggattacaatgcttcagcctctaccatatcaccaccctcttccatggaggaagacaaattcagcagatctgctttacgtgatgcttactgctctgaagtgaaagccagcaccactttggacatcaaagatagcatctcagctgtttcaagtgaaaaggtcagcccatcgaagagcccgtccctgagtccatctccaccatcacccttagaaaagacccccctgggtgaacgtagtgtgaacttctctctgacgcccaatgagattaaagtctctgcagaggcagaagtagccccggtgtctcctgaggtgacccaagaagtagttgaagaacattgtgctagtcctgaggacaagactctggaagtggtgtcaccatctcagtccgtgactggcagtgctggtcacacaccttactatcaatctcctactgacgagaaatccagtcatctccctacagaagtcattgaaaaaccaccagcagttccagtgagttttgaattcagtgatgccaaagatgagaatgaaagggcttcagtaagccccatggatgagcccgtgcctgactcagagtctcctattgaaaaagttttgtctcctttacgcagcccgcccctcattggatccgagtctgcttatgaaagttttctaagtgctgatgacaaggcttctggcagaggtgccgaaagtccttttgaagaaaagagtggaaaacaaggctctccagaccaagtaagtccagtttctgaaatgacttctactagtctttaccaagacaaacaggaagggaaaagcacagactttgcaccaataaaagaagactttggccaagaaaagaaaactgatgatgttgaagccatgagttctcaaccagcactggctctggatgaaaggaaattaggagatgtttctcccacacaaatagatgtcagtcagtttggatcttttaaagaagacactaagatgtccatttctgaaggtactgtctcagacaagtcagctactcctgttgatgagggcgtagcagaagacacgtactctcatatggagggtgtggcctcagtgtccacagcctcagtggctacgagctcatttccagagccaacaacagatgatgtgtctccatctctgcatgctgaggttggctccccacattccacagaagtagatgactccctttcagtgtctgttgtgcaaacacctaccacattccaggaaacagaaatgtctccatctaaagaagaatgcccaagaccgatgtcaatttctccaccagatttctcccctaaaactgcaaagtccaggacacccgttcaagatcacagatctgaacagtcctcaatgtctattgaatttggccaagaatctcctgagcaatcccttgctatggacttcagtcgacagtctccagatcaccctacagtgggtgcaggcgtgcttcacatcactgaaaatgggccaactgaagtggactacagtccttctgacatgcaggactccagtttatcacataagataccacctatggaggagccgtcctacacccaagataatgatctttctgagctcatctcagtatctcaggtagaggcctccccgtccacctcttctgctcataccccttctcagatcgcttctcctctccaagaagatactctatccgatgttgctcctcccagagatatgtccttatatgcctcactcacctctgaaaaagtgcaaagtctggaaggagagaagctctctccaaaatctgatatctctccactcaccccacgagagtcctctcctttatattcacctactttttcagattctacctctgcagtcaaagagaaaacagcaacttgccacagttcctcttctccaccaatagatgcagcatccgcagagccctatggcttccgtgcctcagtgttattcgatacaatgcaacaccatctagccttgaatagagatttgtccacacctggcctggagaaggacagtggagggaagacacctggtgactttagctatgcctatcaaaagcctgaggaaacaaccaggtccccagatgaagaagattatgactatgagtcttatgagaagaccacccggacctcagatgtgggtggctattactatgagaagatagagagaaccacaaaatctccaagtgacagtggctactcctatgagaccattgggaaaactaccaagacccctgaagatggtgactattcctatgaaattattgagaagaccacacggacccctgaagagggtgggtactcatatgacataagtgaaaagaccaccagcccccccgaagtgagtggttacagctatgaaaagactgagaggtctagaaggcttctggatgacatcagcaatggctatgatgactctgaggatggtggccacacacttggggaccccagctactcttatgaaaccactgagaaaattaccagtttccctgagtctgaaggttattcctatgagacatctacaaagacaacacgaacccctgatacttccacatactgttacgagactgcagagaaaatcactagaacccctcaggcatccacatattcctacgagacttcagacctatgctacactgcagaaaagaagtccccctcagaagcccgtcaggatgtcgatttatgcctcgtgtcctcttgtgaatacaagcaccccaagacagagctttcaccctctttcattaatcccaatcctcttgagtggtttgccagtgaagaacccactgaagaatctgaaaagcccctcactcaatcagggggagccccaccgcctccaggaggaaagcaacagggccgacagtgtgatgaaacccctcccacctcagtcagcgagtcagccccatcccagaccgactctgatgttcccccggagactgaagagtgcccctccatcacggccgatgccaatatcgactctgaagacgagtcggaaaccatccccacagacaaaactgtcacgtacaaacacatggacccacctccagctcccgtgcaagaccgcagcccttcgccacgccaccctgatgtgtccatggtggacccagaggccttggccattgagcagaacctgggcaaagctctaaagaaagatctgaaagagaagaccaaaaccaaaaagccaggtacaaagaccaagtcatcttcacctgtcaaaaagagtgatgggaagtctaagcccttggcagcttcaccaaaaccagcgggcttgaaagaatcctcggataaagtgtccagggtggcttctcctaagaagaaagaatctgtggaaaaggcagcaaaacccaccaccactcctgaggtcaaagctgcacgtggggaagagaaagacaaggagaccaagaatgctgccaatgcctctgcatccaagtcggccaagaccgccactgcaggaccaggaactaccaagacgaccaagtcatctgctgtgcccccaggcctccctgtgtatttggacctgtgctacattcctaaccacagcaatagtaagaatgttgatgtggaatttttcaagagagtgcggtcttcctactacgtggtgagtgggaatgaccctgctgctgaggagcccagccgggctgtcctggacgctttgttggaaggaaaggctcagtggggcagcaacatgcaggtgacactgatcccaactcatgactcagaagtgatgagggaatggtaccaggagacccatgagaaacagcaagatctcaacatcatggttttagcaagcagcagcacagtggttatgcaagatgaatccttccctgcatgcaagattgaactgtaaaaaccaaggccagccacaccacaggatctgaactttgtttccagaaattcttcaatttgaaatcaccttttctaaaaagtcaattcatctagttaagtcgctgaacaattacctgccaaatgctatactgtgtcatggtgatgcaagtcactaaatttctcagtttttgctgattgctaagggaaataacagtatttccacaatagggttcaaattcctgcaaaattacctaccccagttcatctctgctgaacatttggaaaccatgcactagccaacccaactgacttctgctaggtagaggcatttgtcttagagagagagagagcgcgggagagagtgagagagagtgagagcacaaagataacgcaggagagagagagagaaagaatgagaaagaaaaggaatgcaagagaaggagatgtaatgacagagagttctggtgagatacccagagagaaaaagagagagcagggtggggtaaggaggagaaaataaaccaacaattaggtctgcattttctcaggcagtaggcattctttagtctacataggcaaagttttccatttttgtcagtctgagtcatcaaaaagagtcttaattttctaaaacaagttggctagaagaaagtaaaaagaacaacacttgttatgagggcatgtgatattttcacatcttaattaagctccttcagtttgaaggctgcacactgacataatgtagtgagtgtagactggccatgcaagtggtttgggccccattcagaactctcagactctaaacacacaagtagattgatctaaggcatgctcccagcatttgtccacccacttagtccactctgagtcgattaacctgcatgcagcaacacccaagtccaccccaattaactgaagcaaataccaaagcagttgggagtacatatggtagacaatttgccttaggaagtgacttgaatgtacaaagatacttgatgcacttattttttaatgtgagacagcaagtttataaaacatccatataggattatagatacttaaaggaacacgtgggtgagcgtgtgtgggggtactagaagctgatctgattggtccaacagtttgatgctgagtcatgcgtgttgaatcccacttcagtgcacctgtggcctctcagtcaaacaagttgtgcctttcacagcttctttactactgcaagttcaagactgaaatggcttctatgatcagaactgggaaaacagtgaatcttatggtggaagaggttctcagcaagtgtacagtatttaccttcctttgtcttacattggctttttaaattttccattaatttcaacataattatgggaacaagtgtacagaagaattttttttttaagatatgtgagaacttttcatagatgaactttttaacaaatgttttcatttacaggaaattgcaaagaaaattctcaagtgatagtctttttttttaagtgtttcgtaagacaaaaattgaataatgttttttgaagttctggcaagattgaagtctgatattgcagtaatgatatttattaaaaacccataactaccaggaataatgatacctcccaccccttgattcccataacataaaagtgctacttgagagtgggggagaatggcatggtaggctacttttcagggccttgacaagtacatcacccagtggtatcctacatacttctttcaagatcttcaaccatgaggtaaaagagccaagttcaaagaaccctagcacaaatttgctttgggattttcttttctggaaaaaaaaaataaaagaaatagtacattgaaaacaaatgaattctcaactcctacggttcatgtagagtttagagaaaatttccatcattgtcatcattgaactgtgaacctgggaagccagatcatgattaacactgacatcaagtttcaagttgcagatcaatgcacccagtgttcagatgaggcaaacttctccgtgacaactgtgctgtgctctgtcacattacatttcctgcagactctaagatctacggagtagagaacaatgacctcattttattttctatgttagttatttatttcaaaattaacattttagttgatttttgtctgataagtctatgttttgcactgctaactatgatgagggtttaaaaaaatgcttcttcagggtcctttcactgaggacctatgcagtctacttaatgctgtgaattacatttttcaaatgtttaattttttaaagaaaattaatattctatttttgttaggcttctctagaaatgcagcttttatttattaccccatttctttcaagtccttggaaaataacatattaagggtacaagaaattaacacatgatggaaaagtcattgtgacgccaatgaatttcattgagtataaactcatctacttcaaatttattttataagacaacctaagatactcaagataattatttaatggttagctcttaagttgaattggtctacataatgcgtgggaagaaaaccagatttttagccttcttgccaaatccagacctctggttgatttttctttgacagaagatgcaagttattttccaatttcacaattaaatgtatttaacctgaacattattttgctttaaaaactataaacattgtaggagaattatagccagtcttcagttataaccactccaccctcctcactttctctctctctctctctttttttttgctatgggatttaatgggaaaaatatgtaaaaactgtcactagtcagctggctctttttcctatgaaatctatcagtacctttctccatccgttgttctcaataatgaccacagagcctgagtataccaagaaaaccaatattcgcattacaggttgctcctgtccttccagacacctttcctgcctgtgtgactaacctaattttgctagttccataaatacacgattagtttagtaacagccatcacaatgtaccatgtacattcatggtgagagctaaagatcgacacagacttctaggagctttgttcatactgattacttaatccaattgtatagattgaatatttgagtggaaggaatttacactctgtttaaatgatgggattctatcgagatagcactcatgatcatgacctttttggtagtattcttaaacaaaattctacagagactaaatgttagcgatgatcctccattttcaattttaaccaattctgtcccctttctcaaaaccctgagccctgtgcatgctttctcagtcttgtggtgggactggatacaatgactaacttcccctcctcccctctttaaacaccattttccatggagttcaaaaaaattttttttcttaacgttacatatcatagtgaatggtttccccagtgtatatgaatgttttaagtgtctccaatagcttatgcagtctaggagctttccaatactcatttaattaagatttaatcatttgctaatggaaatcttaccacctttcattttccctctgttaccaaatttcagctcttaggagctgctctacaattctgaatttgcttttcttgcctctctttagtcacctgtcacaggaggttcctgctcagtaatgatattgtgagttaggataataactttttttttttgtgcttcagatttagaagaaaagatcctgtttccatttgaaaggaactgtaagcttttatcttttaaccaactgaacaatacaccaaaagcagcctagggatgagcatttctttgaaagcaattaggttattcacctggtattaaaactatttactgttaaaaaatctgtgacttcatgaagttgatttttaaaggcagcatcaaaaactgaaaaggaagggaaaaaataggcagcttctctgcacttgtttggagctccccaaaacaggagccatggagaagtggcatcaagaccgggctgccctttcgagaacaccctgtggcagttcagagacacgcttttcctacactgcatgcagcccctctttccagcactggaaagaagtggtcttgagcccagctgagaagcacttcacactcctctctcttgttctgaatggtgtttgtgtcatggtgtctgtgtgtggggtgtggagggagtataattcctgagtggggggggtggtgtctcacccccactcatgtgttgtgccagggggcgtgagtgtgctctacacacggggtttttt

SEQ ID NO: 57131 - DNA, 9920 bp, Homo sapiens
gcccagtctcctggccgagaacctgcatcttcaattcatgatgagactttacctggaggctcagagagcgaggccaccgcttctgatgaggagaatcgagaagacggtgaaaaaggaaacaaaggtaaagcctgaagacaagaaagaggagaaagaaaagccaaagaaagaagtggctaaaaaggaggacaaaacacctatcaagaaggaggaaaaaccaaaaaaggaagaggtgaaaaaagaagtcaaaaaagagatcaagaaagaagagaaaaaagaacccaagaaagaggttaagaaagaaacaccgccaaaggaagtcaagaaggaagttaagaaggaagagaagaaggaagtgaaaaaggaagaaaaggaacccaaaaaagaaattaagaagctccctaaagacgcaaagaaatcatctactcctctgtctgaagcaaaaaaaccagctgctttaaaaccaaaagtacccaagaaggaagagtctgtcaagaaagattctgttgctgccggaaagccaaaggagaaggggaaaataaaagtcattaagaaggaaggcaaggccgcagaggctgtcgctgcagctgtcggcactggagccaccacagcagctgtcatggcggcagctggaatagcagccattggccctgccaaagaactcgaagctgagaggtcccttatgtcatctcctgaggatctaaccaaggactttgaagagttaaaggctgaagaggtcgatgtaacaaaggacatcaagcctcagctggagctaatcgaagacgaagagaaactgaaggaaactgagccagtcgaagcctacgtcatccagaaggagagagaagtcaccaaaggtcctgccgagtcccctgatgagggaatcactaccactgaaggggagggcgaatgtgaacagacacctgaggagctggagcccgtcgagaagcagggagtagacgacattgaaaaatttgaagatgaaggagccggttttgaagaatcttcagagactggagactatgaagagaaggcagaaactgaggaggctgaggagccagaagaggatggggaggaacacgtatgtgtgagcgcctccaagcacagccccactgaggatgaggaaagtgccaaggcggaggctgatgcatacatcagggagaagagggagtctgtggccagtggggatgaccgagccgaagaagacatggatgaggccattgagaaaggagaggctgaacaatctgaagaggaggctgatgaggaggacaaagctgaagatgccagagaggaggaatatgagccggaaaaaatggaagctgaagactatgtgatggctgtggtcgacaaggctgcagaggctggtggtgccgaggagcagtatggattcctcaccacaccaaccaagcaactaggagcccagtctcctggccgagaacctgcatcttcaattcatgatgagactttacctggaggctcagagagcgaggccaccgcttctgatgaggagaatcgagaagaccagcctgaggaattcactgccacctctggctacactcagtctactattgagatatccagtgagcccacccccatggatgagatgtctacccctcgagacgtgatgagtgatgagaccaacaatgaagagacggagtccccttctcaggaattcgtaaatatcaccaaatatgaatcttcattgtattctcaggaatactctaaacctgctgatgttacaccgctcaacggattttctgaaggatcaaaaacagatgccactgatggcaaggattacaatgcttcagcctctaccatatcaccaccctcttccatggaggaagacaaattcagcagatctgctttacgtgatgcttactgctctgaagtgaaagccagcaccactttggacatcaaagatagcatctcagctgtttcaagtgaaaaggtcagcccatcgaagagcccgtccctgagtccatctccaccatcacccttagaaaagacccccctgggtgaacgtagtgtgaacttctctctgacgcccaatgagattaaagtctctgcagaggcagaagtagccccggtgtctcctgaggtgacccaagaagtagttgaagaacattgtgctagtcctgaggacaagactctggaagtggtgtcaccatctcagtccgtgactggcagtgctggtcacacaccttactatcaatctcctactgacgagaaatccagtcatctccctacagaagtcattgaaaaaccaccagcagttccagtgagttttgaattcagtgatgccaaagatgagaatgaaagggcttcagtaagccccatggatgagcccgtgcctgactcagagtctcctattgaaaaagttttgtctcctttacgcagcccgcccctcattggatccgagtctgcttatgaaagttttctaagtgctgatgacaaggcttctggcagaggtgccgaaagtccttttgaagaaaagagtggaaaacaaggctctccagaccaagtaagtccagtttctgaaatgacttctactagtctttaccaagacaaacaggaagggaaaagcacagactttgcaccaataaaagaagactttggccaagaaaagaaaactgatgatgttgaagccatgagttctcaaccagcactggctctggatgaaaggaaattaggagatgtttctcccacacaaatagatgtcagtcagtttggatcttttaaagaagacactaagatgtccatttctgaaggtactgtctcagacaagtcagctactcctgttgatgagggcgtagcagaagacacgtactctcatatggagggtgtggcctcagtgtccacagcctcagtggctacgagctcatttccagagccaacaacagatgatgtgtctccatctctgcatgctgaggttggctccccacattccacagaagtagatgactccctttcagtgtctgttgtgcaaacacctaccacattccaggaaacagaaatgtctccatctaaagaagaatgcccaagaccgatgtcaatttctccaccagatttctcccctaaaactgcaaagtccaggacacccgttcaagatcacagatctgaacagtcctcaatgtctattgaatttggccaagaatctcctgagcaatcccttgctatggacttcagtcgacagtctccagatcaccctacagtgggtgcaggcgtgcttcacatcactgaaaatgggccaactgaagtggactacagtccttctgacatgcaggactccagtttatcacataagataccacctatggaggagccgtcctacacccaagataatgatctttctgagctcatctcagtatctcaggtagaggcctccccgtccacctcttctgctcataccccttctcagatcgcttctcctctccaagaagatactctatccgatgttgctcctcccagagatatgtccttatatgcctcactcacctctgaaaaagtgcaaagtctggaaggagagaagctctctccaaaatctgatatctctccactcaccccacgagagtcctctcctttatattcacctactttttcagattctacctctgcagtcaaagagaaaacagcaacttgccacagttcctcttctccaccaatagatgcagcatccgcagagccctatggcttccgtgcctcagtgttattcgatacaatgcaacaccatctagccttgaatagagatttgtccacacctggcctggagaaggacagtggagggaagacacctggtgactttagctatgcctatcaaaagcctgaggaaacaaccaggtccccagatgaagaagattatgactatgagtcttatgagaagaccacccggacctcagatgtgggtggctattactatgagaagatagagagaaccacaaaatctccaagtgacagtggctactcctatgagaccattgggaaaactaccaagacccctgaagatggtgactattcctatgaaattattgagaagaccacacggacccctgaagagggtgggtactcatatgacataagtgaaaagaccaccagcccccccgaagtgagtggttacagctatgaaaagactgagaggtctagaaggcttctggatgacatcagcaatggctatgatgactctgaggatggtggccacacacttggggaccccagctactcttatgaaaccactgagaaaattaccagtttccctgagtctgaaggttattcctatgagacatctacaaagacaacacgaacccctgatacttccacatactgttacgagactgcagagaaaatcactagaacccctcaggcatccacatattcctacgagacttcagacctatgctacactgcagaaaagaagtccccctcagaagcccgtcaggatgtcgatttatgcctcgtgtcctcttgtgaatacaagcaccccaagacagagctttcaccctctttcattaatcccaatcctcttgagtggtttgccagtgaagaacccactgaagaatctgaaaagcccctcactcaatcagggggagccccaccgcctccaggaggaaagcaacagggccgacagtgtgatgaaacccctcccacctcagtcagcgagtcagccccatcccagaccgactctgatgttcccccggagactgaagagtgcccctccatcacggccgatgccaatatcgactctgaagacgagtcggaaaccatccccacagacaaaactgtcacgtacaaacacatggacccacctccagctcccgtgcaagaccgcagcccttcgccacgccaccctgatgtgtccatggtggacccagaggccttggccattgagcagaacctgggcaaagctctaaagaaagatctgaaagagaagaccaaaaccaaaaagccaggtacaaagaccaagtcatcttcacctgtcaaaaagagtgatgggaagtctaagcccttggcagcttcaccaaaaccagcgggcttgaaagaatcctcggataaagtgtccagggtggcttctcctaagaagaaagaatctgtggaaaaggcagcaaaacccaccaccactcctgaggtcaaagctgcacgtggggaagagaaagacaaggagaccaagaatgctgccaatgcctctgcatccaagtcggccaagaccgccactgcaggaccaggaactaccaagacgaccaagtcatctgctgtgcccccaggcctccctgtgtatttggacctgtgctacattcctaaccacagcaatagtaagaatgttgatgtggaatttttcaagagagtgcggtcttcctactacgtggtgagtgggaatgaccctgctgctgaggagcccagccgggctgtcctggacgctttgttggaaggaaaggctcagtggggcagcaacatgcaggtgacactgatcccaactcatgactcagaagtgatgagggaatggtaccaggagacccatgagaaacagcaagatctcaacatcatggttttagcaagcagcagcacagtggttatgcaagatgaatccttccctgcatgcaagattgaactgtaaaaaccaaggccagccacaccacaggatctgaactttgtttccagaaattcttcaatttgaaatcaccttttctaaaaagtcaattcatctagttaagtcgctgaacaattacctgccaaatgctatactgtgtcatggtgatgcaagtcactaaatttctcagtttttgctgattgctaagggaaataacagtatttccacaatagggttcaaattcctgcaaaattacctaccccagttcatctctgctgaacatttggaaaccatgcactagccaacccaactgacttctgctaggtagaggcatttgtcttagagagagagagagcgcgggagagagtgagagagagtgagagcacaaagataacgcaggagagagagagagaaagaatgagaaagaaaaggaatgcaagagaaggagatgtaatgacagagagttctggtgagatacccagagagaaaaagagagagcagggtggggtaaggaggagaaaataaaccaacaattaggtctgcattttctcaggcagtaggcattctttagtctacataggcaaagttttccatttttgtcagtctgagtcatcaaaaagagtcttaattttctaaaacaagttggctagaagaaagtaaaaagaacaacacttgttatgagggcatgtgatattttcacatcttaattaagctccttcagtttgaaggctgcacactgacataatgtagtgagtgtagactggccatgcaagtggtttgggccccattcagaactctcagactctaaacacacaagtagattgatctaaggcatgctcccagcatttgtccacccacttagtccactctgagtcgattaacctgcatgcagcaacacccaagtccaccccaattaactgaagcaaataccaaagcagttgggagtacatatggtagacaatttgccttaggaagtgacttgaatgtacaaagatacttgatgcacttattttttaatgtgagacagcaagtttataaaacatccatataggattatagatacttaaaggaacacgtgggtgagcgtgtgtgggggtactagaagctgatctgattggtccaacagtttgatgctgagtcatgcgtgttgaatcccacttcagtgcacctgtggcctctcagtcaaacaagttgtgcctttcacagcttctttactactgcaagttcaagactgaaatggcttctatgatcagaactgggaaaacagtgaatcttatggtggaagaggttctcagcaagtgtacagtatttaccttcctttgtcttacattggctttttaaattttccattaatttcaacataattatgggaacaagtgtacagaagaattttttttttaagatatgtgagaacttttcatagatgaactttttaacaaatgttttcatttacaggaaattgcaaagaaaattctcaagtgatagtctttttttttaagtgtttcgtaagacaaaaattgaataatgttttttgaagttctggcaagattgaagtctgatattgcagtaatgatatttattaaaaacccataactaccaggaataatgatacctcccaccccttgattcccataacataaaagtgctacttgagagtgggggagaatggcatggtaggctacttttcagggccttgacaagtacatcacccagtggtatcctacatacttctttcaagatcttcaaccatgaggtaaaagagccaagttcaaagaaccctagcacaaatttgctttgggattttcttttctggaaaaaaaaaataaaagaaatagtacattgaaaacaaatgaattctcaactcctacggttcatgtagagtttagagaaaatttccatcattgtcatcattgaactgtgaacctgggaagccagatcatgattaacactgacatcaagtttcaagttgcagatcaatgcacccagtgttcagatgaggcaaacttctccgtgacaactgtgctgtgctctgtcacattacatttcctgcagactctaagatctacggagtagagaacaatgacctcattttattttctatgttagttatttatttcaaaattaacattttagttgatttttgtctgataagtctatgttttgcactgctaactatgatgagggtttaaaaaaatgcttcttcagggtcctttcactgaggacctatgcagtctacttaatgctgtgaattacatttttcaaatgtttaattttttaaagaaaattaatattctatttttgttaggcttctctagaaatgcagcttttatttattaccccatttctttcaagtccttggaaaataacatattaagggtacaagaaattaacacatgatggaaaagtcattgtgacgccaatgaatttcattgagtataaactcatctacttcaaatttattttataagacaacctaagatactcaagataattatttaatggttagctcttaagttgaattggtctacataatgcgtgggaagaaaaccagatttttagccttcttgccaaatccagacctctggttgatttttctttgacagaagatgcaagttattttccaatttcacaattaaatgtatttaacctgaacattattttgctttaaaaactataaacattgtaggagaattatagccagtcttcagttataaccactccaccctcctcactttctctctctctctctctttttttttgctatgggatttaatgggaaaaatatgtaaaaactgtcactagtcagctggctctttttcctatgaaatctatcagtacctttctccatccgttgttctcaataatgaccacagagcctgagtataccaagaaaaccaatattcgcattacaggttgctcctgtccttccagacacctttcctgcctgtgtgactaacctaattttgctagttccataaatacacgattagtttagtaacagccatcacaatgtaccatgtacattcatggtgagagctaaagatcgacacagacttctaggagctttgttcatactgattacttaatccaattgtatagattgaatatttgagtggaaggaatttacactctgtttaaatgatgggattctatcgagatagcactcatgatcatgacctttttggtagtattcttaaacaaaattctacagagactaaatgttagcgatgatcctccattttcaattttaaccaattctgtcccctttctcaaaaccctgagccctgtgcatgctttctcagtcttgtggtgggactggatacaatgactaacttcccctcctcccctctttaaacaccattttccatggagttcaaaaaaattttttttcttaacgttacatatcatagtgaatggtttccccagtgtatatgaatgttttaagtgtctccaatagcttatgcagtctaggagctttccaatactcatttaattaagatttaatcatttgctaatggaaatcttaccacctttcattttccctctgttaccaaatttcagctcttaggagctgctctacaattctgaatttgcttttcttgcctctctttagtcacctgtcacaggaggttcctgctcagtaatgatattgtgagttaggataataactttttttttttgtgcttcagatttagaagaaaagatcctgtttccatttgaaaggaactgtaagcttttatcttttaaccaactgaacaatacaccaaaagcagcctagggatgagcatttctttgaaagcaattaggttattcacctggtattaaaactatttactgttaaaaaatctgtgacttcatgaagttgatttttaaaggcagcatcaaaaactgaaaaggaagggaaaaaataggcagcttctctgcacttgtttggagctccccaaaacaggagccatggagaagtggcatcaagaccgggctgccctttcgagaacaccctgtggcagttcagagacacgcttttcctacactgcatgcagcccctctttccagcactggaaagaagtggtcttgagcccagctgagaagcacttcacactcctctctcttgttctgaatggtgtttgtgtcagtctgcagctgtgtatggtattatgtcttataatcctgcatcacttctatcctatccagtcatatctaatgtagaaaattagtttccagtgaaagtaatatgtagtgcttttatgatatttgtgtgcaatatcccctcttccattgaggatatttgatgtaaaggaaaaaaaaaaactcagttccacaataaaatacaaaagtggcaaaagtt

SEQ ID NO: 57132 - DNA, 10944 bp, Homo sapiens
tgcctagtctccatataaaagcggcgccgcctccccgccctctctcactccccgctcctctccgccgcgcactctccgcggcgctgggagagggcggagggggaggcggcgcgcggcgccagaggaggggggacgcagggggcggagcggagacagtaccttcggagataatcctttctcctgccgcagaggagaggagcggccggagcgagacacttcgccgaggcacagcagccggcaggatggcgaccgtggtggtggaagccaccgagccggagccgtccggcagcatcgccaacccggcggcgtccacctcgcctagcctgtcgcaccgcttccttgacagcaagttctacttgctggtggtcgtcggcgagatcgtgaccgaggagcacctgcggcgtgccatcggcaacatcgagctcggaatccgatcatgggacacaaacctgattgaatgcaacttggaccaagaactcaaactttttgtatctcgacactctgcaagattctctcctgaagtcccaggacaaaagatccttcatcaccgaagtgacgttttagaaacagtggtcctgatcaacccttctgatgaagcagtcagcaccgaggtgcgcttaatgatcactgatgctgcccgacacaagctgctcgtgctgaccgggcagtgctttgaaaataccggagagctcattctccagtccggctctttctccttccagaacttcatagagattttcaccgatcaagagatcggggagttactaagcaccacccatcctgccaacaaagccagcttaaccctgttctgtcctgaagaaggggactggaagaactccaatcttgacagacacaatctccaagacttcatcaatattaaactcaattcagcttctatcttgccagaaatggaaggactttctgagtttaccgagtatctctcagaatcagtggaagtcccatctccctttgacatcttggaacctcccacatcgggtggatttctgaagctctccaagccctgctgttatatttttccaggagggaggggcgattctgccttgtttgcagtgaatggtttcaatatgctcatcaatggcggatcagagagaaaatcctgcttctggaagctcatccgacacttagaccgagtggactccatcctgctcacccacattggggatgacaatttgcctggaataaacagcatgttacagcggaaaattgcagagctcgaggaagaacagtcccagggctccaccacaaatagtgactggatgaaaaacctcatctcccctgacttaggagttgtatttctcaatgtacctgaaaatctcaaaaatccagagccaaacatcaagatgaagagaagcatagaagaagcctgcttcactctccagtacctaaacaaattgtccatgaaaccagaacctctgtttagaagtgtaggcaatactattgatcctgtcattcttttccaaaaaatgggagtaggtaaacttgagatgtatgtgcttaatccagtcaagagcagcaaggaaatgcagtattttatgcagcagtggactggtaccaacaaagacaaggctgaattcattctgcctaatggtcaagaagtagatctcccgatttcctacttaacttcagtctcatctttgattgtgtggcatccagcaaaccctgcggagaaaatcatccgagtcctgtttcctgggaacagcacccagtacaacatcctggaagggttggaaaagctcaaacatctagactttctgaagcagccactggccacccaaaaggatctcactggccaggtgcccactcctgtggtgaaacaaacaaaactgaaacagagggctgatagccgagaaagtctgaagccagccgcaaaaccacttcctagcaaatccgtgcgcaaggagtcaaaagaagaaacccctgaggtcacaaaagtgaatcacgtggaaaagccacccaaagttgaaagcaaagaaaaggtaatggtgaaaaaagacaagccagtaaaaacagagaccaaaccttcagtgactgaaaaggaggttcccagcaaagaagagccatctccagtgaaagccgaggtggctgagaagcaagccacagatgtcaaacccaaagctgccaaggagaagacggtgaaaaaggaaacaaaggtaaagcctgaagacaagaaagaggagaaagaaaagccaaagaaagaagtggctaaaaaggaggacaaaacacctatcaagaaggaggaaaaaccaaaaaaggaagaggtgaaaaaagaagtcaaaaaagagatcaagaaagaagagaaaaaagaacccaagaaagaggttaagaaagaaacaccgccaaaggaagtcaagaaggaagttaagaaggaagagaagaaggaagtgaaaaaggaagaaaaggaacccaaaaaagaaattaagaagctccctaaagacgcaaagaaatcatctactcctctgtctgaagcaaaaaaaccagctgctttaaaaccaaaagtacccaagaaggaagagtctgtcaagaaagattctgttgctgccggaaagccaaaggagaaggggaaaataaaagtcattaagaaggaaggcaaggccgcagaggctgtcgctgcagctgtcggcactggagccaccacagcagctgtcatggcggcagctggaatagcagccattggccctgccaaagaactcgaagctgagaggtcccttatgtcatctcctgaggatctaaccaaggactttgaagagttaaaggctgaagaggtcgatgtaacaaaggacatcaagcctcagctggagctaatcgaagacgaagagaaactgaaggaaactgagccagtcgaagcctacgtcatccagaaggagagagaagtcaccaaaggtcctgccgagtcccctgatgagggaatcactaccactgaaggggagggcgaatgtgaacagacacctgaggagctggagcccgtcgagaagcagggagtagacgacattgaaaaatttgaagatgaaggagccggttttgaagaatcttcagagactggagactatgaagagaaggcagaaactgaggaggctgaggagccagaagaggatggggaggaacacgtatgtgtgagcgcctccaagcacagccccactgaggatgaggaaagtgccaaggcggaggctgatgcatacatcagggagaagagggagtctgtggccagtggggatgaccgagccgaagaagacatggatgaggccattgagaaaggagaggctgaacaatctgaagaggaggctgatgaggaggacaaagctgaagatgccagagaggaggaatatgagccggaaaaaatggaagctgaagactatgtgatggctgtggtcgacaaggctgcagaggctggtggtgccgaggagcagtatggattcctcaccacaccaaccaagcaactaggagcccagtctcctggccgagaacctgcatcttcaattcatgatgagactttacctggaggctcagagagcgaggccaccgcttctgatgaggagaatcgagaagaccagcctgaggaattcactgccacctctggctacactcagtctactattgagatatccagtgagcccacccccatggatgagatgtctacccctcgagacgtgatgagtgatgagaccaacaatgaagagacggagtccccttctcaggaattcgtaaatatcaccaaatatgaatcttcattgtattctcaggaatactctaaacctgctgatgttacaccgctcaacggattttctgaaggatcaaaaacagatgccactgatggcaaggattacaatgcttcagcctctaccatatcaccaccctcttccatggaggaagacaaattcagcagatctgctttacgtgatgcttactgctctgaagtgaaagccagcaccactttggacatcaaagatagcatctcagctgtttcaagtgaaaaggtcagcccatcgaagagcccgtccctgagtccatctccaccatcacccttagaaaagacccccctgggtgaacgtagtgtgaacttctctctgacgcccaatgagattaaagtctctgcagaggcagaagtagccccggtgtctcctgaggtgacccaagaagtagttgaagaacattgtgctagtcctgaggacaagactctggaagtggtgtcaccatctcagtccgtgactggcagtgctggtcacacaccttactatcaatctcctactgacgagaaatccagtcatctccctacagaagtcattgaaaaaccaccagcagttccagtgagttttgaattcagtgatgccaaagatgagaatgaaagggcttcagtaagccccatggatgagcccgtgcctgactcagagtctcctattgaaaaagttttgtctcctttacgcagcccgcccctcattggatccgagtctgcttatgaaagttttctaagtgctgatgacaaggcttctggcagaggtgccgaaagtccttttgaagaaaagagtggaaaacaaggctctccagaccaagtaagtccagtttctgaaatgacttctactagtctttaccaagacaaacaggaagggaaaagcacagactttgcaccaataaaagaagactttggccaagaaaagaaaactgatgatgttgaagccatgagttctcaaccagcactggctctggatgaaaggaaattaggagatgtttctcccacacaaatagatgtcagtcagtttggatcttttaaagaagacactaagatgtccatttctgaaggtactgtctcagacaagtcagctactcctgttgatgagggcgtagcagaagacacgtactctcatatggagggtgtggcctcagtgtccacagcctcagtggctacgagctcatttccagagccaacaacagatgatgtgtctccatctctgcatgctgaggttggctccccacattccacagaagtagatgactccctttcagtgtctgttgtgcaaacacctaccacattccaggaaacagaaatgtctccatctaaagaagaatgcccaagaccgatgtcaatttctccaccagatttctcccctaaaactgcaaagtccaggacacccgttcaagatcacagatctgaacagtcctcaatgtctattgaatttggccaagaatctcctgagcaatcccttgctatggacttcagtcgacagtctccagatcaccctacagtgggtgcaggcgtgcttcacatcactgaaaatgggccaactgaagtggactacagtccttctgacatgcaggactccagtttatcacataagataccacctatggaggagccgtcctacacccaagataatgatctttctgagctcatctcagtatctcaggtagaggcctccccgtccacctcttctgctcataccccttctcagatcgcttctcctctccaagaagatactctatccgatgttgctcctcccagagatatgtccttatatgcctcactcacctctgaaaaagtgcaaagtctggaaggagagaagctctctccaaaatctgatatctctccactcaccccacgagagtcctctcctttatattcacctactttttcagattctacctctgcagtcaaagagaaaacagcaacttgccacagttcctcttctccaccaatagatgcagcatccgcagagccctatggcttccgtgcctcagtgttattcgatacaatgcaacaccatctagccttgaatagagatttgtccacacctggcctggagaaggacagtggagggaagacacctggtgactttagctatgcctatcaaaagcctgaggaaacaaccaggtccccagatgaagaagattatgactatgagtcttatgagaagaccacccggacctcagatgtgggtggctattactatgagaagatagagagaaccacaaaatctccaagtgacagtggctactcctatgagaccattgggaaaactaccaagacccctgaagatggtgactattcctatgaaattattgagaagaccacacggacccctgaagagggtgggtactcatatgacataagtgaaaagaccaccagcccccccgaagtgagtggttacagctatgaaaagactgagaggtctagaaggcttctggatgacatcagcaatggctatgatgactctgaggatggtggccacacacttggggaccccagctactcttatgaaaccactgagaaaattaccagtttccctgagtctgaaggttattcctatgagacatctacaaagacaacacgaacccctgatacttccacatactgttacgagactgcagagaaaatcactagaacccctcaggcatccacatattcctacgagacttcagacctatgctacactgcagaaaagaagtccccctcagaagcccgtcaggatgtcgatttatgcctcgtgtcctcttgtgaatacaagcaccccaagacagagctttcaccctctttcattaatcccaatcctcttgagtggtttgccagtgaagaacccactgaagaatctgaaaagcccctcactcaatcagggggagccccaccgcctccaggaggaaagcaacagggccgacagtgtgatgaaacccctcccacctcagtcagcgagtcagccccatcccagaccgactctgatgttcccccggagactgaagagtgcccctccatcacggccgatgccaatatcgactctgaagacgagtcggaaaccatccccacagacaaaactgtcacgtacaaacacatggacccacctccagctcccgtgcaagaccgcagcccttcgccacgccaccctgatgtgtccatggtggacccagaggccttggccattgagcagaacctgggcaaagctctaaagaaagatctgaaagagaagaccaaaaccaaaaagccaggtacaaagaccaagtcatcttcacctgtcaaaaagagtgatgggaagtctaagcccttggcagcttcaccaaaaccagcgggcttgaaagaatcctcggataaagtgtccagggtggcttctcctaagaagaaagaatctgtggaaaaggcagcaaaacccaccaccactcctgaggtcaaagctgcacgtggggaagagaaagacaaggagaccaagaatgctgccaatgcctctgcatccaagtcggccaagaccgccactgcaggaccaggaactaccaagacgaccaagtcatctgctgtgcccccaggcctccctgtgtatttggacctgtgctacattcctaaccacagcaatagtaagaatgttgatgtggaatttttcaagagagtgcggtcttcctactacgtggtgagtgggaatgaccctgctgctgaggagcccagccgggctgtcctggacgctttgttggaaggaaaggctcagtggggcagcaacatgcaggtgacactgatcccaactcatgactcagaagtgatgagggaatggtaccaggagacccatgagaaacagcaagatctcaacatcatggttttagcaagcagcagcacagtggttatgcaagatgaatccttccctgcatgcaagattgaactgtaaaaaccaaggccagccacaccacaggatctgaactttgtttccagaaattcttcaatttgaaatcaccttttctaaaaagtcaattcatctagttaagtcgctgaacaattacctgccaaatgctatactgtgtcatggtgatgcaagtcactaaatttctcagtttttgctgattgctaagggaaataacagtatttccacaatagggttcaaattcctgcaaaattacctaccccagttcatctctgctgaacatttggaaaccatgcactagccaacccaactgacttctgctaggtagaggcatttgtcttagagagagagagagcgcgggagagagtgagagagagtgagagcacaaagataacgcaggagagagagagagaaagaatgagaaagaaaaggaatgcaagagaaggagatgtaatgacagagagttctggtgagatacccagagagaaaaagagagagcagggtggggtaaggaggagaaaataaaccaacaattaggtctgcattttctcaggcagtaggcattctttagtctacataggcaaagttttccatttttgtcagtctgagtcatcaaaaagagtcttaattttctaaaacaagttggctagaagaaagtaaaaagaacaacacttgttatgagggcatgtgatattttcacatcttaattaagctccttcagtttgaaggctgcacactgacataatgtagtgagtgtagactggccatgcaagtggtttgggccccattcagaactctcagactctaaacacacaagtagattgatctaaggcatgctcccagcatttgtccacccacttagtccactctgagtcgattaacctgcatgcagcaacacccaagtccaccccaattaactgaagcaaataccaaagcagttgggagtacatatggtagacaatttgccttaggaagtgacttgaatgtacaaagatacttgatgcacttattttttaatgtgagacagcaagtttataaaacatccatataggattatagatacttaaaggaacacgtgggtgagcgtgtgtgggggtactagaagctgatctgattggtccaacagtttgatgctgagtcatgcgtgttgaatcccacttcagtgcacctgtggcctctcagtcaaacaagttgtgcctttcacagcttctttactactgcaagttcaagactgaaatggcttctatgatcagaactgggaaaacagtgaatcttatggtggaagaggttctcagcaagtgtacagtatttaccttcctttgtcttacattggctttttaaattttccattaatttcaacataattatgggaacaagtgtacagaagaattttttttttaagatatgtgagaacttttcatagatgaactttttaacaaatgttttcatttacaggaaattgcaaagaaaattctcaagtgatagtctttttttttaagtgtttcgtaagacaaaaattgaataatgttttttgaagttctggcaagattgaagtctgatattgcagtaatgatatttattaaaaacccataactaccaggaataatgatacctcccaccccttgattcccataacataaaagtgctacttgagagtgggggagaatggcatggtaggctacttttcagggccttgacaagtacatcacccagtggtatcctacatacttctttcaagatcttcaaccatgaggtaaaagagccaagttcaaagaaccctagcacaaatttgctttgggattttcttttctggaaaaaaaaaataaaagaaatagtacattgaaaacaaatgaattctcaactcctacggttcatgtagagtttagagaaaatttccatcattgtcatcattgaactgtgaacctgggaagccagatcatgattaacactgacatcaagtttcaagttgcagatcaatgcacccagtgttcagatgaggcaaacttctccgtgacaactgtgctgtgctctgtcacattacatttcctgcagactctaagatctacggagtagagaacaatgacctcattttattttctatgttagttatttatttcaaaattaacattttagttgatttttgtctgataagtctatgttttgcactgctaactatgatgagggtttaaaaaaatgcttcttcagggtcctttcactgaggacctatgcagtctacttaatgctgtgaattacatttttcaaatgtttaattttttaaagaaaattaatattctatttttgttaggcttctctagaaatgcagcttttatttattaccccatttctttcaagtccttggaaaataacatattaagggtacaagaaattaacacatgatggaaaagtcattgtgacgccaatgaatttcattgagtataaactcatctacttcaaatttattttataagacaacctaagatactcaagataattatttaatggttagctcttaagttgaattggtctacataatgcgtgggaagaaaaccagatttttagccttcttgccaaatccagacctctggttgatttttctttgacagaagatgcaagttattttccaatttcacaattaaatgtatttaacctgaacattattttgctttaaaaactataaacattgtaggagaattatagccagtcttcagttataaccactccaccctcctcactttctctctctctctctctttttttttgctatgggatttaatgggaaaaatatgtaaaaactgtcactagtcagctggctctttttcctatgaaatctatcagtacctttctccatccgttgttctcaataatgaccacagagcctgagtataccaagaaaaccaatattcgcattacaggttgctcctgtccttccagacacctttcctgcctgtgtgactaacctaattttgctagttccataaatacacgattagtttagtaacagccatcacaatgtaccatgtacattcatggtgagagctaaagatcgacacagacttctaggagctttgttcatactgattacttaatccaattgtatagattgaatatttgagtggaaggaatttacactctgtttaaatgatgggattctatcgagatagcactcatgatcatgacctttttggtagtattcttaaacaaaattctacagagactaaatgttagcgatgatcctccattaccatctcaaccctggcctgtgcatgctttctcataagtaccacatatgtattttctaggatttgagagggagagagtctcc

SEQ ID NO: 57133 - DNA, 7264 bp, Homo sapiens
tgcctagtctccatataaaagcggcgccgcctccccgccctctctcactccccgctcctctccgccgcgcactctccgcggcgctgggagagggcggagggggaggcggcgcgcggcgccagaggaggggggacgcagggggcggagcggagacagtaccttcggagataatcctttctcctgccgcagaggagaggagcggccggagcgagacacttcgccgaggcacagcagccggcaggatggcgaccgtggtggtggaagccaccgagccggagccgtccggcagcatcgccaacccggcggcgtccacctcgcctagcctgtcgcaccgcttccttgacagcaagttctacttgctggtggtcgtcggcgagatcgtgaccgaggagcacctgcggcgtgccatcggcaacatcgagctcggaatccgatcatgggacacaaacctgattgaatgcaacttggaccaagaactcaaactttttgtatctcgacactctgcaagattctctcctgaagtcccaggacaaaagatccttcatcaccgaagtgacgttttagaaacagtggtcctgatcaacccttctgatgaagcagtcagcaccgaggtgcgcttaatgatcactgatgctgcccgacacaagctgctcgtgctgaccgggcagtgctttgaaaataccggagagctcattctccagtccggctctttctccttccagaacttcatagagattttcaccgatcaagagatcggggagttactaagcaccacccatcctgccaacaaagccagcttaaccctgttctgtcctgaagaaggggactggaagaactccaatcttgacagacacaatctccaagacttcatcaatattaaactcaattcagcttctatcttgccagaaatggaaggactttctgagtttaccgagtatctctcagaatcagtggaagtcccatctccctttgacatcttggaacctcccacatcgggtggatttctgaagctctccaagccctgctgttatatttttccaggagggaggggcgattctgccttgtttgcagtgaatggtttcaatatgctcatcaatggcggatcagagagaaaatcctgcttctggaagctcatccgacacttagaccgagtggactccatcctgctcacccacattggggatgacaatttgcctggaataaacagcatgttacagcggaaaattgcagagctcgaggaagaacagtcccagggctccaccacaaatagtgactggatgaaaaacctcatctcccctgacttaggagttgtatttctcaatgtacctgaaaatctcaaaaatccagagccaaacatcaagatgaagagaagcatagaagaagcctgcttcactctccagtacctaaacaaattgtccatgaaaccagaacctctgtttagaagtgtaggcaatactattgatcctgtcattcttttccaaaaaatgggagtaggtaaacttgagatgtatgtgcttaatccagtcaagagcagcaaggaaatgcagtattttatgcagcagtggactggtaccaacaaagacaaggctgaattcattctgcctaatggtcaagaagtagatctcccgatttcctacttaacttcagtctcatctttgattgtgtggcatccagcaaaccctgcggagaaaatcatccgagtcctgtttcctgggaacagcacccagtacaacatcctggaagggttggaaaagctcaaacatctagactttctgaagcagccactggccacccaaaaggatctcactggccaggtgcccactcctgtggtgaaacaaacaaaactgaaacagagggctgatagccgagaaagtctgaagccagccgcaaaaccacttcctagcaaatccgtgcgcaaggagtcaaaagaagaaacccctgaggtcacaaaagtgaatcacgtggaaaagccacccaaagttgaaagcaaagaaaaggtaatggtgaaaaaagacaagccagtaaaaacagagaccaaaccttcagtgactgaaaaggaggttcccagcaaagaagagccatctccagtgaaagccgaggtggctgagaagcaagccacagatgtcaaacccaaagctgccaaggagaagacggtgaaaaaggaaacaaaggtaaagcctgaagacaagaaagaggagaaagaaaagccaaagaaagaagtggctaaaaaggaggacaaaacacctatcaagaaggaggaaaaaccaaaaaaggaagaggtgaaaaaagaagtcaaaaaagagatcaagaaagaagagaaaaaagaacccaagaaagaggttaagaaagaaacaccgccaaaggaagtcaagaaggaagttaagaaggaagagaagaaggaagtgaaaaaggaagaaaaggaacccaaaaaagaaattaagaagctccctaaagacgcaaagaaatcatctactcctctgtctgaagcaaaaaaaccagctgctttaaaaccaaaagtacccaagaaggaagagtctgtcaagaaagattctgttgctgccggaaagccaaaggagaaggggaaaataaaagtcattaagaaggaaggcaaggccgcagaggctgtcgctgcagctgtcggcactggagccaccacagcagctgtcatggcggcagctggaatagcagccattggccctgccaaagaactcgaagctgagaggtcccttatgtcatctcctgaggatctaaccaaggactttgaagagttaaaggctgaagaggtcgatgtaacaaaggacatcaagcctcagctggagctaatcgaagacgaagagaaactgaaggaaactgagccagtcgaagcctacgtcatccagaaggagagagaagtcaccaaaggtcctgccgagtcccctgatgagggaatcactaccactgaaggggagggcgaatgtgaacagacacctgaggagctggagcccgtcgagaagcagggagtagacgacattgaaaaatttgaagatgaaggagccggttttgaagaatcttcagagactggagactatgaagagaaggcagaaactgaggaggctgaggagccagaagaggatggggaggaacacgtatgtgtgagcgcctccaagcacagccccactgaggatgaggaaagtgccaaggcggaggctgatgcatacatcagggagaagagggagtctgtggccagtggggatgaccgagccgaagaagacatggatgaggccattgagaaaggagaggctgaacaatctgaagaggaggctgatgaggaggacaaagctgaagatgccagagaggaggaatatgagccggaaaaaatggaagctgaagactatgtgatggctgtggtcgacaaggctgcagaggctggtggtgccgaggagcagtatggattcctcaccacaccaaccaagcaactaggagcccagtctcctggccgagaacctgcatcttcaattcatgatgagactttacctggaggctcagagagcgaggccaccgcttctgatgaggagaatcgagaagaccagcctgaggaattcactgccacctctggctacactcagtctactattgagatatccagtgagcccacccccatggatgagatgtctacccctcgagacgtgatgagtgatgagaccaacaatgaagagacggagtccccttctcaggaattcgtaaatatcaccaaatatgaatcttcattgtattctcaggaatactctaaacctgctgatgttacaccgctcaacggattttctgaaggatcaaaaacagatgccactgatggcaaggattacaatgcttcagcctctaccatatcaccaccctcttccatggaggaagacaaattcagcagatctgctttacgtgatgcttactgctctgaagtgaaagccagcaccactttggacatcaaagatagcatctcagctgtttcaagtgaaaaggtcagcccatcgaagagcccgtccctgagtccatctccaccatcacccttagaaaagacccccctgggtgaacgtagtgtgaacttctctctgacgcccaatgagattaaagtctctgcagaggcagaagtagccccggtgtctcctgaggtgacccaagaagtagttgaagaacattgtgctagtcctgaggacaagactctggaagtggtgtcaccatctcagtccgtgactggcagtgctggtcacacaccttactatcaatctcctactgacgagaaatccagtcatctccctacagaagtcattgaaaaaccaccagcagttccagtgagttttgaattcagtgatgccaaagatgagaatgaaagggcttcagtaagccccatggatgagcccgtgcctgactcagagtctcctattgaaaaagttttgtctcctttacgcagcccgcccctcattggatccgagtctgcttatgaaagttttctaagtgctgatgacaaggcttctggcagaggtgccgaaagtccttttgaagaaaagagtggaaaacaaggctctccagaccaagtaagtccagtttctgaaatgacttctactagtctttaccaagacaaacaggaagggaaaagcacagactttgcaccaataaaagaagactttggccaagaaaagaaaactgatgatgttgaagccatgagttctcaaccagcactggctctggatgaaaggaaattaggagatgtttctcccacacaaatagatgtcagtcagtttggatcttttaaagaagacactaagatgtccatttctgaaggtactgtctcagacaagtcagctactcctgttgatgagggcgtagcagaagacacgtactctcatatggagggtgtggcctcagtgtccacagcctcagtggctacgagctcatttccagagccaacaacagatgatgtgtctccatctctgcatgctgaggttggctccccacattccacagaagtagatgactccctttcagtgtctgttgtgcaaacacctaccacattccaggaaacagaaatgtctccatctaaagaagaatgcccaagaccgatgtcaatttctccaccagatttctcccctaaaactgcaaagtccaggacacccgttcaagatcacagatctgaacagtcctcaatgtctattgaatttggccaagaatctcctgagcaatcccttgctatggacttcagtcgacagtctccagatcaccctacagtgggtgcaggcgtgcttcacatcactgaaaatgggccaactgaagtggactacagtccttctgacatgcaggactccagtttatcacataagataccacctatggaggagccgtcctacacccaagataatgatctttctgagctcatctcagtatctcaggtagaggcctccccgtccacctcttctgctcataccccttctcagatcgcttctcctctccaagaagatactctatccgatgttgctcctcccagagatatgtccttatatgcctcactcacctctgaaaaagtgcaaagtctggaaggagagaagctctctccaaaatctgatatctctccactcaccccacgagagtcctctcctttatattcacctactttttcagattctacctctgcagtcaaagagaaaacagcaacttgccacagttcctcttctccaccaatagatgcagcatccgcagagccctatggcttccgtgcctcagtgttattcgatacaatgcaacaccatctagccttgaatagagatttgtccacacctggcctggagaaggacagtggagggaagacacctggtgactttagctatgcctatcaaaagcctgaggaaacaaccaggtccccagatgaagaagattatgactatgagtcttatgagaagaccacccggacctcagatgtgggtggctattactatgagaagatagagagaaccacaaaatctccaagtgacagtggctactcctatgagaccattgggaaaactaccaagacccctgaagatggtgactattcctatgaaattattgagaagaccacacggacccctgaagagggtgggtactcatatgacataagtgaaaagaccaccagcccccccgaagtgagtggttacagctatgaaaagactgagaggtctagaaggcttctggatgacatcagcaatggctatgatgactctgaggatggtggccacacacttggggaccccagctactcttatgaaaccactgagaaaattaccagtttccctgagtctgaaggttattcctatgagacatctacaaagacaacacgaacccctgatacttccacatactgttacgagactgcagagaaaatcactagaacccctcaggcatccacatattcctacgagacttcagacctatgctacactgcagaaaagaagtccccctcagaagcccgtcaggatgtcgatttatgcctcgtgtcctcttgtgaatacaagcaccccaagacagagctttcaccctctttcattaatcccaatcctcttgagtggtttgccagtgaagaacccactgaagaatctgaaaagcccctcactcaatcagggggagccccaccgcctccaggaggaaagcaacagggccgacagtgtgatgaaacccctcccacctcagtcagcgagtcagccccatcccagaccgactctgatgttcccccggagactgaagagtgcccctccatcacggccgatgccaatatcgactctgaagacgagtcggaaaccatccccacagacaaaactgtcacgtacaaacacatggacccacctccagctcccgtgcaagaccgcagcccttcgccacgccaccctgatgtgtccatggtggacccagaggccttggccattgagcagaacctgggcaaagctctaaagaaagatctgaaagagaagaccaaaaccaaaaagccaggtacaaagaccaagtcatcttcacctgtcaaaaagagtgatgggaagtctaagcccttggcagcttcaccaaaaccagcgggcttgaaagaatcctcggataaagtgtccagggtggcttctcctaagaagaaagaatctgtggaaaaggcagcaaaacccaccaccactcctgaggtcaaagctgcacgtggggaagagaaagacaaggagaccaagaatgctgccaatgcctctgcccgcaattcgacctcaggaatcagctctggccaagattc

SEQ ID NO: 57134 - DNA, 3107 bp, Homo sapiens
tgcctagtctccatataaaagcggcgccgcctccccgccctctctcactccccgctcctctccgccgcgcactctccgcggcgctgggagagggcggagggggaggcggcgcgcggcgccagaggaggggggacgcagggggcggagcggagacagtaccttcggagataatcctttctcctgccgcagaggagaggagcggccggagcgagacacttcgccgaggcacagcagccggcaggatggcgaccgtggtggtggaagccaccgagccggagccgtccggcagcatcgccaacccggcggcgtccacctcgcctagcctgtcgcaccgcttccttgacagcaagttctacttgctggtggtcgtcggcgagatcgtgaccgaggagcacctgcggcgtgccatcggcaacatcgagctcggaatccgatcatgggacacaaacctgattgaatgcaacttggaccaagaactcaaactttttgtatctcgacactctgcaagattctctcctgaagtcccaggacaaaagatccttcatcaccgaagtgacgttttagaaacagtggtcctgatcaacccttctgatgaagcagtcagcaccgaggtgcgcttaatgatcactgatgctgcccgacacaagctgctcgtgctgaccgggcagtgctttgaaaataccggagagctcattctccagtccggctctttctccttccagaacttcatagagattttcaccgatcaagagatcggggagttactaagcaccacccatcctgccaacaaagccagcttaaccctgttctgtcctgaagaaggggactggaagaactccaatcttgacagacacaatctccaagacttcatcaatattaaactcaattcagcttctatcttgccagaaatggaaggactttctgagtttaccgagtatctctcagaatcagtggaagtcccatctccctttgacatcttggaacctcccacatcgggtggatttctgaagctctccaagccctgctgttatatttttccaggagggaggggcgattctgccttgtttgcagtgaatggtttcaatatgctcatcaatggcggatcagagagaaaatcctgcttctggaagctcatccgacacttagaccgagtggactccatcctgctcacccacattggggatgacaatttgcctggaataaacagcatgttacagcggaaaattgcagagctcgaggaagaacagtcccagggctccaccacaaatagtgactggatgaaaaacctcatctcccctgacttaggagttgtatttctcaatgtacctgaaaatctcaaaaatccagagccaaacatcaagatgaagagaagcatagaagaagcctgcttcactctccagtacctaaacaaattgtccatgaaaccagaacctctgtttagaagtgtaggcaatactattgatcctgtcattcttttccaaaaaatgggagtaggtaaacttgagatgtatgtgcttaatccagtcaagagcagcaaggaaatgcagtattttatgcagcagtggactggtaccaacaaagacaaggctgaattcattctgcctaatggtcaagaagtagatctcccgatttcctacttaacttcagtctcatctttgattgtgtggcatccagcaaaccctgcggagaaaatcatccgagtcctgtttcctgggaacagcacccagtacaacatcctggaagggttggaaaagctcaaacatctagactttctgaagcagccactggccacccaaaaggatctcactggccaggtgcccactcctgtggtgaaacaaacaaaactgaaacagagggctgatagccgagaaagtctgaagccagccgcaaaaccacttcctagcaaatccgtgcgcaaggagtcaaaagaagaaacccctgaggtcacaaaagtgaatcacgtggaaaagccacccaaagttgaaagcaaagaaaaggtaatggtgaaaaaagacaagccagtaaaaacagagaccaaaccttcagtgactgaaaaggaggttcccagcaaagaagagccatctccagtgaaagccgaggtggctgagaagcaagccacagatgtcaaacccaaagctgccaaggagaagacggtgaaaaaggaaacaaaggtaaagcctgaagacaagaaagaggagaaagaaaagccaaagaaagaagtggctaaaaaggaggacaaaacacctatcaagaaggaggaaaaaccaaaaaaggaagaggtgaaaaaagaagtcaaaaaagagatcaagaaagaagagaaaaaagaacccaagaaagaggttaagaaagaaacaccgccaaaggaagtcaagaaggaagttaagaaggaagagaagaaggaagtgaaaaaggaagaaaaggaacccaaaaaagaaattaagaagctccctaaagacgcaaagaaatcatctactcctctgtctgaagcaaaaaaaccagctgctttaaaaccaaaagtacccaagaaggaagagtctgtcaagaaagattctgttgctgccggaaagccaaaggagaaggggaaaataaaagtcattaagaaggaaggcaaggccgcagaggctgtcgctgcagctgtcggcactggagccaccacagcagctgtcatggcggcagctggaatagcagccattggccctgccaaagaactcgaagctgagaggtcccttatgtcatctcctgaggatctaaccaaggactttgaagagttaaaggctgaagaggtcgatgtaacaaaggacatcaagcctcagctggagctaatcgaagacgaagagaaactgaaggaaactgagccagtcgaagcctacgtcatccagaaggaagtgaaaaaggaagaaaaggaacccaaaaaagaaattaagaagctccctaaagacgcaaagaaatcatctactcctctgtctgaagcaaaaaaaccagctgctttaaaaccaaaagtacccaagaaggaagagtctgttaagaaagaaacaccgccaaaggaagtcaagaaggaagttaagaaggaagagaagaaggaagtgaaaaaggaagaaaaggaaccc

SEQ ID NO: 57135 - DNA, 1945 bp, Homo sapiens
tgcctagtctccatataaaagcggcgccgcctccccgccctctctcactccccgctcctctccgccgcgcactctccgcggcgctgggagagggcggagggggaggcggcgcgcggcgccagaggaggggggacgcagggggcggagcggagacagtaccttcggagataatcctttctcctgccgcagaggagaggagcggccggagcgagacacttcgccgaggcacagcagccggcaggatggcgaccgtggtggtggaagccaccgagccggagccgtccggcagcatcgccaacccggcggcgtccacctcgcctagcctgtcgcaccgcttccttgacagcaagttctacttgctggtggtcgtcggcgagatcgtgaccgaggagcacctgcggcgtgccatcggcaacatcgagctcggaatccgatcatgggacacaaacctgattgaatgcaacttggaccaagaactcaaactttttgtatctcgacactctgcaagattctctcctgaagtcccaggacaaaagatccttcatcaccgaagtgacgttttagaaacagtggtcctgatcaacccttctgatgaagcagtcagcaccgaggtgcgcttaatgatcactgatgctgcccgacacaagctgctcgtgctgaccgggcagtgctttgaaaataccggagagctcattctccagtccggctctttctccttccagaacttcatagagattttcaccgatcaagagatcggggagttactaagcaccacccatcctgccaacaaagccagcttaaccctgttctgtcctgaagaaggggactggaagaactccaatcttgacagacacaatctccaagacttcatcaatattaaactcaattcagcttctatcttgccagaaatggaaggactttctgagtttaccgagtatctctcagaatcagtggaagtcccatctccctttgacatcttggaacctcccacatcgggtggatttctgaagctctccaagccctgctgttatatttttccaggagggaggggcgattctgccttgtttgcagtgaatggtttcaatatgctcatcaatggcggatcagagagaaaatcctgcttctggaagctcatccgacacttagaccgagtggactccatcctgctcacccacattggggatgacaatttgcctggaataaacagcatgttacagcggaaaattgcagagctcgaggaagaacagtcccagggctccaccacaaatagtgactggatgaaaaacctcatctcccctgacttaggagttgtatttctcaatgtacctgaaaatctcaaaaatccagagccaaacatcaagatgaagagaagcatagaagaagcctgcttcactctccagtacctaaacaaattgtccatgaaaccagaacctctgtttagaagtgtaggcaatactattgatcctgtcattcttttccaaaaaatgggagtaggtaaacttgagatgtatgtgcttaatccagtcaagagcagcaaggaaatgcagtattttatgcagcagtggactggtaccaacaaagacaaggctgaattcattctgcctaatggtcaagaagtagatctcccgatttcctacttaacttcagtctcatctttgattgtgtggcatccagcaaaccctgcggagaaaatcatccgagtcctgtttcctgggaacagcacccagtacaacatcctggaagggttggaaaagctcaaacatctagactttctgaagcagccactggccacccaaaaggatctcactggccaggtgcccactcctgtggtgaaacaaacaaaactgaaacagagggctgatagccgagaaagtctgaagccagccgcaaaaccacttcctagcaaatccgtgggtaggagtaggatccgtctgagcacctccct

SEQ ID NO: 57136 - DNA, 600 bp, Homo sapiens
aaagaatgagctcggtaccagcaggggtggcgtggtggtggaagccaccgagccggagccgtccggcagcatcgccaacccggcggcgtccacctcgcctagcctgtcgcaccgcttccttgacagcaagttctacttgctggtggtcgtcggcgagatcgtgaccgaggagcacctgcggcgtgccatcggcaacatcgagctcggaatccgatcatgggacacaaacctgattgaatgcaacttggaccaagaactcaaactttttgtatctcgacactctgcaagattctctcctgaagtcccaggacaaaagatccttcatcaccgaagtgacgttttagaaacagtggtcctgatcaacccttctgatgaagcagtcagcaccgaggtgcgcttaatgatcactgatgctgcccgacacaagctgctcgtgctgaccgggcagtgctttgaaaataccggagagctcattctccagtccggctctttctccttccagaacttcatagagattttcaccgatcaagagatcggggagttactaacaccacgccacccttaagctgtctgaaccctgcagtgtcttcccagtcacgc

SEQ ID NO: 57137 - DNA, 897 bp, Homo sapiens
  misc_feature (391)..(391): n is a, c, g, or t
  misc_feature (428)..(428): n is a, c, g, or t
  misc_feature (431)..(431): n is a, c, g, or t
  misc_feature (437)..(437): n is a, c, g, or t
  misc_feature (468)..(468): n is a, c, g, or t
  misc_feature (474)..(474): n is a, c, g, or t
  misc_feature (483)..(483): n is a, c, g, or t
  misc_feature (504)..(504): n is a, c, g, or t
  misc_feature (523)..(523): n is a, c, g, or t
  misc_feature (526)..(526): n is a, c, g, or t
  misc_feature (530)..(530): n is a, c, g, or t
  misc_feature (534)..(534): n is a, c, g, or t
  misc_feature (538)..(538): n is a, c, g, or t
  misc_feature (541)..(541): n is a, c, g, or t
  misc_feature (552)..(553): n is a, c, g, or t
  misc_feature (585)..(585): n is a, c, g, or t
  misc_feature (590)..(590): n is a, c, g, or t
  misc_feature (595)..(595): n is a, c, g, or t
  misc_feature (597)..(597): n is a, c, g, or t
  misc_feature (600)..(600): n is a, c, g, or t
  misc_feature (606)..(606): n is a, c, g, or t
  misc_feature (609)..(609): n is a, c, g, or t
  misc_feature (622)..(622): n is a, c, g, or t
  misc_feature (641)..(641): n is a, c, g, or t
  misc_feature (663)..(664): n is a, c, g, or t
  misc_feature (675)..(675): n is a, c, g, or t
  misc_feature (680)..(680): n is a, c, g, or t
  misc_feature (682)..(685): n is a, c, g, or t
  misc_feature (691)..(692): n is a, c, g, or t
  misc_feature (694)..(694): n is a, c, g, or t
  misc_feature (696)..(696): n is a, c, g, or t
  misc_feature (709)..(709): n is a, c, g, or t
  misc_feature (722)..(722): n is a, c, g, or t
  misc_feature (733)..(733): n is a, c, g, or t
  misc_feature (738)..(738): n is a, c, g, or t
  misc_feature (748)..(749): n is a, c, g, or t
  misc_feature (752)..(752): n is a, c, g, or t
  misc_feature (758)..(758): n is a, c, g, or t
  misc_feature (763)..(763): n is a, c, g, or t
  misc_feature (777)..(777): n is a, c, g, or t
  misc_feature (804)..(804): n is a, c, g, or t
  misc_feature (817)..(818): n is a, c, g, or t
  misc_feature (826)..(826): n is a, c, g, or t
  misc_feature (832)..(832): n is a, c, g, or t
  misc_feature (873)..(873): n is a, c, g, or t
ggtcgagtagaaggaccgccgctccggcctcccgcgacttctcgaaggtgggcaggtcccaccttgtggaggatggaggtgaccggggacgccggggtaccagaatctggcgagatccggactctaaagccgtgtctgctgcgccgcaactacagccgcgaacagcacggcgtggccgcctcctgcctcgaagacctgaggagcaaggcctgtgacattctggccattgataagtccctgacaccagtcaccctggtcctggcagaggatggcaccatagtggatgatgacgattactttctgtgtctaccttccaatactaagtttgtggcattggcctaacgtaaatgaagaaaatggggaataaaacagattcgaagagatggaggtnaagccttgtgaatttccccaaagaagtccctattgantgntaagantgaaaacaagacaagccgggtgcaaggtgtntgaaanatgtgaaanaaatgatgtgcccacggcaancctgaaaagaaagaactcntgntccnaccnaccnacnccccccctacnnacgaaggaaggaaccccccaagaatgccttgnttgancgccncnccntgcctnaanaaccatgtgcctnaaggaaacataccgctaanaagtttgctgccaacccgctcnnacccggcctgnacgancnnnnacctcnnananaagggtgccttgnacacaaaagaaanaggaaagatgncgctnagctccaaannaancctccntgcangcctgatccccccnagcgcctttgagaagaaaagaagggcnagccctctctgcnnaaaagcanggaaanagctccaaaagcctgtccttttgggtgagagagggctggantgcagatagaacacggggttatca

SEQ ID NO: 57138 - DNA, 315 bp, Homo sapiens
ctactctggaggctaaggcgagagtatcacttgagcccaggagctcaaggctgatcatgccaccacccctggccagaaaaaaaagcttttaaataaagtaattgtcagcttaggcaacatagcaagaccctgtctctacaaaaaaaaaatttaagttagccaggcatggtggcactgacctgtaatcccagctactcaggaggctgagacatgagaatcgcttgaacccaggaggtggagattgcactgagctgagatcctgccactgggctccagcctgggtgacagaatgagactctgtctttaaaaaaaaaa

SEQ ID NO: 57139 - DNA, 2981 bp, Homo sapiens
ggtcgagtagaaggaccgccgctccggcctcccgcgacttctcgaaggtgggcaggtcccaccttgtggaggatggaggtgaccggggacgccggggtaccagaatctggcgagatccggactctaaagccgtgtctgctgcgccgcaactacagccgcgaacagcacggcgtggccgcctcctgcctcgaagacctgaggagcaaggcctgtgacattctggccattgataagtccctgacaccagtcaccctggtcctggcagaggatggcaccatagtggatgatgacgattactttctgtgtctaccttccaatactaagtttgtggcattggctagtaatgagaaatgggcatacaacaattcagatggaggtacagcttggatttcccaagagtcctttgatgtagatgaaacagacagcggggcagggttgaagtggaagaatgtggccaggcagctgaaagaagatctgtccagcatcatcctcctatcagaggaggacctccagatgcttgttgacgctcctgctcagacctggctcaggaactacgtcagagttgtgccaccgtccagcggctgcagcacacactccaacaggtgcttgaccaaagagaggaagtgcgtcagtccaagcagctcctgcagctgtacctccaggctttggagaaagagggcagcctcttgtcaaagcaggaagagtccaaagctgcctttggtgaggaggtggatgcagtagacacgggtatcagcagagagacctcctcggacgttgcgctggcgagccacatccttactgcactgagggagaagcaggctccagagctgagcttatctagtcaggatttggaggtgggcggaaaccagggtcactgagctacagaggaggacatgccctgggatgtagtagtatcatgcagaggtgtgtgggcccttttgttcacctctgcagactgtgaatcctagctgccagtttgcctattatatgccaaggcatttgcaaaaatctcattaatctaaatcaaaatagctttaaagaaaaatgcatacacttcctcagatcatcaaacagactctggtccaaggttggtaatgaaatgactgttcctgacagggaggaatagcagggcccaatcttctgagatggcttctgggtctttccatggtcagagaagatctatagtccgtcctgaggtctgtcaatgtcacaggaaaaggcaaacttgaggggatcgtcgcctgctggctaagaccagggagctaaaaacttgaggaagggaacctgcctgggtgggtgctacttctgattcattgtccttgtccctgtcataagtacctccctattgtagatagaagggaaggaaactgttgacttgagcttggctaaatttcctgaaggtggaggaccttagagttgctccaagtaaactttccaaggacttcttcctgttggtgttgtaagaaaaggcccatgcttgtccgggcacagtggcttacgcctgttaatgccagtactttgggaggccgaggcaggtggatcacctgaggtcaggagttcgagaccagcctgaccaacatggcgaaaccccatctctactaaaaatacaaaaattagcctggcatggtggtgggaggctgaagcaagagaatcgcttgaacccaggaggtggaggttgcgtgagctaagatcgcgccactgcactccagcctgggcgacaagagtgaaactccgtcttaaaaaagcccatggcaggctgggcgcggtggctcacgcctgtaatcccagcactttgggaggccaaggtgggcggatcacaaggtcaggagatcgagaccatcctggcgaacacggtgaaaccccgtctctactaaaaaaaatacaaaaaaattagccaggcgtggtcgtgggcacctgtagtcccagctactcagggggctgaggcaggagaatggcgtgaatccgggaggcggagcttgcagggagccgagatagtgtcactgcactccagcctgggtgacagagcgagactccgtctcaaaaaacaaaaagcccgtggcaattaatggtaaaggaaacccggcatttcagtgtaaagaggtaacataaacggatactgcctcattgcactccccaaaagagagtcaggagagcagcaggagaggcgcacagaaggcccagttctcaggggtttttattcttgctgcagttggttaccaaggaagaccccaaagcactggctgttgccttgaactgggacataaagaagacggagactgttcaggaggcctgtgagcgggagctcgccctgcgcctgcagcagacgcagagcttgcattctctccggagcatctcagcaagcaaggcctcaccacctggtgacctgcagaatcctaagcgagccagacaggatcccacatagcagcagcgggaagtgtgccaaggaagctctgtggcgttgtgttattggtagacaccctcagcctcatcatttgactacctatgtactactctaccccctgccttagagcaccttccagagaagctattccaggtctcaacatacgccgttccaccaattttttttttagccccaccagcttcaggacttctgccaattttgaatgatatagctgcaccaacaatatcccgcctcctctaattacatatgatgttctctgttcaaaagtaattggcagtgattggccaggcgcagtggctcacgcctgtaatcccagcactgggaggccgaggggggcggatcgtgaagtcaggagatcgagaccatcctggctaacatggtgaaaccctgtctctactaaaaatacaaaaaaaattagccagccatggtggcgggcgcctgtaatcccagctacttgggaggctgaggcaggagaatggcatgaacctgggaggcagagcttgcagtgagctgagattgcgccactgcactccagcctgggcaacagagcgagactccg

SEQ ID NO: 57140 - DNA, 4169 bp, Homo sapiens
ggtcgagtagaaggaccgccgctccggcctcccgcgacttctcgaaggtgggcaggtcccaccttgtggaggatggaggtgaccggggacgccggggtaccagaatctggcgagatccggactctaaagccgtgtctgctgcgccgcaactacagccgcgaacagcacggcgtggccgcctcctgcctcgaagacctgaggagcaaggcctgtgacattctggccattgataagtccctgacaccagtcaccctggtcctggcagaggatggcaccatagtggatgatgacgattactttctgtgtctaccttccaatactaagtttgtggcattggctagtaatgagaaatgggcatacaacaattcagatggaggtacagcttggatttcccaagagtcctttgatgtagatgaaacagacagcggggcagggttgaagtggaagaatgtggccaggcagctgaaagaagatctgtccagcatcatcctcctatcagaggaggacctccagatgcttgttgacgctcctgctcagacctggctcaggaactacgtcagagttgtgccaccgtccagcggctgcagcacacactccaacaggtgcttgaccaaagagaggaagtgcgtcagtccaagcagctcctgcagctgtacctccaggctttggagaaagagggcagcctcttgtcaaagcaggaagagtccaaagctgcctttggtgaggaggtggatgcagtagacacgggtatcagcagagagacctcctcggacgttgcgctggcgagccacatccttactgcactgagggagaagcaggctccagagctgagcttatctagtcaggatttggaggtgggcggaaaccagggtcactgagctacagaggaggacatgccctgggatgtagtagtatcatgcagaggtgtgtgggcccttttgttcacctctgcagactgtgaatcctagctgccagtttgcctattatatgccaaggcatttgcaaaaatctcattaatctaaatcaaaatagctttaaagaaaaatgcatacacttcctcagatcatcaaacagactctggtccaaggttggtaatgaaatgactgttcctgacagggaggaatagcagggcccaatcttctgagatggcttctgggtctttccatggtcagagaagatctatagtccgtcctgaggtctgtcaatgtcacaggaaaaggcaaacttgaggggatcgtcgcctgctggctaagaccagggagctaaaaacttgaggaagggaacctgcctgggtgggtgctacttctgattcattgtccttgtccctgtcataagtacctccctattgtagatagaagggaaggaaactgttgacttgagcttggctaaatttcctgaaggtggaggaccttagagttgctccaagtaaactttccaaggacttcttcctgttggtgttgtaagaaaaggcccatgcttgtccgggcacagtggcttacgcctgttaatgccagtactttgggaggccgaggcaggtggatcacctgaggtcaggagttcgagaccagcctgaccaacatggcgaaaccccatctctactaaaaatacaaaaattagcctggcatggtggtgggaggctgaagcaagagaatcgcttgaacccaggaggtggaggttgcgtgagctaagatcgcgccactgcactccagcctgggcgacaagagtgaaactccgtcttaaaaaagcccatggcaggctgggcgcggtggctcacgcctgtaatcccagcactttgggaggccaaggtgggcggatcacaaggtcaggagatcgagaccatcctggcgaacacggtgaaaccccgtctctactaaaaaaaatacaaaaaaattagccaggcgtggtcgtgggcacctgtagtcccagctactcagggggctgaggcaggagaatggcgtgaatccgggaggcggagcttgcagggagccgagatagtgtcactgcactccagcctgggtgacagagcgagactccgtctcaaaaaacaaaaagcccgtggcaattaatggtaaaggaaacccggcatttcagtgtaaagaggtaacataaacggatactgcctcattgcactccccaaaagagagtcaggagagcagcaggagaggcgcacagaaggcccagttctcaggggtttttattcttgctgcagttggttaccaaggaagaccccaaagcactggctgttgccttgaactgggacataaagaagacggagactgttcaggaggcctgtgagcgggagctcgccctgcgcctgcagcagacgcagagcttgcattctctccggagcatctcagcaagcaaggcctcaccacctggtgacctgcagaatcctaagcgagccagacaggatcccacatagcagcagcgggaagtgtgccaaggaagctctgtggcgttgtgttattggtagacaccctcagcctcatcatttgactacctatgtactactctaccccctgccttagagcaccttccagagaagctattccaggtctcaacatacgccgttccaccaattttttttttagccccaccagcttcaggacttctgccaattttgaatgatatagctgcaccaacaatatcccgcctcctctaattacatatgatgttctctgttcaaaagtaattggcagtgattggcctcccaaagtgctgggattacaggtgtgagccaccacccctggccagaaaaaaaagcttttaaataaagtaattgtcagcttaggcaacatagcaagaccctgtctctacaaaaaaaaaatttaagttagccaggcatggtggcactgacctataatcctagctactctggaggctaaggcgagagtatcacttgagcccaggagctcaaggctgatcatgccaccatactccagcctggatgatagagtaagaccctacttttttttttttttttttaaaaaggtaaccatcaagggcaatgaaaagaaatggtcgtatttccaattcattatccttattctgaagatagtacggcagaattttaagcagagatagtggtgaagatggtgacattatagagtgttgactatggccacaatcttgtttctccagttaatgaatttttttatgtgtttgtttaaagatacatattaagcttgtagaccatagggacatacggagagtccattgctaatatctcactcagtattgtgaaattctatctcaccaccgtgaaactcttcagttttctaattgctttatcagcagggggtataaaaggtcatgaaagcaatttccacatgctgtggctccaggtctctgggtgtgaagcagagcaagcctggtttgtcctcctcctgtctccacacagacggcttctgcaggtttggtaatctacagtacactccttgcagggaaaaggtgatgagtcatcatggacttatttgaccactttttatgcatgcttagaggaaaacagaatactgttaagagattcatctgctagttattaagtaaagaaatatcacaataggccgggcgcagtggctcacacctgtaatcccagcattttgggaggccaaggtgggcggatcacctgaggtcaggagttcgagaccagcctagccaacatggtgaaaccccgtctctactaaaattataaaaaattagccgggtgtagtggtacacgcctgtagtcccagttacttgggaggctgaggcatgagaattgcttgaacccaggaagtggaggtggaggtgagccgaaattgtgccactgtactccagcctgcaacagagtgagacactgtcacacaaaaaagaaagaaatatcacaatatgtcacaataggccgggcgcagtggctcacacctgcagtcccagcactttgggaggccaaggcagatggatcacctgaggtcaggagtttgagaccagcctggccaacgtgacaaaacccagtctactaaaaatacaaaaattagccaggcgtgatggtgggcacctgtaatcccagctactcaggaggctgagacatgagaatcgcttgaacccaggaggtggagattgcactgagctgagatcctgccactgggctccagcctgggtgacagaatgagactctgtctttaaaaaaaaaa

SEQ ID NO: 57141 - DNA, 3992 bp, Homo sapiens
ggtcgagtagaaggaccgccgctccggcctcccgcgacttctcgaaggtgggcaggtcccaccttgtggaggatggaggtgaccggggacgccggggtaccagaatctggcgagatccggactctaaagccgtgtctgctgcgccgcaactacagccgcgaacagcacggcgtggccgcctcctgcctcgaagacctgaggagcaaggcctgtgacattctggccattgataagtccctgacaccagtcaccctggtcctggcagaggatggcaccatagtggatgatgacgattactttctgtgtctaccttccaatactaagtttgtggcattggctagtaatgagaaatgggcatacaacaattcagatggaggtacagcttggatttcccaagagtcctttgatgtagatgaaacagacagcggggcagggttgaagtggaagaatgtggccaggcagctgaaagaagatctgtccagcatcatcctcctatcagaggaggacctccagatgcttgttgacgctcctgctcagacctggctcaggaactacgtcagagttgtgccaccgtccagcggctgcagcacacactccaacaggtgcttgaccaaagagaggaagtgcgtcagtccaagcagctcctgcagctgtacctccaggctttggagaaagagggcagcctcttgtcaaagcaggaagagtccaaagctgcctttggtgaggaggtggatgcagtagacacgggtatcagcagagagacctcctcggacgttgcgctggcgagccacatccttactgcactgagggagaagcaggctccagagctgagcttatctagtcaggatttggaggtgggcggaaaccagggtcactgagctacagaggaggacatgccctgggatgtagtagtatcatgcagaggtgtgtgggcccttttgttcacctctgcagactgtgaatcctagctgccagtttgcctattatatgccaaggcatttgcaaaaatctcattaatctaaatcaaaatagctttaaagaaaaatgcatacacttcctcagatcatcaaacagactctggtccaaggttggtaatgaaatgactgttcctgacagggaggaatagcagggcccaatcttctgagatggcttctgggtctttccatggtcagagaagatctatagtccgtcctgaggtctgtcaatgtcacaggaaaaggcaaacttgaggggatcgtcgcctgctggctaagaccagggagctaaaaacttgaggaagggaacctgcctgggtgggtgctacttctgattcattgtccttgtccctgtcataagtacctccctattgtagatagaagggaaggaaactgttgacttgagcttggctaaatttcctgaaggtggaggaccttagagttgctccaagtaaactttccaaggacttcttcctgttggtgttgtaagaaaaggcccatgcttgtccgggcacagtggcttacgcctgttaatgccagtactttgggaggccgaggcaggtggatcacctgaggtcaggagttcgagaccagcctgaccaacatggcgaaaccccatctctactaaaaatacaaaaattagcctggcatggtggtgggaggctgaagcaagagaatcgcttgaacccaggaggtggaggttgcgtgagctaagatcgcgccactgcactccagcctgggcgacaagagtgaaactccgtcttaaaaaagcccatggcaggctgggcgcggtggctcacgcctgtaatcccagcactttgggaggccaaggtgggcggatcacaaggtcaggagatcgagaccatcctggcgaacacggtgaaaccccgtctctactaaaaaaaatacaaaaaaattagccaggcgtggtcgtgggcacctgtagtcccagctactcagggggctgaggcaggagaatggcgtgaatccgggaggcggagcttgcagggagccgagatagtgtcactgcactccagcctgggtgacagagcgagactccgtctcaaaaaacaaaaagcccgtggcaattaatggtaaaggaaacccggcatttcagtgtaaagaggtaacataaacggatactgcctcattgcactccccaaaagagagtcaggagagcagcaggagaggcgcacagaaggcccagttctcaggggtttttattcttgctgcagttggttaccaaggaagaccccaaagcactggctgttgccttgaactgggacataaagaagacggagactgttcaggaggcctgtgagcgggagctcgccctgcgcctgcagcagacgcagagcttgcattctctccggagcatctcagcaagcaaggcctcaccacctggtgacctgcagaatcctaagcgagccagacaggatcccacatagcagcagcgggaagtgtgccaaggaagctctgtggcgttgtgttattggtagacaccctcagcctcatcatttgactacctatgtactactctaccccctgccttagagcaccttccagagaagctattccaggtctcaacatacgccgttccaccaattttttttttagccccaccagcttcaggacttctgccaattttgaatgatatagctgcaccaacaatatcccgcctcctctaattacatatgatgttctctgttcaaaagtaattggcagtgattggcctcccaaagtgctgggattacaggtgtgagccaccacccctggccagaaaaaaaagcttttaaataaagtaattgtcagcttaggcaacatagcaagaccctgtctctacaaaaaaaaaatttaagttagccaggcatggtggcactgacctataatcctagctactctggaggctaaggcgagagtatcacttgagcccaggagctcaaggctgatcatgccaccatactccagcctggatgatagagtaagaccctacttttttttttttttttttaaaaaggtaaccatcaagggcaatgaaaagaaatggtcgtatttccaattcattatccttattctgaagatagtacggcagaattttaagcagagatagtggtgaagatggtgacattatagagtgttgactatggccacaatcttgtttctccagttaatgaatttttttatgtgtttgtttaaagatacatattaagcttgtagaccatagggacatacggagagtccattgctaatatctcactcagtattgtgaaattctatctcaccaccgtgaaactcttcagttttctaattgctttatcagcagggggtataaaaggtcatgaaagcaatttccacatgctgtggctccaggtctctgggtgtgaagcagagcaagcctggtttgtcctcctcctgtctccacacagacggcttctgcaggtttggtaatctacagtacactccttgcagggaaaaggtgatgagtcatcatggacttatttgaccactttttatgcatgcttagaggaaaacagaatactgttaagagattcatctgctagttattaagtaaagaaatatcacaataggccgggcgcagtggctcacacctgtaatcccagcattttgggaggccaaggtgggcggatcacctgaggtcaggagttcgagaccagcctagccaacatggtgaaaccccgtctctactaaaattataaaaaattagccgggtgtagtggtacacgcctgtagtcccagttacttgggaggctgaggcatgagaattgcttgaacccaggaagtggaggtggaggtgagccgaaattgtgccactgtactccagcctgcaacagagtgagacactgtcacacaaaaaagaaagaaatatcacaatatgtcacaataggccgggcgcagtggctcacacctgcagtcccaaagtgctgggagtataggtggtgagccatgggcctggctagtgagtgcactgaccgacgacgacttggggaactgacgacc

SEQ ID NO: 57142 - DNA, 2792 bp, Homo sapiens
ggtcgagtagaaggaccgccgctccggcctcccgcgacttctcgaaggtgggcaggtcccaccttgtggaggatggaggtgaccggggacgccggggtaccagaatctggcgagatccggactctaaagccgtgtctgctgcgccgcaactacagccgcgaacagcacggcgtggccgcctcctgcctcgaagacctgaggagcaaggcctgtgacattctggccattgataagtccctgacaccagtcaccctggtcctggcagaggatggcaccatagtggatgatgacgattactttctgtgtctaccttccaatactaagtttgtggcattggctagtaatgagaaatgggcatacaacaattcagatggaggtacagcttggatttcccaagagtcctttgatgtagatgaaacagacagcggggcagggttgaagtggaagaatgtggccaggcagctgaaagaagatctgtccagcatcatcctcctatcagaggaggacctccagagtccaaagctgcctttggtgaggaggtggatgcagtagacacgggtatcagcagagagacctcctcggacgttgcgctggcgagccacatccttactgcactgagggagaagcaggctccagagctgagcttatctagtcaggatttggaggtgggcggaaaccagggtcactgagctacagaggaggacatgccctgggatgtagtagtatcatgcagaggtgtgtgggcccttttgttcacctctgcagactgtgaatcctagctgccagtttgcctattatatgccaaggcatttgcaaaaatctcattaatctaaatcaaaatagctttaaagaaaaatgcatacacttcctcagatcatcaaacagactctggtccaaggttggtaatgaaatgactgttcctgacagggaggaatagcagggcccaatcttctgagatggcttctgggtctttccatggtcagagaagatctatagtccgtcctgaggtctgtcaatgtcacaggaaaaggcaaacttgaggggatcgtcgcctgctggctaagaccagggagctaaaaacttgaggaagggaacctgcctgggtgggtgctacttctgattcattgtccttgtccctgtcataagtacctccctattgtagatagaagggaaggaaactgttgacttgagcttggctaaatttcctgaaggtggaggaccttagagttgctccaagtaaactttccaaggacttcttcctgttggtgttgtaagaaaaggcccatgcttgtccgggcacagtggcttacgcctgttaatgccagtactttgggaggccgaggcaggtggatcacctgaggtcaggagttcgagaccagcctgaccaacatggcgaaaccccatctctactaaaaatacaaaaattagcctggcatggtggtgggaggctgaagcaagagaatcgcttgaacccaggaggtggaggttgcgtgagctaagatcgcgccactgcactccagcctgggcgacaagagtgaaactccgtcttaaaaaagcccatggcaggctgggcgcggtggctcacgcctgtaatcccagcactttgggaggccaaggtgggcggatcacaaggtcaggagatcgagaccatcctggcgaacacggtgaaaccccgtctctactaaaaaaaatacaaaaaaattagccaggcgtggtcgtgggcacctgtagtcccagctactcagggggctgaggcaggagaatggcgtgaatccgggaggcggagcttgcagggagccgagatagtgtcactgcactccagcctgggtgacagagcgagactccgtctcaaaaaacaaaaagcccgtggcaattaatggtaaaggaaacccggcatttcagtgtaaagaggtaacataaacggatactgcctcattgcactccccaaaagagagtcaggagagcagcaggagaggcgcacagaaggcccagttctcaggggtttttattcttgctgcagttggttaccaaggaagaccccaaagcactggctgttgccttgaactgggacataaagaagacggagactgttcaggaggcctgtgagcgggagctcgccctgcgcctgcagcagacgcagagcttgcattctctccggagcatctcagcaagcaaggcctcaccacctggtgacctgcagaatcctaagcgagccagacaggatcccacatagcagcagcgggaagtgtgccaaggaagctctgtggcgttgtgttattggtagacaccctcagcctcatcatttgactacctatgtactactctaccccctgccttagagcaccttccagagaagctattccaggtctcaacatacgccgttccaccaattttttttttagccccaccagcttcaggacttctgccaattttgaatgatatagctgcaccaacaatatcccgcctcctctaattacatatgatgttctctgttcaaaagtaattggcagtgattggccaggcgcagtggctcacgcctgtaatcccagcactgggaggccgaggggggcggatcgtgaagtcaggagatcgagaccatcctggctaacatggtgaaaccctgtctctactaaaaatacaaaaaaaattagccagccatggtggcgggcgcctgtaatcccagctacttgggaggctgaggcaggagaatggcatgaacctgggaggcagagcttgcagtgagctgagattgcgccactgcactccagcctgggcaacagagcgagactccg

SEQ ID NO: 57143 - DNA, 2707 bp, Homo sapiens
ggtcgagtagaaggaccgccgctccggcctcccgcgacttctcgaaggtgggcaggtcccaccttgtggaggatggaggtgaccggggacgccggggtaccagaatctggcgagatccggactctaaagccgtgtctgctgcgccgcaactacagccgcgaacagcacggcgtggccgcctcctgcctcgaagacctgaggagcaaggcctgtgacattctggccattgataagtccctgacaccagtcaccctggtcctggcagaggatggcaccatagtggatgatgacgattactttctgtgtctaccttccaatactaagtttgtggcattggctagtaatgagaaatgggcatacaacaattcagatggaggtacagcttggatttcccaagagtcctttgatgtagatgaaacagacagcggggcagggttgaagtggaagaatgtggccaggcagctgaaagaagatctgtccagcatcatcctcctatcagaggaggacctccagatgcttgttgacgctcctgctcagacctggctcaggaactacgtcagagttgtgccaccgtccagcggctgcagcacacactccaacaggtgcttgaccaaagagaggaagtgcgtcagtccaagcagctcctgcagctgtacctccaggctttggagaaagagggcagcctcttgtcaaagcaggaagagtccaaagctgcctttggtgaggaggtggatgcagtagacacgggtatcagcagagagacctcctcggacgttgcgctggcgagccacatccttactgcactgagggagaagcaggctccagagctgagcttatctagtcaggatttggaggtgggcggaaaccagggtcactgagctacagaggaggacatgccctgggatgtagtagtatcatgcagaggtgtgtgggcccttttgttcacctctgcagactgtgaatcctagctgccagtttgcctattatatgccaaggcatttgcaaaaatctcattaatctaaatcaaaatagctttaaagaaaaatgcatacacttcctcagatcatcaaacagactctggtccaaggttggtaatgaaatgactgttcctgacagggaggaatagcagggcccaatcttctgagatggcttctgggtctttccatggtcagagaagatctatagtccgtcctgaggtctgtcaatgtcacaggaaaaggcaaacttgaggggatcgtcgcctgctggctaagaccagggagctaaaaacttgaggaagggaacctgcctgggtgggtgctacttctgattcattgtccttgtccctgtcataagtacctccctattgtagatagaagggaaggaaactgttgacttgagcttggctaaatttcctgaaggtggaggaccttagagttgctccaagtaaactttccaaggacttcttcctgttggtgttgtaagaaaaggcccatgcttgtccgggcacagtggcttacgcctgttaatgccagtactttgggaggccaaggtgggcggatcacaaggtcaggagatcgagaccatcctggcgaacacggtgaaaccccgtctctactaaaaaaaatacaaaaaaattagccaggcgtggtcgtgggcacctgtagtcccagctactcagggggctgaggcaggagaatggcgtgaatccgggaggcggagcttgcagggagccgagatagtgtcactgcactccagcctgggtgacagagcgagactccgtctcaaaaaacaaaaagcccgtggcaattaatggtaaaggaaacccggcatttcagtgtaaagaggtaacataaacggatactgcctcattgcactccccaaaagagagtcaggagagcagcaggagaggcgcacagaaggcccagttctcaggggtttttattcttgctgcagttggttaccaaggaagaccccaaagcactggctgttgccttgaactgggacataaagaagacggagactgttcaggaggcctgtgagcgggagctcgccctgcgcctgcagcagacgcagagcttgcattctctccggagcatctcagcaagcaaggcctcaccacctggtgacctgcagaatcctaagcgagccagacaggatcccacatagcagcagcgggaagtgtgccaaggaagctctgtggcgttgtgttattggtagacaccctcagcctcatcatttgactacctatgtactactctaccccctgccttagagcaccttccagagaagctattccaggtctcaacatacgccgttccaccaattttttttttagccccaccagcttcaggacttctgccaattttgaatgatatagctgcaccaacaatatcccgcctcctctaattacatatgatgttctctgttcaaaagtaattggcagtgattggccaggcgcagtggctcacgcctgtaatcccagcactgggaggccgaggggggcggatcgtgaagtcaggagatcgagaccatcctggctaacatggtgaaaccctgtctctactaaaaatacaaaaaaaattagccagccatggtggcgggcgcctgtaatcccagctacttgggaggctgaggcaggagaatggcatgaacctgggaggcagagcttgcagtgagctgagattgcgccactgcactccagcctgggcaacagagcgagactccg

SEQ ID NO: 57144 - DNA, 3852 bp, Homo sapiens
ggtcgagtagaaggaccgccgctccggcctcccgcgacttctcgaaggtgggcaggtcccaccttgtggaggatggaggtgaccggggacgccggggtaccagaatctggcgagatccggactctaaagccgtgtctgctgcgccgcaactacagccgcgaacagcacggcgtggccgcctcctgcctcgaagacctgaggagcaaggcctgtgacattctggccattgataagtccctgacaccagtcaccctggtcctggcagaggatggcaccatagtggatgatgacgattactttctgtgtctaccttccaatactaagtttgtggcattggctagtaatgagaaatgggcatacaacaattcagatggaggtacagcttggatttcccaagagtcctttgatgtagatgaaacagacagcggggcagggttgaagtggaagaatgtggccaggcagctgaaagaagatctgtccagcatcatcctcctatcagaggaggacctccagatgcttgttgacgctcctgctcagacctggctcaggaactacgtcagagttgtgccaccgtccagcggctgcagcacacactccaacaggtgcttgaccaaagagaggaagtgcgtcagtccaagcagctcctgcagctgtacctccaggctttggagaaagagggcagcctcttgtcaaagcaggaagagtccaaagctgcctttggtgaggaggtggatgcagtagacacgggtatcagcagagagacctcctcggacgttgcgctggcgagccacatccttactgcactgagggagaagcaggctccagagctgagcttatctagtcaggatttggaggtgggcggaaaccagggtcactgagctacagaggaggacatgccctgggatgtagtagtatcatgcagaggtgtgtgggcccttttgttcacctctgcagactgtgaatcctagctgccagtttgcctattatatgccaaggcatttgcaaaaatctcattaatctaaatcaaaatagctttaaagaaaaatgcatacacttcctcagatcatcaaacagactctggtccaaggttggtaatgaaatgactgttcctgacagggaggaatagcagggcccaatcttctgagatggcttctgggtctttccatggtcagagaagatctatagtccgtcctgaggtctgtcaatgtcacaggaaaaggcaaacttgaggggatcgtcgcctgctggctaagaccagggagctaaaaacttgaggaagggaacctgcctgggtgggtgctacttctgattcattgtccttgtccctgtcataagtacctccctattgtagatagaagggaaggaaactgttgacttgagcttggctaaatttcctgaaggtggaggaccttagagttgctccaagtaaactttccaaggacttcttcctgttggtgttgtaagaaaaggcccatgcttgtccgggcacagtggcttacgcctgttaatgccagtactttgggaggccgaggcaggtggatcacctgaggtcaggagttcgagaccagcctgaccaacatggcgaaaccccatctctactaaaaatacaaaaattagcctggcatggtggtgggaggctgaagcaagagaatcgcttgaacccaggaggtggaggttgcgtgagctaagatcgcgccactgcactccagcctgggcgacaagagtgaaactccgtcttaaaaaagcccatggcaggctgggcgcggtggctcacgcctgtaatcccagcactttgggaggccaaggtgggcggatcacaaggtcaggagatcgagaccatcctggcgaacacggtgaaaccccgtctctactaaaaaaaatacaaaaaaattagccaggcgtggtcgtgggcacctgtagtcccagctactcagggggctgaggcaggagaatggcgtgaatccgggaggcggagcttgcagggagccgagatagtgtcactgcactccagcctgggtgacagagcgagactccgtctcaaaaaacaaaaagcccgtggcaattaatggtaaaggaaacccggcatttcagtgtaaagaggtaacataaacggatactgcctcattgcactccccaaaagagagtcaggagagcagcaggagaggcgcacagaaggcccagttctcaggggtttttattcttgctgcagttggttaccaaggaagaccccaaagcactggctgttgccttgaactgggacataaagaagacggagactgttcaggaggcctgtgagcgggagctcgccctgcgcctgcagcagacgcagagcttgcattctctccggagcatctcagcaagcaaggcctcaccacctggtgacctgcagaatcctaagcgagccagacaggatcccacatagcagcagcgggaagtgtgccaaggaagctctgtggcgttgtgttattggtagacaccctcagcctcatcatttgactacctatgtactactctaccccctgccttagagcaccttccagagaagctattccaggtctcaacatacgccgttccaccaattttttttttagccccaccagcttcaggacttctgccaattttgaatgatatagctgcaccaacaatatcccgcctcctctaattacatatgatgttctctgttcaaaagtaattggcagtgattggcctcccaaagtgctgggattacaggtgtgagccaccacccctggccagaaaaaaaagcttttaaataaagtaattgtcagcttaggcaacatagcaagaccctgtctctacaaaaaaaaaatttaagttagccaggcatggtggcactgacctataatcctagctactctggaggctaaggcgagagtatcacttgagcccaggagctcaaggctgatcatgccaccatactccagcctggatgatagagtaagaccctacttttttttttttttttttaaaaaggtaaccatcaagggcaatgaaaagaaatggtcgtatttccaattcattatccttattctgaagatagtacggcagaattttaagcagagatagtggtgaagatggtgacattatagagtgttgactatggccacaatcttgtttctccagttaatgaatttttttatgtgtttgtttaaagatacatattaagcttgtagaccatagggacatacggagagtccattgctaatatctcactcagtattgtgaaattctatctcaccaccgtgaaactcttcagttttctaattgctttatcagcagggggtataaaaggtcatgaaagcaatttccacatgctgtggctccaggtctctgggtgtgaagcagagcaagcctggtttgtcctcctcctgtctccacacagacggcttctgcaggtttggtaatctacagtacactccttgcagggaaaaggtgatgagtcatcatggacttatttgaccactttttatgcatgcttagaggaaaacagaatactgttaagagattcatctgctagttattaagtaaagaaatatcacaataggccgggcgcagtggctcacacctgtaatcccagcattttgggaggccaaggtgggcggatcacctgaggtcaggagttcgagaccagcctggccaacgtgacaaaacccagtctactaaaaatacaaaaattagccaggcgtgatggtgggcacctgtaatcccagctactcaggaggctgagacatgagaatcgcttgaacccaggaggtggagattgcactgagctgagatcctgccactgggctccagcctgggtgacagaatgagactctgtctttaaaaaaaaaa

SEQ ID NO: 57145 - DNA, 3352 bp, Homo sapiens
  misc_feature (2741)..(2741): n is a, c, g, or t
  misc_feature (2843)..(2844): n is a, c, g, or t
  misc_feature (2850)..(2850): n is a, c, g, or t
  misc_feature (2855)..(2855): n is a, c, g, or t
  misc_feature (2858)..(2858): n is a, c, g, or t
  misc_feature (2861)..(2861): n is a, c, g, or t
  misc_feature (2882)..(2882): n is a, c, g, or t
  misc_feature (2892)..(2892): n is a, c, g, or t
  misc_feature (2913)..(2913): n is a, c, g, or t
  misc_feature (2918)..(2918): n is a, c, g, or t
  misc_feature (2926)..(2928): n is a, c, g, or t
  misc_feature (2930)..(2930): n is a, c, g, or t
  misc_feature (2936)..(2936): n is a, c, g, or t
  misc_feature (2948)..(2948): n is a, c, g, or t
  misc_feature (2963)..(2963): n is a, c, g, or t
  misc_feature (2970)..(2970): n is a, c, g, or t
  misc_feature (3009)..(3009): n is a, c, g, or t
  misc_feature (3026)..(3026): n is a, c, g, or t
  misc_feature (3061)..(3061): n is a, c, g, or t
  misc_feature (3067)..(3067): n is a, c, g, or t
  misc_feature (3108)..(3108): n is a, c, g, or t
  misc_feature (3115)..(3115): n is a, c, g, or t
  misc_feature (3168)..(3168): n is a, c, g, or t
  misc_feature (3349)..(3349): n is a, c, g, or t
ggtcgagtagaaggaccgccgctccggcctcccgcgacttctcgaaggtgggcaggtcccaccttgtggaggatggaggtgaccggggacgccggggtaccagaatctggcgagatccggactctaaagccgtgtctgctgcgccgcaactacagccgcgaacagcacggcgtggccgcctcctgcctcgaagacctgaggagcaaggcctgtgacattctggccattgataagtccctgacaccagtcaccctggtcctggcagaggatggcaccatagtggatgatgacgattactttctgtgtctaccttccaatactaagtttgtggcattggctagtaatgagaaatgggcatacaacaattcagatggaggtacagcttggatttcccaagagtcctttgatgtagatgaaacagacagcggggcagggttgaagtggaagaatgtggccaggcagctgaaagaagatctgtccagcatcatcctcctatcagaggaggacctccagatgcttgttgacgctcctgctcagacctggctcaggaactacgtcagagttgtgccaccgtccagcggctgcagcacacactccaacaggtgcttgaccaaagagaggaagtgcgtcagtccaagcagctcctgcagctgtacctccaggctttggagaaagagggcagcctcttgtcaaagcaggaagagtccaaagctgcctttggtgaggaggtggatgcagtagacacgggtatcagcagagagacctcctcggacgttgcgctggcgagccacatccttactgcactgagggagaagcaggctccagagctgagcttatctagtcaggatttggaggtgggcggaaaccagggtcactgagctacagaggaggacatgccctgggatgtagtagtatcatgcagaggtgtgtgggcccttttgttcacctctgcagactgtgaatcctagctgccagtttgcctattatatgccaaggcatttgcaaaaatctcattaatctaaatcaaaatagctttaaagaaaaatgcatacacttcctcagatcatcaaacagactctggtccaaggttggtaatgaaatgactgttcctgacagggaggaatagcagggcccaatcttctgagatggcttctgggtctttccatggtcagagaagatctatagtccgtcctgaggtctgtcaatgtcacaggaaaaggcaaacttgaggggatcgtcgcctgctggctaagaccagggagctaaaaacttgaggaagggaacctgcctgggtgggtgctacttctgattcattgtccttgtccctgtcataagtacctccctattgtagatagaagggaaggaaactgttgacttgagcttggctaaatttcctgaaggtggaggaccttagagttgctccaagtaaactttccaaggacttcttcctgttggtgttgtaagaaaaggcccatgcttgtccgggcacagtggcttacgcctgttaatgccagtactttgggaggccgaggcaggtggatcacctgaggtcaggagttcgagaccagcctgaccaacatggcgaaaccccatctctactaaaaatacaaaaattagcctggcatggtggtgggaggctgaagcaagagaatcgcttgaacccaggaggtggaggttgcgtgagctaagatcgcgccactgcactccagcctgggcgacaagagtgaaactccgtcttaaaaaagcccatggcaggctgggcgcggtggctcacgcctgtaatcccagcactttgggaggccaaggtgggcggatcacaaggtcaggagatcgagaccatcctggcgaacacggtgaaaccccgtctctactaaaaaaaatacaaaaaaattagccaggcgtggtcgtgggcacctgtagtcccagctactcagggggctgaggcaggagaatggcgtgaatccgggaggcggagcttgcagggagccgagatagtgtcactgcactccagcctgggtgacagagcgagactccgtctcaaaaaacaaaaagcccgtggcaattaatggtaaaggaaacccggcatttcagtgtaaagaggtaacataaacggatactgcctcattgcactccccaaaagagagtcaggagagcagcaggagaggcgcacagaaggcccagttctcaggggtttttattcttgctgcagttggttaccaaggaagaccccaaagcactggctgttgccttgaactgggacataaagaagacggagactgttcaggaggcctgtgagcgggagctcgccctgcgcctgcagcagacgcagagcttgcattctctccggagcatctcagcaagcaaggcctcaccacctggtgacctgcagaatcctaagcgagccagacaggatcccacatagcagcagcgggaagtgtgccaaggaagctctgtggcgttgtgttattggtagacaccctcagcctcatcatttgactacctatgtactactctaccccctgccttagagcaccttccagagaagctattccaggtctcaacatacgccgttccaccaattttttttttagccccaccagcttcaggacttctgccaattttgaatgatatagctgcaccaacaatatcccgcctcctctaattacatatgatgttctctgttcaaaagtaattggcagtgattggccactgcacccggcctctgtttactttttgtacancggtgatagcagctcttaagtatacccattccactggatcataaaccagtacactgcgcagtgagatagtggtatatgcttatttgtaagagaacaacaaannaaatanaaaanacnagntctagggctaagttcactatnaatctaattnaatttgtgactaaacactctnaatanacaaaaannnantctttnatatgacatgtngcaaaagtcacctgnagctatnactatagttgagtgttcttaatagcaaaaataacaaaanaaaaaaaaaaagttctnatttaggctatttgatgataaagggatgtacctgnaaaaanaaatatatatttataaaggacctaattaatttttacaaaangattttnttttgtatagtactaatctgcaaatgagcttccctagctggaatggaggtttnagagatagtatagtatagtggttaagaacaccgattctgctagtctgcttaggttcaaatcctggttctactacttactagctgggtgactgtgggtaagatatttaacctctctacttccgtactctgtaaagggataataacagtatctacattttggggtggtaatgattaaatgagntac

SEQ ID NO: 57146 - DNA, 3936 bp, Homo sapiens
ggtcgagtagaaggaccgccgctccggcctcccgcgacttctcgaaggtgggcaggtcccaccttgtggaggatggaggtgaccggggacgccggggtaccagaatctggcgagatccggactctaaagccgtgtctgctgcgccgcaactacagccgcgaacagcacggcgtggccgcctcctgcctcgaagacctgaggagcaaggcctgtgacattctggccattgataagtccctgacaccagtcaccctggtcctggcagaggatggcaccatagtggatgatgacgattactttctgtgtctaccttccaatactaagtttgtggcattggctagtaatgagaaatgggcatacaacaattcagatggaggtacagcttggatttcccaagagtcctttgatgtagatgaaacagacagcggggcagggttgaagtggaagaatgtggccaggcagctgaaagaagatctgtccagcatcatcctcctatcagaggaggacctccagatgcttgttgacgctcctgctcagacctggctcaggaactacgtcagagttgtgccaccgtccagcggctgcagcacacactccaacaggtgcttgaccaaagagaggaagtgcgtcagtccaagcagctcctgcagctgtacctccaggctttggagaaagagggcagcctcttgtcaaagcaggaagagtccaaagctgcctttggtgaggaggtggatgcagtagacacgggtatcagcagagagacctcctcggacgttgcgctggcgagccacatccttactgcactgagggagaagcaggctccagagctgagcttatctagtcaggatttggaggtgggcggaaaccagggtcactgagctacagaggaggacatgccctgggatgtagtagtatcatgcagaggtgtgtgggcccttttgttcacctctgcagactgtgaatcctagctgccagtttgcctattatatgccaaggcatttgcaaaaatctcattaatctaaatcaaaatagctttaaagaaaaatgcatacacttcctcagatcatcaaacagactctggtccaaggttggtaatgaaatgactgttcctgacagggaggaatagcagggcccaatcttctgagatggcttctgggtctttccatggtcagagaagatctatagtccgtcctgaggtctgtcaatgtcacaggaaaaggcaaacttgaggggatcgtcgcctgctggctaagaccagggagctaaaaacttgaggaagggaacctgcctgggtgggtgctacttctgattcattgtccttgtccctgtcataagtacctccctattgtagatagaagggaaggaaactgttgacttgagcttggctaaatttcctgaaggtggaggaccttagagttgctccaagtaaactttccaaggacttcttcctgttggtgttgtaagaaaaggcccatgcttgtccgggcacagtggcttacgcctgttaatgccagtactttgggaggccgaggcaggtggatcacctgaggtcaggagttcgagaccagcctgaccaacatggcgaaaccccatctctactaaaaatacaaaaattagcctggcatggtggtgggaggctgaagcaagagaatcgcttgaacccaggaggtggaggttgcgtgagctaagatcgcgccactgcactccagcctgggcgacaagagtgaaactccgtcttaaaaaagcccatggcaggctgggcgcggtggctcacgcctgtaatcccagcactttgggaggccaaggtgggcggatcacaaggtcaggagatcgagaccatcctggcgaacacggtgaaaccccgtctctactaaaaaaaatacaaaaaaattagccaggcgtggtcgtgggcacctgtagtcccagctactcagggggctgaggcaggagaatggcgtgaatccgggaggcggagcttgcagggagccgagatagtgtcactgcactccagcctgggtgacagagcgagactccgtctcaaaaaacaaaaagcccgtggcaattaatggtaaaggaaacccggcatttcagtgtaaagaggtaacataaacggatactgcctcattgcactccccaaaagagagtcaggagagcagcaggagaggcgcacagaaggcccagttctcaggggtttttattcttgctgcagttggttaccaaggaagaccccaaagcactggctgttgccttgaactgggacataaagaagacggagactgttcaggaggcctgtgagcgggagctcgccctgcgcctgcagcagacgcagagcttgcattctctccggagcatctcagcaagcaaggcctcaccacctggtgacctgcagaatcctaagcgagccagacagggttttgtcacattggccaggctggtctcaaactcctgacctcaggtgatccacccacctcagcctcccaaagtgctgggattacaggtgtgagccaccacccctggccagaaaaaaaagcttttaaataaagtaattgtcagcttaggcaacatagcaagaccctgtctctacaaaaaaaaaatttaagttagccaggcatggtggcactgacctataatcctagctactctggaggctaaggcgagagtatcacttgagcccaggagctcaaggctgatcatgccaccatactccagcctggatgatagagtaagaccctacttttttttttttttttttaaaaaggtaaccatcaagggcaatgaaaagaaatggtcgtatttccaattcattatccttattctgaagatagtacggcagaattttaagcagagatagtggtgaagatggtgacattatagagtgttgactatggccacaatcttgtttctccagttaatgaatttttttatgtgtttgtttaaagatacatattaagcttgtagaccatagggacatacggagagtccattgctaatatctcactcagtattgtgaaattctatctcaccaccgtgaaactcttcagttttctaattgctttatcagcagggggtataaaaggtcatgaaagcaatttccacatgctgtggctccaggtctctgggtgtgaagcagagcaagcctggtttgtcctcctcctgtctccacacagacggcttctgcaggtttggtaatctacagtacactccttgcagggaaaaggtgatgagtcatcatggacttatttgaccactttttatgcatgcttagaggaaaacagaatactgttaagagattcatctgctagttattaagtaaagaaatatcacaataggccgggcgcagtggctcacacctgtaatcccagcattttgggaggccaaggtgggcggatcacctgaggtcaggagttcgagaccagcctagccaacatggtgaaaccccgtctctactaaaattataaaaaattagccgggtgtagtggtacacgcctgtagtcccagttacttgggaggctgaggcatgagaattgcttgaacccaggaagtggaggtggaggtgagccgaaattgtgccactgtactccagcctgcaacagagtgagacactgtcacacaaaaaagaaagaaatatcacaatatgtcacaataggccgggcgcagtggctcacacctgcagtcccagcactttgggaggccaaggcagatggatcacctgaggtcaggagtttgagaccagcctggccaacgtgacaaaacccagtctactaaaaatacaaaaattagccaggcgtgatggtgggcacctgtaatcccagctactcaggaggctgagacatgagaatcgcttgaacccaggaggtggagattgcactgagctgagatcctgccactgggctccagcctgggtgacagaatgagactctgtctttaaaaaaaaaa

SEQ ID NO: 57147 - DNA, 1626 bp, Homo sapiens
ggtcgagtagaaggaccgccgctccggcctcccgcgacttctcgaaggtgggcaggtcccaccttgtggaggatggaggtgaccggggacgccggggtaccagaatctggcgagatccggactctaaagccgtgtctgctgcgccgcaactacagccgcgaacagcacggcgtggccgcctcctgcctcgaagacctgaggagcaaggcctgtgacattctggccattgataagtccctgacaccagtcaccctggtcctggcagaggatggcaccatagtggatgatgacgattactttctgtgtctaccttccaatactaagtttgtggcattggctagtaatgagaaatgggcatacaacaattcagatggaggtacagcttggatttcccaagagtcctttgatgtagatgaaacagacagcggggcagggttgaagtggaagaatgtggccaggcagctgaaagaagatctgtccagcatcatcctcctatcagaggaggacctccagatgcttgttgacgctcctgctcagacctggctcaggaactacgtcagagttgtgccaccgtccagcggctgcagcacacactccaacaggtgcttgaccaaagagaggaagtgcgtcagtccaagcagctcctgcagctgtacctccaggctttggagaaagagggcagcctcttgtcaaagcaggaagagtccaaagctgcctttggtgaggaggtggatgcagtagacacgggtatcagcagagagacctcctcggacgttgcgctggcgagccacatccttactgcactgagggagaagcaggctccagagctgagcttatctagtcaggatttggagttggttaccaaggaagaccccaaagcactggctgttgccttgaactgggacataaagaagacggagactgttcaggaggcctgtgagcgggagctcgccctgcgcctgcagcagacgcagagcttgcattctctccggagcatctcagcaagcaaggcctcaccacctggtgacctgcagaatcctaagcgagccagacaggatcccacatagcagcagcgggaagtgtgccaaggaagctctgtggcgttgtgttattggtagacaccctcagcctcatcatttgactacctatgtactactctaccccctgccttagagcaccttccagagaagctattccaggtctcaacatacgccgttccaccaattttttttttagccccaccagcttcaggacttctgccaattttgaatgatatagctgcaccaacaatatcccgcctcctctaattacatatgatgttctctgttcaaaagtaattggcagtgattggccaggcgcagtggctcacgcctgtaatcccagcactgggaggccgaggggggcggatcgtgaagtcaggagatcgagaccatcctggctaacatggtgaaaccctgtctctactaaaaatacaaaaaaaattagccagccatggtggcgggcgcctgtaatcccagctacttgggaggctgaggcaggagaatggcatgaacctgggaggcagagcttgcagtgagctgagattgcgccactgcactccagcctgggcaacagagcgagactccg

SEQ ID NO: 57148 - DNA, 1696 bp, Homo sapiens
ggtcgagtagaaggaccgccgctccggcctcccgcgacttctcgaaggtgggcaggtcccaccttgtggaggatggaggtgaccggggacgccggggtaccagaatctggcgagatccggactctaaagccgtgtctgctgcgccgcaactacagccgcgaacagcacggcgtggccgcctcctgcctcgaagacctgaggagcaaggcctgtgacattctggccattgataagtccctgacaccagtcaccctggtcctggcagaggatggcaccatagtggatgatgacgattactttctgtgtctaccttccaatactaagtttgtggcattggctagtaatgagaaatgggcatacaacaattcagatggaggtacagcttggatttcccaagagtcctttgatgtagatgaaacagacagcggggcagggttgaagtggaagaatgtggccaggcagctgaaagaagatctgtccagcatcatcctcctatcagaggaggacctccagatgcttgttgacgctcctgctcagacctggctcaggaactacgtcagagttgtgccaccgtccagcggctgcagcacacactccaacaggtgcttgaccaaagagaggaagtgcgtcagtccaagcagctcctgcagctgtacctccaggctttggagaaagagggcagcctcttgtcaaagcaggaagagtccaaagctgcctttggtgaggaggtggatgcagtagacacgggtatcagcagagagacctcctcggacgttgcgctggcgagccacatccttactgcactgagggagaagcaggctccagagctgagcttatctagtcaggatttggaggtgggcggaaaccagggtcactgagctacagaggaggacatgccctgggatgtagtagtatcatgcagagttggttaccaaggaagaccccaaagcactggctgttgccttgaactgggacataaagaagacggagactgttcaggaggcctgtgagcgggagctcgccctgcgcctgcagcagacgcagagcttgcattctctccggagcatctcagcaagcaaggcctcaccacctggtgacctgcagaatcctaagcgagccagacaggatcccacatagcagcagcgggaagtgtgccaaggaagctctgtggcgttgtgttattggtagacaccctcagcctcatcatttgactacctatgtactactctaccccctgccttagagcaccttccagagaagctattccaggtctcaacatacgccgttccaccaattttttttttagccccaccagcttcaggacttctgccaattttgaatgatatagctgcaccaacaatatcccgcctcctctaattacatatgatgttctctgttcaaaagtaattggcagtgattggccaggcgcagtggctcacgcctgtaatcccagcactgggaggccgaggggggcggatcgtgaagtcaggagatcgagaccatcctggctaacatggtgaaaccctgtctctactaaaaatacaaaaaaaattagccagccatggtggcgggcgcctgtaatcccagctacttgggaggctgaggcaggagaatggcatgaacctgggaggcagagcttgcagtgagctgagattgcgccactgcactccagcctgggcaacagagcgagactccg

SEQ ID NO: 57149 - DNA, 1507 bp, Homo sapiens
ggtcgagtagaaggaccgccgctccggcctcccgcgacttctcgaaggtgggcaggtcccaccttgtggaggatggaggtgaccggggacgccggggtaccagaatctggcgagatccggactctaaagccgtgtctgctgcgccgcaactacagccgcgaacagcacggcgtggccgcctcctgcctcgaagacctgaggagcaaggcctgtgacattctggccattgataagtccctgacaccagtcaccctggtcctggcagaggatggcaccatagtggatgatgacgattactttctgtgtctaccttccaatactaagtttgtggcattggctagtaatgagaaatgggcatacaacaattcagatggaggtacagcttggatttcccaagagtcctttgatgtagatgaaacagacagcggggcagggttgaagtggaagaatgtggccaggcagctgaaagaagatctgtccagcatcatcctcctatcagaggaggacctccagagtccaaagctgcctttggtgaggaggtggatgcagtagacacgggtatcagcagagagacctcctcggacgttgcgctggcgagccacatccttactgcactgagggagaagcaggctccagagctgagcttatctagtcaggatttggaggtgggcggaaaccagggtcactgagctacagaggaggacatgccctgggatgtagtagtatcatgcagagttggttaccaaggaagaccccaaagcactggctgttgccttgaactgggacataaagaagacggagactgttcaggaggcctgtgagcgggagctcgccctgcgcctgcagcagacgcagagcttgcattctctccggagcatctcagcaagcaaggcctcaccacctggtgacctgcagaatcctaagcgagccagacaggatcccacatagcagcagcgggaagtgtgccaaggaagctctgtggcgttgtgttattggtagacaccctcagcctcatcatttgactacctatgtactactctaccccctgccttagagcaccttccagagaagctattccaggtctcaacatacgccgttccaccaattttttttttagccccaccagcttcaggacttctgccaattttgaatgatatagctgcaccaacaatatcccgcctcctctaattacatatgatgttctctgttcaaaagtaattggcagtgattggccaggcgcagtggctcacgcctgtaatcccagcactgggaggccgaggggggcggatcgtgaagtcaggagatcgagaccatcctggctaacatggtgaaaccctgtctctactaaaaatacaaaaaaaattagccagccatggtggcgggcgcctgtaatcccagctacttgggaggctgaggcaggagaatggcatgaacctgggaggcagagcttgcagtgagctgagattgcgccactgcactccagcctgggcaacagagcgagactccg

SEQ ID NO: 57150 - DNA, 1596 bp, Homo sapiens
tcagggttatggagcccttttctttcccagcttctcttctgccaattttgaatgatatagctgcaccaacaatatcccgcctcctctaattacatatgatgttctctgttcaaaagtaattggcagtgattggcctcccaaagtgctgggattacaggtgtgagccaccacccctggccagaaaaaaaagcttttaaataaagtaattgtcagcttaggcaacatagcaagaccctgtctctacaaaaaaaaaatttaagttagccaggcatggtggcactgacctataatcctagctactctggaggctaaggcgagagtatcacttgagcccaggagctcaaggctgatcatgccaccatactccagcctggatgatagagtaagaccctacttttttttttttttttttaaaaaggtaaccatcaagggcaatgaaaagaaatggtcgtatttccaattcattatccttattctgaagatagtacggcagaattttaagcagagatagtggtgaagatggtgacattatagagtgttgactatggccacaatcttgtttctccagttaatgaatttttttatgtgtttgtttaaagatacatattaagcttgtagaccatagggacatacggagagtccattgctaatatctcactcagtattgtgaaattctatctcaccaccgtgaaactcttcagttttctaattgctttatcagcagggggtataaaaggtcatgaaagcaatttccacatgctgtggctccaggtctctgggtgtgaagcagagcaagcctggtttgtcctcctcctgtctccacacagacggcttctgcaggtttggtaatctacagtacactccttgcagggaaaaggtgatgagtcatcatggacttatttgaccactttttatgcatgcttagaggaaaacagaatactgttaagagattcatctgctagttattaagtaaagaaatatcacaataggccgggcgcagtggctcacacctgtaatcccagcattttgggaggccaaggtgggcggatcacctgaggtcaggagttcgagaccagcctagccaacatggtgaaaccccgtctctactaaaattataaaaaattagccgggtgtagtggtacacgcctgtagtcccagttacttgggaggctgaggcatgagaattgcttgaacccaggaagtggaggtggaggtgagccgaaattgtgccactgtactccagcctgcaacagagtgagacactgtcacacaaaaaagaaagaaatatcacaatatgtcacaataggccgggcgcagtggctcacacctgcagtcccagcactttgggaggccaaggcagatggatcacctgaggtcaggagtttgagaccagcctggccaacgtgacaaaacccagtctactaaaaatacaaaaattagccaggcgtgatggtgggcacctgtaatcccagctactcaggaggctgagacatgagaatcgcttgaacccaggaggtggagattgcactgagctgagatcctgccactgggctccagcctgggtgacagaatgagactctgtctttaaaaaaaaaa

SEQ ID NO: 57151 - DNA, 1381 bp, Homo sapiens
ggtcgagtagaaggaccgccgctccggcctcccgcgacttctcgaaggtgggcaggtcccaccttgtggaggatggaggtgaccggggacgccggggtaccagaatctggcgagatccggactctaaagccgtgtctgctgcgccgcaactacagccgcgaacagcacggcgtggccgcctcctgcctcgaagacctgaggagcaaggcctgtgacattctggccattgataagtccctgacaccagtcaccctggtcctggcagaggatggcaccatagtggatgatgacgattactttctgtgtctaccttccaatactaagtttgtggcattggctagtaatgagaaatgggcatacaacaattcagatggaggtacagcttggatttcccaagagtcctttgatgtagatgaaacagacagcggggcagggttgaagtggaagaatgtggccaggcagctgaaagaagatctgtccagcatcatcctcctatcagaggaggacctccagatgcttgttgacgctcctgctcagacctggctcaggaactacgtcagagttgtgccaccgtccagcggctgcagcacacactccaacaggtgcttgaccaaagagaggaagtgcgtcagtccaagcagctcctgcagctgtacctccaggctttggagaaagagggcagcctcttgtcaaagcaggaagagtccaaagctgcctttggtgaggaggtggatgcagtagacacgggtatcagcagagagacctcctcggacgttgcgctggcgagccacatccttactgcactgagggagaagcaggctccagagctgagcttatctagtcaggatttggagttggttaccaaggaagaccccaaagcactggctgttgccttgaactgggacataaagaagacggagactgttcaggaggcctgtgagcgggagctcgccctgcgcctgcagcagacgcagagcttgcattctctccggagcatctcagcaagcaaggcctcaccacctggtgacctgcagaatcctaagcgagccagacaggatcccacatagcagcagcgggaagtgtgccaaggaagctctgtggcgttgtgttattggtagacaccctcagcctcatcatttgactacctatgtactactctaccccctgccttagagcaccttccagagaagctattccaggtctcgaagtcctgacctcaggtgatccacccgctcggctccaggtgctgggattacggtgttgagcacaccctggcagaaaaaagttttaataaaggattgccgcttgcatagcagacccgttctcccagacaattatttcccggtgtggcctgagtataaccagtcttcgggagggggct

SEQ ID NO: 57152 - DNA, 1197 bp, Homo sapiens
tagagtatcccggtcatcttgctacacatcaggcaatgaaaagaaatggtcgtatttccaattcattatccttattctgaagatagtacggcagaattttaagcagagatagtggtgaagatggtgacattatagagtgttgactatggccacaatcttgtttctccagttaatgaatttttttatgtgtttgtttaaagatacatattaagcttgtagaccatagggacatacggagagtccattgctaatatctcactcagtattgtgaaattctatctcaccaccgtgaaactcttcagttttctaattgctttatcagcagggggtataaaaggtcatgaaagcaatttccacatgctgtggctccaggtctctgggtgtgaagcagagcaagcctggtttgtcctcctcctgtctccacacagacggcttctgcaggtttggtaatctacagtacactccttgcagggaaaaggtgatgagtcatcatggacttatttgaccactttttatgcatgcttagaggaaaacagaatactgttaagagattcatctgctagttattaagtaaagaaatatcacaataggccgggcgcagtggctcacacctgtaatcccagcattttgggaggccaaggtgggcggatcacctgaggtcaggagttcgagaccagcctagccaacatggtgaaaccccgtctctactaaaattataaaaaattagccgggtgtagtggtacacgcctgtagtcccagttacttgggaggctgaggcatgagaattgcttgaacccaggaagtggaggtggaggtgagccgaaattgtgccactgtactccagcctgcaacagagtgagacactgtcacacaaaaaagaaagaaatatcacaatatgtcacaataggccgggcgcagtggctcacacctgcagtcccagcactttgggaggccaaggcagatggatcacctgaggtcaggagtttgagaccagcctggccaacgtgacaaaacccagtctactaaaaatacaaaaattagccaggcgtgatggtgggcacctgtaatcccagctactcaggaggctgagacatgagaatcgcttgaacccaggaggtggagattgcactgagctgagatcctgccactgggctccagcctgggtgacagaatgagactctgtctttaaaaaaaaaa

SEQ ID NO: 57153 - DNA, 235 bp, Homo sapiens
atgatgacgattactttctgtgtctaccttccaatactaagtttgtggcattggctagtaatgagaaatgggcatacaacaattcaggtaagaaactctagccatgtataaaacggcctatgcagtacagcatccatcatgattactttcactgcacagacaattgccatttgtctggctttttaagcatttgttcaacagatatttactgagcactttctatgtgccagacatg

SEQ ID NO: 57154 - DNA, 299 bp, Homo sapiens
aactacatctcccggcaggctgcggaagggggtcgagtagaaggaccgccgctccggcctcccgcgacttctcgaaggtgggcaggtcccaccttgtggaggatggaggtgaccggggacgccggggtaccagaatctggcgagatccggactctaaagccgtgtctgctgcgccgcaactacagccgcgaacagcacggcgtggccgcctcctgcctcgaagacctgaggagcaagggttggctcgggaccccgggcgagggtgtgggggagccagggccgggtgaggacgtccggcg

SEQ ID NO: 57155 - DNA, 797 bp, Homo sapiens
cggttttctgctgaggctgagccgtttgctccagcctccgactaaactcattaagttgggagatttttttcaattggacgggtgtttttaaagtctcgtctttccagccccaaacaaggtgtaacaacgcactcttccttctaaggaatgagatgagagacaaggatcactccagacatctcctacctacggtttggggttttttttcttaaaggcgaggcttgcattcctcagcagctatgtacaaagctccctgaaaccttgtctctctaaagttagtgtgcagggttttccaaggctgagagagcctaatacatggggaagcacttccttgaggtggaagatctctcccttcacctttcctctttttccctgcaggctagtgcctactttttatcagtttgcacaatcgcttagataaacaccgaggaggagattctctttaattatcaaagacacatcttttcagggggccaacaaagcatttatttcacccgccaaactaaaggagagttattccagtttaggaggaagatgcaagcggtttgggaccttgaacaaggcaaatatggttttggtatgtttacttacagtattttttctctctctctttcctttctcacttttctgcttgtgctgtgtggggttggggatgacttggggcttttcaaaatatcggtttgctaacgtgtatgaaatgccgaggactgtggtttaaggggttcggggaaggggggatcagagtcaattcaatgcattgccatattttattacatgtgtgtggtaggagagatggt

SEQ ID NO: 57156 - DNA, 4114 bp, Homo sapiens
  misc_feature (912)..(912): n is a, c, g, or t
  misc_feature (931)..(931): n is a, c, g, or t
cgcggccgccatggcggggccgccgcagtccggccaatgacggcgagggggcggcgcgcgcgcgcctggccaggccaaccccggctgctgccttataaggcgcgccgtcgccatggcaacgtgcgctaagttgcagcagtcgtgtcaaagttcactatatagagagctcagtgagctgatcgcggagaagccacttctgccagccccggcgcctataaatcgcattccctcccgcgcccccctttttagcatatttgatcactttgattctctgttcttttctctccgcggtgtgtgtgtgcgtgcgcgcgtgtgtgttttcttcttctcctcctcctctccccgagttgcctcctttctccgggtgccgtactgccttttttcccctctttcattctttctctccgtctttttctcccccctctgcgcacgaaggatgtgcttctaggtggtgatctgccctcctctctctcttttatcatttctcccccgccgccggcgagttgactctttccctatgtgtgtgaggcggcggcggcagcagcagcagcagcggctccggcggcggcagcagcggcagcagcgacttcagcggcggcggcggcgctagacgcagcggctccgggcccgacccggcggcttcggcggcggctccggcggcagcggcggcccgggcggcccgcagggaacggcgagcggcctccacccacgactgcgggcggcggcggccggagagagcgaggcgcgcgccggacgcccggggcaggcggcggcggcggcggcccagcgccaggacgacgccgcgcagcgcccgacgcggaccactttcatgctgattcccccggacccgggcagcgctccggccactccgcggcgccggcctccgccccggcctgcctggctccctgggcngcccgcacccggcgcctcngatctcctagtcctcctgatttcgatggctttcctgaatggctgactgtgggctgccctggacttggcccccggacagtcgcctctcctcctcctctacctcctccttcaccaccacctcctcttcctcctcctcctcctcctcctcctccgccaactcctcggctgcacaccagctctaagagcgagagtgaacgagagagggagggagagagtgagagcgagcgagatctttggagagatttttttttttgcctcctacttctgtcttgaagccagacaatcgacttcagctctccctcccctccctctttctccacgttctgctcccactcgctctcctgtccccttcccctcccctcccggcggaaagccccccgaaaccaacaaagctgagccgagagaaacaaacaaaacaaacacaccgggccagacaagccatcgacaaaactttgcaaaagcaaaaacaaaaaaggaaaaactaaccaacctcaaccaaccagcccccgagccacccggggcgccctcccgcgccctcttgcaccctcgcacacacaaaaggcggcgcgccggagcccgagacccggggagccgccgccgccccgccgccgcccgcagccaggggagcaggaagtccggacgcagcccccatagatatggcaatggtagtcagcacgtggcgcgacccccaggacgaggtgcccggctcacagggcagccaggcctcgcaggcgccgcccgtgcccggcccgccgcccggcgccccgcacacgccacagacgcccggccaagggggcccagccagcacgccagcccagacggcggccggtggccagggcggccctggcggcccgggtagcgacaagcagcagcagcagcaacacatcgagtgcgtggtgtgcggagacaagtcgagcggcaagcactacggccagttcacgtgcgagggctgcaagagcttcttcaagcgcagcgtgcggaggaacctgagctacacgtgccgcgccaaccggaactgtcccatcgaccagcaccatcgcaaccagtgccagtactgccgcctcaaaaagtgcctcaaagtgggcatgagacgggaagcggtgcagaggggcaggatgccgccgacccagccgacccacgggcagttcgcgctgaccaacggggatcccctcaactgccactcgtacctgtccggatatatttccctgctgttgcgcgcggagccctatcccacgtcgcgcttcggcagccaatgcatgcagcccaacaacatcatgggtatcgagaacatttgcgaactggccgcgaggatgctcttcagcgccgtcgagtgggcccggaacatccccttcttccccgacctgcagatcacggaccaggtggccctgcttcgcctcacctggagcgagctgtttgtgttgaatgcggcgcagtgctccatgcccctccacgtcgccccgctcctggccgccgccggcctgcatgcttcgcccatgtccgccgaccgggtggtcgcctttatggaccacatacggatcttccaagagcaagtggagaagctcaaggcgctgcacgttgactcagccgagtacagctgcctcaaggccatagtcctgttcacctcagatgcctgtggtctctctgatgtagcccatgtggaaagcttgcaggaaaagtctcagtgtgctttggaagaatacgttaggagccagtaccccaaccagccgacgagattcggaaagcttttgcttcgcctcccttccctccgcaccgtctcctcctcagtcatagagcaattgtttttcgtccgtttggtaggtaaaacccccatcgaaaccctcatccgggatatgttactgtccggcagcagttttaactggccgtatatggcaattcaataaataaataaaataagaagggggagtgaaacagagaaagaaaaggcaaaagactggtttgtttgcttaatttccttctgttaagaaaggatataaaaggatgttacaagtttgctaaaagaagagaggggaagaatttaatggactgtgaatttcaaaaaaaaaaaaaaagactgtcaaatgaacttttacacagaatgcattaaaaaaaaaaaaaaactcctgtgtcggtcagaacaacttgctacttatcatttttgtataaaaaggaaattagtctttttctttttttggtaaatttttgaaaaatattgctaaaagtgcatttaaggagattgggagacaattagcagaatggagaaagtaagtcttttttttttccaaattattaattgtcctgtgtctatgtacctctagctgttcttttttgtacttttctggttccaaaccagtttattctgtggttctataataagttttgatataatcttggcttcttaaaaactgtgtatcattaaaatatatgttctgcaagaattaaaactgagtccatgaaaataccataggaagacataaaactttaaaaggcaactcaaagatgatggaaacgcacttacaagtggtgaccaaaatttttaggtgaagtcgagcactctaattagagaactggaggaaccacatataacacttaacttcccctaccctgcccctccccaaaagaaaccatgacaaacctagcttttaaaaaatattttaagaaagagaatgaactgtggaatttattggcagccaaggaatgtgtccaagacacatgctgaggttttgaataaaaagtgaacttttgtaatttgaattgggtcccgcttagttcttgaattgttatgaaaatcctatatctgtttgtatatttgcaaaccctttgtattataattgttgatattttccctttttaaaaaataccattgaaatcagcatgacaaaaataacactgttggcacttataggtaacgtgattgattcagtatcttagagtttacagtttgtgttttaaaaaaactgaaggttttttttttaagtgcaacatttctgtatactgtaaaagttataataactgaactgtttggtcgagtctttgtgtgttatattccaaggaaaattgaaagtattcagaaattaaaatattatttgatatctgaaacctggctgtccccactcactgtctttacatctagaagagcccctgtgagctctcgcttagctggccgggcggggggtggtgggggggg

SEQ ID NO: 57157 - DNA, 3567 bp, Homo sapiens
  misc_feature (912)..(912): n is a, c, g, or t
  misc_feature (931)..(931): n is a, c, g, or t
  misc_feature (3056)..(3056): n is a, c, g, or t
  misc_feature (3058)..(3058): n is a, c, g, or t
  misc_feature (3076)..(3078): n is a, c, g, or t
  misc_feature (3082)..(3082): n is a, c, g, or t
  misc_feature (3084)..(3084): n is a, c, g, or t
  misc_feature (3093)..(3093): n is a, c, g, or t
  misc_feature (3099)..(3099): n is a, c, g, or t
  misc_feature (3111)..(3111): n is a, c, g, or t
  misc_feature (3114)..(3114): n is a, c, g, or t
  misc_feature (3116)..(3116): n is a, c, g, or t
  misc_feature (3132)..(3132): n is a, c, g, or t
  misc_feature (3140)..(3140): n is a, c, g, or t
  misc_feature (3150)..(3150): n is a, c, g, or t
  misc_feature (3152)..(3152): n is a, c, g, or t
  misc_feature (3567)..(3567): n is a, c, g, or t
cgcggccgccatggcggggccgccgcagtccggccaatgacggcgagggggcggcgcgcgcgcgcctggccaggccaaccccggctgctgccttataaggcgcgccgtcgccatggcaacgtgcgctaagttgcagcagtcgtgtcaaagttcactatatagagagctcagtgagctgatcgcggagaagccacttctgccagccccggcgcctataaatcgcattccctcccgcgcccccctttttagcatatttgatcactttgattctctgttcttttctctccgcggtgtgtgtgtgcgtgcgcgcgtgtgtgttttcttcttctcctcctcctctccccgagttgcctcctttctccgggtgccgtactgccttttttcccctctttcattctttctctccgtctttttctcccccctctgcgcacgaaggatgtgcttctaggtggtgatctgccctcctctctctcttttatcatttctcccccgccgccggcgagttgactctttccctatgtgtgtgaggcggcggcggcagcagcagcagcagcggctccggcggcggcagcagcggcagcagcgacttcagcggcggcggcggcgctagacgcagcggctccgggcccgacccggcggcttcggcggcggctccggcggcagcggcggcccgggcggcccgcagggaacggcgagcggcctccacccacgactgcgggcggcggcggccggagagagcgaggcgcgcgccggacgcccggggcaggcggcggcggcggcggcccagcgccaggacgacgccgcgcagcgcccgacgcggaccactttcatgctgattcccccggacccgggcagcgctccggccactccgcggcgccggcctccgccccggcctgcctggctccctgggcngcccgcacccggcgcctcngatctcctagtcctcctgatttcgatggctttcctgaatggctgactgtgggctgccctggacttggcccccggacagtcgcctctcctcctcctctacctcctccttcaccaccacctcctcttcctcctcctcctcctcctcctcctccgccaactcctcggctgcacaccagctctaagagcgagagtgaacgagagagggagggagagagtgagagcgagcgagatctttggagagatttttttttttgcctcctacttctgtcttgaagccagacaatcgacttcagctctccctcccctccctctttctccacgttctgctcccactcgctctcctgtccccttcccctcccctcccggcggaaagccccccgaaaccaacaaagctgagccgagagaaacaaacaaaacaaacacaccgggccagacaagccatcgacaaaactttgcaaaagcaaaaacaaaaaaggaaaaactaaccaacctcaaccaaccagcccccgagccacccggggcgccctcccgcgccctcttgcaccctcgcacacacaaaaggcggcgcgccggagcccgagacccggggagccgccgccgccccgccgccgcccgcagccaggggagcaggaagtccggacgcagcccccatagatatggcaatggtagtcagcacgtggcgcgacccccaggacgaggtgcccggctcacagggcagccaggcctcgcaggcgccgcccgtgcccggcccgccgcccggcgccccgcacacgccacagacgcccggccaagggggcccagccagcacgccagcccagacggcggccggtggccagggcggccctggcggcccgggtagcgacaagcagcagcagcagcaacacatcgagtgcgtggtgtgcggagacaagtcgagcggcaagcactacggccagttcacgtgcgagggctgcaagagcttcttcaagcgcagcgtgcggaggaacctgagctacacgtgccgcgccaaccggaactgtcccatcgaccagcaccatcgcaaccagtgccagtactgccgcctcaaaaagtgcctcaaagtgggcatgagacgggaagcggtgcagaggggcaggatgccgccgacccagccgacccacgggcagttcgcgctgaccaacggggatcccctcaactgccactcgtacctgtccggatatatttccctgctgttgcgcgcggagccctatcccacgtcgcgcttcggcagccaatgcatgcagcccaacaacatcatgggtatcgagaacatttgcgaactggccgcgaggatgctcttcagcgccgtcgagtgggcccggaacatccccttcttccccgacctgcagatcacggaccaggtggccctgcttcgcctcacctggagcgagctgtttgtgttgaatgcggcgcagtgctccatgcccctccacgtcgccccgctcctggccgccgccggcctgcatgcttcgcccatgtccgccgaccgggtggtcgcctttatggaccacatacggatcttccaagagcaagtggagaagctcaaggcgctgcacgttgactcagccgagtacagctgcctcaaggccatagtcctgttcacctcagatgcctgtggtctctctgatgtagcccatgtggaaagcttgcaggaaaagtctcagtgtgctttggaagaatacgttaggagccagtaccccaaccagccgacgagattcggaaagcttttgcttcgcctcccttccctccgcaccgtctcctcctcagtcatagagcaattgtttttcgtccgtttggtaggtaaaacccccatcgaaaccctcatccgggatatgttactgtccggcagcagttttaactggccgtatatggcaattcaataaataaataaaataagaagggggagtgaaacagagaaagaaaaggcaaaagactggtttgtttgcttaatttccttctgttaagaaaggatataaaaggatgttacaagtttgctaaaagaagagaggggaagaatttaatggactgtgaatttcaaaaaaaaaaaaaaagactgtcaaatgaacttttacacagaatgcattaaaaaaaaaaaaaaactccggggngntgggccaaaacactgtgnnnattnanaattggggntataanaaggggaaatanggncnttttcctttttggggngaaaattnttgggaaaanantttgggctaacaaggtggctttaggggagaattgggggagacacttcacgcagatgggggagaacaggaaaggtcttttttgttcccaaatttattaaatgggcccgggggtatagggtcccttagaaaagtgtccttttgagagactttcgggggtcccaaacccaggttaaatccggggggtcataaaaaaaaggtccggagagaaaactcgtgggggttcctgaaaaacagcggtgttcccttaacaatttttgtgtcttcggcaagattcaacaggggctgtccggggaaaatcacccttgggcgaggacttacaactctctagagagggcactccaaaggttggtgggaaacggcttacaaggtgggtggacccaattttgagggggaagtgcaggcctctattgaaggn

SEQ ID NO: 57158 - DNA, 2573 bp, Homo sapiens
cggttttctgctgaggctgagccgtttgctccagcctccgactaaactcattaagttgggagatttttttcaattggacgggtgtttttaaagtctcgtctttccagccccaaacaaggtgtaacaacgcactcttccttctaaggaatgagatgagagacaaggatcactccagacatctcctacctacggtttggggttttttttcttaaaggcgaggcttgcattcctcagcagctatgtacaaagctccctgaaaccttgtctctctaaagttagtgtgcagggttttccaaggctgagagagcctaatacatggggaagcacttccttgaggtggaagatctctcccttcacctttcctctttttccctgcaggctagtgcctactttttatcagtttgcacaatcgcttagataaacaccgaggaggagattctctttaattatcaaagacacatcttttcagggggccaacaaagcatttatttcacccgccaaactaaaggagagttattccagtttaggaggaagatgcaagcggtttgggaccttgaacaaggcaaatatggttttgcggtgcagaggggcaggatgccgccgacccagccgacccacgggcagttcgcgctgaccaacggggatcccctcaactgccactcgtacctgtccggatatatttccctgctgttgcgcgcggagccctatcccacgtcgcgcttcggcagccaatgcatgcagcccaacaacatcatgggtatcgagaacatttgcgaactggccgcgaggatgctcttcagcgccgtcgagtgggcccggaacatccccttcttccccgacctgcagatcacggaccaggtggccctgcttcgcctcacctggagcgagctgtttgtgttgaatgcggcgcagtgctccatgcccctccacgtcgccccgctcctggccgccgccggcctgcatgcttcgcccatgtccgccgaccgggtggtcgcctttatggaccacatacggatcttccaagagcaagtggagaagctcaaggcgctgcacgttgactcagccgagtacagctgcctcaaggccatagtcctgttcacctcagatgcctgtggtctctctgatgtagcccatgtggaaagcttgcaggaaaagtctcagtgtgctttggaagaatacgttaggagccagtaccccaaccagccgacgagattcggaaagcttttgcttcgcctcccttccctccgcaccgtctcctcctcagtcatagagcaattgtttttcgtccgtttggtaggtaaaacccccatcgaaaccctcatccgggatatgttactgtccggcagcagttttaactggccgtatatggcaattcaataaataaataaaataagaagggggagtgaaacagagaaagaaaaggcaaaagactggtttgtttgcttaatttccttctgttaagaaaggatataaaaggatgttacaagtttgctaaaagaagagaggggaagaatttaatggactgtgaatttcaaaaaaaaaaaaaaagactgtcaaatgaacttttacacagaatgcattaaaaaaaaaaaaaaactcctgtgtcggtcagaacaacttgctacttatcatttttgtataaaaaggaaattagtctttttctttttttggtaaatttttgaaaaatattgctaaaagtgcatttaaggagattgggagacaattagcagaatggagaaagtaagtcttttttttttccaaattattaattgtcctgtgtctatgtacctctagctgttcttttttgtacttttctggttccaaaccagtttattctgtggttctataataagttttgatataatcttggcttcttaaaaactgtgtatcattaaaatatatgttctgcaagaattaaaactgagtccatgaaaataccataggaagacataaaactttaaaaggcaactcaaagatgatggaaacgcacttacaagtggtgaccaaaatttttaggtgaagtcgagcactctaattagagaactggaggaaccacatataacacttaacttcccctaccctgcccctccccaaaagaaaccatgacaaacctagcttttaaaaaatattttaagaaagagaatgaactgtggaatttattggcagccaaggaatgtgtccaagacacatgctgaggttttgaataaaaagtgaacttttgtaatttgaattgggtcccgcttagttcttgaattgttatgaaaatcctatatctgtttgtatatttgcaaaccctttgtattataattgttgatattttccctttttaaaaaataccattgaaatcagcatgacaaaaataacactgttggcacttataggtaacgtgattgattcagtatcttagagtttacagtttgtgttttaaaaaaactgaaggttttttttttaagtgcaacatttctgtatactgtaaaagttataataactgaactgtttggtcgagtctttgtgtgttatattccaaggaaaattgaaagtattcagaaattaaaatattatttgatatctga

SEQ ID NO: 57159 - DNA, 2649 bp, Homo sapiens
ctgatactgtcgttaacagtttaatttatgactatttgcaaaatgtggaggcctgtgtggagaatgcaaatcgcctcacaaagagataaaggttcctgttatctgattcagagggagacacacagttccgaggatgccgagggaaggagtcctgtgcaaacagatcttttagttcctgtccacagacacctctacattctgtagacatgcagagtcctagatatacatatgaggaggttgcatgtgtgttctggttcttggggtggaggtggtggtggagattttcgaatatctgttttaatgactcacaatatgcatatgttaaccccagtcttgtatggggagccctgaaaggtcaggtcacaacctgaaccgcctttaccaagaagcttctcatttcaaaggcacttactgtattttcacgtatcaaaaaagaaaagtgttttcctgaagataacagggaggggggatgcttctcggagggacctgggttttaaaaaataaaggggggtaggagaaaaagggagagagaagaaaaagggggaaaagaaacagctcaaatgaacagagagatcacggtttgcatggctgcccttcaataggctaaactgacaagatcagttttaaagggccacttaaatcagtttcaaagactggagaaaaatgagtcgccctctttggggggaatctgaggctggatcgtggacgccattactcgggactgggccaggttgtccacccccaacccccaacccctatataattataagccaaactattatttacagaggaggaggggagagagtgctggtagttttggtttcttctgtttactgacttgggccagacagacccaatgcacttttgcttgggcctctcaatgacccaggctaaggactcgggcagtgaaagcctgtagcacactgagctatgttttattttaaagcaaacacttcctcaggaccatctcttgctctttcttcccccaccccgcctcccccccttaagttttcagtacatagacatttgctccaactccggttggggcagtttgacagagctctgtgcacacacctcatgtgacccaattcaaacctcttaatctgatgactgaattcttcttcttcttcttcttcttctttttcttcttcttcttcttctgtttttaaactttcttccagatgcctgtggtctctctgatgtagcccatgtggaaagcttgcaggaaaagtctcagtgtgctttggaagaatacgttaggagccagtaccccaaccagccgacgagattcggaaagcttttgcttcgcctcccttccctccgcaccgtctcctcctcagtcatagagcaattgtttttcgtccgtttggtaggtaaaacccccatcgaaaccctcatccgggatatgttactgtccggcagcagttttaactggccgtatatggcaattcaataaataaataaaataagaagggggagtgaaacagagaaagaaaaggcaaaagactggtttgtttgcttaatttccttctgttaagaaaggatataaaaggatgttacaagtttgctaaaagaagagaggggaagaatttaatggactgtgaatttcaaaaaaaaaaaaaaagactgtcaaatgaacttttacacagaatgcattaaaaaaaaaaaaaaactcctgtgtcggtcagaacaacttgctacttatcatttttgtataaaaaggaaattagtctttttctttttttggtaaatttttgaaaaatattgctaaaagtgcatttaaggagattgggagacaattagcagaatggagaaagtaagtcttttttttttccaaattattaattgtcctgtgtctatgtacctctagctgttcttttttgtacttttctggttccaaaccagtttattctgtggttctataataagttttgatataatcttggcttcttaaaaactgtgtatcattaaaatatatgttctgcaagaattaaaactgagtccatgaaaataccataggaagacataaaactttaaaaggcaactcaaagatgatggaaacgcacttacaagtggtgaccaaaatttttaggtgaagtcgagcactctaattagagaactggaggaaccacatataacacttaacttcccctaccctgcccctccccaaaagaaaccatgacaaacctagcttttaaaaaatattttaagaaagagaatgaactgtggaatttattggcagccaaggaatgtgtccaagacacatgctgaggttttgaataaaaagtgaacttttgtaatttgaattgggtcccgcttagttcttgaattgttatgaaaatcctatatctgtttgtatatttgcaaaccctttgtattataattgttgatattttccctttttaaaaaataccattgaaatcagcatgacaaaaataacactgttggcacttataggtaacgtgattgattcagtatcttagagtttacagtttgtgttttaaaaaaactgaaggttttttttttaagtgcaacatttctgtatactgtaaaagttataataactgaactgtttggtcgagtctttgtgtgttatattccaaggaaaattgaaagtattcagaaattaaaatattatttgatatctga

SEQ ID NO: 57160 - DNA, 2021 bp, Homo sapiens
ggagtgtctcctttcctccccgcagcggtgcagaggggcaggatgccgccgacccagccgacccacgggcagttcgcgctgaccaacggggatcccctcaactgccactcgtacctgtccggatatatttccctgctgttgcgcgcggagccctatcccacgtcgcgcttcggcagccaatgcatgcagcccaacaacatcatgggtatcgagaacatttgcgaactggccgcgaggatgctcttcagcgccgtcgagtgggcccggaacatccccttcttccccgacctgcagatcacggaccaggtggccctgcttcgcctcacctggagcgagctgtttgtgttgaatgcggcgcagtgctccatgcccctccacgtcgccccgctcctggccgccgccggcctgcatgcttcgcccatgtccgccgaccgggtggtcgcctttatggaccacatacggatcttccaagagcaagtggagaagctcaaggcgctgcacgttgactcagccgagtacagctgcctcaaggccatagtcctgttcacctcagatgcctgtggtctctctgatgtagcccatgtggaaagcttgcaggaaaagtctcagtgtgctttggaagaatacgttaggagccagtaccccaaccagccgacgagattcggaaagcttttgcttcgcctcccttccctccgcaccgtctcctcctcagtcatagagcaattgtttttcgtccgtttggtaggtaaaacccccatcgaaaccctcatccgggatatgttactgtccggcagcagttttaactggccgtatatggcaattcaataaataaataaaataagaagggggagtgaaacagagaaagaaaaggcaaaagactggtttgtttgcttaatttccttctgttaagaaaggatataaaaggatgttacaagtttgctaaaagaagagaggggaagaatttaatggactgtgaatttcaaaaaaaaaaaaaaagactgtcaaatgaacttttacacagaatgcattaaaaaaaaaaaaaaactcctgtgtcggtcagaacaacttgctacttatcatttttgtataaaaaggaaattagtctttttctttttttggtaaatttttgaaaaatattgctaaaagtgcatttaaggagattgggagacaattagcagaatggagaaagtaagtcttttttttttccaaattattaattgtcctgtgtctatgtacctctagctgttcttttttgtacttttctggttccaaaccagtttattctgtggttctataataagttttgatataatcttggcttcttaaaaactgtgtatcattaaaatatatgttctgcaagaattaaaactgagtccatgaaaataccataggaagacataaaactttaaaaggcaactcaaagatgatggaaacgcacttacaagtggtgaccaaaatttttaggtgaagtcgagcactctaattagagaactggaggaaccacatataacacttaacttcccctaccctgcccctccccaaaagaaaccatgacaaacctagcttttaaaaaatattttaagaaagagaatgaactgtggaatttattggcagccaaggaatgtgtccaagacacatgctgaggttttgaataaaaagtgaacttttgtaatttgaattgggtcccgcttagttcttgaattgttatgaaaatcctatatctgtttgtatatttgcaaaccctttgtattataattgttgatattttccctttttaaaaaataccattgaaatcagcatgacaaaaataacactgttggcacttataggtaacgtgattgattcagtatcttagagtttacagtttgtgttttaaaaaaactgaaggttttttttttaagtgcaacatttctgtatactgtaaaagttataataactgaactgtttggtcgagtctttgtgtgttatattccaaggaaaattgaaagtattcagaaattaaaatattatttgatatctga

SEQ ID NO: 57161 - DNA, 4024 bp, Homo sapiens
  misc_feature (912)..(912): n is a, c, g, or t
  misc_feature (931)..(931): n is a, c, g, or t
cgcggccgccatggcggggccgccgcagtccggccaatgacggcgagggggcggcgcgcgcgcgcctggccaggccaaccccggctgctgccttataaggcgcgccgtcgccatggcaacgtgcgctaagttgcagcagtcgtgtcaaagttcactatatagagagctcagtgagctgatcgcggagaagccacttctgccagccccggcgcctataaatcgcattccctcccgcgcccccctttttagcatatttgatcactttgattctctgttcttttctctccgcggtgtgtgtgtgcgtgcgcgcgtgtgtgttttcttcttctcctcctcctctccccgagttgcctcctttctccgggtgccgtactgccttttttcccctctttcattctttctctccgtctttttctcccccctctgcgcacgaaggatgtgcttctaggtggtgatctgccctcctctctctcttttatcatttctcccccgccgccggcgagttgactctttccctatgtgtgtgaggcggcggcggcagcagcagcagcagcggctccggcggcggcagcagcggcagcagcgacttcagcggcggcggcggcgctagacgcagcggctccgggcccgacccggcggcttcggcggcggctccggcggcagcggcggcccgggcggcccgcagggaacggcgagcggcctccacccacgactgcgggcggcggcggccggagagagcgaggcgcgcgccggacgcccggggcaggcggcggcggcggcggcccagcgccaggacgacgccgcgcagcgcccgacgcggaccactttcatgctgattcccccggacccgggcagcgctccggccactccgcggcgccggcctccgccccggcctgcctggctccctgggcngcccgcacccggcgcctcngatctcctagtcctcctgatttcgatggctttcctgaatggctgactgtgggctgccctggacttggcccccggacagtcgcctctcctcctcctctacctcctccttcaccaccacctcctcttcctcctcctcctcctcctcctcctccgccaactcctcggctgcacaccagctctaagagcgagagtgaacgagagagggagggagagagtgagagcgagcgagatctttggagagatttttttttttgcctcctacttctgtcttgaagccagacaatcgacttcagctctccctcccctccctctttctccacgttctgctcccactcgctctcctgtccccttcccctcccctcccggcggaaagccccccgaaaccaacaaagctgagccgagagaaacaaacaaaacaaacacaccgggccagacaagccatcgacaaaactttgcaaaagcaaaaacaaaaaaggaaaaactaaccaacctcaaccaaccagcccccgagccacccggggcgccctcccgcgccctcttgcaccctcgcacacacaaaaggcggcgcgccggagcccgagacccggggagccgccgccgccccgccgccgcccgcagccaggggagcaggaagtccggacgcagcccccatagatatggcaatggtagtcagcacgtggcgcgacccccaggacgaggtgcccggctcacagggcagccaggcctcgcaggcgccgcccgtgcccggcccgccgcccggcgccccgcacacgccacagacgcccggccaagggggcccagccagcacgccagcccagacggcggccggtggccagggcggccctggcggcccgggtagcgacaagcagcagcagcagcaacacatcgagtgcgtggtgtgcggagacaagtcgagcggcaagcactacggccagttcacgtgcgagggctgcaagagcttcttcaagcgcagcgtgcggaggaacctgagctacacgtgccgcgccaaccggaactgtcccatcgaccagcaccatcgcaaccagtgccagtactgccgcctcaaaaagtgcctcaaagtgggcatgagacgggaagcggtgcagaggggcaggatgccgccgacccagccgacccacgggcagttcgcgctgaccaacggggatcccctcaactgccactcgtacctgtccggatatatttccctgctgttgcgcgcggagccctatcccacgtcgcgcttcggcagccaatgcatgcagcccaacaacatcatgggtatcgagaacatttgcgaactggccgcgaggatgctcttcagcgccgtcgagtgggcccggaacatccccttcttccccgacctgcagatcacggaccaggtggccctgcttcgcctcacctggagcgagctgtttgtgttgaatgcggcgcagtgctccatgcccctccacgtcgccccgctcctggccgccgccggcctgcatgcttcgcccatgtccgccgaccgggtggtcgcctttatggaccacatacggatcttccaagagcaagtggagaagctcaaggcgctgcacgttgactcagccgagtacagctgcctcaaggccatagtcctgttcacctcagatgcctgtggtctctctgatgtagcccatgtggaaagcttgcaggaaaagtctcagtgtgctttggaagaatacgttaggagccagtaccccaaccagccgacgagattcggaaagcttttgcttcgcctcccttccctccgcaccgtctcctcctcagtcatagagcaattgtttttcgtccgtttggtaggtaaaacccccatcgaaaccctcatccgggatatgttactgtccggcagcagttttaactggccgtatatggcaattcaataaataaataaaataagaagggggagtgaaacagagaaagaaaaggcaaaagactggtttgtttgcttaatttccttctgttaagaaaggatataaaaggatgttacaagtttgctaaaagaagagaggggaagaatttaatggactgtgaatttcaaaaaaaaaaaaaaagactgtcaaatgaacttttacacagaatgcattaaaaaaaaaaaaaaactcctgtgtcggtcagaacaacttgctacttatcatttttgtataaaaaggaaattagtctttttctttttttggtaaatttttgaaaaatattgctaaaagtgcatttaaggagattgggagacaattagcagaatggagaaagtaagtcttttttttttccaaattattaattgtcctgtgtctatgtacctctagctgttcttttttgtacttttctggttccaaaccagtttattctgtggttctataataagttttgatataatcttggcttcttaaaaactgtgtatcattaaaatatatgttctgcaagaattaaaactgagtccatgaaaataccataggaagacataaaactttaaaaggcaactcaaagatgatggaaacgcacttacaagtggtgaccaaaatttttaggtgaagtcgagcactctaattagagaactggaggaaccacatataacacttaacttcccctaccctgcccctccccaaaagaaaccatgacaaacctagcttttaaaaaatattttaagaaagagaatgaactgtggaatttattggcagccaaggaatgtgtccaagacacatgctgaggttttgaataaaaagtgaacttttgtaatttgaattgggtcccgcttagttcttgaattgttatgaaaatcctatatctgtttgtatatttgcaaaccctttgtattataattgttgatattttccctttttaaaaaataccattgaaatcagcatgacaaaaataacactgttggcacttataggtaacgtgattgattcagtatcttagagtttacagtttgtgttttaaaaaaactgaaggttttttttttaagtgcaacatttctgtatactgtaaaagttataataactgaactgtttggtcgagtctttgtgtgttatattccaaggaaaattgaaagtattcagaaattaaaatattatttgatatctga

SEQ ID NO: 57162 - DNA, 3393 bp, Homo sapiens
cggttttctgctgaggctgagccgtttgctccagcctccgactaaactcattaagttgggagatttttttcaattggacgggtgtttttaaagtctcgtctttccagccccaaacaaggtgtaacaacgcactcttccttctaaggaatgagatgagagacaaggatcactccagacatctcctacctacggtttggggttttttttcttaaaggcgaggcttgcattcctcagcagctatgtacaaagctccctgaaaccttgtctctctaaagttagtgtgcagggttttccaaggctgagagagcctaatacatggggaagcacttccttgaggtggaagatctctcccttcacctttcctctttttccctgcaggctagtgcctactttttatcagtttgcacaatcgcttagataaacaccgaggaggagattctctttaattatcaaagacacatcttttcagggggccaacaaagcatttatttcacccgccaaactaaaggagagttattccagtttaggaggaagatgcaagcggtttgggaccttgaacaaggcaaatatggttttggtatgtttacttacagtattttttctctctctctttctccacgttctgctcccactcgctctcctgtccccttcccctcccctcccggcggaaagccccccgaaaccaacaaagctgagccgagagaaacaaacaaaacaaacacaccgggccagacaagccatcgacaaaactttgcaaaagcaaaaacaaaaaaggaaaaactaaccaacctcaaccaaccagcccccgagccacccggggcgccctcccgcgccctcttgcaccctcgcacacacaaaaggcggcgcgccggagcccgagacccggggagccgccgccgccccgccgccgcccgcagccaggggagcaggaagtccggacgcagcccccatagatatggcaatggtagtcagcacgtggcgcgacccccaggacgaggtgcccggctcacagggcagccaggcctcgcaggcgccgcccgtgcccggcccgccgcccggcgccccgcacacgccacagacgcccggccaagggggcccagccagcacgccagcccagacggcggccggtggccagggcggccctggcggcccgggtagcgacaagcagcagcagcagcaacacatcgagtgcgtggtgtgcggagacaagtcgagcggcaagcactacggccagttcacgtgcgagggctgcaagagcttcttcaagcgcagcgtgcggaggaacctgagctacacgtgccgcgccaaccggaactgtcccatcgaccagcaccatcgcaaccagtgccagtactgccgcctcaaaaagtgcctcaaagtgggcatgagacgggaagcggtgcagaggggcaggatgccgccgacccagccgacccacgggcagttcgcgctgaccaacggggatcccctcaactgccactcgtacctgtccggatatatttccctgctgttgcgcgcggagccctatcccacgtcgcgcttcggcagccaatgcatgcagcccaacaacatcatgggtatcgagaacatttgcgaactggccgcgaggatgctcttcagcgccgtcgagtgggcccggaacatccccttcttccccgacctgcagatcacggaccaggtggccctgcttcgcctcacctggagcgagctgtttgtgttgaatgcggcgcagtgctccatgcccctccacgtcgccccgctcctggccgccgccggcctgcatgcttcgcccatgtccgccgaccgggtggtcgcctttatggaccacatacggatcttccaagagcaagtggagaagctcaaggcgctgcacgttgactcagccgagtacagctgcctcaaggccatagtcctgttcacctcagatgcctgtggtctctctgatgtagcccatgtggaaagcttgcaggaaaagtctcagtgtgctttggaagaatacgttaggagccagtaccccaaccagccgacgagattcggaaagcttttgcttcgcctcccttccctccgcaccgtctcctcctcagtcatagagcaattgtttttcgtccgtttggtaggtaaaacccccatcgaaaccctcatccgggatatgttactgtccggcagcagttttaactggccgtatatggcaattcaataaataaataaaataagaagggggagtgaaacagagaaagaaaaggcaaaagactggtttgtttgcttaatttccttctgttaagaaaggatataaaaggatgttacaagtttgctaaaagaagagaggggaagaatttaatggactgtgaatttcaaaaaaaaaaaaaaagactgtcaaatgaacttttacacagaatgcattaaaaaaaaaaaaaaactcctgtgtcggtcagaacaacttgctacttatcatttttgtataaaaaggaaattagtctttttctttttttggtaaatttttgaaaaatattgctaaaagtgcatttaaggagattgggagacaattagcagaatggagaaagtaagtcttttttttttccaaattattaattgtcctgtgtctatgtacctctagctgttcttttttgtacttttctggttccaaaccagtttattctgtggttctataataagttttgatataatcttggcttcttaaaaactgtgtatcattaaaatatatgttctgcaagaattaaaactgagtccatgaaaataccataggaagacataaaactttaaaaggcaactcaaagatgatggaaacgcacttacaagtggtgaccaaaatttttaggtgaagtcgagcactctaattagagaactggaggaaccacatataacacttaacttcccctaccctgcccctccccaaaagaaaccatgacaaacctagcttttaaaaaatattttaagaaagagaatgaactgtggaatttattggcagccaaggaatgtgtccaagacacatgctgaggttttgaataaaaagtgaacttttgtaatttgaattgggtcccgcttagttcttgaattgttatgaaaatcctatatctgtttgtatatttgcaaaccctttgtattataattgttgatattttccctttttaaaaaataccattgaaatcagcatgacaaaaataacactgttggcacttataggtaacgtgattgattcagtatcttagagtttacagtttgtgttttaaaaaaactgaaggttttttttttaagtgcaacatttctgtatactgtaaaagttataataactgaactgtttggtcgagtctttgtgtgttatattccaaggaaaattgaaagtattcagaaattaaaatattatttgatatctga

SEQ ID NO: 57163 - DNA, 3040 bp, Homo sapiens
  misc_feature (912)..(912): n is a, c, g, or t
  misc_feature (931)..(931): n is a, c, g, or t
cgcggccgccatggcggggccgccgcagtccggccaatgacggcgagggggcggcgcgcgcgcgcctggccaggccaaccccggctgctgccttataaggcgcgccgtcgccatggcaacgtgcgctaagttgcagcagtcgtgtcaaagttcactatatagagagctcagtgagctgatcgcggagaagccacttctgccagccccggcgcctataaatcgcattccctcccgcgcccccctttttagcatatttgatcactttgattctctgttcttttctctccgcggtgtgtgtgtgcgtgcgcgcgtgtgtgttttcttcttctcctcctcctctccccgagttgcctcctttctccgggtgccgtactgccttttttcccctctttcattctttctctccgtctttttctcccccctctgcgcacgaaggatgtgcttctaggtggtgatctgccctcctctctctcttttatcatttctcccccgccgccggcgagttgactctttccctatgtgtgtgaggcggcggcggcagcagcagcagcagcggctccggcggcggcagcagcggcagcagcgacttcagcggcggcggcggcgctagacgcagcggctccgggcccgacccggcggcttcggcggcggctccggcggcagcggcggcccgggcggcccgcagggaacggcgagcggcctccacccacgactgcgggcggcggcggccggagagagcgaggcgcgcgccggacgcccggggcaggcggcggcggcggcggcccagcgccaggacgacgccgcgcagcgcccgacgcggaccactttcatgctgattcccccggacccgggcagcgctccggccactccgcggcgccggcctccgccccggcctgcctggctccctgggcngcccgcacccggcgcctcngatctcctagtcctcctgatttcgatggctttcctgaatggctgactgtgggctgccctggacttggcccccggacagtcgcctctcctcctcctctacctcctccttcaccaccacctcctcttcctcctcctcctcctcctcctcctccgccaactcctcggctgcacaccagctctaagagcgagagtgaacgagagagggagggagagagtgagagcgagcgagatctttggagagatttttttttttgcctcctacttctgtcttgaagccagacaatcgacttcagctctccctcccctccctctttctccacgttctgctcccactcgctctcctgtccccttcccctcccctcccggcggaaagccccccgaaaccaacaaagctgagccgagagaaacaaacaaaacaaacacaccgggccagacaagccatcgacaaaactttgcaaaagcaaaaacaaaaaaggaaaaactaaccaacctcaaccaaccagcccccgagccacccggggcgccctcccgcgccctcttgcaccctcgcacacacaaaaggcggcgcgccggagcccgagacccggggagccgccgccgccccgccgccgcccgcagccaggggagcaggaagtccggacgcagcccccatagatatggcaatggtagtcagcacgtggcgcgacccccaggacgaggtgcccggctcacagggcagccaggcctcgcaggcgccgcccgtgcccggcccgccgcccggcgccccgcacacgccacagacgcccggccaagggggcccagccagcacgccagcccagacggcggccggtggccagggcggccctggcggcccgggtagcgacaagcagcagcagcagcaacacatcgagtgcgtggtgtgcggagacaagtcgagcggcaagcactacggccagttcacgtgcgagggctgcaagagcttcttcaagcgcagcgtgcggaggaacctgagctacacgtgccgcgccaaccggaactgtcccatcgaccagcaccatcgcaaccagtgccagtactgccgcctcaaaaagtgcctcaaagtgggcatgagacgggaagcggtgcagaggggcaggatgccgccgacccagccgacccacgggcagttcgcgctgaccaacggggatcccctcaactgccactcgtacctgtccggatatatttccctgctgttgcgcgcggagccctatcccacgtcgcgcttcggcagccaatgcatgcagcccaacaacatcatgggtatcgagaacatttgcgaactggccgcgaggatgctcttcagcgccgtcgagtgggcccggaacatccccttcttccccgacctgcagatcacggaccaggtggccctgcttcgcctcacctggagcgagctgtttgtgttgaatgcggcgcagtgctccatgcccctccacgtcgccccgctcctggccgccgccggcctgcatgcttcgcccatgtccgccgaccgggtggtcgcctttatggaccacatacggatcttccaagagcaagtggagaagctcaaggcgctgcacgttgactcagccgagtacagctgcctcaaggccatagtcctgttcacctcagatgcctgtggtctctctgatgtagcccatgtggaaagcttgcaggaaaagtctcagtgtgctttggaagaatacgttaggagccagtaccccaaccagccgacgagattcggaaagcttttgcttcgcctcccttccctccgcaccgtctcctcctcagtcatagagcaattgtttttcgtccgtttggtaggtaaaacccccatcgaaaccctcatccgggatatgttactgtccggcagcagttttaactggccgtatatggcaattcaataaataaataaaataagaagggggagtgaaacagagaaagaaaaggcaaaagactggtttgtttgcttaatttccttctgttaagaaaggatataaaaggatgttacaagtttgctaaaagaagagaggggaagaatttaatggactgtgaatttcaaaaaaaaaaaaggaacctcaagccgaattcctacagcccgagggatccacagttc

SEQ ID NO: 57164 - DNA, 3459 bp, Homo sapiens
  misc_feature (912)..(912): n is a, c, g, or t
  misc_feature (931)..(931): n is a, c, g, or t
cgcggccgccatggcggggccgccgcagtccggccaatgacggcgagggggcggcgcgcgcgcgcctggccaggccaaccccggctgctgccttataaggcgcgccgtcgccatggcaacgtgcgctaagttgcagcagtcgtgtcaaagttcactatatagagagctcagtgagctgatcgcggagaagccacttctgccagccccggcgcctataaatcgcattccctcccgcgcccccctttttagcatatttgatcactttgattctctgttcttttctctccgcggtgtgtgtgtgcgtgcgcgcgtgtgtgttttcttcttctcctcctcctctccccgagttgcctcctttctccgggtgccgtactgccttttttcccctctttcattctttctctccgtctttttctcccccctctgcgcacgaaggatgtgcttctaggtggtgatctgccctcctctctctcttttatcatttctcccccgccgccggcgagttgactctttccctatgtgtgtgaggcggcggcggcagcagcagcagcagcggctccggcggcggcagcagcggcagcagcgacttcagcggcggcggcggcgctagacgcagcggctccgggcccgacccggcggcttcggcggcggctccggcggcagcggcggcccgggcggcccgcagggaacggcgagcggcctccacccacgactgcgggcggcggcggccggagagagcgaggcgcgcgccggacgcccggggcaggcggcggcggcggcggcccagcgccaggacgacgccgcgcagcgcccgacgcggaccactttcatgctgattcccccggacccgggcagcgctccggccactccgcggcgccggcctccgccccggcctgcctggctccctgggcngcccgcacccggcgcctcngatctcctagtcctcctgatttcgatggctttcctgaatggctgactgtgggctgccctggacttggcccccggacagtcgcctctcctcctcctctacctcctccttcaccaccacctcctcttcctcctcctcctcctcctcctcctccgccaactcctcggctgcacaccagctctaagagcgagagtgaacgagagagggagggagagagtgagagcgagcgagatctttggagagatttttttttttgcctcctacttctgtcttgaagccagacaatcgacttcagctctccctcccctccctctttctccacgttctgctcccactcgctctcctgtccccttcccctcccctcccggcggaaagccccccgaaaccaacaaagctgagccgagagaaacaaacaaaacaaacacaccgggccagacaagccatcgacaaaactttgcaaaagcaaaaacaaaaaaggaaaaactaaccaacctcaaccaaccagcccccgagccacccggggcgccctcccgcgccctcttgcaccctcgcacacacaaaaggcggcgcgccggagcccgagacccggggagccgccgccgccccgccgccgcccgcagccaggggagcaggaagtccggacgcagcccccatagatatggcaatggtagtcagcacgtggcgcgacccccaggacgaggtgcccggctcacagggcagccaggcctcgcaggcgccgcccgtgcccggcccgccgcccggcgccccgcacacgccacagacgcccggccaagggggcccagccagcacgccagcccagacggcggccggtggccagggcggccctggcggcccgggtagcgacaagcagcagcagcagcaacacatcgagtgcgtggtgtgcggagacaagtcgagcggcaagcactacggccagttcacgtgcgagggctgcaagagcttcttcaagcgcagcgtgcggaggaacctgagctacacgtgccgcgccaaccggaactgtcccatcgaccagcaccatcgcaaccagtgccagtactgccgcctcaaaaagtgcctcaaagtgggcatgagacgggaagcggtgcagaggggcaggatgccgccgacccagccgacccacgggcagttcgcgctgaccaacggggatcccctcaactgccactcgtacctgtccggatatatttccctgctgttgcgcgcggagccctatcccacgtcgcgcttcggcagccaatgcatgcagcccaacaacatcatgggtatcgagaacatttgcgaactggccgcgaggatgctcttcagcgccgtcgagtgggcccggaacatccccttcttccccgacctgcagatcacggaccaggtggccctgcttcgcctcacctggagcgagctgtttgtgttgaatgcggcgcagtgctccatgcccctccacgtcgccccgctcctggccgccgccggcctgcatgcttcgcccatgtccgccgaccgggtggtcgcctttatggaccacatacggatcttccaagagcaagtggagaagctcaaggcgctgcacgttgactcagccgagtacagctgcctcaaggccatagtcctgttcacctcagatgcctgtggtctctctgatgtagcccatgtggaaagcttgcaggaaaagtctcagtgtgctttggaagaatacgttaggagccagtaccccaaccagccgacgagattcggaaagcttttgcttcgcctcccttccctccgcaccgtctcctcctcagtcatagagcaattgtttttcgtccgttgtggcttacgtaattctgacttttgaaatctcactgctcgtgaacaaaatctacactgcaactttatttcttgcaccgtgcctggacttcagccacatcctgcactacattcgcttacaggtgaagacagtgacaagacgaacgacaccattccaaaggtgacacgtgtgtaatactcttctataatgactattgtatcatatcccctctaccggacaaaattctcttggatcctctgcaccacaagagggaacatttctaccaacagcacaggaaagttccctgccaaaacacttaagatactagtaaaaccttacgatagtgctaatgtctcatcgcatgacagcacagaccacgcgagtgacctcggaacaactcactgtggaacactgtctaacaaggcaatcagcgcgcacacgggcccaacagcacaatagatggacaagaggaaacacacgactcagcaccacagaggacacccaacccgaagtgaatcaccaccgagaccaaccagatggtgccacgcacacgccctcaaacacgcctctaggccacccaacctgaccacggccacaaagcgcaccacgcagaaacaacacgcccacagaagctcgagcgcgacacagccccacaaccagaactcacgcacgacaactaccaccgacaaccaaaacactcgcgaccgagcatcacaacgacagcaacatacacaagcga

SEQ ID NO: 57165 - DNA, 638 bp, Homo sapiens
gcaccgacttcagtgtgcatgttccttggacacctgcctcagtgtgcatgttcactgggcatcttcccttcgacccctttgcccacgtggtgaccgctggggagctgtgagagtgtgaggggcacgttccagccgtctggactctttctctcctactgagacgcagcctataggtccgcaggccagtcctcccaggaactgaaatagtgaaatatgagttggcgaggaagatcaacatataggcctaggccaagaagaagtttacagcctcctgagctgattggggctatgcttgaacccactgatgaagagcctaaagaagagaaaccacccactaaaagtcggaatcctacacctgatcagaagagagaagatgatcagggtgcagctgagattcaagtgcctgacctggaagccgatctccaggagctatgtcagacaaagactggggatggatgtgaaggtggtactgatgtcaaggggaagattctaccaaaagcagagcactttaaaatgccagaagcaggtgaagggaaatcacaggtttaaaggaagataagctgaaacaacacaaactgtttttatattagatattttactttaaaatatcttaataaagttttaagcttttctccaaa

SEQ ID NO: 57166 - DNA, 1156 bp, Homo sapiens
ctgaaagtgaatacgttcttaaactctaatattttcggaatatagatgaaatggttgataagctaggaatgcatgcattattaaatatatcccagtagtacctgaatatctattcatcacaaagactgtgcatgaacttgtgaaatttgctagttgtcccttgataatatttacttttagaaataaatatttagttattctagatgtcttcctctacatctccatttccctttccgtttcttttttttcgtgccatactgttcatgatatatacctctttcatattttgatatcaataatgataatgatagattaaaagtaatgcgatcatataattaattatacaaaggggaattttttcaagtgtaaaaagagatatttgtattaacatcaggactataggtgaaaactggggacagatgtttaccataccttaatatctacagaagggtaaactaacccaaagcaacatttttgcactttggcacaatagaggaaaaaacaaatgcaatactgtcctttctattcaccacgcatatgcagcttctaatgtgacattaactcttttcttaaaagatagttttcatactatttccagggagcctatttgacatccagaccatagtttcaagccaaaatattaaattgtacattttttataaattcctttgtttcttagtttttttgtgtgtatttgttatatttttagtaaaattatacacaatttttgctttatacattaaatccctttttaagagtttcacttgatttaatgtgttctgacctcggactgccttttgggtttcccttgtagcacctagaaagcagggtgtgtttaaaaaatattaataatgtatatgtttggaagtttatctcccaaagtctcccacagaggtctaattgaatgtaagccagagggtgactcttgggtttatggtcttagtccactgtacgaaacaaaaactttggtgtcatttgcatatcttaatgtgatctaaatacagttctgctagtaatgttccacctgttatgtttctattacaggtgaagggaaatcacaggtttaaaggaagataagctgaaacaacacaaactgtttttatattagatattttactttaaaatatcttaataaagttttaagcttttctccaaa

SEQ ID NO: 57167 - DNA, 652 bp, Homo sapiens
aggctagtagaggctgggggtgtgaatcggcagagggttctggacacctgcctcagtgtgcatgttcactgggcatcttcccttcgacccctttgcccacgtggtgaccgctggggagctgtgagagtgtgaggggcacgttccagccgtctggactctttctctcctactgagacgcagcctataggtccgcaggccagtcctcccaggaactgaaatagtgaaatatgagttggcgaggaagatcaacatataggcctaggccaagaagaagtttacagcctcctgagctgattggggctatgcttgaacccactgatgaagagcctaaagaagagaaaccacccactaaaagtcggaatcctacacctgatcagaagagagaagatgatcagggtgcagctgagattcaagtgcctgacctggaagccgatctccaggagctatgtcagacaaagactggggatggatgtgaaggtggtactgatgtcaaggggaagattctaccaaaagcagagcactttaaaatgccagaagcaggtgaagggaaatcacaggtttaaaggaagataagctgaaacaacacaaactgtttttatattagatattttactttaaaatatcttaataaagttttaagcttttctccaaa

SEQ ID NO: 57168 - DNA, 1031 bp, Homo sapiens
  misc_feature (684)..(684): n is a, c, g, or t
  misc_feature (693)..(693): n is a, c, g, or t
  misc_feature (697)..(697): n is a, c, g, or t
  misc_feature (706)..(707): n is a, c, g, or t
  misc_feature (710)..(710): n is a, c, g, or t
  misc_feature (713)..(713): n is a, c, g, or t
  misc_feature (717)..(717): n is a, c, g, or t
  misc_feature (719)..(720): n is a, c, g, or t
  misc_feature (729)..(730): n is a, c, g, or t
  misc_feature (737)..(737): n is a, c, g, or t
  misc_feature (744)..(745): n is a, c, g, or t
  misc_feature (749)..(749): n is a, c, g, or t
  misc_feature (759)..(759): n is a, c, g, or t
  misc_feature (788)..(788): n is a, c, g, or t
  misc_feature (792)..(795): n is a, c, g, or t
  misc_feature (798)..(798): n is a, c, g, or t
  misc_feature (803)..(803): n is a, c, g, or t
gcaccgacttcagtgtgcatgttccttggacacctgcctcagtgtgcatgttcactgggcatcttcccttcgacccctttgcccacgtggtgaccgctggggagctgtgagagtgtgaggggcacgttccagccgtctggactctttctctcctactgagacgcagcctataggtccgcaggccagtcctcccaggaactgaaatagtgaaatatgagttggcgaggaagatcaacatataggcctaggccaagaagaagtttacagcctcctgagctgattggggctatgcttgaacccactgatgaagagcctaaagaagagaaaccacccactaaaagtcggaatcctacacctgatcagaagagagaagatgatcagggtgcagctgagattcaagtgcctgacctggaagccgatctccaggagctatgtcagacaaagactggggatggatgtgaaggtggtactgatgtcaaggggaagattctaccaaaagcagagcactttaaaatgccagaagcaggtgaagggaaatcacaggtttaaaggaagataagctgaaacaacacaaactgtttttatattagatattttactttaaaatatcttaataaagttttaagcttttctccaaaaaaaaaaaaaaaaaaaaaaaaaacgggggttttttggggggggggnaaaaggggnttgnagggggggnnagnggntccngnncccattttnngtcacgnggggaanntggnggccccccanaagaggggggataaattgaaaaggcgggntacnnnnttnggacngctcgccaccggggcacaaacaccccagtcgggcgtattgaaccaggaacacaagaccataaagcacgcagacaaccacgaacaccagggaacagcgggaacacacaatgaccgagcggtcacgcgacacagagtcgtacactcggccaacgacagcaacactaaacgggacacaaaccgcatgtctcaacacgagacgacagcatgacacaaacagcggtcgaagcc

SEQ ID NO: 57169 - DNA, 471 bp, Homo sapiens
aggagaaatcgcgaccaagaatttcatatttggcaaagctaagcttcataagagaaggagaaataagatccttttaagaccaagcaaatgctaagagtatttgttaccaccagacttgctttaaaagatgtcttgaagggagtgctagatatagaaaggaaagcctgtgttacccaacccatcacaaaaacacatttaagaacgtagactagtaatgctataaagcagcaacacaatcaagtctgtgtgataaccagctaacaacatgatgatgaaatcagacctgcacataccaatattaaccttgaatgcaaagcagctgaaagccctaattaaaaggcacagaatgacagcttggataaagaagcaagatcgaactgtatcctctctacaggactcatctcacatgcaatgacactcataggctataagtaaagggatggagaaaaattgcccaagcaaatggaaaac

SEQ ID NO: 57170 - DNA, 691 bp, Homo sapiens
cactgcattctccctcccgcaagcacacagatcctctcttctctccatgtagtcactacttggggaaggggaatgggtggtatcagcaattcaagactgatttcttttccatcttcagcgcccctttccttgatatgatgttaaaaccagaacaagaaacagatcgaggaagaggcagagtaacaacagccgggaagaagatacagttttgggccaagggaaaagagcttcattagcatatttgtcaagcagatgtgaaatgaggcagaaaactactagaacaattggagaaatctagaatatgaagttccagcacaaacttagatggcttctaactatgtgaaggtttgaacagcagcttctgacatagaaaataaccacagcaaaaagaagcactaacaagtgacagatgtggttgactcatctccttctcccttcgactctctaatgagcaattaaatagcctgaaacagaacaatcaagaggtctggcaaatccacacactagatgactgccttttcacttaactgtgtcctcatatggaagagaggagaaaagaggagaggaggggagaggcaagttctcttgtgtttcttcttacaaagcacaaatgccattatgagggccccaccctcaggacctcatctaatcctaatttcctcccaaaattaaatctcaaatgtcatcacat

SEQ ID NO: 57171 - DNA, 356 bp, Homo sapiens
ataattagagcttgatcttgttgataattatgaatacctgtaaaatgttctctaaaagtccctgatttctcttattttctcaaattaaggataagcttagaattcggttttatagactatatctgcaaggcgatataaaaaggatttgttgacaaatagttccttaaagaatattcccaaagaataaactttggaaggccaaggtgggcggatcacttgagctcaggagttccagaccagcctgggcaacactggaaaccatgcccggctaatttttgtatttttagtagagacggggtttccccatgttggccaggctggtctcaaactcctgacctcaggtgatccacctgcgt

SEQ ID NO: 57172 - DNA, 485 bp, Homo sapiens
ttcccgggtcgactactattactaaattcgcggccgcgtcggcaaagaaagaaagaaagaaagaaagaaagaaagaaagaaagaaagaaagaaagaataaaaaaaaatgataacatggcaaccaccaaactcccttaaaaacaaacattggtgacatggccaattaagtatcagtgagcctcctatctgggacttatctgttcctattgtttcaaaaccatttcatgtacactactgaggtaagtttataacttgaaatgtgaactttttttttttttagtgttaagaacaaactatataaatgtaaaaaaaaagttttagagttctgttttcaaacattgctagtggtttagttaactttagctgctttatatttgaaaagcttttatttagatcttgctccatttacagtacattcttaggatgtatgtagtaaataaagctttctttaaagcaatcgcaaaaaagtcgacgcggccgcgaat

SEQ ID NO: 57173 - DNA, 4440 bp, Homo sapiens
ggaggagtgaggtcaattgccctttagtcccaggactaaccggaagcttctgcaacaggaggacattgaaaataagatggaacccatccacataaggatttgcctcaaagggcactgcaaaaattgaacagaggaatcccaaggaagctgcctgaatttgcctgtatactctcgttctgcgacttataaaggaccagacaaatcaaattagtggttttggtttccgccagctgtggatgcctttgacattatgaccgcagaggattccaccgcagccatgagcagtgactcggccgccgggtcctcggccaaggtgcccgagggcgtggcgggcgcgcccaacgaggcagcactgctggcgctgatggagcgcacgggctacagcatggtgcaagagaacgggcagcgcaagtacggcggcccaccgcccggctgggagggcccgcacccgcagcgtggctgcgaggtcttcgtgggcaagatcccgcgcgacgtgtacgaggacgagctggtgcccgtgttcgaggccgtgggccgcatctacgagctgcgcctcatgatggactttgacggcaagaaccgcggctacgccttcgtcatgtactgccacaagcacgaggccaagcgcgcagtgcgtgagctcaacaactacgagatccgcccgggccgcctgctcggcgtgtgctgcagcgtggacaactgccgcctcttcatcggcgggatccccaagatgaagaagcgcgaggaaatcctggaggagattgccaaggtcaccgagggcgtgctggacgtgatcgtctacgccagcgcggccgacaagatgaagaaccgcggcttcgccttcgtggagtacgagagccaccgcgcggctgccatggctcgccgcaagctcatgcctggccgcatccagctgtggggccaccagatcgccgtggactgggccgagcctgagatcgacgtggacgaggacgtgatggagaccgtgaagatcctctacgtgcgcaacctcatgatcgagaccaccgaggacaccatcaagaagagcttcggccagttcaaccccggctgcgtggagcgcgtcaagaagatccgcgactacgccttcgtgcacttcaccagccgcgaggatgccgtgcatgccatgaacaacctcaacggcactgagctggagggctcgtgcctggaggtcacgctggccaagcccgtggacaaggagcagtactcgcgctaccagaaggcagccaggggcggcggcgcggctgaggcagcgcagcagcccagctacgtgtactcctgcgacccctacacactggcctactacggctacccctacaacgcgctcattgggcccaacagggactactttgtgaaagtagccatccctgccattggggctcagtattccatgtttccagcagctccagcccctaaaatgattgaagatggcaaaatccacacagtggagcacatgatcagccccattgctgtgcagccagacccagccagtgctgctgccgccgcagccgcggccgcagccgccgcagccgctgtcattcccactgtgtcgacgccaccacctttccagggccgcccaataactccagtatacacggtggctccaaacgttcagagaattcctactgccgggatctacggggccagttacgtgccatttgctgctccagctacagccacgatcgccacactacagaagaacgcggcagccgcggccgccgtgtatggaggatacgcaggctacatacctcaggccttccctgctgctgccattcaggtccccatccccgacgtctaccagacatactgaggctggtgaccagcacgaagacagaccacacaaacaccactgaaggaacgcttgactatttatgaagaaggaacatgttggattcacacatgcaacctgaaagtgaagaatgttagcagatttatttctgaattattttatatacatgaagttttcactagttttttaagactattttcaacttagcatgcctacgttcatacatttccaaaagacttgcaatggttcgtgccttcattccatcttttaaaaatttgtatgctgtactacatttgtatagaggtttttgttgttgtttttttaaggatatattttcagtatgaaggttattttcttaacttctgcactccagagatttctattttgtagtaccttcaataatatatcaactatatattaaaaaagcacacttgaggagctagggaactattttgaaaaatatatacaatatttaaagatacaaacagtagtgcttaaaaatactacataaagcattattttaaaggttatactggaaagtgcaattttaaaatgagtaaaacctctgtatttctgctggcattaagggttgatggtgttaccatgtatcatcatggcggtactattttttaaaagaaattaaacactggatctctccttaagccaacattgaaaagacttgccgcacttctgagtccaaacactggaaagctctcctttgccaccgttagccggggctcattctccatgtgccttagccttaaacatgcccccactcccacatctctcaccctgtcccctcctccccagattcccaatcccaccgcaatgtttggcaagcctaggactgataagtagctctgatagaggagctggtggcttttatacttcttcctgggtttttgttggggtttgttgtttcgttgttttttgttttttttttgtttggttggggaagtattgtcttctacgtgtgctattttcagtagcagagtaagcacaaggttttaatcgagttgcataagacacctttgcatagctatttaattgcccaatgtaaaactttaatgccatttctaatgcttttattcatttttgaagtatgagtttgtagggacaaagaatgtatgttatcgtagacaagacccccagagactcttttcagcagaaagttatgcttctagttgccttaccatgtttcttgcaaaactgtccatggtcctcaagggtgttggaaacattatgtttattaaatgggcctctcttcctttgctgtgcacttgatgggtgaactggattggggtgtgcacatccaggaggaggaggagagacctgtagaagtttaaagatagtttgtaaatatcttctaatgcttgtttttagtccttttatgttggagaagttcatggtatgtagtttaatgcaaaatgaaaccattttatttcaatgttattaaaaaggtttgttttattaggaagttaatgtattgttgcagtgttttgtgcctgtttaaaggcttttgtttagcagagtgaatgtaaaatacagtaaaatgttaagattgtcatctactttttaaaaaaaaatatcaacttggaattgttttttaaaggctcaatcaaggaagtgaggtgtgcaataaggtagcaagtaaaacgcagttgcgtttttatgtcatgttagagatccatacaattttccactcacgggatttttgttgatggctgaattcttgtggattcataagaggatcatgcccttagcaagtacttttgttttgttttaaattaagagattcccaaatgcctttttccccctcatcttgaaatgagatgagtttttatgtgtaagcaatatttatttaactattctataaaattattgagtgcctactgaggcctttaagcaccgctaacattcctttccatcattcttttaaatgacataaaataattgtgcaatgttcctgatgatgtaccccacaagctgcattcaaactcaaatctgtgggaatgagtgactcgacaaaatgtaattcggatcagatcctcatcccctgactgtgtgaaaaaagtactctccttctagtgaaggattgtcacagagtttcactggatgaaactatgacccagtattcttactgtattttacatatgcctgtaaattatttgcaaaaaagaagaagaagaggaagaaagaaaagaaagaaaagaaagaaagaaagaaagaaagaaagaaagaaagaaagaaagaaagaaagaaagaaagaataaaaaaaaatgataacatggcaaccaccaaactcccttaaaaacaaacattggtgacatggccaattaagtatcagtgagcctcctatctgggacttatctgttcctattgtttcaaaaccatttcatgtacactactgaggtaagtttataacttgaaatgtgaactttttttttttttagtgttaagaacaaactatataaatgtaaaaaaaaagttttagagttctgttttcaaacattgctagtggtttagttaactttagctgctttatatttgaaaagcttttatttagatcttgctccatttacagtacattcttaggatgtatgtagtaaataaagctttctttaaagcaatcgcaa

SEQ ID NO: 57174 - DNA, 4462 bp, Homo sapiens
ggaggagtgaggtcaattgccctttagtcccaggactaaccggaagcttctgcaacaggaggacattgaaaataagatggaacccatccacataaggatttgcctcaaagggcactgcaaaaattgaacagaggaatcccaaggaagctgcctgaatttgcctgtatactctcgttctgcgacttataaaggaccagacaaatcaaattagtggttttggtttccgccagctgtggatgcctttgacattatgaccgcagaggattccaccgcagccatgagcagtgactcggccgccgggtcctcggccaaggtgcccgagggcgtggcgggcgcgcccaacgaggcagcactgctggcgctgatggagcgcacgggctacagcatggtgcaagagaacgggcagcgcaagtacggcggcccaccgcccggctgggagggcccgcacccgcagcgtggctgcgaggtcttcgtgggcaagatcccgcgcgacgtgtacgaggacgagctggtgcccgtgttcgaggccgtgggccgcatctacgagctgcgcctcatgatggactttgacggcaagaaccgcggctacgccttcgtcatgtactgccacaagcacgaggccaagcgcgcagtgcgtgagctcaacaactacgagatccgcccgggccgcctgctcggcgtgtgctgcagcgtggacaactgccgcctcttcatcggcgggatccccaagatgaagaagcgcgaggaaatcctggaggagattgccaaggtcaccgagggcgtgctggacgtgatcgtctacgccagcgcggccgacaagatgaagaaccgcggcttcgccttcgtggagtacgagagccaccgcgcggctgccatggctcgccgcaagctcatgcctggccgcatccagctgtggggccaccagatcgccgtggactgggccgagcctgagatcgacgtggacgaggacgtgatggagaccgtgaagatcctctacgtgcgcaacctcatgatcgagaccaccgaggacaccatcaagaagagcttcggccagttcaaccccggctgcgtggagcgcgtcaagaagatccgcgactacgccttcgtgcacttcaccagccgcgaggatgccgtgcatgccatgaacaacctcaacggcactgagctggagggctcgtgcctggaggtcacgctggccaagcccgtggacaaggagcagtactcgcgctaccagaaggcagccaggggcggcggcgcggctgaggcagcgcagcagcccagctacgtgtactcctgcgacccctacacactggcctactacggctacccctacaacgcgctcattgggcccaacagggactactttgtgaaagtagccatccctgccattggggctcagtattccatgtttccagcagctccagcccctaaaatgattgaagatggcaaaatccacacagtggagcacatgatcagccccattgctgtgcagccagacccagccagtgctgctgccgccgcagccgcggccgcagccgccgcagccgctgtcattcccactgtgtcgacgccaccacctttccagggccgcccaataactccagtatacacggtggctccaaacgttcagagaattcctactgccgggatctacggggccagttacgtgccatttgctgctccagctacagccacgatcgccacactacagaagaacgcggcagccgcggccgccgtgtatggaggatacgcaggctacatacctcaggccttccctgctgctgccattcaggtccccatccccgacgtctaccagacatactgaggctggtgaccagcacgaagacagaccacacaaacaccactgaaggaacgcttgactatttatgaagaaggaacatgttggattcacacatgcaacctgaaagtgaagaatgttagcagatttatttctgaattattttatatacatgaagttttcactagttttttaagactattttcaacttagcatgcctacgttcatacatttccaaaagacttgcaatggttcgtgccttcattccatcttttaaaaatttgtatgctgtactacatttgtatagaggtttttgttgttgtttttttaaggatatattttcagtatgaaggttattttcttaacttctgcactccagagatttctattttgtagtaccttcaataatatatcaactatatattaaaaaagcacacttgaggagctagggaactattttgaaaaatatatacaatatttaaagatacaaacagtagtgcttaaaaatactacataaagcattattttaaaggttatactggaaagtgcaattttaaaatgagtaaaacctctgtatttctgctggcattaagggttgatggtgttaccatgtatcatcatggcggtactattttttaaaagaaattaaacactggatctctccttaagccaacattgaaaagacttgccgcacttctgagtccaaacactggaaagctctcctttgccaccgttagccggggctcattctccatgtgccttagccttaaacatgcccccactcccacatctctcaccctgtcccctcctccccagattcccaatcccaccgcaatgtttggcaagcctaggactgataagtagctctgatagaggagctggtggcttttatacttcttcctgggtttttgttggggtttgttgtttcgttgttttttgttttttttttgtttggttggggaagtattgtcttctacgtgtgctattttcagtagcagagtaagcacaaggttttaatcgagttgcataagacacctttgcatagctatttaattgcccaatgtaaaactttaatgccatttctaatgcttttattcatttttgaagtatgagtttgtagggacaaagaatgtatgttatcgtagacaagacccccagagactcttttcagcagaaagttatgcttctagttgccttaccatgtttcttgcaaaactgtccatggtcctcaagggtgttggaaacattatgtttattaaatgggcctctcttcctttgctgtgcacttgatgggtgaactggattggggtgtgcacatccaggaggaggaggagagacctgtagaagtttaaagatagtttgtaaatatcttctaatgcttgtttttagtccttttatgttggagaagttcatggtatgtagtttaatgcaaaatgaaaccattttatttcaatgttattaaaaaggtttgttttattaggaagttaatgtattgttgcagtgttttgtgcctgtttaaaggcttttgtttagcagagtgaatgtaaaatacagtaaaatgttaagattgtcatctactttttaaaaaaaaatatcaacttggaattgttttttaaaggctcaatcaaggaagtgaggtgtgcaataaggtagcaagtaaaacgcagttgcgtttttatgtcatgttagagatccatacaattttccactcacgggatttttgttgatggctgaattcttgtggattcataagaggatcatgcccttagcaagtacttttgttttgttttaaattaagagattcccaaatgcctttttccccctcatcttgaaatgagatgagtttttatgtgtaagcaatatttatttaactattctataaaattattgagtgcctactgaggcctttaagcaccgctaacattcctttccatcattcttttaaatgacataaaataattgtgcaatgttcctgatgatgtaccccacaagctgcattcaaactcaaatctgtgggaatgagtgactcgacaaaatgtaattcggatcagatcctcatcccctgactgtgtgaaaaaagtactctccttctagtgaaggattgtcacagagtttcactggatgaaactatgacccagtattcttactgtattttacatatgcctgtaaattatttgcaaaaaagaagaagaagaggaagaaagaaaagaaagaaaagaaagaaagaaagaaagaaagaaagaaagaaagaaagaaagaaagaaagaaagaaagaataaaaaaaaatgataacatggcaaccaccaaactcccttaaaaacaaacattggtgacatggccaattaagtatcagtgagcctcctatctgggacttatctgttcctattgtttcaaaaccatttcatgtacactactgaggtaagtttataacttgaaatgtgaactttttttttttttagtgttaagaacaaactatataaatgtaaaaaaaaagttttagagttctgttttcaaacattgctagtggtttagttaactttagctgctttatatttgaaaagcttttatttagatcttgctccatttacagtacattcttaggatgtatgtagtaaataaagctttctttaaagcaatcgcaaaaaagtcgacgcggccgcgaat

SEQ ID NO: 57175 - DNA, 4454 bp, Homo sapiens
  misc_feature (4271)..(4271): n is a, c, g, or t
ggaggagtgaggtcaattgccctttagtcccaggactaaccggaagcttctgcaacaggaggacattgaaaataagatggaacccatccacataaggatttgcctcaaagggcactgcaaaaattgaacagaggaatcccaaggaagctgcctgaatttgcctgtatactctcgttctgcgacttataaaggaccagacaaatcaaattagtggttttggtttccgccagctgtggatgcctttgacattatgaccgcagaggattccaccgcagccatgagcagtgactcggccgccgggtcctcggccaaggtgcccgagggcgtggcgggcgcgcccaacgaggcagcactgctggcgctgatggagcgcacgggctacagcatggtgcaagagaacgggcagcgcaagtacggcggcccaccgcccggctgggagggcccgcacccgcagcgtggctgcgaggtcttcgtgggcaagatcccgcgcgacgtgtacgaggacgagctggtgcccgtgttcgaggccgtgggccgcatctacgagctgcgcctcatgatggactttgacggcaagaaccgcggctacgccttcgtcatgtactgccacaagcacgaggccaagcgcgcagtgcgtgagctcaacaactacgagatccgcccgggccgcctgctcggcgtgtgctgcagcgtggacaactgccgcctcttcatcggcgggatccccaagatgaagaagcgcgaggaaatcctggaggagattgccaaggtcaccgagggcgtgctggacgtgatcgtctacgccagcgcggccgacaagatgaagaaccgcggcttcgccttcgtggagtacgagagccaccgcgcggctgccatggctcgccgcaagctcatgcctggccgcatccagctgtggggccaccagatcgccgtggactgggccgagcctgagatcgacgtggacgaggacgtgatggagaccgtgaagatcctctacgtgcgcaacctcatgatcgagaccaccgaggacaccatcaagaagagcttcggccagttcaaccccggctgcgtggagcgcgtcaagaagatccgcgactacgccttcgtgcacttcaccagccgcgaggatgccgtgcatgccatgaacaacctcaacggcactgagctggagggctcgtgcctggaggtcacgctggccaagcccgtggacaaggagcagtactcgcgctaccagaaggcagccaggggcggcggcgcggctgaggcagcgcagcagcccagctacgtgtactcctgcgacccctacacactggcctactacggctacccctacaacgcgctcattgggcccaacagggactactttgtgaaagtagccatccctgccattggggctcagtattccatgtttccagcagctccagcccctaaaatgattgaagatggcaaaatccacacagtggagcacatgatcagccccattgctgtgcagccagacccagccagtgctgctgccgccgcagccgcggccgcagccgccgcagccgctgtcattcccactgtgtcgacgccaccacctttccagggccgcccaataactccagtatacacggtggctccaaacgttcagagaattcctactgccgggatctacggggccagttacgtgccatttgctgctccagctacagccacgatcgccacactacagaagaacgcggcagccgcggccgccgtgtatggaggatacgcaggctacatacctcaggccttccctgctgctgccattcaggtccccatccccgacgtctaccagacatactgaggctggtgaccagcacgaagacagaccacacaaacaccactgaaggaacgcttgactatttatgaagaaggaacatgttggattcacacatgcaacctgaaagtgaagaatgttagcagatttatttctgaattattttatatacatgaagttttcactagttttttaagactattttcaacttagcatgcctacgttcatacatttccaaaagacttgcaatggttcgtgccttcattccatcttttaaaaatttgtatgctgtactacatttgtatagaggtttttgttgttgtttttttaaggatatattttcagtatgaaggttattttcttaacttctgcactccagagatttctattttgtagtaccttcaataatatatcaactatatattaaaaaagcacacttgaggagctagggaactattttgaaaaatatatacaatatttaaagatacaaacagtagtgcttaaaaatactacataaagcattattttaaaggttatactggaaagtgcaattttaaaatgagtaaaacctctgtatttctgctggcattaagggttgatggtgttaccatgtatcatcatggcggtactattttttaaaagaaattaaacactggatctctccttaagccaacattgaaaagacttgccgcacttctgagtccaaacactggaaagctctcctttgccaccgttagccggggctcattctccatgtgccttagccttaaacatgcccccactcccacatctctcaccctgtcccctcctccccagattcccaatcccaccgcaatgtttggcaagcctaggactgataagtagctctgatagaggagctggtggcttttatacttcttcctgggtttttgttggggtttgttgtttcgttgttttttgttttttttttgtttggttggggaagtattgtcttctacgtgtgctattttcagtagcagagtaagcacaaggttttaatcgagttgcataagacacctttgcatagctatttaattgcccaatgtaaaactttaatgccatttctaatgcttttattcatttttgaagtatgagtttgtagggacaaagaatgtatgttatcgtagacaagacccccagagactcttttcagcagaaagttatgcttctagttgccttaccatgtttcttgcaaaactgtccatggtcctcaagggtgttggaaacattatgtttattaaatgggcctctcttcctttgctgtgcacttgatgggtgaactggattggggtgtgcacatccaggaggaggaggagagacctgtagaagtttaaagatagtttgtaaatatcttctaatgcttgtttttagtccttttatgttggagaagttcatggtatgtagtttaatgcaaaatgaaaccattttatttcaatgttattaaaaaggtttgttttattaggaagttaatgtattgttgcagtgttttgtgcctgtttaaaggcttttgtttagcagagtgaatgtaaaatacagtaaaatgttaagattgtcatctactttttaaaaaaaaatatcaacttggaattgttttttaaaggctcaatcaaggaagtgaggtgtgcaataaggtagcaagtaaaacgcagttgcgtttttatgtcatgttagagatccatacaattttccactcacgggatttttgttgatggctgaattcttgtggattcataagaggatcatgcccttagcaagtacttttgttttgttttaaattaagagattcccaaatgcctttttccccctcatcttgaaatgagatgagtttttatgtgtaagcaatatttatttaactattctataaaattattgagtgcctactgaggcctttaagcaccgctaacattcctttccatcattcttttaaatgacataaaataattgtgcaatgttcctgatgatgtaccccacaagctgcattcaaactcaaatctgtgggaatgagtgactcgacaaaatgtaattcggatcagatcctcatcccctgactgtgtgaaaaaagtactctccttctagtgaaggattgtcacagagtttcactggatgaaactatgacccagtattcttactgtattttacatatgcctgtaaattatttgcaaaaaagaagaagaagaggaagaaagaaaagaaagaaaagaaagaaagaaagaaagaaagaaagaaagaaagaaagaaagaaagaaagaaagaaagaataaaaaaaaatgataacatggcaaccaccaaactcccttaaaaacaaacattggtgacatggccaattaagtatcagtgagcctcctatctgggacttatctgttcctattgtttcaaaaccatttcatgtacactactgaggtaagtttataacttgaaatgtgaactttttttttttttagtgttaagaacactnttttatgttcaacaatgttgaagtttgttcaacatgcgagggtgtggtaatgggggtgaaaagaaagggaataagattgcgccataagaatctagaggatgggtaaaaggattaaaagagagaaaaagggggaaaatcggggagaaggacacctataaggaaatgagataaagggaaatgaaa

SEQ ID NO: 57176 - DNA, 4094 bp, Homo sapiens
ggaggagtgaggtcaattgccctttagtcccaggactaaccggaagcttctgcaacaggaggacattgaaaataagatggaacccatccacataaggatttgcctcaaagggcactgcaaaaattgaacagaggaatcccaaggaagctgcctgaatttgcctgtatactctcgttctgcgacttataaaggaccagacaaatcaaattagtggttttggtttccgccagctgtggatgcctttgacattatgaccgcagaggattccaccgcagccatgagcagtgactcggccgccgggtcctcggccaaggtgcccgagggcgtggcgggcgcgcccaacgaggcagcactgctggcgctgatggagcgcacgggctacagcatggtgcaagagaacgggcagcgcaagtacggcggcccaccgcccggctgggagggcccgcacccgcagcgtggctgcgaggtcttcgtgggcaagatcccgcgcgacgtgtacgaggacgagctggtgcccgtgttcgaggccgtgggccgcatctacgagctgcgcctcatgatggactttgacggcaagaaccgcggctacgccttcgtcatgtactgccacaagcacgaggccaagcgcgcagtgcgtgagctcaacaactacgagatccgcccgggccgcctgctcggcgtgtgctgcagcgtggacaactgccgcctcttcatcggcgggatccccaagatgaagaagcgcgaggaaatcctggaggagattgccaaggtcaccgagggcgtgctggacgtgatcgtctacgccagcgcggccgacaagatgaagaaccgcggcttcgccttcgtggagtacgagagccaccgcgcggctgccatggctcgccgcaagctcatgcctggccgcatccagctgtggggccaccagatcgccgtggactgggccgagcctgagatcgacgtggacgaggacgtgatggagaccgtgaagatcctctacgtgcgcaacctcatgatcgagaccaccgaggacaccatcaagaagagcttcggccagttcaaccccggctgcgtggagcgcgtcaagaagatccgcgactacgccttcgtgcacttcaccagccgcgaggatgccgtgcatgccatgaacaacctcaacggcactgagctggagggctcgtgcctggaggtcacgctggccaagcccgtggacaaggagcagtactcgcgctaccagaaggcagccaggggcggcggcgcggctgaggcagcgcagcagcccagctacgtgtactcctgcgacccctacacactggcctactacggctacccctacaacgcgctcattgggcccaacagggactactttgtgaaagtagccatccctgccattggggctcagtattccatgtttccagcagctccagcccctaaaatgattgaagatggcaaaatccacacagtggagcacatgatcagccccattgctgtgcagccagacccagccagtgctgctgccgccgcagccgcggccgcagccgccgcagccgctgtcattcccactgtgtcgacgccaccacctttccagggccgcccaataactccagtatacacggtggctccaaacgttcagagaattcctactgccgggatctacggggccagttacgtgccatttgctgctccagctacagccacgatcgccacactacagaagaacgcggcagccgcggccgccgtgtatggaggatacgcaggctacatacctcaggccttccctgctgctgccattcaggtccccatccccgacgtctaccagacatactgaggctggtgaccagcacgaagacagaccacacaaacaccactgaaggaacgcttgactatttatgaagaaggaacatgttggattcacacatgcaacctgaaagtgaagaatgttagcagatttatttctgaattattttatatacatgaagttttcactagttttttaagactattttcaacttagcatgcctacgttcatacatttccaaaagacttgcaatggttcgtgccttcattccatcttttaaaaatttgtatgctgtactacatttgtatagaggtttttgttgttgtttttttaaggatatattttcagtatgaaggttattttcttaacttctgcactccagagatttctattttgtagtaccttcaataatatatcaactatatattaaaaaagcacacttgaggagctagggaactattttgaaaaatatatacaatatttaaagatacaaacagtagtgcttaaaaatactacataaagcattattttaaaggttatactggaaagtgcaattttaaaatgagtaaaacctctgtatttctgctggcattaagggttgatggtgttaccatgtatcatcatggcggtactattttttaaaagaaattaaacactggatctctccttaagccaacattgaaaagacttgccgcacttctgagtccaaacactggaaagctctcctttgccaccgttagccggggctcattctccatgtgccttagccttaaacatgcccccactcccacatctctcaccctgtcccctcctccccagattcccaatcccaccgcaatgtttggcaagcctaggactgataagtagctctgatagaggagctggtggcttttatacttcttcctgggtttttgttggggtttgttgtttcgttgttttttgttttttttttgtttggttggggaagtattgtcttctacgtgtgctattttcagtagcagagtaagcacaaggttttaatcgagttgcataagacacctttgcatagctatttaattgcccaatgtaaaactttaatgccatttctaatgcttttattcatttttgaagtatgagtttgtagggacaaagaatgtatgttatcgtagacaagacccccagagactcttttcagcagaaagttatgcttctagttgccttaccatgtttcttgcaaaactgtccatggtcctcaagggtgttggaaacattatgtttattaaatgggcctctcttcctttgctgtgcacttgatgggtgaactggattggggtgtgcacatccaggaggaggaggagagacctgtagaagtttaaagatagtttgtaaatatcttctaatgcttgtttttagtccttttatgttggagaagttcatggtatgtagtttaatgcaaaatgaaaccattttatttcaatgttattaaaaaggtttgttttattaggaagttaatgtattgttgcagtgttttgtgcctgtttaaaggcttttgtttagcagagtgaatgtaaaatacagtaaaatgttaagattgtcatctactttttaaaaaaaaatatcaacttggaattgttttttaaaggctcaatcaaggaagtgaggtgtgcaataaggtagcaagtaaaacgcagttgcgtttttatgtcatgttagagatccatacaattttccactcacgggatttttgttgatggctgaattcttgtggattcataagaggatcatgcccttagcaagtacttttgttttgttttaaattaagagattcccaaatgcctttttccccctcatcttgaaatgagatgagtttttatgtgtaagcaatatttatttaactattctataaaattattgagtgcctactgaggcctttaagcaccgctaacattcctttccatcattcttttaaatgacataaaataattgtgcaatgttcctgatgatgtaccccacaagctgcattcaaactcaaatctgtgggaatgagtgactcgacaaaatgtaattcggatcagatcctcatcccctgactgtgtgaaaaaagtactctccttctagtgaaggattgtcacagagtttcactggatgaaactatgacccagtattcttactgtattttacatatgcctgtaaattatttgcaaaaaagaagaagaagaggaagaaagaaaagaaagaaaagaaagaaagaaagaaagaaagaaagaaagaaagaaagaaagaaagaaagaaagaaaggcggcagctcgcgatctagaac

SEQ ID NO: 57177 - DNA, 4898 bp, Homo sapiens
ctggtactgctcccgagtacgggatgttggcccattccgcgcctacaaacaggcttagcgctccactgaaatgcgggaggctccttaactcttgtataaacagaaaccctccgtaactctaggtcagagcgcactaaaatgagccacttctgaacgagcagcgcccaggccccaggccctgctgcgaaggccccggcaaaggtcagggccccgtccgcgtgacgctcctgcctgcgcgcggccaagccatgctcggccccagctcaggtaacggaggccttggaaggagactctgcgtcaggtcacccagcagagatcagcaatccttggctcactgaggaggtttggatttgcctcaaagggcactgcaaaaattgaacagaggaatcccaaggaagctgcctgaatttgcctgtatactctcgttctgcgacttataaaggaccagacaaatcaaattagtggttttggtttccgccagctgtggatgcctttgacattatgaccgcagaggattccaccgcagccatgagcagtgactcggccgccgggtcctcggccaaggtgcccgagggcgtggcgggcgcgcccaacgaggcagcactgctggcgctgatggagcgcacgggctacagcatggtgcaagagaacgggcagcgcaagtacggcggcccaccgcccggctgggagggcccgcacccgcagcgtggctgcgaggtcttcgtgggcaagatcccgcgcgacgtgtacgaggacgagctggtgcccgtgttcgaggccgtgggccgcatctacgagctgcgcctcatgatggactttgacggcaagaaccgcggctacgccttcgtcatgtactgccacaagcacgaggccaagcgcgcagtgcgtgagctcaacaactacgagatccgcccgggccgcctgctcggcgtgtgctgcagcgtggacaactgccgcctcttcatcggcgggatccccaagatgaagaagcgcgaggaaatcctggaggagattgccaaggtcaccgagggcgtgctggacgtgatcgtctacgccagcgcggccgacaagatgaagaaccgcggcttcgccttcgtggagtacgagagccaccgcgcggctgccatggctcgccgcaagctcatgcctggccgcatccagctgtggggccaccagatcgccgtggactgggccgagcctgagatcgacgtggacgaggacgtgatggagaccgtgaagatcctctacgtgcgcaacctcatgatcgagaccaccgaggacaccatcaagaagagcttcggccagttcaaccccggctgcgtggagcgcgtcaagaagatccgcgactacgccttcgtgcacttcaccagccgcgaggatgccgtgcatgccatgaacaacctcaacggcactgagctggagggctcgtgcctggaggtcacgctggccaagcccgtggacaaggagcagtactcgcgctaccagaaggcagccaggggcggcggcgcggctgaggcagcgcagcagcccagctacgtgtactcctgcgacccctacacactggcctactacggctacccctacaacgcgctcattgggcccaacagggactactttgtgaaagcaggcagcataagaggccgagggcgaggtgcagctggcaacagagccccagggcctaggggttcctacctcgggggatattctgctggccgtggtatatatagccgatatcatgaagggaaaggaaagcagcaagaaaaaggatatgaactggtgccgaatttggaaatccctaccgtcaacccagttgccattaaacctggtacagtagccatccctgccattggggctcagtattccatgtttccagcagctccagcccctaaaatgattgaagatggcaaaatccacacagtggagcacatgatcagccccattgctgtgcagccagacccagccagtgctgctgccgccgcagccgcggccgcagccgccgcagccgctgtcattcccactgtgtcgacgccaccacctttccagggccgcccaataactccagtatacacggtggctccaaacgttcagagaattcctactgccgggatctacggggccagttacgtgccatttgctgctccagctacagccacgatcgccacactacagaagaacgcggcagccgcggccgccgtgtatggaggatacgcaggctacatacctcaggccttccctgctgctgccattcaggtccccatccccgacgtctaccagacatactgaggctggtgaccagcacgaagacagaccacacaaacaccactgaaggaacgcttgactatttatgaagaaggaacatgttggattcacacatgcaacctgaaagtgaagaatgttagcagatttatttctgaattattttatatacatgaagttttcactagttttttaagactattttcaacttagcatgcctacgttcatacatttccaaaagacttgcaatggttcgtgccttcattccatcttttaaaaatttgtatgctgtactacatttgtatagaggtttttgttgttgtttttttaaggatatattttcagtatgaaggttattttcttaacttctgcactccagagatttctattttgtagtaccttcaataatatatcaactatatattaaaaaagcacacttgaggagctagggaactattttgaaaaatatatacaatatttaaagatacaaacagtagtgcttaaaaatactacataaagcattattttaaaggttatactggaaagtgcaattttaaaatgagtaaaacctctgtatttctgctggcattaagggttgatggtgttaccatgtatcatcatggcggtactattttttaaaagaaattaaacactggatctctccttaagccaacattgaaaagacttgccgcacttctgagtccaaacactggaaagctctcctttgccaccgttagccggggctcattctccatgtgccttagccttaaacatgcccccactcccacatctctcaccctgtcccctcctccccagattcccaatcccaccgcaatgtttggcaagcctaggactgataagtagctctgatagaggagctggtggcttttatacttcttcctgggtttttgttggggtttgttgtttcgttgttttttgttttttttttgtttggttggggaagtattgtcttctacgtgtgctattttcagtagcagagtaagcacaaggttttaatcgagttgcataagacacctttgcatagctatttaattgcccaatgtaaaactttaatgccatttctaatgcttttattcatttttgaagtatgagtttgtagggacaaagaatgtatgttatcgtagacaagacccccagagactcttttcagcagaaagttatgcttctagttgccttaccatgtttcttgcaaaactgtccatggtcctcaagggtgttggaaacattatgtttattaaatgggcctctcttcctttgctgtgcacttgatgggtgaactggattggggtgtgcacatccaggaggaggaggagagacctgtagaagtttaaagatagtttgtaaatatcttctaatgcttgtttttagtccttttatgttggagaagttcatggtatgtagtttaatgcaaaatgaaaccattttatttcaatgttattaaaaaggtttgttttattaggaagttaatgtattgttgcagtgttttgtgcctgtttaaaggcttttgtttagcagagtgaatgtaaaatacagtaaaatgttaagattgtcatctactttttaaaaaaaaatatcaacttggaattgttttttaaaggctcaatcaaggaagtgaggtgtgcaataaggtagcaagtaaaacgcagttgcgtttttatgtcatgttagagatccatacaattttccactcacgggatttttgttgatggctgaattcttgtggattcataagaggatcatgcccttagcaagtacttttgttttgttttaaattaagagattcccaaatgcctttttccccctcatcttgaaatgagatgagtttttatgtgtaagcaatatttatttaactattctataaaattattgagtgcctactgaggcctttaagcaccgctaacattcctttccatcattcttttaaatgacataaaataattgtgcaatgttcctgatgatgtaccccacaagctgcattcaaactcaaatctgtgggaatgagtgactcgacaaaatgtaattcggatcagatcctcatcccctgactgtgtgaaaaaagtactctccttctagtgaaggattgtcacagagtttcactggatgaaactatgacccagtattcttactgtattttacatatgcctgtaaattatttgcaaaaaagaagaagaagaggaagaaagaaaagaaagaaaagaaagaaagaaagaaagaaagaaagaaagaaagaaagaaagaaagaaagaaagaaagaataaaaaaaaatgataacatggcaaccaccaaactcccttaaaaacaaacattggtgacatggccaattaagtatcagtgagcctcctatctgggacttatctgttcctattgtttcaaaaccatttcatgtacactactgaggtaagtttataacttgaaatgtgaactttttttttttttagtgttaagaacaaactatataaatgtaaaaaaaaagttttagagttctgttttcaaacattgctagtggtttagttaactttagctgctttatatttgaaaagcttttatttagatcttgctccatttacagtacattcttaggatgtatgtagtaaataaagctttctttaaagcaatcgcaa

SEQ ID NO: 57178 - DNA, 5085 bp, Homo sapiens
ccgtgcgcagcgccccacgcagccgggacgcggcgccgctctgcgggtggaaccgccgcgcgctcccggcctcgggagctgagcccgagagaacttcgctgccttcgggtcgccgctcccgctttccactgtggaatgtgcagcttgggatagagagaaaccagggtttggggagcggtcctcctggagactttctctctgcaagtctccaaggttaagcaattctgacccactggaattcccagagcctgggagttaagcctaaaacgctctgttgctttaagcggcgcggtggggagtcgctggacactccttattttggttttacattaaaaagaaggcggacgagaagatgttgtaggtgacttcctagctgtgttaagttgctcctgggctgtgaatggtgttaatttctgaagtgggcggctccaaaaacttaacaaggaaagctcaggtaacggaggccttggaaggagactctgcgtcaggtcacccagcagagatcagcaatccttggctcactgaggaggtttggatttgcctcaaagggcactgcaaaaattgaacagaggaatcccaaggaagctgcctgaatttgcctgtatactctcgttctgcgacttataaaggaccagacaaatcaaattagtggttttggtttccgccagctgtggatgcctttgacattatgaccgcagaggattccaccgcagccatgagcagtgactcggccgccgggtcctcggccaaggtgcccgagggcgtggcgggcgcgcccaacgaggcagcactgctggcgctgatggagcgcacgggctacagcatggtgcaagagaacgggcagcgcaagtacggcggcccaccgcccggctgggagggcccgcacccgcagcgtggctgcgaggtcttcgtgggcaagatcccgcgcgacgtgtacgaggacgagctggtgcccgtgttcgaggccgtgggccgcatctacgagctgcgcctcatgatggactttgacggcaagaaccgcggctacgccttcgtcatgtactgccacaagcacgaggccaagcgcgcagtgcgtgagctcaacaactacgagatccgcccgggccgcctgctcggcgtgtgctgcagcgtggacaactgccgcctcttcatcggcgggatccccaagatgaagaagcgcgaggaaatcctggaggagattgccaaggtcaccgagggcgtgctggacgtgatcgtctacgccagcgcggccgacaagatgaagaaccgcggcttcgccttcgtggagtacgagagccaccgcgcggctgccatggctcgccgcaagctcatgcctggccgcatccagctgtggggccaccagatcgccgtggactgggccgagcctgagatcgacgtggacgaggacgtgatggagaccgtgaagatcctctacgtgcgcaacctcatgatcgagaccaccgaggacaccatcaagaagagcttcggccagttcaaccccggctgcgtggagcgcgtcaagaagatccgcgactacgccttcgtgcacttcaccagccgcgaggatgccgtgcatgccatgaacaacctcaacggcactgagctggagggctcgtgcctggaggtcacgctggccaagcccgtggacaaggagcagtactcgcgctaccagaaggcagccaggggcggcggcgcggctgaggcagcgcagcagcccagctacgtgtactcctgcgacccctacacactggcctactacggctacccctacaacgcgctcattgggcccaacagggactactttgtgaaagcaggcagcataagaggccgagggcgaggtgcagctggcaacagagccccagggcctaggggttcctacctcgggggatattctgctggccgtggtatatatagccgatatcatgaagggaaaggaaagcagcaagaaaaaggatatgaactggtgccgaatttggaaatccctaccgtcaacccagttgccattaaacctggtacagtagccatccctgccattggggctcagtattccatgtttccagcagctccagcccctaaaatgattgaagatggcaaaatccacacagtggagcacatgatcagccccattgctgtgcagccagacccagccagtgctgctgccgccgcagccgcggccgcagccgccgcagccgctgtcattcccactgtgtcgacgccaccacctttccagggccgcccaataactccagtatacacggtggctccaaacgttcagagaattcctactgccgggatctacggggccagttacgtgccatttgctgctccagctacagccacgatcgccacactacagaagaacgcggcagccgcggccgccgtgtatggaggatacgcaggctacatacctcaggccttccctgctgctgccattcaggtccccatccccgacgtctaccagacatactgaggctggtgaccagcacgaagacagaccacacaaacaccactgaaggaacgcttgactatttatgaagaaggaacatgttggattcacacatgcaacctgaaagtgaagaatgttagcagatttatttctgaattattttatatacatgaagttttcactagttttttaagactattttcaacttagcatgcctacgttcatacatttccaaaagacttgcaatggttcgtgccttcattccatcttttaaaaatttgtatgctgtactacatttgtatagaggtttttgttgttgtttttttaaggatatattttcagtatgaaggttattttcttaacttctgcactccagagatttctattttgtagtaccttcaataatatatcaactatatattaaaaaagcacacttgaggagctagggaactattttgaaaaatatatacaatatttaaagatacaaacagtagtgcttaaaaatactacataaagcattattttaaaggttatactggaaagtgcaattttaaaatgagtaaaacctctgtatttctgctggcattaagggttgatggtgttaccatgtatcatcatggcggtactattttttaaaagaaattaaacactggatctctccttaagccaacattgaaaagacttgccgcacttctgagtccaaacactggaaagctctcctttgccaccgttagccggggctcattctccatgtgccttagccttaaacatgcccccactcccacatctctcaccctgtcccctcctccccagattcccaatcccaccgcaatgtttggcaagcctaggactgataagtagctctgatagaggagctggtggcttttatacttcttcctgggtttttgttggggtttgttgtttcgttgttttttgttttttttttgtttggttggggaagtattgtcttctacgtgtgctattttcagtagcagagtaagcacaaggttttaatcgagttgcataagacacctttgcatagctatttaattgcccaatgtaaaactttaatgccatttctaatgcttttattcatttttgaagtatgagtttgtagggacaaagaatgtatgttatcgtagacaagacccccagagactcttttcagcagaaagttatgcttctagttgccttaccatgtttcttgcaaaactgtccatggtcctcaagggtgttggaaacattatgtttattaaatgggcctctcttcctttgctgtgcacttgatgggtgaactggattggggtgtgcacatccaggaggaggaggagagacctgtagaagtttaaagatagtttgtaaatatcttctaatgcttgtttttagtccttttatgttggagaagttcatggtatgtagtttaatgcaaaatgaaaccattttatttcaatgttattaaaaaggtttgttttattaggaagttaatgtattgttgcagtgttttgtgcctgtttaaaggcttttgtttagcagagtgaatgtaaaatacagtaaaatgttaagattgtcatctactttttaaaaaaaaatatcaacttggaattgttttttaaaggctcaatcaaggaagtgaggtgtgcaataaggtagcaagtaaaacgcagttgcgtttttatgtcatgttagagatccatacaattttccactcacgggatttttgttgatggctgaattcttgtggattcataagaggatcatgcccttagcaagtacttttgttttgttttaaattaagagattcccaaatgcctttttccccctcatcttgaaatgagatgagtttttatgtgtaagcaatatttatttaactattctataaaattattgagtgcctactgaggcctttaagcaccgctaacattcctttccatcattcttttaaatgacataaaataattgtgcaatgttcctgatgatgtaccccacaagctgcattcaaactcaaatctgtgggaatgagtgactcgacaaaatgtaattcggatcagatcctcatcccctgactgtgtgaaaaaagtactctccttctagtgaaggattgtcacagagtttcactggatgaaactatgacccagtattcttactgtattttacatatgcctgtaaattatttgcaaaaaagaagaagaagaggaagaaagaaaagaaagaaaagaaagaaagaaagaaagaaagaaagaaagaaagaaagaaagaaagaaagaaagaaagaataaaaaaaaatgataacatggcaaccaccaaactcccttaaaaacaaacattggtgacatggccaattaagtatcagtgagcctcctatctgggacttatctgttcctattgtttcaaaaccatttcatgtacactactgaggtaagtttataacttgaaatgtgaactttttttttttttagtgttaagaacaaactatataaatgtaaaaaaaaagttttagagttctgttttcaaacattgctagtggtttagttaactttagctgctttatatttgaaaagcttttatttagatcttgctccatttacagtacattcttaggatgtatgtagtaaataaagctttctttaaagcaatcgcaa

SEQ ID NO: 57179 - DNA, 4416 bp, Homo sapiens
ggaggagtgaggtcaattgccctttagtcccaggactaaccggaagcttctgcaacaggaggacattgaaaataagatggaacccatccacataaggatttgcctcaaagggcactgcaaaaattgaacagaggaatcccaaggaagctgcctgaatttgcctgtatactctcgttctgcgacttataaaggaccagacaaatcaaattagtggttttggtttccgccagctgtggatgcctttgacattatgaccgcagaggattccaccgcagccatgagcagtgactcggccgccgggtcctcggccaaggtgcccgagggcgtggcgggcgcgcccaacgaggcagcactgctggcgctgatggagcgcacgggctacagcatggtgcaagagaacgggcagcgcaagtacggcggcccaccgcccggctgggagggcccgcacccgcagcgtggctgcgaggtcttcgtgggcaagatcccgcgcgacgtgtacgaggacgagctggtgcccgtgttcgaggccgtgggccgcatctacgagctgcgcctcatgatggactttgacggcaagaaccgcggctacgccttcgtcatgtactgccacaagcacgaggccaagcgcgcagtgcgtgagctcaacaactacgagatccgcccgggccgcctgctcggcgtgtgctgcagcgtggacaactgccgcctcttcatcggcgggatccccaagatgaagaagcgcgaggaaatcctggaggagattgccaaggtcaccgagggcgtgctggacgtgatcgtctacgccagcgcggccgacaagatgaagaaccgcggcttcgccttcgtggagtacgagagccaccgcgcggctgccatggctcgccgcaagctcatgcctggccgcatccagctgtggggccaccagatcgccgtggactgggccgagcctgagatcgacgtggacgaggacgtgatggagaccgtgaagatcctctacgtgcgcaacctcatgatcgagaccaccgaggacaccatcaagaagagcttcggccagttcaaccccggctgcgtggagcgcgtcaagaagatccgcgactacgccttcgtgcacttcaccagccgcgaggatgccgtgcatgccatgaacaacctcaacggcactgagctggagggctcgtgcctggaggtcacgctggccaagcccgtggacaaggagcagtactcgcgctaccagaaggcagccaggggcggcggcgcggctgaggcagcgcagcagcccagctacgtgtactcctgcgacccctacacactggcctactacggctacccctacaacgcgctcattgggcccaacagggactactttgtgaaagtagccatccctgccattggggctcagtattccatgtttccagcagctccagcccctaaaatgattgaagatggcaaaatccacacagtggagcacatgatcagccccattgctgtgcagccagacccagccagtgctgctgccgccgcagccgcggccgcagccgccgcagccgctgtcattcccactgtgtcgacgccaccacctttccagggccgcccaataactccagtatacacggtggctccaaacgttcagagaattcctactgccgggatctacggggccagttacgtgccatttgctgctccagctacagccacgatcgccacactacagaagaacgcggcagccgcggccgccgtgtatggaggatacgcaggctacatacctcaggccttccctgctgctgccattcaggtccccatccccgacgtctaccagacatactgaggctggtgaccagcacgaagacagaccacacaaacaccactgaaggaacgcttgactatttatgaagaaggaacatgttggattcacacatgcaacctgaaagtgaagaatgttagcagatttatttctgaattattttatatacatgaagttttcactagttttttaagactattttcaacttagcatgcctacgttcatacatttccaaaagacttgcaatggttcgtgccttcattccatcttttaaaaatttgtatgctgtactacatttgtatagaggtttttgttgttgtttttttaaggatatattttcagtatgaaggttattttcttaacttctgcactccagagatttctattttgtagtaccttcaataatatatcaactatatattaaaaaagcacacttgaggagctagggaactattttgaaaaatatatacaatatttaaagatacaaacagtagtgcttaaaaatactacataaagcattattttaaaggttatactggaaagtgcaattttaaaatgagtaaaacctctgtatttctgctggcattaagggttgatggtgttaccatgtatcatcatggcggtactattttttaaaagaaattaaacactggatctctccttaagccaacattgaaaagacttgccgcacttctgagtccaaacactggaaagctctcctttgccaccgttagccggggctcattctccatgtgccttagccttaaacatgcccccactcccacatctctcaccctgtcccctcctccccagattcccaatcccaccgcaatgtttggcaagcctaggactgataagtagctctgatagaggagctggtggcttttatacttcttcctgggtttttgttggggtttgttgtttcgttgttttttgttttttttttgtttggttggggaagtattgtcttctacgtgtgctattttcagtagcagagtaagcacaaggttttaatcgagttgcataagacacctttgcatagctatttaattgcccaatgtaaaactttaatgccatttctaatgcttttattcatttttgaagtatgagtttgtagggacaaagaatgtatgttatcgtagacaagacccccagagactcttttcagcagaaagttatgcttctagttgccttaccatgtttcttgcaaaactgtccatggtcctcaagggtgttggaaacattatgtttattaaatgggcctctcttcctttgctgtgcacttgatgggtgaactggattggggtgtgcacatccaggaggaggaggagagacctgtagaagtttaaagatagtttgtaaatatcttctaatgcttgtttttagtccttttatgttggagaagttcatggtatgtagtttaatgcaaaatgaaaccattttatttcaatgttattaaaaaggtttgttttattaggaagttaatgtattgttgcagtgttttgtgcctgtttaaaggcttttgtttagcagagtgaatgtaaaatacagtaaaatgttaagattgtcatctactttttaaaaaaaaatatcaacttggaattgttttttaaaggctcaatcaaggaagtgaggtgtgcaataaggtagcaagtaaaacgcagttgcgtttttatgtcatgttagagatccatacaattttccactcacgggatttttgttgatggctgaattcttgtggattcataagaggatcatgcccttagcaagtacttttgttttgttttaaattaagagattcccaaatgcctttttccccctcatcttgaaatgagatgagtttttatgtgtaagcaatatttatttaactattctataaaattattgagtgcctactgaggcctttaagcaccgctaacattcctttccatcattcttttaaatgacataaaataattgtgcaatgttcctgatgatgtaccccacaagctgcattcaaactcaaatctgtgggaatgagtgactcgacaaaatgtaattcggatcagatcctcatcccctgactgtgtgaaaaaagtactctccttctagtgaaggattgtcacagagtttcactggatgaaactatgacccagtattcttactgtattttacatatgcctgtaaattatttgcaaaaaagaagaagaagaggaagaaagaaaagaaagaaaagaaagaaagaaagaaagaaagaaagaaagaaagaataaaaaaaaatgataacatggcaaccaccaaactcccttaaaaacaaacattggtgacatggccaattaagtatcagtgagcctcctatctgggacttatctgttcctattgtttcaaaaccatttcatgtacactactgaggtaagtttataacttgaaatgtgaactttttttttttttagtgttaagaacaaactatataaatgtaaaaaaaaagttttagagttctgttttcaaacattgctagtggtttagttaactttagctgctttatatttgaaaagcttttatttagatcttgctccatttacagtacattcttaggatgtatgtagtaaataaagctttctttaaagcaatcgcaa

SEQ ID NO: 57180 - DNA, 4813 bp, Homo sapiens
ctggtactgctcccgagtacgggatgttggcccattccgcgcctacaaacaggcttagcgctccactgaaatgcgggaggctccttaactcttgtataaacagaaaccctccgtaactctaggtcagagcgcactaaaatgagccacttctgaacgagcagcgcccaggccccaggccctgctgcgaaggccccggcaaaggtcagggccccgtccgcgtgacgctcctgcctgcgcgcggccaagccatgctcggccccaggatttgcctcaaagggcactgcaaaaattgaacagaggaatcccaaggaagctgcctgaatttgcctgtatactctcgttctgcgacttataaaggaccagacaaatcaaattagtggttttggtttccgccagctgtggatgcctttgacattatgaccgcagaggattccaccgcagccatgagcagtgactcggccgccgggtcctcggccaaggtgcccgagggcgtggcgggcgcgcccaacgaggcagcactgctggcgctgatggagcgcacgggctacagcatggtgcaagagaacgggcagcgcaagtacggcggcccaccgcccggctgggagggcccgcacccgcagcgtggctgcgaggtcttcgtgggcaagatcccgcgcgacgtgtacgaggacgagctggtgcccgtgttcgaggccgtgggccgcatctacgagctgcgcctcatgatggactttgacggcaagaaccgcggctacgccttcgtcatgtactgccacaagcacgaggccaagcgcgcagtgcgtgagctcaacaactacgagatccgcccgggccgcctgctcggcgtgtgctgcagcgtggacaactgccgcctcttcatcggcgggatccccaagatgaagaagcgcgaggaaatcctggaggagattgccaaggtcaccgagggcgtgctggacgtgatcgtctacgccagcgcggccgacaagatgaagaaccgcggcttcgccttcgtggagtacgagagccaccgcgcggctgccatggctcgccgcaagctcatgcctggccgcatccagctgtggggccaccagatcgccgtggactgggccgagcctgagatcgacgtggacgaggacgtgatggagaccgtgaagatcctctacgtgcgcaacctcatgatcgagaccaccgaggacaccatcaagaagagcttcggccagttcaaccccggctgcgtggagcgcgtcaagaagatccgcgactacgccttcgtgcacttcaccagccgcgaggatgccgtgcatgccatgaacaacctcaacggcactgagctggagggctcgtgcctggaggtcacgctggccaagcccgtggacaaggagcagtactcgcgctaccagaaggcagccaggggcggcggcgcggctgaggcagcgcagcagcccagctacgtgtactcctgcgacccctacacactggcctactacggctacccctacaacgcgctcattgggcccaacagggactactttgtgaaagcaggcagcataagaggccgagggcgaggtgcagctggcaacagagccccagggcctaggggttcctacctcgggggatattctgctggccgtggtatatatagccgatatcatgaagggaaaggaaagcagcaagaaaaaggatatgaactggtgccgaatttggaaatccctaccgtcaacccagttgccattaaacctggtacagtagccatccctgccattggggctcagtattccatgtttccagcagctccagcccctaaaatgattgaagatggcaaaatccacacagtggagcacatgatcagccccattgctgtgcagccagacccagccagtgctgctgccgccgcagccgcggccgcagccgccgcagccgctgtcattcccactgtgtcgacgccaccacctttccagggccgcccaataactccagtatacacggtggctccaaacgttcagagaattcctactgccgggatctacggggccagttacgtgccatttgctgctccagctacagccacgatcgccacactacagaagaacgcggcagccgcggccgccgtgtatggaggatacgcaggctacatacctcaggccttccctgctgctgccattcaggtccccatccccgacgtctaccagacatactgaggctggtgaccagcacgaagacagaccacacaaacaccactgaaggaacgcttgactatttatgaagaaggaacatgttggattcacacatgcaacctgaaagtgaagaatgttagcagatttatttctgaattattttatatacatgaagttttcactagttttttaagactattttcaacttagcatgcctacgttcatacatttccaaaagacttgcaatggttcgtgccttcattccatcttttaaaaatttgtatgctgtactacatttgtatagaggtttttgttgttgtttttttaaggatatattttcagtatgaaggttattttcttaacttctgcactccagagatttctattttgtagtaccttcaataatatatcaactatatattaaaaaagcacacttgaggagctagggaactattttgaaaaatatatacaatatttaaagatacaaacagtagtgcttaaaaatactacataaagcattattttaaaggttatactggaaagtgcaattttaaaatgagtaaaacctctgtatttctgctggcattaagggttgatggtgttaccatgtatcatcatggcggtactattttttaaaagaaattaaacactggatctctccttaagccaacattgaaaagacttgccgcacttctgagtccaaacactggaaagctctcctttgccaccgttagccggggctcattctccatgtgccttagccttaaacatgcccccactcccacatctctcaccctgtcccctcctccccagattcccaatcccaccgcaatgtttggcaagcctaggactgataagtagctctgatagaggagctggtggcttttatacttcttcctgggtttttgttggggtttgttgtttcgttgttttttgttttttttttgtttggttggggaagtattgtcttctacgtgtgctattttcagtagcagagtaagcacaaggttttaatcgagttgcataagacacctttgcatagctatttaattgcccaatgtaaaactttaatgccatttctaatgcttttattcatttttgaagtatgagtttgtagggacaaagaatgtatgttatcgtagacaagacccccagagactcttttcagcagaaagttatgcttctagttgccttaccatgtttcttgcaaaactgtccatggtcctcaagggtgttggaaacattatgtttattaaatgggcctctcttcctttgctgtgcacttgatgggtgaactggattggggtgtgcacatccaggaggaggaggagagacctgtagaagtttaaagatagtttgtaaatatcttctaatgcttgtttttagtccttttatgttggagaagttcatggtatgtagtttaatgcaaaatgaaaccattttatttcaatgttattaaaaaggtttgttttattaggaagttaatgtattgttgcagtgttttgtgcctgtttaaaggcttttgtttagcagagtgaatgtaaaatacagtaaaatgttaagattgtcatctactttttaaaaaaaaatatcaacttggaattgttttttaaaggctcaatcaaggaagtgaggtgtgcaataaggtagcaagtaaaacgcagttgcgtttttatgtcatgttagagatccatacaattttccactcacgggatttttgttgatggctgaattcttgtggattcataagaggatcatgcccttagcaagtacttttgttttgttttaaattaagagattcccaaatgcctttttccccctcatcttgaaatgagatgagtttttatgtgtaagcaatatttatttaactattctataaaattattgagtgcctactgaggcctttaagcaccgctaacattcctttccatcattcttttaaatgacataaaataattgtgcaatgttcctgatgatgtaccccacaagctgcattcaaactcaaatctgtgggaatgagtgactcgacaaaatgtaattcggatcagatcctcatcccctgactgtgtgaaaaaagtactctccttctagtgaaggattgtcacagagtttcactggatgaaactatgacccagtattcttactgtattttacatatgcctgtaaattatttgcaaaaaagaagaagaagaggaagaaagaaaagaaagaaaagaaagaaagaaagaaagaaagaaagaaagaaagaaagaaagaaagaaagaaagaaagaataaaaaaaaatgataacatggcaaccaccaaactcccttaaaaacaaacattggtgacatggccaattaagtatcagtgagcctcctatctgggacttatctgttcctattgtttcaaaaccatttcatgtacactactgaggtaagtttataacttgaaatgtgaactttttttttttttagtgttaagaacaaactatataaatgtaaaaaaaaagttttagagttctgttttcaaacattgctagtggtttagttaactttagctgctttatatttgaaaagcttttatttagatcttgctccatttacagtacattcttaggatgtatgtagtaaataaagctttctttaaagcaatcgcaa

SEQ ID NO: 57181 - DNA, 4700 bp, Homo sapiens
gggaaagagagcgccaggtgcttagcaggatttgcctcaaagggcactgcaaaaattgaacagaggaatcccaaggaagctgcctgaatttgcctgtatactctcgttctgcgacttataaaggaccagacaaatcaaattagtggttttgagacagggtctcactatgttgcccagactggtctggaactcctgagctcaagcaagcttctcacctcagcctcccaaagtgctgggattataggcttcagccaccacgcccaaccagccaggtttccgccagctgtggatgcctttgacattatgaccgcagaggattccaccgcagccatgagcagtgactcggccgccgggtcctcggccaaggtgcccgagggcgtggcgggcgcgcccaacgaggcagcactgctggcgctgatggagcgcacgggctacagcatggtgcaagagaacgggcagcgcaagtacggcggcccaccgcccggctgggagggcccgcacccgcagcgtggctgcgaggtcttcgtgggcaagatcccgcgcgacgtgtacgaggacgagctggtgcccgtgttcgaggccgtgggccgcatctacgagctgcgcctcatgatggactttgacggcaagaaccgcggctacgccttcgtcatgtactgccacaagcacgaggccaagcgcgcagtgcgtgagctcaacaactacgagatccgcccgggccgcctgctcggcgtgtgctgcagcgtggacaactgccgcctcttcatcggcgggatccccaagatgaagaagcgcgaggaaatcctggaggagattgccaaggtcaccgagggcgtgctggacgtgatcgtctacgccagcgcggccgacaagatgaagaaccgcggcttcgccttcgtggagtacgagagccaccgcgcggctgccatggctcgccgcaagctcatgcctggccgcatccagctgtggggccaccagatcgccgtggactgggccgagcctgagatcgacgtggacgaggacgtgatggagaccgtgaagatcctctacgtgcgcaacctcatgatcgagaccaccgaggacaccatcaagaagagcttcggccagttcaaccccggctgcgtggagcgcgtcaagaagatccgcgactacgccttcgtgcacttcaccagccgcgaggatgccgtgcatgccatgaacaacctcaacggcactgagctggagggctcgtgcctggaggtcacgctggccaagcccgtggacaaggagcagtactcgcgctaccagaaggcagccaggggcggcggcgcggctgaggcagcgcagcagcccagctacgtgtactcctgcgacccctacacactggcctactacggctacccctacaacgcgctcattgggcccaacagggactactttgtgaaagcaggcagcataagaggccgagggcgaggtgcagctggcaacagagccccagggcctaggggttcctacctcgggggatattctgctggccgtggtatatatagccgatatcatgaagggaaaggaaagcagcaagaaaaaggatatgaactggtgccgaatttggaaatccctaccgtcaacccagttgccattaaacctggtacagtagccatccctgccattggggctcagtattccatgtttccagcagctccagcccctaaaatgattgaagatggcaaaatccacacagtggagcacatgatcagccccattgctgtgcagccagacccagccagtgctgctgccgccgcagccgcggccgcagccgccgcagccgctgtcattcccactgtgtcgacgccaccacctttccagggccgcccaataactccagtatacacggtggctccaaacgttcagagaattcctactgccgggatctacggggccagttacgtgccatttgctgctccagctacagccacgatcgccacactacagaagaacgcggcagccgcggccgccgtgtatggaggatacgcaggctacatacctcaggccttccctgctgctgccattcaggtccccatccccgacgtctaccagacatactgaggctggtgaccagcacgaagacagaccacacaaacaccactgaaggaacgcttgactatttatgaagaaggaacatgttggattcacacatgcaacctgaaagtgaagaatgttagcagatttatttctgaattattttatatacatgaagttttcactagttttttaagactattttcaacttagcatgcctacgttcatacatttccaaaagacttgcaatggttcgtgccttcattccatcttttaaaaatttgtatgctgtactacatttgtatagaggtttttgttgttgtttttttaaggatatattttcagtatgaaggttattttcttaacttctgcactccagagatttctattttgtagtaccttcaataatatatcaactatatattaaaaaagcacacttgaggagctagggaactattttgaaaaatatatacaatatttaaagatacaaacagtagtgcttaaaaatactacataaagcattattttaaaggttatactggaaagtgcaattttaaaatgagtaaaacctctgtatttctgctggcattaagggttgatggtgttaccatgtatcatcatggcggtactattttttaaaagaaattaaacactggatctctccttaagccaacattgaaaagacttgccgcacttctgagtccaaacactggaaagctctcctttgccaccgttagccggggctcattctccatgtgccttagccttaaacatgcccccactcccacatctctcaccctgtcccctcctccccagattcccaatcccaccgcaatgtttggcaagcctaggactgataagtagctctgatagaggagctggtggcttttatacttcttcctgggtttttgttggggtttgttgtttcgttgttttttgttttttttttgtttggttggggaagtattgtcttctacgtgtgctattttcagtagcagagtaagcacaaggttttaatcgagttgcataagacacctttgcatagctatttaattgcccaatgtaaaactttaatgccatttctaatgcttttattcatttttgaagtatgagtttgtagggacaaagaatgtatgttatcgtagacaagacccccagagactcttttcagcagaaagttatgcttctagttgccttaccatgtttcttgcaaaactgtccatggtcctcaagggtgttggaaacattatgtttattaaatgggcctctcttcctttgctgtgcacttgatgggtgaactggattggggtgtgcacatccaggaggaggaggagagacctgtagaagtttaaagatagtttgtaaatatcttctaatgcttgtttttagtccttttatgttggagaagttcatggtatgtagtttaatgcaaaatgaaaccattttatttcaatgttattaaaaaggtttgttttattaggaagttaatgtattgttgcagtgttttgtgcctgtttaaaggcttttgtttagcagagtgaatgtaaaatacagtaaaatgttaagattgtcatctactttttaaaaaaaaatatcaacttggaattgttttttaaaggctcaatcaaggaagtgaggtgtgcaataaggtagcaagtaaaacgcagttgcgtttttatgtcatgttagagatccatacaattttccactcacgggatttttgttgatggctgaattcttgtggattcataagaggatcatgcccttagcaagtacttttgttttgttttaaattaagagattcccaaatgcctttttccccctcatcttgaaatgagatgagtttttatgtgtaagcaatatttatttaactattctataaaattattgagtgcctactgaggcctttaagcaccgctaacattcctttccatcattcttttaaatgacataaaataattgtgcaatgttcctgatgatgtaccccacaagctgcattcaaactcaaatctgtgggaatgagtgactcgacaaaatgtaattcggatcagatcctcatcccctgactgtgtgaaaaaagtactctccttctagtgaaggattgtcacagagtttcactggatgaaactatgacccagtattcttactgtattttacatatgcctgtaaattatttgcaaaaaagaagaagaagaggaagaaagaaaagaaagaaaagaaagaaagaaagaaagaaagaaagaaagaaagaaagaaagaaagaaagaaagaaagaataaaaaaaaatgataacatggcaaccaccaaactcccttaaaaacaaacattggtgacatggccaattaagtatcagtgagcctcctatctgggacttatctgttcctattgtttcaaaaccatttcatgtacactactgaggtaagtttataacttgaaatgtgaactttttttttttttagtgttaagaacaaactatataaatgtaaaaaaaaagttttagagttctgttttcaaacattgctagtggtttagttaactttagctgctttatatttgaaaagcttttatttagatcttgctccatttacagtacattcttaggatgtatgtagtaaataaagctttctttaaagcaatcgcaa

SEQ ID NO: 57182 - DNA, 4865 bp, Homo sapiens
ctggtactgctcccgagtacgggatgttggcccattccgcgcctacaaacaggcttagcgctccactgaaatgcgggaggctccttaactcttgtataaacagaaaccctccgtaactctaggtcagagcgcactaaaatgagccacttctgaacgagcagcgcccaggccccaggccctgctgcgaaggccccggcaaaggtcagggccccgtccgcgtgacgctcctgcctgcgcgcggccaagccatgctcggccccagctcaggtaacggaggccttggaaggagactctgcgtcaggtcacccagcagagatcagcaatccttggctcactgaggaggtttggatttgcctcaaagggcactgcaaaaattgaacagaggaatcccaaggaagctgcctgaatttgcctgtatactctcgttctgcgacttataaaggaccagacaaatcaaattagtggttttggtttccgccagctgtggatgcctttgacattatgaccgcagaggattccaccgcagccatgagcagtgactcggccgccgggtcctcggccaaggtgcccgagggcgtggcgggcgcgcccaacgaggcagcactgctggcgctgatggagcgcacgggctacagcatggtgcaagagaacgggcagcgcaagtacggcggcccaccgcccggctgggagggcccgcacccgcagcgtggctgcgaggtcttcgtgggcaagatcccgcgcgacgtgtacgaggacgagctggtgcccgtgttcgaggccgtgggccgcatctacgagctgcgcctcatgatggactttgacggcaagaaccgcggctacgccttcgtcatgtactgccacaagcacgaggccaagcgcgcagtgcgtgagctcaacaactacgagatccgcccgggccgcctgctcggcgtgtgctgcagcgtggacaactgccgcctcttcatcggcgggatccccaagatgaagaagcgcgaggaaatcctggaggagattgccaaggtcaccgagggcgtgctggacgtgatcgtctacgccagcgcggccgacaagatgaagaaccgcggcttcgccttcgtggagtacgagagccaccgcgcggctgccatggctcgccgcaagctcatgcctggccgcatccagctgtggggccaccagatcgccgtggactgggccgagcctgagatcgacgtggacgaggacgtgatggagaccgtgaagatcctctacgtgcgcaacctcatgatcgagaccaccgaggacaccatcaagaagagcttcggccagttcaaccccggctgcgtggagcgcgtcaagaagatccgcgactacgccttcgtgcacttcaccagccgcgaggatgccgtgcatgccatgaacaacctcaacggcactgagctggagggctcgtgcctggaggtcacgctggccaagcccgtggacaaggagcagtactcgcgctaccagaaggcagccaggggcggcggcgcggctgaggcagcgcagcagcccagctacgtgtactcctgcgacccctacacactggcctactacggctacccctacaacgcgctcattgggcccaacagggactactttgtgaaagcaggcagcataagaggccgagggcgaggtgcagctggcaacagagccccagggcctaggggttcctacctcgggggatattctgctggccgtggtatatatagccgatatcatgaagggaaaggaaagcagcaagaaaaaggatatgaactggtgccgaatttggaaatccctaccgtcaacccagttgccattaaacctggtacagtagccatccctgccattggggctcagtattccatgtttccagcagctccagcccctaaaatgattgaagatggcaaaatccacacagtggagcacatgatcagccccattgctgtgcagccagacccagccagtgctgctgccgccgcagccgcggccgcagccgccgcagccgctgtcattcccactgtgtcgacgccaccacctttccagggccgcccaataactccagtatacacggtggctccaaacgttcagagaattcctactgccgggatctacggggccagttacgtgccatttgctgctccagctacagccacgatcgccacactacagaagaacgcggcagccgcggccgccgtgtatggaggatacgcaggctacatacctcaggccttccctgctgctgccattcaggtccccatccccgacgtctaccagaccacacaaacaccactgaaggaacgcttgactatttatgaagaaggaacatgttggattcacacatgcaacctgaaagtgaagaatgttagcagatttatttctgaattattttatatacatgaagttttcactagttttttaagactattttcaacttagcatgcctacgttcatacatttccaaaagacttgcaatggttcgtgccttcattccatcttttaaaaatttgtatgctgtactacatttgtatagaggtttttgttgttgtttttttaaggatatattttcagtatgaaggttattttcttaacttctgcactccagagatttctattttgtagtaccttcaataatatatcaactatatattaaaaaagcacacttgaggagctagggaactattttgaaaaatatatacaatatttaaagatacaaacagtagtgcttaaaaatactacataaagcattattttaaaggttatactggaaagtgcaattttaaaatgagtaaaacctctgtatttctgctggcattaagggttgatggtgttaccatgtatcatcatggcggtactattttttaaaagaaattaaacactggatctctccttaagccaacattgaaaagacttgccgcacttctgagtccaaacactggaaagctctcctttgccaccgttagccggggctcattctccatgtgccttagccttaaacatgcccccactcccacatctctcaccctgtcccctcctccccagattcccaatcccaccgcaatgtttggcaagcctaggactgataagtagctctgatagaggagctggtggcttttatacttcttcctgggtttttgttggggtttgttgtttcgttgttttttgttttttttttgtttggttggggaagtattgtcttctacgtgtgctattttcagtagcagagtaagcacaaggttttaatcgagttgcataagacacctttgcatagctatttaattgcccaatgtaaaactttaatgccatttctaatgcttttattcatttttgaagtatgagtttgtagggacaaagaatgtatgttatcgtagacaagacccccagagactcttttcagcagaaagttatgcttctagttgccttaccatgtttcttgcaaaactgtccatggtcctcaagggtgttggaaacattatgtttattaaatgggcctctcttcctttgctgtgcacttgatgggtgaactggattggggtgtgcacatccaggaggaggaggagagacctgtagaagtttaaagatagtttgtaaatatcttctaatgcttgtttttagtccttttatgttggagaagttcatggtatgtagtttaatgcaaaatgaaaccattttatttcaatgttattaaaaaggtttgttttattaggaagttaatgtattgttgcagtgttttgtgcctgtttaaaggcttttgtttagcagagtgaatgtaaaatacagtaaaatgttaagattgtcatctactttttaaaaaaaaatatcaacttggaattgttttttaaaggctcaatcaaggaagtgaggtgtgcaataaggtagcaagtaaaacgcagttgcgtttttatgtcatgttagagatccatacaattttccactcacgggatttttgttgatggctgaattcttgtggattcataagaggatcatgcccttagcaagtacttttgttttgttttaaattaagagattcccaaatgcctttttccccctcatcttgaaatgagatgagtttttatgtgtaagcaatatttatttaactattctataaaattattgagtgcctactgaggcctttaagcaccgctaacattcctttccatcattcttttaaatgacataaaataattgtgcaatgttcctgatgatgtaccccacaagctgcattcaaactcaaatctgtgggaatgagtgactcgacaaaatgtaattcggatcagatcctcatcccctgactgtgtgaaaaaagtactctccttctagtgaaggattgtcacagagtttcactggatgaaactatgacccagtattcttactgtattttacatatgcctgtaaattatttgcaaaaaagaagaagaagaggaagaaagaaaagaaagaaaagaaagaaagaaagaaagaaagaaagaaagaaagaaagaaagaaagaaagaaagaaagaataaaaaaaaatgataacatggcaaccaccaaactcccttaaaaacaaacattggtgacatggccaattaagtatcagtgagcctcctatctgggacttatctgttcctattgtttcaaaaccatttcatgtacactactgaggtaagtttataacttgaaatgtgaactttttttttttttagtgttaagaacaaactatataaatgtaaaaaaaaagttttagagttctgttttcaaacattgctagtggtttagttaactttagctgctttatatttgaaaagcttttatttagatcttgctccatttacagtacattcttaggatgtatgtagtaaataaagctttctttaaagcaatcgcaa

SEQ ID NO: 57183 - DNA, 4648 bp, Homo sapiens
ctggtactgctcccgagtacgggatgttggcccattccgcgcctacaaacaggcttagcgctccactgaaatgcgggaggctccttaactcttgtataaacagaaaccctccgtaactctaggtcagagcgcactaaaatgagccacttctgaacgagcagcgcccaggccccaggccctgctgcgaaggccccggcaaaggtcagggccccgtccgcgtgacgctcctgcctgcgcgcggccaagccatgctcggccccagctcaggtaacggaggccttggaaggagactctgcgtcaggtcacccagcagagatcagcaatccttggctcactgaggaggtttggatttgcctcaaagggcactgcaaaaattgaacagaggaatcccaaggaagctgcctgaatttgcctgtatactctcgttctgcgacttataaaggaccagacaaatcaaattagtggttttggtttccgccagctgtggatgcctttgacattatgaccgcagaggattccaccgcagccatgagcagtgactcggccgccgggtcctcggccaaggtgcccgagggcgtggcgggcgcgcccaacgaggcagcactgctggcgctgatggagcgcacgggctacagcatggtgcaagagaacgggcagcgcaagtacggcggcccaccgcccggctgggagggcccgcacccgcagcgtggctgcgaggtcttcgtgggcaagatcccgcgcgacgtgtacgaggacgagctggtgcccgtgttcgaggccgtgggccgcatctacgagctgcgcctcatgatggactttgacggcaagaaccgcggctacgccttcgtcatgtactgccacaagcacgaggccaagcgcgcagtgcgtgagctcaacaactacgagatccgcccgggccgcctgctcggcgtgtgctgcagcgtggacaactgccgcctcttcatcggcgggatccccaagatgaagaagcgcgaggaaatcctggaggagattgccaaggtcaccgagggcgtgctggacgtgatcgtctacgccagcgcggccgacaagatgaagaaccgcggcttcgccttcgtggagtacgagagccaccgcgcggctgccatggctcgccgcaagctcatgcctggccgcatccagctgtggggccaccagatcgccgtggactgggccgagcctgagatcgacgtggacgaggacgtgatggagaccgtgaagatcctctacgtgcgcaacctcatgatcgagaccaccgaggacaccatcaagaagagcttcggccagttcaaccccggctgcgtggagcgcgtcaagaagatccgcgactacgccttcgtgcacttcaccagccgcgaggatgccgtgcatgccatgaacaacctcaacggcactgagctggagggctcgtgcctggaggtcacgctggccaagcccgtggacaaggagcagtactcgcgctaccagaaggcagccaggggcggcggcgcggctgaggcagcgcagcagcccagctacgtgtactcctgcgacccctacacactggcctactacggctacccctacaacgcgctcattgggcccaacagggactactttgtgaaagcaggcagcataagaggccgagggcgaggtgcagctggcaacagagccccagggcctaggggttcctacctcgggggatattctgctggccgtggtatatatagccgatatcatgaagggaaaggacagccgctgtcattcccactgtgtcgacgccaccacctttccagggccgcccaataactccagtatacacggtggctccaaacgttcagagaattcctactgccgggatctacggggccagttacgtgccatttgctgctccagctacagccacgatcgccacactacagaagaacgcggcagccgcggccgccgtgtatggaggatacgcaggctacatacctcaggccttccctgctgctgccattcaggtccccatccccgacgtctaccagacatactgaggctggtgaccagcacgaagacagaccacacaaacaccactgaaggaacgcttgactatttatgaagaaggaacatgttggattcacacatgcaacctgaaagtgaagaatgttagcagatttatttctgaattattttatatacatgaagttttcactagttttttaagactattttcaacttagcatgcctacgttcatacatttccaaaagacttgcaatggttcgtgccttcattccatcttttaaaaatttgtatgctgtactacatttgtatagaggtttttgttgttgtttttttaaggatatattttcagtatgaaggttattttcttaacttctgcactccagagatttctattttgtagtaccttcaataatatatcaactatatattaaaaaagcacacttgaggagctagggaactattttgaaaaatatatacaatatttaaagatacaaacagtagtgcttaaaaatactacataaagcattattttaaaggttatactggaaagtgcaattttaaaatgagtaaaacctctgtatttctgctggcattaagggttgatggtgttaccatgtatcatcatggcggtactattttttaaaagaaattaaacactggatctctccttaagccaacattgaaaagacttgccgcacttctgagtccaaacactggaaagctctcctttgccaccgttagccggggctcattctccatgtgccttagccttaaacatgcccccactcccacatctctcaccctgtcccctcctccccagattcccaatcccaccgcaatgtttggcaagcctaggactgataagtagctctgatagaggagctggtggcttttatacttcttcctgggtttttgttggggtttgttgtttcgttgttttttgttttttttttgtttggttggggaagtattgtcttctacgtgtgctattttcagtagcagagtaagcacaaggttttaatcgagttgcataagacacctttgcatagctatttaattgcccaatgtaaaactttaatgccatttctaatgcttttattcatttttgaagtatgagtttgtagggacaaagaatgtatgttatcgtagacaagacccccagagactcttttcagcagaaagttatgcttctagttgccttaccatgtttcttgcaaaactgtccatggtcctcaagggtgttggaaacattatgtttattaaatgggcctctcttcctttgctgtgcacttgatgggtgaactggattggggtgtgcacatccaggaggaggaggagagacctgtagaagtttaaagatagtttgtaaatatcttctaatgcttgtttttagtccttttatgttggagaagttcatggtatgtagtttaatgcaaaatgaaaccattttatttcaatgttattaaaaaggtttgttttattaggaagttaatgtattgttgcagtgttttgtgcctgtttaaaggcttttgtttagcagagtgaatgtaaaatacagtaaaatgttaagattgtcatctactttttaaaaaaaaatatcaacttggaattgttttttaaaggctcaatcaaggaagtgaggtgtgcaataaggtagcaagtaaaacgcagttgcgtttttatgtcatgttagagatccatacaattttccactcacgggatttttgttgatggctgaattcttgtggattcataagaggatcatgcccttagcaagtacttttgttttgttttaaattaagagattcccaaatgcctttttccccctcatcttgaaatgagatgagtttttatgtgtaagcaatatttatttaactattctataaaattattgagtgcctactgaggcctttaagcaccgctaacattcctttccatcattcttttaaatgacataaaataattgtgcaatgttcctgatgatgtaccccacaagctgcattcaaactcaaatctgtgggaatgagtgactcgacaaaatgtaattcggatcagatcctcatcccctgactgtgtgaaaaaagtactctccttctagtgaaggattgtcacagagtttcactggatgaaactatgacccagtattcttactgtattttacatatgcctgtaaattatttgcaaaaaagaagaagaagaggaagaaagaaaagaaagaaaagaaagaaagaaagaaagaaagaaagaaagaaagaaagaaagaaagaaagaaagaaagaataaaaaaaaatgataacatggcaaccaccaaactcccttaaaaacaaacattggtgacatggccaattaagtatcagtgagcctcctatctgggacttatctgttcctattgtttcaaaaccatttcatgtacactactgaggtaagtttataacttgaaatgtgaactttttttttttttagtgttaagaacaaactatataaatgtaaaaaaaaagttttagagttctgttttcaaacattgctagtggtttagttaactttagctgctttatatttgaaaagcttttatttagatcttgctccatttacagtacattcttaggatgtatgtagtaaataaagctttctttaaagcaatcgcaa

SEQ ID NO: 57184 - DNA, 4161 bp, Homo sapiens
ctggtactgctcccgagtacgggatgttggcccattccgcgcctacaaacaggcttagcgctccactgaaatgcgggaggctccttaactcttgtataaacagaaaccctccgtaactctaggtcagagcgcactaaaatgagccacttctgaacgagcagcgcccaggccccaggccctgctgcgaaggccccggcaaaggtcagggccccgtccgcgtgacgctcctgcctgcgcgcggccaagccatgctcggccccagctcaggtaacggaggccttggaaggagactctgcgtcaggtcacccagcagagatcagcaatccttggctcactgaggaggtttggatttgcctcaaagggcactgcaaaaattgaacagaggaatcccaaggaagctgcctgaatttgcctgtatactctcgttctgcgacttataaaggaccagacaaatcaaattagtggttttggtttccgccagctgtggatgcctttgacattatgaccgcagaggattccaccgcagccatgagcagtgactcggccgccgggtcctcggccaaggtgcccgagggcgtggcgggcgcgcccaacgaggcagcactgctggcgctgatggagcgcacgggctacagcatggtgcaagagaacgggcagcgcaagtacggcggcccaccgcccggctgggagggcccgcacccgcagcgtggctgcgaggtcttcgtgggcaagatcccgcgcgacgtgtacgaggacgagctggtgcccgtgttcgaggccgtgggccgcatctacgagctgcgcctcatgatggactttgacggcaagaaccgcggctacgccttcgtcatgtactgccacaagcacgaggccaagcgcgcagtgcgtgagctcaacaactacgagatccgcccgggccgcctgctcggcgtgtgctgcagcgtggacaactgccgcctcttcatcggcgggatccccaagatgaagaagcgcgaggaaatcctggaggagattgccaaggtcaccgagggcgtgctggacgtgatcgtctacgccagcgcggccgacaagatgaagaaccgcggcttcgccttcgtggagtacgagagccaccgcgcggctgccatggctcgccgcaagctcatgcctggccgcatccagctgtggggccaccagatcgccgtggactgggccgagcctgagatcgacgtggacgaggacgtgatggagaccgtgaagatcctctacgtgcgcaacctcatgatcgagaccaccgaggacaccatcaagaagagcttcggccagttcaaccccggctgcgtggagcgcgtcaagaagatccgcgactacgccttcgtgcacttcaccagccgcgaggatgccgtgcatgccatttgctgctccagctacagccacgatcgccacactacagaagaacgcggcagccgcggccgccgtgtatggaggatacgcaggctacatacctcaggccttccctgctgctgccattcaggtccccatccccgacgtctaccagacatactgaggctggtgaccagcacgaagacagaccacacaaacaccactgaaggaacgcttgactatttatgaagaaggaacatgttggattcacacatgcaacctgaaagtgaagaatgttagcagatttatttctgaattattttatatacatgaagttttcactagttttttaagactattttcaacttagcatgcctacgttcatacatttccaaaagacttgcaatggttcgtgccttcattccatcttttaaaaatttgtatgctgtactacatttgtatagaggtttttgttgttgtttttttaaggatatattttcagtatgaaggttattttcttaacttctgcactccagagatttctattttgtagtaccttcaataatatatcaactatatattaaaaaagcacacttgaggagctagggaactattttgaaaaatatatacaatatttaaagatacaaacagtagtgcttaaaaatactacataaagcattattttaaaggttatactggaaagtgcaattttaaaatgagtaaaacctctgtatttctgctggcattaagggttgatggtgttaccatgtatcatcatggcggtactattttttaaaagaaattaaacactggatctctccttaagccaacattgaaaagacttgccgcacttctgagtccaaacactggaaagctctcctttgccaccgttagccggggctcattctccatgtgccttagccttaaacatgcccccactcccacatctctcaccctgtcccctcctccccagattcccaatcccaccgcaatgtttggcaagcctaggactgataagtagctctgatagaggagctggtggcttttatacttcttcctgggtttttgttggggtttgttgtttcgttgttttttgttttttttttgtttggttggggaagtattgtcttctacgtgtgctattttcagtagcagagtaagcacaaggttttaatcgagttgcataagacacctttgcatagctatttaattgcccaatgtaaaactttaatgccatttctaatgcttttattcatttttgaagtatgagtttgtagggacaaagaatgtatgttatcgtagacaagacccccagagactcttttcagcagaaagttatgcttctagttgccttaccatgtttcttgcaaaactgtccatggtcctcaagggtgttggaaacattatgtttattaaatgggcctctcttcctttgctgtgcacttgatgggtgaactggattggggtgtgcacatccaggaggaggaggagagacctgtagaagtttaaagatagtttgtaaatatcttctaatgcttgtttttagtccttttatgttggagaagttcatggtatgtagtttaatgcaaaatgaaaccattttatttcaatgttattaaaaaggtttgttttattaggaagttaatgtattgttgcagtgttttgtgcctgtttaaaggcttttgtttagcagagtgaatgtaaaatacagtaaaatgttaagattgtcatctactttttaaaaaaaaatatcaacttggaattgttttttaaaggctcaatcaaggaagtgaggtgtgcaataaggtagcaagtaaaacgcagttgcgtttttatgtcatgttagagatccatacaattttccactcacgggatttttgttgatggctgaattcttgtggattcataagaggatcatgcccttagcaagtacttttgttttgttttaaattaagagattcccaaatgcctttttccccctcatcttgaaatgagatgagtttttatgtgtaagcaatatttatttaactattctataaaattattgagtgcctactgaggcctttaagcaccgctaacattcctttccatcattcttttaaatgacataaaataattgtgcaatgttcctgatgatgtaccccacaagctgcattcaaactcaaatctgtgggaatgagtgactcgacaaaatgtaattcggatcagatcctcatcccctgactgtgtgaaaaaagtactctccttctagtgaaggattgtcacagagtttcactggatgaaactatgacccagtattcttactgtattttacatatgcctgtaaattatttgcaaaaaagaagaagaagaggaagaaagaaaagaaagaaaagaaagaaagaaagaaagaaagaaagaaagaaagaaagaaagaaagaaagaaagaaagaataaaaaaaaatgataacatggcaaccaccaaactcccttaaaaacaaacattggtgacatggccaattaagtatcagtgagcctcctatctgggacttatctgttcctattgtttcaaaaccatttcatgtacactactgaggtaagtttataacttgaaatgtgaactttttttttttttagtgttaagaacaaactatataaatgtaaaaaaaaagttttagagttctgttttcaaacattgctagtggtttagttaactttagctgctttatatttgaaaagcttttatttagatcttgctccatttacagtacattcttaggatgtatgtagtaaataaagctttctttaaagcaatcgcaa

SEQ ID NO: 57185 - DNA, 3820 bp, Homo sapiens
ctggtactgctcccgagtacgggatgttggcccattccgcgcctacaaacaggcttagcgctccactgaaatgcgggaggctccttaactcttgtataaacagaaaccctccgtaactctaggtcagagcgcactaaaatgagccacttctgaacgagcagcgcccaggccccaggccctgctgcgaaggccccggcaaaggtcagggccccgtccgcgtgacgctcctgcctgcgcgcggccaagccatgctcggccccagctcaggtaacggaggccttggaaggagactctgcgtcaggtcacccagcagagatcagcaatccttggctcactgaggaggtttggatttgcctcaaagggcactgcaaaaattgaacagaggaatcccaaggaagctgcctgaatttgcctgtatactctcgttctgcgacttataaaggaccagacaaatcaaattagtggttttggtttccgccagctgtggatgcctttgacattatgaccgcagaggattccaccgcagccatgagcagtgactcggccgccgggtcctcggccaaggtgcccgagggcgtggcgggcgcgcccaacgaggcagcactgctggcgctgatggagcgcacgggctacagcatggtgcaagagaacgggcagcgcaagtacggcggcccaccgcccggctgggagggcccgcacccgcagcgtggctgcgaggtcttcgtgggcaagatcccgcgcgacgtgtacgaggacgagctggtgcccgtgttcgaggccgtgggccgcatctacgagctgcgcctcatgatggactttgacggcaagaaccgcggctacgccttcgtcatgtactgccacaagcacgaggccaagcgcgcagtgcgtgagctcaacaactacgagatccgcccgggccgccagccgctgtcattcccactgtgtcgacgccaccacctttccagggccgcccaataactccagtatacacggtggctccaaacgttcagagaattcctactgccgggatctacggggccagttacgtgccatttgctgctccagctacagccacgatcgccacactacagaagaacgcggcagccgcggccgccgtgtatggaggatacgcaggctacatacctcaggccttccctgctgctgccattcaggtccccatccccgacgtctaccagacatactgaggctggtgaccagcacgaagacagaccacacaaacaccactgaaggaacgcttgactatttatgaagaaggaacatgttggattcacacatgcaacctgaaagtgaagaatgttagcagatttatttctgaattattttatatacatgaagttttcactagttttttaagactattttcaacttagcatgcctacgttcatacatttccaaaagacttgcaatggttcgtgccttcattccatcttttaaaaatttgtatgctgtactacatttgtatagaggtttttgttgttgtttttttaaggatatattttcagtatgaaggttattttcttaacttctgcactccagagatttctattttgtagtaccttcaataatatatcaactatatattaaaaaagcacacttgaggagctagggaactattttgaaaaatatatacaatatttaaagatacaaacagtagtgcttaaaaatactacataaagcattattttaaaggttatactggaaagtgcaattttaaaatgagtaaaacctctgtatttctgctggcattaagggttgatggtgttaccatgtatcatcatggcggtactattttttaaaagaaattaaacactggatctctccttaagccaacattgaaaagacttgccgcacttctgagtccaaacactggaaagctctcctttgccaccgttagccggggctcattctccatgtgccttagccttaaacatgcccccactcccacatctctcaccctgtcccctcctccccagattcccaatcccaccgcaatgtttggcaagcctaggactgataagtagctctgatagaggagctggtggcttttatacttcttcctgggtttttgttggggtttgttgtttcgttgttttttgttttttttttgtttggttggggaagtattgtcttctacgtgtgctattttcagtagcagagtaagcacaaggttttaatcgagttgcataagacacctttgcatagctatttaattgcccaatgtaaaactttaatgccatttctaatgcttttattcatttttgaagtatgagtttgtagggacaaagaatgtatgttatcgtagacaagacccccagagactcttttcagcagaaagttatgcttctagttgccttaccatgtttcttgcaaaactgtccatggtcctcaagggtgttggaaacattatgtttattaaatgggcctctcttcctttgctgtgcacttgatgggtgaactggattggggtgtgcacatccaggaggaggaggagagacctgtagaagtttaaagatagtttgtaaatatcttctaatgcttgtttttagtccttttatgttggagaagttcatggtatgtagtttaatgcaaaatgaaaccattttatttcaatgttattaaaaaggtttgttttattaggaagttaatgtattgttgcagtgttttgtgcctgtttaaaggcttttgtttagcagagtgaatgtaaaatacagtaaaatgttaagattgtcatctactttttaaaaaaaaatatcaacttggaattgttttttaaaggctcaatcaaggaagtgaggtgtgcaataaggtagcaagtaaaacgcagttgcgtttttatgtcatgttagagatccatacaattttccactcacgggatttttgttgatggctgaattcttgtggattcataagaggatcatgcccttagcaagtacttttgttttgttttaaattaagagattcccaaatgcctttttccccctcatcttgaaatgagatgagtttttatgtgtaagcaatatttatttaactattctataaaattattgagtgcctactgaggcctttaagcaccgctaacattcctttccatcattcttttaaatgacataaaataattgtgcaatgttcctgatgatgtaccccacaagctgcattcaaactcaaatctgtgggaatgagtgactcgacaaaatgtaattcggatcagatcctcatcccctgactgtgtgaaaaaagtactctccttctagtgaaggattgtcacagagtttcactggatgaaactatgacccagtattcttactgtattttacatatgcctgtaaattatttgcaaaaaagaagaagaagaggaagaaagaaaagaaagaaaagaaagaaagaaagaaagaaagaaagaaagaaagaaagaaagaaagaaagaaagaaagaataaaaaaaaatgataacatggcaaccaccaaactcccttaaaaacaaacattggtgacatggccaattaagtatcagtgagcctcctatctgggacttatctgttcctattgtttcaaaaccatttcatgtacactactgaggtaagtttataacttgaaatgtgaactttttttttttttagtgttaagaacaaactatataaatgtaaaaaaaaagttttagagttctgttttcaaacattgctagtggtttagttaactttagctgctttatatttgaaaagcttttatttagatcttgctccatttacagtacattcttaggatgtatgtagtaaataaagctttctttaaagcaatcgcaa

SEQ ID NO: 57186 - DNA, 3258 bp, Homo sapiens
tttttttacagtatacaggaggatgtgcataggttaaatgcaaatacgccattttctctcagggactcgagcatctgaggattttggtatccacggaggtcctagagccaatcacctgtgaggatactgaggggcaactgtatttcacctttccctcagccttccaggcctctcactttcacaaggtggcatcactgagtttgaggatgcagctccaccttacctcttcagtggctcttctcccacttgcttacaataattgctgtttgcccgcccctctgcctttctctcccttgcttttgtgtctttgtattcccgtcttctgggagaggcttgttgaatgaatggatgataggtacatacacgtgttcaggaaggctcctttttgtctcttctcctcaggggccgcccaataactccagtatacacggtggctccaaacgttcagagaattcctactgccgggatctacggggccagttacgtgccatttgctgctccagctacagccacgatcgccacactacagaagaacgcggcagccgcggccgccgtgtatggaggatacgcaggctacatacctcaggccttccctgctgctgccattcaggtccccatccccgacgtctaccagacatactgaggctggtgaccagcacgaagacagaccacacaaacaccactgaaggaacgcttgactatttatgaagaaggaacatgttggattcacacatgcaacctgaaagtgaagaatgttagcagatttatttctgaattattttatatacatgaagttttcactagttttttaagactattttcaacttagcatgcctacgttcatacatttccaaaagacttgcaatggttcgtgccttcattccatcttttaaaaatttgtatgctgtactacatttgtatagaggtttttgttgttgtttttttaaggatatattttcagtatgaaggttattttcttaacttctgcactccagagatttctattttgtagtaccttcaataatatatcaactatatattaaaaaagcacacttgaggagctagggaactattttgaaaaatatatacaatatttaaagatacaaacagtagtgcttaaaaatactacataaagcattattttaaaggttatactggaaagtgcaattttaaaatgagtaaaacctctgtatttctgctggcattaagggttgatggtgttaccatgtatcatcatggcggtactattttttaaaagaaattaaacactggatctctccttaagccaacattgaaaagacttgccgcacttctgagtccaaacactggaaagctctcctttgccaccgttagccggggctcattctccatgtgccttagccttaaacatgcccccactcccacatctctcaccctgtcccctcctccccagattcccaatcccaccgcaatgtttggcaagcctaggactgataagtagctctgatagaggagctggtggcttttatacttcttcctgggtttttgttggggtttgttgtttcgttgttttttgttttttttttgtttggttggggaagtattgtcttctacgtgtgctattttcagtagcagagtaagcacaaggttttaatcgagttgcataagacacctttgcatagctatttaattgcccaatgtaaaactttaatgccatttctaatgcttttattcatttttgaagtatgagtttgtagggacaaagaatgtatgttatcgtagacaagacccccagagactcttttcagcagaaagttatgcttctagttgccttaccatgtttcttgcaaaactgtccatggtcctcaagggtgttggaaacattatgtttattaaatgggcctctcttcctttgctgtgcacttgatgggtgaactggattggggtgtgcacatccaggaggaggaggagagacctgtagaagtttaaagatagtttgtaaatatcttctaatgcttgtttttagtccttttatgttggagaagttcatggtatgtagtttaatgcaaaatgaaaccattttatttcaatgttattaaaaaggtttgttttattaggaagttaatgtattgttgcagtgttttgtgcctgtttaaaggcttttgtttagcagagtgaatgtaaaatacagtaaaatgttaagattgtcatctactttttaaaaaaaaatatcaacttggaattgttttttaaaggctcaatcaaggaagtgaggtgtgcaataaggtagcaagtaaaacgcagttgcgtttttatgtcatgttagagatccatacaattttccactcacgggatttttgttgatggctgaattcttgtggattcataagaggatcatgcccttagcaagtacttttgttttgttttaaattaagagattcccaaatgcctttttccccctcatcttgaaatgagatgagtttttatgtgtaagcaatatttatttaactattctataaaattattgagtgcctactgaggcctttaagcaccgctaacattcctttccatcattcttttaaatgacataaaataattgtgcaatgttcctgatgatgtaccccacaagctgcattcaaactcaaatctgtgggaatgagtgactcgacaaaatgtaattcggatcagatcctcatcccctgactgtgtgaaaaaagtactctccttctagtgaaggattgtcacagagtttcactggatgaaactatgacccagtattcttactgtattttacatatgcctgtaaattatttgcaaaaaagaagaagaagaggaagaaagaaaagaaagaaaagaaagaaagaaagaaagaaagaaagaaagaaagaaagaaagaaagaaagaaagaaagaataaaaaaaaatgataacatggcaaccaccaaactcccttaaaaacaaacattggtgacatggccaattaagtatcagtgagcctcctatctgggacttatctgttcctattgtttcaaaaccatttcatgtacactactgaggtaagtttataacttgaaatgtgaactttttttttttttagtgttaagaacaaactatataaatgtaaaaaaaaagttttagagttctgttttcaaacattgctagtggtttagttaactttagctgctttatatttgaaaagcttttatttagatcttgctccatttacagtacattcttaggatgtatgtagtaaataaagctttctttaaagcaatcgcaa

SEQ ID NO: 57187 - DNA, 3251 bp, Homo sapiens
gcctttagccaggggaggctcagccagcaggataaaatttcagggcagatttacgggaagttgccggtgttgggagtaaaaatctggtttggtgagtttaagaagcagcaagaaaaaggatatgaactggtgccgaatttggaaatccctaccgtcaacccagttgccattaaacctggtacagtagccatccctgccattggggctcagtattccatgtttccagcagctccagcccctaaaatgattgaagatggcaaaatccacacagtggagcacatgatcagccccattgctgtgcagccagacccagccagtgctgctgccgccgcagccgcggccgcagccgccgcagccgctgtcattcccactgtgtcgacgccaccacctttccagggccgcccaataactccagtatacacggtggctccaaacgttcagagaattcctactgccgggatctacggggccagttacgtgccatttgctgctccagctacagccacgatcgccacactacagaagaacgcggcagccgcggccgccgtgtatggaggatacgcaggctacatacctcaggccttccctgctgctgccattcaggtccccatccccgacgtctaccagacatactgaggctggtgaccagcacgaagacagaccacacaaacaccactgaaggaacgcttgactatttatgaagaaggaacatgttggattcacacatgcaacctgaaagtgaagaatgttagcagatttatttctgaattattttatatacatgaagttttcactagttttttaagactattttcaacttagcatgcctacgttcatacatttccaaaagacttgcaatggttcgtgccttcattccatcttttaaaaatttgtatgctgtactacatttgtatagaggtttttgttgttgtttttttaaggatatattttcagtatgaaggttattttcttaacttctgcactccagagatttctattttgtagtaccttcaataatatatcaactatatattaaaaaagcacacttgaggagctagggaactattttgaaaaatatatacaatatttaaagatacaaacagtagtgcttaaaaatactacataaagcattattttaaaggttatactggaaagtgcaattttaaaatgagtaaaacctctgtatttctgctggcattaagggttgatggtgttaccatgtatcatcatggcggtactattttttaaaagaaattaaacactggatctctccttaagccaacattgaaaagacttgccgcacttctgagtccaaacactggaaagctctcctttgccaccgttagccggggctcattctccatgtgccttagccttaaacatgcccccactcccacatctctcaccctgtcccctcctccccagattcccaatcccaccgcaatgtttggcaagcctaggactgataagtagctctgatagaggagctggtggcttttatacttcttcctgggtttttgttggggtttgttgtttcgttgttttttgttttttttttgtttggttggggaagtattgtcttctacgtgtgctattttcagtagcagagtaagcacaaggttttaatcgagttgcataagacacctttgcatagctatttaattgcccaatgtaaaactttaatgccatttctaatgcttttattcatttttgaagtatgagtttgtagggacaaagaatgtatgttatcgtagacaagacccccagagactcttttcagcagaaagttatgcttctagttgccttaccatgtttcttgcaaaactgtccatggtcctcaagggtgttggaaacattatgtttattaaatgggcctctcttcctttgctgtgcacttgatgggtgaactggattggggtgtgcacatccaggaggaggaggagagacctgtagaagtttaaagatagtttgtaaatatcttctaatgcttgtttttagtccttttatgttggagaagttcatggtatgtagtttaatgcaaaatgaaaccattttatttcaatgttattaaaaaggtttgttttattaggaagttaatgtattgttgcagtgttttgtgcctgtttaaaggcttttgtttagcagagtgaatgtaaaatacagtaaaatgttaagattgtcatctactttttaaaaaaaaatatcaacttggaattgttttttaaaggctcaatcaaggaagtgaggtgtgcaataaggtagcaagtaaaacgcagttgcgtttttatgtcatgttagagatccatacaattttccactcacgggatttttgttgatggctgaattcttgtggattcataagaggatcatgcccttagcaagtacttttgttttgttttaaattaagagattcccaaatgcctttttccccctcatcttgaaatgagatgagtttttatgtgtaagcaatatttatttaactattctataaaattattgagtgcctactgaggcctttaagcaccgctaacattcctttccatcattcttttaaatgacataaaataattgtgcaatgttcctgatgatgtaccccacaagctgcattcaaactcaaatctgtgggaatgagtgactcgacaaaatgtaattcggatcagatcctcatcccctgactgtgtgaaaaaagtactctccttctagtgaaggattgtcacagagtttcactggatgaaactatgacccagtattcttactgtattttacatatgcctgtaaattatttgcaaaaaagaagaagaagaggaagaaagaaaagaaagaaaagaaagaaagaaagaaagaaagaaagaaagaaagaaagaaagaaagaaagaaagaaagaataaaaaaaaatgataacatggcaaccaccaaactcccttaaaaacaaacattggtgacatggccaattaagtatcagtgagcctcctatctgggacttatctgttcctattgtttcaaaaccatttcatgtacactactgaggtaagtttataacttgaaatgtgaactttttttttttttagtgttaagaacaaactatataaatgtaaaaaaaaagttttagagttctgttttcaaacattgctagtggtttagttaactttagctgctttatatttgaaaagcttttatttagatcttgctccatttacagtacattcttaggatgtatgtagtaaataaagctttctttaaagcaatcgcaa

SEQ ID NO: 57188 - DNA, 3537 bp, Homo sapiens
ctggtactgctcccgagtacgggatgttggcccattccgcgcctacaaacaggcttagcgctccactgaaatgcgggaggctccttaactcttgtataaacagaaaccctccgtaactctaggtcagagcgcactaaaatgagccacttctgaacgagcagcgcccaggccccaggccctgctgcgaaggccccggcaaaggtcagggccccgtccgcgtgacgctcctgcctgcgcgcggccaagccatgctcggccccagctcaggtaacggaggccttggaaggagactctgcgtcaggtcacccagcagagatcagcaatccttggctcactgaggaggtttggatttgcctcaaagggcactgcaaaaattgaacagaggaatcccaaggaagctgcctgaatttgcctgtatactctcgttctgcgacttataaaggaccagacaaatcaaattagtggttttgtagccatccctgccattggggctcagtattccatgtttccagcagctccagcccctaaaatgattgaagatggcaaaatccacacagtggagcacatgatcagccccattgctgtgcagccagacccagccagtgctgctgccgccgcagccgcggccgcagccgccgcagccgctgtcattcccactgtgtcgacgccaccacctttccagggccgcccaataactccagtatacacggtggctccaaacgttcagagaattcctactgccgggatctacggggccagttacgtgccatttgctgctccagctacagccacgatcgccacactacagaagaacgcggcagccgcggccgccgtgtatggaggatacgcaggctacatacctcaggccttccctgctgctgccattcaggtccccatccccgacgtctaccagacatactgaggctggtgaccagcacgaagacagaccacacaaacaccactgaaggaacgcttgactatttatgaagaaggaacatgttggattcacacatgcaacctgaaagtgaagaatgttagcagatttatttctgaattattttatatacatgaagttttcactagttttttaagactattttcaacttagcatgcctacgttcatacatttccaaaagacttgcaatggttcgtgccttcattccatcttttaaaaatttgtatgctgtactacatttgtatagaggtttttgttgttgtttttttaaggatatattttcagtatgaaggttattttcttaacttctgcactccagagatttctattttgtagtaccttcaataatatatcaactatatattaaaaaagcacacttgaggagctagggaactattttgaaaaatatatacaatatttaaagatacaaacagtagtgcttaaaaatactacataaagcattattttaaaggttatactggaaagtgcaattttaaaatgagtaaaacctctgtatttctgctggcattaagggttgatggtgttaccatgtatcatcatggcggtactattttttaaaagaaattaaacactggatctctccttaagccaacattgaaaagacttgccgcacttctgagtccaaacactggaaagctctcctttgccaccgttagccggggctcattctccatgtgccttagccttaaacatgcccccactcccacatctctcaccctgtcccctcctccccagattcccaatcccaccgcaatgtttggcaagcctaggactgataagtagctctgatagaggagctggtggcttttatacttcttcctgggtttttgttggggtttgttgtttcgttgttttttgttttttttttgtttggttggggaagtattgtcttctacgtgtgctattttcagtagcagagtaagcacaaggttttaatcgagttgcataagacacctttgcatagctatttaattgcccaatgtaaaactttaatgccatttctaatgcttttattcatttttgaagtatgagtttgtagggacaaagaatgtatgttatcgtagacaagacccccagagactcttttcagcagaaagttatgcttctagttgccttaccatgtttcttgcaaaactgtccatggtcctcaagggtgttggaaacattatgtttattaaatgggcctctcttcctttgctgtgcacttgatgggtgaactggattggggtgtgcacatccaggaggaggaggagagacctgtagaagtttaaagatagtttgtaaatatcttctaatgcttgtttttagtccttttatgttggagaagttcatggtatgtagtttaatgcaaaatgaaaccattttatttcaatgttattaaaaaggtttgttttattaggaagttaatgtattgttgcagtgttttgtgcctgtttaaaggcttttgtttagcagagtgaatgtaaaatacagtaaaatgttaagattgtcatctactttttaaaaaaaaatatcaacttggaattgttttttaaaggctcaatcaaggaagtgaggtgtgcaataaggtagcaagtaaaacgcagttgcgtttttatgtcatgttagagatccatacaattttccactcacgggatttttgttgatggctgaattcttgtggattcataagaggatcatgcccttagcaagtacttttgttttgttttaaattaagagattcccaaatgcctttttccccctcatcttgaaatgagatgagtttttatgtgtaagcaatatttatttaactattctataaaattattgagtgcctactgaggcctttaagcaccgctaacattcctttccatcattcttttaaatgacataaaataattgtgcaatgttcctgatgatgtaccccacaagctgcattcaaactcaaatctgtgggaatgagtgactcgacaaaatgtaattcggatcagatcctcatcccctgactgtgtgaaaaaagtactctccttctagtgaaggattgtcacagagtttcactggatgaaactatgacccagtattcttactgtattttacatatgcctgtaaattatttgcaaaaaagaagaagaagaggaagaaagaaaagaaagaaaagaaagaaagaaagaaagaaagaaagaaagaaagaaagaaagaaagaaagaaagaaagaataaaaaaaaatgataacatggcaaccaccaaactcccttaaaaacaaacattggtgacatggccaattaagtatcagtgagcctcctatctgggacttatctgttcctattgtttcaaaaccatttcatgtacactactgaggtaagtttataacttgaaatgtgaactttttttttttttagtgttaagaacaaactatataaatgtaaaaaaaaagttttagagttctgttttcaaacattgctagtggtttagttaactttagctgctttatatttgaaaagcttttatttagatcttgctccatttacagtacattcttaggatgtatgtagtaaataaagctttctttaaagcaatcgcaa

SEQ ID NO: 57189 - DNA, 3654 bp, Homo sapiens
ccgtgcgcagcgccccacgcagccgggacgcggcgccgctctgcgggtggaaccgccgcgcgctcccggcctcgggagctgagcccgagagaacttcgctgccttcgggtcgccgctcccgctttccactgtggaatgtgcagcttgggatagagagaaaccagggtttggggagcggtcctcctggagactttctctctgcaagtctccaaggttaagcaattctgacccactggaattcccagagcctgggagttaagcctaaaacgctctgttgctttaagcggcgcggtggggagtcgctggacactccttattttggttttacattaaaaagaaggcggacgagaagatgttgtaggtgacttcctagctgtgttaagttgctcctgggctgtgaatggtgttaatttctgaagtgggcggctccaaaaacttaacaaggaaagctcaggtaacggaggccttggaaggagactctgcgtcaggtcacccagcagagatcagcaatccttggctcactgaggaggtttggatttgcctcaaagggcactgcaaaaattgaacagaggaatcccaaggaagctgcctgaatttgcctgtatactctcgttctgcgacttataaaggaccagacaaatcaaattagtggttttggtttccgccagctgtggatgcctttgacattatgaccgcagaggattccaccgcagccatgagcagtgactcggccgccgggtcctcggccaaggtgcccgagggcgtggcgggcgcgcccaacgaggcagcactgctggcgctgatggagcgcacgggctacagcatggtgcaagagaacgttcagagaattcctactgccgggatctacggggccagttacgtgccatttgctgctccagctacagccacgatcgccacactacagaagaacgcggcagccgcggccgccgtgtatggaggatacgcaggctacatacctcaggccttccctgctgctgccattcaggtccccatccccgacgtctaccagacatactgaggctggtgaccagcacgaagacagaccacacaaacaccactgaaggaacgcttgactatttatgaagaaggaacatgttggattcacacatgcaacctgaaagtgaagaatgttagcagatttatttctgaattattttatatacatgaagttttcactagttttttaagactattttcaacttagcatgcctacgttcatacatttccaaaagacttgcaatggttcgtgccttcattccatcttttaaaaatttgtatgctgtactacatttgtatagaggtttttgttgttgtttttttaaggatatattttcagtatgaaggttattttcttaacttctgcactccagagatttctattttgtagtaccttcaataatatatcaactatatattaaaaaagcacacttgaggagctagggaactattttgaaaaatatatacaatatttaaagatacaaacagtagtgcttaaaaatactacataaagcattattttaaaggttatactggaaagtgcaattttaaaatgagtaaaacctctgtatttctgctggcattaagggttgatggtgttaccatgtatcatcatggcggtactattttttaaaagaaattaaacactggatctctccttaagccaacattgaaaagacttgccgcacttctgagtccaaacactggaaagctctcctttgccaccgttagccggggctcattctccatgtgccttagccttaaacatgcccccactcccacatctctcaccctgtcccctcctccccagattcccaatcccaccgcaatgtttggcaagcctaggactgataagtagctctgatagaggagctggtggcttttatacttcttcctgggtttttgttggggtttgttgtttcgttgttttttgttttttttttgtttggttggggaagtattgtcttctacgtgtgctattttcagtagcagagtaagcacaaggttttaatcgagttgcataagacacctttgcatagctatttaattgcccaatgtaaaactttaatgccatttctaatgcttttattcatttttgaagtatgagtttgtagggacaaagaatgtatgttatcgtagacaagacccccagagactcttttcagcagaaagttatgcttctagttgccttaccatgtttcttgcaaaactgtccatggtcctcaagggtgttggaaacattatgtttattaaatgggcctctcttcctttgctgtgcacttgatgggtgaactggattggggtgtgcacatccaggaggaggaggagagacctgtagaagtttaaagatagtttgtaaatatcttctaatgcttgtttttagtccttttatgttggagaagttcatggtatgtagtttaatgcaaaatgaaaccattttatttcaatgttattaaaaaggtttgttttattaggaagttaatgtattgttgcagtgttttgtgcctgtttaaaggcttttgtttagcagagtgaatgtaaaatacagtaaaatgttaagattgtcatctactttttaaaaaaaaatatcaacttggaattgttttttaaaggctcaatcaaggaagtgaggtgtgcaataaggtagcaagtaaaacgcagttgcgtttttatgtcatgttagagatccatacaattttccactcacgggatttttgttgatggctgaattcttgtggattcataagaggatcatgcccttagcaagtacttttgttttgttttaaattaagagattcccaaatgcctttttccccctcatcttgaaatgagatgagtttttatgtgtaagcaatatttatttaactattctataaaattattgagtgcctactgaggcctttaagcaccgctaacattcctttccatcattcttttaaatgacataaaataattgtgcaatgttcctgatgatgtaccccacaagctgcattcaaactcaaatctgtgggaatgagtgactcgacaaaatgtaattcggatcagatcctcatcccctgactgtgtgaaaaaagtactctccttctagtgaaggattgtcacagagtttcactggatgaaactatgacccagtattcttactgtattttacatatgcctgtaaattatttgcaaaaaagaagaagaagaggaagaaagaaaagaaagaaaagaaagaaagaaagaaagaaagaaagaaagaaagaaagaaagaaagaaagaaagaaagaataaaaaaaaatgataacatggcaaccaccaaactcccttaaaaacaaacattggtgacatggccaattaagtatcagtgagcctcctatctgggacttatctgttcctattgtttcaaaaccatttcatgtacactactgaggtaagtttataacttgaaatgtgaactttttttttttttagtgttaagaacaaactatataaatgtaaaaaaaaagttttagagttctgttttcaaacattgctagtggtttagttaactttagctgctttatatttgaaaagcttttatttagatcttgctccatttacagtacattcttaggatgtatgtagtaaataaagctttctttaaagcaatcgcaa

SEQ ID NO: 57190 - DNA, 3211 bp, Homo sapiens
  misc_feature (16)..(16): n is a, c, g, or t
cagcagctccagcccntaaaatgattgaagatggcaaaatccacacagtggagcacatgatcagccccattgctgtgcagccagacccagcccagctacgtgtactcctgcgacccctacacactggcctactacggctacccctacaacgcgctcattgggcccaacagggactactttgtgaaagcaggcagcataagaggccgagggcgaggtgcagctggcaacagagccccagggcctaggggttcctacctcgggggatattctgctggccgtggtatatatagccgatatcatgaagggaaaggacagccgctgtcattcccactgtgtcgacgccaccacctttccagggccgcccaataactccagtatacacggtggctccaaacgttcagagaattcctactgccgggatctacggggccagttacgtgccatttgctgctccagctacagccacgatcgccacactacagaagaacgcggcagccgcggccgccgtgtatggaggatacgcaggctacatacctcaggccttccctgctgctgccattcaggtccccatccccgacgtctaccagacatactgaggctggtgaccagcacgaagacagaccacacaaacaccactgaaggaacgcttgactatttatgaagaaggaacatgttggattcacacatgcaacctgaaagtgaagaatgttagcagatttatttctgaattattttatatacatgaagttttcactagttttttaagactattttcaacttagcatgcctacgttcatacatttccaaaagacttgcaatggttcgtgccttcattccatcttttaaaaatttgtatgctgtactacatttgtatagaggtttttgttgttgtttttttaaggatatattttcagtatgaaggttattttcttaacttctgcactccagagatttctattttgtagtaccttcaataatatatcaactatatattaaaaaagcacacttgaggagctagggaactattttgaaaaatatatacaatatttaaagatacaaacagtagtgcttaaaaatactacataaagcattattttaaaggttatactggaaagtgcaattttaaaatgagtaaaacctctgtatttctgctggcattaagggttgatggtgttaccatgtatcatcatggcggtactattttttaaaagaaattaaacactggatctctccttaagccaacattgaaaagacttgccgcacttctgagtccaaacactggaaagctctcctttgccaccgttagccggggctcattctccatgtgccttagccttaaacatgcccccactcccacatctctcaccctgtcccctcctccccagattcccaatcccaccgcaatgtttggcaagcctaggactgataagtagctctgatagaggagctggtggcttttatacttcttcctgggtttttgttggggtttgttgtttcgttgttttttgttttttttttgtttggttggggaagtattgtcttctacgtgtgctattttcagtagcagagtaagcacaaggttttaatcgagttgcataagacacctttgcatagctatttaattgcccaatgtaaaactttaatgccatttctaatgcttttattcatttttgaagtatgagtttgtagggacaaagaatgtatgttatcgtagacaagacccccagagactcttttcagcagaaagttatgcttctagttgccttaccatgtttcttgcaaaactgtccatggtcctcaagggtgttggaaacattatgtttattaaatgggcctctcttcctttgctgtgcacttgatgggtgaactggattggggtgtgcacatccaggaggaggaggagagacctgtagaagtttaaagatagtttgtaaatatcttctaatgcttgtttttagtccttttatgttggagaagttcatggtatgtagtttaatgcaaaatgaaaccattttatttcaatgttattaaaaaggtttgttttattaggaagttaatgtattgttgcagtgttttgtgcctgtttaaaggcttttgtttagcagagtgaatgtaaaatacagtaaaatgttaagattgtcatctactttttaaaaaaaaatatcaacttggaattgttttttaaaggctcaatcaaggaagtgaggtgtgcaataaggtagcaagtaaaacgcagttgcgtttttatgtcatgttagagatccatacaattttccactcacgggatttttgttgatggctgaattcttgtggattcataagaggatcatgcccttagcaagtacttttgttttgttttaaattaagagattcccaaatgcctttttccccctcatcttgaaatgagatgagtttttatgtgtaagcaatatttatttaactattctataaaattattgagtgcctactgaggcctttaagcaccgctaacattcctttccatcattcttttaaatgacataaaataattgtgcaatgttcctgatgatgtaccccacaagctgcattcaaactcaaatctgtgggaatgagtgactcgacaaaatgtaattcggatcagatcctcatcccctgactgtgtgaaaaaagtactctccttctagtgaaggattgtcacagagtttcactggatgaaactatgacccagtattcttactgtattttacatatgcctgtaaattatttgcaaaaaagaagaagaagaggaagaaagaaaagaaagaaaagaaagaaagaaagaaagaaagaaagaaagaaagaaagaaagaaagaaagaaagaaagaataaaaaaaaatgataacatggcaaccaccaaactcccttaaaaacaaacattggtgacatggccaattaagtatcagtgagcctcctatctgggacttatctgttcctattgtttcaaaaccatttcatgtacactactgaggtaagtttataacttgaaatgtgaactttttttttttttagtgttaagaacaaactatataaatgtaaaaaaaaagttttagagttctgttttcaaacattgctagtggtttagttaactttagctgctttatatttgaaaagcttttatttagatcttgctccatttacagtacattcttaggatgtatgtagtaaataaagctttctttaaagcaatcgcaa

SEQ ID NO: 57191 - DNA, 2998 bp, Homo sapiens
gccgaatttggaaatccctaccgtcaacccagttgccattaaacttggtacagtagccatccctgccagggcctaggggttcctacctcgggggatattctgctggccgtggtatatatagccgatatcatgaagggaaaggaggccgcccaataactccagtatacacggtggctccaaacgttcagagaattcctactgccgggatctacggggccagttacgtgccatttgctgctccagctacagccacgatcgccacactacagaagaacgcggcagccgcggccgccgtgtatggaggatacgcaggctacatacctcaggccttccctgctgctgccattcaggtccccatccccgacgtctaccagacatactgaggctggtgaccagcacgaagacagaccacacaaacaccactgaaggaacgcttgactatttatgaagaaggaacatgttggattcacacatgcaacctgaaagtgaagaatgttagcagatttatttctgaattattttatatacatgaagttttcactagttttttaagactattttcaacttagcatgcctacgttcatacatttccaaaagacttgcaatggttcgtgccttcattccatcttttaaaaatttgtatgctgtactacatttgtatagaggtttttgttgttgtttttttaaggatatattttcagtatgaaggttattttcttaacttctgcactccagagatttctattttgtagtaccttcaataatatatcaactatatattaaaaaagcacacttgaggagctagggaactattttgaaaaatatatacaatatttaaagatacaaacagtagtgcttaaaaatactacataaagcattattttaaaggttatactggaaagtgcaattttaaaatgagtaaaacctctgtatttctgctggcattaagggttgatggtgttaccatgtatcatcatggcggtactattttttaaaagaaattaaacactggatctctccttaagccaacattgaaaagacttgccgcacttctgagtccaaacactggaaagctctcctttgccaccgttagccggggctcattctccatgtgccttagccttaaacatgcccccactcccacatctctcaccctgtcccctcctccccagattcccaatcccaccgcaatgtttggcaagcctaggactgataagtagctctgatagaggagctggtggcttttatacttcttcctgggtttttgttggggtttgttgtttcgttgttttttgttttttttttgtttggttggggaagtattgtcttctacgtgtgctattttcagtagcagagtaagcacaaggttttaatcgagttgcataagacacctttgcatagctatttaattgcccaatgtaaaactttaatgccatttctaatgcttttattcatttttgaagtatgagtttgtagggacaaagaatgtatgttatcgtagacaagacccccagagactcttttcagcagaaagttatgcttctagttgccttaccatgtttcttgcaaaactgtccatggtcctcaagggtgttggaaacattatgtttattaaatgggcctctcttcctttgctgtgcacttgatgggtgaactggattggggtgtgcacatccaggaggaggaggagagacctgtagaagtttaaagatagtttgtaaatatcttctaatgcttgtttttagtccttttatgttggagaagttcatggtatgtagtttaatgcaaaatgaaaccattttatttcaatgttattaaaaaggtttgttttattaggaagttaatgtattgttgcagtgttttgtgcctgtttaaaggcttttgtttagcagagtgaatgtaaaatacagtaaaatgttaagattgtcatctactttttaaaaaaaaatatcaacttggaattgttttttaaaggctcaatcaaggaagtgaggtgtgcaataaggtagcaagtaaaacgcagttgcgtttttatgtcatgttagagatccatacaattttccactcacgggatttttgttgatggctgaattcttgtggattcataagaggatcatgcccttagcaagtacttttgttttgttttaaattaagagattcccaaatgcctttttccccctcatcttgaaatgagatgagtttttatgtgtaagcaatatttatttaactattctataaaattattgagtgcctactgaggcctttaagcaccgctaacattcctttccatcattcttttaaatgacataaaataattgtgcaatgttcctgatgatgtaccccacaagctgcattcaaactcaaatctgtgggaatgagtgactcgacaaaatgtaattcggatcagatcctcatcccctgactgtgtgaaaaaagtactctccttctagtgaaggattgtcacagagtttcactggatgaaactatgacccagtattcttactgtattttacatatgcctgtaaattatttgcaaaaaagaagaagaagaggaagaaagaaaagaaagaaaagaaagaaagaaagaaagaaagaaagaaagaaagaaagaaagaaagaaagaaagaaagaataaaaaaaaatgataacatggcaaccaccaaactcccttaaaaacaaacattggtgacatggccaattaagtatcagtgagcctcctatctgggacttatctgttcctattgtttcaaaaccatttcatgtacactactgaggtaagtttataacttgaaatgtgaactttttttttttttagtgttaagaacaaactatataaatgtaaaaaaaaagttttagagttctgttttcaaacattgctagtggtttagttaactttagctgctttatatttgaaaagcttttatttagatcttgctccatttacagtacattcttaggatgtatgtagtaaataaagctttctttaaagcaatcgcaa

SEQ ID NO: 57192 - DNA, 4500 bp, Homo sapiens
ctggtactgctcccgagtacgggatgttggcccattccgcgcctacaaacaggcttagcgctccactgaaatgcgggaggctccttaactcttgtataaacagaaaccctccgtaactctaggtcagagcgcactaaaatgagccacttctgaacgagcagcgcccaggccccaggccctgctgcgaaggccccggcaaaggtcagggccccgtccgcgtgacgctcctgcctgcgcgcggccaagccatgctcggccccagctcaggtaacggaggccttggaaggagactctgcgtcaggtcacccagcagagatcagcaatccttggctcactgaggaggtttggatttgcctcaaagggcactgcaaaaattgaacagaggaatcccaaggaagctgcctgaatttgcctgtatactctcgttctgcgacttataaaggaccagacaaatcaaattagtggttttggtttccgccagctgtggatgcctttgacattatgaccgcagaggattccaccgcagccatgagcagtgactcggccgccgggtcctcggccaaggtgcccgagggcgtggcgggcgcgcccaacgaggcagcactgctggcgctgatggagcgcacgggctacagcatggtgcaagagaacgggcagcgcaagtacggcggcccaccgcccggctgggagggcccgcacccgcagcgtggctgcgaggtcttcgtgggcaagatcccgcgcgacgtgtacgaggacgagctggtgcccgtgttcgaggccgtgggccgcatctacgagctgcgcctcatgatggactttgacggcaagaaccgcggctacgccttcgtcatgtactgccacaagcacgaggccaagcgcgcagtgcgtgagctcaacaactacgagatccgcccgggccgcctgctcggcgtgtgctgcagcgtggacaactgccgcctcttcatcggcgggatccccaagatgaagaagcgcgaggaaatcctggaggagattgccaaggtcaccgagggcgtgctggacgtgatcgtctacgccagcgcggccgacaagatgaagaaccgcggcttcgccttcgtggagtacgagagccaccgcgcggctgccatggctcgccgcaagctcatgcctggccgcatccagctgtggggccaccagatcgccgtggactgggccgagcctgagatcgacgtggacgaggacgtgatggagaccgtgaagatcctctacgtgcgcaacctcatgatcgagaccaccgaggacaccatcaagaagagcttcggccagttcaaccccggctgcgtggagcgcgtcaagaagatccgcgactacgccttcgtgcacttcaccagccgcgaggatgccgtgcatgccatgaacaacctcaacggcactgagctggagggctcgtgcctggaggtcacgctggccaagcccgtggacaaggagcagtactcgcgctaccagaaggcagccaggggcggcggcgcggctgaggcagcgcagcagcccagctacgtgtactcctgcgacccctacacactggcctactacggctacccctacaacgcgctcattgggcccaacagggactactttgtgaaagcaggcagcataagaggccgagggcgaggtgcagctggcaacagagccccagggcctaggggttcctacctcgggggatattctgctggccgtggtatatatagccgatatcatgaagggaaaggaaagcagcaagaaaaaggatatgaactggtgccgaatttggaaatccctaccgtcaacccagttgccattaaacctggtacagtagccatccctgccattggggctcagtattccatgtttccagcagctccagcccctaaaatgattgaagatggcaaaatccacacagtggagcacatgatcagccccattgctgtgcagccagacccagccagtgctgctgccgccgcagccgcggccgcagccgccgcagccgctgtcattcccactgtgtcgacgccaccacctttccagggccgcccaataactccagtatacacggtggctccaaacgttcagagaattcctactgccgggatctacggggccagttacgtgccatttgctgctccagctacagccacgatcgccacactacagaagaacgcggcagccgcggccgccgtgtatggaggatacgcaggctacatacctcaggccttccctgctgctgccattcaggtccccatccccgacgtctaccagacatactgaggctggtgaccagcacgaagacagaccacacaaacaccactgaaggaacgcttgactatttatgaagaaggaacatgttggattcacacatgcaacctgaaagtgaagaatgttagcagatttatttctgaattattttatatacatgaagttttcactagttttttaagactattttcaacttagcatgcctacgttcatacatttccaaaagacttgcaatggttcgtgccttcattccatcttttaaaaatttgtatgctgtactacatttgtatagaggtttttgttgttgtttttttaaggatatattttcagtatgaaggttattttcttaacttctgcactccagagatttctattttgtagtaccttcaataatatatcaactatatattaaaaaagcacacttgaggagctagggaactattttgaaaaatatatacaatatttaaagatacaaacagtagtgcttaaaaatactacataaagcattattttaaaggttatactggaaagtgcaattttaaaatgagtaaaacctctgtatttctgctggcattaagggttgatggtgttaccatgtatcatcatggcggtactattttttaaaagaaattaaacactggatctctccttaagccaacattgaaaagacttgccgcacttctgagtccaaacactggaaagctctcctttgccaccgttagccggggctcattctccatgtgccttagccttaaacatgcccccactcccacatctctcaccctgtcccctcctccccagattcccaatcccaccgcaatgtttggcaagcctaggactgataagtagctctgatagaggagctggtggcttttatacttcttcctgggtttttgttggggtttgttgtttcgttgttttttgttttttttttgtttggttggggaagtattgtcttctacgtgtgctattttcagtagcagagtaagcacaaggttttaatcgagttgcataagacacctttgcatagctatttaattgcccaatgtaaaactttaatgccatttctaatgcttttattcatttttgaagtatgagtttgtagggacaaagaatgtatgttatcgtagacaagacccccagagactcttttcagcagaaagttatgcttctagttgccttaccatgtttcttgcaaaactgtccatggtcctcaagggtgttggaaacattatgtttattaaatgggcctctcttcctttgctgtgcacttgatgggtgaactggattggggtgtgcacatccaggaggaggaggagagacctgtagaagtttaaagatagtttgtaaatatcttctaatgcttgtttttagtccttttatgttggagaagttcatggtatgtagtttaatgcaaaatgaaaccattttatttcaatgttattaaaaaggtttgttttattaggaagttaatgtattgttgcagtgttttgtgcctgtttaaaggcttttgtttagcagagtgaatgtaaaatacagtaaaatgttaagattgtcatctactttttaaaaaaaaatatcaacttggaattgttttttaaaggctcaatcaaggaagtgaggtgtgcaataaggtagcaagtaaaacgcagttgcgtttttatgtcatgttagagatccatacaattttccactcacgggatttttgttgatggctgaattcttgtggattcataagaggatcatgcccttagcaagtacttttgttttgttttaaattaagagattcccaaatgcctttttccccctcatcttgaaatgagatgagtttttatgtgtaagcaatatttatttaactattctataaaattattgagtgcctactgaggcctttaagcaccgctaacattcctttccatcattcttttaaatgacataaaataattgtgcaatgttcctgatgatgtaccccacaagctgcattcaaactcaaatctgtgggaatgagtgactcgacaatctcttttcctatcttttcctccccccctcctcagtcctctttccccctcccttctcttctccttccccttttctcactttcttctctctcttctccttcttccatctctctttctcaccctcctctttcaacttatttgcaaaaaagaagaagaagaggaagaaacactcttattccttccgctatcccctatccttcgcactgtccga

SEQ ID NO: 57193 - DNA, 3738 bp, Homo sapiens
ctggtactgctcccgagtacgggatgttggcccattccgcgcctacaaacaggcttagcgctccactgaaatgcgggaggctccttaactcttgtataaacagaaaccctccgtaactctaggtcagagcgcactaaaatgagccacttctgaacgagcagcgcccaggccccaggccctgctgcgaaggccccggcaaaggtcagggccccgtccgcgtgacgctcctgcctgcgcgcggccaagccatgctcggccccagctcaggtaacggaggccttggaaggagactctgcgtcaggtcacccagcagagatcagcaatccttggctcactgaggaggtttggatttgcctcaaagggcactgcaaaaattgaacagaggaatcccaaggaagctgcctgaatttgcctgtatactctcgttctgcgacttataaaggaccagacaaatcaaattagtggttttggtttccgccagctgtggatgcctttgacattatgaccgcagaggattccaccgcagccatgagcagtgactcggccgccgggtcctcggccaaggtgcccgagggcgtggcgggcgcgcccaacgaggcagcactgctggcgctgatggagcgcacgggctacagcatggtgcaagagaacgggcagcgcaagtacggcggcccaccgcccggctgggagggcccgcacccgcagcgtggctgcgaggtcttcgtgggcaagatcccgcgcgacgtgtacgaggacgagctggtgcccgtgttcgaggccgtgggccgcatctacgagctgcgcctcatgatggactttgacggcaagaaccgcggctacgccttcgtcatgtactgccacaagcacgaggccaagcgcgcagtgcgtgagctcaacaactacgagatccgcccgggccgcctgctcggcgtgtgctgcagcgtggacaactgccgcctcttcatcggcgggatccccaagatgaagaagcgcgaggaaatcctggaggagattgccaaggtcaccgagggcgtgctggacgtgatcgtctacgccagcgcggccgacaagatgaagaaccgcggcttcgccttcgtggagtacgagagccaccgcgcggctgccatggctcgccgcaagctcatgcctggccgcatccagctgtggggccaccagatcgccgtggactgggccgagcctgagatcgacgtggacgaggacgtgatggagaccgtgaagatcctctacgtgcgcaacctcatgatcgagaccaccgaggacaccatcaagaagagcttcggccagttcaaccccggctgcgtggagcgcgtcaagaagatccgcgactacgccttcgtgcacttcaccagccgcgaggatgccgtgcatgccatgaacaacctcaacggcactgagctggagggctcgtgcctggaggtcacgctggccaagcccgtggacaaggagcagtactcgcgctaccagaaggcagccaggggcggcggcgcggctgaggcagcgcagcagcccagctacgtgtactcctgcgacccctacacactggcctactacggctacccctacaacgcgctcattgggcccaacagggactactttgtgaaagcaggcagcataagaggccgagggcgaggtgcagctggcaacagagccccagggcctaggggttcctacctcgggggatattctgctggccgtggtatatatagccgatatcatgaagggaaaggaaagcagcaagaaaaaggatatgaactggtgccgaatttggaaatccctaccgtcaacccagttgccattaaacctggtacagtagccatccctgccattggggctcagtattccatgtttccagcagctccagcccctaaaatgattgaagatggcaaaatccacacagtggagcacatgatcagccccattgctgtgcagccagacccagccagtgctgctgccgccgcagccgcggccgcagccgccgcagccgctgtcattcccactgtgtcgacgccaccacctttccagggccgcccaataactccagtatacacggtggctccaaacgttcagagaattcctactgccgggatctacggggccagttacgtgccatttgctgctccagctacagccacgatcgccacactacagaagaacgcggcagccgcggccgccgtgtatggaggatacgcaggctacatacctcaggccttccctgctgctgccattcaggtccccatccccgacgtctaccagacatactgaggctggtgaccagcacgaagacagaccacacaaacaccactgaaggaacgcttgactatttatgaagaaggaacatgttggattcacacatgcaacctgaaagtgaagaatgttagcagatttatttctgaattattttatatacatgaagttttcactagttttttaagactattttcaacttagcatgcctacgttcatacatttccaaaagacttgcaatggttcgtgccttcattccatcttttaaaaatttgtatgctgtactacatttgtatagaggtttttgttgttgtttttttaaggatatattttcagtatgaaggttattttcttaacttctgcactccagagatttctattttgtagtaccttcaataatatatcaactatatattaaaaaagcacacttgaggagctagggaactattttgaaaaatatatacaatatttaaagatacaaacagtagtgcttaaaaatactacataaagcattattttaaaggttatactggaaagtgcaattttaaaatgagtaaaacctctgtatttctgctggcattaagggttgatggtgttaccatgtatcatcatggcggtactattttttaaaagaaattaaacactggatctctccttaagccaacattgaaaagacttgccgcacttctgagtccaaacactggaaagctctcctttgccaccgttagccggggctcattctccatgtgccttagccttaaacatgcccccactcccacatctctcaccctgtcccctcctccccagattcccaatcccaccgcaatgtttggcaagcctaggactgataagtagctctgatagaggagctggtggcttttatacttcttcctgggtttttgttggggtttgttgtttcgttgttttttgttttttttttgtttggttggggaagtattgtcttctacgtgtgctattttcagtagcagagtaagcacaaggttttaatcgagttgcataagacacctttgcatagctatttaattgcccaatgtaaaactttaatgccatttctaatgcttttattcatttttgaagtatgagtttgtagggacaaagaatgtatgttatcgtagacaagacccccagagactcttttcagcagaaagttatgcttctagttgccttaccatgtttcttgcaaaactgtccatggtcctcaagggtgttggaaacattatgtttattaaatgggcctctcttcctttgctgtgcacttgatgggtgaactggattggggtgtgcacatccaggaggaggaggagagacctgtagaagtttaaagatagtttgtaaatatcttctaatgcttgtttttagtccttttatgttggagaagttcatggtatgtagtttaatgcaaaatgaaaccattttatttcaatgttattaaaaaggtttgttttattagga

SEQ ID NO: 57194 - DNA, 3600 bp, Homo sapiens
ctggtactgctcccgagtacgggatgttggcccattccgcgcctacaaacaggcttagcgctccactgaaatgcgggaggctccttaactcttgtataaacagaaaccctccgtaactctaggtcagagcgcactaaaatgagccacttctgaacgagcagcgcccaggccccaggccctgctgcgaaggccccggcaaaggtcagggccccgtccgcgtgacgctcctgcctgcgcgcggccaagccatgctcggccccagctcaggtaacggaggccttggaaggagactctgcgtcaggtcacccagcagagatcagcaatccttggctcactgaggaggtttggatttgcctcaaagggcactgcaaaaattgaacagaggaatcccaaggaagctgcctgaatttgcctgtatactctcgttctgcgacttataaaggaccagacaaatcaaattagtggttttggtttccgccagctgtggatgcctttgacattatgaccgcagaggattccaccgcagccatgagcagtgactcggccgccgggtcctcggccaaggtgcccgagggcgtggcgggcgcgcccaacgaggcagcactgctggcgctgatggagcgcacgggctacagcatggtgcaagagaacgggcagcgcaagtacggcggcccaccgcccggctgggagggcccgcacccgcagcgtggctgcgaggtcttcgtgggcaagatcccgcgcgacgtgtacgaggacgagctggtgcccgtgttcgaggccgtgggccgcatctacgagctgcgcctcatgatggactttgacggcaagaaccgcggctacgccttcgtcatgtactgccacaagcacgaggccaagcgcgcagtgcgtgagctcaacaactacgagatccgcccgggccgcctgctcggcgtgtgctgcagcgtggacaactgccgcctcttcatcggcgggatccccaagatgaagaagcgcgaggaaatcctggaggagattgccaaggtcaccgagggcgtgctggacgtgatcgtctacgccagcgcggccgacaagatgaagaaccgcggcttcgccttcgtggagtacgagagccaccgcgcggctgccatggctcgccgcaagctcatgcctggccgcatccagctgtggggccaccagatcgccgtggactgggccgagcctgagatcgacgtggacgaggacgtgatggagaccgtgaagatcctctacgtgcgcaacctcatgatcgagaccaccgaggacaccatcaagaagagcttcggccagttcaaccccggctgcgtggagcgcgtcaagaagatccgcgactacgccttcgtgcacttcaccagccgcgaggatgccgtgcatgccatgaacaacctcaacggcactgagctggagggctcgtgcctggaggtcacgctggccaagcccgtggacaaggagcagtactcgcgctaccagaaggcagccaggggcggcggcgcggctgaggcagcgcagcagcccagctacgtgtactcctgcgacccctacacactggcctactacggctacccctacaacgcgctcattgggcccaacagggactactttgtgaaagcaggcagcataagaggccgagggcgaggtgcagctggcaacagagccccagggcctaggggttcctacctcgggggatattctgctggccgtggtatatatagccgatatcatgaagggaaaggaaagcagcaagaaaaaggatatgaactggtgccgaatttggaaatccctaccgtcaacccagttgccattaaacctggtacagtagccatccctgccattggggctcagtattccatgtttccagcagctccagcccctaaaatgattgaagatggcaaaatccacacagtggagcacatgatcagccccattgctgtgcagccagacccagccagtgctgctgccgccgcagccgcggccgcagccgccgcagccgctgtcattcccactgtgtcgacgccaccacctttccagggccgcccaataactccagtatacacggtggctccaaacgttcagagaattcctactgccgggatctacggggccagttacgtgccatttgctgctccagctacagccacgatcgccacactacagaagaacgcggcagccgcggccgccgtgtatggaggatacgcaggctacatacctcaggccttccctgctgctgccattcaggtccccatccccgacgtctaccagacatactgaggctggtgaccagcacgaagacagaccacacaaacaccactgaaggaacgcttgactatttatgaagaaggaacatgttggattcacacatgcaacctgaaagtgaagaatgttagcagatttatttctgaattattttatatacatgaagttttcactagttttttaagactattttcaacttagcatgcctacgttcatacatttccaaaagacttgcaatggttcgtgccttcattccatcttttaaaaatttgtatgctgtactacatttgtatagaggtttttgttgttgtttttttaaggatatattttcagtatgaaggttattttcttaacttctgcactccagagatttctattttgtagtaccttcaataatatatcaactatatattaaaaaagcacacttgaggagctagggaactattttgaaaaatatatacaatatttaaagatacaaacagtagtgcttaaaaatactacataaagcattattttaaaggttatactggaaagtgcaattttaaaatgagtaaaacctctgtatttctgctggcattaagggttgatggtgttaccatgtatcatcatggcggtactattttttaaaagaaattaaacactggatctctccttaagccaacattgaaaagacttgccgcacttctgagtccaaacactggaaagctctcctttgccaccgttagccggggctcattctccatgtgccttagccttaaacatgcccccactcccacatctctcaccctgtcccctcctccccagattcccaatcccaccgcaatgtttggcaagcctaggactgataagtagctctgatagaggagctggtggcttttatacttcttcctgggtttttgttggggtttgttgtttcgttgttttttgttttttttttgtttggttggggaagtattgtcttctacgtgtgctattttcagtagcagagtaagcacaaggttttaatcgagttgcataagacacctttgcatagctatttaattgcccaatgtaaaactttaatgccatttctaatgcttttattcatttttgaagtatgagtttgtagggacaaagaatgtatgttatcgtagacaagacccccagagactcttttcagcagaaagttatgcttctagttgccttaccatgtttcttgcaaaactgtccatggtcctcaagggtgttggaaacattatgtttattaaatgggcctctcttcctttgctgtgcacttgatgggtgaactggattgggtcatgttctgtggggatcctctaggtcacctgcgaa

SEQ ID NO: 57195 - DNA, 1400 bp, Homo sapiens
ggtctcagaggaagggcctctcgggcagcacctcctgttggaagtggctgaacaggggctcgcgtcgtgtgcacatccaggaggaggaggagagacctgtagaagtttaaagatagtttgtaaatatcttctaatgcttgtttttagtccttttatgttggagaagttcatggtatgtagtttaatgcaaaatgaaaccattttatttcaatgttattaaaaaggtttgttttattaggaagttaatgtattgttgcagtgttttgtgcctgtttaaaggcttttgtttagcagagtgaatgtaaaatacagtaaaatgttaagattgtcatctactttttaaaaaaaaatatcaacttggaattgttttttaaaggctcaatcaaggaagtgaggtgtgcaataaggtagcaagtaaaacgcagttgcgtttttatgtcatgttagagatccatacaattttccactcacgggatttttgttgatggctgaattcttgtggattcataagaggatcatgcccttagcaagtacttttgttttgttttaaattaagagattcccaaatgcctttttccccctcatcttgaaatgagatgagtttttatgtgtaagcaatatttatttaactattctataaaattattgagtgcctactgaggcctttaagcaccgctaacattcctttccatcattcttttaaatgacataaaataattgtgcaatgttcctgatgatgtaccccacaagctgcattcaaactcaaatctgtgggaatgagtgactcgacaaaatgtaattcggatcagatcctcatcccctgactgtgtgaaaaaagtactctccttctagtgaaggattgtcacagagtttcactggatgaaactatgacccagtattcttactgtattttacatatgcctgtaaattatttgcaaaaaagaagaagaagaggaagaaagaaaagaaagaaaagaaagaaagaaagaaagaaagaaagaaagaaagaaagaaagaaagaaagaaagaaagaataaaaaaaaatgataacatggcaaccaccaaactcccttaaaaacaaacattggtgacatggccaattaagtatcagtgagcctcctatctgggacttatctgttcctattgtttcaaaaccatttcatgtacactactgaggtaagtttataacttgaaatgtgaactttttttttttttagtgttaagaacaaactatataaatgtaaaaaaaaagttttagagttctgttttcaaacattgctagtggtttagttaactttagctgctttatatttgaaaagcttttatttagatcttgctccatttacagtacattcttaggatgtatgtagtaaataaagctttctttaaagcaatcgcaa

SEQ ID NO: 57196 - DNA, 3679 bp, Homo sapiens
ctggtactgctcccgagtacgggatgttggcccattccgcgcctacaaacaggcttagcgctccactgaaatgcgggaggctccttaactcttgtataaacagaaaccctccgtaactctaggtcagagcgcactaaaatgagccacttctgaacgagcagcgcccaggccccaggccctgctgcgaaggccccggcaaaggtcagggccccgtccgcgtgacgctcctgcctgcgcgcggccaagccatgctcggccccagctcaggtaacggaggccttggaaggagactctgcgtcaggtcacccagcagagatcagcaatccttggctcactgaggaggtttggatttgcctcaaagggcactgcaaaaattgaacagaggaatcccaaggaagctgcctgaatttgcctgtatactctcgttctgcgacttataaaggaccagacaaatcaaattagtggttttggtttccgccagctgtggatgcctttgacattatgaccgcagaggattccaccgcagccatgagcagtgactcggccgccgggtcctcggccaaggtgcccgagggcgtggcgggcgcgcccaacgaggcagcactgctggcgctgatggagcgcacgggctacagcatggtgcaagagaacgggcagcgcaagtacggcggcccaccgcccggctgggagggcccgcacccgcagcgtggctgcgaggtcttcgtgggcaagatcccgcgcgacgtgtacgaggacgagctggtgcccgtgttcgaggccgtgggccgcatctacgagctgcgcctcatgatggactttgacggcaagaaccgcggctacgccttcgtcatgtactgccacaagcacgaggccaagcgcgcagtgcgtgagctcaacaactacgagatccgcccgggccgcctgctcggcgtgtgctgcagcgtggacaactgccgcctcttcatcggcgggatccccaagatgaagaagcgcgaggaaatcctggaggagattgccaaggtcaccgagggcgtgctggacgtgatcgtctacgccagcgcggccgacaagatgaagaaccgcggcttcgccttcgtggagtacgagagccaccgcgcggctgccatggctcgccgcaagctcatgcctggccgcatccagctgtggggccaccagatcgccgtggactgggccgagcctgagatcgacgtggacgaggacgtgatggagaccgtgaagatcctctacgtgcgcaacctcatgatcgagaccaccgaggacaccatcaagaagagcttcggccagttcaaccccggctgcgtggagcgcgtcaagaagatccgcgactacgccttcgtgcacttcaccagccgcgaggatgccgtgcatgccatgaacaacctcaacggcactgagctggagggctcgtgcctggaggtcacgctggccaagcccgtggacaaggagcagtactcgcgctaccagaaggcagccaggggcggcggcgcggctgaggcagcgcagcagcccagctacgtgtactcctgcgacccctacacactggcctactacggctacccctacaacgcgctcattgggcccaacagggactactttgtgaaagcaggcagcataagaggccgagggcgaggtgcagctggcaacagagccccagggcctaggggttcctacctcgggggatattctgctggccgtggtatatatagccgatatcatgaagggaaaggaaagcagcaagaaaaaggatatgaactggtgccgaatttggaaatccctaccgtcaacccagttgccattaaacctggtacagtagccatccctgccattggggctcagtattccatgtttccagcagctccagcccctaaaatgattgaagatggcaaaatccacacagtggagcacatgatcagccccattgctgtgcagccagacccagccagtgctgctgccgccgcagccgcggccgcagccgccgcagccgctgtcattcccactgtgtcgacgccaccacctttccagggccgcccaataactccagtatacacggtggctccaaacgttcagagaattcctactgccgggatctacggggccagttacgtgccatttgctgctccagctacagccacgatcgccacactacagaagaacgcggcagccgcggccgccgtgtatggaggatacgcaggctacatacctcaggccttccctgctgctgccattcaggtccccatccccgacgtctaccagacatactgaggctggtgaccagcacgaagacagaccacacaaacaccactgaaggaacgcttgactatttatgaagaaggaacatgttggattcacacatgcaacctgaaagtgaagaatgttagcagatttatttctgaattattttatatacatgaagttttcactagttttttaagactattttcaacttagcatgcctacgttcatacatttccaaaagacttgcaatggttcgtgccttcattccatcttttaaaaatttgtatgctgtactacatttgtatagaggtttttgttgttgtttttttaaggatatattttcagtatgaaggttattttcttaacttctgcactccagagatttctattttgtagtaccttcaataatatatcaactatatattaaaaaagcacacttgaggagctagggaactattttgaaaaatatatacaatatttaaagatacaaacagtagtgcttaaaaatactacataaagcattattttaaaggttatactggaaagtgcaattttaaaatgagtaaaacctctgtatttctgctggcattaagggttgatggtgttaccatgtatcatcatggcggtactattttttaaaagaaattaaacactggatctctccttaagccaacattgaaaagacttgccgcacttctgagtccaaacactggaaagctctcctttgccaccgttagccggggctcattctccatgtgccttagccttaaacatgcccccactcccacatctctcaccctgtcccctcctccccagattcccaatcccaccgcaatgtttggcaagcctaggactgataagtagctctgatagaggagctggtggcttttatacttcttcctgggtttttgttggggtttgttgtttcgttgttttttgttttttttttgtttggttggggaagtattgtcttctacgtgtgctattttcagtagcagagtaagcacaaggttttaatcgagttgcataagacacctttgcatagctatttaattgcccaatgtaaaactttaatgccatttctaatgcttttattcatttttgaagtatgagtttgtagggacaaagaatgtatgttatcgtagacaagacccccagagactcttttcagcagaaagttatgcttctagttgccttaccatgtttcttgcaaaactgtccatggtcctcaagggtgttggaaacattatgtttattaaatgggcctctcttcctttgctgtgcacttgatgggtgaactggattggggtgtgcacatccaggaggaggaggagagacctgtagaagtttaaagatagtttgtaaatatcttctaatgcttgtttttagtccttttatgtgcctttcgtacaagagggatcct

SEQ ID NO: 57197 - DNA, 3102 bp, Homo sapiens
ctggtactgctcccgagtacgggatgttggcccattccgcgcctacaaacaggcttagcgctccactgaaatgcgggaggctccttaactcttgtataaacagaaaccctccgtaactctaggtcagagcgcactaaaatgagccacttctgaacgagcagcgcccaggccccaggccctgctgcgaaggccccggcaaaggtcagggccccgtccgcgtgacgctcctgcctgcgcgcggccaagccatgctcggccccagctcaggtaacggaggccttggaaggagactctgcgtcaggtcacccagcagagatcagcaatccttggctcactgaggaggtttggatttgcctcaaagggcactgcaaaaattgaacagaggaatcccaaggaagctgcctgaatttgcctgtatactctcgttctgcgacttataaaggaccagacaaatcaaattagtggttttggtttccgccagctgtggatgcctttgacattatgaccgcagaggattccaccgcagccatgagcagtgactcggccgccgggtcctcggccaaggtgcccgagggcgtggcgggcgcgcccaacgaggcagcactgctggcgctgatggagcgcacgggctacagcatggtgcaagagaacgggcagcgcaagtacggcggcccaccgcccggctgggagggcccgcacccgcagcgtggctgcgaggtcttcgtgggcaagatcccgcgcgacgtgtacgaggacgagctggtgcccgtgttcgaggccgtgggccgcatctacgagctgcgcctcatgatggactttgacggcaagaaccgcggctacgccttcgtcatgtactgccacaagcacgaggccaagcgcgcagtgcgtgagctcaacaactacgagatccgcccgggccgcctgctcggcgtgtgctgcagcgtggacaactgccgcctcttcatcggcgggatccccaagatgaagaagcgcgaggaaatcctggaggagattgccaaggtcaccgagggcgtgctggacgtgatcgtctacgccagcgcggccgacaagatgaagaaccgcggcttcgccttcgtggagtacgagagccaccgcgcggctgccatggctcgccgcaagctcatgcctggccgcatccagctgtggggccaccagatcgccgtggactgggccgagcctgagatcgacgtggacgaggacgtgatggagaccgtgaagatcctctacgtgcgcaacctcatgatcgagaccaccgaggacaccatcaagaagagcttcggccagttcaaccccggctgcgtggagcgcgtcaagaagatccgcgactacgccttcgtgcacttcaccagccgcgaggatgccgtgcatgccatgaacaacctcaacggcactgagctggagggctcgtgcctggaggtcacgctggccaagcccgtggacaaggagcagtactcgcgctaccagaaggcagccaggggcggcggcgcggctgaggcagcgcagcagcccagctacgtgtactcctgcgacccctacacactggcctactacggctacccctacaacgcgctcattgggcccaacagggactactttgtgaaagcaggcagcataagaggccgagggcgaggtgcagctggcaacagagccccagggcctaggggttcctacctcgggggatattctgctggccgtggtatatatagccgatatcatgaagggaaaggaaagcagcaagaaaaaggatatgaactggtgccgaatttggaaatccctaccgtcaacccagttgccattaaacctggtacagtagccatccctgccattggggctcagtattccatgtttccagcagctccagcccctaaaatgattgaagatggcaaaatccacacagtggagcacatgatcagccccattgctgtgcagccagacccagccagtgctgctgccgccgcagccgcggccgcagccgccgcagccgctgtcattcccactgtgtcgacgccaccacctttccagggccgcccaataactccagtatacacggtggctccaaacgttcagagaattcctactgccgggatctacggggccagttacgtgccatttgctgctccagctacagccacgatcgccacactacagaagaacgcggcagccgcggccgccgtgtatggaggatacgcaggctacatacctcaggccttccctgctgctgccattcaggtccccatccccgacgtctaccagacatactgaggctggtgaccagcacgaagacagaccacacaaacaccactgaaggaacgcttgactatttatgaagaaggaacatgttggattcacacatgcaacctgaaagtgaagaatgttagcagatttatttctgaattattttatatacatgaagttttcactagttttttaagactattttcaacttagcatgcctacgttcatacatttccaaaagacttgcaatggttcgtgccttcattccatcttttaaaaatttgtatgctgtactacatttgtatagaggtttttgttgttgtttttttaaggatatattttcagtatgaaggttattttcttaacttctgcactccagagatttctattttgtagtaccttcaataatatatcaactatatattaaaaaagcacacttgaggagctagggaactattttgaaaaatatatacaatatttaaagatacaaacagtagtgcttaaaaatactacataaagcattattttaaaggttatactggaaagtgcaattttaaaatgagtaaaacctctgtatttctgctggcattaagggttgatggtgttaccatgtatcatcatggcggtactattttttaaaagaaattaaacactggatctctccttaagccaacattgaaaagacttgccgcacttctgagtccaaacactggaaagctctcctttgccaccgttagccggggctcattctccatgtgccttagccttaaacatgcccccactcccacatctctcaccctgtcccctcctccccagatgatcggtaccggctgattattttttttc

SEQ ID NO: 57198 - DNA, 3091 bp, Homo sapiens
ctggtactgctcccgagtacgggatgttggcccattccgcgcctacaaacaggcttagcgctccactgaaatgcgggaggctccttaactcttgtataaacagaaaccctccgtaactctaggtcagagcgcactaaaatgagccacttctgaacgagcagcgcccaggccccaggccctgctgcgaaggccccggcaaaggtcagggccccgtccgcgtgacgctcctgcctgcgcgcggccaagccatgctcggccccagctcaggtaacggaggccttggaaggagactctgcgtcaggtcacccagcagagatcagcaatccttggctcactgaggaggtttggatttgcctcaaagggcactgcaaaaattgaacagaggaatcccaaggaagctgcctgaatttgcctgtatactctcgttctgcgacttataaaggaccagacaaatcaaattagtggttttggtttccgccagctgtggatgcctttgacattatgaccgcagaggattccaccgcagccatgagcagtgactcggccgccgggtcctcggccaaggtgcccgagggcgtggcgggcgcgcccaacgaggcagcactgctggcgctgatggagcgcacgggctacagcatggtgcaagagaacgggcagcgcaagtacggcggcccaccgcccggctgggagggcccgcacccgcagcgtggctgcgaggtcttcgtgggcaagatcccgcgcgacgtgtacgaggacgagctggtgcccgtgttcgaggccgtgggccgcatctacgagctgcgcctcatgatggactttgacggcaagaaccgcggctacgccttcgtcatgtactgccacaagcacgaggccaagcgcgcagtgcgtgagctcaacaactacgagatccgcccgggccgcctgctcggcgtgtgctgcagcgtggacaactgccgcctcttcatcggcgggatccccaagatgaagaagcgcgaggaaatcctggaggagattgccaaggtcaccgagggcgtgctggacgtgatcgtctacgccagcgcggccgacaagatgaagaaccgcggcttcgccttcgtggagtacgagagccaccgcgcggctgccatggctcgccgcaagctcatgcctggccgcatccagctgtggggccaccagatcgccgtggactgggccgagcctgagatcgacgtggacgaggacgtgatggagaccgtgaagatcctctacgtgcgcaacctcatgatcgagaccaccgaggacaccatcaagaagagcttcggccagttcaaccccggctgcgtggagcgcgtcaagaagatccgcgactacgccttcgtgcacttcaccagccgcgaggatgccgtgcatgccatgaacaacctcaacggcactgagctggagggctcgtgcctggaggtcacgctggccaagcccgtggacaaggagcagtactcgcgctaccagaaggcagccaggggcggcggcgcggctgaggcagcgcagcagcccagctacgtgtactcctgcgacccctacacactggcctactacggctacccctacaacgcgctcattgggcccaacagggactactttgtgaaagcaggcagcataagaggccgagggcgaggtgcagctggcaacagagccccagggcctaggggttcctacctcgggggatattctgctggccgtggtatatatagccgatatcatgaagggaaaggaaagcagcaagaaaaaggatatgaactggtgccgaatttggaaatccctaccgtcaacccagttgccattaaacctggtacagtagccatccctgccattggggctcagtattccatgtttccagcagctccagcccctaaaatgattgaagatggcaaaatccacacagtggagcacatgatcagccccattgctgtgcagccagacccagccagtgctgctgccgccgcagccgcggccgcagccgccgcagccgctgtcattcccactgtgtcgacgccaccacctttccagggccgcccaataactccagtatacacggtggctccaaacgttcagagaattcctactgccgggatctacggggccagttacgtgccatttgctgctccagctacagccacgatcgccacactacagaagaacgcggcagccgcggccgccgtgtatggaggatacgcaggctacatacctcaggccttccctgctgctgccattcaggtccccatccccgacgtctaccagacatactgaggctggtgaccagcacgaagacagaccacacaaacaccactgaaggaacgcttgactatttatgaagaaggaacatgttggattcacacatgcaacctgaaagtgaagaatgttagcagatttatttctgaattattttatatacatgaagttttcactagttttttaagactattttcaacttagcatgcctacgttcatacatttccaaaagacttgcaatggttcgtgccttcattccatcttttaaaaatttgtatgctgtactacatttgtatagaggtttttgttgttgtttttttaaggatatattttcagtatgaaggttattttcttaacttctgcactccagagatttctattttgtagtaccttcaataatatatcaactatatattaaaaaagcacacttgaggagctagggaactattttgaaaaatatatacaatatttaaagatacaaacagtagtgcttaaaaatactacataaagcattattttaaaggttatactggaaagtgcaattttaaaatgagtaaaacctctgtatttctgctggcattaagggttgatggtgttaccatgtatcatcatggcggtactattttttaaaagaaattaaacactggatctctccttaagccaacattgaaaagacttgccgcacttctgagtccaaacactggaaagctctcctttgccaccgttagccggggctcattctccatgtgccttagccttaaacatgcccccactcccacatcttacctcttggggcttaaggaccttgggctaacgacctgggtac

SEQ ID NO: 57199 - DNA, 2305 bp, Homo sapiens
ctggtactgctcccgagtacgggatgttggcccattccgcgcctacaaacaggcttagcgctccactgaaatgcgggaggctccttaactcttgtataaacagaaaccctccgtaactctaggtcagagcgcactaaaatgagccacttctgaacgagcagcgcccaggccccaggccctgctgcgaaggccccggcaaaggtcagggccccgtccgcgtgacgctcctgcctgcgcgcggccaagccatgctcggccccagctcaggtaacggaggccttggaaggagactctgcgtcaggtcacccagcagagatcagcaatccttggctcactgaggaggtttggatttgcctcaaagggcactgcaaaaattgaacagaggaatcccaaggaagctgcctgaatttgcctgtatactctcgttctgcgacttataaaggaccagacaaatcaaattagtggttttggtttccgccagctgtggatgcctttgacattatgaccgcagaggattccaccgcagccatgagcagtgactcggccgccgggtcctcggccaaggtgcccgagggcgtggcgggcgcgcccaacgaggcagcactgctggcgctgatggagcgcacgggctacagcatggtgcaagagaacgggcagcgcaagtacggcggcccaccgcccggctgggagggcccgcacccgcagcgtggctgcgaggtcttcgtgggcaagatcccgcgcgacgtgtacgaggacgagctggtgcccgtgttcgaggccgtgggccgcatctacgagctgcgcctcatgatggactttgacggcaagaaccgcggctacgccttcgtcatgtactgccacaagcacgaggccaagcgcgcagtgcgtgagctcaacaactacgagatccgcccgggccgcctgctcggcgtgtgctgcagcgtggacaactgccgcctcttcatcggcgggatccccaagatgaagaagcgcgaggaaatcctggaggagattgccaaggtcaccgagggcgtgctggacgtgatcgtctacgccagcgcggccgacaagatgaagaaccgcggcttcgccttcgtggagtacgagagccaccgcgcggctgccatggctcgccgcaagctcatgcctggccgcatccagctgtggggccaccagatcgccgtggactgggccgagcctgagatcgacgtggacgaggacgtgatggagaccgtgaagatcctctacgtgcgcaacctcatgatcgagaccaccgaggacaccatcaagaagagcttcggccagttcaaccccggctgcgtggagcgcgtcaagaagatccgcgactacgccttcgtgcacttcaccagccgcgaggatgccgtgcatgccatgaacaacctcaacggcactgagctggagggctcgtgcctggaggtcacgctggccaagcccgtggacaaggagcagtactcgcgctaccagaaggcagccaggggcggcggcgcggctgaggcagcgcagcagcccagctacgtgtactcctgcgacccctacacactggcctactacggctacccctacaacgcgctcattgggcccaacagggactactttgtgaaagcaggcagcataagaggccgagggcgaggtgcagctggcaacagagccccagggcctaggggttcctacctcgggggatattctgctggccgtggtatatatagccgatatcatgaagggaaaggaaagcagcaagaaaaaggatatgaactggtgccgaatttggaaatccctaccgtcaacccagttgccattaaacctggtacagtagccatccctgccattggggctcagtattccatgtttccagcagctccagcccctaaaatgattgaagatggcaaaatccacacagtggagcacatgatcagccccattgctgtgcagccagacccagccagtgctgctgccgccgcagccgcggccgcagccgccgcagccgctgtcattcccactgtgtcgacgccaccacctttccagggccgcccaataactccagtatacacggtggctccaaacgttcagagaattcctactgccgggatctacggggccagttacgtgccatttgctgctccagctacagccacgatcgccacactacagaagaacgcggcagccgcggccgccgtgtatggaggatacgcaggagaattccttgaacccaggaggcggaggttacagtgagtcgagatcatgcctttgcactccagcctgggcaacaacagcaaaactccatctt

SEQ ID NO: 57200 - DNA, 1707 bp, Homo sapiens
ctggtactgctcccgagtacgggatgttggcccattccgcgcctacaaacaggcttagcgctccactgaaatgcgggaggctccttaactcttgtataaacagaaaccctccgtaactctaggtcagagcgcactaaaatgagccacttctgaacgagcagcgcccaggccccaggccctgctgcgaaggccccggcaaaggtcagggccccgtccgcgtgacgctcctgcctgcgcgcggccaagccatgctcggccccagctcaggtaacggaggccttggaaggagactctgcgtcaggtcacccagcagagatcagcaatccttggctcactgaggaggtttggatttgcctcaaagggcactgcaaaaattgaacagaggaatcccaaggaagctgcctgaatttgcctgtatactctcgttctgcgacttataaaggaccagacaaatcaaattagtggttttggtttccgccagctgtggatgcctttgacattatgaccgcagaggattccaccgcagccatgagcagtgactcggccgccgggtcctcggccaaggtgcccgagggcgtggcgggcgcgcccaacgaggcagcactgctggcgctgatggagcgcacgggctacagcatggtgcaagagaacgggcagcgcaagtacggcggcccaccgcccggctgggagggcccgcacccgcagcgtggctgcgaggtcttcgtgggcaagatcccgcgcgacgtgtacgaggacgagctggtgcccgtgttcgaggccgtgggccgcatctacgagctgcgcctcatgatggactttgacggcaagaaccgcggctacgccttcgtcatgtactgccacaagcacgaggccaagcgcgcagtgcgtgagctcaacaactacgagatccgcccgggccgcctgctcggcgtgtgctgcagcgtggacaactgccgcctcttcatcggcgggatccccaagatgaagaagcgcgaggaaatcctggaggagattgccaaggtcaccgagggcgtgctggacgtgatcgtctacgccagcgcggccgacaagatgaagaaccgcggcttcgccttcgtggagtacgagagccaccgcgcggctgccatggctcgccgcaagctcatgcctggccgcatccagctgtggggccaccagatcgccgtggactgggccgagcctgagatcgacgtggacgaggacgtgatggagaccgtgaagatcctctacgtgcgcaacctcatgatcgagaccaccgaggacaccatcaagaagagcttcggccagttcaaccccggctgcgtggagcgcgtcaagaagatccgcgactacgccttcgtgcacttcaccagccgcgaggatgccgtgcatgccatgaacaacctcaacggcactgagctggagggctcgtgcctggaggtcacgctggccaagcccgtggacaaggagcagtactcgcgctaccagaaggcagccaggggcggcggcgcggctgaggcagcgcagcagcccagctacgtgtactcctgcgacccctacacactggcctactacggctacccctacaacgcgctcattgggcccaacagggactactttgtgaaagcagcataagaggccgagggcggggtgggaagtgcctgctgtttataatgttggatttgcaaatacagtttattttacagaaat

SEQ ID NO: 57201 - DNA, 549 bp, Homo sapiens
ccttcaaagaagatatcaagtggccaaaaagcacatgaaaagatactcaatatcacaagtcattagggaaacacgaatcaaaactacaatgagatactactttacacccaagcaggatggctatcaagaaaagaaagaaagaaagaaagaaagaaagaaagaaagaaagaaagaaagaaagaataaaaaaaaatgataacatggcaaccaccaaactcccttaaaaacaaacattggtgacatggccaattaagtatcagtgagcctcctatctgggacttatctgttcctattgtttcaaaaccatttcatgtacactactgaggtaagtttataacttgaaatgtgaactttttttttttttagtgttaagaacaaactatataaatgtaaaaaaaaagttttagagttctgttttcaaacattgctagtggtttagttaactttagctgctttatatttgaaaagcttttatttagatcttgctccatttacagtacattcttaggatgtatgtagtaaataaagctttctttaaagcaatcgcaa

SEQ ID NO: 57202 - DNA, 602 bp, Homo sapiens
cggacgagaagatgttgtaggtgacttcctagctgtgttaagttgctcctgggctgtgaatggtgttaatttctgaagtgggcggctccaaaaacttaacaaggaaaggtaaggtggtttttggtagtccttctaactattgtcccttaatcttacatttgggtcccaatttttgaagtgtatatttttttcttattcttctctctttagcccttatccctcatgctatcactcatcttctgtctcttggtatatttagtgggaaataaagggtttataaaacggttttaaaagggtcaacctctgggaaggcagataatcatatacagtcagtcccatcgtgtttcctgtagtgatgaatcttttcccataaaagaaactgatttttttttttcactcttgaaaatacatgattggaccgcccagaagcacaggtgactttagactcagattattacagtgagactgaggaagcgtcctggacaggaggcatctcatttaagtgttaaccaaggcagaggggggtcttcctgcagtaatttacgtctgaaagtaacactcggtagaggtgtagttgtttcaaattaaaaattcagcctgta

SEQ ID NO: 57203 - DNA, 1946 bp, Homo sapiens
acatacactgctccgagaactgtggccatagccatgaataaaggggagaattgtatttagaagaacagtttcagaacacttttatttatgatacctttatagtcttagaataactatagaaaggttttaattatttcagattagaatgtactttcattttatatcacactttttttccattattttggttgaatggcatacatttttcatatttgattgtgtcattattatttaccatttctaaggaattgcaaatgtaatctcttcactagagatcagaatttagcaccttagaaaacatttaatataaaagtgaagttttagtgagaaattaattctacaaatggtttgtactattctgtgcctcaaatattaaatatctaattgtgactactgtgaaatgcagttagttgataatgataaaatctctgtggtagcatttttgattctcttaatgttaaccttattaacaacagaatcaaaaatgctaccactaagattttattttttaaaacatatttatttacttttttatgaagatcttaaaaacgagatttttgatctaattaaagatatttcaactcagaaatgagtatgtttaagtgtaaatatttctaaatgtattgtacacctttttcttaggttaacgccttttactatttaaagtcaaatactttacgacatttagttgacagaaacttcaactcaatagaattatacaacagagaagaaatcctagagaatatctaatatctccaatataatcctgttattttattgcttaaaaattaaggcctgaagatattgtaacctgataacttggagttttatgttttgattagtcaggattttgccatttttacacattacaagaacattgtaaaccaaaaagggaattctacagctgctttgtttggcagatacagggcactaacttcagatgactagatcccaagtctagacctggaatcagagttctttttcctcttagctcacttcctaagtcttaactgtgctggtttctgcctgagttattctatttggagatgctaccacttgataaccaagatggccctcagcaggctccagaccagtctctagtttaccaatcccaatgcagatggctctgggagagataattccagttggcctggttaggcctggtgaacatctgggaccatttttgtagttgaggatggtgattcttcccaggcgcacacctgtgcacaaagctttggaatgggagttgagtgggtcccactcaaacttcatcaaatgtagggcttctgggacaagaaagtgaggctttgaaaactggacagaagaagaagcagaacatgtcccccaggcatatgaaagttacacgattctcaaaccatatccccgtgttagatcttttctcctgagataaatggaatgtttttttaaaacttatgtacaaaattttaagtgctgtcttcactaaagattttttgttctctcttgaagaagggcaaacaattataagtgaatttgttgagagcattctggtaatttttaccttagtttttaagttcaatggctatgtggcagaaaatacataaatactaaattctaaacaaatgagtgaaaatattttggaataacctaatcatcaaaagcacataagaattgtctattgctatttagtaaagtactttgaaatgtttggctatctcattgatttttcctttgactgttagctcaagaattgaaacacctcaactaaaacatttaaagatcctttaaaagcacttgtagactagaacttgatttattttttcccatctctcttcttttccccttctcttttctttctttttgtaaatgtttcaactaacttttattgaagttgaagtcacactttatccaactgcgtaatatttaagcttcaactaaaaacaagctttcagtcatgattagagggt

SEQ ID NO: 57204 - DNA, 394 bp, Homo sapiens
gccgggtcactcagggaagaggctgtgctgaacacggcaagcagcatccccggcctgacccacagatgcagcagcacccgcgtccttgcttttccacccaagctgtgacaaccaaaaatgcctctagacactggcaaggtcccctgaaggtggggtgagcttgccgccactgagcggccctgctttgaggccagggtcacagtggtaaggtccccactgtggtggaaggcttggtttgatcctggcttggccatctgcacctgcctgacaacaactcactggatcctaccatggtgggcaccatccttggcactgaggccatgccctctccaccggatgagccacccaagctctgggcgtcgctgtcctctttcataaaattggagaaactgta

SEQ ID NO: 57205 - DNA, 741 bp, Homo sapiens
ccgaccgccattgcacaacgcggaggactagcctggggtcacagggatgccgcggctcctccgcttgtccctgctgtggcttggactcctgctggttcggttttctcgtgaactgagcgacatcagcagtgccaggaagctgtgcggcaggtacttggtgaaagaaatagaaaaactctgcggccatgccaactggagccagttccgtttcgaggaggaaacccctttctcacggttgattgcacaggcctcggagaaggtcgaagcctacagcccataccagttcgaaagcccgcaaaccgcttccccggcccggggaagaggcacaaacccagtgtctacttcttgggaagaagcagtaaacagttgggaaatgcagtcactacctgagtataaggataaaaagggatattcaccccttggtaagacaagagaattttcttcatcacataatatcaatgtatatattcatgagaatgcaaaatttcagaagaaacgtagaaacaaaattaaaaccttaagcaatttgttttgggggcatcatccccaaagaaaacgcagaggatattcagaaaagtgttgtcttacaggatgtacaaaagaagaacttagcattgcatgtcttccatatattgattttaaaaggctaaaggaaaaaagatcatcacttgtaactaagatatactaaccatcttagaattttttctaacctaataaaagcttaatacatttatttaaaaa

SEQ ID NO: 57206 - DNA, 803 bp, Homo sapiens
ccgaccgccattgcacaacgcggaggactagcctggggtcacagggatgccgcggctcctccgcttgtccctgctgtggcttggactcctgctggttcggttttctcgtgaactgagcgacatcagcagtgccaggaagctgtgcggcaggtacttggtgaaagaaatagaaaaactctgcggccatgccaactggagccagttccgtttcgaggaggaaacccctttctcacggttgattgcacaggcctcggagaaggtcgaagcctacagcccataccagttcgaaagcccgcaaaccgcttccccggcccggggaagaggcacaaacccagtgtctacttcttgggaagaagcagtaaacagttgggaaatgcagtcactacctgagtataaggataaaaagggatattcaccccttggtctgctggagtttgctggaggcccactccagatgctgtttgcctgggtatcaccagcagaggctgcagaacagcaaagattgctgcctgttccttcctctggaagcttcatcccagaggggcacccactagatgccagccagagctttcctgtatgagtgacataagggaattctaaattgatacaccatcaggattcaccctcaagattcaacttcaacatttttcaaagtccttcaataagaaggtaaaactcagtttcaagtttctttgtcaacaacaacctttactcctattaccaagaatttctattcaacaaactgcaaagcagttataaaagtaataaaggtaaaaaaaagtggtaccatgagattcacactg

SEQ ID NO: 57207 - DNA, 181 bp, Homo sapiens
aggcccactccagatgctgtttgcctgggtatcaccagcagaggctgcagaacagcaaagattgctgcctgttccttcctctggaagcttcatcccagaggggcacccactagatgccagccagagctttcctgtatgagtgacataaggtaactttttaaaaagattatgtgtaaactat

SEQ ID NO: 57208 - DNA, 2609 bp, Homo sapiens
ctgccctggtgcacacagatggcacatggcagagcccaagccctctccatgagatctgcagcgtttgtccacacggcagggcaaattaccttgtagagtcagcatggaggtttgcaactctgccggacttggtgcagaaaaaataccagccgtgctgttaaaccaaaaccccaggagaaaactttctggtgacagaagggcattgtgacccacgttgcccagggccagggacagggcagctgctcatggtccttcctcacgagttttcctggagcagagggatacccccaaacccagggagcccacaggagcttcagaagggctcggctggagggcggggcccctgttgcacttgctcactggggactggggaggctctgatcgcagaccgggggtgctgctacctctgtctgctgccggcagaaagccacaagccatgaaaactgattgagatgagaagaattcatctgggactggcttttgctttaggatggtgttggaagttgctcgttgtcgctaggagcctgctccactgtaagggtgtcgggatctgaagagctatggtgaaacaccactgaagcattgccaaggatggggctggtaagtagcaaaaagccggacaaggaaaagccgatcaaagagaaggacaagggccaatggagccccctgaaggtcagcgcccaagacaaggacgccccgccactgccgcccctggttgtcttcaaccaccttactcctccaccgcccgatgaacacctggatgaagacaagcatttcgtggtggctctgtatgactacaccgctatgaatgatcgggacctgcagatgctgaagggggagaagctacaggtcctgaagggaactggagactggtggctggccaggtcactcgtcacaggaagagaaggctatgtgcccagtaactttgtggcccgagtggagagcctggaaatggaaaggtggttctttagatcacagggtcggaaggaggctgagaggcagcttcttgctccaatcaacaaggccggctcctttcttatcagagagagtgaaaccaacaaaggtgccttctccctgtctgtgaaggatgtcaccacccagggggagctgatcaagcactataagatccgctgcctggatgaagggggctactacatctccccccggatcaccttcccctcgctccaggccctggtgcagcactattctaagaagggggatggtctatgccagaggctgaccctgccctgtgtgcgcccggccccgcagaatccctgggcccaggatgaatgggagatcccccggcagtctctcaggctggtcaggaaactcgggtctggacaattcggcgaagtctggatgggttactacaaaaacaacatgaaggtggccattaagacgctgaaggagggaaccatgtctccagaagccttcctgggtgaggccaacgtgatgaaggctctgcagcacgagcggctggtccgactctacgcagtggtcaccaaggagcccatctacattgtcaccgagtacatggccagaggatgcctgctggatttcctgaagacagatgaagggagcagattgtcactcccaaggctgattgacatgtcggcgcagattgctgaagggatggcatacattgagcgcatgaattccatccaccgcgacctgcgggcggccaacatcctggtgtctgaggccttgtgctgcaaaattgctgattttggcttggctcgaatcatcgacagtgaatacacggcccaagagggggccaagttccccatcaagtggacagccccggaagccatccacttcggggtcttcaccatcaaagcagacgtgtggtcgtttggagtcctcctgatggaagttgtcacttatgggcgggtgccatacccagggatgagcaaccccgaggtcatccgcaacctggagcgcggctaccgcatgccgcgccccgacacctgcccgcccgagctgtaccgcggcgtcatcgccgagtgctggcgcagccggcccgaggagcggcccaccttcgagttcctgcagtcggtgctggaggacttctacacggccaccgagcggcagtacgagctgcagccctagccggccgcgcccgcctgcgccccgtgcccacctctgcgcggacgaccccgacttccgtgccatcccagacgggccgcgaaggcggggtgtcgcctgtgcccttttctcagacccggaatccagtgggcagaggcagcttcgcagggggtccccggacggactccttcaccgactgcacccccgggcgagttacgcggcctctctgtgccgcttcatttgtagagggctgtaacagtgacctcgcacggtcatccggagtactaagccccagtaaggtgttcaggactggtaagcgactgtcatcaagtaaggcccccgtgctgggcaccccccgtgctggccgcgtccccgcctctgcgccctgcgtggaccccgccctgccccgctacagaagccagactgggtcccgcggacgccagcaggggcagccccagcctaggctgcgctccagcactgcggggcttttctgcaataaagtcacgagcgttcgaaaaaaaaag

SEQ ID NO: 57209 - DNA, 1329 bp, Homo sapiens
ctgccctggtgcacacagatggcacatggcagagcccaagccctctccatgagatctgcagcgtttgtccacacggcagggcaaattaccttgtagagtcagcatggaggtttgcaactctgccggacttggtgcagaaaaaataccagccgtgctgttaaaccaaaaccccaggagaaaactttctggtgacagaagggcattgtgacccacgttgcccagggccagggacagggcagctgctcatggtccttcctcacgagttttcctggagcagagggatacccccaaacccagggagcccacaggagcttcagaagggctcggctggagggcggggcccctgttgcacttgctcactggggactggggaggctctgatcgcagaccgggggtgctgctacctctgtctgctgccggcagaaagccacaagccatgaaaactgattgagatgagaagaattcatctgggactggcttttgctttaggatggtgttggaagttgctcgttgtcgctaggagcctgctccactgtaagggtgtcgggatctgaagagctatggtgaaacaccactgaagcattgccaaggttacaccgcacgaaaagttggcaatcctctctctcggtggctgctgtgggagcagctaacctcacagcacccgaagggatgtcatcgggaccccagctcggtttccagcatcagctgatgccagcaagaagccagccaggcctggggcttggcagcccagggactttaccatccaccatccacagggctgttgccctggacaggtcattgatatctgactcacagccaattcatggatgacgtgaatccaaaaatcagaggcccacgtggatttagacatggaaatgcctcaccagcttccatgagccagtctctgtgcggcagacttgaactgcacgggggctgataggaagcagggtgggcgctgggatgtgactgtgcccttgccagtgtttccagtctcccagctcgggttctgtggttgtctaagcctgggggtgctctgccgggtctgtggcgacccggctgccttttcagcctaatcaccagagaagccacagaaagagctggaccacttagaggggcagtctggccacagccacttggaagaacaggctgattttgtacagatgtgtcattttctcctgacttttaaactgtaaacattatataataccctagaaaattttgaaaatagatataaaccatcaataacactggcaacctaacacttttacctaagagctacccattttgatttatctgatgcgcagttttcattgctggaatcataaagac

SEQ ID NO: 57210 - DNA, 267 bp, Homo sapiens
aggagggtgaagtggttctgacagagccatgttctcagcccaggagcagttcagacagcatttctggagtgcatcttctgtgcctagcactctttgatgcctgctgggagggacagagcattgcaaagtcagacgaacaccaggccaggcatgcagggacagtactagatccaggtctcctgcctcctggtcatgcaaccatttacaactgtgtgaatattttacaaggatggccctcactgagaattcagtggactagtagtagta

SEQ ID NO: 57211 - DNA, 400 bp, Homo sapiens
aggagggtgaagtggttctgacagagccatgttctcagcccaggagcagttcagacagcatttctggagtgcatcttctgtgcctagcactctttgatgcctgctgggagggacagagcattgcaaagtcagacgaacaccaggccaggcatgcagggacagtactagatccaggtctcctgcctcctggtcatgcaaccatttacaactgtgtgaatattttacaaggatggccagagaggttgggcttgatggcctctgaggtccacggcgtggccaagttctcatgccactttctcaccctcctatgaccctgaccgcacactgctcctataggatcctaacatgcccatgttgatatagctcccctcactgagaattcagtggactagtagtagta

SEQ ID NO: 57212 - DNA, 2456 bp, Homo sapiens
ctgccctggtgcacacagatggcacatggcagagcccaagccctctccatgagatctgcagcgtttgtccacacggcagggcaaattaccttgtagagtcagcatggaggtttgcaactctgccggacttggtgcagaaaaaataccagccgtgctgttaaaccaaaaccccaggagaaaactttctggtgacagaagggcattgtgacccacgttgcccagggccagggacagggcagctgctcatggtccttcctcacgagttttcctggagcagagggatacccccaaacccagggagcccacaggagcttcagaagggctcggctggagggcggggcccctgttgcacttgctcactggggactggggaggctctgatcgcagaccgggggtgctgctacctctgtctgctgccggcagaaagccacaagccatgaaaactgattgagatgagaagaattcatctgggactggcttttgctttaggatggtgttggaagttgctcgttgtcgctaggagcctgctccactgtaagggtgtcgggatctgaagagctatggtgaaacaccactgaagcattgccaaggatggggctggtaagtagcaaaaagccggacaaggaaaagccgatcaaagagaaggacaagggccaatggagccccctgaaggtcagcgcccaagacaaggacgccccgccactgccgcccctggttgtcttcaaccaccttactcctccaccgcccgatgaacacctggatgaagacaagcatttcgtggtggctctgtatgactacaccgctatgaatgatcgggacctgcagatgctgaagggggagaagctacaggtcctgaagggaactggagactggtggctggccaggtcactcgtcacaggaagagaaggctatgtgcccagtaactttgtggcccgagtggagagcctggaaatggaaaggtggttctttagatcacagggtcggaaggaggctgagaggcagcttcttgctccaatcaacaaggccggctcctttcttatcagagagagtgaaaccaacaaaggtgccttctccctgtctgtgaaggatgtcaccacccagggggagctgatcaagcactataagatccgctgcctggatgaagggggctactacatctccccccggatcaccttcccctcgctccaggccctggtgcagcactattctagttactacaaaaacaacatgaaggtggccattaagacgctgaaggagggaaccatgtctccagaagccttcctgggtgaggccaacgtgatgaaggctctgcagcacgagcggctggtccgactctacgcagtggtcaccaaggagcccatctacattgtcaccgagtacatggccagaggatgcctgctggatttcctgaagacagatgaagggagcagattgtcactcccaaggctgattgacatgtcggcgcagattgctgaagggatggcatacattgagcgcatgaattccatccaccgcgacctgcgggcggccaacatcctggtgtctgaggccttgtgctgcaaaattgctgattttggcttggctcgaatcatcgacagtgaatacacggcccaagagggggccaagttccccatcaagtggacagccccggaagccatccacttcggggtcttcaccatcaaagcagacgtgtggtcgtttggagtcctcctgatggaagttgtcacttatgggcgggtgccatacccagggatgagcaaccccgaggtcatccgcaacctggagcgcggctaccgcatgccgcgccccgacacctgcccgcccgagctgtaccgcggcgtcatcgccgagtgctggcgcagccggcccgaggagcggcccaccttcgagttcctgcagtcggtgctggaggacttctacacggccaccgagcggcagtacgagctgcagccctagccggccgcgcccgcctgcgccccgtgcccacctctgcgcggacgaccccgacttccgtgccatcccagacgggccgcgaaggcggggtgtcgcctgtgcccttttctcagacccggaatccagtgggcagaggcagcttcgcagggggtccccggacggactccttcaccgactgcacccccgggcgagttacgcggcctctctgtgccgcttcatttgtagagggctgtaacagtgacctcgcacggtcatccggagtactaagccccagtaaggtgttcaggactggtaagcgactgtcatcaagtaaggcccccgtgctgggcaccccccgtgctggccgcgtccccgcctctgcgccctgcgtggaccccgccctgccccgctacagaagccagactgggtcccgcggacgccagcaggggcagccccagcctaggctgcgctccagcactgcggggcttttctgcaataaagtcacgagcgttcgaaaaaaaaag

SEQ ID NO: 57213 - DNA, 2485 bp, Homo sapiens
ctgccctggtgcacacagatggcacatggcagagcccaagccctctccatgagatctgcagcgtttgtccacacggcagggcaaattaccttgtagagtcagcatggaggtttgcaactctgccggacttggtgcagaaaaaataccagccgtgctgttaaaccaaaaccccaggagaaaactttctggtgacagaagggcattgtgacccacgttgcccagggccagggacagggcagctgctcatggtccttcctcacgagttttcctggagcagagggatacccccaaacccagggagcccacaggagcttcagaagggctcggctggagggcggggcccctgttgcacttgctcactggggactggggaggctctgatcgcagaccgggggtgctgctacctctgtctgctgccggcagaaagccacaagccatgaaaactgattgagatgagaagaattcatctgggactggcttttgctttaggatggtgttggaagttgctcgttgtcgctaggagcctgctccactgtaagggtgtcgggatctgaagagctatggtgaaacaccactgaagcattgccaaggttgtcttcaaccaccttactcctccaccgcccgatgaacacctggatgaagacaagcatttcgtggtggctctgtatgactacaccgctatgaatgatcgggacctgcagatgctgaagggggagaagctacaggtcctgaagggaactggagactggtggctggccaggtcactcgtcacaggaagagaaggctatgtgcccagtaactttgtggcccgagtggagagcctggaaatggaaaggtggttctttagatcacagggtcggaaggaggctgagaggcagcttcttgctccaatcaacaaggccggctcctttcttatcagagagagtgaaaccaacaaaggtgccttctccctgtctgtgaaggatgtcaccacccagggggagctgatcaagcactataagatccgctgcctggatgaagggggctactacatctccccccggatcaccttcccctcgctccaggccctggtgcagcactattctaagaagggggatggtctatgccagaggctgaccctgccctgtgtgcgcccggccccgcagaatccctgggcccaggatgaatgggagatcccccggcagtctctcaggctggtcaggaaactcgggtctggacaattcggcgaagtctggatgggttactacaaaaacaacatgaaggtggccattaagacgctgaaggagggaaccatgtctccagaagccttcctgggtgaggccaacgtgatgaaggctctgcagcacgagcggctggtccgactctacgcagtggtcaccaaggagcccatctacattgtcaccgagtacatggccagaggatgcctgctggatttcctgaagacagatgaagggagcagattgtcactcccaaggctgattgacatgtcggcgcagattgctgaagggatggcatacattgagcgcatgaattccatccaccgcgacctgcgggcggccaacatcctggtgtctgaggccttgtgctgcaaaattgctgattttggcttggctcgaatcatcgacagtgaatacacggcccaagagggggccaagttccccatcaagtggacagccccggaagccatccacttcggggtcttcaccatcaaagcagacgtgtggtcgtttggagtcctcctgatggaagttgtcacttatgggcgggtgccatacccagggatgagcaaccccgaggtcatccgcaacctggagcgcggctaccgcatgccgcgccccgacacctgcccgcccgagctgtaccgcggcgtcatcgccgagtgctggcgcagccggcccgaggagcggcccaccttcgagttcctgcagtcggtgctggaggacttctacacggccaccgagcggcagtacgagctgcagccctagccggccgcgcccgcctgcgccccgtgcccacctctgcgcggacgaccccgacttccgtgccatcccagacgggccgcgaaggcggggtgtcgcctgtgcccttttctcagacccggaatccagtgggcagaggcagcttcgcagggggtccccggacggactccttcaccgactgcacccccgggcgagttacgcggcctctctgtgccgcttcatttgtagagggctgtaacagtgacctcgcacggtcatccggagtactaagccccagtaaggtgttcaggactggtaagcgactgtcatcaagtaaggcccccgtgctgggcaccccccgtgctggccgcgtccccgcctctgcgccctgcgtggaccccgccctgccccgctacagaagccagactgggtcccgcggacgccagcaggggcagccccagcctaggctgcgctccagcactgcggggcttttctgcaataaagtcacgagcgttcgaaaaaaaaag

SEQ ID NO: 57214 - DNA, 1816 bp, Homo sapiens
ggcactgactccatcacggtgtgaggagcagcagctcagggccgactgggaccagaaatgctagatttttatttcttggggacaggcagtgcaggagggaggctgtgtgggaatactccgaggagcagggtcgctctgagtttcacctgttcctgccgttttccaggtggttctttagatcacagggtcggaaggaggctgagaggcagcttcttgctccaatcaacaaggccggctcctttcttatcagagagagtgaaaccaacaaaggtgccttctccctgtctgtgaaggatgtcaccacccagggggagctgatcaagcactataagatccgctgcctggatgaagggggctactacatctccccccggatcaccttcccctcgctccaggccctggtgcagcactattctaagaagggggatggtctatgccagaggctgaccctgccctgtgtgcgcccggccccgcagaatccctgggcccaggatgaatgggagatcccccggcagtctctcaggctggtcaggaaactcgggtctggacaattcggcgaagtctggatgggttactacaaaaacaacatgaaggtggccattaagacgctgaaggagggaaccatgtctccagaagccttcctgggtgaggccaacgtgatgaaggctctgcagcacgagcggctggtccgactctacgcagtggtcaccaaggagcccatctacattgtcaccgagtacatggccagaggatgcctgctggatttcctgaagacagatgaagggagcagattgtcactcccaaggctgattgacatgtcggcgcagattgctgaagggatggcatacattgagcgcatgaattccatccaccgcgacctgcgggcggccaacatcctggtgtctgaggccttgtgctgcaaaattgctgattttggcttggctcgaatcatcgacagtgaatacacggcccaagagggggccaagttccccatcaagtggacagccccggaagccatccacttcggggtcttcaccatcaaagcagacgtgtggtcgtttggagtcctcctgatggaagttgtcacttatgggcgggtgccatacccagggatgagcaaccccgaggtcatccgcaacctggagcgcggctaccgcatgccgcgccccgacacctgcccgcccgagctgtaccgcggcgtcatcgccgagtgctggcgcagccggcccgaggagcggcccaccttcgagttcctgcagtcggtgctggaggacttctacacggccaccgagcggcagtacgagctgcagccctagccggccgcgcccgcctgcgccccgtgcccacctctgcgcggacgaccccgacttccgtgccatcccagacgggccgcgaaggcggggtgtcgcctgtgcccttttctcagacccggaatccagtgggcagaggcagcttcgcagggggtccccggacggactccttcaccgactgcacccccgggcgagttacgcggcctctctgtgccgcttcatttgtagagggctgtaacagtgacctcgcacggtcatccggagtactaagccccagtaaggtgttcaggactggtaagcgactgtcatcaagtaaggcccccgtgctgggcaccccccgtgctggccgcgtccccgcctctgcgccctgcgtggaccccgccctgccccgctacagaagccagactgggtcccgcggacgccagcaggggcagccccagcctaggctgcgctccagcactgcggggcttttctgcaataaagtcacgagcgttcgaaaaaaaaag

SEQ ID NO: 57215 - DNA, 902 bp, Homo sapiens
gtgaggatggagggtaggggccaccggccgtggcctcccaaagcttgcatggcttttcccacaggggccaagttccccatcaagtggacagccccggaagccatccacttcggggtcttcaccatcaaagcagacgtgtggtcgtttggagtcctcctgatggaagttgtcacttatgggcgggtgccatacccagggatgagcaaccccgaggtcatccgcaacctggagcgcggctaccgcatgccgcgccccgacacctgcccgcccgagctgtaccgcggcgtcatcgccgagtgctggcgcagccggcccgaggagcggcccaccttcgagttcctgcagtcggtgctggaggacttctacacggccaccgagcggcagtacgagctgcagccctagccggccgcgcccgcctgcgccccgtgcccacctctgcgcggacgaccccgacttccgtgccatcccagacgggccgcgaaggcggggtgtcgcctgtgcccttttctcagacccggaatccagtgggcagaggcagcttcgcagggggtccccggacggactccttcaccgactgcacccccgggcgagttacgcggcctctctgtgccgcttcatttgtagagggctgtaacagtgacctcgcacggtcatccggagtactaagccccagtaaggtgttcaggactggtaagcgactgtcatcaagtaaggcccccgtgctgggcaccccccgtgctggccgcgtccccgcctctgcgccctgcgtggaccccgccctgccccgctacagaagccagactgggtcccgcggacgccagcaggggcagccccagcctaggctgcgctccagcactgcggggcttttctgcaataaagtcacgagcgttcgaaaaaaaaag

SEQ ID NO: 57216 - DNA, 1978 bp, Homo sapiens
  misc_feature (1776)..(1776): n is a, c, g, or t
  misc_feature (1779)..(1779): n is a, c, g, or t
  misc_feature (1791)..(1791): n is a, c, g, or t
  misc_feature (1803)..(1803): n is a, c, g, or t
  misc_feature (1810)..(1810): n is a, c, g, or t
  misc_feature (1829)..(1829): n is a, c, g, or t
  misc_feature (1846)..(1846): n is a, c, g, or t
  misc_feature (1854)..(1854): n is a, c, g, or t
  misc_feature (1858)..(1859): n is a, c, g, or t
  misc_feature (1865)..(1865): n is a, c, g, or t
  misc_feature (1872)..(1872): n is a, c, g, or t
  misc_feature (1875)..(1875): n is a, c, g, or t
  misc_feature (1877)..(1877): n is a, c, g, or t
  misc_feature (1883)..(1883): n is a, c, g, or t
  misc_feature (1886)..(1886): n is a, c, g, or t
  misc_feature (1892)..(1892): n is a, c, g, or t
  misc_feature (1896)..(1896): n is a, c, g, or t
  misc_feature (1898)..(1898): n is a, c, g, or t
  misc_feature (1904)..(1904): n is a, c, g, or t
  misc_feature (1908)..(1908): n is a, c, g, or t
  misc_feature (1916)..(1916): n is a, c, g, or t
  misc_feature (1919)..(1920): n is a, c, g, or t
  misc_feature (1926)..(1927): n is a, c, g, or t
  misc_feature (1929)..(1929): n is a, c, g, or t
  misc_feature (1931)..(1932): n is a, c, g, or t
  misc_feature (1953)..(1953): n is a, c, g, or t
  misc_feature (1959)..(1959): n is a, c, g, or t
ctgccctggtgcacacagatggcacatggcagagcccaagccctctccatgagatctgcagcgtttgtccacacggcagggcaaattaccttgtagagtcagcatggaggtttgcaactctgccggacttggtgcagaaaaaataccagccgtgctgttaaaccaaaaccccaggagaaaactttctggtgacagaagggcattgtgacccacgttgcccagggccagggacagggcagctgctcatggtccttcctcacgagttttcctggagcagagggatacccccaaacccagggagcccacaggagcttcagaagggctcggctggagggcggggcccctgttgcacttgctcactggggactggggaggctctgatcgcagaccgggggtgctgctacctctgtctgctgccggcagaaagccacaagccatgaaaactgattgagatgagaagaattcatctgggactggcttttgctttaggatggtgttggaagttgctcgttgtcgctaggagcctgctccactgtaagggtgtcgggatctgaagagctatggtgaaacaccactgaagcattgccaaggatggggctggtaagtagcaaaaagccggacaaggaaaagccgatcaaagagaaggacaagggccaatggagccccctgaaggtcagcgcccaagacaaggacgccccgccactgccgcccctggttgtcttcaaccaccttactcctccaccgcccgatgaacacctggatgaagacaagcatttcgtggtggctctgtatgactacaccgctatgaatgatcgggacctgcagatgctgaagggggagaagctacaggtcctgaagggaactggagactggtggctggccaggtcactcgtcacaggaagagaaggctatgtgcccagtaactttgtggcccgagtggagagcctggaaatggaaaggtggttctttagatcacagggtcggaaggaggctgagaggcagcttcttgctccaatcaacaaggccggctcctttcttatcagagagagtgaaaccaacaaaggtgccttctccctgtctgtgaaggatgtcaccacccagggggagctgatcaagcactataagatccgctgcctggatgaagggggctactacatctccccccggatcaccttcccctcgctccaggccctggtgcagcactattctaagaagggggatggtctatgccagaggctgaccctgccctgtgtgcgcccggccccgcagaatccctgggcccaggatgaatgggagatcccccggcagtctctcaggctggtcaggaaactcgggtctggacaattcggcgaagtctggatgggttactacaaaaacaacatgaaggtggccattaagacgctgaaggagggaaccatgtctccagaagccttcctgggtgaggccaacgtgatgaaggctctgcagcacgagcggctggtccgactctacgcagtggtcaccaaggagcccatctacattgtcaccgagtacatggccagaggatgcctgctggatttcctgaagacagatgaagggagcagattgtcactcccaaggctgattgacatgtcggcgcagattgctgaagggatggcatacattgagcgcatgaattccatccaccgcgacctgcgggcggccaacatcctggtgtctgaggccttgtgctgcaaaattgctgattttggcttggctcgaatcatcgacagtgaatacacggcccaagaggggcangtncccatcaagggnccgcccggagcntcacttngggtctcccatcaagcgangtgtggcggtggggccnctgaggangtgnncttggngggtgcntancngggtgngcncccggnttcncnctgggngggncgttgggnccnnctcccnngntnnggggttccttgggcgccgggncccttntggggggggtaccccggag

SEQ ID NO: 57217 - DNA, 1987 bp, Homo sapiens
ctgccctggtgcacacagatggcacatggcagagcccaagccctctccatgagatctgcagcgtttgtccacacggcagggcaaattaccttgtagagtcagcatggaggtttgcaactctgccggacttggtgcagaaaaaataccagccgtgctgttaaaccaaaaccccaggagaaaactttctggtgacagaagggcattgtgacccacgttgcccagggccagggacagggcagctgctcatggtccttcctcacgagttttcctggagcagagggatacccccaaacccagggagcccacaggagcttcagaagggctcggctggagggcggggcccctgttgcacttgctcactggggactggggaggctctgatcgcagaccgggggtgctgctacctctgtctgctgccggcagaaagccacaagccatgaaaactgattgagatgagaagaattcatctgggactggcttttgctttaggatggtgttggaagttgctcgttgtcgctaggagcctgctccactgtaagggtgtcgggatctgaagagctatggtgaaacaccactgaagcattgccaaggatggggctggtaagtagcaaaaagccggacaaggaaaagccgatcaaagagaaggacaagggccaatggagccccctgaaggtcagcgcccaagacaaggacgccccgccactgccgcccctggttgtcttcaaccaccttactcctccaccgcccgatgaacacctggatgaagacaagcatttcgtggtggctctgtatgactacaccgctatgaatgatcgggacctgcagatgctgaagggggagaagctacaggtcctgaagggaactggagactggtggctggccaggtcactcgtcacaggaagagaaggctatgtgcccagtaactttgtggcccgagtggagagcctggaaatggaaaggtggttctttagatcacagggtcggaaggaggctgagaggcagcttcttgctccaatcaacaaggccggctcctttcttatcagagagagtgaaaccaacaaaggtgccttctccctgtctgtgaaggatgtcaccacccagggggagctgatcaagcactataagatccgctgcctggatgaagggggctactacatctccccccggatcaccttcccctcgctccaggccctggtgcagcactattctaagaagggggatggtctatgccagaggctgaccctgccctgtgtgcgcccggccccgcagaatccctgggcccaggatgaatgggagatcccccggcagtctctcaggctggtcaggaaactcgggtctggacaattcggcgaagtctggatgggttactacaaaaacaacatgaaggtggccattaagacgctgaaggagggaaccatgtctccagaagccttcctgggtgaggccaacgtgatgaaggctctgcagcacgagcggctggtccgactctacgcagtggtcaccaaggagcccatctacattgtcaccgagtacatggccagaggatgcctgctggatttcctgaagacagatgaagggagcagattgtcactcccaaggctgattgacatgtcggcgcagattgctgaagggatggcatacattgagcgcatgaattccatccaccgcgacctgcgggcggccaacatcctggtgtctgaggccttgtgctgcaaaattgctgattttggcttggctcgaatcatcgacagtgaatacacggcccaagagggtaagcacagcccctaaccacaagggaaacctagggccttatctttcccagctcctcaaagccgcctttaacttctcccagcacagccctgagggaagacacctgagggctatacggtttctacagctctagatcagcatttccttcatttacccaaatgtgttcagcagaatggtagtgccctgagacctcccatggaggaacagctttaggata

SEQ ID NO: 57218 - DNA, 491 bp, Homo sapiens
gttgctgttctgggcttctaggagaggagtttattcggctgaggagcaacacagtcacctttctactccatccaagaaacagctccttccccagcagcccacaggggctgtgcgggggacacagtgtgggctcggtcttggcgtggaggcccccaggctgtccttcaccatgtgcctgttccctcagattgctgaagggatggcatacattgagcgcatgaattccatccaccgcgacctgcgggcggccaacatcctggtgtctgaggccttgtgctgcaaaattgctgattttggcttggctcgaatcatcgacagtgaatacacggcccaagagggtaagcacagcccctaaccacaagggaaacctagggccttatctttcccagctcctcaaagccgcctttaacttctcccagcacagccctgagggaagacacctgagggctatacggtttctacagctctagatcagcatttccttcatttac

SEQ ID NO: 57219 - DNA, 526 bp, Homo sapiens
ggctgtttagagaccgggcagccaggcaacgcacgaggctggagaagtggtctgggactgtgggcactgctgtcccttgcctgggcccactgtgccccgcgggacgctcagggccccccacccaccgaggaccccagcccctcacccccgcttgcggtctcctctgccgcagggatgagcaaccccgaggtcatccgcaacctggagcgcggctaccgcatgccgcgccccgacacctgcccgcccgagctgtaccgcggcgtcatcgccgagtgctggcgcagccggcccgaggagcggcccaccttcgagttcctgcagtcggtgctggaggacttctacacggccaccgagcggcagtacgagctgcagccctagccggccgcgcccgcctgcgccccgtgcccacctctgcgcggacgaccccgacttccgtgccatcccagacgggccgcgaaggcggggtgtcgcctgtgcccttttctcagacccggaatccagtgggcagaggcagcttcgcaggggg

SEQ ID NO: 57220 - DNA, 639 bp, Homo sapiens
ccatctacattgtcaccgagtacatggccagaggtggtgccccccgcagagccgcatcctcagagcgaggcgggagggccgggcttagcaggaggaggagggtccgctgcggtgggttcaccaggccagggggtcctgcagatctagggcatggcacggtgtggggacagggagggatggagggagggggagggacagagggagggtgagaaacaggagggtgaagtggttctgacagagccatgttctcagcccaggagcagttcagacagcatttctggagtgcatcttctgtgcctagcactctttgatgcctgctgggagggacagagcattgcaaagtcagacgaacaccaggccaggcatgcagggacagtactagatccaggtctcctgcctcctggtcatgcaaccatttacaactgtgtgaatattttacaaggatggccagagaggttgggcttgatggcctctgaggtccacggcgtggccaagttctcatgccactttctcaccctcctatgaccctgaccgcacactgctcctataggatcctaacatgcccatgttgatatagctccctaacaactgtcaccaaggggcccccggtcggaggctgtgctgggggtgcctctagcc

SEQ ID NO: 57221 - DNA, 307 bp, Homo sapiens
tggaagaatgaaggccaagtgatattcttgagtacttaatgtttacatttaagaaaatcgtaatctgggccaggagcaggcagtggctcacacctgtaatcccagcactttggtaggctcaggtgatctgcccacctcagcctccaaagtgctggaattacaggtgtgagtcactgtgcccagccgcagtcacctcttgaaaaaccaaatccaaccacaatgttaaccacaacattattcctatccctgaaataaatataatgaaactatttgggaaacaaggtttgaaattattgagccatgaact

SEQ ID NO: 57222 - DNA, 339 bp, Homo sapiens
agatttaatctactttttcctggctccctcccattactgggagagctgggtcttaaacccagataccctcttctccagttccaggccctttgtcctgttaagaaacttctccgtttgacgtgtcttgaggctaattcttctacagtaatatgaggctttgatccagacagctccagagaaactacgctcaaagtggagggttttcttaattgtagagaaactcacattacattaccttgtttgtgagatgtgttctgttgtattcagaaaggttcagaagaaagtcggctctggtcctgtctagaaatctttgatgcaggagccatttagctggagggg

SEQ ID NO: 57223 - DNA, 434 bp, Homo sapiens
ccatatttatatttgtacacacactccctcaaaatcgtgagttcatattgatacctccagttctggttcttcctagccttccccctttccatctttgtatttttattttccaacagtaagaaccctggctcccagtgctatgaatatatttactcatttgctccatccactgcactccagcctaggccacagaatgaaaccctgtcaagaaagaaaggaaggaatgagggagggagggagagaggaagagagagaaggaagaaggaagggagggagggaaaactgagaaagtaacataccatcatttttgctgtagtttgttcataagaagcaaaatcacttggtccagcccacactctggggagatgattttctaactccatttgtaataatttattccacttttattagttggcattatacagtaagaaaga

SEQ ID NO: 57224 - DNA, 538 bp, Homo sapiens
acattgctaaatgtcccctaggggacccctacactgaagttggctggagctctggggatcagggaggacatctgcaagcgtgcttatgagttgtaagctctaagaggggagggacattgcacagggcaggtcaggcacattgtaagtgctcttaaaacattacagttgagaagaatttcagagtaacatttatagccaagaaagatattcttcccccaacttgggcattcccttgatgttaaattgtcctgtgcgtcaaaaccctaaagaactgcagggaagcctataaccccaaaggaaggcagagaaaggtcctgggggacaggttgtggggtgagttaacttattccagccaaggtgaaggagttgccccgggcttcactctgagacttggagcctagtgtgctaagctcccagttcccaaagtgaccattcccacgctgaatgtcattactgcctcatcagcagcttgtcagctgtaatttctaatcccaagccgggtctctcttcccaggaccaaagtcataaagatgtttgc

SEQ ID NO: 57225 - DNA, 361 bp, Homo sapiens
agggagggtaaaacaaatccctctccaatgctttgtagaaggggattagaatcactgtggaattcggtattggctaataaagtataaacgctaaagatcaatgcctgagtgcacagttgtccttcaagccattgtacttctgctttccaagaatagaagactactttttaaccaagaattaaaaataaactcataatttaaacacctctttcatgccaaatggaaatcttagtgttgaataatcaggctcacctgaatacaaagttgtcctgaaaatgctgacaatcacaaaaaaggttctagaagctttttcaaaaaacaagttcagatggttccaactgagttactattgagtttaaag

SEQ ID NO: 57226 - DNA, 326 bp, Homo sapiens
gtaaagcattgtcactagtgctggaaatagccatcccaaacctaagtgacatcctcacctgccagcacaattaacccttcaattatttacttagacaaccatgtgttaaaggcaagttaaatatgttaactacttacagttctattcagctcttgcacgatgtctctgggaaatctctgttcttgggatagcttactgatggtgaagttaccattggctccaactctataaactcttccctcaacacaaagatcgtcttctcttggctactatatttactgagactaagtggcctgcttcatcttctaccaaatgttcaataagca

SEQ ID NO: 57227 - DNA, 518 bp, Homo sapiens
cagagtgagactccatctcaaaaaaaaaaaaaaagaaactcagtttctggttacatctgatctttattttttatatatcatctaagctataaagttatattccctatttgtgatcttaaaagaaggactccaggaaagtgttcaaatattcatatatctaaactggaacatatgtttatatttttaaaagtagcctgagaggttggcaactaaagtcatatgttgaatgatcatttctcaagagtttcattttatggtctttctcttgttctgtaaaatgtgggcatggatagatataaagtgcctggtgtccatgcttttgtgaaatcccttcctcttccatgtgaatgggacctgtgactttcttctaacccagagaacacagcaaaaatgatgtgatttatctgagtccattgatgacattgattacgacttcccttcaccacattatttaggactgcgtcgtaggagactgggacacatatccactttgctggcttgatgaagtaaactgctaa

SEQ ID NO: 57228 - DNA, 346 bp, Homo sapiens
agtggaattgttgttatagagtgtgagctttttcagctttaccagatattgctaaattgctgtctgaagcaaatgtagcagttcacactgctgtctagaattttctcatatccttattagattttgaattgtcagaccctgtgatttttactcttacgatggctgtgatatgcttttttgttttaatttgtacttcccttatttatggggataaatatatttccatgtttaataagcatttggatttgttcttctgtcaacaacatatataaatctttgtcaccaaatcagcttttttgaggtatgacttacatgtaataaaatgtgccaattttgagtgtaccat

SEQ ID NO: 57229 - DNA, 568 bp, Homo sapiens
ttttctgaggtggagtctcgctctgacggccagctctggagtctgactaacttggttcagatcttggccttctcttccaatcttgagtgagatacttcacctttctgagcctcagttttcttctctgtagagtgggatcattgtggccagcttgtagtgaaacgctccagaatattagccaaacacaactaaggagatgttgactgggtttgttccatccatgataacagattttttggttaatgccccatgacaccaacacttcatatagcccttatgtgtctgactccattccgggctgtgctcatggcagcccagccatcagcaccaactgtgctgacataattgtttcctgctttttctcctgacttcttattgtgagtacttttcatgctaatacagtctccctcccaggcacagcagactgctacagattattctgatgaactgatgagatgtttgccttggcatacagctgtctatctaaaacaagggtgcctctttttttggtggagggacagagtttctctcttgttgcccaggctggagtgcaatggtgcaaactcgg

SEQ ID NO: 57230 - DNA, 730 bp, Homo sapiens
gaagaaaagaaaagcaaataaaggaaaacacacccagagcagtgagagaagtctgtatacaacgacccatttgtgcagtagaggctgtgcaggcaggtaccgggaacagggctccaccttttagaaggtggtcctctggcgtgagccaccgcgcccggccagaagaaatttctaataacactcaaggacggccagctctggagtctgactaacttggttcagatcttggccttctcttccaatcttgagtgagatacttcacctttctgagcctcagttttcttctctgtagagtgggatcattgtggccagcttgtagtgaaacgctccagaatattagccaaacacaactaaggagatgttgactgggtttgttccatccatgataacagattttttggttaatgccccatgacaccaacacttcatatagcccttatgtgtctgactccattccgggctgtgctcatggcagcccagccatcagcaccaactgtgctgacataattgtttcctgctttttctcctgacttcttattgtgagtacttttcatgctaatacagtctccctcccaggcacagcagactgctacagattattctgatgaactgatgagatgtttgccttggcatacagctgtctatctaaaacaagggtgcctctttttttggtggagggacagagtttctctcttgttgcccaggctggagtgcaatggtgcaaactcgg

SEQ ID NO: 57231 - DNA, 546 bp, Homo sapiens
agccttggctaatctgatgagtgtgccctagaatttggttcagaagctgttgacatgaagaatcagagatcgccaaggactcaattctaccacggtcacacctagagaccaacgctcagtgatctggtagtgtcattctgactcccggatcagaaaagatgcctgtacccactgcaaaagcagagcagagtccctctacctgggtcaagcccaaaccatcagtactcccagaaccaacaaaatgtcctgagagaaaaatagccagcaatcatcagatcacctcgaaattattctctctttctctctctggaattttagttcacttagtcttcgttgctttcacagctctcaggtgcttctgaaaatgacttttttaatattttccatttgttcaggtaagagtattggcctatcacatcctgccccaaagcagaagtctttctgtgtataatttttgatctttacaattcaggtcttccaaaagtatgtaacataactaatacatgtttgttgaaatgaatgaataaataaattattaatgctaaa

SEQ ID NO: 57232 - DNA, 253 bp, Homo sapiens
aaaaatgtgtgccctttggcaacactgcatgacacatgaaagggccaacatgattcaaactcttagctatggaagcctgggaggatggtaggtttggatggtctatggccttctgatgcctctatcactccaacacaagtgcccttagttgttcagtgtcctataaaaaaggatggaaaactaggaccactttcaaggggcttatgcaaatacataaagtgcctgaattaaactctgaagcagtaacagggta

SEQ ID NO: 57233 - DNA, 322 bp, Homo sapiens
tttacagtattttctgaaaggcagcatcaaattctgaatgggcatcactgattcatttacacatctgttaaaattttattgagcacatactatgtgtggtgtaatgcactactttccaatgataaggaatttagataagcaaaatgtgcttcaggtcgtcaggccacggtgattataatttggagagactgtaggtaggcaactcattacaaatgaagcagaatgaaactatcactaaattgagtaggcaggaatagcttactctggcagaaggcacctgagaatcctaattgagggaagacttttaggttttaagtaagca

SEQ ID NO: 57234 - DNA, 480 bp, Homo sapiens
ttgggagcagagggactctggccagtgtctctgctttttcactgtgtgaccccgggcagatacgtcaacgtctctggacttcagtcccctgaagcaaaatcacaataatgagaatccgctcccaggcctgccatgaacgcgaagtagcccataaacagcagctctgtgcgtgtgtggacgagaaagtgaacgcgagagctctgcagacctcaatctcacgcccgcaaggatttgccaatggctgcttagaaagctgtgcttaccctgggcctcaatgcagctgatcacttggggcagtggcacagcaggaacagggagggaagcccttatccccagcagccacaagagtggaggcaaaacttcatacccaccttagcttcccaattcccctggctgtcctcccagcctagtttttaaatatctgaatcttaagcgtgcacctaggagtaatcttaataaatcgcatccctccctgaaggt

SEQ ID NO: 57235 - DNA, 612 bp, Homo sapiens
ctcgtgcctgaactcctgacctagtgttccacctgccttggcctcccaaagtgctgggattacaggcgtgagccaccatgctggccatcatttctgtttttaatatctgcagtgcctcaaagtgtttacattttatcactctgtatccatcatccttaatgcttaaaagctttagaagtatgttatacatacttctgctgtagcatttattttcatatttgtagtcctagctttgctgctaaaccatgagctcttggaatgccagaggcaaagttatcttgcacgtcattgtattcttaagcacctaacagtatgtctggatgccttttttctgattgatattacttcttggccaggatagagaaatggttaagttctcacataaaattgaagagttttctcagttttgaaaagcatattgggtagaaaagaagaatttctttggaagcattaaggacactttgtattgtcattttcttagacagacttatggttcagtcaccatgagttatcatttctgtatgcctactcatcttaagattgtcataccttaatcctaataagagaacagctcaacaagtaggtaggtgagattgttactggccagtattg

SEQ ID NO: 57236 - DNA, 844 bp, Homo sapiens
gctgtctctccccgcatctgcctatccggtgaaggaagagaggcagctgcaggagctgctgttctggaggcagacaggaagctggtgagggagctagggaactcctgaggcctgcctcttcctgtaggaagcagcactaagatagagatttgggaccaagggcaccaactgcactctcacccatttcctttagggctgtctgcctcattctcagaggtccagtctggccctgggactgacaaagtcaggggcattccagagtctgagccttgaagctaaggttcactgctttgggttctgtccagcatagcttcagactcatgctgagaaaacataaccaacaattactgagtgcttactctggcctggcactgttctgagttcctgctgctcagagtgtgggctgtggaccagcagcagcagcacccggggacttgttagacatgcagcatctcagaccccaactgctgaatcagaagctgcattttaacaagacccaggtaatttgtatgacacgaaagcttgagaagcactgttcttcatacttagatctattaactcagttaatcctttaacaatcttctcagctgagtccttttattatcatccgcacttcctatacaaaaaaaacctgagtcatagagaagtcaggtaacttgtcttaggtcacacagctagtaattttgataggtagaattcaaacctaaaaaaactgcctctggagcctgcatagttagccactatgatgctgaccttgtaaacagcatggagaacagcttctttatccatccaaatggcagagggcttaggacactagtgaggaataaagtcaacttcaccaaga

SEQ ID NO: 57237 - DNA, 500 bp, Homo sapiens
ttataacttccttaattactcctgcagacaacatcactattttagaatgtaagattggcctttcaagatgtcttttcaagtttttgcatttccgataaataacggctcgacccacctgccaacaagttctgtagctccacctaggaaccagctcagtgtaagaggacagctttggctccctatgagttcatctcccacccaaccagtcagcacttcccattccccagcccctacccaccaaactatccttaaaaaaccctagtctcaaggccaggtgtggtggctcatgcctgtaatcccagcactttgggaggctgaggcgggtggatcacttgaggtcaggagttcgagaccagcctgcccaacatggtgaaaccctgtctctactaaaaacacaaaaaaattagcttggtgtggtggtggggattccaggtgtctgccaccacatccagcctaaaactgttcttattgttattttaatagttttccctcagtagaat

SEQ ID NO: 57238 - DNA, 408 bp, Homo sapiens
atacaggtctaaaatgcctgttttgttttagaaactactgttctccccaggattaaaatgtgcaggaagcattcatcccacccttagtttagctgatagccttacccccctcccttttgttttgttgtggatctgaacttattttacccaatggctattttcttgcatttccctctagaggtattggcatttcgagaagcacttcagccttccagatctttacataattcattacggacatattttggacttacagtatcttagagtacaaaaaaaagagactctcctctttatttccagaagttgttacagacttctcctgaatttaaatttcctgaaaatttttcctggacatgctgtaagtttttattccattagggaaccataaacaaaaccacttaccagcag

SEQ ID NO: 57239 - DNA, 350 bp, Homo sapiens
tttttaagatagttctgtttggtagtggaccaactattagttttcagaagggttggtttggatttttgttttaattacagtctatataattagttctcagcatgttgaggtaaaagagaattgtaccagcaagctcccaatttcttcatctcattaggtttttaacacgattattagtatcataatcagctatgatgttttttgttgcaggttttcacattctctgatttgcggggtgtcttgattggctaatttgggcaaattattttgattgtcttgatgatggttggctgattagaacacagcaagggcataatttcttcctgtgaaacgttgcattcttttgtttt

SEQ ID NO: 57240 - DNA, 199 bp, Homo sapiens
tcatcggaagcatgtacaatcccacaattttacattcaatccacttttcagcccagtgtttggattcagcatagcagaaaatatcttgttggagctgctcttaatcacacctggtgaaaggactatatcttaccttgcgaatctttctcctttttctttctttttttttctttcctattgattgggtgggagaagtcat

SEQ ID NO: 57241 - DNA, 543 bp, Homo sapiens
ttaacggtaaatgcgaatgtagttagttcatcttgggcatcagagagcattgtaaaacttgctaattatagtatcctctgagtaagctgatccatcttttggcaaaaattatgttgtgagagacttttcatttgaaaatttcttggctactgactttaattagcagttgatactagaatggactttcatggcgttcacagcctgggatggcccacgtcatctttaaccttgaactcactgatgtttgaattattcagtagctggcttagccatattgaatttcaaataagtgttcaatggtgttagttacttatttctaaatggtacacaacattttaaatgttttgctattgatttatagtgactagtttcctgtctgatttgagaggttctgacaaattttttaagaaacggatgtaaccatgaaatcctaagtagaggacccagctaacctgtacccacaatcctgatacacttgagactgtgagataaatttgtgttgttttattctgtatgataataaaacttacaaataaaatgaaa

SEQ ID NO: 57242 - DNA, 301 bp, Homo sapiens
ggaaaaatataacaaaacaataacctggagacaatatctaggagggaacaattctgggacagcatttcttttttccccacctgacttcagagaggtagcaagtattcactgggaggcatcactttaagccaggtacaaaaacaggctccaactacaaaaagtgcgttttcctaacaaaagtattccaagcaacctccctgtacacggcacattttctgaaaatcaatcaagccctctcattcagctgaagtccaatcgcattgtctgtcccttcctccagaagccgatttctgccaggtag

SEQ ID NO: 57243 - DNA, 369 bp, Homo sapiens
gaaaagataatgaaggaataatgcaaagctgaaggctgtgccagatgtaagaagtgattatgaaggataaaagaaaagggctttccaagcagggaagaggcatcagagagaaaaccaattgttgagccagtattctgtcacagggacatttgtctttgttctttaatgcccagtaagggtcttctcaggttccattaaacatgcagaatcacaagacccccccaaagttaccatggtgccaaccgactcaaaacaatacagacaagaagctcagctcatcaggaaggctgcagcaggcatatgggaaccatctgctccacaaaggacagctgagatgcaaagatccctacaaggtccatatccacggga

SEQ ID NO: 57244 - DNA, 211 bp, Homo sapiens
tttgctttatgaagaagctggcctaggtagggttacaaatgggttttactgaacttaaacagctaattcctacatctctgaaaataatcagaatagaaaaatagatggaaaaatttcaaacccactgtaagagactaacataaatccaattccaaaagctgttaatcataccatctaaaaagaaaactgtcgactaatcatgtgtttacaa

SEQ ID NO: 57245 - DNA, 4078 bp, Homo sapiens
cgcgcgctgcctgaggacgccgcggcccccgcccccgccatgggcgcccctgcctgcgccctcgcgctctgcgtggccgtggccatcgtggccggcgcctcctcggagtccttggggacggagcagcgcgtcgtggggcgagcggcagaagtcccgggcccagagcccggccagcaggagcagttggtcttcggcagcggggatgctgtggagctgagctgtcccccgcccgggggtggtcccatggggcccactgtctgggtcaaggatggcacagggctggtgccctcggagcgtgtcctggtggggccccagcggctgcaggtgctgaatgcctcccacgaggactccggggcctacagctgccggcagcggctcacgcagcgcgtactgtgccacttcagtgtgcgggtgacagacgctccatcctcgggagatgacgaagacggggaggacgaggctgaggacacaggtgtggacacaggggccccttactggacacggcccgagcggatggacaagaagctgctggccgtgccggccgccaacaccgtccgcttccgctgcccagccgctggcaaccccactccctccatctcctggctgaagaacggcagggagttccgcggcgagcaccgcattggaggcatcaagctgcggcatcagcagtggagcctggtcatggaaagcgtggtgccctcggaccgcggcaactacacctgcgtcgtggagaacaagtttggcagcatccggcagacgtacacgctggacgtgctggagcgctccccgcaccggcccatcctgcaggcggggctgccggccaaccagacggcggtgctgggcagcgacgtggagttccactgcaaggtgtacagtgacgcacagccccacatccagtggctcaagcacgtggaggtgaacggcagcaaggtgggcccggacggcacaccctacgttaccgtgctcaagacggcgggcgctaacaccaccgacaaggagctagaggttctctccttgcacaacgtcacctttgaggacgccggggagtacacctgcctggcgggcaattctattgggttttctcatcactctgcgtggctggtggtgctgccagccgaggaggagctggtggaggctgacgaggcgggcagtgtgtatgcaggcatcctcagctacggggtgggcttcttcctgttcatcctggtggtggcggctgtgacgctctgccgcctgcgcagcccccccaagaaaggcctgggctcccccaccgtgcacaagatctcccgcttcccgctcaagcgacaggtgtccctggagtccaacgcgtccatgagctccaacacaccactggtgcgcatcgcaaggctgtcctcaggggagggccccacgctggccaatgtctccgagctcgagctgcctgccgaccccaaatgggagctgtctcgggcccggctgaccctgggcaagccccttggggagggctgcttcggccaggtggtcatggcggaggccatcggcattgacaaggaccgggccgccaagcctgtcaccgtagccgtgaagatgctgaaagacgatgccactgacaaggacctgtcggacctggtgtctgagatggagatgatgaagatgatcgggaaacacaaaaacatcatcaacctgctgggcgcctgcacgcagggcgggcccctgtacgtgctggtggagtacgcggccaagggtaacctgcgggagtttctgcgggcgcggcggcccccgggcctggactactccttcgacacctgcaagccgcccgaggagcagctcaccttcaaggacctggtgtcctgtgcctaccaggtggcccggggcatggagtacttggcctcccagaagtgcatccacagggacctggctgcccgcaatgtgctggtgaccgaggacaacgtgatgaagatcgcagacttcgggctggcccgggacgtgcacaacctcgactactacaagaagacaaccaacggccggctgcccgtgaagtggatggcgcctgaggccttgtttgaccgagtctacactcaccagagtgacgtctggtcctttggggtcctgctctgggagatcttcacgctggggggctccccgtaccccggcatccctgtggaggagctcttcaagctgctgaaggagggccaccgcatggacaagcccgccaactgcacacacgacctgtacatgatcatgcgggagtgctggcatgccgcgccctcccagaggcccaccttcaagcagctggtggaggacctggaccgtgtccttaccgtgacgtccaccgacgagtacctggacctgtcggcgcctttcgagcagtactccccgggtggccaggacacccccagctccagctcctcaggggacgactccgtgtttgcccacgacctgctgcccccggccccacccagcagtgggggctcgcggacgtgaagggccactggtccccaacaatgtgaggggtccctagcagcccaccctgctgctggtgcacagccactccccggcatgagactcagtgcagatggagagacagctacacagagctttggtctgtgtgtgtgtgtgtgcgtgtgtgtgtgtgtgtgcacatccgcgtgtgcctgtgtgcgtgcgcatcttgcctccaggtgcagaggtaccctgggtgtccccgctgctgtgcaacggtctcctgactggtgctgcagcaccgaggggcctttgttctggggggacccagtgcagaatgtaagtgggcccacccggtgggacccccgtggggcagggagctgggcccgacatggctccggcctctgcctttgcaccacgggacatcacagggtgggcctcggcccctcccaacacccaaagctgagcctgcagggaagccccacatgtccagcaccttgtgcctggggtgttagtggcaccgcctccccacctccaggctttcccacttcccaccctgcccctcagagactgaaattacgggtacctgaagatgggagcctttaccttttatgcaaaaggtttattccggaaactagtgtacatttctataaatagatgctgtgtatatggtatatatacatatatatatataacatatatggaagaggaaaaggctggtacaacggaggcctgcgaccctgggggcacaggaggcaggcatggccctgggcggggcgtgggggggcgtggagggaggccccagggggtctcacccatgcaagcagaggaccagggctttttctggcaccgcagttttgttttaaaactggacctgtatatttgtaaagctatttatgggcccctggcactcttgttcccacaccccaacacttccagcatttagctggccacatggcggagagttttaatttttaacttattgacaaccgagaaggtttatcccgccgatagagggacggccaagaatgtacgtccagcctgccccggagctggaggatcccctccaagcctaaaaggttgttaatagttggaggtgattccagtgaagatattttatttcctttgtcctttttcaggagaattagatttctataggatttttctttaggagatttattttttggacttcaaagcaagctggtattttcatacaaattcttctaattgctgtgtgtcccaggcagggagacggtttccagggaggggccggccctgtgtgcaggttccgatgttattagatgttacaagtttatatatatctatatatataatttattgagtttttacaagatgtatttgttgtagacttaacacttcttacgcaatgcttctagagttttatagcctggactgctacctttcaaagcttggagggaagccgtgaattcagttggttcgttctgtactgttactgggccctgagtctgggcagctgtcccttgcttgcctgcagggccatggctcagggtggtctcttcttggggcccagtgcatggtggccagaggtgtcacccaaaccggcaggtgcgattttgttaacccagcgacgaactttccgaaaaataaagacacctggttgctaacctgaacctgtgct

SEQ ID NO: 57246 - DNA, 3742 bp, Homo sapiens
cgcgcgctgcctgaggacgccgcggcccccgcccccgccatgggcgcccctgcctgcgccctcgcgctctgcgtggccgtggccatcgtggccggcgcctcctcggagtccttggggacggagcagcgcgtcgtggggcgagcggcagaagtcccgggcccagagcccggccagcaggagcagttggtcttcggcagcggggatgctgtggagctgagctgtcccccgcccgggggtggtcccatggggcccactgtctgggtcaaggatggcacagggctggtgccctcggagcgtgtcctggtggggccccagcggctgcaggtgctgaatgcctcccacgaggactccggggcctacagctgccggcagcggctcacgcagcgcgtactgtgccacttcagtgtgcgggtgacagacgctccatcctcgggagatgacgaagacggggaggacgaggctgaggacacaggtgtggacacaggggccccttactggacacggcccgagcggatggacaagaagctgctggccgtgccggccgccaacaccgtccgcttccgctgcccagccgctggcaaccccactccctccatctcctggctgaagaacggcagggagttccgcggcgagcaccgcattggaggcatcaagctgcggcatcagcagtggagcctggtcatggaaagcgtggtgccctcggaccgcggcaactacacctgcgtcgtggagaacaagtttggcagcatccggcagacgtacacgctggacgtgctggagcgctccccgcaccggcccatcctgcaggcggggctgccggccaaccagacggcggtgctgggcagcgacgtggagttccactgcaaggtgtacagtgacgcacagccccacatccagtggctcaagcacgtggaggtgaacggcagcaaggtgggcccggacggcacaccctacgttaccgtgctcaaggtgtccctggagtccaacgcgtccatgagctccaacacaccactggtgcgcatcgcaaggctgtcctcaggggagggccccacgctggccaatgtctccgagctcgagctgcctgccgaccccaaatgggagctgtctcgggcccggctgaccctgggcaagccccttggggagggctgcttcggccaggtggtcatggcggaggccatcggcattgacaaggaccgggccgccaagcctgtcaccgtagccgtgaagatgctgaaagacgatgccactgacaaggacctgtcggacctggtgtctgagatggagatgatgaagatgatcgggaaacacaaaaacatcatcaacctgctgggcgcctgcacgcagggcgggcccctgtacgtgctggtggagtacgcggccaagggtaacctgcgggagtttctgcgggcgcggcggcccccgggcctggactactccttcgacacctgcaagccgcccgaggagcagctcaccttcaaggacctggtgtcctgtgcctaccaggtggcccggggcatggagtacttggcctcccagaagtgcatccacagggacctggctgcccgcaatgtgctggtgaccgaggacaacgtgatgaagatcgcagacttcgggctggcccgggacgtgcacaacctcgactactacaagaagacaaccaacggccggctgcccgtgaagtggatggcgcctgaggccttgtttgaccgagtctacactcaccagagtgacgtctggtcctttggggtcctgctctgggagatcttcacgctggggggctccccgtaccccggcatccctgtggaggagctcttcaagctgctgaaggagggccaccgcatggacaagcccgccaactgcacacacgacctgtacatgatcatgcgggagtgctggcatgccgcgccctcccagaggcccaccttcaagcagctggtggaggacctggaccgtgtccttaccgtgacgtccaccgacgagtacctggacctgtcggcgcctttcgagcagtactccccgggtggccaggacacccccagctccagctcctcaggggacgactccgtgtttgcccacgacctgctgcccccggccccacccagcagtgggggctcgcggacgtgaagggccactggtccccaacaatgtgaggggtccctagcagcccaccctgctgctggtgcacagccactccccggcatgagactcagtgcagatggagagacagctacacagagctttggtctgtgtgtgtgtgtgtgcgtgtgtgtgtgtgtgtgcacatccgcgtgtgcctgtgtgcgtgcgcatcttgcctccaggtgcagaggtaccctgggtgtccccgctgctgtgcaacggtctcctgactggtgctgcagcaccgaggggcctttgttctggggggacccagtgcagaatgtaagtgggcccacccggtgggacccccgtggggcagggagctgggcccgacatggctccggcctctgcctttgcaccacgggacatcacagggtgggcctcggcccctcccaacacccaaagctgagcctgcagggaagccccacatgtccagcaccttgtgcctggggtgttagtggcaccgcctccccacctccaggctttcccacttcccaccctgcccctcagagactgaaattacgggtacctgaagatgggagcctttaccttttatgcaaaaggtttattccggaaactagtgtacatttctataaatagatgctgtgtatatggtatatatacatatatatatataacatatatggaagaggaaaaggctggtacaacggaggcctgcgaccctgggggcacaggaggcaggcatggccctgggcggggcgtgggggggcgtggagggaggccccagggggtctcacccatgcaagcagaggaccagggctttttctggcaccgcagttttgttttaaaactggacctgtatatttgtaaagctatttatgggcccctggcactcttgttcccacaccccaacacttccagcatttagctggccacatggcggagagttttaatttttaacttattgacaaccgagaaggtttatcccgccgatagagggacggccaagaatgtacgtccagcctgccccggagctggaggatcccctccaagcctaaaaggttgttaatagttggaggtgattccagtgaagatattttatttcctttgtcctttttcaggagaattagatttctataggatttttctttaggagatttattttttggacttcaaagcaagctggtattttcatacaaattcttctaattgctgtgtgtcccaggcagggagacggtttccagggaggggccggccctgtgtgcaggttccgatgttattagatgttacaagtttatatatatctatatatataatttattgagtttttacaagatgtatttgttgtagacttaacacttcttacgcaatgcttctagagttttatagcctggactgctacctttcaaagcttggagggaagccgtgaattcagttggttcgttctgtactgttactgggccctgagtctgggcagctgtcccttgcttgcctgcagggccatggctcagggtggtctcttcttggggcccagtgcatggtggccagaggtgtcacccaaaccggcaggtgcgattttgttaacccagcgacgaactttccgaaaaataaagacacctggttgctaacctgaacctgtgct

SEQ ID NO: 57247 - DNA, 3950 bp, Homo sapiens
cgcgcgctgcctgaggacgccgcggcccccgcccccgccatgggcgcccctgcctgcgccctcgcgctctgcgtggccgtggccatcgtggccggcgcctcctcggagtccttggggacggagcagcgcgtcgtggggcgagcggcagaagtcccgggcccagagcccggccagcaggagcagttggtcttcggcagcggggatgctgtggagctgagctgtcccccgcccgggggtggtcccatggggcccactgtctgggtcaaggatggcacagggctggtgccctcggagcgtgtcctggtggggccccagcggctgcaggtgctgaatgcctcccacgaggactccggggcctacagctgccggcagcggctcacgcagcgcgtactgtgccacttcagtgtgcgggtgacagacgctccatcctcgggagatgacgaagacggggaggacgaggctgaggacacaggtgtggacacaggggccccttactggacacggcccgagcggatggacaagaagctgctggccgtgccggccgccaacaccgtccgcttccgctgcccagccgctggcaaccccactccctccatctcctggctgaagaacggcagggagttccgcggcgagcaccgcattggaggcatcaagctgcggcatcagcagtggagcctggtcatggaaagcgtggtgccctcggaccgcggcaactacacctgcgtcgtggagaacaagtttggcagcatccggcagacgtacacgctggacgtgctggagcgctccccgcaccggcccatcctgcaggcggggctgccggccaaccagacggcggtgctgggcagcgacgtggagttccactgcaaggtgtacagtgacgcacagccccacatccagtggctcaagcacgtggaggtgaacggcagcaaggtgggcccggacggcacaccctacgttaccgtgctcaagacggcgggcgctaacaccaccgacaaggagctagaggttctctccttgcacaacgtcacctttgaggacgccggggagtacacctgcctggcgggcaattctattgggttttctcatcactctgcgtggctggtggtgctgccagccgaggaggagctggtggaggctgacgaggcgggcagtgtgtatgcaggcatcctcagctacggggtgggcttcttcctgttcatcctggtggtggcggctgtgacgctctgccgcctgcgcagcccccccaagaaaggcctgggctcccccaccgtgcacaagatctcccgcttcccgctcaagcgacaggtgtccctggagtccaacgcgtccatgagctccaacacaccactggtgcgcatcgcaaggctgtcctcaggggagggccccacgctggccaatgtctccgagctcgagctgcctgccgaccccaaatgggagctgtctcgggcccggctgaccctgggcaagccccttggggagggctgcttcggccaggtggtcatggcggaggccatcggcattgacaaggaccgggccgccaagcctgtcaccgtagccgtgaagatgctgaaagacgatgccactgacaaggacctgtcggacctggtgtctgagatggagatgatgaagatgatcgggaaacacaaaaacatcatcaacctgctgggcgcctgcacgcagggcgggcccctgtacgtgctggtggagtacgcggccaagggtaacctgcgggagtttctgcgggcgcggcggcccccgggcctggactactccttcgacacctgcaagccgcccgaggagcagctcaccttcaaggacctggtgtcctgtgcctaccaggtggcccggggcatggagtacttggcctcccagaagtgcatccacagggacctggctgcccgcaatgtgctggtgaccgaggacaacgtgatgaagatcgcagacttcgggctggcccgggacgtgcacaacctcgactactacaagaagacaaccaacggccggctgcccgtgaagtggatggcgcctgaggccttgtttgaccgagtctacactcaccagagtgacgtctggtcctttggggtcctgctctgggagatcttcacgctggggggctccccgtaccccggcatccctgtggaggagctcttcaagctgctgaaggagggccaccgcatggacaagcccgccaactgcacacacgacctgtacatgatcatgcgggagtgctggcatgccgcgccctcccagaggcccaccttcaagcagctggtggaggacctggaccgtgtccttaccgtgacgtccaccgacgagtacctggacctgtcggcgcctttcgagcagtactccccgggtggccaggacacccccagctccagctcctcaggggacgactccgtgtttgcccacgacctgctgcccccggccccacccagcagtgggggctcgcggacgtgaagggccactggtccccaacaatgtgaggggtccctagcagcccaccctgctgctggtgcacagccactccccggcatgagactcagtgcagatggagagacagctacacagagctttggtctgtgtgtgtgtgtgtgcgtgtgtgtgtgtgtgtgcacatccgcgtgtgcctgtgtgcgtgcgcatcttgcctccaggtgcagaggtaccctgggtgtccccgctgctgtgcaacggtctcctgactggtgctgcagcaccgaggggcctcggcccctcccaacacccaaagctgagcctgcagggaagccccacatgtccagcaccttgtgcctggggtgttagtggcaccgcctccccacctccaggctttcccacttcccaccctgcccctcagagactgaaattacgggtacctgaagatgggagcctttaccttttatgcaaaaggtttattccggaaactagtgtacatttctataaatagatgctgtgtatatggtatatatacatatatatatataacatatatggaagaggaaaaggctggtacaacggaggcctgcgaccctgggggcacaggaggcaggcatggccctgggcggggcgtgggggggcgtggagggaggccccagggggtctcacccatgcaagcagaggaccagggctttttctggcaccgcagttttgttttaaaactggacctgtatatttgtaaagctatttatgggcccctggcactcttgttcccacaccccaacacttccagcatttagctggccacatggcggagagttttaatttttaacttattgacaaccgagaaggtttatcccgccgatagagggacggccaagaatgtacgtccagcctgccccggagctggaggatcccctccaagcctaaaaggttgttaatagttggaggtgattccagtgaagatattttatttcctttgtcctttttcaggagaattagatttctataggatttttctttaggagatttattttttggacttcaaagcaagctggtattttcatacaaattcttctaattgctgtgtgtcccaggcagggagacggtttccagggaggggccggccctgtgtgcaggttccgatgttattagatgttacaagtttatatatatctatatatataatttattgagtttttacaagatgtatttgttgtagacttaacacttcttacgcaatgcttctagagttttatagcctggactgctacctttcaaagcttggagggaagccgtgaattcagttggttcgttctgtactgttactgggccctgagtctgggcagctgtcccttgcttgcctgcagggccatggctcagggtggtctcttcttggggcccagtgcatggtggccagaggtgtcacccaaaccggcaggtgcgattttgttaacccagcgacgaactttccgaaaaataaagacacctggttgctaacctgaacctgtgct

SEQ ID NO: 57248 - DNA, 3567 bp, Homo sapiens
ggaacagatagaatcgagctcggtacgaacgggtgatgcggatggacaagaagctgctggccgtgccggccgccaacaccgtccgcttccgctgcccagccgctggcaaccccactccctccatctcctggctgaagaacggcagggagttccgcggcgagcaccgcattggaggcatcaagctgcggcatcagcagtggagcctggtcatggaaagcgtggtgccctcggaccgcggcaactacacctgcgtcgtggagaacaagtttggcagcatccggcagacgtacacgctggacgtgctggagcgctccccgcaccggcccatcctgcaggcggggctgccggccaaccagacggcggtgctgggcagcgacgtggagttccactgcaaggtgtacagtgacgcacagccccacatccagtggctcaagcacgtggaggtgaacggcagcaagacggcgggcgctaacaccaccgacaaggagctagaggttctctccttgcacaacgtcacctttgaggacgccggggagtacacctgcctggcgggcaattctattgggttttctcatcactctgcgtggctggtggtgctgccagccgaggaggagctggtggaggctgacgaggcgggcagtgtgtatgcaggcatcctcagctacggggtgggcttcttcctgttcatcctggtggtggcggctgtgacgctctgccgcctgcgcagcccccccaagaaaggcctgggctcccccaccgtgcacaagatctcccgcttcccgctcaagcgacaggtgtccctggagtccaacgcgtccatgagctccaacacaccactggtgcgcatcgcaaggctgtcctcaggggagggccccacgctggccaatgtctccgagctcgagctgcctgccgaccccaaatgggagctgtctcgggcccggctgaccctgggcaagccccttggggagggctgcttcggccaggtggtcatggcggaggccatcggcattgacaaggaccgggccgccaagcctgtcaccgtagccgtgaagatgctgaaagacgatgccactgacaaggacctgtcggacctggtgtctgagatggagatgatgaagatgatcgggaaacacaaaaacatcatcaacctgctgggcgcctgcacgcagggcgggcccctgtacgtgctggtggagtacgcggccaagggtaacctgcgggagtttctgcgggcgcggcggcccccgggcctggactactccttcgacacctgcaagccgcccgaggagcagctcaccttcaaggacctggtgtcctgtgcctaccaggtggcccggggcatggagtacttggcctcccagaagtgcatccacagggacctggctgcccgcaatgtgctggtgaccgaggacaacgtgatgaagatcgcagacttcgggctggcccgggacgtgcacaacctcgactactacaagaagacaaccaacggccggctgcccgtgaagtggatggcgcctgaggccttgtttgaccgagtctacactcaccagagtgacgtctggtcctttggggtcctgctctgggagatcttcacgctggggggctccccgtaccccggcatccctgtggaggagctcttcaagctgctgaaggagggccaccgcatggacaagcccgccaactgcacacacgacctgtacatgatcatgcgggagtgctggcatgccgcgccctcccagaggcccaccttcaagcagctggtggaggacctggaccgtgtccttaccgtgacgtccaccgacgagtacctggacctgtcggcgcctttcgagcagtactccccgggtggccaggacacccccagctccagctcctcaggggacgactccgtgtttgcccacgacctgctgcccccggccccacccagcagtgggggctcgcggacgtgaagggccactggtccccaacaatgtgaggggtccctagcagcccaccctgctgctggtgcacagccactccccggcatgagactcagtgcagatggagagacagctacacagagctttggtctgtgtgtgtgtgtgtgcgtgtgtgtgtgtgtgtgcacatccgcgtgtgcctgtgtgcgtgcgcatcttgcctccaggtgcagaggtaccctgggtgtccccgctgctgtgcaacggtctcctgactggtgctgcagcaccgaggggcctttgttctggggggacccagtgcagaatgtaagtgggcccacccggtgggacccccgtggggcagggagctgggcccgacatggctccggcctctgcctttgcaccacgggacatcacagggtgggcctcggcccctcccaacacccaaagctgagcctgcagggaagccccacatgtccagcaccttgtgcctggggtgttagtggcaccgcctccccacctccaggctttcccacttcccaccctgcccctcagagactgaaattacgggtacctgaagatgggagcctttaccttttatgcaaaaggtttattccggaaactagtgtacatttctataaatagatgctgtgtatatggtatatatacatatatatatataacatatatggaagaggaaaaggctggtacaacggaggcctgcgaccctgggggcacaggaggcaggcatggccctgggcggggcgtgggggggcgtggagggaggccccagggggtctcacccatgcaagcagaggaccagggctttttctggcaccgcagttttgttttaaaactggacctgtatatttgtaaagctatttatgggcccctggcactcttgttcccacaccccaacacttccagcatttagctggccacatggcggagagttttaatttttaacttattgacaaccgagaaggtttatcccgccgatagagggacggccaagaatgtacgtccagcctgccccggagctggaggatcccctccaagcctaaaaggttgttaatagttggaggtgattccagtgaagatattttatttcctttgtcctttttcaggagaattagatttctataggatttttctttaggagatttattttttggacttcaaagcaagctggtattttcatacaaattcttctaattgctgtgtgtcccaggcagggagacggtttccagggaggggccggccctgtgtgcaggttccgatgttattagatgttacaagtttatatatatctatatatataatttattgagtttttacaagatgtatttgttgtagacttaacacttcttacgcaatgcttctagagttttatagcctggactgctacctttcaaagcttggagggaagccgtgaattcagttggttcgttctgtactgttactgggccctgagtctgggcagctgtcccttgcttgcctgcagggccatggctcagggtggtctcttcttggggcccagtgcatggtggccagaggtgtcacccaaaccggcaggtgcgattttgttaacccagcgacgaactttccgaaaaataaagacacctggttgctaacctgaacctgtgct

SEQ ID NO: 57249 - DNA, 3546 bp, Homo sapiens
ggaacagatagaatcgagctcggtacgaacgggtgatgcggatggacaagaagctgctggccgtgccggccgccaacaccgtccgcttccgctgcccagccgctggcaaccccactccctccatctcctggctgaagaacggcagggagttccgcggcgagcaccgcattggaggcatcaagctgcggcatcagcagtggagcctggtcatggaaagcgtggtgccctcggaccgcggcaactacacctgcgtcgtggagaacaagtttggcagcatccggcagacgtacacgctggacgtgctggagcgctccccgcaccggcccatcctgcaggcggggctgccggccaaccagacggcggtgctgggcagcgacgtggagttccactgcaaggtgtacagtgacgcacagccccacatccagtggctcaagcacacggcgggcgctaacaccaccgacaaggagctagaggttctctccttgcacaacgtcacctttgaggacgccggggagtacacctgcctggcgggcaattctattgggttttctcatcactctgcgtggctggtggtgctgccagccgaggaggagctggtggaggctgacgaggcgggcagtgtgtatgcaggcatcctcagctacggggtgggcttcttcctgttcatcctggtggtggcggctgtgacgctctgccgcctgcgcagcccccccaagaaaggcctgggctcccccaccgtgcacaagatctcccgcttcccgctcaagcgacaggtgtccctggagtccaacgcgtccatgagctccaacacaccactggtgcgcatcgcaaggctgtcctcaggggagggccccacgctggccaatgtctccgagctcgagctgcctgccgaccccaaatgggagctgtctcgggcccggctgaccctgggcaagccccttggggagggctgcttcggccaggtggtcatggcggaggccatcggcattgacaaggaccgggccgccaagcctgtcaccgtagccgtgaagatgctgaaagacgatgccactgacaaggacctgtcggacctggtgtctgagatggagatgatgaagatgatcgggaaacacaaaaacatcatcaacctgctgggcgcctgcacgcagggcgggcccctgtacgtgctggtggagtacgcggccaagggtaacctgcgggagtttctgcgggcgcggcggcccccgggcctggactactccttcgacacctgcaagccgcccgaggagcagctcaccttcaaggacctggtgtcctgtgcctaccaggtggcccggggcatggagtacttggcctcccagaagtgcatccacagggacctggctgcccgcaatgtgctggtgaccgaggacaacgtgatgaagatcgcagacttcgggctggcccgggacgtgcacaacctcgactactacaagaagacaaccaacggccggctgcccgtgaagtggatggcgcctgaggccttgtttgaccgagtctacactcaccagagtgacgtctggtcctttggggtcctgctctgggagatcttcacgctggggggctccccgtaccccggcatccctgtggaggagctcttcaagctgctgaaggagggccaccgcatggacaagcccgccaactgcacacacgacctgtacatgatcatgcgggagtgctggcatgccgcgccctcccagaggcccaccttcaagcagctggtggaggacctggaccgtgtccttaccgtgacgtccaccgacgagtacctggacctgtcggcgcctttcgagcagtactccccgggtggccaggacacccccagctccagctcctcaggggacgactccgtgtttgcccacgacctgctgcccccggccccacccagcagtgggggctcgcggacgtgaagggccactggtccccaacaatgtgaggggtccctagcagcccaccctgctgctggtgcacagccactccccggcatgagactcagtgcagatggagagacagctacacagagctttggtctgtgtgtgtgtgtgtgcgtgtgtgtgtgtgtgtgcacatccgcgtgtgcctgtgtgcgtgcgcatcttgcctccaggtgcagaggtaccctgggtgtccccgctgctgtgcaacggtctcctgactggtgctgcagcaccgaggggcctttgttctggggggacccagtgcagaatgtaagtgggcccacccggtgggacccccgtggggcagggagctgggcccgacatggctccggcctctgcctttgcaccacgggacatcacagggtgggcctcggcccctcccaacacccaaagctgagcctgcagggaagccccacatgtccagcaccttgtgcctggggtgttagtggcaccgcctccccacctccaggctttcccacttcccaccctgcccctcagagactgaaattacgggtacctgaagatgggagcctttaccttttatgcaaaaggtttattccggaaactagtgtacatttctataaatagatgctgtgtatatggtatatatacatatatatatataacatatatggaagaggaaaaggctggtacaacggaggcctgcgaccctgggggcacaggaggcaggcatggccctgggcggggcgtgggggggcgtggagggaggccccagggggtctcacccatgcaagcagaggaccagggctttttctggcaccgcagttttgttttaaaactggacctgtatatttgtaaagctatttatgggcccctggcactcttgttcccacaccccaacacttccagcatttagctggccacatggcggagagttttaatttttaacttattgacaaccgagaaggtttatcccgccgatagagggacggccaagaatgtacgtccagcctgccccggagctggaggatcccctccaagcctaaaaggttgttaatagttggaggtgattccagtgaagatattttatttcctttgtcctttttcaggagaattagatttctataggatttttctttaggagatttattttttggacttcaaagcaagctggtattttcatacaaattcttctaattgctgtgtgtcccaggcagggagacggtttccagggaggggccggccctgtgtgcaggttccgatgttattagatgttacaagtttatatatatctatatatataatttattgagtttttacaagatgtatttgttgtagacttaacacttcttacgcaatgcttctagagttttatagcctggactgctacctttcaaagcttggagggaagccgtgaattcagttggttcgttctgtactgttactgggccctgagtctgggcagctgtcccttgcttgcctgcagggccatggctcagggtggtctcttcttggggcccagtgcatggtggccagaggtgtcacccaaaccggcaggtgcgattttgttaacccagcgacgaactttccgaaaaataaagacacctggttgctaacctgaacctgtgct

SEQ ID NO: 57250 - DNA, 3504 bp, Homo sapiens
ggaacagatagaatcgagctcggtacgaacgggtgatgcggatggacaagaagctgctggccgtgccggccgccaacaccgtccgcttccgctgcccagccgctggcaaccccactccctccatctcctggctgaagaacggcagggagttccgcggcgagcaccgcattggaggcatcaagctgcggcatcagcagtggagcctggtcatggaaagcgtggtgccctcggaccgcggcaactacacctgcgtcgtggagaacaagtttggcagcatccggcagacgtacacgctggacgtgctggagcgctccccgcaccggcccatcctgcaggcggggctgccggccaaccagacggcggtgctgggcagcgacgtggagttccactgcaagacggcgggcgctaacaccaccgacaaggagctagaggttctctccttgcacaacgtcacctttgaggacgccggggagtacacctgcctggcgggcaattctattgggttttctcatcactctgcgtggctggtggtgctgccagccgaggaggagctggtggaggctgacgaggcgggcagtgtgtatgcaggcatcctcagctacggggtgggcttcttcctgttcatcctggtggtggcggctgtgacgctctgccgcctgcgcagcccccccaagaaaggcctgggctcccccaccgtgcacaagatctcccgcttcccgctcaagcgacaggtgtccctggagtccaacgcgtccatgagctccaacacaccactggtgcgcatcgcaaggctgtcctcaggggagggccccacgctggccaatgtctccgagctcgagctgcctgccgaccccaaatgggagctgtctcgggcccggctgaccctgggcaagccccttggggagggctgcttcggccaggtggtcatggcggaggccatcggcattgacaaggaccgggccgccaagcctgtcaccgtagccgtgaagatgctgaaagacgatgccactgacaaggacctgtcggacctggtgtctgagatggagatgatgaagatgatcgggaaacacaaaaacatcatcaacctgctgggcgcctgcacgcagggcgggcccctgtacgtgctggtggagtacgcggccaagggtaacctgcgggagtttctgcgggcgcggcggcccccgggcctggactactccttcgacacctgcaagccgcccgaggagcagctcaccttcaaggacctggtgtcctgtgcctaccaggtggcccggggcatggagtacttggcctcccagaagtgcatccacagggacctggctgcccgcaatgtgctggtgaccgaggacaacgtgatgaagatcgcagacttcgggctggcccgggacgtgcacaacctcgactactacaagaagacaaccaacggccggctgcccgtgaagtggatggcgcctgaggccttgtttgaccgagtctacactcaccagagtgacgtctggtcctttggggtcctgctctgggagatcttcacgctggggggctccccgtaccccggcatccctgtggaggagctcttcaagctgctgaaggagggccaccgcatggacaagcccgccaactgcacacacgacctgtacatgatcatgcgggagtgctggcatgccgcgccctcccagaggcccaccttcaagcagctggtggaggacctggaccgtgtccttaccgtgacgtccaccgacgagtacctggacctgtcggcgcctttcgagcagtactccccgggtggccaggacacccccagctccagctcctcaggggacgactccgtgtttgcccacgacctgctgcccccggccccacccagcagtgggggctcgcggacgtgaagggccactggtccccaacaatgtgaggggtccctagcagcccaccctgctgctggtgcacagccactccccggcatgagactcagtgcagatggagagacagctacacagagctttggtctgtgtgtgtgtgtgtgcgtgtgtgtgtgtgtgtgcacatccgcgtgtgcctgtgtgcgtgcgcatcttgcctccaggtgcagaggtaccctgggtgtccccgctgctgtgcaacggtctcctgactggtgctgcagcaccgaggggcctttgttctggggggacccagtgcagaatgtaagtgggcccacccggtgggacccccgtggggcagggagctgggcccgacatggctccggcctctgcctttgcaccacgggacatcacagggtgggcctcggcccctcccaacacccaaagctgagcctgcagggaagccccacatgtccagcaccttgtgcctggggtgttagtggcaccgcctccccacctccaggctttcccacttcccaccctgcccctcagagactgaaattacgggtacctgaagatgggagcctttaccttttatgcaaaaggtttattccggaaactagtgtacatttctataaatagatgctgtgtatatggtatatatacatatatatatataacatatatggaagaggaaaaggctggtacaacggaggcctgcgaccctgggggcacaggaggcaggcatggccctgggcggggcgtgggggggcgtggagggaggccccagggggtctcacccatgcaagcagaggaccagggctttttctggcaccgcagttttgttttaaaactggacctgtatatttgtaaagctatttatgggcccctggcactcttgttcccacaccccaacacttccagcatttagctggccacatggcggagagttttaatttttaacttattgacaaccgagaaggtttatcccgccgatagagggacggccaagaatgtacgtccagcctgccccggagctggaggatcccctccaagcctaaaaggttgttaatagttggaggtgattccagtgaagatattttatttcctttgtcctttttcaggagaattagatttctataggatttttctttaggagatttattttttggacttcaaagcaagctggtattttcatacaaattcttctaattgctgtgtgtcccaggcagggagacggtttccagggaggggccggccctgtgtgcaggttccgatgttattagatgttacaagtttatatatatctatatatataatttattgagtttttacaagatgtatttgttgtagacttaacacttcttacgcaatgcttctagagttttatagcctggactgctacctttcaaagcttggagggaagccgtgaattcagttggttcgttctgtactgttactgggccctgagtctgggcagctgtcccttgcttgcctgcagggccatggctcagggtggtctcttcttggggcccagtgcatggtggccagaggtgtcacccaaaccggcaggtgcgattttgttaacccagcgacgaactttccgaaaaataaagacacctggttgctaacctgaacctgtgct

SEQ ID NO: 57251 - DNA, 3525 bp, Homo sapiens
ggaacagatagaatcgagctcggtacgaacgggtgatgcggatggacaagaagctgctggccgtgccggccgccaacaccgtccgcttccgctgcccagccgctggcaaccccactccctccatctcctggctgaagaacggcagggagttccgcggcgagcaccgcattggaggcatcaagctgcggcatcagcagtggagcctggtcatggaaagcgtggtgccctcggaccgcggcaactacacctgcgtcgtggagaacaagtttggcagcatccggcagacgtacacgctggacgtgctggagcgctccccgcaccggcccatcctgcaggcggggctgccggccaaccagacggcggtgctgggcagcgacgtggagttccactgcaaggtgtacagtgacgcacagccccacatccagtggctcaagcacgtggaggtgaacggcagcaagacggcgggcgctaacaccaccgacaaggagctagaggttctctccttgcacaacgtcacctttgaggacgccggggagtacacctgcctggcgggcaattctattgggttttctcatcactctgcgtggctggtggtgctgccagccgaggaggagctggtggaggctgacgaggcgggcagtgtgtatgcaggcatcctcagctacggggtgggcttcttcctgttcatcctggtggtggcggctgtgacgctctgccgcctgcgcagcccccccaagaaaggcctgggctcccccaccgtgcacaagatctcccgcttcccgctcaagcgacaggtgtccctggagtccaacgcgtccatgagctccaacacaccactggtgcgcatcgcaaggctgtcctcaggggagggccccacgctggccaatgtctccgagctcgagctgcctgccgaccccaaatgggagctgtctcgggcccggctgaccctgggcaagccccttggggagggctgcttcggccaggtggtcatggcggaggccatcggcattgacaaggaccgggccgccaagcctgtcaccgtagccgtgaagatgctgaaagacgatgccactgacaaggacctgtcggacctggtgtctgagatggagatgatgaagatgatcgggaaacacaaaaacatcatcaacctgctgggcgcctgcacgcagggcgggcccctgtacgtgctggtggagtacgcggccaagggtaacctgcgggagtttctgcgggcgcggcggcccccgggcctggactactccttcgacacctgcaagccgcccgaggagcagctcaccttcaaggacctggtgtcctgtgcctaccaggtggcccggggcatggagtacttggcctcccagaagtgcatccacagggacctggctgcccgcaatgtgctggtgaccgaggacaacgtgatgaagatcgcagacttcgggctggcccgggacgtgcacaacctcgactactacaagaagacaaccaacggccggctgcccgtgaagtggatggcgcctgaggccttgtttgaccgagtctacactcaccagagtgacgtctggtcctttggggtcctgctctgggagatcttcacgctggggggctccccgtaccccggcatccctgtggaggagctcttcaagctgctgaaggagggccaccgcatggacaagcccgccaactgcacacacgacctgtacatgatcatgcgggagtgctggcatgccgcgccctcccagaggcccaccttcaagcagctggtggaggacctggaccgtgtccttaccgtgacgtccaccgacgagtacctggacctgtcggcgcctttcgagcagtactccccgggtggccaggacacccccagctccagctcctcaggggacgactccgtgtttgcccacgacctgctggccactggtccccaacaatgtgaggggtccctagcagcccaccctgctgctggtgcacagccactccccggcatgagactcagtgcagatggagagacagctacacagagctttggtctgtgtgtgtgtgtgtgcgtgtgtgtgtgtgtgtgcacatccgcgtgtgcctgtgtgcgtgcgcatcttgcctccaggtgcagaggtaccctgggtgtccccgctgctgtgcaacggtctcctgactggtgctgcagcaccgaggggcctttgttctggggggacccagtgcagaatgtaagtgggcccacccggtgggacccccgtggggcagggagctgggcccgacatggctccggcctctgcctttgcaccacgggacatcacagggtgggcctcggcccctcccaacacccaaagctgagcctgcagggaagccccacatgtccagcaccttgtgcctggggtgttagtggcaccgcctccccacctccaggctttcccacttcccaccctgcccctcagagactgaaattacgggtacctgaagatgggagcctttaccttttatgcaaaaggtttattccggaaactagtgtacatttctataaatagatgctgtgtatatggtatatatacatatatatatataacatatatggaagaggaaaaggctggtacaacggaggcctgcgaccctgggggcacaggaggcaggcatggccctgggcggggcgtgggggggcgtggagggaggccccagggggtctcacccatgcaagcagaggaccagggctttttctggcaccgcagttttgttttaaaactggacctgtatatttgtaaagctatttatgggcccctggcactcttgttcccacaccccaacacttccagcatttagctggccacatggcggagagttttaatttttaacttattgacaaccgagaaggtttatcccgccgatagagggacggccaagaatgtacgtccagcctgccccggagctggaggatcccctccaagcctaaaaggttgttaatagttggaggtgattccagtgaagatattttatttcctttgtcctttttcaggagaattagatttctataggatttttctttaggagatttattttttggacttcaaagcaagctggtattttcatacaaattcttctaattgctgtgtgtcccaggcagggagacggtttccagggaggggccggccctgtgtgcaggttccgatgttattagatgttacaagtttatatatatctatatatataatttattgagtttttacaagatgtatttgttgtagacttaacacttcttacgcaatgcttctagagttttatagcctggactgctacctttcaaagcttggagggaagccgtgaattcagttggttcgttctgtactgttactgggccctgagtctgggcagctgtcccttgcttgcctgcagggccatggctcagggtggtctcttcttggggcccagtgcatggtggccagaggtgtcacccaaaccggcaggtgcgattttgttaacccagcgacgaactttccgaaaaataaagacacctggttgctaacctgaacctgtgct

SEQ ID NO: 57252 - DNA, 4031 bp, Homo sapiens
cgcgcgctgcctgaggacgccgcggcccccgcccccgccatgggcgcccctgcctgcgccctcgcgctctgcgtggccgtggccatcgtggccggcgcctcctcggagtccttggggacggagcagcgcgtcgtggggcgagcggcagaagtcccgggcccagagcccggccagcaggagcagttggtcttcggcagcggggatgctgtggagctgagctgtcccccgcccgggggtggtcccatggggcccactgtctgggtcaaggatggcacagggctggtgccctcggagcgtgtcctggtggggccccagcggctgcaggtgctgaatgcctcccacgaggactccggggcctacagctgccggcagcggctcacgcagcgcgtactgtgccacttcagtgtgcgggtgacagacgctccatcctcgggagatgacgaagacggggaggacgaggctgaggacacaggtgtggacacaggggccccttactggacacggcccgagcggatggacaagaagctgctggccgtgccggccgccaacaccgtccgcttccgctgcccagccgctggcaaccccactccctccatctcctggctgaagaacggcagggagttccgcggcgagcaccgcattggaggcatcaagctgcggcatcagcagtggagcctggtcatggaaagcgtggtgccctcggaccgcggcaactacacctgcgtcgtggagaacaagtttggcagcatccggcagacgtacacgctggacgtgctggagcgctccccgcaccggcccatcctgcaggcggggctgccggccaaccagacggcggtgctgggcagcgacgtggagttccactgcaaggtgtacagtgacgcacagccccacatccagtggctcaagcacgtggaggtgaacggcagcaaggtgggcccggacggcacaccctacgttaccgtgctcaagacggcgggcgctaacaccaccgacaaggagctagaggttctctccttgcacaacgtcacctttgaggacgccggggagtacacctgcctggcgggcaattctattgggttttctcatcactctgcgtggctggtggtgctgccagccgaggaggagctggtggaggctgacgaggcgggcagtgtgtatgcaggcatcctcagctacggggtgggcttcttcctgttcatcctggtggtggcggctgtgacgctctgccgcctgcgcagcccccccaagaaaggcctgggctcccccaccgtgcacaagatctcccgcttcccgctcaagcgacaggtgtccctggagtccaacgcgtccatgagctccaacacaccactggtgcgcatcgcaaggctgtcctcaggggagggccccacgctggccaatgtctccgagctcgagctgcctgccgaccccaaatgggagctgtctcgggcccggctgaccctgggcaagccccttggggagggctgcttcggccaggtggtcatggcggaggccatcggcattgacaaggaccgggccgccaagcctgtcaccgtagccgtgaagatgctgaaagacgatgccactgacaaggacctgtcggacctggtgtctgagatggagatgatgaagatgatcgggaaacacaaaaacatcatcaacctgctgggcgcctgcacgcagggcgggcccctgtacgtgctggtggagtacgcggccaagggtaacctgcgggagtttctgcgggcgcggcggcccccgggcctggactactccttcgacacctgcaagccgcccgaggagcagctcaccttcaaggacctggtgtcctgtgcctaccaggtggcccggggcatggagtacttggcctcccagaagtgcatccacagggacctggctgcccgcaatgtgctggtgaccgaggacaacgtgatgaagatcgcagacttcgggctggcccgggacgtgcacaacctcgactactacaagaagacaaccaacggccggctgcccgtgaagtggatggcgcctgaggccttgtttgaccgagtctacactcaccagagtgacgtctggtcctttggggtcctgctctgggagatcttcacgctggggggctccccgtaccccggcatccctgtggaggagctcttcaagctgctgaaggagggccaccgcatggacaagcccgccaactgcacacacgacctgtacatgatcatgcgggagtgctggcatgccgcgccctcccagaggcccaccttcaagcagctggtggaggacctggaccgtgtccttaccgtgacgtccaccgacgagtacctggacctgtcggcgcctttcgagcagtactccccgggtggccaggacacccccagctccagctcctcaggggacgactccgtgtttgcccacgacctgctgcccccggccccacccagcagtgggggctcgcggacgtgaagggccactggtccccaacaatgtgaggggtccctagcagcccaccctgctgctggtgcacagccactccccggcatgagactcagtgcagatggagagacagctacacagagctttggtctgtgtgtgtgtgtgtgcgtgtgtgtgtgtgtgtgcacatccgcgtgtgcctgtgtgcgtgcgcatcttgcctccaggtgcagaggtaccctgggtgtccccgctgctgtgcaacggtctcctgactggtgctgcagcaccgaggggcctttgttctggggggacccagtgcagaatgtaagtgggcccacccggtgggacccccgtggggcagggagctgggcccgacatggctccggcctctgcctttgcaccacgggacatcacagggtgggcctcggcccctcccaacacccaaagctgagcctgcagggaagccccacatgtccagcaccttgtgcctggggtgttagtggcaccgcctccccacctccaggctttcccacttcccaccctgcccctcagagactgaaattacgggtacctgaagatgggagcctttaccttttatgcaaaaggtttattccggaaactagtgtacatttctataaatagatgctgtgtatatggtatatatacatatatatatataacatatatggaagaggaaaaggctggtacaacggaggcctgcgaccctgggggcacaggaggcaggcatggccctgggcggggcgtgggggggcgtggagggaggccccagggggtctcacccatgcaagcagaggaccagggctttttctggcaccgcagttttgttttaaaactggacctgtatatttgtaaagctatttatgggcccctggcactcttgttcccacaccccaacacttccagcatttagctggccacatggcggagagttttaatttttaacttattgacaaccgagaaggtttatcccgccgatagagggacggccaagaatgtacgtccagcctgccccggagctggaggatcccctccaagcctaaaaggttgttaatagttggaggtgattccagtgaagatattttatttcctttgtcctttttcaggagaattagatttctataggatttttctttaggagatttattttttggacttcaaagcaagctggtattttcatacaaattcttctaattgctgtgcaggttccgatgttattagatgttacaagtttatatatatctatatatataatttattgagtttttacaagatgtatttgttgtagacttaacacttcttacgcaatgcttctagagttttatagcctggactgctacctttcaaagcttggagggaagccgtgaattcagttggttcgttctgtactgttactgggccctgagtctgggcagctgtcccttgcttgcctgcagggccatggctcagggtggtctcttcttggggcccagtgcatggtggccagaggtgtcacccaaaccggcaggtgcgattttgttaacccagcgacgaactttccgaaaaataaagacacctggttgctaacctgaacctgtgct

SEQ ID NO: 57253 - DNA, 1532 bp, Homo sapiens
ggaacagatagaatcgagctcggtacgaacgggtgatgcggatggacaagaagctgctggccgtgccggccgccaacaccgtccgcttccgctgcccagccgctggcaaccccactccctccatctcctggctgaagaacggcagggagttccgcggcgagcaccgcattggaggcatcaagctgcggcatcagcagtggagcctggtcatggaaagcgtggtgccctcggaccgcggcaactacacctgcgtcgtggagaacaagtttggcagcatccggcagacgtacacgctggacgtgctggagcgctccccgcaccggcccatcctgcaggcggggctgccggccaaccagacggcggtgctgggcagcgacgtggagttccactgcaaggtgtacagtgacgcacagccccacatccagtggctcaagcacgtggaggtgaacggcagcaagacggcgggcgctaacaccaccgacaaggagctagaggttctctccttgcacaacgtcacctttgaggacgccggggagtacacctgcctggcgggcaattctattgggttttctcatcactctgcgtggctggtggtgctgccagccgaggaggagctggtggaggctgacgaggcgggcagtgtgtatgcaggcatcctcagctacggggtgggcttcttcctgttcatcctggtggtggcggctgtgacgctctgccgcctgcgcagcccccccaagaaaggcctgggctcccccaccgtgcacaagatctcccgcttcccgctcaagcgacaggtgtccctggagtccaacgcgtccatgagctccaacacaccactggtgcgcatcgcaaggctgtcctcaggggagggccccacgctggccaatgtctccgagctcgagctgcctgccgaccccaaatgggagctgtctcgggcccggctgaccctgggcaagccccttggggagggctgcttcggccaggtggtcatggcggaggccatcggcattgacaaggaccgggccgccaagcctgtcaccgtagccgtgaagatgctgaaagacgatgccactgacaaggacctgtcggacctggtgtctgagatggagatgatgaagatgatcgggaaacacaaaaacatcatcaacctggtgcaggttccgatgttattagatgttacaagtttatatatatctatatatataatttattgagtttttacaagatgtatttgttgtagacttaacacttcttacgcaatgcttctagagttttatagcctggactgctacctttcaaagcttggagggaagccgtgaattcagttggttcgttctgtactgttactgggccctgagtctgggcagctgtcccttgcttgcctgcagggccatggctcagggtggtctcttcttggggcccagtgcatggtggccagaggtgtcacccaaaccggcaggtgcgattttgttaacccagcgacgaactttccgaaaaataaagacacctggttgctaacctgaacctgtgct

SEQ ID NO: 57254 - DNA, 732 bp, Homo sapiens
ggaacagatagaatcgagctcggtacgaacgggtgatgcggatggacaagaagctgctggccgtgccggccgccaacaccgtccgcttccgctgcccagccgctggcaaccccactccctccatctcctggctgaagaacggcagggagttccgcggcgagcaccgcattggaggcatcaagctgcggcatcagcagtggagcctggtcatggaaagcgtggtgccctcggaccgcggcaactacacctgcgtcgtggagaacaagtttggcagcatccggcagacgtacacgctggacgtgctggagcgctccccgcaccggcccatcctgcaggcggggctgccggccaaccagacggcggtgctgggcagcgacgtggagttccactgcaaggtgtacagtgacgcacagccccacatccagtggctcaagcacgtggaggtgaacggcagcaaggtgggcccggacggcacaccctacgttaccgtgctcaagtcctggatcagtgagagtgtggaggccgacgtgcgcctccgcctggccaatgtgtcggagcgggacgggggcgagtacctctgtcgagccaccaatttcataggcgtggccgagaaggccttttggctgagcgttcacgggccccgagcaggtaacgactctgtcccatgccggccgacaagagctccagctcaaggccctggcgcgcgccctgcacgccccgcacgcccagccc

SEQ ID NO: 57255 - DNA, 496 bp, Homo sapiens
caaaattattttcaccaagttacggtttggcattcttccctcgggttactatgcaaagggaaaaaaatcttgtaacactcattaatgcatatatgatagggatacaaacaaaaacattgtcctctatattccttattgaattaaggcctgcaaaaaacttctctgtgaacttctttgaattcttctttttatatgacaaaaaaattcatatgtttgattttgttgtttcattctttagaagttgccccaatgcttggaggcaaaattttagctcaattttattttagacaaagtcttgctctcttgcccaggctggaatgcagtggagtgatctctgctgactgcaacctctgcctcctgggttcaagtgaacctcctgcctcaacctctcaagtagctgggattacaggtgcccaccatcatgcccggctaatttttgtatttttagtagagacgggattttaccatgttggccaggctggtcttgaactcctga

SEQ ID NO: 57256 - DNA, 432 bp, Homo sapiens
caagcattatcttgcttaatttgcttcataaaactatgaaaaacatattatttcagttttataggtgagggatgtaatcgctagtacaatataggaaacacatgtcagagccaagatttgaagttgagtctctcagactccaaaatctgaaactttttcaaatatgccgtcttgttttccacactgatgcttttgacccttgccataaagtcagcatgacctctttgacaatgtgaatacagttaacactgtgcactttgaacaaaagaaaaggaagtaaaaggacaagaccattttcaggcaaaatgaagaatatgcaaaatgtcccctttttttctttctttttgctgatttccttcctaattccctcctcactactcccacctctaagtcaaaagctttttcttctaccttcaaacatctgcagctatg

SEQ ID NO: 57257 - DNA, 267 bp, Homo sapiens
ccaaagggagaagctaaagggtgaaagagggcagaaagagaaagtggaatgagagggcatgagtgcttcatgatgtcatcacaagatttagcttctcattatgccacataaagagtggcagtttcttagttcatttttcttgcttagaacacctgaggctgggtgatttataaggaaaataaatttatttgttacagttctggaggctggaaagtccaagggcatagctgggcatctggtgagagccttcttcctggcagggactct

SEQ ID NO: 57258 - DNA, 461 bp, Homo sapiens
ttcaatttctacaccacagagattgtaacaatttatacaccaaccagaaatgttttctttaccctgggtaagtgttatcaaacattttgatctttgccaattcagtgggtgaatcaatgtgtgatttaatttgcatttttatcttgaatgagagttgaacatcttttcatatatttaagaaccattgggtatttccatttctgtacaccgttggttgttctttgcccatttttctgtaaggctgtggacttttttcttgatctctagattcacttggtatcggtaatccccctataggtgcagtgtaagaatttaaaaaatgaaaacaggctgggcacagtggttcatgcctatattcccagtgctttgagaagccaaggcaggaggattgcctggggccaagagcttgagaccagcctaggcaacatagcaagactctgtctatacaaattttttttaaa

SEQ ID NO: 57259 - DNA, 656 bp, Homo sapiens
gattctccttctccctcctgtccccacattcacccttcctgatccagtaacattcagtttagcaaacatttcttgagcatcttccatgagccaggcactatgctaggcttacaaaggcacaatatctgcctttaggcagccctggcctagcatgtagacacatgttctttaggatttgcccaagggtgatattaagcatgttctatacataacaagtacctactccagtgcctcaacttctttttaacagggtatagagcctttaaatccatattactgatatcgtctatactgcagatattcctagcacaaaagttttgattaaagtgtaaattactattaccaggctggttcctgagagtaggttttaatagaaaaacaagagaaggaactaatagaagaccagtttatataaattaagggatggagagggctcactgggaaagaagtgtaggagccacggtggctcacgactgtaaatcatcccagctacttgggacactgagacagaaggattccttgaggccaggagttcaagaatagcatgagcaacatagcaagactcccatctctaaagaagtgaaaaaaaattagctgggcctggtggggcatacctgtggtcccagctacttcggaagctgaaatgggaagattgc

SEQ ID NO: 57260 - DNA, 370 bp, Homo sapiens
aaattacccagacatcttgaaatcaacctcctgagtagctgggaccacaggtgtgtgccactacacctagctaattctttttattatttttttagagatggggtctccatatttcgccgaggctggtctcaaactctgcagctcaagtgctccgagtcagcctcctaaaatgatggcttgcaggtgtgagccaccaggcctggccccagaatattatttaggctactctaggccactctgcctgtgggtgaaccctactctatctatagagcagccaaaagtatatatacatgtaaactcttagccgggcgtggtagcaagcgcctgtggtcccaactacttgggaggctgaggctgagttcgaggctgc

SEQ ID NO: 57261 - DNA, 560 bp, Homo sapiens
agcccctgggttccccatcattaggaggtcagatgagaaggagccagccatgaagactgggaaggagtggctgttgtggggaggtgggtggtgtcctagacacaggtatctttttaaggcagaggggcccggaaaaggatccttgtagtttgagtagttatgcctctctctgagcatgggcagttcgttggtgaactgacaacgtgaaatacacatgatgcaattccaccgtgtgtcaagtttgaaagcactccctgccagtagcgtgtggggagtgtagggaatggcaattgtaatgagacatcacagtgtaaaattcctgagctctgctctagtacagcctggggacagacgtctgggccaagaagggcttctgtgagacagcatggaacagtggcctggtcagagagacttgggcatgcatctgagggctgtaagcctcagtttccccatctgtaaaatggaactctaatcgctgtctccatctgggaggattttgtgaggattcagagaaactgcacatgaaatgctccaccaggcccaggaacttaccaaggtct

SEQ ID NO: 57262 - DNA, 189 bp, Homo sapiens
atgaaaagtacattttaaaactaaaaagaagacaactcaatttttaaaaaaatgtttttgcgatacatttttacccacacctgggcaacagtgcaccctccacgtccccagcagtctgggcagcccctgcctcacaggctgtcgtgcgggcgtgagtagagcactcgccgggccaggaacacacaaagg

SEQ ID NO: 57263 - DNA, 2741 bp, Homo sapiens
ctctacaagcgggcggtggtgactacacgaggcgccgaagatgctgttgagggccctggagaaacttcagcagaacagggcctctccccttgcaggccgagccggggccctgcgccctccccctccgcccagctcggccaagggcgcatttgctgagcgtctggcggcctctaccggagcacctctgcagagggccgatcctccagcccagagacgacatgtggcgctcgggcgagtgccttgcagagagaggagtagcttgctggctttgaacgcgtggcgtggcagatatttcagaaagcttcaagaacaagctggagaagggaagagttattcctccatattcacctgcttcaactactattcttattgggaatggacaatggaatgttctctggttttatcatgatcaaaaacctccttctcttttgtatttccatgaacttatccagtcactttggcttttcacagatgccaaccagttcagtgaaagatgagaccaatgacaacatcacgatatttaccaggatcttggatgggctcttggatggctacgacaacagacttcggcccgggctgggagagcgcatcactcaggtgaggaccgacatctacgtcaccagcttcggcccggtgtccgacacggaaatggagtacaccatagacgtgtttttccgacaaagctggaaagatgaaaggcttcggtttaaggggcccatgcagcgcctccctctcaacaacctccttgccagcaagatctggaccccagacacgttcttccacaacgggaagaagtccatcgctcacaacatgaccacgcccaacaagctgctgcggctggaggacgacggcaccctgctctacaccatgcgcttgaccatctctgcagagtgccccatgcagcttgaggacttcccgatggatgcgcacgcttgccctctgaaatttggcagctatgcgtaccctaattctgaagtcgtttacgtctggaccaacggctccaccaagtcggtggtggtggcggaagatggctccagactgaaccagtaccacctgatggggcagacggtgggcactgagaacatcagcaccagcacaggcgaatacacaatcatgacagctcacttccacctgaaaaggaagattggctactttgtcatccagacctaccttccctgcataatgaccgtgatcttatcacaggtgtccttttggctgaaccgggaatcagtcccagccaggacagtttttggggtcaccacggtgctgaccatgacgaccctcagcatcagcgccaggaactctctgcccaaagtggcctacgccaccgccatggactggttcatagctgtgtgctatgccttcgtcttctcggcgctgatagagtttgccacggtcaattactttaccaagagaggctgggcctgggatggcaaaaaagccttggaagcagccaagatcaagaaaaagcgtgaagtcatactaaataagtcaacaaacgcttttacaactgggaagatgtctcaccccccaaacattccgaaggaacagaccccagcagggacgtcgaatacaacctcagtctcagtaaaaccctctgaagagaagacttctgaaagcaaaaagacttacaacagtatcagcaaaattgacaaaatgtcccgaatcgtattcccagtcttgttcggcactttcaacttagtttactgggcaacgtatttgaatagggagccggtgataaaaggagccgcctctccaaaataaccggccacactcccaaactccaagacagccatacttccagcgaaatggtaccaaggagaggtcttgctcacagggactctccatatgtgagcactatctttcaggaaatttttgcatgtttaataatatgtacaaataatattgccttgatgtttctatatgtaacttcagatgtttccaagatgtcccattgataattcgagcaaacaactttctggaaaaacaggatacgatgactgacactcagatgcccagtatcatacgttgatagtttacaaacaagatacgtatatttttaactgcttcaagtgttacctaacaatgttttttatacttcaaatgtcatttcatacaaattttcccagtgaataaatattttaggaaactctccatgattattagttgaccaactatattgcgagaaacagagatcataaagagcacgttttccattatgaggaaacttggacatttatgtacaaaatgaattgcctttgataattcttactgttctgaaattaggaaagtactgcatgatcttacacgaagaaatagaataggcaaacttttatgcaggcagattaataacagaaatacatcatatgttagatacacaaaatatttccctgaggaaaaaaaatcaactgcttaaattttttgggaagaaaaagaaacatttcttaccccacaccacccactacctgaacaatagccaagaaaggaaaggagatgttaaaacaaacagtgttttgatgacattctcagcacttggcccatgtgatcgctgtctctgaaacactgaccacctctccctacagccagcgtgtagtgcttcagtggtgagaaattgtaattgagttattttccattttatttccttgtatgtatttcatgactggacttactgctctgtcagcttttgtatatgaatcttaaatgttcattaaaaaataaaaaatgaactgatcttgtggaca

SEQ ID NO: 57264 - DNA, 2254 bp, Homo sapiens
ctctacaagcgggcggtggtgactacacgaggcgccgaagatgctgttgagggccctggagaaacttcagcagaacagggcctctccccttgcaggccgagccggggccctgcgccctccccctccgcccagctcggccaagggcgcatttgctgagcgtctggcggcctctaccggagcacctctgcagagggccgatcctccagcccagagacgacatgtggcgctcgggcgagtgcctccctctcaacaacctccttgccagcaagatctggaccccagacacgttcttccacaacgggaagaagtccatcgctcacaacatgaccacgcccaacaagctgctgcggctggaggacgacggcaccctgctctacaccatgcgcttgaccatctctgcagagtgccccatgcagcttgaggacttcccgatggatgcgcacgcttgccctctgaaatttggcagctatgcgtaccctaattctgaagtcgtttacgtctggaccaacggctccaccaagtcggtggtggtggcggaagatggctccagactgaaccagtaccacctgatggggcagacggtgggcactgagaacatcagcaccagcacaggcgaatacacaatcatgacagctcacttccacctgaaaaggaagattggctactttgtcatccagacctaccttccctgcataatgaccgtgatcttatcacaggtgtccttttggctgaaccgggaatcagtcccagccaggacagtttttggggtcaccacggtgctgaccatgacgaccctcagcatcagcgccaggaactctctgcccaaagtggcctacgccaccgccatggactggttcatagctgtgtgctatgccttcgtcttctcggcgctgatagagtttgccacggtcaattactttaccaagagaggctgggcctgggatggcaaaaaagccttggaagcagccaagatcaagaaaaagcgtgaagtcatactaaataagtcaacaaacgcttttacaactgggaagatgtctcaccccccaaacattccgaaggaacagaccccagcagggacgtcgaatacaacctcagtctcagtaaaaccctctgaagagaagacttctgaaagcaaaaagacttacaacagtatcagcaaaattgacaaaatgtcccgaatcgtattcccagtcttgttcggcactttcaacttagtttactgggcaacgtatttgaatagggagccggtgataaaaggagccgcctctccaaaataaccggccacactcccaaactccaagacagccatacttccagcgaaatggtaccaaggagaggtcttgctcacagggactctccatatgtgagcactatctttcaggaaatttttgcatgtttaataatatgtacaaataatattgccttgatgtttctatatgtaacttcagatgtttccaagatgtcccattgataattcgagcaaacaactttctggaaaaacaggatacgatgactgacactcagatgcccagtatcatacgttgatagtttacaaacaagatacgtatatttttaactgcttcaagtgttacctaacaatgttttttatacttcaaatgtcatttcatacaaattttcccagtgaataaatattttaggaaactctccatgattattagttgaccaactatattgcgagaaacagagatcataaagagcacgttttccattatgaggaaacttggacatttatgtacaaaatgaattgcctttgataattcttactgttctgaaattaggaaagtactgcatgatcttacacgaagaaatagaataggcaaacttttatgcaggcagattaataacagaaatacatcatatgttagatacacaaaatatttccctgaggaaaaaaaatcaactgcttaaattttttgggaagaaaaagaaacatttcttaccccacaccacccactacctgaacaatagccaagaaaggaaaggagatgttaaaacaaacagtgttttgatgacattctcagcacttggcccatgtgatcgctgtctctgaaacactgaccacctctccctacagccagcgtgtagtgcttcagtggtgagaaattgtaattgagttattttccattttatttccttgtatgtatttcatgactggacttactgctctgtcagcttttgtatatgaatcttaaatgttcattaaaaaataaaaaatgaactgatcttgtggaca

SEQ ID NO: 57265 - DNA, 281 bp, Homo sapiens
caacccagagacacaaaggccaactctatgtgatttaaaaggagtagctgcttggcttccagcctctggctaacatcccatcttcaaagagccttgatggttcaccctactgtcttctggcctctatagctaccctagttgagtaaagttggggtctggactataccccagaaatctagatccccgctgagccaataaggatctgggggagggctgatgagcaggcttcttacagcattctggcccaactctgttcaattgttagtgtctacttagaagat

SEQ ID NO: 57266 - DNA, 2901 bp, Homo sapiens
  misc_feature (42)..(42): n is a, c, g, or t
  misc_feature (47)..(48): n is a, c, g, or t
ccatcacaccccccccacaccaccaaatactgctagtacagnctggnntgtggcctgtgcagatccctgagcgtgtggcagcagtgcggtcgtggtccctccctatgcagcctggtttctagcgtgacacgcccttgacttgaggaccatgaaccgcagccgccaggtgacgtgcgtggcctgggtccgctgcggcgtggccaaagagacaccagacaaggtagagctgagtaaagaagaagtaaaacgcctcattgctgaggcaaaggagaaattgcaagaagaaggtggtggcagtgatgaagaggagacaggcagtccttcagaagatggcatgcagagtgcacgcacccaggcacgcccaagagagcccctggaggatggtgacccagaggatgacaggacgcttgatgatgatgagctggctgagtacgacttagataaatatgatgaggaaggtgacccagatgctgagactcttggtgaatctctcttgggtcttacggtctacgggagtaatgatcaagatccttacgttactctgaaagatacagaacaatatgaacgtgaagatttcttgattaagcccagtgataatcttatagtttgtggccgagctgaacaggaccagtgcaatttagaggtgcatgtttataatcaagaagaagactctttttatgtacaccatgatatactcttgtctgcatatcctctgagtgtggaatggctgaattttgatcctagcccagatgattctactggaaattacattgctgtaggaaacatgacccctgttattgaagtgtgggaccttgatatagtggactctttagagccagtcttcacactcggaagtaaactttcaaaaaagaagaaaaagaaaggaaagaagagttcctcagcagaagggcataccgatgctgtccttgacctttcatggaataagctaatcagaaatgttttagcaagtgcatcagctgacaacactgtaattctgtgggatatgtccttggggaaaccagcagctagcctcgctgtacacacagacaaggtccaaacactgcagtttcatccatttgaagcacagactctgatttctggctcatatgataagtcagtggctttgtatgactgccgaagtccagatgaaagccatcgaatgtggcgattcagtgggcagatagagagagtgacttggaatcacttttcaccttgtcatttcttggccagtacagatgacggctttgtatataatttggatgcacgttcagataagccaatttttacacttaatgcacacaatgatgaaatctctggtcttgatcttagcagtcaaatcaagggctgtctcgtgactgcttcagctgacaaatacgtgaagatctgggacatcttaggagataggccaagtctagttcattctagggacatgaaaatgggagttctcttctgttcttcatgttgccctgatttgccatttatttatgcctttggaggtcaaaaagaagggcttcgggtctgggatataagcacagtctcttcagtaaatgaagcatttggaagacgagagaggcttgttcttgggagtgcaagaaattcatctattagtggcccttttggcagcaggagctcagatacacccatggagtcttaatgaagatcatctaatttcctgcttaccttaactgggaattttaaaaagttggcctaaaaatgttccatgcgtggcagcaaccatgcagagtgactgaaacacaattcatttctgactgacattcctttctgcaactgcggtggcaccacaaatatccggtctttgtgcttgctcttcagatggatggtttgtaaggctcttgttgcatttcttaaaaaagagtaataaaaaggatttttaaaaagtaattccttaaacataccatctgtcacagttaatctagatttgtaaataggtagtaatttatagaatttttaaagcgtaaaatccggtaatattaaaagataggtaaacctaggcctggaaaggctgttatttggctaaaattgcacaggaggccatgaacagaggcaagtgccccagagactccactttcattcctaactgttctcaaattaatgctcatgattgagtattctcagtgcaactcgtagagtttgataagtaaaagttacatgcccctgttttcctagcatgatattcactgttatcaaagacaagaggcagaccattcattcattctcaaaacactgaatgccattctgtgcctagtgctatacaaggcatgggagattcagtgtgaataagtctttgctctccacctaacaagggacagttttaattatagattgtcttcctattaagtatgagttttagtaggcattaaaaatcgtaattagtttgataatatgagacccaaccctaacttgccagaagagtaatcagttcatgaaccattgatatttcctgtatatttcatgaatgtgacttcagtcattctagtgttaatactgtggaatgtcattggtgtagcaacgtgggttcaccaaaacacctttttatacaaaagacagatgtgtgaattaaagagattaaaggatagagtattctgtttctttgttttgatttggcttttaggtattaaaataaggcccagatcactaaaaattagtaacagagggagacctctaatagatttaaagtcagttaattctctctgaaatttgatgttttcttctataaagaataactctaaaataggcatcttcccaggactttccattctcaggaaaagacctagttacgtataaaaaataacttctactgctttatgtagtcatataggtctgcctaaaataagaatttgtatttaataaataccaaaattttcaaatggtaaaaaaaat

SEQ ID NO: 57267 - DNA, 2909 bp, Homo sapiens
gaaatgagcgccgacgctgcccaaacaggagcctgcgcatgcgctctgccctggcagcggccctgtgcagatccctgagcgtgtggcagcagtgcggtcgtggtccctccctatgcagcctggtttctagcgtgacacgcccttgacttgaggaccatgaaccgcagccgccaggtgacgtgcgtggcctgggtccgctgcggcgtggccaaagagacaccagacaaggtagagctgagtaaagaagaagtaaaacgcctcattgctgaggcaaaggagaaattgcaagaagaaggtggtggcagtgatgaagaggagacaggcagtccttcagaagatggcatgcagagtgcacgcacccaggcacgcccaagagagcccctggaggatggtgacccagaggatgacaggacgcttgatgatgatgagctggctgagtacgacttagataaatatgatgaggaaggtgacccagatgctgagactcttggtgaatctctcttgggtcttacggtctacgggagtaatgatcaagatccttacgttactctgaaagatacagaacaatatgaacgtgaagatttcttgattaagcccagtgataatcttatagtttgtggccgagctgaacaggaccagtgcaatttagaggtgcatgtttataatcaagaagaagactctttttatgtacaccatgatatactcttgtctgcatatcctctgagtgtggaatggctgaattttgatcctagcccagatgattctactggaaattacattgctgtaggaaacatgacccctgttattgaagtgtgggaccttgatatagtggactctttagagccagtcttcacactcggaagtaaactttcaaaaaagaagaaaaagaaaggaaagaagagttcctcagcagaagggcataccgatgctgtccttgacctttcatggaataagctaatcagaaatgttttagcaagtgcatcagctgacaacactgtaattctgtgggatatgtccttggggaaaccagcagctagcctcgctgtacacacagacaaggtccaaacactgcagtttcatccatttgaagcacagactctgatttctggctcatatgataagtcagtggctttgtatgactgccgaagtccagatgaaagccatcgaatgtggcgattcagtgggcagatagagagagtgacttggaatcacttttcaccttgtcatttcttggccagtacagatgacggctttgtatataatttggatgcacgttcagataagccaatttttacacttaatgcacacaatgatgaaatctctggtcttgatcttagcagtcaaatcaagggctgtctcgtgactgcttcagctgacaaatacgtgaagatctgggacatcttaggagataggccaagtctagttcattctagggacatgaaaatgggagttctcttctgttcttcatgttgccctgatttgccatttatttatgcctttggaggtcaaaaagaagggcttcgggtctgggatataagcacagtctcttcagtaaatgaagcatttggaagacgagagaggcttgttcttgggagtgcaagaaattcatctattagtggcccttttggcagcaggagctcagatacacccatggagtcttaatgaagatcatctaatttcctgcttaccttaactgggaattttaaaaagttggcctaaaaatgttccatgcgtggcagcaaccatgcagagtgactgaaacacaattcatttctgactgacattcctttctgcaactgcggtggcaccacaaatatccggtctttgtgcttgctcttcagatggatggtttgtaaggctcttgttgcatttcttaaaaaagagtaataaaaaggatttttaaaaagtaattccttaaacataccatctgtcacagttaatctagatttgtaaataggtagtaatttatagaatttttaaagcgtaaaatccggtaatattaaaagataggtaaacctaggcctggaaaggctgttatttggctaaaattgcacaggaggccatgaacagaggcaagtgccccagagactccactttcattcctaactgttctcaaattaatgctcatgattgagtattctcagtgcaactcgtagagtttgataagtaaaagttacatgcccctgttttcctagcatgatattcactgttatcaaagacaagaggcagaccattcattcattctcaaaacactgaatgccattctgtgcctagtgctatacaaggcatgggagattcagtgtgaataagtctttgctctccacctaacaagggacagttttaattatagattgtcttcctattaagtatgagttttagtaggcattaaaaatcgtaattagtttgataatatgagacccaaccctaacttgccagaagagtaatcagttcatgaaccattgatatttcctgtatatttcatgaatgtgacttcagtcattctagtgttaatactgtggaatgtcattggtgtagcaacgtgggttcaccaaaacacctttttatacaaaagacagatgtgtgaattaaagagattaaaggatagagtattctgtttctttgttttgatttggcttttaggtattaaaataaggcccagatcactaaaaattagtaacagagggagacctctaatagatttaaagtcagttaattctctctgaaatttgatgttttcttctataaagaataactctaaaataggcatcttcccaggactttccattctcaggaaaagacctagttacgtataaaaaataacttctactgctttatgtagtcatataggtctgcctaaaataagaatttgtatttaataaataccaaaattttcaaatggtaaaaaaaat

SEQ ID NO: 57268 - DNA, 2596 bp, Homo sapiens
  misc_feature (42)..(42): n is a, c, g, or t
  misc_feature (47)..(48): n is a, c, g, or t
ccatcacaccccccccacaccaccaaatactgctagtacagnctggnntgtggcctgtgcagatccctgagcgtgtggcagcagtgcggtcgtggtccctccctatgcagcctggtttctagcgtgacacgcccttgacttgaggaccatgaaccgcagccgccaggtgacgtgcgtggcctgggtccgctgcggcgtggccaaagagacaccagacaaggtagagctgagtaaagaagaagtaaaacgcctcattgctgaggcaaaggagaaattgcaagaagaaggtggtggcagtgatgaagaggagacaggcagtccttcagaagatggcatgcagagtgcacgcacccaggcacgcccaagagagcccctggaggatggtgacccagaggatgacaggacgcttgatgatgatgagctggctgagtacgacttagataaatatgatgaggaaggtgacccagatgctgagactcttggtgaatctctcttgggtcttacggtctacgggagtaatgatcaagatccttacgttactctgaaagatacagaacaatatgaacgtgaagatttcttgattaagcccagtgataatcttatagtttgtggccgagctgaacaggaccagtgcaatttagaggtgcatgtttataatcaagaagaagactctttttatgtacaccatgatatactcttgtctgcatatcctctgagtgtggaatggctgaattttgatcctagcccagatgattctactggaaattacattgctgtaggaaacatgacccctgttattgaagtgtgggaccttgatatagtggactctttagagccagtcttcacactcggaagtaaactttcaaaaaagaagaaaaagaaaggaaagaagagttcctcagcagaagggcataccgatgctgtccttgacctttcatggaataagctaatcagaaatgttttagcaagtgcatcagctgacaacactgtaattctgtgggatatgtccttggggaaaccagcagctagcctcgctgtacacacagacaaggtccaaacactgcagtttcatccatttgaagcacagactctgatttctggctcatatgataagtcagtggctttgtatgactgccgaagtccagatgaaagccatcgaatgtggcgattcagtgggcagatagagagagtgacttggaatcacttttcaccttgtcatttcttggccagtacagatgacggctttgtatataatttggatgcacgttcagataagccaatttttacacttaatgcacacaatgatgaaatctctggtcttgatcttagcagtcaaatcaagggctgtctcgtgactgcttcagctgacaaatacgtgaagatctgggacatcttaggagataggccaagtctagttcattctagggacatgaaaatgggagttctcttctgttcttcatgttgccctgatttgccatttatttatgcctttggaggtcaaaaagaagggcttcgggtctgggatataagcacagtctcttcagtaaatgaagcatttggaagacgagagaggcttgttcttgggagtgcaagaaattcatctattagtggcccttttggcagcaggagctcagatacacccatggagtcttaatgaagatcatctaatttcctgcttaccttaactgggaattttaaaaagttggcctaaaaatgttccatgcgtggcagcaaccatgcagagtgactgaaacacaattcatttctgactgacattcctttctgcaactgcggtggcaccacaaatatccggtctttgtgcttgctcttcagatggatggtttgtaaggctcttgttgcatttcttaaaaaagagtaataaaaaggatttttaaaaagtaattccttaaacataccatctgtcacagttaatctagatttgtaaataggtagtaatttatagaatttttaaagcgtaaaatccggtaatattaaaagataggtaaacctaggcctggaaaggctgttatttggctaaaattgcacaggaggccatgaacagaggcaagtgccccagagactccactttcattcctaactgttctcaaattaatgctcatgattgagtattctcagtgcaactcgtagagtttgataagtaaaagttacatgcccctgttttcctagcatgatattcactgttatcaaagacaagaggcagaccattcattcattctcaaaacactgaatgccattctgtgcctagtgctatacaaggcatgggagattcagtgtgaataagtctttgctctccacctaacaagggacagttttaattatagattgtcttcctattaagtatgagttttagtaggcattaaaaatcgtaattagtttgataatatgagacccaaccctaacttgccagaagagtaatcagttcatgaaccattgatatttcctgtatatttcatgaatgtgacttcagtcattctagtgttaatactgtggaatgtcattggtgtagcaacgtgggttcaccaaaacacctttttatacaaaagacagatgtgtgaattaaagagattaaaggata

SEQ ID NO: 57269 - DNA, 1899 bp, Homo sapiens
  misc_feature (42)..(42): n is a, c, g, or t
  misc_feature (47)..(48): n is a, c, g, or t
ccatcacaccccccccacaccaccaaatactgctagtacagnctggnntgtggcctgtgcagatccctgagcgtgtggcagcagtgcggtcgtggtccctccctatgcagcctggtttctagcgtgacacgcccttgacttgaggaccatgaaccgcagccgccaggtgacgtgcgtggcctgggtccgctgcggcgtggccaaagagacaccagacaaggtagagctgagtaaagaagaagtaaaacgcctcattgctgaggcaaaggagaaattgcaagaagaaggtggtggcagtgatgaagaggagacaggcagtccttcagaagatggcatgcagagtgcacgcacccaggcacgcccaagagagcccctggaggatggtgacccagaggatgacaggacgcttgatgatgatgagctggctgagtacgacttagataaatatgatgaggaaggtgacccagatgctgagactcttggtgaatctctcttgggtcttacggtctacgggagtaatgatcaagatccttacgttactctgaaagatacagaacaatatgaacgtgaagatttcttgattaagcccagtgataatcttatagtttgtggccgagctgaacaggaccagtgcaatttagaggtgcatgtttataatcaagaagaagactctttttatgtacaccatgatatactcttgtctgcatatcctctgagtgtggaatggctgaattttgatcctagcccagatgattctactggaaattacattgctgtaggaaacatgacccctgttattgaagtgtgggaccttgatatagtggactctttagagccagtcttcacactcggaagtaaactttcaaaaaagaagaaaaagaaaggaaagaagagttcctcagcagaagggcataccgatgctgtccttgacctttcatggaataagctaatcagaaatgttttagcaagtgcatcagctgacaacactgtaattctgtgggatatgtccttggggaaaccagcagctagcctcgctgtacacacagacaaggtccaaacactgcagtttcatccatttgaagcacagactctgatttctggctcatatgataagtcagtggctttgtatgactgccgaagtccagatgaaagccatcgaatgtggcgattcagtgggcagatagagagagtgacttggaatcacttttcaccttgtcatttcttggccagtacagatgacggctttgtatataatttggatgcacgttcagataagccaatttttacacttaatgcacacaatgatgaaatctctggtcttgatcttagcagtcaaatcaagggctgtctcgtgactgcttcagctgacaaatacgtgaagatctgggacatcttaggagataggccaagtctagttcattctagggacatgaaaatgggagttctcttctgttcttcatgttgccctgatttgccatttatttatgcctttggaggtcaaaaagaagggcttcgggtctgggatataagcacagtctcttcagtaaatgaagcatttggaagacgagagaggcttgttcttgggagtgcaagaaattcatctattagtggcccttttggcagcaggagctcagatacacccatggagtcttaatgaagatcatctaatttcctgcttaccttaactgggaattttaaaaagttggcctaaaaatgttccatgcgtggcagcaaccatgcagagtgactgaaacacaattcatttctgactgacattcctttctgcaactgcggtggcaccacaaatatccggtctttgtgcttgctcttcagatggatggtttgtaaggctcttgttgcatttcttaaaaaagagtaataaaaaggatttttaaaaag

SEQ ID NO: 57270 - DNA, 2509 bp, Homo sapiens
  misc_feature (42)..(42): n is a, c, g, or t
  misc_feature (47)..(48): n is a, c, g, or t
ccatcacaccccccccacaccaccaaatactgctagtacagnctggnntgtggcctgtgcagatccctgagcgtgtggcagcagtgcggtcgtggtccctccctatgcagcctggtttctagcgtgacacgcccttgacttgaggaccatgaaccgcagccgccaggtgacgtgcgtggcctgggtccgctgcggcgtggccaaagagacaccagacaaggtagagctgagtaaagaagaagtaaaacgcctcattgctgaggcaaaggagaaattgcaagaagaaggtggtggcagtgatgaagaggagacaggcagtccttcagaagatggcatgcagagtgcacgcacccaggcacgcccaagagagcccctggaggatggtgacccagaggatgacaggacgcttgatgatgatgagctggctgagtacgacttagataaatatgatgaggaaggtgacccagatgctgagactcttggtgaatctctcttgggtcttacggtctacgggagtaatgatcaagatccttacgttactctgaaagatacagaacaatatgaacgtgaagatttcttgattaagcccagtgataatcttatagtttgtggccgagctgaacaggaccagtgcaatttagaggtgcatgtttataatcaagaagaagactctttttatgtacaccatgatatactcttgtctgcatatcctctgagtgtggaatggctgaattttgatcctagcccagatgattctactggaaattacattgctgtaggaaacatgacccctgttattgaagtgtgggaccttgatatagtggactctttagagccagtcttcacactcggaagtaaactttcaaaaaagaagaaaaagaaaggaaagaagagttcctcagcagaagggcataccgatgctgtccttgacctttcatggaataagctaatcagaaatgttttagcaagtgcatcagctgacaacactgtaattctgtgggatatgtccttggggaaaccagcagctagcctcgctgtacacacagacaaggtccaaacactgcagtttcatccatttgaagcacagactctgatttctggctcatatgataagtcagtggctttgtatgactgccgaagtccagatgaaagccatcgaatgtggcgattcagtgggcagatagagagagtgacttggaatcacttttcaccttgtcatttcttggccagtacagatgacggctttgtatataatttggatgcacgttcagataagccaatttttacacttaatgcacacaatgatgaaatctctggtcttgatcttagcagtcaaatcaagggctgtctcgtgactgcttcagctgacaaatacgtgaagatctgggacatcttaggagataggccaagtctagttcattctagggacatgaaaatgggagttctcttctgttcttcatgttgccctgatttgccatttatttatgcctttggaggtcaaaaagaagggcttcgggtctgggatataagcacagtctcttcagtaaatgaagcatttggaagacgagagaggcttgttcttgggagtgcaagaaattcatctattagtggcccttttggcagcaggagctcagatacacccatggagtcttaatgaagatcatctaatttcctgcttaccttaactgggaattttaaaaagttggcctaaaaatgttccatgcgtggcagcaaccatgcagagtgactgaaacacaattcatttctgactgacattcctttctgcaactgcggtggcaccacaaatatccggtctttgtgcttgctcttcagatggatggtttgtaaggctcttgttgcatttcttaaaaaagagtaataaaaaggatttttaaaaagaaaaaaaaaaaaaaaaaaaaaaaaattggggggggccgggccccggaaaaaattttaaaccctggttggggcggcgcggggcccacgatgggttaggtgtgaacaggggccacatgaggcgggctcccaaagaaaaatcccgggccagggctatggctggcgggggtttctcccccaaataaaaaaagggccggggcgggaaaccacgcagcgtcttcgtgcacaaccatcccgaagtgggagagttcgggagggccatagcggggcccacaacagcgggcgtcccagaggaagcgaaatacaatttaagccgcgccgcctgtggagcaaaaccagaccttacagaacacacaatcaagagaagaaaaagaaaacaagaaaagaagaagccaacccaagatacaacagcgaggcaaaagacgaaaagaaagaaaaagagagagaaacaagacaacagaaaaaagaaaaaccaacaaaaaaaaaacagacaccaaaaaaacaacgaccagacaacgcagagcgaacaagaaaaacgcaaacagaacagagagcagccaaaaaataagagagaaacaactgagcaccactaaaaagacagaaggacatgaga

SEQ ID NO: 57271 - DNA, 1957 bp, Homo sapiens
  misc_feature (42)..(42): n is a, c, g, or t
  misc_feature (47)..(48): n is a, c, g, or t
ccatcacaccccccccacaccaccaaatactgctagtacagnctggnntgtggcctgtgcagatccctgagcgtgtggcagcagtgcggtcgtggtccctccctatgcagcctggtttctagcgtgacacgcccttgacttgaggaccatgaaccgcagccgccaggtgacgtgcgtggcctgggtccgctgcggcgtggccaaagagacaccagacaaggtagagctgagtaaagaagaagtaaaacgcctcattgctgaggcaaaggagaaattgcaagaagaaggtggtggcagtgatgaagaggagacaggcagtccttcagaagatggcatgcagagtgcacgcacccaggcacgcccaagagagcccctggaggatggtgacccagaggatgacaggacgcttgatgatgatgagctggctgagtacgacttagataaatatgatgaggaaggtgacccagatgctgagactcttggtgaatctctcttgggtcttacggtctacgggagtaatgatcaagatccttacgttactctgaaagatacagaacaatatgaacgtgaagatttcttgattaagcccagtgataatcttatagtttgtggccgagctgaacaggaccagtgcaatttagaggtgcatgtttataatcaagaagaagactctttttatgtacaccatgatatactcttgtctgcatatcctctgagtgtggaatggctgaattttgatcctagcccagatgattctactggaaattacattgctgtaggaaacatgacccctgttattgaagtgtgggaccttgatatagtggactctttagagccagtcttcacactcggaagtaaactttcaaaaaagaagaaaaagaaaggaaagaagagttcctcagcagaagggcataccgatgctgtccttgacctttcatggaataagctaatcagaaatgttttagcaagtgcatcagctgacaacactgtaattctgtgggatatgtccttggggaaaccagcagctagcctcgctgtacacacagacaaggtccaaacactgcagtttcatccatttgaagcacagactctgatttctggctcatatgataagtcagtggctttgtatgactgccgaagtccagatgaaagccatcgaatgtggcgattcagtgggcagatagagagagtgacttggaatcacttttcaccttgtcatttcttggccagtacagatgacggctttgtatataatttggatgcacgttcagataagccaatttttacacttaatgcacacaatgatgaaatctctggtcttgatcttagcagtcaaatcaagggctgtctcgtgactgcttcagctgacaaatacgtgaagatctgggacatcttaggagataggccaagtctagttcattctagggacatgaaaatgggagttctcttctgttcttcatgttgccctgatttgccatttatttatgcctttggaggtcaaaaagaagggcttcgggtctgggatataagcacagtctcttcagtaaatgaagcatttggaagacgagagaggcttgttcttgggagtgcaagaaattcatctattagtggcccttttggcagcaggagctcagatacacccatggagtcttaatgaagatcatctaatttcctgcttaccttaactgggaattttaaaaagttggcctaaaaatgttccatgcgtggcagcaaccatgcagagtgactgaaacacaattcatttctgactgacattcctttctgcaactgcggtggcaccacaaatatccggtctttgtgcttgctcttcagatggatggtttgtaaggctcttgttgcatttcttaaaaaagagtaataaaaaggatttttaaaaaggaggaaaaaaagaggaaagcaaccaaaaaaaaaaccaaagacacagatgaaaacagga

SEQ ID NO: 57272 - DNA, 2877 bp, Homo sapiens
ggccatgagcatatccctgacgtcgtggcacaagagctgacttgatctgtccctatgcggcctgtattgatatccgtgatcagcactaagagttggggaccatgacaacgaagacgcgagggtgaggtgcgctgagcgggcgtccgctgatcgcggtgtgcagatgcatgagagctcaatacacagggtatcagctgagtaaagaatcgcaagtcagaacgcctctattgctttgaggcccggaccaagttgccaagaagaaggtggtggcagtgatgaagaggagacaggcagtccttcagaagatggcatgcagagtgcacgcacccaggcacgcccaagagagcccctggaggatggtgacccagaggatgacaggacgcttgatgatgatgagctggctgagtacgacttagataaatatgatgaggaaggtgacccagatgctgagactcttggtgaatctctcttgggtcttacggtctacgggagtaatgatcaagatccttacgttactctgaaagatacagaacaatatgaacgtgaagatttcttgattaagcccagtgataatcttatagtttgtggccgagctgaacaggaccagtgcaatttagaggtgcatgtttataatcaagaagaagactctttttatgtacaccatgatatactcttgtctgcatatcctctgagtgtggaatggctgaattttgatcctagcccagatgattctactggaaattacattgctgtaggaaacatgacccctgttattgaagtgtgggaccttgatatagtggactctttagagccagtcttcacactcggaagtaaactttcaaaaaagaagaaaaagaaaggaaagaagagttcctcagcagaagggcataccgatgctgtccttgacctttcatggaataagctaatcagaaatgttttagcaagtgcatcagctgacaacactgtaattctgtgggatatgtccttggggaaaccagcagctagcctcgctgtacacacagacaaggtccaaacactgcagtttcatccatttgaagcacagactctgatttctggctcatatgataagtcagtggctttgtatgactgccgaagtccagatgaaagccatcgaatgtggcgattcagtgggcagatagagagagtgacttggaatcacttttcaccttgtcatttcttggccagtacagatgacggctttgtatataatttggatgcacgttcagataagccaatttttacacttaatgcacacaatgatgaaatctctggtcttgatcttagcagtcaaatcaagggctgtctcgtgactgcttcagctgacaaatacgtgaagatctgggacatcttaggagataggccaagtctagttcattctagggacatgaaaatgggagttctcttctgttcttcatgttgccctgatttgccatttatttatgcctttggaggtcaaaaagaagggcttcgggtctgggatataagcacagtctcttcagtaaatgaagcatttggaagacgagagaggcttgttcttgggagtgcaagaaattcatctattagtggcccttttggcagcaggagctcagatacacccatggagtcttaatgaagatcatctaatttcctgcttaccttaactgggaattttaaaaagttggcctaaaaatgttccatgcgtggcagcaaccatgcagagtgactgaaacacaattcatttctgactgacattcctttctgcaactgcggtggcaccacaaatatccggtctttgtgcttgctcttcagatggatggtttgtaaggctcttgttgcatttcttaaaaaagagtaataaaaaggatttttaaaaagtaattccttaaacataccatctgtcacagttaatctagatttgtaaataggtagtaatttatagaatttttaaagcgtaaaatccggtaatattaaaagataggtaaacctaggcctggaaaggctgttatttggctaaaattgcacaggaggccatgaacagaggcaagtgccccagagactccactttcattcctaactgttctcaaattaatgctcatgattgagtattctcagtgcaactcgtagagtttgataagtaaaagttacatgcccctgttttcctagcatgatattcactgttatcaaagacaagaggcagaccattcattcattctcaaaacactgaatgccattctgtgcctagtgctatacaaggcatgggagattcagtgtgaataagtctttgctctccacctaacaagggacagttttaattatagattgtcttcctattaagtatgagttttagtaggcattaaaaatcgtaattagtttgataatatgagacccaaccctaacttgccagaagagtaatcagttcatgaaccattgatatttcctgtatatttcatgaatgtgacttcagtcattctagtgttaatactgtggaatgtcattggtgtagcaacgtgggttcaccaaaacacctttttatacaaaagacagatgtgtgaattaaagagattaaaggatagagtattctgtttctttgttttgatttggcttttaggtattaaaataaggcccagatcactaaaaattagtaacagagggagacctctaatagatttaaagtcagttaattctctctgaaatttgatgttttcttctataaagaataactctaaaataggcatcttcccaggactttccattctcaggaaaagacctagttacgtataaaaaataacttctactgctttatgtagtcatataggtctgcctaaaataagaatttgtatttaataaataccaaaattttcaaatggtaaaaaaaat

SEQ ID NO: 57273 - DNA, 2866 bp, Homo sapiens
  misc_feature (42)..(42): n is a, c, g, or t
  misc_feature (47)..(48): n is a, c, g, or t
ccatcacaccccccccacaccaccaaatactgctagtacagnctggnntgtggcctgtgcagatccctgagcgtgtggcagcagtgcggtcgtggtccctccctatgcagcctggtttctagcgtgacacgcccttgacttgaggaccatgaaccgcagccgccaggtgacgtgcgtggcctgggtccgctgcggcgtggccaaagagacaccagacaaggtagagctgagtaaagaagaagtaaaacgcctcattgctgaggcaaaggagaaattgcaagaagaaggtggtggcagtgatgaagagtgcacgcacccaggcacgcccaagagagcccctggaggatggtgacccagaggatgacaggacgcttgatgatgatgagctggctgagtacgacttagataaatatgatgaggaaggtgacccagatgctgagactcttggtgaatctctcttgggtcttacggtctacgggagtaatgatcaagatccttacgttactctgaaagatacagaacaatatgaacgtgaagatttcttgattaagcccagtgataatcttatagtttgtggccgagctgaacaggaccagtgcaatttagaggtgcatgtttataatcaagaagaagactctttttatgtacaccatgatatactcttgtctgcatatcctctgagtgtggaatggctgaattttgatcctagcccagatgattctactggaaattacattgctgtaggaaacatgacccctgttattgaagtgtgggaccttgatatagtggactctttagagccagtcttcacactcggaagtaaactttcaaaaaagaagaaaaagaaaggaaagaagagttcctcagcagaagggcataccgatgctgtccttgacctttcatggaataagctaatcagaaatgttttagcaagtgcatcagctgacaacactgtaattctgtgggatatgtccttggggaaaccagcagctagcctcgctgtacacacagacaaggtccaaacactgcagtttcatccatttgaagcacagactctgatttctggctcatatgataagtcagtggctttgtatgactgccgaagtccagatgaaagccatcgaatgtggcgattcagtgggcagatagagagagtgacttggaatcacttttcaccttgtcatttcttggccagtacagatgacggctttgtatataatttggatgcacgttcagataagccaatttttacacttaatgcacacaatgatgaaatctctggtcttgatcttagcagtcaaatcaagggctgtctcgtgactgcttcagctgacaaatacgtgaagatctgggacatcttaggagataggccaagtctagttcattctagggacatgaaaatgggagttctcttctgttcttcatgttgccctgatttgccatttatttatgcctttggaggtcaaaaagaagggcttcgggtctgggatataagcacagtctcttcagtaaatgaagcatttggaagacgagagaggcttgttcttgggagtgcaagaaattcatctattagtggcccttttggcagcaggagctcagatacacccatggagtcttaatgaagatcatctaatttcctgcttaccttaactgggaattttaaaaagttggcctaaaaatgttccatgcgtggcagcaaccatgcagagtgactgaaacacaattcatttctgactgacattcctttctgcaactgcggtggcaccacaaatatccggtctttgtgcttgctcttcagatggatggtttgtaaggctcttgttgcatttcttaaaaaagagtaataaaaaggatttttaaaaagtaattccttaaacataccatctgtcacagttaatctagatttgtaaataggtagtaatttatagaatttttaaagcgtaaaatccggtaatattaaaagataggtaaacctaggcctggaaaggctgttatttggctaaaattgcacaggaggccatgaacagaggcaagtgccccagagactccactttcattcctaactgttctcaaattaatgctcatgattgagtattctcagtgcaactcgtagagtttgataagtaaaagttacatgcccctgttttcctagcatgatattcactgttatcaaagacaagaggcagaccattcattcattctcaaaacactgaatgccattctgtgcctagtgctatacaaggcatgggagattcagtgtgaataagtctttgctctccacctaacaagggacagttttaattatagattgtcttcctattaagtatgagttttagtaggcattaaaaatcgtaattagtttgataatatgagacccaaccctaacttgccagaagagtaatcagttcatgaaccattgatatttcctgtatatttcatgaatgtgacttcagtcattctagtgttaatactgtggaatgtcattggtgtagcaacgtgggttcaccaaaacacctttttatacaaaagacagatgtgtgaattaaagagattaaaggatagagtattctgtttctttgttttgatttggcttttaggtattaaaataaggcccagatcactaaaaattagtaacagagggagacctctaatagatttaaagtcagttaattctctctgaaatttgatgttttcttctataaagaataactctaaaataggcatcttcccaggactttccattctcaggaaaagacctagttacgtataaaaaataacttctactgctttatgtagtcatataggtctgcctaaaataagaatttgtatttaataaataccaaaattttcaaatggtaaaaaaaat

SEQ ID NO: 57274 - DNA, 2937 bp, Homo sapiens
gaaatgagcgccgacgctgcccaaacaggagcctgcgcatgcgctctgccctggcagcggccctgtgcagatccctgagcgtgtggcagcagtgcggtcgtggtccctccctatgcagcctggtttctagcgtgacacgcccttgacttgaggaccatgaaccgcagccgccaggtgacgtgcgtggcctgggtccgctgcggcgtggccaaagagacaccagacaaggtagagctgagtaaagaagaagtaaaacgcctcattgctgaggcaaaggagaaattgcaagaagaaggtggtggcagtgatgaagaggagacaggcagtccttcagaagatggcatgcagagtgcacgcacccaggcacgcccaagagagcccctggaggatggtgacccagaggatgacaggacgcttgatgatgatgagctggctgagtacgacttagataaatatgatgaggaaggtgacccagatgctgagactcttggtgaatctctcttgggtcttacggtctacgggagtaatgatcaagatccttacgttactctgaaagatacatcaatgacatttttttcctctcacttaggaacaatatgaacgtgaagatttcttgattaagcccagtgataatcttatagtttgtggccgagctgaacaggaccagtgcaatttagaggtgcatgtttataatcaagaagaagactctttttatgtacaccatgatatactcttgtctgcatatcctctgagtgtggaatggctgaattttgatcctagcccagatgattctactggaaattacattgctgtaggaaacatgacccctgttattgaagtgtgggaccttgatatagtggactctttagagccagtcttcacactcggaagtaaactttcaaaaaagaagaaaaagaaaggaaagaagagttcctcagcagaagggcataccgatgctgtccttgacctttcatggaataagctaatcagaaatgttttagcaagtgcatcagctgacaacactgtaattctgtgggatatgtccttggggaaaccagcagctagcctcgctgtacacacagacaaggtccaaacactgcagtttcatccatttgaagcacagactctgatttctggctcatatgataagtcagtggctttgtatgactgccgaagtccagatgaaagccatcgaatgtggcgattcagtgggcagatagagagagtgacttggaatcacttttcaccttgtcatttcttggccagtacagatgacggctttgtatataatttggatgcacgttcagataagccaatttttacacttaatgcacacaatgatgaaatctctggtcttgatcttagcagtcaaatcaagggctgtctcgtgactgcttcagctgacaaatacgtgaagatctgggacatcttaggagataggccaagtctagttcattctagggacatgaaaatgggagttctcttctgttcttcatgttgccctgatttgccatttatttatgcctttggaggtcaaaaagaagggcttcgggtctgggatataagcacagtctcttcagtaaatgaagcatttggaagacgagagaggcttgttcttgggagtgcaagaaattcatctattagtggcccttttggcagcaggagctcagatacacccatggagtcttaatgaagatcatctaatttcctgcttaccttaactgggaattttaaaaagttggcctaaaaatgttccatgcgtggcagcaaccatgcagagtgactgaaacacaattcatttctgactgacattcctttctgcaactgcggtggcaccacaaatatccggtctttgtgcttgctcttcagatggatggtttgtaaggctcttgttgcatttcttaaaaaagagtaataaaaaggatttttaaaaagtaattccttaaacataccatctgtcacagttaatctagatttgtaaataggtagtaatttatagaatttttaaagcgtaaaatccggtaatattaaaagataggtaaacctaggcctggaaaggctgttatttggctaaaattgcacaggaggccatgaacagaggcaagtgccccagagactccactttcattcctaactgttctcaaattaatgctcatgattgagtattctcagtgcaactcgtagagtttgataagtaaaagttacatgcccctgttttcctagcatgatattcactgttatcaaagacaagaggcagaccattcattcattctcaaaacactgaatgccattctgtgcctagtgctatacaaggcatgggagattcagtgtgaataagtctttgctctccacctaacaagggacagttttaattatagattgtcttcctattaagtatgagttttagtaggcattaaaaatcgtaattagtttgataatatgagacccaaccctaacttgccagaagagtaatcagttcatgaaccattgatatttcctgtatatttcatgaatgtgacttcagtcattctagtgttaatactgtggaatgtcattggtgtagcaacgtgggttcaccaaaacacctttttatacaaaagacagatgtgtgaattaaagagattaaaggatagagtattctgtttctttgttttgatttggcttttaggtattaaaataaggcccagatcactaaaaattagtaacagagggagacctctaatagatttaaagtcagttaattctctctgaaatttgatgttttcttctataaagaataactctaaaataggcatcttcccaggactttccattctcaggaaaagacctagttacgtataaaaaataacttctactgctttatgtagtcatataggtctgcctaaaataagaatttgtatttaataaataccaaaattttcaaatggtaaaaaaaat

SEQ ID NO: 57275 - DNA, 2565 bp, Homo sapiens
ccaactctagatgatccagagttagttataaaatagatgattgcatctaagtccaagaatggatgtcataggaaatatgtttttgtcaagatgactattttattattgtagtttgtcaatttttcttacagatgctgagactcttggtgaatctctcttgggtcttacggtctacgggagtaatgatcaagatccttacgttactctgaaagatacagaacaatatgaacgtgaagatttcttgattaagcccagtgataatcttatagtttgtggccgagctgaacaggaccagtgcaatttagaggtgcatgtttataatcaagaagaagactctttttatgtacaccatgatatactcttgtctgcatatcctctgagtgtggaatggctgaattttgatcctagcccagatgattctactggaaattacattgctgtaggaaacatgacccctgttattgaagtgtgggaccttgatatagtggactctttagagccagtcttcacactcggaagtaaactttcaaaaaagaagaaaaagaaaggaaagaagagttcctcagcagaagggcataccgatgctgtccttgacctttcatggaataagctaatcagaaatgttttagcaagtgcatcagctgacaacactgtaattctgtgggatatgtccttggggaaaccagcagctagcctcgctgtacacacagacaaggtccaaacactgcagtttcatccatttgaagcacagactctgatttctggctcatatgataagtcagtggctttgtatgactgccgaagtccagatgaaagccatcgaatgtggcgattcagtgggcagatagagagagtgacttggaatcacttttcaccttgtcatttcttggccagtacagatgacggctttgtatataatttggatgcacgttcagataagccaatttttacacttaatgcacacaatgatgaaatctctggtcttgatcttagcagtcaaatcaagggctgtctcgtgactgcttcagctgacaaatacgtgaagatctgggacatcttaggagataggccaagtctagttcattctagggacatgaaaatgggagttctcttctgttcttcatgttgccctgatttgccatttatttatgcctttggaggtcaaaaagaagggcttcgggtctgggatataagcacagtctcttcagtaaatgaagcatttggaagacgagagaggcttgttcttgggagtgcaagaaattcatctattagtggcccttttggcagcaggagctcagatacacccatggagtcttaatgaagatcatctaatttcctgcttaccttaactgggaattttaaaaagttggcctaaaaatgttccatgcgtggcagcaaccatgcagagtgactgaaacacaattcatttctgactgacattcctttctgcaactgcggtggcaccacaaatatccggtctttgtgcttgctcttcagatggatggtttgtaaggctcttgttgcatttcttaaaaaagagtaataaaaaggatttttaaaaagtaattccttaaacataccatctgtcacagttaatctagatttgtaaataggtagtaatttatagaatttttaaagcgtaaaatccggtaatattaaaagataggtaaacctaggcctggaaaggctgttatttggctaaaattgcacaggaggccatgaacagaggcaagtgccccagagactccactttcattcctaactgttctcaaattaatgctcatgattgagtattctcagtgcaactcgtagagtttgataagtaaaagttacatgcccctgttttcctagcatgatattcactgttatcaaagacaagaggcagaccattcattcattctcaaaacactgaatgccattctgtgcctagtgctatacaaggcatgggagattcagtgtgaataagtctttgctctccacctaacaagggacagttttaattatagattgtcttcctattaagtatgagttttagtaggcattaaaaatcgtaattagtttgataatatgagacccaaccctaacttgccagaagagtaatcagttcatgaaccattgatatttcctgtatatttcatgaatgtgacttcagtcattctagtgttaatactgtggaatgtcattggtgtagcaacgtgggttcaccaaaacacctttttatacaaaagacagatgtgtgaattaaagagattaaaggatagagtattctgtttctttgttttgatttggcttttaggtattaaaataaggcccagatcactaaaaattagtaacagagggagacctctaatagatttaaagtcagttaattctctctgaaatttgatgttttcttctataaagaataactctaaaataggcatcttcccaggactttccattctcaggaaaagacctagttacgtataaaaaataacttctactgctttatgtagtcatataggtctgcctaaaataagaatttgtatttaataaataccaaaattttcaaatggtaaaaaaaat

SEQ ID NO: 57276 - DNA, 2752 bp, Homo sapiens
tcaggttttcatgccaataatttattgaacggaggtctgtacacaggcaaaccttactgtggaaactaaaacatcaggagctctctccactcccctggccctccagggtggggtgaggagggagtagaccttgggggcagaggacaggaggggagttacagctgtaggaggggcggggcaaggttggacggtgcgaatcgacgttttctttaagaaaaaaattataacaatctatttacacccgggggccagggaagggaagaggagacgggctgggctggttctatttagataaatatgatgaggaaggtgacccagatgctgagactcttggtgaatctctcttgggtcttacggtctacgggagtaatgatcaagatccttacgttactctgaaagatacagaacaatatgaacgtgaagatttcttgattaagcccagtgataatcttatagtttgtggccgagctgaacaggaccagtgcaatttagaggtgcatgtttataatcaagaagaagactctttttatgtacaccatgatatactcttgtctgcatatcctctgagtgtggaatggctgaattttgatcctagcccagatgattctactggaaattacattgctgtaggaaacatgacccctgttattgaagtgtgggaccttgatatagtggactctttagagccagtcttcacactcggaagtaaactttcaaaaaagaagaaaaagaaaggaaagaagagttcctcagcagaagggcataccgatgctgtccttgacctttcatggaataagctaatcagaaatgttttagcaagtgcatcagctgacaacactgtaattctgtgggatatgtccttggggaaaccagcagctagcctcgctgtacacacagacaaggtccaaacactgcagtttcatccatttgaagcacagactctgatttctggctcatatgataagtcagtggctttgtatgactgccgaagtccagatgaaagccatcgaatgtggcgattcagtgggcagatagagagagtgacttggaatcacttttcaccttgtcatttcttggccagtacagatgacggctttgtatataatttggatgcacgttcagataagccaatttttacacttaatgcacacaatgatgaaatctctggtcttgatcttagcagtcaaatcaagggctgtctcgtgactgcttcagctgacaaatacgtgaagatctgggacatcttaggagataggccaagtctagttcattctagggacatgaaaatgggagttctcttctgttcttcatgttgccctgatttgccatttatttatgcctttggaggtcaaaaagaagggcttcgggtctgggatataagcacagtctcttcagtaaatgaagcatttggaagacgagagaggcttgttcttgggagtgcaagaaattcatctattagtggcccttttggcagcaggagctcagatacacccatggagtcttaatgaagatcatctaatttcctgcttaccttaactgggaattttaaaaagttggcctaaaaatgttccatgcgtggcagcaaccatgcagagtgactgaaacacaattcatttctgactgacattcctttctgcaactgcggtggcaccacaaatatccggtctttgtgcttgctcttcagatggatggtttgtaaggctcttgttgcatttcttaaaaaagagtaataaaaaggatttttaaaaagtaattccttaaacataccatctgtcacagttaatctagatttgtaaataggtagtaatttatagaatttttaaagcgtaaaatccggtaatattaaaagataggtaaacctaggcctggaaaggctgttatttggctaaaattgcacaggaggccatgaacagaggcaagtgccccagagactccactttcattcctaactgttctcaaattaatgctcatgattgagtattctcagtgcaactcgtagagtttgataagtaaaagttacatgcccctgttttcctagcatgatattcactgttatcaaagacaagaggcagaccattcattcattctcaaaacactgaatgccattctgtgcctagtgctatacaaggcatgggagattcagtgtgaataagtctttgctctccacctaacaagggacagttttaattatagattgtcttcctattaagtatgagttttagtaggcattaaaaatcgtaattagtttgataatatgagacccaaccctaacttgccagaagagtaatcagttcatgaaccattgatatttcctgtatatttcatgaatgtgacttcagtcattctagtgttaatactgtggaatgtcattggtgtagcaacgtgggttcaccaaaacacctttttatacaaaagacagatgtgtgaattaaagagattaaaggatagagtattctgtttctttgttttgatttggcttttaggtattaaaataaggcccagatcactaaaaattagtaacagagggagacctctaatagatttaaagtcagttaattctctctgaaatttgatgttttcttctataaagaataactctaaaataggcatcttcccaggactttccattctcaggaaaagacctagttacgtataaaaaataacttctactgctttatgtagtcatataggtctgcctaaaataagaatttgtatttaataaataccaaaattttcaaatggtaaaaaaaat

SEQ ID NO: 57277 - DNA, 2489 bp, Homo sapiens
gcggccgcctactactactaaattcgcggccgcgtcgacgaggaaggtgacccagatgctgagactcttggtgaatctctcttgggtcttacggtctacgggagtaatgatcaagatccttacgttactctgaaagatacagaacaatatgaacgtgaagatttcttgattaagcccagtgataatcttatagtttgtggccgagctgaacaggaccagtgcaatttagaggtgcatgtttataatcaagaagaagactctttttatgtacaccatgatatactcttgtctgcatatcctctgagtgtggaatggctgaattttgatcctagcccagatgattctactggaaattacattgctgtaggaaacatgacccctgttattgaagtgtgggaccttgatatagtggactctttagagccagtcttcacactcggaagtaaactttcaaaaaagaagaaaaagaaaggaaagaagagttcctcagcagaagggcataccgatgctgtccttgacctttcatggaataagctaatcagaaatgttttagcaagtgcatcagctgacaacactgtaattctgtgggatatgtccttggggaaaccagcagctagcctcgctgtacacacagacaaggtccaaacactgcagtttcatccatttgaagcacagactctgatttctggctcatatgataagtcagtggctttgtatgactgccgaagtccagatgaaagccatcgaatgtggcgattcagtgggcagatagagagagtgacttggaatcacttttcaccttgtcatttcttggccagtacagatgacggctttgtatataatttggatgcacgttcagataagccaatttttacacttaatgcacacaatgatgaaatctctggtcttgatcttagcagtcaaatcaagggctgtctcgtgactgcttcagctgacaaatacgtgaagatctgggacatcttaggagataggccaagtctagttcattctagggacatgaaaatgggagttctcttctgttcttcatgttgccctgatttgccatttatttatgcctttggaggtcaaaaagaagggcttcgggtctgggatataagcacagtctcttcagtaaatgaagcatttggaagacgagagaggcttgttcttgggagtgcaagaaattcatctattagtggcccttttggcagcaggagctcagatacacccatggagtcttaatgaagatcatctaatttcctgcttaccttaactgggaattttaaaaagttggcctaaaaatgttccatgcgtggcagcaaccatgcagagtgactgaaacacaattcatttctgactgacattcctttctgcaactgcggtggcaccacaaatatccggtctttgtgcttgctcttcagatggatggtttgtaaggctcttgttgcatttcttaaaaaagagtaataaaaaggatttttaaaaagtaattccttaaacataccatctgtcacagttaatctagatttgtaaataggtagtaatttatagaatttttaaagcgtaaaatccggtaatattaaaagataggtaaacctaggcctggaaaggctgttatttggctaaaattgcacaggaggccatgaacagaggcaagtgccccagagactccactttcattcctaactgttctcaaattaatgctcatgattgagtattctcagtgcaactcgtagagtttgataagtaaaagttacatgcccctgttttcctagcatgatattcactgttatcaaagacaagaggcagaccattcattcattctcaaaacactgaatgccattctgtgcctagtgctatacaaggcatgggagattcagtgtgaataagtctttgctctccacctaacaagggacagttttaattatagattgtcttcctattaagtatgagttttagtaggcattaaaaatcgtaattagtttgataatatgagacccaaccctaacttgccagaagagtaatcagttcatgaaccattgatatttcctgtatatttcatgaatgtgacttcagtcattctagtgttaatactgtggaatgtcattggtgtagcaacgtgggttcaccaaaacacctttttatacaaaagacagatgtgtgaattaaagagattaaaggatagagtattctgtttctttgttttgatttggcttttaggtattaaaataaggcccagatcactaaaaattagtaacagagggagacctctaatagatttaaagtcagttaattctctctgaaatttgatgttttcttctataaagaataactctaaaataggcatcttcccaggactttccattctcaggaaaagacctagttacgtataaaaaataacttctactgctttatgtagtcatataggtctgcctaaaataagaatttgtatttaataaataccaaaattttcaaatggtaaaaaaaat

SEQ ID NO: 57278 - DNA, 1107 bp, Homo sapiens
  misc_feature (42)..(42): n is a, c, g, or t
  misc_feature (47)..(48): n is a, c, g, or t
ccatcacaccccccccacaccaccaaatactgctagtacagnctggnntgtggcctgtgcagatccctgagcgtgtggcagcagtgcggtcgtggtccctccctatgcagcctggtttctagcgtgacacgcccttgacttgaggaccatgaaccgcagccgccaggtgacgtgcgtggcctgggtccgctgcggcgtggccaaagagacaccagacaaggtagagctgagtaaagaagaagtaaaacgcctcattgctgaggcaaaggagaaattgcaagaagaaggtggtggcagtgatgaagaggagacaggcagtccttcagaagatggcatgcagagtgcacgcacccaggcacgcccaagagagcccctggaggatggtgacccagaggatgacaggacgcttgatgatgatgagctggctgagtacgacttagataaatatgatgaggaaggtgacccagatgctgagactcttggtgaatctctcttgggtcttacggtctacgggagtaatgatcaagatccttacgttactctgaaagatacagaacaatatgaacgtgaagatttcttgattaagcccagtgataatcttatagtttgtggccgagctgaacaggaccagtgcaatttagaggtgcatgtttataatcaagaagaagactctttttatgtacaccatgatatactcttgtctgcatatcctctgagtgtggaatggctgaattttgatcctagcccagatgattctactggaaattacattgctgtaggaaacatgacccctgttattgaagtgtgggaccttgatatagtggactctttagagccagtcttcacactcggaagtaaactttcaaaaaagaagaaaaagaaaggaaagaagagttcctcagcagaagggcataccgatgctgtccttgacctttcatggaataagctaatcagaaatgttttagcaagtgcatcagctgacaacactgtaattctgtgggatatgtccttggggaaaccagcagctagcctcgctgtacacacagacaagtcccaacctgcggttccccctttggagcccgaatctcggtctggggcaatggtagg

SEQ ID NO: 57279 - DNA, 1066 bp, Homo sapiens
gaaatgagcgccgacgctgcccaaacaggagcctgcgcatgcgctctgccctggcagcggccctgtgcagatccctgagcgtgtggcagcagtgcggtcgtggtccctccctatgcagcctggtttctagcgtgacacgcccttgacttgaggaccatgaaccgcagccgccaggtgacgtgcgtggcctgggtccgctgcggcgtggccaaagagacaccagacaaggtagagctgagtaaagaagaagtaaaacgcctcattgctgaggcaaaggagaaattgcaagaagaaggtggtggcagtgatgaagaggagacaggcagtccttcagaagatggcatgcagagtgcacgcacccaggcacgcccaagagagcccctggaggatggtgacccagaggatgacaggacgcttgatgatgatgagctggctgagtacgacttagataaatatgatgaggaaggtgacccagatgctgagactcttggtgaatctctcttgggtcttacggtctacgggagtaatgatcaagatccttacgttactctgaaagatacagaacaatatgaacgtgaagatttcttgattaagcccagtgataatcttatagtttgtggccgagctgaacaggaccagtgcaatttagaggtgcatgtttataatcaagaagaagactctttttatgtacaccatgatatactcttgtctgcatatcctctgagtgtggaatggctgaattttgatcctagcccagatgattctactggaaattacattgctgtaggaaacatgacccctgttattgaagtgtgggaccttgatatagtggactctttagagccagtcttcacactcggaagtaaacttttcacaaagagacacgaaggacgagagtctacggatgggtatcgagtatgcctgacctcatgagtaggagtcgaagttagagggctcggacaggattgggggacccggaaaagagctgtaaaaggtaagtgccaaagacacatggcacataaaggatgtgcacaactgagggagcatattcagagtgaaccacccc

SEQ ID NO: 57280 - DNA, 1673 bp, Homo sapiens
tacggctagtggggacgggtgtgaatcggcgaggggatgccgtgcggataagccaatatacactgaggcacacaagatgaaatctctggtcttgatcttagcagtcaaatcaagggctgtctcgtgactgcttcagctgacaaatacgtgaagatctgggacatcttaggagataggccaagtctagttcattctagggacatgaaaatgggagttctcttctgttcttcatgttgccctgatttgccatttatttatgcctttggaggtcaaaaagaagggcttcgggtctgggatataagcacagtctcttcagtaaatgaagcatttggaagacgagagaggcttgttcttgggagtgcaagaaattcatctattagtggcccttttggcagcaggagctcagatacacccatggagtcttaatgaagatcatctaatttcctgcttaccttaactgggaattttaaaaagttggcctaaaaatgttccatgcgtggcagcaaccatgcagagtgactgaaacacaattcatttctgactgacattcctttctgcaactgcggtggcaccacaaatatccggtctttgtgcttgctcttcagatggatggtttgtaaggctcttgttgcatttcttaaaaaagagtaataaaaaggatttttaaaaagtaattccttaaacataccatctgtcacagttaatctagatttgtaaataggtagtaatttatagaatttttaaagcgtaaaatccggtaatattaaaagataggtaaacctaggcctggaaaggctgttatttggctaaaattgcacaggaggccatgaacagaggcaagtgccccagagactccactttcattcctaactgttctcaaattaatgctcatgattgagtattctcagtgcaactcgtagagtttgataagtaaaagttacatgcccctgttttcctagcatgatattcactgttatcaaagacaagaggcagaccattcattcattctcaaaacactgaatgccattctgtgcctagtgctatacaaggcatgggagattcagtgtgaataagtctttgctctccacctaacaagggacagttttaattatagattgtcttcctattaagtatgagttttagtaggcattaaaaatcgtaattagtttgataatatgagacccaaccctaacttgccagaagagtaatcagttcatgaaccattgatatttcctgtatatttcatgaatgtgacttcagtcattctagtgttaatactgtggaatgtcattggtgtagcaacgtgggttcaccaaaacacctttttatacaaaagacagatgtgtgaattaaagagattaaaggatagagtattctgtttctttgttttgatttggcttttaggtattaaaataaggcccagatcactaaaaattagtaacagagggagacctctaatagatttaaagtcagttaattctctctgaaatttgatgttttcttctataaagaataactctaaaataggcatcttcccaggactttccattctcaggaaaagacctagttacgtataaaaaataacttctactgctttatgtagtcatataggtctgcctaaaataagaatttgtatttaataaataccaaaattttcaaatggtaaaaaaaat

SEQ ID NO: 57281 - DNA, 811 bp, Homo sapiens
gaaatgagcgccgacgctgcccaaacaggagcctgcgcatgcgctctgccctggcagcggccctgtgcagatccctgagcgtgtggcagcagtgcggtcgtggtccctccctatgcagcctggtttctagcgtgacacgcccttgacttgaggaccatgaaccgcagccgccaggtgacgtgcgtggcctgggtccgctgcggcgtggccaaagagacaccagacaaggtagagctgagtaaagaagaagtaaaacgcctcattgctgaggcaaaggagaaattgcaagaagaaggtggtggcagtgatgaagaggagacaggcagtccttcagaagatggcatgcagagtgcacgcacccaggcacgcccaagagagcccctggaggatggtgacccagaggatgacaggacgcttgatgatgatgagctggctgagtacgacttagataaatatgatgaggaaggtgacccagatgctgagactcttggtgaatctctcttgggtcttacggtctacgggagtaatgatcaagatccttacgttactctgaaagatacagaacaatatgaacgtgaagatttcttgattaagcccagtgataatcttatagtttgtggccgagctgaacaggaccagtgcaatttagaggtgcatgtttataatcaagaaaaccaaccagctaacagcgaccctcgggagggcccacaggacactccgtgtaccacggcaatactgaatgtgctgatggaggcagtgccagttctctgtccccttctgccagcactgacagtagaagatattgctatag

SEQ ID NO: 57282 - DNA, 628 bp, Homo sapiens
  misc_feature (42)..(42): n is a, c, g, or t
  misc_feature (47)..(48): n is a, c, g, or t
  misc_feature (287)..(287): n is a, c, g, or t
  misc_feature (294)..(294): n is a, c, g, or t
  misc_feature (317)..(317): n is a, c, g, or t
  misc_feature (321)..(321): n is a, c, g, or t
  misc_feature (335)..(335): n is a, c, g, or t
  misc_feature (342)..(343): n is a, c, g, or t
  misc_feature (345)..(345): n is a, c, g, or t
  misc_feature (356)..(357): n is a, c, g, or t
  misc_feature (412)..(412): n is a, c, g, or t
  misc_feature (453)..(454): n is a, c, g, or t
  misc_feature (464)..(464): n is a, c, g, or t
  misc_feature (470)..(470): n is a, c, g, or t
  misc_feature (472)..(472): n is a, c, g, or t
  misc_feature (477)..(477): n is a, c, g, or t
  misc_feature (497)..(497): n is a, c, g, or t
  misc_feature (513)..(513): n is a, c, g, or t
  misc_feature (516)..(516): n is a, c, g, or t
  misc_feature (520)..(520): n is a, c, g, or t
  misc_feature (523)..(523): n is a, c, g, or t
  misc_feature (533)..(533): n is a, c, g, or t
  misc_feature (549)..(549): n is a, c, g, or t
  misc_feature (556)..(556): n is a, c, g, or t
  misc_feature (598)..(598): n is a, c, g, or t
ccatcacaccccccccacaccaccaaatactgctagtacagnctggnntgtggcctgtgcagatccctgagcgtgtggcagcagtgcggtcgtggtccctccctatgcagcctggtttctagcgtgacacgcccttgacttgaggaccatgaaccgcagccgccaggtgacgtgcgtggcctgggtccgctgcggcgtggccaaagagacaccagacaaggtagagctgagtaaagaagaagtaaaacgcctcattgctgaggcaaaggagaaattgcaataagaangtggtgncattaattaagattagaaagttnggantgtataacatgctntgtacanngnactaataaacnnaacaaaaacacataaatcgcttaccagccgcaaaaacatcctgcaaaccatacangcagcagctgttacatgccagtcacgaactaggactgatanngtaggaccanctgcancnatctnccgcataagatggccgtaanagagaggtctgtgganccncganccnatggaggagnaacagaaggatcggangcgcatncagaaacaattagatgcaaccgcaacagtgtgcttgcaggantatacgcatgaagtggagacgggcgcctac

SEQ ID NO: 57283 - DNA, 470 bp, Homo sapiens
gcagaattacaaaagtgcatcccttgcttcccctaacatgataaactgcttatggagagtaagtgtgcctaagacatgagtaacctggctctgagctcggccagagaaggggaaattagaaattgtcctgggcttttggacatagagaggattcttcttgcgagtggaagatttgacctggagaaggtcaaaaccactgtaacgttagaggcaccagtgccttcaagtgttaagatcagaatccaccaattactgaaactcagctcattttttttctactttatttagaaccttaaaacaggctttaaatgaatcttgatttcacagtgctattttattactatttcattataaataaaacatataggagaattgaactcttaaaaccctaactttgcctgaatgtgtctaggtcagtggctttgtatgactgccgaagtccagatgaaagccatcgaatgtggcgattc

SEQ ID NO: 57284 - DNA, 375 bp, Homo sapiens
attggtgtagcaacgtgggttcaccaaaacacctttttatacaaaagacagatgtgtgaattaaagagattaaaggatagagtattctgtttctttgttttgatttggcttttaggtattaaaataaggcccagatcactaaaaattagtaacagagggagacctctaatagatttaaagtcagttaattctctctgaaatttgatgttttcttctataaagaataactctaaaataggcatcttcccaggactttccattctcaggaaaagacctagttacgtataaaaaataacttctactgctttatgtagtcatataggtctgcctaaaataagaatttgtatttaataaataccaaaattttcaaatggt

SEQ ID NO: 57285 - DNA, 554 bp, Homo sapiens
cagtcatcttctgacctcctcattacctctcacatgaattgaaaatttaacccctgacccactctcttgccaccttcattctggacagtagtactgctgctaccatcagtgtttactgattattgtgctcttaaaatgtacctaccccattaccccatgcttaccatttcagataacattgcctcatttaatcctaacataaaccatataaggcattcttttttacacattacaaatgaggagactgaggctccgactaattaactaacttgtccatcgtcacatagctagtaagtagtgaagctgggatttgacccaggtctgtttgactccaagccaattagtttttagctttcacagagaaatctcaaacattccttgaacagtcttatctcctcaattactgactcttgatattcttataggtacctcatacttacagttttcaagatgaaatttatcgtattctgttcaaggttacacttttgcttgtgattagtacttatctagagttgcccaacctagaaacaagggagtcttatactcatgtttag

SEQ ID NO: 57286 - DNA, 222 bp, Homo sapiens
gccaatcataacactttctaattggcacaaaatccacctacctgttgcctctcaggcttgggtaacatacttcagacactttcttaggtaagtcttggcccttggggtgttatttgcccagatggtaaaaacatttaagtaggtctgattatttcattttcagtggtttcaacgcatttttgtggcctgggtggttactgtaatgtgcccaagttgttcatt

SEQ ID NO: 57287 - DNA, 202 bp, Homo sapiens
gctgttctctcccattctccttaagtcaccaaatctcatgtctttcaacatctgttctatctaggagatctccgtcagcttacctgtgagcactcaatttttttgtccttaacctctgactttggaggggaagtatttccattcccttgaaatactacccaagccccaacttgtggtcatggtcccactccttccagactcc

SEQ ID NO: 57288 - DNA, 417 bp, Homo sapiens
gccaacacctaggtgagcagatagtcttccctaggacagctcacggcagggagagaaaccatgagacttgagaagcaacagaagggaatgcagtgagggaaacatttcaagtaagagggaagaaataaaaaaaccggaggtcaaagacaggccaaagttcccattgtctatccactgcactttggtggccctggcgagagctactctgcagaaaagtgagaagtgaaaatcagagccctggggctgagaagcgcattggaggttaaaaaaacccgggggagtgagcgtggaactcgccaacacgcacagttgctcaccctagcacaggtgcatctggacgcaaagcaagggggagagtgagggagaatatctgacctgctcctgtttcagctgagattccagcgggttagaagcgct

SEQ ID NO: 57289 - DNA, 499 bp, Homo sapiens
ttctgtcgtttgcatcaacatggattaacttggagccattgtgttatgtgaagtaagccaggcacaggaagataaatgctgcatgttctcactcatctgccgaagctaaaaaagttcatctcatagaaggagagtgtacaataatggtcactagaggcaaggaaaagtttgggagaggggtttatagccaaaggttgattaatggtacaaagtgcaactagataggaggaataagttctagttttctatagcactgtagggtgagcataattaacaatttattgttaaattactgataagtctagtaatgttgcaggatacaaaatatacatacaaaagttggagacatttatatacattgataatgaactatccaaaaaagaaaataagaaggcaattacatttccagtaacaacaaaaagaataaaatgcttgaaaataaacttagccaaagaggtgtaatacttgcacactgaaaactataaaacacgatgaggaa

SEQ ID NO: 57290 - DNA, 3891 bp, Homo sapiens
tgcatccatgtctgccagcctctgtggccacacgtctccaacctgtctgttcttccacgtctgtctctgaccttgggtcctgtggcctggcagcacaagggcattgagggtgggaagcatgctgcttccattggcctagcccatggagcggggccgagggatcactgggatttttggaggggatagggattaataactggccttcgagatgccttgtccctcctgtcccacagctccaggcccctctgcggcggttcctgagacaggagatggtcattgaagtgaaggcgatcggtggcaagaaggaccggtctctcttcctgttcacggacctcatcgtctgcaccactctgaagcgaaagtcaggctccctgcggcgcagctccatgagcctgtacacggcagccagtgtcattgacacagccagcaagtacaagatgctgtggaagctgccgctggaagacgcagacatcatcaaaggggcatcccaagccaccaatcgggagaacatccagaaggccatcagccgccttgatgaggacctcaccaccctgggccaaatgagcaagctctctgagagccttggtttcccccaccagagcctggacgatgcactgcgggacctctcagctgccatgcaccgggacctgtcggagaagcaggcgctgtgctacgcgctttccttcccgccaaccaagctggagctgtgcgccactcggcccgagggcaccgactcctacatttttgagttccctcaccctgacgcccgccttggttttgaacaggccttcgatgaggccaagaggaagctggcatccagcaaaagctgtctagaccctgagttcctgaaggccatccccatcatgaaaacccgcagtggcatgcagttctcctgtgcggctcccaccctgaacagctgcccggagccctcgcctgaggtatgggtctgcaacagcgacggctacgtgggccaggtgtgcctgctgagcctgcgcgccgagccggacgtggaggcctgcatcgccgtctgttccgcccgcatcctctgcatcggggcggtgcccgggctgcagcctcgctgccaccgggagcctcctccgtcgctgaggagtcctccagagacggcaccggagcccgccgggccggagctggacgtcgaggccgctgcagacgaggaagccgcgacgctcgcggagccggggccgcagccctgccttcacatctccattgcaggctcgggcttggagatgacgccgggcctcggcgagggtgacccccgcccagagctggtgccctttgacagtgactctgacgatgagtcttcgcccagcccctcggggacgctgcagagccaggccagccggtccaccatctcctccagctttggcaatgaggagaccccgagttccaaggaggccacggcagagaccaccagctcagaggaggagcaggagccaggcttcctgccactgtctggctcctttgggcctggtggtccctgcggcaccagcccaatggatgggagagcccttcgccgctccagccacggctccttcacccggggcagccttgaggacctgctgagtgtcgaccctgaggcctaccagagctccgtgtggctgggcactgaggatggctgtgtccacgtgtaccagtcctccgacagcatccgtgaccgcaggaacagcatgaagctccagcatgcggcctctgtgacctgcatcttgtatctgaataaccaggtgtttgtgtctctggccaatggagagcttgtggtctaccaaagggaagcaggccatttctgggacccccagaacttcaaatcagtgaccttgggcacccaggggagccccatcaccaagatggtatctgtgggtgggcggctgtggtgtggctgccagaaccgagtccttgtcctgagccctgacacgctgcagctggagcacatgttttacgtgggtcaggattcaagccgctgcgtggcttgcatggtggactccagcctgggtgtgtgggtgacattgaaaggtagtgcccacgtgtgtctctaccatccagacacctttgagcagctggcagaagtagacgtcactcctcccgtgcacaggatgctggcaggctcggatgccatcatccggcagcacaaggctgcctgtctgcgaatcacagcgctgctggtgtgtgaggagctgctgtgggtgggcaccagtgctggtgtcgtcctcaccatgcccacttcgcccggtactgtcagctgcccacgggcaccactcagtcccacaggcctcggccagggacacaccggccacgtccgcttcttggctgcagtccagctgccagatggcttcaacctgctctgcccaaccccaccacctcccccagacacaggccccgagaagctgccatcactggagcaccgggactccccttggcaccgaggccccgcccctgccaggcctaaaatgctggttatcagtggaggtgatggctatgaggacttccgactcagcagtgggggcggcagcagcagtgagactgtgggtcgagacgacagcacaaaccacctcctcctgtggagggtgtgaccctgtctgccgtggcccaggactcgcccgcccacctgccttcagcctgcttgcctctccctagcccacacgcagactttgaccaggagtatccagccaggggcacacatgtgcctgcgtgggctctgccttgtcttcgcggaagcattcctgatggaacacccactggccagccaggccatggcttctcccgaccctctggctgccccggtgcttccagtcatgatcgggtgggggacatgtgggctgaccaggacctctgaccctggagcttctaccaaagacacagctgggtctggaccccacggggctggggagggccatgtgcaatatttggagggttttctggagggcagcaggaaggctggggaattccccatgtacagtatttatgtttctttttagatgtgtaccttcccaagcacttatttatgcagtgacctggtcacctggggtgggggtgatttgaggaaatgacatgaggaaaagaaacctattcctgccctggggaccaccctgggactctaaccaagccttcctggagggacccatgcgcccctgagccccattccattcatacagacacacacgtacgcacactgcatgtccaaggccctaaacattgcccgttgacataaactttccagggccccagcctgatggggctgccctcagtcctctagatcaagatgctgactattagggggcagtgattgccatctggggacctgtcaggctttgtcatttcccagtttgttggtggtgcctttagtggttccctaatttgggaacactgatggggccttggacagggctttctctcaggtaggagaaatgggcccatgatctcctcacagtcgcccccagtccttggccctgcttccctgtgtctcatgcactggcacatatggtcaccttggagggcagacctaggagcccctctgaccactgaatccgtctccacaccccttctgccaagggaagccccttcaggaaggaccccccaaagctgaggggctgaatgtagccttttcaacagagaaggctcccacttgagagcagcctctacctgaccccctggaccacagagagccactctgaccctcagccccctcgcttcttcagctaaaactccaaaggtttggtttcagatggggtttgttttgttctgtttggttttggttttgtttggggtgggtgggtcattgcggtcttagattatgtttctcttgctaccaaacagtcatgtattaactctctttggatgatgaagtttaaagagtcaataaatagaaacaccagatga

SEQ ID NO: 57291 - DNA, 3968 bp, Homo sapiens
gcatgtcattcctcacatgatgcccatccatgggtttcagcaaagcatgcgtgagaacaaggagaagcaggcgctgtctgacctcatgatcaagcctgtgcagcggatcccacgctacgagcttctggtgaaggacctcctgaagcatacacctgaggaccacccggaccatccactcctgctggaggcgcagcggaacatcaagcaggtggctgagcgcatcaacaagggtgtgcggagtgccgaggaggcggagcgccatgcccgtgtgctgcaggagatagaggctcacatcgagggcatggaggatctccaggcccctctgcggcggttcctgagacaggagatggtcattgaagtgaaggcgatcggtggcaagaaggaccggtctctcttcctgttcacggacctcatcgtctgcaccactctgaagcgaaagtcaggctccctgcggcgcagctccatgagcctgtacacggcagccagtgtcattgacacagccagcaagtacaagatgctgtggaagctgccgctggaagacgcagacatcatcaaaggggcatcccaagccaccaatcgggagaacatccagaaggccatcagccgccttgatgaggacctcaccaccctgggccaaatgagcaagctctctgagagccttggtttcccccaccagagcctggacgatgcactgcgggacctctcagctgccatgcaccgggacctgtcggagaagcaggcgctgtgctacgcgctttccttcccgccaaccaagctggagctgtgcgccactcggcccgagggcaccgactcctacatttttgagttccctcaccctgacgcccgccttggttttgaacaggccttcgatgaggccaagaggaagctggcatccagcaaaagctgtctagaccctgagttcctgaaggccatccccatcatgaaaacccgcagtggcatgcagttctcctgtgcggctcccaccctgaacagctgcccggagccctcgcctgaggtatgggtctgcaacagcgacggctacgtgggccaggtgtgcctgctgagcctgcgcgccgagccggacgtggaggcctgcatcgccgtctgttccgcccgcatcctctgcatcggggcggtgcccgggctgcagcctcgctgccaccgggagcctcctccgtcgctgaggagtcctccagagacggcaccggagcccgccgggccggagctggacgtcgaggccgctgcagacgaggaagccgcgacgctcgcggagccggggccgcagccctgccttcacatctccattgcaggctcgggcttggagatgacgccgggcctcggcgagggtgacccccgcccagagctggtgccctttgacagtgactctgacgatgagtcttcgcccagcccctcggggacgctgcagagccaggccagccggtccaccatctcctccagctttggcaatgaggagaccccgagttccaaggaggccacggcagagaccaccagctcagaggaggagcaggagccaggcttcctgccactgtctggctcctttgggcctggtggtccctgcggcaccagcccaatggatgggagagcccttcgccgctccagccacggctccttcacccggggcagccttgaggacctgctgagtgtcgaccctgaggcctaccagagctccgtgtggctgggcactgaggatggctgtgtccacgtgtaccagtcctccgacagcatccgtgaccgcaggaacagcatgaagctccagcatgcggcctctgtgacctgcatcttgtatctgaataaccaggtgtttgtgtctctggccaatggagagcttgtggtctaccaaagggaagcaggccatttctgggacccccagaacttcaaatcagtgaccttgggcacccaggggagccccatcaccaagatggtatctgtgggtgggcggctgtggtgtggctgccagaaccgagtccttgtcctgagccctgacacgctgcagctggagcacatgttttacgtgggtcaggattcaagccgctgcgtggcttgcatggtggactccagcctgggtgtgtgggtgacattgaaaggtagtgcccacgtgtgtctctaccatccagacacctttgagcagctggcagaagtagacgtcactcctcccgtgcacaggatgctggcaggctcggatgccatcatccggcagcacaaggctgcctgtctgcgaatcacagcgctgctggtgtgtgaggagctgctgtgggtgggcaccagtgctggtgtcgtcctcaccatgcccacttcgcccggtactgtcagctgcccacgggcaccactcagtcccacaggcctcggccagggacacaccggccacgtccgcttcttggctgcagtccagctgccagatggcttcaacctgctctgcccaaccccaccacctcccccagacacaggccccgagaagctgccatcactggagcaccgggactccccttggcaccgaggccccgcccctgccaggcctaaaatgctggttatcagtggaggtgatggctatgaggacttccgactcagcagtgggggcggcagcagcagtgagactgtgggtcgagacgacagcacaaaccacctcctcctgtggagggtgtgaccctgtctgccgtggcccaggactcgcccgcccacctgccttcagcctgcttgcctctccctagcccacacgcagactttgaccaggagtatccagccaggggcacacatgtgcctgcgtgggctctgccttgtcttcgcggaagcattcctgatggaacacccactggccagccaggccatggcttctcccgaccctctggctgccccggtgcttccagtcatgatcgggtgggggacatgtgggctgaccaggacctctgaccctggagcttctaccaaagacacagctgggtctggaccccacggggctggggagggccatgtgcaatatttggagggttttctggagggcagcaggaaggctggggaattccccatgtacagtatttatgtttctttttagatgtgtaccttcccaagcacttatttatgcagtgacctggtcacctggggtgggggtgatttgaggaaatgacatgaggaaaagaaacctattcctgccctggggaccaccctgggactctaaccaagccttcctggagggacccatgcgcccctgagccccattccattcatacagacacacacgtacgcacactgcatgtccaaggccctaaacattgcccgttgacataaactttccagggccccagcctgatggggctgccctcagtcctctagatcaagatgctgactattagggggcagtgattgccatctggggacctgtcaggctttgtcatttcccagtttgttggtggtgcctttagtggttccctaatttgggaacactgatggggccttggacagggctttctctcaggtaggagaaatgggcccatgatctcctcacagtcgcccccagtccttggccctgcttccctgtgtctcatgcactggcacatatggtcaccttggagggcagacctaggagcccctctgaccactgaatccgtctccacaccccttctgccaagggaagccccttcaggaaggaccccccaaagctgaggggctgaatgtagccttttcaacagagaaggctcccacttgagagcagcctctacctgaccccctggaccacagagagccactctgaccctcagccccctcgcttcttcagctaaaactccaaaggtttggtttcagatggggtttgttttgttctgtttggttttggttttgtttggggtgggtgggtcattgcggtcttagattatgtttctcttgctaccaaacagtcatgtattaactctctttggatgatgaagtttaaagagtcaataaatagaaacaccagatga

SEQ ID NO: 57292 - DNA, 1995 bp, Homo sapiens
gggaggcaggcctgccaatgacccatcttctcccccgccttccccagcacatgttttacgtgggtcaggattcaagccgctgcgtggcttgcatggtggactccagcctgggtgtgtgggtgacattgaaaggtagtgcccacgtgtgtctctaccatccagacacctttgagcagctggcagaagtagacgtcactcctcccgtgcacaggatgctggcaggctcggatgccatcatccggcagcacaaggctgcctgtctgcgaatcacagcgctgctggtgtgtgaggagctgctgtgggtgggcaccagtgctggtgtcgtcctcaccatgcccacttcgcccggtactgtcagctgcccacgggcaccactcagtcccacaggcctcggccagggacacaccggccacgtccgcttcttggctgcagtccagctgccagatggcttcaacctgctctgcccaaccccaccacctcccccagacacaggccccgagaagctgccatcactggagcaccgggactccccttggcaccgaggccccgcccctgccaggcctaaaatgctggttatcagtggaggtgatggctatgaggacttccgactcagcagtgggggcggcagcagcagtgagactgtgggtcgagacgacagcacaaaccacctcctcctgtggagggtgtgaccctgtctgccgtggcccaggactcgcccgcccacctgccttcagcctgcttgcctctccctagcccacacgcagactttgaccaggagtatccagccaggggcacacatgtgcctgcgtgggctctgccttgtcttcgcggaagcattcctgatggaacacccactggccagccaggccatggcttctcccgaccctctggctgccccggtgcttccagtcatgatcgggtgggggacatgtgggctgaccaggacctctgaccctggagcttctaccaaagacacagctgggtctggaccccacggggctggggagggccatgtgcaatatttggagggttttctggagggcagcaggaaggctggggaattccccatgtacagtatttatgtttctttttagatgtgtaccttcccaagcacttatttatgcagtgacctggtcacctggggtgggggtgatttgaggaaatgacatgaggaaaagaaacctattcctgccctggggaccaccctgggactctaaccaagccttcctggagggacccatgcgcccctgagccccattccattcatacagacacacacgtacgcacactgcatgtccaaggccctaaacattgcccgttgacataaactttccagggccccagcctgatggggctgccctcagtcctctagatcaagatgctgactattagggggcagtgattgccatctggggacctgtcaggctttgtcatttcccagtttgttggtggtgcctttagtggttccctaatttgggaacactgatggggccttggacagggctttctctcaggtaggagaaatgggcccatgatctcctcacagtcgcccccagtccttggccctgcttccctgtgtctcatgcactggcacatatggtcaccttggagggcagacctaggagcccctctgaccactgaatccgtctccacaccccttctgccaagggaagccccttcaggaaggaccccccaaagctgaggggctgaatgtagccttttcaacagagaaggctcccacttgagagcagcctctacctgaccccctggaccacagagagccactctgaccctcagccccctcgcttcttcagctaaaactccaaaggtttggtttcagatggggtttgttttgttctgtttggttttggttttgtttggggtgggtgggtcattgcggtcttagattatgtttctcttgctaccaaacagtcatgtattaactctctttggatgatgaagtttaaagagtcaataaatagaaacaccagatga

SEQ ID NO: 57293 - DNA, 6879 bp, Homo sapiens
  misc_feature (236)..(237): n is a, c, g, or t
  misc_feature (2611)..(2611): n is a, c, g, or t
cgtcctctttgtgttcttttactgtttgtatctgctctaatgggctcccttcttccaatctcgtttttttcgctctttcccccgttcagtgcacggcccccttttgggagccccccccctgcttccaagttttccacaaagggcggacggcacaggctgcagcgaccaagattgagaccactggtccccagcggtcccgttccctgtcgctccaacccgcggggttggccttgggnncgccttagctggagggcccccgggtgagacgttcggccgtgccacagaacttgacccggcagagaacctttgctccgtctcgcgtcctcttcccacactccgtgcgctgctttcggcgtgggccctgcgctcctagggagtggggggccagggggggttgccccggctgccccgaggccaagcccccccccgggtgagttacgccactatggcggacggggcaccccggccccagctttaccgcagcgtctcgttcaagctgctggagcgctggagcggcggccccgggctgagggaggaggacacggacacccccggcttgaggcgacgcgcctcgtgccggccgaccacggctgcccggggccagccctctcggcgcgtgtccaagctggcgtctgggcccctggccgcccccgcgcagccgcgcccgctccgcagcctctcgccgtcggttcgccagctctcccggcgcttcgacgcgccgcgtctggacgacggctccgctgggacccgagacggaggcgtcttacccgcggccgcggaagaagcggccgagggcccagcgcgaggagcctggcccagcgtcaccgagatgcgcaagctcttcggcggtcctggctccaggaggcccagcgccgactctgaatccccaggaacgcccagccccgacggtgccgcgtgggagcctccggctcgggagtcgcggcagccaccgacgccaccccctcggacatgcttccccctggcgggtctgcgttcggcgcggcccctgaccgggccggagaccgaagggaggctgcgccggccgcagcagcaacaggagcgggcgcagcgtccagcggatggtttacattcttggcatatcttctcccaaccgcaggccggggcccgggcctcctgctcctcctcctccatcgccgcctcctatcctgtcagccgcagtcgtgctgccagctccagcgaggaggaagaggagggcccgccgcagctgcctggagcccagagtccggcctaccacggcggccactcctcgggcagtgacgacgaccgagacggtgagggcggccaccgctggggagggaggcccgggctcaggcctggaagctccctattggatcaggactgcaggcctgacagtgatgggttaaatctaagcagcatgaactcagcaggggtttctgggagccctgagcccccaacatctccaagagcccctagagaagaaggactccgggagtggggtagtggctctccgccctgcgtcccaggtccccaggagggacttcggcctatgtctgactctgtgggaggagctttccgtgtggccaaggtgagctttccctcgtacctggccagccccgcaggctcccgcggtagcagccgttattccagcacggagaccctcaaggacgacgacctatggtctagtaggggttctgggggctggggcgtgtaccgctcccctagctttggagctggggaagggctcctgcggtcccaggctcgaacccgtgccaaaggacctggaggcacctctagggcattgagggatggaggatttgagcctgaaaagagtcgacagcggaagtccctgtcaaatccagatatcgcctcagagaccctgacgcttctcagtttcctgcgctcagacctttcagagctgagggtccgaaaacctggtgggagctccggggaccgtggaagcaaccccctagatggcagagactcaccatccgcaggtggccctgtggggcaacttgaacccatacccatcccagccccagcatcacctggcacgcgccccacactcaaggacttgacagccactctgcggagagcaaagtcattcacctgctctgagaagcccatggcccgccgcctgccccgcaccagtgctctgaagtccagctcctccgagctcctgctcacaggccctggtgccgaggaggatccgctgcccctcatcgtccaggaccaatatgtgcaggaggcccgccaggtttttgagaagatccagcgcatgggtgcccaacaagatgatggaagcgatgccccccctggaagccctgactgggcaggggatgtgacccgagggcagcggtcccaggaggagctctcaggccctgagtccagtctgacagatgaaggcattggggcagaccctgagcctcctgttgcagcattttgcggcctgggtaccacagggatgtggcgacctctttcctcatcctcggcccagacgaaccaccatggccctgggactgaggacagtctgggcgggtgggccctggtgtcgcctgagacccctcccacaccaggtgccctccgccgacgacgcaaagtcccaccttcaggttctggtgggagcgaattnagcaatggggaggcaggggaggcctacaggtccctgagtgacccaattcctcagcgccaccgggctgccacctctgaagagcctactgggttctctgtggacagcaacctcctgggctcactgagccccaagacagggctccctgccacctcagccatggatgagggcttgaccagtggtcacagtgactggtctgtgggcagtgaagagagcaagggatatcaggaggttattcagagcatagttcaggggcctggcaccctggggcgtgtggtggacgacaggattgctggcaaagcccccaagaagaaatccctgagtgaccccagccgccgtggggagctggctgggcctggattcgagggccctggaggggagcccatccgagaagttgagcccatgctgcctccatccagcagcgagcccatccttgtagagcagcgggcagagccagaagaacctggtgccaccaggagccgggcacagtctgaaagggccctacctgaggctctgcctccccctgccactgcccaccgaaactttcaccttgaccccaagctggctgacattctgtccccgaggctaatccgccgaggctccaagaagcgcccagctcggagtagtcaccaggagcttcggagagacgagggcagtcaggaccagactggcagcctgtctcgggcccggccctcctccagacacgttcgccatgccagtgtgcccgccacatttatgcctattgtggtgcctgagccaccaacttctgttggtccccctgtggctgtgccagaacccataggcttccctacccgagcccatcccacgttgcaggcaccatcgctcgaggacgtcaccaagcagtacatgctgaacctgcactccggtgaggtccctgccccagtgccagtggacatgccctgcttgcctctggctgcaccgccctctgctgaggccaagccccctgaggcagctcggcctgcagatgagcctacccctgccagcaagtgctgcagcaagccacaggtggacatgcggaagcacgtggccatgaccctgctggacacagagcagtcgtatgtggagtcgctgcgcaccctgatgcagggctacatgcagccgctgaagcagccagagaactccgtgctctgtgacccttcactggtggacgagatcttcgaccagatccccgagctcctggagcaccacgagcaattcctggagcaggttcggcactgcatgcagacctggcatgcccagcagaaggtgggagccctgctcgtccagtcgttctccaaggatgtcctagtaaacatctattctgcctatatcgataacttcctcaatgcaaaggatgctgtgcgtgtggccaaggaggcgaggcctgcctttctcaagttcctagagcaaagcatgcgtgagaacaaggagaagcaggcgctgtctgacctcatgatcaagcctgtgcagcggatcccacgctacgagcttctggtgaaggacctcctgaagcatacacctgaggaccacccggaccatccactcctgctggaggcgcagcggaacatcaagcaggtggctgagcgcatcaacaagggtgtgcggagtgccgaggaggcggagcgccatgcccgtgtgctgcaggagatagaggctcacatcgagggcatggaggatctccaggcccctctgcggcggttcctgagacaggagatggtcattgaagtgaaggcgatcggtggcaagaaggaccggtctctcttcctgttcacggacctcatcgtctgcaccactctgaagcgaaagtcaggctccctgcggcgcagctccatgagcctgtacacggcagccagtgtcattgacacagccagcaagtacaagatgctgtggaagctgccgctggaagacgcagacatcatcaaaggggcatcccaagccaccaatcgggagaacatccagaaggccatcagccgccttgatgaggacctcaccaccctgggccaaatgagcaagctctctgagagccttggtttcccccaccagagcctggacgatgcactgcgggacctctcagctgccatgcaccgggacctgtcggagaagcaggcgctgtgctacgcgctttccttcccgccaaccaagctggagctgtgcgccactcggcccgagggcaccgactcctacatttttgagttccctcaccctgacgcccgccttggttttgaacaggccttcgatgaggccaagaggaagctggcatccagcaaaagctgtctagaccctgagttcctgaaggccatccccatcatgaaaacccgcagtggcatgcagttctcctgtgcggctcccaccctgaacagctgcccggagccctcgcctgaggtatgggtctgcaacagcgacggctacgtgggccaggtgtgcctgctgagcctgcgcgccgagccggacgtggaggcctgcatcgccgtctgttccgcccgcatcctctgcatcggggcggtgcccgggctgcagcctcgctgccaccgggagcctcctccgtcgctgaggagtcctccagagacggcaccggagcccgccgggccggagctggacgtcgaggccgctgcagacgaggaagccgcgacgctcgcggagccggggccgcagccctgccttcacatctccattgcaggctcgggcttggagatgacgccgggcctcggcgagggtgacccccgcccagagctggtgccctttgacagtgactctgacgatgagtcttcgcccagcccctcggggacgctgcagagccaggccagccggtccaccatctcctccagctttggcaatgaggagaccccgagttccaaggaggccacggcagagaccaccagctcagaggaggagcaggagccaggcttcctgccactgtctggctcctttgggcctggtggtccctgcggcaccagcccaatggatgggagagcccttcgccgctccagccacggctccttcacccggggcagccttgaggacctgctgagtgtcgaccctgaggcctaccagagctccgtgtggctgggcactgaggatggctgtgtccacgtgtaccagtcctccgacagcatccgtgaccgcaggaacagcatgaagctccagcatgcggcctctgtgacctgcatcttgtatctgaataaccaggtgtttgtgtctctggccaatggagagcttgtggtctaccaaagggaagcaggccatttctgggacccccagaacttcaaatcagtgaccttgggcacccaggggagccccatcaccaagatggtatctgtgggtgggcggctgtggtgtggctgccagaaccgagtccttgtcctgagccctgacacgctgcagctggagcacatgttttacgtgggtcaggattcaagccgctgcgtggcttgcatggtggactccagcctgggtgtgtgggtgacattgaaaggtagtgcccacgtgtgtctctaccatccagacacctttgagcagctggcagaagtagacgtcactcctcccgtgcacaggatgctggcaggctcggatgccatcatccggcagcacaaggctgcctgtctgcgaatcacagcgctgctggtgtgtgaggagctgctgtgggtgggcaccagtgctggtgtcgtcctcaccatgcccacttcgcccggtactgtcagctgcccacgggcaccactcagtcccacaggcctcggccagggacacaccggccacgtccgcttcttggctgcagtccagctgccagatggcttcaacctgctctgcccaaccccaccacctcccccagacacaggccccgagaagctgccatcactggagcaccgggactccccttggcaccgaggccccgcccctgccaggcctaaaatgctggttatcagtggaggtgatggctatgaggacttccgactcagcagtgggggcggcagcagcagtgagactgtgggtcgagacgacagcacaaaccacctcctcctgtggagggtgtgaccctgtctgccgtggcccaggactcgcccgcccacctgccttcagcctgcttgcctctccctagcccacacgcagactttgaccaggagtatccagccaggggcacacatgtgcctgcgtgggctctgccttgtcttcgcggaagcattcctgatggaacacccactggccagccaggccatggcttctcccgaccctctggctgccccggtgcagggtggccctccggtgcatgtgggcac

SEQ ID NO: 57294 - DNA, 6517 bp, Homo sapiens
  misc_feature (236)..(237): n is a, c, g, or t
  misc_feature (2611)..(2611): n is a, c, g, or t
cgtcctctttgtgttcttttactgtttgtatctgctctaatgggctcccttcttccaatctcgtttttttcgctctttcccccgttcagtgcacggcccccttttgggagccccccccctgcttccaagttttccacaaagggcggacggcacaggctgcagcgaccaagattgagaccactggtccccagcggtcccgttccctgtcgctccaacccgcggggttggccttgggnncgccttagctggagggcccccgggtgagacgttcggccgtgccacagaacttgacccggcagagaacctttgctccgtctcgcgtcctcttcccacactccgtgcgctgctttcggcgtgggccctgcgctcctagggagtggggggccagggggggttgccccggctgccccgaggccaagcccccccccgggtgagttacgccactatggcggacggggcaccccggccccagctttaccgcagcgtctcgttcaagctgctggagcgctggagcggcggccccgggctgagggaggaggacacggacacccccggcttgaggcgacgcgcctcgtgccggccgaccacggctgcccggggccagccctctcggcgcgtgtccaagctggcgtctgggcccctggccgcccccgcgcagccgcgcccgctccgcagcctctcgccgtcggttcgccagctctcccggcgcttcgacgcgccgcgtctggacgacggctccgctgggacccgagacggaggcgtcttacccgcggccgcggaagaagcggccgagggcccagcgcgaggagcctggcccagcgtcaccgagatgcgcaagctcttcggcggtcctggctccaggaggcccagcgccgactctgaatccccaggaacgcccagccccgacggtgccgcgtgggagcctccggctcgggagtcgcggcagccaccgacgccaccccctcggacatgcttccccctggcgggtctgcgttcggcgcggcccctgaccgggccggagaccgaagggaggctgcgccggccgcagcagcaacaggagcgggcgcagcgtccagcggatggtttacattcttggcatatcttctcccaaccgcaggccggggcccgggcctcctgctcctcctcctccatcgccgcctcctatcctgtcagccgcagtcgtgctgccagctccagcgaggaggaagaggagggcccgccgcagctgcctggagcccagagtccggcctaccacggcggccactcctcgggcagtgacgacgaccgagacggtgagggcggccaccgctggggagggaggcccgggctcaggcctggaagctccctattggatcaggactgcaggcctgacagtgatgggttaaatctaagcagcatgaactcagcaggggtttctgggagccctgagcccccaacatctccaagagcccctagagaagaaggactccgggagtggggtagtggctctccgccctgcgtcccaggtccccaggagggacttcggcctatgtctgactctgtgggaggagctttccgtgtggccaaggtgagctttccctcgtacctggccagccccgcaggctcccgcggtagcagccgttattccagcacggagaccctcaaggacgacgacctatggtctagtaggggttctgggggctggggcgtgtaccgctcccctagctttggagctggggaagggctcctgcggtcccaggctcgaacccgtgccaaaggacctggaggcacctctagggcattgagggatggaggatttgagcctgaaaagagtcgacagcggaagtccctgtcaaatccagatatcgcctcagagaccctgacgcttctcagtttcctgcgctcagacctttcagagctgagggtccgaaaacctggtgggagctccggggaccgtggaagcaaccccctagatggcagagactcaccatccgcaggtggccctgtggggcaacttgaacccatacccatcccagccccagcatcacctggcacgcgccccacactcaaggacttgacagccactctgcggagagcaaagtcattcacctgctctgagaagcccatggcccgccgcctgccccgcaccagtgctctgaagtccagctcctccgagctcctgctcacaggccctggtgccgaggaggatccgctgcccctcatcgtccaggaccaatatgtgcaggaggcccgccaggtttttgagaagatccagcgcatgggtgcccaacaagatgatggaagcgatgccccccctggaagccctgactgggcaggggatgtgacccgagggcagcggtcccaggaggagctctcaggccctgagtccagtctgacagatgaaggcattggggcagaccctgagcctcctgttgcagcattttgcggcctgggtaccacagggatgtggcgacctctttcctcatcctcggcccagacgaaccaccatggccctgggactgaggacagtctgggcgggtgggccctggtgtcgcctgagacccctcccacaccaggtgccctccgccgacgacgcaaagtcccaccttcaggttctggtgggagcgaattnagcaatggggaggcaggggaggcctacaggtccctgagtgacccaattcctcagcgccaccgggctgccacctctgaagagcctactgggttctctgtggacagcaacctcctgggctcactgagccccaagacagggctccctgccacctcagccatggatgagggcttgaccagtggtcacagtgactggtctgtgggcagtgaagagagcaagggatatcaggaggttattcagagcatagttcaggggcctggcaccctggggcgtgtggtggacgacaggattgctggcaaagcccccaagaagaaatccctgagtgaccccagccgccgtggggagctggctgggcctggattcgagggccctggaggggagcccatccgagaagttgagcccatgctgcctccatccagcagcgagcccatccttgtagagcagcgggcagagccagaagaacctggtgccaccaggagccgggcacagtctgaaagggccctacctgaggctctgcctccccctgccactgcccaccgaaactttcaccttgaccccaagctggctgacattctgtccccgaggctaatccgccgaggctccaagaagcgcccagctcggagtagtcaccaggagcttcggagagacgagggcagtcaggaccagactggcagcctgtctcgggcccggccctcctccagacacgttcgccatgccagtgtgcccgccacatttatgcctattgtggtgcctgagccaccaacttctgttggtccccctgtggctgtgccagaacccataggcttccctacccgagcccatcccacgttgcaggcaccatcgctcgaggacgtcaccaagcagtacatgctgaacctgcactccggtgaggtccctgccccagtgccagtggacatgccctgcttgcctctggctgcaccgccctctgctgaggccaagccccctgaggcagctcggcctgcagatgagcctacccctgccagcaagtgctgcagcaagccacaggtggacatgcggaagcacgtggccatgaccctgctggacacagagcagtcgtatgtggagtcgctgcgcaccctgatgcagggctacatgcagccgctgaagcagccagagaactccgtgctctgtgacccttcactggtggacgagatcttcgaccagatccccgagctcctggagcaccacgagcaattcctggagcaggttcggcactgcatgcagacctggcatgcccagcagaaggtgggagccctgctcgtccagtcgttctccaaggatgtcctagtaaacatctattctgcctatatcgataacttcctcaatgcaaaggatgctgtgcgtgtggccaaggaggcgaggcctgcctttctcaagttcctagagcaaagcatgcgtgagaacaaggagaagcaggcgctgtctgacctcatgatcaagcctgtgcagcggatcccacgctacgagcttctggtgaaggacctcctgaagcatacacctgaggaccacccggaccatccactcctgctggaggcgcagcggaacatcaagcaggtggctgagcgcatcaacaagggtgtgcggagtgccgaggaggcggagcgccatgcccgtgtgctgcaggagatagaggctcacatcgagggcatggaggatctccaggcccctctgcggcggttcctgagacaggagatggtcattgaagtgaaggcgatcggtggcaagaaggaccggtctctcttcctgttcacggacctcatcgtctgcaccactctgaagcgaaagtcaggctccctgcggcgcagctccatgagcctgtacacggcagccagtgtcattgacacagccagcaagtacaagatgctgtggaagctgccgctggaagacgcagacatcatcaaaggggcatcccaagccaccaatcgggagaacatccagaaggccatcagccgccttgatgaggacctcaccaccctgggccaaatgagcaagctctctgagagccttggtttcccccaccagagcctggacgatgcactgcgggacctctcagctgccatgcaccgggacctgtcggagaagcaggcgctgtgctacgcgctttccttcccgccaaccaagctggagctgtgcgccactcggcccgagggcaccgactcctacatttttgagttccctcaccctgacgcccgccttggttttgaacaggccttcgatgaggccaagaggaagctggcatccagcaaaagctgtctagaccctgagttcctgaaggccatccccatcatgaaaacccgcagtggcatgcagttctcctgtgcggctcccaccctgaacagctgcccggagccctcgcctgaggtatgggtctgcaacagcgacggctacgtgggccaggtgtgcctgctgagcctgcgcgccgagccggacgtggaggcctgcatcgccgtctgttccgcccgcatcctctgcatcggggcggtgcccgggctgcagcctcgctgccaccgggagcctcctccgtcgctgaggagtcctccagagacggcaccggagcccgccgggccggagctggacgtcgaggccgctgcagacgaggaagccgcgacgctcgcggagccggggccgcagccctgccttcacatctccattgcaggctcgggcttggagatgacgccgggcctcggcgagggtgacccccgcccagagctggtgccctttgacagtgactctgacgatgagtcttcgcccagcccctcggggacgctgcagagccaggccagccggtccaccatctcctccagctttggcaatgaggagaccccgagttccaaggaggccacggcagagaccaccagctcagaggaggagcaggagccaggcttcctgccactgtctggctcctttgggcctggtggtccctgcggcaccagcccaatggatgggagagcccttcgccgctccagccacggctccttcacccggggcagccttgaggacctgctgagtgtcgaccctgaggcctaccagagctccgtgtggctgggcactgaggatggctgtgtccacgtgtaccagtcctccgacagcatccgtgaccgcaggaacagcatgaagctccagcatgcggcctctgtgacctgcatcttgtatctgaataaccaggtgtttgtgtctctggccaatggagagcttgtggtctaccaaagggaagcaggccatttctgggacccccagaacttcaaatcagtgaccttgggcacccaggggagccccatcaccaagatggtatctgtgggtgggcggctgtggtgtggctgccagaaccgagtccttgtcctgagccctgacacgctgcagctggaggtagcagggggtgggggaatggaattggtgccatgggatgagctaggtccgtgtgacagggagatggagaccatggtaggggcataagcagcatccagcagagggctagggccttcctctgaccacagagtgacgctggccagtccctgtcctccttcgatcctcatttcttctgtagctgatgaggaatacagtaagtgtcccatatacattaggaatcttattcatcctcctgcccaccctatctctcaactcaggttttagggtcctttggggataggacaagagtcctttctgatgtcaacatccattagcattagactctggcatttattgctgcacatgtcacttgcacacatgtcagaagtatccaggggcaacgggttcccttaatttccctcacttattccattgttggctgggcaggagtccaaagccctgggttcaggccccagctctgtgactgacttgctgtgtgacctttcccttctaggcttcagcttccccacctgtccaggggga

SEQ ID NO: 57295 - DNA, 456 bp, Homo sapiens
tggattacagaattgcgagctgcggtacccccgtgtgggttctttgtgctggcacatatggtcaccttggagggcagacctaggagcccctctgaccactgaatccgtctccacaccccttctgccaagggaagccccttcaggaaggaccccccaaagctgaggggctgaatgtagccttttcaacagagaaggctcccacttgagagcagcctctacctgaccccctggaccacagagagccactctgaccctcagccccctcgcttcttcagctaaaactccaaaggtttggtttcagatggggtttgttttgttctgtttggttttggttttgtttggggtgggtgggtcattgcggtcttagattatgtttctcttgctaccaaacagtcatgtattaactctctttggatgatgaagtttaaagagtcaataaatagaaacaccagatga

SEQ ID NO: 57296 - DNA, 7943 bp, Homo sapiens
  misc_feature (236)..(237): n is a, c, g, or t
  misc_feature (2611)..(2611): n is a, c, g, or t
cgtcctctttgtgttcttttactgtttgtatctgctctaatgggctcccttcttccaatctcgtttttttcgctctttcccccgttcagtgcacggcccccttttgggagccccccccctgcttccaagttttccacaaagggcggacggcacaggctgcagcgaccaagattgagaccactggtccccagcggtcccgttccctgtcgctccaacccgcggggttggccttgggnncgccttagctggagggcccccgggtgagacgttcggccgtgccacagaacttgacccggcagagaacctttgctccgtctcgcgtcctcttcccacactccgtgcgctgctttcggcgtgggccctgcgctcctagggagtggggggccagggggggttgccccggctgccccgaggccaagcccccccccgggtgagttacgccactatggcggacggggcaccccggccccagctttaccgcagcgtctcgttcaagctgctggagcgctggagcggcggccccgggctgagggaggaggacacggacacccccggcttgaggcgacgcgcctcgtgccggccgaccacggctgcccggggccagccctctcggcgcgtgtccaagctggcgtctgggcccctggccgcccccgcgcagccgcgcccgctccgcagcctctcgccgtcggttcgccagctctcccggcgcttcgacgcgccgcgtctggacgacggctccgctgggacccgagacggaggcgtcttacccgcggccgcggaagaagcggccgagggcccagcgcgaggagcctggcccagcgtcaccgagatgcgcaagctcttcggcggtcctggctccaggaggcccagcgccgactctgaatccccaggaacgcccagccccgacggtgccgcgtgggagcctccggctcgggagtcgcggcagccaccgacgccaccccctcggacatgcttccccctggcgggtctgcgttcggcgcggcccctgaccgggccggagaccgaagggaggctgcgccggccgcagcagcaacaggagcgggcgcagcgtccagcggatggtttacattcttggcatatcttctcccaaccgcaggccggggcccgggcctcctgctcctcctcctccatcgccgcctcctatcctgtcagccgcagtcgtgctgccagctccagcgaggaggaagaggagggcccgccgcagctgcctggagcccagagtccggcctaccacggcggccactcctcgggcagtgacgacgaccgagacggtgagggcggccaccgctggggagggaggcccgggctcaggcctggaagctccctattggatcaggactgcaggcctgacagtgatgggttaaatctaagcagcatgaactcagcaggggtttctgggagccctgagcccccaacatctccaagagcccctagagaagaaggactccgggagtggggtagtggctctccgccctgcgtcccaggtccccaggagggacttcggcctatgtctgactctgtgggaggagctttccgtgtggccaaggtgagctttccctcgtacctggccagccccgcaggctcccgcggtagcagccgttattccagcacggagaccctcaaggacgacgacctatggtctagtaggggttctgggggctggggcgtgtaccgctcccctagctttggagctggggaagggctcctgcggtcccaggctcgaacccgtgccaaaggacctggaggcacctctagggcattgagggatggaggatttgagcctgaaaagagtcgacagcggaagtccctgtcaaatccagatatcgcctcagagaccctgacgcttctcagtttcctgcgctcagacctttcagagctgagggtccgaaaacctggtgggagctccggggaccgtggaagcaaccccctagatggcagagactcaccatccgcaggtggccctgtggggcaacttgaacccatacccatcccagccccagcatcacctggcacgcgccccacactcaaggacttgacagccactctgcggagagcaaagtcattcacctgctctgagaagcccatggcccgccgcctgccccgcaccagtgctctgaagtccagctcctccgagctcctgctcacaggccctggtgccgaggaggatccgctgcccctcatcgtccaggaccaatatgtgcaggaggcccgccaggtttttgagaagatccagcgcatgggtgcccaacaagatgatggaagcgatgccccccctggaagccctgactgggcaggggatgtgacccgagggcagcggtcccaggaggagctctcaggccctgagtccagtctgacagatgaaggcattggggcagaccctgagcctcctgttgcagcattttgcggcctgggtaccacagggatgtggcgacctctttcctcatcctcggcccagacgaaccaccatggccctgggactgaggacagtctgggcgggtgggccctggtgtcgcctgagacccctcccacaccaggtgccctccgccgacgacgcaaagtcccaccttcaggttctggtgggagcgaattnagcaatggggaggcaggggaggcctacaggtccctgagtgacccaattcctcagcgccaccgggctgccacctctgaagagcctactgggttctctgtggacagcaacctcctgggctcactgagccccaagacagggctccctgccacctcagccatggatgagggcttgaccagtggtcacagtgactggtctgtgggcagtgaagagagcaagggatatcaggaggttattcagagcatagttcaggggcctggcaccctggggcgtgtggtggacgacaggattgctggcaaagcccccaagaagaaatccctgagtgaccccagccgccgtggggagctggctgggcctggattcgagggccctggaggggagcccatccgagaagttgagcccatgctgcctccatccagcagcgagcccatccttgtagagcagcgggcagagccagaagaacctggtgccaccaggagccgggcacagtctgaaagggccctacctgaggctctgcctccccctgccactgcccaccgaaactttcaccttgaccccaagctggctgacattctgtccccgaggctaatccgccgaggctccaagaagcgcccagctcggagtagtcaccaggagcttcggagagacgagggcagtcaggaccagactggcagcctgtctcgggcccggccctcctccagacacgttcgccatgccagtgtgcccgccacatttatgcctattgtggtgcctgagccaccaacttctgttggtccccctgtggctgtgccagaacccataggcttccctacccgagcccatcccacgttgcaggcaccatcgctcgaggacgtcaccaagcagtacatgctgaacctgcactccggtgaggtccctgccccagtgccagtggacatgccctgcttgcctctggctgcaccgccctctgctgaggccaagccccctgaggcagctcggcctgcagatgagcctacccctgccagcaagtgctgcagcaagccacaggtggacatgcggaagcacgtggccatgaccctgctggacacagagcagtcgtatgtggagtcgctgcgcaccctgatgcagggctacatgcagccgctgaagcagccagagaactccgtgctctgtgacccttcactggtggacgagatcttcgaccagatccccgagctcctggagcaccacgagcaattcctggagcaggttcggcactgcatgcagacctggcatgcccagcagaaggtgggagccctgctcgtccagtcgttctccaaggatgtcctagtaaacatctattctgcctatatcgataacttcctcaatgcaaaggatgctgtgcgtgtggccaaggaggcgaggcctgcctttctcaagttcctagagcaaagcatgcgtgagaacaaggagaagcaggcgctgtctgacctcatgatcaagcctgtgcagcggatcccacgctacgagcttctggtgaaggacctcctgaagcatacacctgaggaccacccggaccatccactcctgctggaggcgcagcggaacatcaagcaggtggctgagcgcatcaacaagggtgtgcggagtgccgaggaggcggagcgccatgcccgtgtgctgcaggagatagaggctcacatcgagggcatggaggatctccaggcccctctgcggcggttcctgagacaggagatggtcattgaagtgaaggcgatcggtggcaagaaggaccggtctctcttcctgttcacggacctcatcgtctgcaccactctgaagcgaaagtcaggctccctgcggcgcagctccatgagcctgtacacggcagccagtgtcattgacacagccagcaagtacaagatgctgtggaagctgccgctggaagacgcagacatcatcaaaggggcatcccaagccaccaatcgggagaacatccagaaggccatcagccgccttgatgaggacctcaccaccctgggccaaatgagcaagctctctgagagccttggtttcccccaccagagcctggacgatgcactgcgggacctctcagctgccatgcaccgggacctgtcggagaagcaggcgctgtgctacgcgctttccttcccgccaaccaagctggagctgtgcgccactcggcccgagggcaccgactcctacatttttgagttccctcaccctgacgcccgccttggttttgaacaggccttcgatgaggccaagaggaagctggcatccagcaaaagctgtctagaccctgagttcctgaaggccatccccatcatgaaaacccgcagtggcatgcagttctcctgtgcggctcccaccctgaacagctgcccggagccctcgcctgaggtatgggtctgcaacagcgacggctacgtgggccaggtgtgcctgctgagcctgcgcgccgagccggacgtggaggcctgcatcgccgtctgttccgcccgcatcctctgcatcggggcggtgcccgggctgcagcctcgctgccaccgggagcctcctccgtcgctgaggagtcctccagagacggcaccggagcccgccgggccggagctggacgtcgaggccgctgcagacgaggaagccgcgacgctcgcggagccggggccgcagccctgccttcacatctccattgcaggctcgggcttggagatgacgccgggcctcggcgagggtgacccccgcccagagctggtgccctttgacagtgactctgacgatgagtcttcgcccagcccctcggggacgctgcagagccaggccagccggtccaccatctcctccagctttggcaatgaggagaccccgagttccaaggaggccacggcagagaccaccagctcagaggaggagcaggagccaggcttcctgccactgtctggctcctttgggcctggtggtccctgcggcaccagcccaatggatgggagagcccttcgccgctccagccacggctccttcacccggggcagccttgaggacctgctgagtgtcgaccctgaggcctaccagagctccgtgtggctgggcactgaggatggctgtgtccacgtgtaccagtcctccgacagcatccgtgaccgcaggaacagcatgaagctccagcatgcggcctctgtgacctgcatcttgtatctgaataaccaggtgtttgtgtctctggccaatggagagcttgtggtctaccaaagggaagcaggccatttctgggacccccagaacttcaaatcagtgaccttgggcacccaggggagccccatcaccaagatggtatctgtgggtgggcggctgtggtgtggctgccagaaccgagtccttgtcctgagccctgacacgctgcagctggagcacatgttttacgtgggtcaggattcaagccgctgcgtggcttgcatggtggactccagcctgggtgtgtgggtgacattgaaaggtagtgcccacgtgtgtctctaccatccagacacctttgagcagctggcagaagtagacgtcactcctcccgtgcacaggatgctggcaggctcggatgccatcatccggcagcacaaggctgcctgtctgcgaatcacagcgctgctggtgtgtgaggagctgctgtgggtgggcaccagtgctggtgtcgtcctcaccatgcccacttcgcccggtactgtcagctgcccacgggcaccactcagtcccacaggcctcggccagggacacaccggccacgtccgcttcttggctgcagtccagctgccagatggcttcaacctgctctgcccaaccccaccacctcccccagacacaggccccgagaagctgccatcactggagcaccgggactccccttggcaccgaggccccgcccctgccaggcctaaaatgctggttatcagtggaggtgatggctatgaggacttccgactcagcagtgggggcggcagcagcagtgagactgtgggtcgagacgacagcacaaaccacctcctcctgtggagggtgtgaccctgtctgccgtggcccaggactcgcccgcccacctgccttcagcctgcttgcctctccctagcccacacgcagactttgaccaggagtatccagccaggggcacacatgtgcctgcgtgggctctgccttgtcttcgcggaagcattcctgatggaacacccactggccagccaggccatggcttctcccgaccctctggctgccccggtgcttccagtcatgatcgggtgggggacatgtgggctgaccaggacctctgaccctggagcttctaccaaagacacagctgggtctggaccccacggggctggggagggccatgtgcaatatttggagggttttctggagggcagcaggaaggctggggaattccccatgtacagtatttatgtttctttttagatgtgtaccttcccaagcacttatttatgcagtgacctggtcacctggggtgggggtgatttgaggaaatgacatgaggaaaagaaacctattcctgccctggggaccaccctgggactctaaccaagccttcctggagggacccatgcgcccctgagccccattccattcatacagacacacacgtacgcacactgcatgtccaaggccctaaacattgcccgttgacataaactttccagggccccagcctgatggggctgccctcagtcctctagatcaagatgctgactattagggggcagtgattgccatctggggacctgtcaggctttgtcatttcccagtttgttggtggtgcctttagtggttccctaatttgggaacactgatggggccttggacagggctttctctcaggtaggagaaatgggcccatgatctcctcacagtcgcccccagtccttggccctgcttccctgtgtctcatgcactggcacatatggtcaccttggagggcagacctaggagcccctctgaccactgaatccgtctccacaccccttctgccaagggaagccccttcaggaaggaccccccaaagctgaggggctgaatgtagccttttcaacagagaaggctcccacttgagagcagcctctacctgaccccctggaccacagagagccactctgaccctcagccccctcgcttcttcagctaaaactccaaaggtttggtttcagatggggtttgttttgttctgtttggttttggttttgtttggggtgggtgggtcattgcggtcttagattatgtttctcttgctaccaaacagtcatgtattaactctctttggatgatgaagtttaaagagtcaataaatagaaacaccagatga

SEQ ID NO: 57297 - DNA, 8244 bp, Homo sapiens
  misc_feature (236)..(237): n is a, c, g, or t
  misc_feature (2611)..(2611): n is a, c, g, or t
cgtcctctttgtgttcttttactgtttgtatctgctctaatgggctcccttcttccaatctcgtttttttcgctctttcccccgttcagtgcacggcccccttttgggagccccccccctgcttccaagttttccacaaagggcggacggcacaggctgcagcgaccaagattgagaccactggtccccagcggtcccgttccctgtcgctccaacccgcggggttggccttgggnncgccttagctggagggcccccgggtgagacgttcggccgtgccacagaacttgacccggcagagaacctttgctccgtctcgcgtcctcttcccacactccgtgcgctgctttcggcgtgggccctgcgctcctagggagtggggggccagggggggttgccccggctgccccgaggccaagcccccccccgggtgagttacgccactatggcggacggggcaccccggccccagctttaccgcagcgtctcgttcaagctgctggagcgctggagcggcggccccgggctgagggaggaggacacggacacccccggcttgaggcgacgcgcctcgtgccggccgaccacggctgcccggggccagccctctcggcgcgtgtccaagctggcgtctgggcccctggccgcccccgcgcagccgcgcccgctccgcagcctctcgccgtcggttcgccagctctcccggcgcttcgacgcgccgcgtctggacgacggctccgctgggacccgagacggaggcgtcttacccgcggccgcggaagaagcggccgagggcccagcgcgaggagcctggcccagcgtcaccgagatgcgcaagctcttcggcggtcctggctccaggaggcccagcgccgactctgaatccccaggaacgcccagccccgacggtgccgcgtgggagcctccggctcgggagtcgcggcagccaccgacgccaccccctcggacatgcttccccctggcgggtctgcgttcggcgcggcccctgaccgggccggagaccgaagggaggctgcgccggccgcagcagcaacaggagcgggcgcagcgtccagcggatggtttacattcttggcatatcttctcccaaccgcaggccggggcccgggcctcctgctcctcctcctccatcgccgcctcctatcctgtcagccgcagtcgtgctgccagctccagcgaggaggaagaggagggcccgccgcagctgcctggagcccagagtccggcctaccacggcggccactcctcgggcagtgacgacgaccgagacggtgagggcggccaccgctggggagggaggcccgggctcaggcctggaagctccctattggatcaggactgcaggcctgacagtgatgggttaaatctaagcagcatgaactcagcaggggtttctgggagccctgagcccccaacatctccaagagcccctagagaagaaggactccgggagtggggtagtggctctccgccctgcgtcccaggtccccaggagggacttcggcctatgtctgactctgtgggaggagctttccgtgtggccaaggtgagctttccctcgtacctggccagccccgcaggctcccgcggtagcagccgttattccagcacggagaccctcaaggacgacgacctatggtctagtaggggttctgggggctggggcgtgtaccgctcccctagctttggagctggggaagggctcctgcggtcccaggctcgaacccgtgccaaaggacctggaggcacctctagggcattgagggatggaggatttgagcctgaaaagagtcgacagcggaagtccctgtcaaatccagatatcgcctcagagaccctgacgcttctcagtttcctgcgctcagacctttcagagctgagggtccgaaaacctggtgggagctccggggaccgtggaagcaaccccctagatggcagagactcaccatccgcaggtggccctgtggggcaacttgaacccatacccatcccagccccagcatcacctggcacgcgccccacactcaaggacttgacagccactctgcggagagcaaagtcattcacctgctctgagaagcccatggcccgccgcctgccccgcaccagtgctctgaagtccagctcctccgagctcctgctcacaggccctggtgccgaggaggatccgctgcccctcatcgtccaggaccaatatgtgcaggaggcccgccaggtttttgagaagatccagcgcatgggtgcccaacaagatgatggaagcgatgccccccctggaagccctgactgggcaggggatgtgacccgagggcagcggtcccaggaggagctctcaggccctgagtccagtctgacagatgaaggcattggggcagaccctgagcctcctgttgcagcattttgcggcctgggtaccacagggatgtggcgacctctttcctcatcctcggcccagacgaaccaccatggccctgggactgaggacagtctgggcgggtgggccctggtgtcgcctgagacccctcccacaccaggtgccctccgccgacgacgcaaagtcccaccttcaggttctggtgggagcgaattnagcaatggggaggcaggggaggcctacaggtccctgagtgacccaattcctcagcgccaccgggctgccacctctgaagagcctactgggttctctgtggacagcaacctcctgggctcactgagccccaagacagggctccctgccacctcagccatggatgagggcttgaccagtggtcacagtgactggtctgtgggcagtgaagagagcaagggatatcaggaggttattcagagcatagttcaggggcctggcaccctggggcgtgtggtggacgacaggattgctggcaaagcccccaagaagaaatccctgagtgaccccagccgccgtggggagctggctgggcctggattcgagggccctggaggggagcccatccgagaagttgagcccatgctgcctccatccagcagcgagcccatccttgtagagcagcgggcagagccagaagaacctggtgccaccaggagccgggcacagtctgaaagggccctacctgaggctctgcctccccctgccactgcccaccgaaactttcaccttgaccccaagctggctgacattctgtccccgaggctaatccgccgaggctccaagaagcgcccagctcggagtagtcaccaggagcttcggagagacgagggcagtcaggaccagactggcagcctgtctcgggcccggccctcctccagacacgttcgccatgccagtgtgcccgccacatttatgcctattgtggtgcctgagccaccaacttctgttggtccccctgtggctgtgccagaacccataggcttccctacccgagcccatcccacgttgcaggcaccatcgctcgaggacgtcaccaagcagtacatgctgaacctgcactccggtgaggtccctgccccagtgccagtggacatgccctgcttgcctctggctgcaccgccctctgctgaggccaagccccctgaggcagctcggcctgcagatgagcctacccctgccagcaagtgctgcagcaagccacaggtggacatgcggaagcacgtggccatgaccctgctggacacagagcagtcgtatgtggagtcgctgcgcaccctgatgcagggctacatgcagccgctgaagcagccagagaactccgtgctctgtgacccttcactggtggacgagatcttcgaccagatccccgagctcctggagcaccacgagcaattcctggagcaggttcggcactgcatgcagacctggcatgcccagcagaaggtgggagccctgctcgtccagtcgttctccaaggatgtcctagtaaacatctattctgcctatatcgataacttcctcaatgcaaaggatgctgtgcgtgtggccaaggaggcgaggcctgcctttctcaagttcctagagcaaagcatgcgtgagaacaaggagaagcaggcgctgtctgacctcatgatcaagcctgtgcagcggatcccacgctacgagcttctggtgaaggacctcctgaagcatacacctgaggaccacccggaccatccactcctgctggaggcgcagcggaacatcaagcaggtggctgagcgcatcaacaagggtgtgcggagtgccgaggaggcggagcgccatgcccgtgtgctgcaggagatagaggctcacatcgagggcatggaggatctccaggcccctctgcggcggttcctgagacaggagatggtcattgaagtgaaggcgatcggtggcaagaaggaccggtctctcttcctgttcacggacctcatcgtctgcaccactctgaagcgaaagtcaggctccctgcggcgcagctccatgagcctgtacacggcagccagtgtcattgacacagccagcaagtacaagatgctgtggaagctgccgctggaagacgcagacatcatcaaaggggcatcccaagccaccaatcgggagaacatccagaaggccatcagccgccttgatgaggacctcaccaccctgggccaaatgagcaagctctctgagagccttggtttcccccaccagagcctggacgatgcactgcgggacctctcagctgccatgcaccgggacctgtcggagaagcaggcgctgtgctacgcgctttccttcccgccaaccaagctggagctgtgcgccactcggcccgagggcaccgactcctacatttttgagttccctcaccctgacgcccgccttggttttgaacaggccttcgatgaggccaagaggaagctggcatccagcaaaagctgtctagaccctgagttcctgaaggccatccccatcatgaaaacccgcagtggcatgcagttctcctgtgcggctcccaccctgaacagctgcccggagccctcgcctgaggtatgggtctgcaacagcgacggctacgtgggccaggtgtgcctgctgagcctgcgcgccgagccggacgtggaggcctgcatcgccgtctgttccgcccgcatcctctgcatcggggcggtgcccgggctgcagcctcgctgccaccgggagcctcctccgtcgctgaggagtcctccagagacggcaccggagcccgccgggccggagctggacgtcgaggccgctgcagacgaggaagccgcgacgctcgcggagccggggccgcagccctgccttcacatctccattgcaggctcgggcttggagatgacgccgggcctcggcgagggtgacccccgcccagagctggtgccctttgacagtgactctgacgatgagtcttcgcccagcccctcggggacgctgcagagccaggccagccggtccaccatctcctccagctttggcaatgaggagaccccgagttccaaggaggccacggcagagaccaccagctcagaggaggagcaggagccaggcttcctgccactgtctggctcctttgggcctggtggtccctgcggcaccagcccaatggatgggagagcccttcgccgctccagccacggctccttcacccggggcagccttgaggacctgctgagtgtcgaccctgaggcctaccagagctccgtgtggctgggcactgaggatggctgtgtccacgtgtaccagtcctccgacagcatccgtgaccgcaggaacagcatgaagctccagcatgcggcctctgtgacctgcatcttgtatctgaataaccaggtgtttgtgtctctggccaatggagagcttgtggtctaccaaagggaagcaggccatttctgggacccccagaacttcaaatcagtgaccttgggcacccaggggagccccatcaccaagatggtatctgtgggtgggcggctgtggtgtggctgccagaaccgagtccttgtcctgagccctgacacgctgcagctggagcacatgttttacgtgggtcaggattcaagccgctgcgtggcttgcatggtggactccagcctgggtgtgtgggtgacattgaaaggtagtgcccacgtgtgtctctaccatccagacacctttgagcagctggcagaagtagacgtcactcctcccgtgcacaggatgctggcaggctcggatgccatcatccggcagcacaaggctgcctgtctgcgaatcacagcgctgctggtgtgtgaggagctgctgtgggtgggcaccagtgctggtgtcgtcctcaccatgcccacttcgcccggtactgtcagctgcccacgggcaccactcagtcccacaggcctcggccagggacacaccggccacgtccgcttcttggctgcagtccagctgccagatggcttcaacctgctctgcccaaccccaccacctcccccagacacaggccccgagaagctgccatcactggagcaccgggactccccttggcaccgaggccccgcccctgccaggcctaaaatgctggttatcagtggaggtgatggctatgaggacttccgactcagcagtgggggcggcagcagcagtgagactgtgggtcgagacgacagcacaaaccacctcctcctgtggagggtgtgaccctgtctgccgtggcccaggactcgcccgcccacctgccttcagcctgcttgcctctccctagcccacacgcagactttgaccaggagtatccagccaggggcacacatgtgcctgcgtgggctctgccttgtcttcgcggaagcattcctgatggaacacccactggccagccaggccatggcttctcccgaccctctggctgccccggtgcttccagtcatgatcgggtgggggacatgtgggctgaccaggacctctgaccctggagcttctaccaaagacacagctgggtctggaccccacggggctggggagggccatgtgcaatatttggagggttttctggagggcagcaggaaggctggggaattccccatgtacagtatttatgtttctttttagatgtgtaccttcccaagcacttatttatgcagtgacctggtcacctggggtgggggtgatttgaggaaatgacatgaggaaaagaaacctattcctgccctggggaccaccctgggactctaaccaagccttcctggagggacccatgcgcccctgagccccattccattcatacagacacacacgtacgcacactgcatgtccaaggccctaaacattgcccgttgacataaactttccagggccccagcctgatggggctgccctcagtcctctagatcaagatgctgactattagggggcagtgattgccatctggggacctgtcaggctttgtcatttcccagtttgttggtggtgcctttagtggttccctaatttgggaacactgatggggccttggacagggctttctctcaggtaggagaaatgggcccatgatctcctcacagtcgcccccagtccttggccctgcttccctgtgtctcatgcactggcacatatggtcaccttggagggcagacctaggagcccctctgaccactgaatccgtctccacaccccttctgccaagggaagccccttcaggaaggaccccccaaagctgaggggctgaatgtagccttttcaacagagaaggctcccacttgagagcagcctctacctgaccccctggaccacagagagccactctgaccctcagccccctcgcttcttcagctaaaactccaaaggtttggtttcagatggggtttgttttgttctgtttggttttggttttgtttggggtgggtgggtcattgcggtcttagattatgtttctcttgctaccaaacagtcatgtattaactctctttggatgatgaagtttaaagagtcaataaatagaaacaccagatgactgcattggtggccacagtggcctcctgtcagcaacctcagggctcagtctccctggccacatgggccttccgacgtccacacacttgggaagaagggaggccttggagacccagaagagtgctggacggcgaggttgccacgatttgctgtgttacctgggcaggtggctgggctgcagtttcctcatcaggaaaataaaggggttgtaccagttcagtgctttgtaaccagggttacatggtagaatcccttgcagatgacatgtaaatgcagaaacatgattcgtaacttatttacgt

SEQ ID NO: 57298 - DNA, 1269 bp, Homo sapiens
caccttatttataagagttgtgctagccccacacgcagactttgaccaggagtatccagccaggggcacacatgtgcctgcgtgggctctgccttgtcttcgcggaagcattcctgatggaacacccactggccagccaggccatggcttctcccgaccctctggctgccccggtgcttccagtcatgatcgggtgggggacatgtgggctgaccaggacctctgaccctggagcttctaccaaagacacagctgggtctggaccccacggggctggggagggccatgtgcaatatttggagggttttctggagggcagcaggaaggctggggaattccccatgtacagtatttatgtttctttttagatgtgtaccttcccaagcacttatttatgcagtgacctggtcacctggggtgggggtgatttgaggaaatgacatgaggaaaagaaacctattcctgccctggggaccaccctgggactctaaccaagccttcctggagggacccatgcgcccctgagccccattccattcatacagacacacacgtacgcacactgcatgtccaaggccctaaacattgcccgttgacataaactttccagggccccagcctgatggggctgccctcagtcctctagatcaagatgctgactattagggggcagtgattgccatctggggacctgtcaggctttgtcatttcccagtttgttggtggtgcctttagtggttccctaatttgggaacactgatggggccttggacagggctttctctcaggtaggagaaatgggcccatgatctcctcacagtcgcccccagtccttggccctgcttccctgtgtctcatgcactggcacatatggtcaccttggagggcagacctaggagcccctctgaccactgaatccgtctccacaccccttctgccaagggaagccccttcaggaaggaccccccaaagctgaggggctgaatgtagccttttcaacagagaaggctcccacttgagagcagcctctacctgaccccctggaccacagagagccactctgaccctcagccccctcgcttcttcagctaaaactccaaaggtttggtttcagatggggtttgttttgttctgtttggttttggttttgtttggggtgggtgggtcattgcggtcttagattatgtttctcttgctaccaaacagtcatgtattaactctctttggatgatgaagtttaaagagtcaataaatagaaacaccagatga

SEQ ID NO: 57299 - DNA, 6510 bp, Homo sapiens
  misc_feature (236)..(237): n is a, c, g, or t
  misc_feature (2611)..(2611): n is a, c, g, or t
cgtcctctttgtgttcttttactgtttgtatctgctctaatgggctcccttcttccaatctcgtttttttcgctctttcccccgttcagtgcacggcccccttttgggagccccccccctgcttccaagttttccacaaagggcggacggcacaggctgcagcgaccaagattgagaccactggtccccagcggtcccgttccctgtcgctccaacccgcggggttggccttgggnncgccttagctggagggcccccgggtgagacgttcggccgtgccacagaacttgacccggcagagaacctttgctccgtctcgcgtcctcttcccacactccgtgcgctgctttcggcgtgggccctgcgctcctagggagtggggggccagggggggttgccccggctgccccgaggccaagcccccccccgggtgagttacgccactatggcggacggggcaccccggccccagctttaccgcagcgtctcgttcaagctgctggagcgctggagcggcggccccgggctgagggaggaggacacggacacccccggcttgaggcgacgcgcctcgtgccggccgaccacggctgcccggggccagccctctcggcgcgtgtccaagctggcgtctgggcccctggccgcccccgcgcagccgcgcccgctccgcagcctctcgccgtcggttcgccagctctcccggcgcttcgacgcgccgcgtctggacgacggctccgctgggacccgagacggaggcgtcttacccgcggccgcggaagaagcggccgagggcccagcgcgaggagcctggcccagcgtcaccgagatgcgcaagctcttcggcggtcctggctccaggaggcccagcgccgactctgaatccccaggaacgcccagccccgacggtgccgcgtgggagcctccggctcgggagtcgcggcagccaccgacgccaccccctcggacatgcttccccctggcgggtctgcgttcggcgcggcccctgaccgggccggagaccgaagggaggctgcgccggccgcagcagcaacaggagcgggcgcagcgtccagcggatggtttacattcttggcatatcttctcccaaccgcaggccggggcccgggcctcctgctcctcctcctccatcgccgcctcctatcctgtcagccgcagtcgtgctgccagctccagcgaggaggaagaggagggcccgccgcagctgcctggagcccagagtccggcctaccacggcggccactcctcgggcagtgacgacgaccgagacggtgagggcggccaccgctggggagggaggcccgggctcaggcctggaagctccctattggatcaggactgcaggcctgacagtgatgggttaaatctaagcagcatgaactcagcaggggtttctgggagccctgagcccccaacatctccaagagcccctagagaagaaggactccgggagtggggtagtggctctccgccctgcgtcccaggtccccaggagggacttcggcctatgtctgactctgtgggaggagctttccgtgtggccaaggtgagctttccctcgtacctggccagccccgcaggctcccgcggtagcagccgttattccagcacggagaccctcaaggacgacgacctatggtctagtaggggttctgggggctggggcgtgtaccgctcccctagctttggagctggggaagggctcctgcggtcccaggctcgaacccgtgccaaaggacctggaggcacctctagggcattgagggatggaggatttgagcctgaaaagagtcgacagcggaagtccctgtcaaatccagatatcgcctcagagaccctgacgcttctcagtttcctgcgctcagacctttcagagctgagggtccgaaaacctggtgggagctccggggaccgtggaagcaaccccctagatggcagagactcaccatccgcaggtggccctgtggggcaacttgaacccatacccatcccagccccagcatcacctggcacgcgccccacactcaaggacttgacagccactctgcggagagcaaagtcattcacctgctctgagaagcccatggcccgccgcctgccccgcaccagtgctctgaagtccagctcctccgagctcctgctcacaggccctggtgccgaggaggatccgctgcccctcatcgtccaggaccaatatgtgcaggaggcccgccaggtttttgagaagatccagcgcatgggtgcccaacaagatgatggaagcgatgccccccctggaagccctgactgggcaggggatgtgacccgagggcagcggtcccaggaggagctctcaggccctgagtccagtctgacagatgaaggcattggggcagaccctgagcctcctgttgcagcattttgcggcctgggtaccacagggatgtggcgacctctttcctcatcctcggcccagacgaaccaccatggccctgggactgaggacagtctgggcgggtgggccctggtgtcgcctgagacccctcccacaccaggtgccctccgccgacgacgcaaagtcccaccttcaggttctggtgggagcgaattnagcaatggggaggcaggggaggcctacaggtccctgagtgacccaattcctcagcgccaccgggctgccacctctgaagagcctactgggttctctgtggacagcaacctcctgggctcactgagccccaagacagggctccctgccacctcagccatggatgagggcttgaccagtggtcacagtgactggtctgtgggcagtgaagagagcaagggatatcaggaggttattcagagcatagttcaggggcctggcaccctggggcgtgtggtggacgacaggattgctggcaaagcccccaagaagaaatccctgagtgaccccagccgccgtggggagctggctgggcctggattcgagggccctggaggggagcccatccgagaagttgagcccatgctgcctccatccagcagcgagcccatccttgtagagcagcgggcagagccagaagaacctggtgccaccaggagccgggcacagtctgaaagggccctacctgaggctctgcctccccctgccactgcccaccgaaactttcaccttgaccccaagctggctgacattctgtccccgaggctaatccgccgaggctccaagaagcgcccagctcggagtagtcaccaggagcttcggagagacgagggcagtcaggaccagactggcagcctgtctcgggcccggccctcctccagacacgttcgccatgccagtgtgcccgccacatttatgcctattgtggtgcctgagccaccaacttctgttggtccccctgtggctgtgccagaacccataggcttccctacccgagcccatcccacgttgcaggcaccatcgctcgaggacgtcaccaagcagtacatgctgaacctgcactccggtgaggtccctgccccagtgccagtggacatgccctgcttgcctctggctgcaccgccctctgctgaggccaagccccctgaggcagctcggcctgcagatgagcctacccctgccagcaagtgctgcagcaagccacaggtggacatgcggaagcacgtggccatgaccctgctggacacagagcagtcgtatgtggagtcgctgcgcaccctgatgcagggctacatgcagccgctgaagcagccagagaactccgtgctctgtgacccttcactggtggacgagatcttcgaccagatccccgagctcctggagcaccacgagcaattcctggagcaggttcggcactgcatgcagacctggcatgcccagcagaaggtgggagccctgctcgtccagtcgttctccaaggatgtcctagtaaacatctattctgcctatatcgataacttcctcaatgcaaaggatgctgtgcgtgtggccaaggaggcgaggcctgcctttctcaagttcctagagcaaagcatgcgtgagaacaaggagaagcaggcgctgtctgacctcatgatcaagcctgtgcagcggatcccacgctacgagcttctggtgaaggacctcctgaagcatacacctgaggaccacccggaccatccactcctgctggaggcgcagcggaacatcaagcaggtggctgagcgcatcaacaagggtgtgcggagtgccgaggaggcggagcgccatgcccgtgtgctgcaggagatagaggctcacatcgagggcatggaggatctccaggcccctctgcggcggttcctgagacaggagatggtcattgaagtgaaggcgatcggtggcaagaaggaccggtctctcttcctgttcacggacctcatcgtctgcaccactctgaagcgaaagtcaggctccctgcggcgcagctccatgagcctgtacacggcagccagtgtcattgacacagccagcaagtacaagatgctgtggaagctgccgctggaagacgcagacatcatcaaaggggcatcccaagccaccaatcgggagaacatccagaaggccatcagccgccttgatgaggacctcaccaccctgggccaaatgagcaagctctctgagagccttggtttcccccaccagagcctggacgatgcactgcgggacctctcagctgccatgcaccgggacctgtcggagaagcaggcgctgtgctacgcgctttccttcccgccaaccaagctggagctgtgcgccactcggcccgagggcaccgactcctacatttttgagttccctcaccctgacgcccgccttggttttgaacaggccttcgatgaggccaagaggaagctggcatccagcaaaagctgtctagaccctgagttcctgaaggccatccccatcatgaaaacccgcagtggcatgcagttctcctgtgcggctcccaccctgaacagctgcccggagccctcgcctgaggtatgggtctgcaacagcgacggctacgtgggccaggtgtgcctgctgagcctgcgcgccgagccggacgtggaggcctgcatcgccgtctgttccgcccgcatcctctgcatcggggcggtgcccgggctgcagcctcgctgccaccgggagcctcctccgtcgctgaggagtcctccagagacggcaccggagcccgccgggccggagctggacgtcgaggccgctgcagacgaggaagccgcgacgctcgcggagccggggccgcagccctgccttcacatctccattgcaggctcgggcttggagatgacgccgggcctcggcgagggtgacccccgcccagagctggtgccctttgacagtgactctgacgatgagtcttcgcccagcccctcggggacgctgcagagccaggccagccggtccaccatctcctccagctttggcaatgaggagaccccgagttccaaggaggccacggcagagaccaccagctcagaggaggagcaggagccaggcttcctgccactgtctggctcctttgggcctggtggtccctgcggcaccagcccaatggatgggagagcccttcgccgctccagccacggctccttcacccggggcagccttgaggacctgctgagtgtcgaccctgaggcctaccagagctccgtgtggctgggcactgaggatggctgtgtccacgtgtaccagtcctccgacagcatccgtgaccgcaggaacagcatgaagctccagcatgcggcctctgtgacctgcatcttgtatctgaataaccaggtgtttgtgtctctggccaatggagagcttgtggtctaccaaagggaagcaggccatttctgggacccccagaacttcaaatcagtgaccttgggcacccaggggagccccatcaccaagatggtatctgtgggtgggcggctgtggtgtggctgccagaaccgagtccttgtcctgagccctgacacgctgcagctggaggtagcagggggtgggggaatggaattggtgccatgggatgagctaggtccgtgtgacagggagatggagaccatggtaggggcataagcagcatccagcagagggctagggccttcctctgaccacagagtgacgctggccagtccctgtcctccttcgatcctcatttcttctgtagctgatgaggaatacagtaagtgtcccatatacattaggaatcttattcatcctcctgcccaccctatctctcaactcaggttttagggtcctttggggataggacaagagtcctttctgatgtcaacatccattagcattagactctggcatttattgctgcacatgtcacttgcacacatgtcagaagtatccaggggcaacgggttcccttaatttccctcacttattccattgttggctgggcaggagtccaaagccctgggttcaggccccagctctgtgactgacttgctgtgtgacctttcccgttaggagctaatcggacgagctcgaat

SEQ ID NO: 57300 - DNA, 768 bp, Homo sapiens
agcctgcgctgccgcagcctgcgccatttccgatgccaggcaccctcaaggcacagaggctggggctcatgttgggggcacttggcctctccaggcctcgaaggcttctcctgggctgacgcgagctggggaacgggagggacggacgtgggagcgagaacgtcacactggaggcagctggtggcacgatgggggacagagtgaaaggtagcaagtcaagagccttcgtgtcaccatggccacacaccccgatggcttccggcttgagggacccctggctgcagcccacagccctgggccttgcactgtgctctacgaaggccctgtccgtgggctctgcccctttgccccgcgaaattccaacaccatggcggcggctgccctggctgcccccagcctgggcttcgatggggtgattggggtgctcgtggctgataccagcctcacggacatgcacgtggtggatgtagagctgagcggaccccggggccccacgggccgaagctttgctgtgcacacccgcagagagaaccctgccgagccaggcgcggtcaccggctccgccaccgtcacggccttctggcggagcctcctggcctgctgccagctcccctccaggccggggatccatctctgctgagaagcctcctccctcccgagacaagatcatctgcctggcctctcaccaccaccatcccacccctgccctgccccacttccccagggtctcccttctgactcagtaaagatcaccgctgcctccccccg

SEQ ID NO: 57301 - DNA, 853 bp, Homo sapiens
agcctgcgctgccgcagcctgcgccatttccgatgccaggcaccctcaaggcacagaggctggggctcatgttgggggcacttggcctctccaggcctcgaaggcttctcctgggctgacgcgagctggggaacgggagggacggacgtgggagcgagaacgtcacactggaggcagctggtggcacgatgggggacagagtgaaaggtagcaagtcaaggcgccctgatctggttgtggaagtggcccatcccaaaataatccatgaatctggggcacaaatcctgcgccatgccaatctcctgagccttcgtgtcaccatggccacacaccccgatggcttccggcttgagggacccctggctgcagcccacagccctgggccttgcactgtgctctacgaaggccctgtccgtgggctctgcccctttgccccgcgaaattccaacaccatggcggcggctgccctggctgcccccagcctgggcttcgatggggtgattggggtgctcgtggctgataccagcctcacggacatgcacgtggtggatgtagagctgagcggaccccggggccccacgggccgaagctttgctgtgcacacccgcagagagaaccctgccgagccaggcgcggtcaccggctccgccaccgtcacggccttctggcggagcctcctggcctgctgccagctcccctccaggccggggatccatctctgctgagaagcctcctccctcccgagacaagatcatctgcctggcctctcaccaccaccatcccacccctgccctgccccacttccccagggtctcccttctgactcagtaaagatcaccgctgcctccccccg

SEQ ID NO: 57302 - DNA, 703 bp, Homo sapiens
agcctgcgctgccgcagcctgcgccatttccgatgccaggcaccctcaaggcacagaggctggggctcatgttgggggcacttggcctctccaggcctcgaaggcttctcctgggctgacgcgagctggggaacgggagggacggacgtgggagcgagaacgtcacactggaggcagctggtggcacgatgggggacagagtgaaaggtagcaagtcaagcctcacggacatgcacgtggtggatgtagagctgagcggaccccggggccccacgggccgaagctttgctgtgcacacccgcagagagaaccctgccgagccaggcgcggtcaccggctccgccaccgtcacggccttctggcggagcctcctgggtgcggccaggcccctctcccccggccctgggctcctgtgttctgcagagcttgggggtcccgggctctcactagttctgcagttctggttctgtatttgttgacctttctttctttctgacctttatttccttaacctctctccatgactttgaatcctggcactgtagatgtctccatttgtgcccgcctctgatcgagactctctctgtctctgtccacccccagggctctgtcccgctctctccgggtcttcctccaccgcccccctgccctgtcccctcctcccaccactgcctcccccaggcgtctgtctcctcatctctcc

SEQ ID NO: 57303 - DNA, 1003 bp, Homo sapiens
agcctgcgctgccgcagcctgcgccatttccgatgccaggcaccctcaaggcacagaggctggggctcatgttgggggcacttggcctctccaggcctcgaaggcttctcctgggctgacgcgagctggggaacgggagggacggacgtgggagcgagaacgtcacactggaggcagctggtggcacgatgggggacagagtgaaaggtagcaagtcaaggcgccctgatctggttgtggaagtggcccatcccaaaataatccatgaatctggggcacaaatcctgcgccatgccaatctcctggtggggtccccctcagctctaagtgaccagaccacagagcggcagctcttggaggcctcacagcactgggaccacgccgtgtttgtggcccgaggggccctgtggggcgctgaggacatcaggagattggatgcagctgggggcctccggagccttcgtgtcaccatggccacacaccccgatggcttccggcttgagggacccctggctgcagcccacagccctgggccttgcactgtgctctacgaaggccctgtccgtgggctctgcccctttgccccgcgaaattccaacaccatggcggcggctgccctggctgcccccagcctgggcttcgatggggtgattggggtgctcgtggctgataccagcctcacggacatgcacgtggtggatgtagagctgagcggaccccggggccccacgggccgaagctttgctgtgcacacccgcagagagaaccctgccgagccaggcgcggtcaccggctccgccaccgtcacggccttctggcggagcctcctggcctgctgccagctcccctccaggccggggatccatctctgctgagaagcctcctccctcccgagacaagatcatctgcctggcctctcaccaccaccatcccacccctgccctgccccacttccccagggtctcccttctgactcagtaaagatcaccgctgcctccccccg

SEQ ID NO: 57304 - DNA, 1024 bp, Homo sapiens
cgagcagcccagggagccaggccccagacaccgcactcagggccatggccgacaggggcccgtggagggtgggcgtggtgggctatggccgcctcggacagtccctcgtctcccgcctcttggctcagggaccagaacttggcctagaacttgtttttgtctggaatcgtgacccaggacgaatggcagggagcgtgcccccttccctgcagctccagaaccttgctgcccttggggaaaggcgccctgatctggttgtggaagtggcccatcccaaaataatccatgaatctggggcacaaatcctgcgccatgccaatctcctggtggggtccccctcagctctaagtgaccagaccacagagcggcagctcttggaggcctcacagcactgggaccacgccgtgtttgtggcccgaggggccctgtggggcgctgaggacatcaggagattggatgcagctgggggcctccggagccttcgtgtcaccatggccacacaccccgatggcttccggcttgagggacccctggctgcagcccacagccctgggccttgcactgtgctctacgaaggccctgtccgtgggctctgcccctttgccccgcgaaattccaacaccatggcggcggctgccctggctgcccccagcctgggcttcgatggggtgattggggtgctcgtggctgataccagcctcacggacatgcacgtggtggatgtagagctgagcggaccccggggccccacgggccgaagctttgctgtgcacacccgcagagagaaccctgccgagccaggcgcggtcaccggctccgccaccgtcacggccttctggcggagcctcctggcctgctgccagctcccctccaggccggggatccatctctgctgagaagcctcctccctcccgagacaagatcatctgcctggcctctcaccaccaccatcccacccctgccctgccccacttccccagggtctcccttctgactcagtaaagatcaccgctgcctccccccg

SEQ ID NO: 57305 - DNA, 778 bp, Homo sapiens
cgagcagcccagggagccaggccccagacaccgcactcagggccatggccgacaggggcccgtggagggtgggcgtggtgggctatggccgcctcggacagtccctcgtctcccgcctcttggctcagggaccagaacttggcctagaacttgtttttgtctggaatctggcccatcccaaaataatccatgaatctggggcacaaatcctgcgccatgccaatctcctgagccttcgtgtcaccatggccacacaccccgatggcttccggcttgagggacccctggctgcagcccacagccctgggccttgcactgtgctctacgaaggccctgtccgtgggctctgcccctttgccccgcgaaattccaacaccatggcggcggctgccctggctgcccccagcctgggcttcgatggggtgattggggtgctcgtggctgataccagcctcacggacatgcacgtggtggatgtagagctgagcggaccccggggccccacgggccgaagctttgctgtgcacacccgcagagagaaccctgccgagccaggcgcggtcaccggctccgccaccgtcacggccttctggcggagcctcctggcctgctgccagctcccctccaggccggggatccatctctgctgagaagcctcctccctcccgagacaagatcatctgcctggcctctcaccaccaccatcccacccctgccctgccccacttccccagggtctcccttctgactcagtaaagatcaccgctgcctccccccg

SEQ ID NO: 57306 - DNA, 1072 bp, Homo sapiens
agcctgcgctgccgcagcctgcgccatttccgatgccaggcaccctcaaggcacagaggctggggctcatgttgggggcacttggcctctccaggcctcgaaggcttctcctgggctgacgcgagctggggaacgggagggacggacgtgggagcgagaacgtcacactggaggcagctggtggcacgatgggggacagagtgaaaggtagcaagtcaaggcgccctgatctggttgtggaagtggcccatcccaaaataatccatgaatctggggcacaaatcctgcgccatgccaatctcctggtggggtccccctcagctctaagtgaccagaccacagagcggcagctcttggaggcctcacagcactgggaccacgccgtgtttgtggcccgaggggccctgtggggcgctgaggacatcaggagattggatgcagctgggggcctccggagccttcgtgtcaccatggccacacaccccgatggcttccggcttgagggacccctggctgcagcccacagccctgggccttgcactgtgctctacgaaggccctgtccgtgggctctgcccctttgccccgcgaaattccaacaccatggcggcggctgccctggctgcccccagcctgggcttcgatggggtgattggggtgctcgtggctgataccaggtgagcagagctaagcagggtgttgggctgagtccaggctctccagactgactgcccctcttgtcccagcctcacggacatgcacgtggtggatgtagagctgagcggaccccggggccccacgggccgaagctttgctgtgcacacccgcagagagaaccctgccgagccaggcgcggtcaccggctccgccaccgtcacggccttctggcggagcctcctggcctgctgccagctcccctccaggccggggatccatctctgctgagaagcctcctccctcccgagacaagatcatctgcctggcctctcaccaccaccatcccacccctgccctgccccacttccccagggtctcccttctgactcagtaaagatcaccgctgcctccccccg

SEQ ID NO: 57307 - DNA, 378 bp, Homo sapiens
attggcatgaattatcacatgtaatccacgactctataaggaagacaatataatcttcattttacagagggaggaagtgaatagagcttgagggaggtagcctgaggtcacacagccaatggaggagaaggattcaaatccaggcagtctgactctaaactcgccactttccatcactggtctcactactgttctctgctatgatgtgtgccaggatattcccctacccctaaggaggtcctggtgccccaagaagaaaatgtccaacatcctatcaatgcctaagtatattcctgaggaaccaagtcaataggaacagaatacgcccccaggaagcctttggttctggtgtgaaatcctcctgagcaatgtgcactc

SEQ ID NO: 57308 - DNA, 3287 bp, Homo sapiens
tcctcctcgccgcccgcagcgtccccgggcgggcgcgggccgcgatggcagcggcggagcagggctgagcccgctgcccgcccgcagttcccggccccgctggccccagtcatggcgaagcagtacgatgtgctgttccggctgctgctgatcggggactccggggtgggcaagacctgcctgctgtgccgcttcaccgacaacgagttccactcctcgcacatctccaccatcggtgttgactttaagatgaagaccatagaggtagacggcatcaaagtgcggatacagatctgggacactgcagggcaggagagataccagaccatcacaaagcagtactatcggcgggcccaggggatatttttggtctatgacattagcagcgagcgctcttaccagcacatcatgaagtgggtcagtgacgtggatgagtacgcaccagaaggcgtccagaagatccttatggggaataaggctgatgaggagcagaaacggcaggtgggaagagagcaagggcagcagctggcgaaggagtatggcatggacttctatgaaacaagtgcctgcaccaacctcaacattaaagagtcattcacgcgtctgacagagctggtgctgcaggcccataggaaggagctggaaggcctccggatgcgtgccagcaatgagttggcactggcagagctggaggaggaggagggcaaacccgagggcccagcgaactcttcgaaaacctgctggtgctgagtcctgtgtggggcaccccacacgacacccctcttccctcaggaggcccgtgggcagacaggggagccggggctttgccctgctgctgtcctctcgtgtgatgaccctattgagtatcagtagccactactccccctgcctggccctgagagcggctctgctgtcatctcaagcagcccctgtccccagcccgtccaccctggagtggtcttcttcagcctgtttccccagccacaggcctgctacgacccccacgatgtgccgcaagcactgtctcaccatcccgcacccaccagacaacagccagggctggagtccaggccactttcagctgctcctttctccgtgcatcgtgtctcttctctgctttttctctcttcccccacttctctttctctgacccctcccctccggtgcgtttcgtatcaaagctcctcaaaccccgtcccccgtgtgtcctgctgtgtgcagctcgctctttccttccttcctaagctatccaaggggatggacccaggctcgtggggaggttccacccttggatccaggaagaaccctccaccctgcctcgtgggtgggccaaaggctacagggtgcttcttcctcttcccccacccccactgtccctcatgtgccatgggcctgcctccccagtgacctgcgaaagtggagcatcgaggtaggagggaaacggcaaccggggagtcctcgagcctggggctgccctacctctacccattccccgaccagagctttgcccttgcttggctgcccgcctgcctctttggggaactgagctcagaggcaggtgcttcagagaaggaaacaaaatgaggggtggcagggataaaaagtcacctccattctctacctcccatgcagcatgaacacaatttctctccacctggctcccaaatttaaagatgtggaccaaggcctgtgggtactccaggggcaaggagagccctggggtcagtgacactgtcaggccaaccatgcactccacaaaggggagcatttggaaatgaaggactagctcctatgtatcaggttaagagcaagggagagctggccagggacagcagtttgcacagcagaggggaatgtagcaacagcagggcctcctaggccccatcttccatttcttaggtaagaagagcatttcctcagactcccaggcggaggactgagcctagccttcagcaaccaaggttctcctgggacccaaagtttatgggagaagggcaaagacttcatgggaagagagaaggaaggccctgggtagaaacgcttggtgctgttctctttggcctttaagacaaagcgctcatcttgccctctacctcctgataggcttgagggtttgccaaccacactgtggctacaggtggagggaagaggactccttcctccagagtgctatgttcaggaagtttctttaaccccatatggcccaagagtagctcgtaggaggccctttaaagacggaacaagtaatttaccagttctactggggttcctgcccaccgtcccaaggtgggcgaggcctaggaagagggtcattcttaagccacacattagctgcactgcgtggctgcagccaaaacaaagaactgggtgttgagtattcatcaactaagaaccaaaatccagggcactcatatgtgaaggataagaacctcacttccttactcctccaaaaagaagtggggaaagaaccatcaaacctttcctcctgacttaccaaaccaggaaaacagcaggagagggtggctcaggacttagggacagggtatagcttagatggtggaaagcaaaggagagcaggaagttgtaaatcactggctaatgagaaaaggagacagctaactctaggatgaagctgtgactaggctggagttgcttccttgaagatgggactccttgggtatcaagacctatgccacatcacactggggctagggaagtaggtgatgccagccctcaagtctgtcttcagccagggacttgagaagttatattgggcagtggctccaatctgtggaccagtatttcagctttccctgaagatcaggcagggtgccattcattgtctttctctcctagccccctcaggaaagaaggactatatttgtactgtaccctaggggttctggaagggaaaacatggaatcaggattctatagactgataggccctatccacaagggccatgactgggaaaaggtatgggagcagaaggagaattgggattttagggtgcagctacgctcaccctaaacttttggtggcctggggcatgtcttgaggcccagactgttaagcaggctctgctggcctgtttactcgtcaccacctctgcacctgctgtcttgagactccatccagccccaggcacgccacctgctcctgagcctccactatctccctgtgacgggtgaacttcgtgtactgtgtctcgggtccatatatgaattgtgagcagggttcatctattttaaacacagatgtttacaaaataaagattatttcaaacc

SEQ ID NO: 57309 - DNA, 2801 bp, Homo sapiens
aggtgggaggaggagccataagatggaccttatccctcaggccgctgcagggttgccaggggagaggaggagacactggactaacctgtgccctttggtttccagtcattcacgcgtctgacagagctggtgctgcaggcccataggaaggagctggaaggcctccggatgcgtgccagcaatgagttggcactggcagagctggaggaggaggagggcaaacccgagggcccagcgaactcttcgaaaacctgctggtgctgagtcctgtgtggggcaccccacacgacacccctcttccctcaggaggcccgtgggcagacaggggagccggggctttgccctgctgctgtcctctcgtgtgatgaccctattgagtatcagtagccactactccccctgcctggccctgagagcggctctgctgtcatctcaagcagcccctgtccccagcccgtccaccctggagtggtcttcttcagcctgtttccccagccacaggcctgctacgacccccacgatgtgccgcaagcactgtctcaccatcccgcacccaccagacaacagccagggctggagtccaggccactttcagctgctcctttctccgtgcatcgtgtctcttctctgctttttctctcttcccccacttctctttctctgacccctcccctccggtgcgtttcgtatcaaagctcctcaaaccccgtcccccgtgtgtcctgctgtgtgcagctcgctctttccttccttcctaagctatccaaggggatggacccaggctcgtggggaggttccacccttggatccaggaagaaccctccaccctgcctcgtgggtgggccaaaggctacagggtgcttcttcctcttcccccacccccactgtccctcatgtgccatgggcctgcctccccagtgacctgcgaaagtggagcatcgaggtaggagggaaacggcaaccggggagtcctcgagcctggggctgccctacctctacccattccccgaccagagctttgcccttgcttggctgcccgcctgcctctttggggaactgagctcagaggcaggtgcttcagagaaggaaacaaaatgaggggtggcagggataaaaagtcacctccattctctacctcccatgcagcatgaacacaatttctctccacctggctcccaaatttaaagatgtggaccaaggcctgtgggtactccaggggcaaggagagccctggggtcagtgacactgtcaggccaaccatgcactccacaaaggggagcatttggaaatgaaggactagctcctatgtatcaggttaagagcaagggagagctggccagggacagcagtttgcacagcagaggggaatgtagcaacagcagggcctcctaggccccatcttccatttcttaggtaagaagagcatttcctcagactcccaggcggaggactgagcctagccttcagcaaccaaggttctcctgggacccaaagtttatgggagaagggcaaagacttcatgggaagagagaaggaaggccctgggtagaaacgcttggtgctgttctctttggcctttaagacaaagcgctcatcttgccctctacctcctgataggcttgagggtttgccaaccacactgtggctacaggtggagggaagaggactccttcctccagagtgctatgttcaggaagtttctttaaccccatatggcccaagagtagctcgtaggaggccctttaaagacggaacaagtaatttaccagttctactggggttcctgcccaccgtcccaaggtgggcgaggcctaggaagagggtcattcttaagccacacattagctgcactgcgtggctgcagccaaaacaaagaactgggtgttgagtattcatcaactaagaaccaaaatccagggcactcatatgtgaaggataagaacctcacttccttactcctccaaaaagaagtggggaaagaaccatcaaacctttcctcctgacttaccaaaccaggaaaacagcaggagagggtggctcaggacttagggacagggtatagcttagatggtggaaagcaaaggagagcaggaagttgtaaatcactggctaatgagaaaaggagacagctaactctaggatgaagctgtgactaggctggagttgcttccttgaagatgggactccttgggtatcaagacctatgccacatcacactggggctagggaagtaggtgatgccagccctcaagtctgtcttcagccagggacttgagaagttatattgggcagtggctccaatctgtggaccagtatttcagctttccctgaagatcaggcagggtgccattcattgtctttctctcctagccccctcaggaaagaaggactatatttgtactgtaccctaggggttctggaagggaaaacatggaatcaggattctatagactgataggccctatccacaagggccatgactgggaaaaggtatgggagcagaaggagaattgggattttagggtgcagctacgctcaccctaaacttttggtggcctggggcatgtcttgaggcccagactgttaagcaggctctgctggcctgtttactcgtcaccacctctgcacctgctgtcttgagactccatccagccccaggcacgccacctgctcctgagcctccactatctccctgtgacgggtgaacttcgtgtactgtgtctcgggtccatatatgaattgtgagcagggttcatctattttaaacacagatgtttacaaaataaagattatttcaaacc

SEQ ID NO: 57310 - DNA, 3637 bp, Homo sapiens
tcctcctcgccgcccgcagcgtccccgggcgggcgcgggccgcgatggcagcggcggagcagggctgagcccgctgcccgcccgcagttcccggccccgctggccccagtcatggcgaagcagtacgatgtgctgttccggctgctgctgatcggggactccggggtgggcaagacctgcctgctgtgccgcttcaccgacaacgagttccactcctcgcacatctccaccatcggtgttgactttaagatgaagaccatagaggtagacggcatcaaagtgcggatacagatctgggacactgcagggcaggagagataccagaccatcacaaagcagtactatcggcgggcccaggggatatttttggtctatgacattagcagcgagcgctcttaccagcacatcatgaagtgggtcagtgacgtggatgagtacgcaccagaaggcgtccagaagatccttatggggaataaggctgatgaggagcagaaacggcaggtgggaagagagcaagggcagcagctggcgaaggagtatggcatggacttctatgaaacaagtgcctgcaccaacctcaacattaaagagtcattcacgcgtctgacagagctggtgctgcaggcccataggaaggagctggaaggcctccggatgcgtgccagcaatgagttggcactggcagagctggaggaggaggagggcaaacccgagggcccagcgaactcttcgaaaacctgctggtgctgagtcctgtgtggggcaccccacacgacacccctcttccctcaggaggcccgtgggcagacaggggagccggggctttgccctgctgctgtcctctcgtgtgatgaccctattgagtatcagtagccactactccccctgcctggccctgagagcggctctgctgtcatctcaagcagcccctgtccccagcccgtccaccctggagtggtcttcttcagcctgtttccccagccacaggcctgctacgacccccacgatgtgccgcaagcactgtctcaccatcccgcacccaccagacaacagccagggctggagtccaggccactttcagctgctcctttctccgtgcatcgtgtctcttctctgctttttctctcttcccccacttctctttctctgacccctcccctccggtgcgtttcgtatcaaagctcctcaaaccccgtcccccgtgtgtcctgctgtgtgcagctcgctctttccttccttcctaagctatccaaggggatggacccaggctcgtggggaggttccacccttggatccaggaagaaccctccaccctgcctcgtgggtgggccaaaggctacagggtgcttcttcctcttcccccacccccactgtccctcatgtgccatgggcctgcctccccagtgacctgcgaaagtggagcatcgaggtaggagggaaacggcaaccggggagtcctcgagcctggggctgccctacctctacccattccccgaccagagctttgcccttgcttggctgcccgcctgcctctttggggaactgagctcagaggcaggtgcttcagagaaggaaacaaaatgaggggtggcagggataaaaagtcacctccattctctacctcccatgcagcatgaacacaatttctctccacctggctcccaaatttaaagatgtggaccaaggcctgtgggtactccaggggcaaggagagccctggggtcagtgacactgtcaggccaaccatgcactccacaaaggggagcatttggaaatgaaggactagctcctatgtatcaggttaagagcaagggagagctggccagggacagcagtttgcacagcagaggggaatgtagcaacagcagggcctcctaggccccatcttccatttcttaggtaagaagagcatttcctcagactcccaggcggaggactgagcctagccttcagcaaccaaggttctcctgggacccaaagtttatgggagaagggcaaagacttcatgggaagagagaaggaaggccctgggtagaaacgcttggtgctgttctctttggcctttaagacaaagcgctcatcttgccctctacctcctgataggcttgagggtttgccaaccacactgtggctacaggtggagggaagaggactccttcctccagagtgctatgttcaggaagtttctttaaccccatatggcccaagagtagctcgtaggaggccctttaaagacggaacaagtaatttaccagttctactggggttcctgcccaccgtcccaaggtgggcgaggcctaggaagagggtcattcttaagccacacattagctgcactgcgtggctgcagccaaaacaaagaactgggtgttgagtattcatcaactaagaaccaaaatccagggcactcatatgtgaaggataagaacctcacttccttactcctccaaaaagaagtggggaaagaaccatcaaacctttcctcctgacttaccaaaccaggaaaacagcaggagagggtggctcaggacttagggacagggtatagcttagatggtggaaagcaaaggagagcaggaagttgtaaatcactggctaatgagaaaaggagacagctaactctaggatgaagctgtgactaggctggagttgcttccttgaagatgggactccttgggtatcaagacctatgccacatcacactggggctagggaagtaggtgatgccagccctcaagtctgtcttcagccagggacttgagaagttatattgggcagtggctccaatctgtggaccagtatttcagctttccctgaagatcaggcagggtgccattcattgtctttctctcctagccccctcaggaaagaaggactatatttgtactgtaccctaggggttctggaagggaaaacatggaatcaggattctatagactgataggccctatccacaagggccatgactgggaaaaggtatgggagcagaaggagaattgggattttagggtgcagctacgctcaccctaaacttttggtggcctggggcatgtcttgaggcccagactgttaagcaggctctgctggcctgtttactcgtcaccacctctgcacctgctgtcttgagactccatccagccccaggcacgccacctgctcctgagcctccactatctccctgtgacgggtgaacttcgtgtactgtgtctcgggtccatatatgaattgtgagcagggttcatctattttaaacacagatgtttacaaaataaagattatttcaaacccggtgtggctgcctggatgagtccttgggggtaggtctcactcagaccctggcagtgatgtgggagggagagaggcagtgctggtagaagcagctccagaagcaaaggcaacagcagtagagtgaccacggaagcggcaaacattgtcttcccttctctaccttccctagtgccacctgcagggaggcccaaagcaaagccccgttgccctgcattgggctggcactgcagaaataagatgaaacacagttatcgagaggatgctgaacatctatgagcaggttttaaagccaagatgagtctcatctgtttgtgtgggtcaggaacgggtcttcctgaaggcatgaggt

SEQ ID NO: 57311 - DNA, 1825 bp, Homo sapiens
cccctctctgctccgcccctctctgctccgcccctctctgctccgcccctctctgctgctccgcctgcctctttggggaactgagctcagaggcaggtgcttcagagaaggaaacaaaatgaggggtggcagggataaaaagtcacctccattctctacctcccatgcagcatgaacacaatttctctccacctggctcccaaatttaaagatgtggaccaaggcctgtgggtactccaggggcaaggagagccctggggtcagtgacactgtcaggccaaccatgcactccacaaaggggagcatttggaaatgaaggactagctcctatgtatcaggttaagagcaagggagagctggccagggacagcagtttgcacagcagaggggaatgtagcaacagcagggcctcctaggccccatcttccatttcttaggtaagaagagcatttcctcagactcccaggcggaggactgagcctagccttcagcaaccaaggttctcctgggacccaaagtttatgggagaagggcaaagacttcatgggaagagagaaggaaggccctgggtagaaacgcttggtgctgttctctttggcctttaagacaaagcgctcatcttgccctctacctcctgataggcttgagggtttgccaaccacactgtggctacaggtggagggaagaggactccttcctccagagtgctatgttcaggaagtttctttaaccccatatggcccaagagtagctcgtaggaggccctttaaagacggaacaagtaatttaccagttctactggggttcctgcccaccgtcccaaggtgggcgaggcctaggaagagggtcattcttaagccacacattagctgcactgcgtggctgcagccaaaacaaagaactgggtgttgagtattcatcaactaagaaccaaaatccagggcactcatatgtgaaggataagaacctcacttccttactcctccaaaaagaagtggggaaagaaccatcaaacctttcctcctgacttaccaaaccaggaaaacagcaggagagggtggctcaggacttagggacagggtatagcttagatggtggaaagcaaaggagagcaggaagttgtaaatcactggctaatgagaaaaggagacagctaactctaggatgaagctgtgactaggctggagttgcttccttgaagatgggactccttgggtatcaagacctatgccacatcacactggggctagggaagtaggtgatgccagccctcaagtctgtcttcagccagggacttgagaagttatattgggcagtggctccaatctgtggaccagtatttcagctttccctgaagatcaggcagggtgccattcattgtctttctctcctagccccctcaggaaagaaggactatatttgtactgtaccctaggggttctggaagggaaaacatggaatcaggattctatagactgataggccctatccacaagggccatgactgggaaaaggtatgggagcagaaggagaattgggattttagggtgcagctacgctcaccctaaacttttggtggcctggggcatgtcttgaggcccagactgttaagcaggctctgctggcctgtttactcgtcaccacctctgcacctgctgtcttgagactccatccagccccaggcacgccacctgctcctgagcctccactatctccctgtgacgggtgaacttcgtgtactgtgtctcgggtccatatatgaattgtgagcagggttcatctattttaaacacagatgtttacaaaataaagattatttcaaacc

SEQ ID NO: 57312 - DNA, 3222 bp, Homo sapiens
tcctcctcgccgcccgcagcgtccccgggcgggcgcgggccgcgatggcagcggcggagcagggctgagcccgctgcccgcccgcagttcccggccccgctggccccagtcatggcgaagcagtacgatgtgctgttccggctgctgctgatcggggactccggggtgggcaagacctgcctgctgtgccgcttcaccgacaacgagttccactcctcgcacatctccaccatcggtgttgactttaagatgaagaccatagaggtagacggcatcaaagtgcggatacagatctgggacactgcagggcaggagagataccagaccatcacaaagcagtactatcggcgggcccaggggatatttttggtctatgacattagcagcgagcgctcttaccagcacatcatgaagtgggtcagtgacgtggatgagtacgcaccagaaggcgtccagaagatccttatggggaataaggctgatgaggagcagaaacggcaggtgggaagagagcaagggcagcagctggcgaaggagtatggcatggacttctatgaaacaagtgcctgcaccaacctcaacattaaagagtcattcacgcgtctgacagagctggtgctgcaggcccataggaaggagctggaaggcctccggatgcgtgccagcaatgagttggcactggcagagctggaggaggaggagggcaaacccgagggcccagcgaactcttcgaaaacctgctggtgctgagtcctgtgtggggcaccccacacgacacccctcttccctcaggaggcccgtgggcagacaggggagccggggctttgccctgctgctgtcctctcgtgtgatgaccctattgagtatcagtagccactactccccctgcctggccctgagagcggctctgctgtcatctcaagcagcccctgtccccagcccgtccaccctggagtggtcttcttcagcctgtttccccagccacaggcctgctacgacccccacgatgtgccgcaagcactgtctcaccatcccgcacccaccagacaacagccagggctggagtccaggccactttcagctgctcctttctccgtgcatcgtgtctcttctctgctttttctctcttcccccacttctctttctctgacccctcccctccggtgcgtttcgtatcaaagctcctcaaaccccgtcccccgtgtgtcctgctgtgtgcagctcgctctttccttccttcctaagctatccaaggggatggacccaggctcgtggggaggttccacccttggatccaggaagaaccctccaccctgcctcgtgggtgggccaaaggctacagggtgcttcttcctcttcccccacccccactgtccctcatgtgccatgggcctgcctccccagtgacctgcgaaagtggagcatcgaggtaggagggaaacggcaaccggggagtcctcgagcctggggctgccctacctctacccattccccgaccagagctttgcccttgcttggctgcccgcctgcctctttggggaactgagctcagaggcaggtgcttcagagaaggaaacaaaatgaggggtggcagggataaaaagtcacctccattctctacctcccatgcagcatgaacacaatttctctccacctggctcccaaatttaaagatgtggaccaaggcctgtgggtactccaggggcaaggagagccctggggtcagtgacactgtcaggccaaccatgcactccacaaaggggagcatttggaaatgaaggactagctcctatgtatcaggttaagagcaagggagagctggccagggacagcagtttgcacagcagaggggaatgtagcaacagcagggcctcctaggccccatcttccatttcttaggtaagaagagcatttcctcagactcccaggcggaggactgagcctagccttcagcaaccaaggttctcctgggacccaaagtttatgggagaagggcaaagacttcatgggaagagagaaggaaggccctgggtagaaacgcttggtgctgttctctttggcctttaagacaaagcgctcatcttgccctctacctcctgataggcttgagggtttgccaaccacactgtggctacaggtggagggaagaggactccttcctccagagtgctatgttcaggaagtttctttaaccccatatggcccaagagtagctcgtaggaggccctttaaagacggaacaagtaatttaccagttctactggggttcctgcccaccgtcccaaggtgggcgaggcctaggaagagggtcattcttaagccacacattagctgcactgcgtggctgcagccaaaacaaagaactgggtgttgagtattcatcaactaagaaccaaaatccagggcactcatatgtgaaggataagaacctcacttccttactcctccaaaaagaagtggggaaagaaccatcaaacctttcctcctgacttaccaaaccaggaaaacagcaggagagggtggctcaggacttagggacagggtatagcttagatggtggaaagcaaaggagagcaggaagttgtaaatcactggctaatgagaaaaggagacagctaactctaggatgaagctgtgactaggctggagttgcttccttgaagatgggactccttgggtatcaagacctatgccacatcacactggggctagggaagtaggtgatgccagccctcaagtctgtcttcagccagggacttgagaagttatattgggcagtggctccaatctgtggaccagtatttcagctttccctgaagatcaggcagggtgccattcattgtctttctctcctagccccctcaggaaagaaggactatatttgtactgtaccctaggggttctggaagggaaaacatggaatcaggattctatagactgataggccctatccacaagggccatgactgggaaaaggtatgggagcagaaggagaattgggattttagggtgcagctacgctcaccctaaacttttggtggcctggggcatgtcttgaggcccagactgttaagcaggctctgctggcctgtttactcgtcaccactatctccctgtgacgggtgaacttcgtgtactgtgtctcgggtccatatatgaattgtgagcagggttcatctattttaaacacagatgtttacaaaataaagattatttcaaacc

SEQ ID NO: 57313 - DNA, 3418 bp, Homo sapiens
tcctcctcgccgcccgcagcgtccccgggcgggcgcgggccgcgatggcagcggcggagcagggctgagcccgctgcccgcccgcagttcccggccccgctggccccagtcatggcgaagcagtacgatgtgctgttccggctgctgctgatcggggactccggggtgggcaagacctgcctgctgtgccgcttcaccgacaacgagttccactcctcgcacatctccaccatcggtgttgactttaagatgaagaccatagaggtagacggcatcaaagtgcggatacagatctgggacactgcagggcaggagagataccagaccatcacaaagcagtactatcggcgggcccaggggatatttttggtctatgacattagcagcgagcgctcttaccagcacatcatgaagtgggtcagtgacgtggatgaggtaggagatgccacctcactgccggggtgtggagagggtgcctcaccggggaaggcaaggcgagggccagatgggaaggcaaatgcttccaggaagctttgccttccacagccctggatgaagacctctggtacgcaccagaaggcgtccagaagatccttatggggaataaggctgatgaggagcagaaacggcaggtgggaagagagcaagggcagcagctggcgaaggagtatggcatggacttctatgaaacaagtgcctgcaccaacctcaacattaaagagtcattcacgcgtctgacagagctggtgctgcaggcccataggaaggagctggaaggcctccggatgcgtgccagcaatgagttggcactggcagagctggaggaggaggagggcaaacccgagggcccagcgaactcttcgaaaacctgctggtgctgagtcctgtgtggggcaccccacacgacacccctcttccctcaggaggcccgtgggcagacaggggagccggggctttgccctgctgctgtcctctcgtgtgatgaccctattgagtatcagtagccactactccccctgcctggccctgagagcggctctgctgtcatctcaagcagcccctgtccccagcccgtccaccctggagtggtcttcttcagcctgtttccccagccacaggcctgctacgacccccacgatgtgccgcaagcactgtctcaccatcccgcacccaccagacaacagccagggctggagtccaggccactttcagctgctcctttctccgtgcatcgtgtctcttctctgctttttctctcttcccccacttctctttctctgacccctcccctccggtgcgtttcgtatcaaagctcctcaaaccccgtcccccgtgtgtcctgctgtgtgcagctcgctctttccttccttcctaagctatccaaggggatggacccaggctcgtggggaggttccacccttggatccaggaagaaccctccaccctgcctcgtgggtgggccaaaggctacagggtgcttcttcctcttcccccacccccactgtccctcatgtgccatgggcctgcctccccagtgacctgcgaaagtggagcatcgaggtaggagggaaacggcaaccggggagtcctcgagcctggggctgccctacctctacccattccccgaccagagctttgcccttgcttggctgcccgcctgcctctttggggaactgagctcagaggcaggtgcttcagagaaggaaacaaaatgaggggtggcagggataaaaagtcacctccattctctacctcccatgcagcatgaacacaatttctctccacctggctcccaaatttaaagatgtggaccaaggcctgtgggtactccaggggcaaggagagccctggggtcagtgacactgtcaggccaaccatgcactccacaaaggggagcatttggaaatgaaggactagctcctatgtatcaggttaagagcaagggagagctggccagggacagcagtttgcacagcagaggggaatgtagcaacagcagggcctcctaggccccatcttccatttcttaggtaagaagagcatttcctcagactcccaggcggaggactgagcctagccttcagcaaccaaggttctcctgggacccaaagtttatgggagaagggcaaagacttcatgggaagagagaaggaaggccctgggtagaaacgcttggtgctgttctctttggcctttaagacaaagcgctcatcttgccctctacctcctgataggcttgagggtttgccaaccacactgtggctacaggtggagggaagaggactccttcctccagagtgctatgttcaggaagtttctttaaccccatatggcccaagagtagctcgtaggaggccctttaaagacggaacaagtaatttaccagttctactggggttcctgcccaccgtcccaaggtgggcgaggcctaggaagagggtcattcttaagccacacattagctgcactgcgtggctgcagccaaaacaaagaactgggtgttgagtattcatcaactaagaaccaaaatccagggcactcatatgtgaaggataagaacctcacttccttactcctccaaaaagaagtggggaaagaaccatcaaacctttcctcctgacttaccaaaccaggaaaacagcaggagagggtggctcaggacttagggacagggtatagcttagatggtggaaagcaaaggagagcaggaagttgtaaatcactggctaatgagaaaaggagacagctaactctaggatgaagctgtgactaggctggagttgcttccttgaagatgggactccttgggtatcaagacctatgccacatcacactggggctagggaagtaggtgatgccagccctcaagtctgtcttcagccagggacttgagaagttatattgggcagtggctccaatctgtggaccagtatttcagctttccctgaagatcaggcagggtgccattcattgtctttctctcctagccccctcaggaaagaaggactatatttgtactgtaccctaggggttctggaagggaaaacatggaatcaggattctatagactgataggccctatccacaagggccatgactgggaaaaggtatgggagcagaaggagaattgggattttagggtgcagctacgctcaccctaaacttttggtggcctggggcatgtcttgaggcccagactgttaagcaggctctgctggcctgtttactcgtcaccacctctgcacctgctgtcttgagactccatccagccccaggcacgccacctgctcctgagcctccactatctccctgtgacgggtgaacttcgtgtactgtgtctcgggtccatatatgaattgtgagcagggttcatctattttaaacacagatgtttacaaaataaagattatttcaaacc

SEQ ID NO: 57314 - DNA, 3253 bp, Homo sapiens
tcctcctcgccgcccgcagcgtccccgggcgggcgcgggccgcgatggcagcggcggagcagggctgagcccgctgcccgcccgcagttcccggccccgctggccccagtcatggcgaagcagtacgatgtgctgttccggctgctgctgatcggggactccggggtgggcaagacctgcctgctgtgccgcttcaccgacaacgagttccactcctcgcacatctccaccatcggtgttgactttaagatgaagaccatagaggtagacggcatcaaagtgcggatacagatctgggacactgcagggcaggagagataccagaccatcacaaagcagtactatcggcgggcccaggggatatttttggtctatgacattagcagcgagcgctcttaccagcacatcatgaagtgggtcagtgacgtggatgagtacgcaccagaaggcgtccagaagatccttatggggaataaggctgatgaggagcagaaacggcaggtgggaagagagcaagggcagcagctggcgaaggagtatggcatggacttctatgaaacaagtgcctgcaccaacctcaacattaaagagtcattcacgcgtctgacagagctggtgctgcaggcccataggaaggagctggaaggcctccggatgcgtgccagcaatgagttggcactggcagagctggaggaggaggagggcaaacccgagggcccagcgaactcttcgaaaacctgctggtgctgagtcctgtgtggggcaccccacacgacacccctcttccctcaggaggcccgtgggcagacaggggagccggggctttgccctgctgctgtcctctcgtgtgatgaccctattgagtatcagtagccactactccccctgcctggccctgagagcggctctgctgtcatctcaagcagcccctgtccccagcccgtccaccctggagtggtcttcttcagcctgtttccccagccacaggcctgctacgacccccacgatgtgccgcaagcactgtctcaccatcccgcacccaccagacaacagccagggctggagtccaggccactttcagctgctcctttctccgtgcatcgtgtctcttctctgctttttctctcttcccccacttctctttctctgacccctcccctccggtgcgtttcgtatcaaagctcctcaaaccccgtcccccgtgtgtcctgctgtgtgcagctcgctctttccttccttcctaagctatccaaggggatggacccaggctcgtggggaggttccacccttggatccaggaagaaccctccaccctgcctcgtgggtgggccaaaggctacagggtgcttcttcctcttcccccacccccactgtccctcatgtgccatgggcctgcctccccagtgacctgcgaaagtggagcatcgaggtaggagggaaacggcaaccggggagtcctcgagcctggggctgccctacctctacccattccctgcctctttggggaactgagctcagaggcaggtgcttcagagaaggaaacaaaatgaggggtggcagggataaaaagtcacctccattctctacctcccatgcagcatgaacacaatttctctccacctggctcccaaatttaaagatgtggaccaaggcctgtgggtactccaggggcaaggagagccctggggtcagtgacactgtcaggccaaccatgcactccacaaaggggagcatttggaaatgaaggactagctcctatgtatcaggttaagagcaagggagagctggccagggacagcagtttgcacagcagaggggaatgtagcaacagcagggcctcctaggccccatcttccatttcttaggtaagaagagcatttcctcagactcccaggcggaggactgagcctagccttcagcaaccaaggttctcctgggacccaaagtttatgggagaagggcaaagacttcatgggaagagagaaggaaggccctgggtagaaacgcttggtgctgttctctttggcctttaagacaaagcgctcatcttgccctctacctcctgataggcttgagggtttgccaaccacactgtggctacaggtggagggaagaggactccttcctccagagtgctatgttcaggaagtttctttaaccccatatggcccaagagtagctcgtaggaggccctttaaagacggaacaagtaatttaccagttctactggggttcctgcccaccgtcccaaggtgggcgaggcctaggaagagggtcattcttaagccacacattagctgcactgcgtggctgcagccaaaacaaagaactgggtgttgagtattcatcaactaagaaccaaaatccagggcactcatatgtgaaggataagaacctcacttccttactcctccaaaaagaagtggggaaagaaccatcaaacctttcctcctgacttaccaaaccaggaaaacagcaggagagggtggctcaggacttagggacagggtatagcttagatggtggaaagcaaaggagagcaggaagttgtaaatcactggctaatgagaaaaggagacagctaactctaggatgaagctgtgactaggctggagttgcttccttgaagatgggactccttgggtatcaagacctatgccacatcacactggggctagggaagtaggtgatgccagccctcaagtctgtcttcagccagggacttgagaagttatattgggcagtggctccaatctgtggaccagtatttcagctttccctgaagatcaggcagggtgccattcattgtctttctctcctagccccctcaggaaagaaggactatatttgtactgtaccctaggggttctggaagggaaaacatggaatcaggattctatagactgataggccctatccacaagggccatgactgggaaaaggtatgggagcagaaggagaattgggattttagggtgcagctacgctcaccctaaacttttggtggcctggggcatgtcttgaggcccagactgttaagcaggctctgctggcctgtttactcgtcaccacctctgcacctgctgtcttgagactccatccagccccaggcacgccacctgctcctgagcctccactatctccctgtgacgggtgaacttcgtgtactgtgtctcgggtccatatatgaattgtgagcagggttcatctattttaaacacagatgtttacaaaataaagattatttcaaacc

SEQ ID NO: 57315 - DNA, 2627 bp, Homo sapiens
tcctcctcgccgcccgcagcgtccccgggcgggcgcgggccgcgatggcagcggcggagcagggctgagcccgctgcccgcccgcagttcccggccccgctggccccagtcatggcgaagcagtacgatgtgctgttccggctgctgctgatcggggactccggggtgggcaagacctgcctgctgtgccgcttcaccgacaacgagttccactcctcgcacatctccaccatcggtgttgactttaagatgaagaccatagaggtagacggcatcaaagtgcggatacagatctgggacactgcagggcaggagagataccagaccatcacaaagcagtactatcggcgggcccaggggatatttttggtctatgacattagcagcgagcgctcttaccagcacatcatgaagtgggtcagtgacgtggatgagtacgcaccagaaggcgtccagaagatccttatggggaataaggctgatgaggagcagaaacggcaggtgggaagagagcaagggcagcagctggcgaaggagtatggcatggacttctatgaaacaagtgcctgcaccaacctcaacattaaagagtcattcacgcgtctgacagagctggtgctgcaggcccataggaaggagctggaaggcctccggatgcgtgccagcaatgagttggcactggcagagctggaggaggaggagggcaaacccgagggcccagcgaactcttcgaaaacctgctggtgctgagtcctgtgtggggcaccccacacgacacccctcttccctcaggaggcccgtgggcagacaggggagccggggctttgccctgctgctgtcctctcgtgtgatgaccctattgagtatcagtagccactactccccctgcctggccctgagagcggctctgctgtcatctcaagcagcccctgtccccagcccgtccaccctggagtggtcttcttcagcctgtttccccagccacaggcctgctacgacccccacgatgtgccgcaagcactgtctcaccatcccgcacccaccagacaacagccagggctggagtccaggccactttcagctgctcctttctccgtgcatcgtgtctcttctctgctttttctctcttcccccacttctctttctctgacccctcccctccggtgcgtttcgtatcaaagctcctcaaaccccgtcccccgtgtgtcctgctgtgtgcagctcgctctttccttccttcctaagctatccaaggggatggacccaggctcgtggggaggttccacccttggatccaggaagaaccctccaccctgcctcgtgggtgggccaaaggctacagggtgcttcttcctcttcccccacccccactgtccctcatgtgccatgggcctgcctccccagtgacctgcgaaagtggagcatcgaggtaggagggaaacggcaaccggggagtcctcgagcctggggctgccctacctctacccattccccgaccagagctttgcccttgcttggctgcccgcctgcctctttggggaactgagctcagaggcaggtgcttcagagaaggaaacaaaatgaggggtggcagggataaaaagtcacctccattctctacctcccatgcagcatgaacacaatttctctccacctggctcccaaatttaaagatgtggaccaaggcctgtgggtactccaggggcaaggagagccctggggtcagtgacactgtcaggccaaccatgcactccacaaaggggagcatttggaaatgaaggactagctcctatgtatcaggttaagagcaagggagagctggccagggacagcagtttgcacagcagaggggaatgtagcaacagcagggcctcctaggccccatcttccatttcttaggtaagaagagcatttcctcagactcccaggcggaggactgagcctagccttcagcaaccaaggttctcctgggacccaaagtttatgggagaagggcaaagacttcatgggaagagagaaggaaggccctgggtagaaacgcttggtgctgttctctttggcctttaagacaaagcgctcatcttgccctctacctcctgataggcttgagggtttgccaaccacactgtggctacaggtggagggaagaggactccttcctccagagtgctatgttcaggaagtttctttaaccccatatggcccaagagtagctcgtaggaggccctttaaagacggaacaagtaatttaccagttctactggggttcctgcccaccgtcccaaggtgggcgaggcctaggaagagggtcattcttaagccacacattagctgcactgcgtggctgcagccaaaacaaagaactgggtgttgagtattcatcaactaagaaccaaaatccagggcactcatatgtgaaggataagaacctcacttccttactcctccaaaaagaagtggggaaagaaccatcaaacctttcctcctgacttactgctcctgagcctccactatctccctgtgacgggtgaacttcgtgtactgtgtctcgggtccatatatgaattgtgagcagggttcatctattttaaacacagatgtttacaaaataaagattatttcaaacc

SEQ ID NO: 57316 - DNA, 812 bp, Homo sapiens
gaacctttacactgttctttttcttttcagctgtttgaagatacttttccccattgaaatgttttagttccaaatgcagaaagtgattttattcctctccctactaccagttactactataaaaatgaaaaaaattgtttattggcataagttttgtaatgtcacacacccgcatctgtagctgttgatgacaattccaagatagtcttcaagctatgcataaatcagcaaacaggcccttttgaggattggaaggatagtgacttcacttgcctggttgtaagctgtaacactgattaaacatgcatttggtgcttgctgagtaaaggagctgcaagctgcacttggagacatggtgttgcataacagcgtgttgtgcctctgttctttgtcaggcaggcgcacattgaatcctgtaataacaatgaagtatgtgtaaaggagctaaatttgaagacatctaagggttttctgatgaagctcttcatggcaaaaatagaatgaaagaattcaagattgaagtagtttttatgttgttttgtgctttaacaggcaggtttttattaagggtttattatctttatccattcttgttgcttgctgaccaccggtacacattaatttacaataaaagcacatgtcttaaaaggagagcataaatcagctctacattagttttccaagttctcctcttggtggggggggtcttcaaaatctttaaaaaaaagcaaatgacagacgacgccggccgttaagttaataataaggggtatcccggctagacgggcccggaattagtaggggttccagct

SEQ ID NO: 57317 - DNA, 413 bp, Homo sapiens
ccagactaacctgtctcgcttttcccctccgctgcggccactccctgaacctcagaagaggaggactggagagaggacgaagacggtagtacagcctttccttctgtggtgctttctgctgcctgctgtcccaagtgcagcctccttgtccaggggccctgttctgggggctggggggtgtgagtaggcggcagggacggagtgggtcagtcgtttcctcccctgcctcccaggggccaggatcacagttccaagctgatcatcatgcctgaacttcagggccactggctcctcttcctggttcctggatccttcccctgggttgggtggtgggagggaccaaggctagctggtctcccaagctgctccaaatgtggccatagaggggacctggcacctggaagacagcagcg

SEQ ID NO: 57318 - DNA, 272 bp, Homo sapiens
aaaaaattagctgggcatggtggtgtacacctgtagtcctagctaattgggaggctgaggcaggaggattgcttgagctcttggagtttgaagctgcagtgagctatgatcatgccactgcattctagtaagactctgtttctaaataataatcataaatacataaaagaaggtagggtaatagtaggaacacagattctagaagtactaaagataagaaatacttagcattaactcctctgatctattttccttgactacatttatctaag

SEQ ID NO: 57319 - DNA, 151 bp, Homo sapiens
gatatattacaaatgagcattcagtaagtcatctcaaagatattatatacagatggtgtcaactacacattcaataactgacagttattaggctcctgaagtctgccagtaatgccttacaggttgtgtcagtgatatccttgtagtgttt

SEQ ID NO: 57320 - DNA, 5031 bp, Homo sapiens
tctagatgggggtcctgggccccagggtgtgcagccactgacttggggactgctggtggggtagggatgagggagggaggggcattgtgatgtacagggctgctctgtgagatcaagggtctcttaagggtgggagctggggcagggactacgagagcagccagatgggctgaaagtggaactcaaggggtttctggcacctacctacctgcttcccgctggggggtggggagttggcccagagtcttaagattggggcagggtggagaggtgggctcttcctgcttcccactcatcttatagctttctttccccagaatccgaattcgagatccaaaccaaggaggaaaggatatcacagaggagatcatgtctggggcccgcactgcctccacacccacccctccccagacgggaggcggtctggagcctcaagctaatggggagacgccccaggttgctgtcattgtccggccagatgaccggtcacagggagcaatcattgctgaccggccagggctgcctggcccagagcatagcccttcagaatcccagccttcgtcgccttctccgaccccatcaccatccccagtcttggaaccggggtctgagcctaatctcgcagtcctctctattcctggggacactatgacaactatacaaatgtctgtagaagaatcaacccccatctcccgtgaaactggggagccatatcgcctctctccagaacccactcctctcgccgaacccatactggaagtagaagtgacacttagcaaaccggttccagaatctgagttttcttccagtcctctccaggctcccacccctttggcatctcacacagtggaaattcatgagcctaatggcatggtcccatctgaagatctggaaccagaggtggagtcaagcccagagcttgctcctcccccagcttgcccctccgaatcccctgtgcccattgctccaactgcccaacctgaggaactgctcaacggagccccctcgccaccagctgtggacttaagcccagtcagtgagccagaggagcaggccaaggaggtgacagcatcagtggcgccccccaccatcccctctgctactccagctacggctccttcagctacttccccagctcaggaggaggaaatggaagaagaagaagaagaggaagaaggagaagcaggagaagcaggagaagctgagagtgagaaaggaggagaggaactgctccccccagagagtacccctattccagccaacttgtctcagaatttggaggcagcagcagccactcaagtggcagtatctgtgccaaagaggagacggaaaattaaggagctaaataagaaggaggctgttggagaccttctggatgccttcaaggaggcgaacccggcagtaccagaggtggaaaatcagcctcctgcaggcagcaatccaggcccagagtctgagggcagtggtgtgcccccacgtcctgaggaagcagatgagacctgggactcaaaggaagacaaaattcacaatgctgagaacatccagcccggggaacagaagtatgaatataagtcagatcagtggaagcctctaaacctagaggagaaaaaacgttacgaccgtgagttcctgcttggttttcagttcatctttgccagtatgcagaagccagagggattgccacatatcagtgacgtggtgctggacaaggccaataaaacaccactgcggccactggatcccactagactacaaggcataaattgtggcccagacttcactccatcctttgccaaccttggccggacaacccttagcacccgtgggcccccaaggggtgggccaggtggggagctgccccgtgggccggctggcctgggaccccggcgctctcagcagggaccccgaaaagaaccacgcaagatcattgccacagtgttaatgaccgaagatataaaactgaacaaagcagagaaagcctggaaacccagcagcaagcggacggcggctgataaggatcgaggggaagaagatgctgatggcagcaaaacccaggacctattccgcagggtgcgctccatcctgaataaactgacaccccagatgttccagcagctgatgaagcaagtgacgcagctggccatcgacaccgaggaacgcctcaaaggggtcattgacctcatttttgagaaggccatttcagagcccaacttctctgtggcctatgccaacatgtgccgctgcctcatggcgctgaaagtgcccactacggaaaagccaacagtgactgtgaacttccgaaagctgttgttgaatcgatgtcagaaggagtttgagaaagacaaagatgatgatgaggtttttgagaagaagcaaaaagagatggatgaagctgctacggcagaggaacgaggacgcctgaaggaagagctggaagaggctcgggacatagcccggcggcgctctttagggaatatcaagtttattggagagttgttcaaactgaagatgttaacagaggcaataatgcatgactgtgtggtcaaactgcttaagaaccatgatgaagagtcccttgagtgcctttgtcgtctgctcaccaccattggcaaagacctggactttgaaaaagccaagccccgaatggatcagtatttcaaccagatggaaaaaatcattaaagaaaagaagacgtcatcccgcatccgctttatgctgcaggacgtgctggatctgcgagggagcaattgggtgccacgccgaggggatcagggtcccaagaccattgaccagatccataaggaggctgagatggaagaacatcgagagcacatcaaagtgcagcagctcatggccaagggcagtgacaagcgtcggggcggtcctccaggccctcccatcagccgtggacttccccttgtggatgatggtggctggaacacagttcccatcagcaaaggtagccgccccattgacacctcacgactcaccaagatcaccaagcctggctccatcgattctaacaaccagctctttgcacctggagggcgactgagctggggcaagggcagcagcggaggctcaggagccaagccctcagacgcagcatcagaagctgctcgcccagctactagtactttgaatcgcttctcagcccttcaacaagcggtacccacagaaagcacagataatagacgtgtggtgcagaggagtagcttgagccgagaacgaggcgagaaagctggagaccgaggagaccgcctagagcggagtgaacggggaggggaccgtggggaccggcttgatcgtgcgcggacacctgctaccaagcggagcttcagcaaggaagtggaggagcggagtagagaacggccctcccagcctgaggggctgcgcaaggcagctagcctcacggaggatcgggaccgtgggcgggatgccgtgaagcgagaagctgccctacccccagtgagccccctgaaggcggctctctctgaggaggagttagagaagaaatccaaggctatcattgaggaatatctccatctcaatgacatgaaagaggcagtccagtgcgtgcaggagctggcctcaccctccttgctcttcatctttgtacggcatggtgtcgagtctacgctggagcgcagtgccattgctcgtgagcatatggggcagctgctgcaccagctgctctgtgctgggcatctgtctactgctcagtactaccaagggttgtatgaaatcttggaattggctgaggacatggaaattgacatcccccacgtgtggctctacctagcggaactggtaacacccattctgcaggaaggtggggtgcccatgggggagctgttcagggagattacaaagcctctgagaccgttgggcaaagctgcttccctgttgctggagatcctgggcctcctgtgcaaaagcatgggtcctaaaaaggtggggacgctgtggcgagaagccgggcttagctggaaggaatttctacctgaaggccaggacattggtgcattcgtcgctgaacagaaggtggagtataccctgggagaggagtcggaagcccctggccagagggcactcccctccgaggagctgaacaggcagctggagaagctgctgaaggagggcagcagtaaccagcgggtgttcgactggatagaggccaacctgagtgagcagcagatagtatccaacacgttagttcgagccctcatgacggctgtctgctattctgcaattatttttgagactcccctccgagtggacgttgcagtgctgaaagcgcgagcgaagctgctgcagaaatacctgtgtgacgagcagaaggagctacaggcgctctacgccctccaggcccttgtagtgaccttagaacagcctcccaacctgctgcggatgttctttgacgcactgtatgacgaggacgtggtgaaggaggatgccttctacagttgggagagtagcaaggaccccgctgagcagcagggcaagggtgtggcccttaaatctgtcacagccttcttcaagtggctccgtgaagcagaggaggagtctgaccacaactgagggctggtggggccggggacctggagccccatggacacacagatggcccggctagccgcctggactgcaggggggcggcagcagcggcggtggcagtgggtgcctgtagtgtgatgtgtctgaactaataaagtggctgaagaggcaggatggcttggggctgcctgggcccccctccaggatgccgccaggtgtccctctcctccccctggggcacagagatatattatatataaagtcttgaaatttggtgtgtcttggggtggggaggggcaccaacgcctgcccctggggtccttttttttattttctgaaaatcactctcgggactgccgtcctcgctgctgggggcatatgccccagcccctgtaccacccctgctgttgcctgggcagggggaagggggggcacggtgcctgtaattattaaacatgaattcaattaagctca

SEQ ID NO: 57321 - DNA, 940 bp, Homo sapiens
ttttttttttgtggggaaaagtgagccatatcgcctctctccagaacccactcctctcgccgaacccatactggaagtagaagtgacacttagcaaaccggttccagaatctgagttttcttccagtcctctccaggctcccacccctttggcatctcacacagtggaaattcatgagcctaatggcatggtcccatctgaagatctggaaccagaggtggagtcaagcccagagcttgctcctcccccagcttgcccctccgaatcccctgtgcccattgctccaactgcccaacctgaggaactgctcaacggagccccctcgccaccagctgtggacttaagcccagtcagtgagccagaggagcaggccaaggaggtgacagcatcagtggcgccccccaccatcccctctgctactccagctacggctccttcagctacttccccagctcaggaggaggaaatggaagaagaagaagaagaggaagaaggagaagcaggagaagcaggagaagctgagagtgagaaaggaggagaggaactgctccccccagagagtacccctattccagccaacttgtctcagaatttggaggcagcagcagccactcaagtggcagtatctgtgccaaagaggagacggaaaattaaggagctaaataagaaggaggctgttggagaccttctggatgccttcaaggaggcgaacccggcagtaccagaggtggaaaatcagcctcctgcaggcagcaatccaggcccagagtctgaggcagatgtggcctccctgaaccgccgcattcagctggttgaggaggagctggaccgggcccaggagcgcctggctacagccctgcagaagctggaggaggccgagaaggcggctgatgagagcgagagaggaatgaaggcatcgaaaaccgggcatgaaggatga

SEQ ID NO: 57322 - DNA, 736 bp, Homo sapiens
  misc_feature (35)..(35): n is a, c, g, or t
gggcccagcacaaagtcatgaaccatagcacacangatcaaccaagatcaccaagcctggctccatcgattctaacaaccagctctttgcacctggagggcgactgagctggggcaagggcagcagcggaggctcaggagccaagccctcagacgcagcatcagaagctgctcgcccagctactagtactttgaatcgcttctcagcccttcaacaagcggtacccacagaaagcacagataatagacgtgtggtgcagagagtctggagtgcgtcaaaccattgagacggggcgcatccatctaagagatcgagccatgcagtgcatagcaaaggctttgggagagtggaccgtacgtattaaccatacatgcagatgactggggaaacaatgcgtgggacgaaaaacacacaaaccaaaaaacacaaaaacagcagcaacaaacaaaaaaaaaaaaaaaaaaaaacaaaaaaaaaggaagggagaaagacgaggggaagagggagggcaaagaggaggagaaggaaagagagcagaagagggaggagcaggccagcaagcaaggaaacagggaagaagacagccggacaggaacgagagtaaaggagggcgagaacaaagcacagaggcagaaagaggcgggagaggacaacagacaaggagacggagggggcgacggacagagaaaaccagagtagaaggcacaggacagaaaagagaagaaaacacgggggg

SEQ ID NO: 57323 - DNA, 579 bp, Homo sapiens
aaaaaaaaatggcatggataggccgtggttttagcttggcacgaggcagggaccccgaaaagaaccacgcaagatcattgccacagtgttaatgaccgaagatataaaactgaacaaagcagagaaagcctggaaacccagcagcaagcggacggcggctgataaggatcgaggggaagaagatgctgatggcagcaaaacccaggacctattccgcagggtgcgctccatcctgaataaactgacaccccagatgttccagcagctgatgaagcaagtgacgcagctggccatcgacaccgaggaacgcctcaaaggggtcattgacctcatttttgagaaggccatttcagagcccaacttctctgtggcctatgccaacatgtgccgctgcctcatggcgctgaaagtgcccactacggaaaagccaacagtgactgtgaacttccgaaagctgttgttgaatcgatgtcagaaggagtttgagaaagacaaagatgatgatgaggtttttgagaagaagcaaaaagagatggatgaagctgctacggcagagagaaaacccactatcgattccac

SEQ ID NO: 57324 - DNA, 554 bp, Homo sapiens
gtaccgacagatccctaaccagaagaaatccaaggctatcattgaggaatatctccatctcaatgacatgaaagaggcagtccagtgcgtgcaggagctggcctcaccctccttgctcttcatctttgtacggcatggtgtcgagtctacgctggagcgcagtgccattgctcgtgagcatatggggcagctgctgcaccagctgctctgtgctgggcatctgtctactgctcagtactaccaagggttgtatgaaatcttggaattggctgaggacatggaaattgacatcccccacgtgtggctctacctagcggaactggtaacacccattctgcaggaaggtggggtgcccatgggggagctgttcagggagattacaaagcctctgagaccgttgggcaaagctgcttccctgttgctggagatcctgggcctcctgtgcaaaagcatgggtcctaaaaaggtggggacgctgtggcgagaaataacatggttgttgtccagggtgataaacaccagatgatgagtgaaggaaagatacatcgactacg

SEQ ID NO: 57325 - DNA, 423 bp, Homo sapiens
gagctcggtacccccaggtagacctaacctgggcctcctgtgcaaaagcatgggtcctaaaaaggtggggacgctgtggcgagaagccgggcttagctggaaggaatttctacctgaaggccaggacattggtgcattcgtcgctgaacagaaggtggagtataccctgggagaggagtcggaagcccctggccagagggcactcccctccgaggagctgaacaggcagctggagaagctgctgaaggagggcagcagtaaccagcgggtgttcgactggatagaggccaacctgagtgagcagcagatagtatccaacacgttagttcgagccctcatgacggctgtctgctattctgcaattatttgtaagaggaaccagggagatggaggggcaagggtgggcctgacaagacaagtgga

SEQ ID NO: 57326 - DNA, 5524 bp, Homo sapiens
cctgtgtgcccctgggccaggcccgaacccggtgtccccgggtggggggtggggacgccacggccgaagcagctagctccgttcgtgatccgggagcctggtgccagcgagacctggaatttccggtctggttggtctggggccccgcggagccaggttgataccctcacctcccaaccccaggccctcggatgcccagaacctgtaggccgcaccgtggacttgttcttaatcgagggggtgctggggggaccctgatgtggcaccaaatgaaatgaacaaagctccacagtccacaggccccccacccgccccatcccccggactcccacagccagcgtttcccccggggcagacagcgccggtggtgttcagtacgccacaagcgacacaaatgaacacgccttctcagccccgccagcacttctaccctagccgggcccagcccccgagcagtgcagcctcccgagtgcagagtgcagcccctgcccgccctggcccagctgcccatgtctaccctgctggatcccaagtaatgatgatcccttcccagatctcctacccagcctcccagggggcctactacatccctggacaggggcgttccacatacgttgtcccgacacagcagtaccctgtgcagccaggagccccaggcttctatccaggtgcaagccctacagaatttgggacctacgctggcgcctactatccagcccaaggggtgcagcagtttcccactggcgtggcccccgccccagttttgatgaaccagccaccccagattgctcccaagagggagcgtaagacgatccgaattcgagatccaaaccaaggaggaaaggatatcacagaggagatcatgtctggggcccgcactgcctccacacccacccctccccagacgggaggcggtctggagcctcaagctaatggggagacgccccaggttgctgtcattgtccggccagatgaccggtcacagggagcaatcattgctgaccggccagggctgcctggcccagagcatagcccttcagaatcccagccttcgtcgccttctccgaccccatcaccatccccagtcttggaaccggggtctgagcctaatctcgcagtcctctctattcctggggacactatgacaactatacaaatgtctgtagaagaatcaacccccatctcccgtgaaactggggagccatatcgcctctctccagaacccactcctctcgccgaacccatactggaagtagaagtgacacttagcaaaccggttccagaatctgagttttcttccagtcctctccaggctcccacccctttggcatctcacacagtggaaattcatgagcctaatggcatggtcccatctgaagatctggaaccagaggtggagtcaagcccagagcttgctcctcccccagcttgcccctccgaatcccctgtgcccattgctccaactgcccaacctgaggaactgctcaacggagccccctcgccaccagctgtggacttaagcccagtcagtgagccagaggagcaggccaaggaggtgacagcatcagtggcgccccccaccatcccctctgctactccagctacggctccttcagctacttccccagctcaggaggaggaaatggaagaagaagaagaagaggaagaaggagaagcaggagaagcaggagaagctgagagtgagaaaggaggagaggaactgctccccccagagagtacccctattccagccaacttgtctcagaatttggaggcagcagcagccactcaagtggcagtatctgtgccaaagaggagacggaaaattaaggagctaaataagaaggaggctgttggagaccttctggatgccttcaaggaggcgaacccggcagtaccagaggtggaaaatcagcctcctgcaggcagcaatccaggcccagagtctgagggcagtggtgtgcccccacgtcctgaggaagcagatgagacctgggactcaaaggaagacaaaattcacaatgctgagaacatccagcccggggaacagaagtatgaatataagtcagatcagtggaagcctctaaacctagaggagaaaaaacgttacgaccgtgagttcctgcttggttttcagttcatctttgccagtatgcagaagccagagggattgccacatatcagtgacgtggtgctggacaaggccaataaaacaccactgcggccactggatcccactagactacaaggcataaattgtggcccagacttcactccatcctttgccaaccttggccggacaacccttagcacccgtgggcccccaaggggtgggccaggtggggagctgccccgtgggccggctggcctgggaccccggcgctctcagcagggaccccgaaaagaaccacgcaagatcattgccacagtgttaatgaccgaagatataaaactgaacaaagcagagaaagcctggaaacccagcagcaagcggacggcggctgataaggatcgaggggaagaagatgctgatggcagcaaaacccaggacctattccgcagggtgcgctccatcctgaataaactgacaccccagatgttccagcagctgatgaagcaagtgacgcagctggccatcgacaccgaggaacgcctcaaaggggtcattgacctcatttttgagaaggccatttcagagcccaacttctctgtggcctatgccaacatgtgccgctgcctcatggcgctgaaagtgcccactacggaaaagccaacagtgactgtgaacttccgaaagctgttgttgaatcgatgtcagaaggagtttgagaaagacaaagatgatgatgaggtttttgagaagaagcaaaaagagatggatgaagctgctacggcagaggaacgaggacgcctgaaggaagagctggaagaggctcgggacatagcccggcggcgctctttagggaatatcaagtttattggagagttgttcaaactgaagatgttaacagaggcaataatgcatgactgtgtggtcaaactgcttaagaaccatgatgaagagtcccttgagtgcctttgtcgtctgctcaccaccattggcaaagacctggactttgaaaaagccaagccccgaatggatcagtatttcaaccagatggaaaaaatcattaaagaaaagaagacgtcatcccgcatccgctttatgctgcaggacgtgctggatctgcgagggagcaattgggtgccacgccgaggggatcagggtcccaagaccattgaccagatccataaggaggctgagatggaagaacatcgagagcacatcaaagtgcagcagctcatggccaagggcagtgacaagcgtcggggcggtcctccaggccctcccatcagccgtggacttccccttgtggatgatggtggctggaacacagttcccatcagcaaaggtagccgccccattgacacctcacgactcaccaagatcaccaagcctggctccatcgattctaacaaccagctctttgcacctggagggcgactgagctggggcaagggcagcagcggaggctcaggagccaagccctcagacgcagcatcagaagctgctcgcccagctactagtactttgaatcgcttctcagcccttcaacaagcggtacccacagaaagcacagataatagacgtgtggtgcagaggagtagcttgagccgagaacgaggcgagaaagctggagaccgaggagaccgcctagagcggagtgaacggggaggggaccgtggggaccggcttgatcgtgcgcggacacctgctaccaagcggagcttcagcaaggaagtggaggagcggagtagagaacggccctcccagcctgaggggctgcgcaaggcagctagcctcacggaggatcgggaccgtgggcgggatgccgtgaagcgagaagctgccctacccccagtgagccccctgaaggcggctctctctgaggaggagttagagaagaaatccaaggctatcattgaggaatatctccatctcaatgacatgaaagaggcagtccagtgcgtgcaggagctggcctcaccctccttgctcttcatctttgtacggcatggtgtcgagtctacgctggagcgcagtgccattgctcgtgagcatatggggcagctgctgcaccagctgctctgtgctgggcatctgtctactgctcagtactaccaagggttgtatgaaatcttggaattggctgaggacatggaaattgacatcccccacgtgtggctctacctagcggaactggtaacacccattctgcaggaaggtggggtgcccatgggggagctgttcagggagattacaaagcctctgagaccgttgggcaaagctgcttccctgttgctggagatcctgggcctcctgtgcaaaagcatgggtcctaaaaaggtggggacgctgtggcgagaagccgggcttagctggaaggaatttctacctgaaggccaggacattggtgcattcgtcgctgaacagaaggtggagtataccctgggagaggagtcggaagcccctggccagagggcactcccctccgaggagctgaacaggcagctggagaagctgctgaaggagggcagcagtaaccagcgggtgttcgactggatagaggccaacctgagtgagcagcagatagtatccaacacgttagttcgagccctcatgacggctgtctgctattctgcaattatttttgagactcccctccgagtggacgttgcagtgctgaaagcgcgagcgaagctgctgcagaaatacctgtgtgacgagcagaaggagctacaggcgctctacgccctccaggcccttgtagtgaccttagaacagcctcccaacctgctgcggatgttctttgacgcactgtatgacgaggacgtggtgaaggaggatgccttctacagttgggagagtagcaaggaccccgctgagcagcagggcaagggtgtggcccttaaatctgtcacagccttcttcaagtggctccgtgaagcagaggaggagtctgaccacaactgagggctggtggggccggggacctggagccccatggacacacagatggcccggctagccgcctggactgcaggggggcggcagcagcggcggtggcagtgggtgcctgtagtgtgatgtgtctgaactaataaagtggctgaagaggcaggatggcttggggctgcctgggcccccctccaggatgccgccaggtgtccctctcctccccctggggcacagagatatattatatataaagtcttgaaatttggtgtgtcttggggtggggaggggcaccaacgcctgcccctggggtccttttttttattttctgaaaatcactctcgggactgccgtcctcgctgctgggggcatatgccccagcccctgtaccacccctgctgttgcctgggcagggggaagggggggcacggtgcctgtaattattaaacatgaattcaattaagctca

SEQ ID NO: 57327 - DNA, 5423 bp, Homo sapiens
ctcagagacccactttattcagttctgtacatatggggacatcggtccaagcccaacccaccttagcatgtatcactctgtggagaataaagcaccctttctcaccgacctcttcctgagcgccactctttcccaacaggtgctggggggaccctgatgtggcaccaaatgaaatgaacaaagctccacagtccacaggccccccacccgccccatcccccggactcccacagccagcgtttcccccggggcagacagcgccggtggtgttcagtacgccacaagcgacacaaatgaacacgccttctcagccccgccagcacttctaccctagccgggcccagcccccgagcagtgcagcctcccgagtgcagagtgcagcccctgcccgccctggcccagctgcccatgtctaccctgctggatcccaagtaatgatgatcccttcccagatctcctacccagcctcccagggggcctactacatccctggacaggggcgttccacatacgttgtcccgacacagcagtaccctgtgcagccaggagccccaggcttctatccaggtgcaagccctacagaatttgggacctacgctggcgcctactatccagcccaaggggtgcagcagtttcccactggcgtggcccccgccccagttttgatgaaccagccaccccagattgctcccaagagggagcgtaagacgatccgaattcgagatccaaaccaaggaggaaaggatatcacagaggagatcatgtctggggcccgcactgcctccacacccacccctccccagacgggaggcggtctggagcctcaagctaatggggagacgccccaggttgctgtcattgtccggccagatgaccggtcacagggagcaatcattgctgaccggccagggctgcctggcccagagcatagcccttcagaatcccagccttcgtcgccttctccgaccccatcaccatccccagtcttggaaccggggtctgagcctaatctcgcagtcctctctattcctggggacactatgacaactatacaaatgtctgtagaagaatcaacccccatctcccgtgaaactggggagccatatcgcctctctccagaacccactcctctcgccgaacccatactggaagtagaagtgacacttagcaaaccggttccagaatctgagttttcttccagtcctctccaggctcccacccctttggcatctcacacagtggaaattcatgagcctaatggcatggtcccatctgaagatctggaaccagaggtggagtcaagcccagagcttgctcctcccccagcttgcccctccgaatcccctgtgcccattgctccaactgcccaacctgaggaactgctcaacggagccccctcgccaccagctgtggacttaagcccagtcagtgagccagaggagcaggccaaggaggtgacagcatcagtggcgccccccaccatcccctctgctactccagctacggctccttcagctacttccccagctcaggaggaggaaatggaagaagaagaagaagaggaagaaggagaagcaggagaagcaggagaagctgagagtgagaaaggaggagaggaactgctccccccagagagtacccctattccagccaacttgtctcagaatttggaggcagcagcagccactcaagtggcagtatctgtgccaaagaggagacggaaaattaaggagctaaataagaaggaggctgttggagaccttctggatgccttcaaggaggcgaacccggcagtaccagaggtggaaaatcagcctcctgcaggcagcaatccaggcccagagtctgagggcagtggtgtgcccccacgtcctgaggaagcagatgagacctgggactcaaaggaagacaaaattcacaatgctgagaacatccagcccggggaacagaagtatgaatataagtcagatcagtggaagcctctaaacctagaggagaaaaaacgttacgaccgtgagttcctgcttggttttcagttcatctttgccagtatgcagaagccagagggattgccacatatcagtgacgtggtgctggacaaggccaataaaacaccactgcggccactggatcccactagactacaaggcataaattgtggcccagacttcactccatcctttgccaaccttggccggacaacccttagcacccgtgggcccccaaggggtgggccaggtggggagctgccccgtgggccggctggcctgggaccccggcgctctcagcagggaccccgaaaagaaccacgcaagatcattgccacagtgttaatgaccgaagatataaaactgaacaaagcagagaaagcctggaaacccagcagcaagcggacggcggctgataaggatcgaggggaagaagatgctgatggcagcaaaacccaggacctattccgcagggtgcgctccatcctgaataaactgacaccccagatgttccagcagctgatgaagcaagtgacgcagctggccatcgacaccgaggaacgcctcaaaggggtcattgacctcatttttgagaaggccatttcagagcccaacttctctgtggcctatgccaacatgtgccgctgcctcatggcgctgaaagtgcccactacggaaaagccaacagtgactgtgaacttccgaaagctgttgttgaatcgatgtcagaaggagtttgagaaagacaaagatgatgatgaggtttttgagaagaagcaaaaagagatggatgaagctgctacggcagaggaacgaggacgcctgaaggaagagctggaagaggctcgggacatagcccggcggcgctctttagggaatatcaagtttattggagagttgttcaaactgaagatgttaacagaggcaataatgcatgactgtgtggtcaaactgcttaagaaccatgatgaagagtcccttgagtgcctttgtcgtctgctcaccaccattggcaaagacctggactttgaaaaagccaagccccgaatggatcagtatttcaaccagatggaaaaaatcattaaagaaaagaagacgtcatcccgcatccgctttatgctgcaggacgtgctggatctgcgagggagcaattgggtgccacgccgaggggatcagggtcccaagaccattgaccagatccataaggaggctgagatggaagaacatcgagagcacatcaaagtgcagcagctcatggccaagggcagtgacaagcgtcggggcggtcctccaggccctcccatcagccgtggacttccccttgtggatgatggtggctggaacacagttcccatcagcaaaggtagccgccccattgacacctcacgactcaccaagatcaccaagcctggctccatcgattctaacaaccagctctttgcacctggagggcgactgagctggggcaagggcagcagcggaggctcaggagccaagccctcagacgcagcatcagaagctgctcgcccagctactagtactttgaatcgcttctcagcccttcaacaagcggtacccacagaaagcacagataatagacgtgtggtgcagaggagtagcttgagccgagaacgaggcgagaaagctggagaccgaggagaccgcctagagcggagtgaacggggaggggaccgtggggaccggcttgatcgtgcgcggacacctgctaccaagcggagcttcagcaaggaagtggaggagcggagtagagaacggccctcccagcctgaggggctgcgcaaggcagctagcctcacggaggatcgggaccgtgggcgggatgccgtgaagcgagaagctgccctacccccagtgagccccctgaaggcggctctctctgaggaggagttagagaagaaatccaaggctatcattgaggaatatctccatctcaatgacatgaaagaggcagtccagtgcgtgcaggagctggcctcaccctccttgctcttcatctttgtacggcatggtgtcgagtctacgctggagcgcagtgccattgctcgtgagcatatggggcagctgctgcaccagctgctctgtgctgggcatctgtctactgctcagtactaccaagggttgtatgaaatcttggaattggctgaggacatggaaattgacatcccccacgtgtggctctacctagcggaactggtaacacccattctgcaggaaggtggggtgcccatgggggagctgttcagggagattacaaagcctctgagaccgttgggcaaagctgcttccctgttgctggagatcctgggcctcctgtgcaaaagcatgggtcctaaaaaggtggggacgctgtggcgagaagccgggcttagctggaaggaatttctacctgaaggccaggacattggtgcattcgtcgctgaacagaaggtggagtataccctgggagaggagtcggaagcccctggccagagggcactcccctccgaggagctgaacaggcagctggagaagctgctgaaggagggcagcagtaaccagcgggtgttcgactggatagaggccaacctgagtgagcagcagatagtatccaacacgttagttcgagccctcatgacggctgtctgctattctgcaattatttttgagactcccctccgagtggacgttgcagtgctgaaagcgcgagcgaagctgctgcagaaatacctgtgtgacgagcagaaggagctacaggcgctctacgccctccaggcccttgtagtgaccttagaacagcctcccaacctgctgcggatgttctttgacgcactgtatgacgaggacgtggtgaaggaggatgccttctacagttgggagagtagcaaggaccccgctgagcagcagggcaagggtgtggcccttaaatctgtcacagccttcttcaagtggctccgtgaagcagaggaggagtctgaccacaactgagggctggtggggccggggacctggagccccatggacacacagatggcccggctagccgcctggactgcaggggggcggcagcagcggcggtggcagtgggtgcctgtagtgtgatgtgtctgaactaataaagtggctgaagaggcaggatggcttggggctgcctgggcccccctccaggatgccgccaggtgtccctctcctccccctggggcacagagatatattatatataaagtcttgaaatttggtgtgtcttggggtggggaggggcaccaacgcctgcccctggggtccttttttttattttctgaaaatcactctcgggactgccgtcctcgctgctgggggcatatgccccagcccctgtaccacccctgctgttgcctgggcagggggaagggggggcacggtgcctgtaattattaaacatgaattcaattaagctca

SEQ ID NO: 57328 - DNA, 5227 bp, Homo sapiens
ccggctgcgcctgcggagaagcggtggccgccgagcgggatctgtgcggggagccggaaatggttgtggactacgtctgtgcggctgcgtggggctcggccgcgcggactgaaggagactgaagcacttctaccctagccgggcccagcccccgagcagtgcagcctcccgagtgcagagtgcagcccctgcccgccctggcccagctgcccatgtctaccctgctggatcccaagtaatgatgatcccttcccagatctcctacccagcctcccagggggcctactacatccctggacaggggcgttccacatacgttgtcccgacacagcagtaccctgtgcagccaggagccccaggcttctatccaggtgcaagccctacagaatttgggacctacgctggcgcctactatccagcccaaggggtgcagcagtttcccactggcgtggcccccgccccagttttgatgaaccagccaccccagattgctcccaagagggagcgtaagacgatccgaattcgagatccaaaccaaggaggaaaggatatcacagaggagatcatgtctggggcccgcactgcctccacacccacccctccccagacgggaggcggtctggagcctcaagctaatggggagacgccccaggttgctgtcattgtccggccagatgaccggtcacagggagcaatcattgctgaccggccagggctgcctggcccagagcatagcccttcagaatcccagccttcgtcgccttctccgaccccatcaccatccccagtcttggaaccggggtctgagcctaatctcgcagtcctctctattcctggggacactatgacaactatacaaatgtctgtagaagaatcaacccccatctcccgtgaaactggggagccatatcgcctctctccagaacccactcctctcgccgaacccatactggaagtagaagtgacacttagcaaaccggttccagaatctgagttttcttccagtcctctccaggctcccacccctttggcatctcacacagtggaaattcatgagcctaatggcatggtcccatctgaagatctggaaccagaggtggagtcaagcccagagcttgctcctcccccagcttgcccctccgaatcccctgtgcccattgctccaactgcccaacctgaggaactgctcaacggagccccctcgccaccagctgtggacttaagcccagtcagtgagccagaggagcaggccaaggaggtgacagcatcagtggcgccccccaccatcccctctgctactccagctacggctccttcagctacttccccagctcaggaggaggaaatggaagaagaagaagaagaggaagaaggagaagcaggagaagcaggagaagctgagagtgagaaaggaggagaggaactgctccccccagagagtacccctattccagccaacttgtctcagaatttggaggcagcagcagccactcaagtggcagtatctgtgccaaagaggagacggaaaattaaggagctaaataagaaggaggctgttggagaccttctggatgccttcaaggaggcgaacccggcagtaccagaggtggaaaatcagcctcctgcaggcagcaatccaggcccagagtctgagggcagtggtgtgcccccacgtcctgaggaagcagatgagacctgggactcaaaggaagacaaaattcacaatgctgagaacatccagcccggggaacagaagtatgaatataagtcagatcagtggaagcctctaaacctagaggagaaaaaacgttacgaccgtgagttcctgcttggttttcagttcatctttgccagtatgcagaagccagagggattgccacatatcagtgacgtggtgctggacaaggccaataaaacaccactgcggccactggatcccactagactacaaggcataaattgtggcccagacttcactccatcctttgccaaccttggccggacaacccttagcacccgtgggcccccaaggggtgggccaggtggggagctgccccgtgggccggctggcctgggaccccggcgctctcagcagggaccccgaaaagaaccacgcaagatcattgccacagtgttaatgaccgaagatataaaactgaacaaagcagagaaagcctggaaacccagcagcaagcggacggcggctgataaggatcgaggggaagaagatgctgatggcagcaaaacccaggacctattccgcagggtgcgctccatcctgaataaactgacaccccagatgttccagcagctgatgaagcaagtgacgcagctggccatcgacaccgaggaacgcctcaaaggggtcattgacctcatttttgagaaggccatttcagagcccaacttctctgtggcctatgccaacatgtgccgctgcctcatggcgctgaaagtgcccactacggaaaagccaacagtgactgtgaacttccgaaagctgttgttgaatcgatgtcagaaggagtttgagaaagacaaagatgatgatgaggtttttgagaagaagcaaaaagagatggatgaagctgctacggcagaggaacgaggacgcctgaaggaagagctggaagaggctcgggacatagcccggcggcgctctttagggaatatcaagtttattggagagttgttcaaactgaagatgttaacagaggcaataatgcatgactgtgtggtcaaactgcttaagaaccatgatgaagagtcccttgagtgcctttgtcgtctgctcaccaccattggcaaagacctggactttgaaaaagccaagccccgaatggatcagtatttcaaccagatggaaaaaatcattaaagaaaagaagacgtcatcccgcatccgctttatgctgcaggacgtgctggatctgcgagggagcaattgggtgccacgccgaggggatcagggtcccaagaccattgaccagatccataaggaggctgagatggaagaacatcgagagcacatcaaagtgcagcagctcatggccaagggcagtgacaagcgtcggggcggtcctccaggccctcccatcagccgtggacttccccttgtggatgatggtggctggaacacagttcccatcagcaaaggtagccgccccattgacacctcacgactcaccaagatcaccaagcctggctccatcgattctaacaaccagctctttgcacctggagggcgactgagctggggcaagggcagcagcggaggctcaggagccaagccctcagacgcagcatcagaagctgctcgcccagctactagtactttgaatcgcttctcagcccttcaacaagcggtacccacagaaagcacagataatagacgtgtggtgcagaggagtagcttgagccgagaacgaggcgagaaagctggagaccgaggagaccgcctagagcggagtgaacggggaggggaccgtggggaccggcttgatcgtgcgcggacacctgctaccaagcggagcttcagcaaggaagtggaggagcggagtagagaacggccctcccagcctgaggggctgcgcaaggcagctagcctcacggaggatcgggaccgtgggcgggatgccgtgaagcgagaagctgccctacccccagtgagccccctgaaggcggctctctctgaggaggagttagagaagaaatccaaggctatcattgaggaatatctccatctcaatgacatgaaagaggcagtccagtgcgtgcaggagctggcctcaccctccttgctcttcatctttgtacggcatggtgtcgagtctacgctggagcgcagtgccattgctcgtgagcatatggggcagctgctgcaccagctgctctgtgctgggcatctgtctactgctcagtactaccaagggttgtatgaaatcttggaattggctgaggacatggaaattgacatcccccacgtgtggctctacctagcggaactggtaacacccattctgcaggaaggtggggtgcccatgggggagctgttcagggagattacaaagcctctgagaccgttgggcaaagctgcttccctgttgctggagatcctgggcctcctgtgcaaaagcatgggtcctaaaaaggtggggacgctgtggcgagaagccgggcttagctggaaggaatttctacctgaaggccaggacattggtgcattcgtcgctgaacagaaggtggagtataccctgggagaggagtcggaagcccctggccagagggcactcccctccgaggagctgaacaggcagctggagaagctgctgaaggagggcagcagtaaccagcgggtgttcgactggatagaggccaacctgagtgagcagcagatagtatccaacacgttagttcgagccctcatgacggctgtctgctattctgcaattatttttgagactcccctccgagtggacgttgcagtgctgaaagcgcgagcgaagctgctgcagaaatacctgtgtgacgagcagaaggagctacaggcgctctacgccctccaggcccttgtagtgaccttagaacagcctcccaacctgctgcggatgttctttgacgcactgtatgacgaggacgtggtgaaggaggatgccttctacagttgggagagtagcaaggaccccgctgagcagcagggcaagggtgtggcccttaaatctgtcacagccttcttcaagtggctccgtgaagcagaggaggagtctgaccacaactgagggctggtggggccggggacctggagccccatggacacacagatggcccggctagccgcctggactgcaggggggcggcagcagcggcggtggcagtgggtgcctgtagtgtgatgtgtctgaactaataaagtggctgaagaggcaggatggcttggggctgcctgggcccccctccaggatgccgccaggtgtccctctcctccccctggggcacagagatatattatatataaagtcttgaaatttggtgtgtcttggggtggggaggggcaccaacgcctgcccctggggtccttttttttattttctgaaaatcactctcgggactgccgtcctcgctgctgggggcatatgccccagcccctgtaccacccctgctgttgcctgggcagggggaagggggggcacggtgcctgtaattattaaacatgaattcaattaagctca

SEQ ID NO: 57329 - DNA, 5343 bp, Homo sapiens
cctgtgtgcccctgggccaggcccgaacccggtgtccccgggtggggggtggggacgccacggccgaagcagctagctccgttcgtgatccgggagcctggtgccagcgagacctggaatttccggtctggttggtctggggccccgcggagccaggttgataccctcacctcccaaccccaggccctcggatgcccagaacctgtaggccgcaccgtggacttgttcttaatcgaggggcacttctaccctagccgggcccagcccccgagcagtgcagcctcccgagtgcagagtgcagcccctgcccgccctggcccagctgcccatgtctaccctgctggatcccaagtaatgatgatcccttcccagatctcctacccagcctcccagggggcctactacatccctggacaggggcgttccacatacgttgtcccgacacagcagtaccctgtgcagccaggagccccaggcttctatccaggtgcaagccctacagaatttgggacctacgctggcgcctactatccagcccaaggggtgcagcagtttcccactggcgtggcccccgccccagttttgatgaaccagccaccccagattgctcccaagagggagcgtaagacgatccgaattcgagatccaaaccaaggaggaaaggatatcacagaggagatcatgtctggggcccgcactgcctccacacccacccctccccagacgggaggcggtctggagcctcaagctaatggggagacgccccaggttgctgtcattgtccggccagatgaccggtcacagggagcaatcattgctgaccggccagggctgcctggcccagagcatagcccttcagaatcccagccttcgtcgccttctccgaccccatcaccatccccagtcttggaaccggggtctgagcctaatctcgcagtcctctctattcctggggacactatgacaactatacaaatgtctgtagaagaatcaacccccatctcccgtgaaactggggagccatatcgcctctctccagaacccactcctctcgccgaacccatactggaagtagaagtgacacttagcaaaccggttccagaatctgagttttcttccagtcctctccaggctcccacccctttggcatctcacacagtggaaattcatgagcctaatggcatggtcccatctgaagatctggaaccagaggtggagtcaagcccagagcttgctcctcccccagcttgcccctccgaatcccctgtgcccattgctccaactgcccaacctgaggaactgctcaacggagccccctcgccaccagctgtggacttaagcccagtcagtgagccagaggagcaggccaaggaggtgacagcatcagtggcgccccccaccatcccctctgctactccagctacggctccttcagctacttccccagctcaggaggaggaaatggaagaagaagaagaagaggaagaaggagaagcaggagaagcaggagaagctgagagtgagaaaggaggagaggaactgctccccccagagagtacccctattccagccaacttgtctcagaatttggaggcagcagcagccactcaagtggcagtatctgtgccaaagaggagacggaaaattaaggagctaaataagaaggaggctgttggagaccttctggatgccttcaaggaggcgaacccggcagtaccagaggtggaaaatcagcctcctgcaggcagcaatccaggcccagagtctgagggcagtggtgtgcccccacgtcctgaggaagcagatgagacctgggactcaaaggaagacaaaattcacaatgctgagaacatccagcccggggaacagaagtatgaatataagtcagatcagtggaagcctctaaacctagaggagaaaaaacgttacgaccgtgagttcctgcttggttttcagttcatctttgccagtatgcagaagccagagggattgccacatatcagtgacgtggtgctggacaaggccaataaaacaccactgcggccactggatcccactagactacaaggcataaattgtggcccagacttcactccatcctttgccaaccttggccggacaacccttagcacccgtgggcccccaaggggtgggccaggtggggagctgccccgtgggccggctggcctgggaccccggcgctctcagcagggaccccgaaaagaaccacgcaagatcattgccacagtgttaatgaccgaagatataaaactgaacaaagcagagaaagcctggaaacccagcagcaagcggacggcggctgataaggatcgaggggaagaagatgctgatggcagcaaaacccaggacctattccgcagggtgcgctccatcctgaataaactgacaccccagatgttccagcagctgatgaagcaagtgacgcagctggccatcgacaccgaggaacgcctcaaaggggtcattgacctcatttttgagaaggccatttcagagcccaacttctctgtggcctatgccaacatgtgccgctgcctcatggcgctgaaagtgcccactacggaaaagccaacagtgactgtgaacttccgaaagctgttgttgaatcgatgtcagaaggagtttgagaaagacaaagatgatgatgaggtttttgagaagaagcaaaaagagatggatgaagctgctacggcagaggaacgaggacgcctgaaggaagagctggaagaggctcgggacatagcccggcggcgctctttagggaatatcaagtttattggagagttgttcaaactgaagatgttaacagaggcaataatgcatgactgtgtggtcaaactgcttaagaaccatgatgaagagtcccttgagtgcctttgtcgtctgctcaccaccattggcaaagacctggactttgaaaaagccaagccccgaatggatcagtatttcaaccagatggaaaaaatcattaaagaaaagaagacgtcatcccgcatccgctttatgctgcaggacgtgctggatctgcgagggagcaattgggtgccacgccgaggggatcagggtcccaagaccattgaccagatccataaggaggctgagatggaagaacatcgagagcacatcaaagtgcagcagctcatggccaagggcagtgacaagcgtcggggcggtcctccaggccctcccatcagccgtggacttccccttgtggatgatggtggctggaacacagttcccatcagcaaaggtagccgccccattgacacctcacgactcaccaagatcaccaagcctggctccatcgattctaacaaccagctctttgcacctggagggcgactgagctggggcaagggcagcagcggaggctcaggagccaagccctcagacgcagcatcagaagctgctcgcccagctactagtactttgaatcgcttctcagcccttcaacaagcggtacccacagaaagcacagataatagacgtgtggtgcagaggagtagcttgagccgagaacgaggcgagaaagctggagaccgaggagaccgcctagagcggagtgaacggggaggggaccgtggggaccggcttgatcgtgcgcggacacctgctaccaagcggagcttcagcaaggaagtggaggagcggagtagagaacggccctcccagcctgaggggctgcgcaaggcagctagcctcacggaggatcgggaccgtgggcgggatgccgtgaagcgagaagctgccctacccccagtgagccccctgaaggcggctctctctgaggaggagttagagaagaaatccaaggctatcattgaggaatatctccatctcaatgacatgaaagaggcagtccagtgcgtgcaggagctggcctcaccctccttgctcttcatctttgtacggcatggtgtcgagtctacgctggagcgcagtgccattgctcgtgagcatatggggcagctgctgcaccagctgctctgtgctgggcatctgtctactgctcagtactaccaagggttgtatgaaatcttggaattggctgaggacatggaaattgacatcccccacgtgtggctctacctagcggaactggtaacacccattctgcaggaaggtggggtgcccatgggggagctgttcagggagattacaaagcctctgagaccgttgggcaaagctgcttccctgttgctggagatcctgggcctcctgtgcaaaagcatgggtcctaaaaaggtggggacgctgtggcgagaagccgggcttagctggaaggaatttctacctgaaggccaggacattggtgcattcgtcgctgaacagaaggtggagtataccctgggagaggagtcggaagcccctggccagagggcactcccctccgaggagctgaacaggcagctggagaagctgctgaaggagggcagcagtaaccagcgggtgttcgactggatagaggccaacctgagtgagcagcagatagtatccaacacgttagttcgagccctcatgacggctgtctgctattctgcaattatttttgagactcccctccgagtggacgttgcagtgctgaaagcgcgagcgaagctgctgcagaaatacctgtgtgacgagcagaaggagctacaggcgctctacgccctccaggcccttgtagtgaccttagaacagcctcccaacctgctgcggatgttctttgacgcactgtatgacgaggacgtggtgaaggaggatgccttctacagttgggagagtagcaaggaccccgctgagcagcagggcaagggtgtggcccttaaatctgtcacagccttcttcaagtggctccgtgaagcagaggaggagtctgaccacaactgagggctggtggggccggggacctggagccccatggacacacagatggcccggctagccgcctggactgcaggggggcggcagcagcggcggtggcagtgggtgcctgtagtgtgatgtgtctgaactaataaagtggctgaagaggcaggatggcttggggctgcctgggcccccctccaggatgccgccaggtgtccctctcctccccctggggcacagagatatattatatataaagtcttgaaatttggtgtgtcttggggtggggaggggcaccaacgcctgcccctggggtccttttttttattttctgaaaatcactctcgggactgccgtcctcgctgctgggggcatatgccccagcccctgtaccacccctgctgttgcctgggcagggggaagggggggcacggtgcctgtaattattaaacatgaattcaattaagctca

SEQ ID NO: 57330 - DNA, 4938 bp, Homo sapiens
tctagatgggggtcctgggccccagggtgtgcagccactgacttggggactgctggtggggtagggatgagggagggaggggcattgtgatgtacagggctgctctgtgagatcaagggtctcttaagggtgggagctggggcagggactacgagagcagccagatgggctgaaagtggaactcaaggggtttctggcacctacctacctgcttcccgctgggggatccgaattcgagatccaaaccaaggaggaaaggatatcacagaggagatcatgtctggggcccgcactgcctccacacccacccctccccagacgggaggcggtctggagcctcaagctaatggggagacgccccaggttgctgtcattgtccggccagatgaccggtcacagggagcaatcattgctgaccggccagggctgcctggcccagagcatagcccttcagaatcccagccttcgtcgccttctccgaccccatcaccatccccagtcttggaaccggggtctgagcctaatctcgcagtcctctctattcctggggacactatgacaactatacaaatgtctgtagaagaatcaacccccatctcccgtgaaactggggagccatatcgcctctctccagaacccactcctctcgccgaacccatactggaagtagaagtgacacttagcaaaccggttccagaatctgagttttcttccagtcctctccaggctcccacccctttggcatctcacacagtggaaattcatgagcctaatggcatggtcccatctgaagatctggaaccagaggtggagtcaagcccagagcttgctcctcccccagcttgcccctccgaatcccctgtgcccattgctccaactgcccaacctgaggaactgctcaacggagccccctcgccaccagctgtggacttaagcccagtcagtgagccagaggagcaggccaaggaggtgacagcatcagtggcgccccccaccatcccctctgctactccagctacggctccttcagctacttccccagctcaggaggaggaaatggaagaagaagaagaagaggaagaaggagaagcaggagaagcaggagaagctgagagtgagaaaggaggagaggaactgctccccccagagagtacccctattccagccaacttgtctcagaatttggaggcagcagcagccactcaagtggcagtatctgtgccaaagaggagacggaaaattaaggagctaaataagaaggaggctgttggagaccttctggatgccttcaaggaggcgaacccggcagtaccagaggtggaaaatcagcctcctgcaggcagcaatccaggcccagagtctgagggcagtggtgtgcccccacgtcctgaggaagcagatgagacctgggactcaaaggaagacaaaattcacaatgctgagaacatccagcccggggaacagaagtatgaatataagtcagatcagtggaagcctctaaacctagaggagaaaaaacgttacgaccgtgagttcctgcttggttttcagttcatctttgccagtatgcagaagccagagggattgccacatatcagtgacgtggtgctggacaaggccaataaaacaccactgcggccactggatcccactagactacaaggcataaattgtggcccagacttcactccatcctttgccaaccttggccggacaacccttagcacccgtgggcccccaaggggtgggccaggtggggagctgccccgtgggccggctggcctgggaccccggcgctctcagcagggaccccgaaaagaaccacgcaagatcattgccacagtgttaatgaccgaagatataaaactgaacaaagcagagaaagcctggaaacccagcagcaagcggacggcggctgataaggatcgaggggaagaagatgctgatggcagcaaaacccaggacctattccgcagggtgcgctccatcctgaataaactgacaccccagatgttccagcagctgatgaagcaagtgacgcagctggccatcgacaccgaggaacgcctcaaaggggtcattgacctcatttttgagaaggccatttcagagcccaacttctctgtggcctatgccaacatgtgccgctgcctcatggcgctgaaagtgcccactacggaaaagccaacagtgactgtgaacttccgaaagctgttgttgaatcgatgtcagaaggagtttgagaaagacaaagatgatgatgaggtttttgagaagaagcaaaaagagatggatgaagctgctacggcagaggaacgaggacgcctgaaggaagagctggaagaggctcgggacatagcccggcggcgctctttagggaatatcaagtttattggagagttgttcaaactgaagatgttaacagaggcaataatgcatgactgtgtggtcaaactgcttaagaaccatgatgaagagtcccttgagtgcctttgtcgtctgctcaccaccattggcaaagacctggactttgaaaaagccaagccccgaatggatcagtatttcaaccagatggaaaaaatcattaaagaaaagaagacgtcatcccgcatccgctttatgctgcaggacgtgctggatctgcgagggagcaattgggtgccacgccgaggggatcagggtcccaagaccattgaccagatccataaggaggctgagatggaagaacatcgagagcacatcaaagtgcagcagctcatggccaagggcagtgacaagcgtcggggcggtcctccaggccctcccatcagccgtggacttccccttgtggatgatggtggctggaacacagttcccatcagcaaaggtagccgccccattgacacctcacgactcaccaagatcaccaagcctggctccatcgattctaacaaccagctctttgcacctggagggcgactgagctggggcaagggcagcagcggaggctcaggagccaagccctcagacgcagcatcagaagctgctcgcccagctactagtactttgaatcgcttctcagcccttcaacaagcggtacccacagaaagcacagataatagacgtgtggtgcagaggagtagcttgagccgagaacgaggcgagaaagctggagaccgaggagaccgcctagagcggagtgaacggggaggggaccgtggggaccggcttgatcgtgcgcggacacctgctaccaagcggagcttcagcaaggaagtggaggagcggagtagagaacggccctcccagcctgaggggctgcgcaaggcagctagcctcacggaggatcgggaccgtgggcgggatgccgtgaagcgagaagctgccctacccccagtgagccccctgaaggcggctctctctgaggaggagttagagaagaaatccaaggctatcattgaggaatatctccatctcaatgacatgaaagaggcagtccagtgcgtgcaggagctggcctcaccctccttgctcttcatctttgtacggcatggtgtcgagtctacgctggagcgcagtgccattgctcgtgagcatatggggcagctgctgcaccagctgctctgtgctgggcatctgtctactgctcagtactaccaagggttgtatgaaatcttggaattggctgaggacatggaaattgacatcccccacgtgtggctctacctagcggaactggtaacacccattctgcaggaaggtggggtgcccatgggggagctgttcagggagattacaaagcctctgagaccgttgggcaaagctgcttccctgttgctggagatcctgggcctcctgtgcaaaagcatgggtcctaaaaaggtggggacgctgtggcgagaagccgggcttagctggaaggaatttctacctgaaggccaggacattggtgcattcgtcgctgaacagaaggtggagtataccctgggagaggagtcggaagcccctggccagagggcactcccctccgaggagctgaacaggcagctggagaagctgctgaaggagggcagcagtaaccagcgggtgttcgactggatagaggccaacctgagtgagcagcagatagtatccaacacgttagttcgagccctcatgacggctgtctgctattctgcaattatttttgagactcccctccgagtggacgttgcagtgctgaaagcgcgagcgaagctgctgcagaaatacctgtgtgacgagcagaaggagctacaggcgctctacgccctccaggcccttgtagtgaccttagaacagcctcccaacctgctgcggatgttctttgacgcactgtatgacgaggacgtggtgaaggaggatgccttctacagttgggagagtagcaaggaccccgctgagcagcagggcaagggtgtggcccttaaatctgtcacagccttcttcaagtggctccgtgaagcagaggaggagtctgaccacaactgagggctggtggggccggggacctggagccccatggacacacagatggcccggctagccgcctggactgcaggggggcggcagcagcggcggtggcagtgggtgcctgtagtgtgatgtgtctgaactaataaagtggctgaagaggcaggatggcttggggctgcctgggcccccctccaggatgccgccaggtgtccctctcctccccctggggcacagagatatattatatataaagtcttgaaatttggtgtgtcttggggtggggaggggcaccaacgcctgcccctggggtccttttttttattttctgaaaatcactctcgggactgccgtcctcgctgctgggggcatatgccccagcccctgtaccacccctgctgttgcctgggcagggggaagggggggcacggtgcctgtaattattaaacatgaattcaattaagctca

SEQ ID NO: 57331 - DNA, 5144 bp, Homo sapiens
ccggctgcgcctgcggagaagcggtggccgccgagcgggatctgtgcggggagccggaaatggttgtggactacgtctgtgcggctgcgtggggctcggccgcgcggactgaaggagactgaaggtgctggggggaccctgatgtggcaccaaatgaaatgaacaaagctccacagtccacaggccccccacccgccccatcccccggactcccacaggggcgttccacatacgttgtcccgacacagcagtaccctgtgcagccaggagccccaggcttctatccaggtgcaagccctacagaatttgggacctacgctggcgcctactatccagcccaaggggtgcagcagtttcccactggcgtggcccccgccccagttttgatgaaccagccaccccagattgctcccaagagggagcgtaagacgatccgaattcgagatccaaaccaaggaggaaaggatatcacagaggagatcatgtctggggcccgcactgcctccacacccacccctccccagacgggaggcggtctggagcctcaagctaatggggagacgccccaggttgctgtcattgtccggccagatgaccggtcacagggagcaatcattgctgaccggccagggctgcctggcccagagcatagcccttcagaatcccagccttcgtcgccttctccgaccccatcaccatccccagtcttggaaccggggtctgagcctaatctcgcagtcctctctattcctggggacactatgacaactatacaaatgtctgtagaagaatcaacccccatctcccgtgaaactggggagccatatcgcctctctccagaacccactcctctcgccgaacccatactggaagtagaagtgacacttagcaaaccggttccagaatctgagttttcttccagtcctctccaggctcccacccctttggcatctcacacagtggaaattcatgagcctaatggcatggtcccatctgaagatctggaaccagaggtggagtcaagcccagagcttgctcctcccccagcttgcccctccgaatcccctgtgcccattgctccaactgcccaacctgaggaactgctcaacggagccccctcgccaccagctgtggacttaagcccagtcagtgagccagaggagcaggccaaggaggtgacagcatcagtggcgccccccaccatcccctctgctactccagctacggctccttcagctacttccccagctcaggaggaggaaatggaagaagaagaagaagaggaagaaggagaagcaggagaagcaggagaagctgagagtgagaaaggaggagaggaactgctccccccagagagtacccctattccagccaacttgtctcagaatttggaggcagcagcagccactcaagtggcagtatctgtgccaaagaggagacggaaaattaaggagctaaataagaaggaggctgttggagaccttctggatgccttcaaggaggcgaacccggcagtaccagaggtggaaaatcagcctcctgcaggcagcaatccaggcccagagtctgagggcagtggtgtgcccccacgtcctgaggaagcagatgagacctgggactcaaaggaagacaaaattcacaatgctgagaacatccagcccggggaacagaagtatgaatataagtcagatcagtggaagcctctaaacctagaggagaaaaaacgttacgaccgtgagttcctgcttggttttcagttcatctttgccagtatgcagaagccagagggattgccacatatcagtgacgtggtgctggacaaggccaataaaacaccactgcggccactggatcccactagactacaaggcataaattgtggcccagacttcactccatcctttgccaaccttggccggacaacccttagcacccgtgggcccccaaggggtgggccaggtggggagctgccccgtgggccggctggcctgggaccccggcgctctcagcagggaccccgaaaagaaccacgcaagatcattgccacagtgttaatgaccgaagatataaaactgaacaaagcagagaaagcctggaaacccagcagcaagcggacggcggctgataaggatcgaggggaagaagatgctgatggcagcaaaacccaggacctattccgcagggtgcgctccatcctgaataaactgacaccccagatgttccagcagctgatgaagcaagtgacgcagctggccatcgacaccgaggaacgcctcaaaggggtcattgacctcatttttgagaaggccatttcagagcccaacttctctgtggcctatgccaacatgtgccgctgcctcatggcgctgaaagtgcccactacggaaaagccaacagtgactgtgaacttccgaaagctgttgttgaatcgatgtcagaaggagtttgagaaagacaaagatgatgatgaggtttttgagaagaagcaaaaagagatggatgaagctgctacggcagaggaacgaggacgcctgaaggaagagctggaagaggctcgggacatagcccggcggcgctctttagggaatatcaagtttattggagagttgttcaaactgaagatgttaacagaggcaataatgcatgactgtgtggtcaaactgcttaagaaccatgatgaagagtcccttgagtgcctttgtcgtctgctcaccaccattggcaaagacctggactttgaaaaagccaagccccgaatggatcagtatttcaaccagatggaaaaaatcattaaagaaaagaagacgtcatcccgcatccgctttatgctgcaggacgtgctggatctgcgagggagcaattgggtgccacgccgaggggatcagggtcccaagaccattgaccagatccataaggaggctgagatggaagaacatcgagagcacatcaaagtgcagcagctcatggccaagggcagtgacaagcgtcggggcggtcctccaggccctcccatcagccgtggacttccccttgtggatgatggtggctggaacacagttcccatcagcaaaggtagccgccccattgacacctcacgactcaccaagatcaccaagcctggctccatcgattctaacaaccagctctttgcacctggagggcgactgagctggggcaagggcagcagcggaggctcaggagccaagccctcagacgcagcatcagaagctgctcgcccagctactagtactttgaatcgcttctcagcccttcaacaagcggtacccacagaaagcacagataatagacgtgtggtgcagaggagtagcttgagccgagaacgaggcgagaaagctggagaccgaggagaccgcctagagcggagtgaacggggaggggaccgtggggaccggcttgatcgtgcgcggacacctgctaccaagcggagcttcagcaaggaagtggaggagcggagtagagaacggccctcccagcctgaggggctgcgcaaggcagctagcctcacggaggatcgggaccgtgggcgggatgccgtgaagcgagaagctgccctacccccagtgagccccctgaaggcggctctctctgaggaggagttagagaagaaatccaaggctatcattgaggaatatctccatctcaatgacatgaaagaggcagtccagtgcgtgcaggagctggcctcaccctccttgctcttcatctttgtacggcatggtgtcgagtctacgctggagcgcagtgccattgctcgtgagcatatggggcagctgctgcaccagctgctctgtgctgggcatctgtctactgctcagtactaccaagggttgtatgaaatcttggaattggctgaggacatggaaattgacatcccccacgtgtggctctacctagcggaactggtaacacccattctgcaggaaggtggggtgcccatgggggagctgttcagggagattacaaagcctctgagaccgttgggcaaagctgcttccctgttgctggagatcctgggcctcctgtgcaaaagcatgggtcctaaaaaggtggggacgctgtggcgagaagccgggcttagctggaaggaatttctacctgaaggccaggacattggtgcattcgtcgctgaacagaaggtggagtataccctgggagaggagtcggaagcccctggccagagggcactcccctccgaggagctgaacaggcagctggagaagctgctgaaggagggcagcagtaaccagcgggtgttcgactggatagaggccaacctgagtgagcagcagatagtatccaacacgttagttcgagccctcatgacggctgtctgctattctgcaattatttttgagactcccctccgagtggacgttgcagtgctgaaagcgcgagcgaagctgctgcagaaatacctgtgtgacgagcagaaggagctacaggcgctctacgccctccaggcccttgtagtgaccttagaacagcctcccaacctgctgcggatgttctttgacgcactgtatgacgaggacgtggtgaaggaggatgccttctacagttgggagagtagcaaggaccccgctgagcagcagggcaagggtgtggcccttaaatctgtcacagccttcttcaagtggctccgtgaagcagaggaggagtctgaccacaactgagggctggtggggccggggacctggagccccatggacacacagatggcccggctagccgcctggactgcaggggggcggcagcagcggcggtggcagtgggtgcctgtagtgtgatgtgtctgaactaataaagtggctgaagaggcaggatggcttggggctgcctgggcccccctccaggatgccgccaggtgtccctctcctccccctggggcacagagatatattatatataaagtcttgaaatttggtgtgtcttggggtggggaggggcaccaacgcctgcccctggggtccttttttttattttctgaaaatcactctcgggactgccgtcctcgctgctgggggcatatgccccagcccctgtaccacccctgctgttgcctgggcagggggaagggggggcacggtgcctgtaattattaaacatgaattcaattaagctca

SEQ ID NO: 57332 - DNA, 4707 bp, Homo sapiens
ggtcggtacctctcgaattcggatcgtcttacgctccctctgggagcatctggggcccgcactgcctccacacccacccctccccagacgggaggcggtctggagcctcaagctaatggggagacgccccaggttgctgtcattgtccggccagatgaccggtcacagggagcaatcattgctgaccggccagggctgcctggcccagagcatagcccttcagaatcccagccttcgtcgccttctccgaccccatcaccatccccagtcttggaaccggggtctgagcctaatctcgcagtcctctctattcctggggacactatgacaactatacaaatgtctgtagaagaatcaacccccatctcccgtgaaactggggagccatatcgcctctctccagaacccactcctctcgccgaacccatactggaagtagaagtgacacttagcaaaccggttccagaatctgagttttcttccagtcctctccaggctcccacccctttggcatctcacacagtggaaattcatgagcctaatggcatggtcccatctgaagatctggaaccagaggtggagtcaagcccagagcttgctcctcccccagcttgcccctccgaatcccctgtgcccattgctccaactgcccaacctgaggaactgctcaacggagccccctcgccaccagctgtggacttaagcccagtcagtgagccagaggagcaggccaaggaggtgacagcatcagtggcgccccccaccatcccctctgctactccagctacggctccttcagctacttccccagctcaggaggaggaaatggaagaagaagaagaagaggaagaaggagaagcaggagaagcaggagaagctgagagtgagaaaggaggagaggaactgctccccccagagagtacccctattccagccaacttgtctcagaatttggaggcagcagcagccactcaagtggcagtatctgtgccaaagaggagacggaaaattaaggagctaaataagaaggaggctgttggagaccttctggatgccttcaaggaggcgaacccggcagtaccagaggtggaaaatcagcctcctgcaggcagcaatccaggcccagagtctgagggcagtggtgtgcccccacgtcctgaggaagcagatgagacctgggactcaaaggaagacaaaattcacaatgctgagaacatccagcccggggaacagaagtatgaatataagtcagatcagtggaagcctctaaacctagaggagaaaaaacgttacgaccgtgagttcctgcttggttttcagttcatctttgccagtatgcagaagccagagggattgccacatatcagtgacgtggtgctggacaaggccaataaaacaccactgcggccactggatcccactagactacaaggcataaattgtggcccagacttcactccatcctttgccaaccttggccggacaacccttagcacccgtgggcccccaaggggtgggccaggtggggagctgccccgtgggccggctggcctgggaccccggcgctctcagcagggaccccgaaaagaaccacgcaagatcattgccacagtgttaatgaccgaagatataaaactgaacaaagcagagaaagcctggaaacccagcagcaagcggacggcggctgataaggatcgaggggaagaagatgctgatggcagcaaaacccaggacctattccgcagggtgcgctccatcctgaataaactgacaccccagatgttccagcagctgatgaagcaagtgacgcagctggccatcgacaccgaggaacgcctcaaaggggtcattgacctcatttttgagaaggccatttcagagcccaacttctctgtggcctatgccaacatgtgccgctgcctcatggcgctgaaagtgcccactacggaaaagccaacagtgactgtgaacttccgaaagctgttgttgaatcgatgtcagaaggagtttgagaaagacaaagatgatgatgaggtttttgagaagaagcaaaaagagatggatgaagctgctacggcagaggaacgaggacgcctgaaggaagagctggaagaggctcgggacatagcccggcggcgctctttagggaatatcaagtttattggagagttgttcaaactgaagatgttaacagaggcaataatgcatgactgtgtggtcaaactgcttaagaaccatgatgaagagtcccttgagtgcctttgtcgtctgctcaccaccattggcaaagacctggactttgaaaaagccaagccccgaatggatcagtatttcaaccagatggaaaaaatcattaaagaaaagaagacgtcatcccgcatccgctttatgctgcaggacgtgctggatctgcgagggagcaattgggtgccacgccgaggggatcagggtcccaagaccattgaccagatccataaggaggctgagatggaagaacatcgagagcacatcaaagtgcagcagctcatggccaagggcagtgacaagcgtcggggcggtcctccaggccctcccatcagccgtggacttccccttgtggatgatggtggctggaacacagttcccatcagcaaaggtagccgccccattgacacctcacgactcaccaagatcaccaagcctggctccatcgattctaacaaccagctctttgcacctggagggcgactgagctggggcaagggcagcagcggaggctcaggagccaagccctcagacgcagcatcagaagctgctcgcccagctactagtactttgaatcgcttctcagcccttcaacaagcggtacccacagaaagcacagataatagacgtgtggtgcagaggagtagcttgagccgagaacgaggcgagaaagctggagaccgaggagaccgcctagagcggagtgaacggggaggggaccgtggggaccggcttgatcgtgcgcggacacctgctaccaagcggagcttcagcaaggaagtggaggagcggagtagagaacggccctcccagcctgaggggctgcgcaaggcagctagcctcacggaggatcgggaccgtgggcgggatgccgtgaagcgagaagctgccctacccccagtgagccccctgaaggcggctctctctgaggaggagttagagaagaaatccaaggctatcattgaggaatatctccatctcaatgacatgaaagaggcagtccagtgcgtgcaggagctggcctcaccctccttgctcttcatctttgtacggcatggtgtcgagtctacgctggagcgcagtgccattgctcgtgagcatatggggcagctgctgcaccagctgctctgtgctgggcatctgtctactgctcagtactaccaagggttgtatgaaatcttggaattggctgaggacatggaaattgacatcccccacgtgtggctctacctagcggaactggtaacacccattctgcaggaaggtggggtgcccatgggggagctgttcagggagattacaaagcctctgagaccgttgggcaaagctgcttccctgttgctggagatcctgggcctcctgtgcaaaagcatgggtcctaaaaaggtggggacgctgtggcgagaagccgggcttagctggaaggaatttctacctgaaggccaggacattggtgcattcgtcgctgaacagaaggtggagtataccctgggagaggagtcggaagcccctggccagagggcactcccctccgaggagctgaacaggcagctggagaagctgctgaaggagggcagcagtaaccagcgggtgttcgactggatagaggccaacctgagtgagcagcagatagtatccaacacgttagttcgagccctcatgacggctgtctgctattctgcaattatttttgagactcccctccgagtggacgttgcagtgctgaaagcgcgagcgaagctgctgcagaaatacctgtgtgacgagcagaaggagctacaggcgctctacgccctccaggcccttgtagtgaccttagaacagcctcccaacctgctgcggatgttctttgacgcactgtatgacgaggacgtggtgaaggaggatgccttctacagttgggagagtagcaaggaccccgctgagcagcagggcaagggtgtggcccttaaatctgtcacagccttcttcaagtggctccgtgaagcagaggaggagtctgaccacaactgagggctggtggggccggggacctggagccccatggacacacagatggcccggctagccgcctggactgcaggggggcggcagcagcggcggtggcagtgggtgcctgtagtgtgatgtgtctgaactaataaagtggctgaagaggcaggatggcttggggctgcctgggcccccctccaggatgccgccaggtgtccctctcctccccctggggcacagagatatattatatataaagtcttgaaatttggtgtgtcttggggtggggaggggcaccaacgcctgcccctggggtccttttttttattttctgaaaatcactctcgggactgccgtcctcgctgctgggggcatatgccccagcccctgtaccacccctgctgttgcctgggcagggggaagggggggcacggtgcctgtaattattaaacatgaattcaattaagctca

SEQ ID NO: 57333 - DNA, 4348 bp, Homo sapiens
ttttttttttgtggggaaaagtgagccatatcgcctctctccagaacccactcctctcgccgaacccatactggaagtagaagtgacacttagcaaaccggttccagaatctgagttttcttccagtcctctccaggctcccacccctttggcatctcacacagtggaaattcatgagcctaatggcatggtcccatctgaagatctggaaccagaggtggagtcaagcccagagcttgctcctcccccagcttgcccctccgaatcccctgtgcccattgctccaactgcccaacctgaggaactgctcaacggagccccctcgccaccagctgtggacttaagcccagtcagtgagccagaggagcaggccaaggaggtgacagcatcagtggcgccccccaccatcccctctgctactccagctacggctccttcagctacttccccagctcaggaggaggaaatggaagaagaagaagaagaggaagaaggagaagcaggagaagcaggagaagctgagagtgagaaaggaggagaggaactgctccccccagagagtacccctattccagccaacttgtctcagaatttggaggcagcagcagccactcaagtggcagtatctgtgccaaagaggagacggaaaattaaggagctaaataagaaggaggctgttggagaccttctggatgccttcaaggaggcgaacccggcagtaccagaggtggaaaatcagcctcctgcaggcagcaatccaggcccagagtctgagggcagtggtgtgcccccacgtcctgaggaagcagatgagacctgggactcaaaggaagacaaaattcacaatgctgagaacatccagcccggggaacagaagtatgaatataagtcagatcagtggaagcctctaaacctagaggagaaaaaacgttacgaccgtgagttcctgcttggttttcagttcatctttgccagtatgcagaagccagagggattgccacatatcagtgacgtggtgctggacaaggccaataaaacaccactgcggccactggatcccactagactacaaggcataaattgtggcccagacttcactccatcctttgccaaccttggccggacaacccttagcacccgtgggcccccaaggggtgggccaggtggggagctgccccgtgggccggctggcctgggaccccggcgctctcagcagggaccccgaaaagaaccacgcaagatcattgccacagtgttaatgaccgaagatataaaactgaacaaagcagagaaagcctggaaacccagcagcaagcggacggcggctgataaggatcgaggggaagaagatgctgatggcagcaaaacccaggacctattccgcagggtgcgctccatcctgaataaactgacaccccagatgttccagcagctgatgaagcaagtgacgcagctggccatcgacaccgaggaacgcctcaaaggggtcattgacctcatttttgagaaggccatttcagagcccaacttctctgtggcctatgccaacatgtgccgctgcctcatggcgctgaaagtgcccactacggaaaagccaacagtgactgtgaacttccgaaagctgttgttgaatcgatgtcagaaggagtttgagaaagacaaagatgatgatgaggtttttgagaagaagcaaaaagagatggatgaagctgctacggcagaggaacgaggacgcctgaaggaagagctggaagaggctcgggacatagcccggcggcgctctttagggaatatcaagtttattggagagttgttcaaactgaagatgttaacagaggcaataatgcatgactgtgtggtcaaactgcttaagaaccatgatgaagagtcccttgagtgcctttgtcgtctgctcaccaccattggcaaagacctggactttgaaaaagccaagccccgaatggatcagtatttcaaccagatggaaaaaatcattaaagaaaagaagacgtcatcccgcatccgctttatgctgcaggacgtgctggatctgcgagggagcaattgggtgccacgccgaggggatcagggtcccaagaccattgaccagatccataaggaggctgagatggaagaacatcgagagcacatcaaagtgcagcagctcatggccaagggcagtgacaagcgtcggggcggtcctccaggccctcccatcagccgtggacttccccttgtggatgatggtggctggaacacagttcccatcagcaaaggtagccgccccattgacacctcacgactcaccaagatcaccaagcctggctccatcgattctaacaaccagctctttgcacctggagggcgactgagctggggcaagggcagcagcggaggctcaggagccaagccctcagacgcagcatcagaagctgctcgcccagctactagtactttgaatcgcttctcagcccttcaacaagcggtacccacagaaagcacagataatagacgtgtggtgcagaggagtagcttgagccgagaacgaggcgagaaagctggagaccgaggagaccgcctagagcggagtgaacggggaggggaccgtggggaccggcttgatcgtgcgcggacacctgctaccaagcggagcttcagcaaggaagtggaggagcggagtagagaacggccctcccagcctgaggggctgcgcaaggcagctagcctcacggaggatcgggaccgtgggcgggatgccgtgaagcgagaagctgccctacccccagtgagccccctgaaggcggctctctctgaggaggagttagagaagaaatccaaggctatcattgaggaatatctccatctcaatgacatgaaagaggcagtccagtgcgtgcaggagctggcctcaccctccttgctcttcatctttgtacggcatggtgtcgagtctacgctggagcgcagtgccattgctcgtgagcatatggggcagctgctgcaccagctgctctgtgctgggcatctgtctactgctcagtactaccaagggttgtatgaaatcttggaattggctgaggacatggaaattgacatcccccacgtgtggctctacctagcggaactggtaacacccattctgcaggaaggtggggtgcccatgggggagctgttcagggagattacaaagcctctgagaccgttgggcaaagctgcttccctgttgctggagatcctgggcctcctgtgcaaaagcatgggtcctaaaaaggtggggacgctgtggcgagaagccgggcttagctggaaggaatttctacctgaaggccaggacattggtgcattcgtcgctgaacagaaggtggagtataccctgggagaggagtcggaagcccctggccagagggcactcccctccgaggagctgaacaggcagctggagaagctgctgaaggagggcagcagtaaccagcgggtgttcgactggatagaggccaacctgagtgagcagcagatagtatccaacacgttagttcgagccctcatgacggctgtctgctattctgcaattatttttgagactcccctccgagtggacgttgcagtgctgaaagcgcgagcgaagctgctgcagaaatacctgtgtgacgagcagaaggagctacaggcgctctacgccctccaggcccttgtagtgaccttagaacagcctcccaacctgctgcggatgttctttgacgcactgtatgacgaggacgtggtgaaggaggatgccttctacagttgggagagtagcaaggaccccgctgagcagcagggcaagggtgtggcccttaaatctgtcacagccttcttcaagtggctccgtgaagcagaggaggagtctgaccacaactgagggctggtggggccggggacctggagccccatggacacacagatggcccggctagccgcctggactgcaggggggcggcagcagcggcggtggcagtgggtgcctgtagtgtgatgtgtctgaactaataaagtggctgaagaggcaggatggcttggggctgcctgggcccccctccaggatgccgccaggtgtccctctcctccccctggggcacagagatatattatatataaagtcttgaaatttggtgtgtcttggggtggggaggggcaccaacgcctgcccctggggtccttttttttattttctgaaaatcactctcgggactgccgtcctcgctgctgggggcatatgccccagcccctgtaccacccctgctgttgcctgggcagggggaagggggggcacggtgcctgtaattattaaacatgaattcaattaagctca

SEQ ID NO: 57334 - DNA, 4315 bp, Homo sapiens
ggccgccctttttttttttgttttaaagtgaatatacaatttatttaacattcaaacttcattaagacatgtgcaatatggcaattttactggggattaaaccctacctaggattgcttgctggggcttagcaacagggtccagttcacacttagcactaattaaatactttattgaataaatacaataccaaacaaaatgctttcaaatgctttctaaaaaaattttaaaggcctttctactcaggctaatgacaaacacaataaaggcagatatgctagtttaacataattggctgattttatacagcacttatatcttttagtccacaagttaatattattaaatgatagagaacatctaatacaaccatttctacagaactaggaaataaatttctaagaaagaaagattttacagaccccatcttttatacccaccccaacagtctaactctaaagaggataaagccaatgactttcctcacaagagctcacgattaacgtcgctttgctatcaaaatctgtatttctgatccgttatgagctttgagacaagattcaaggcagcagcagccactcaagtggcagtatctgtgccaaagaggagacggaaaattaaggagctaaataagaaggaggctgttggagaccttctggatgccttcaaggaggcgaacccggcagtaccagaggtggaaaatcagcctcctgcaggcagcaatccaggcccagagtctgagggcagtggtgtgcccccacgtcctgaggaagcagatgagacctgggactcaaaggaagacaaaattcacaatgctgagaacatccagcccggggaacagaagtatgaatataagtcagatcagtggaagcctctaaacctagaggagaaaaaacgttacgaccgtgagttcctgcttggttttcagttcatctttgccagtatgcagaagccagagggattgccacatatcagtgacgtggtgctggacaaggccaataaaacaccactgcggccactggatcccactagactacaaggcataaattgtggcccagacttcactccatcctttgccaaccttggccggacaacccttagcacccgtgggcccccaaggggtgggccaggtggggagctgccccgtgggccggctggcctgggaccccggcgctctcagcagggaccccgaaaagaaccacgcaagatcattgccacagtgttaatgaccgaagatataaaactgaacaaagcagagaaagcctggaaacccagcagcaagcggacggcggctgataaggatcgaggggaagaagatgctgatggcagcaaaacccaggacctattccgcagggtgcgctccatcctgaataaactgacaccccagatgttccagcagctgatgaagcaagtgacgcagctggccatcgacaccgaggaacgcctcaaaggggtcattgacctcatttttgagaaggccatttcagagcccaacttctctgtggcctatgccaacatgtgccgctgcctcatggcgctgaaagtgcccactacggaaaagccaacagtgactgtgaacttccgaaagctgttgttgaatcgatgtcagaaggagtttgagaaagacaaagatgatgatgaggtttttgagaagaagcaaaaagagatggatgaagctgctacggcagaggaacgaggacgcctgaaggaagagctggaagaggctcgggacatagcccggcggcgctctttagggaatatcaagtttattggagagttgttcaaactgaagatgttaacagaggcaataatgcatgactgtgtggtcaaactgcttaagaaccatgatgaagagtcccttgagtgcctttgtcgtctgctcaccaccattggcaaagacctggactttgaaaaagccaagccccgaatggatcagtatttcaaccagatggaaaaaatcattaaagaaaagaagacgtcatcccgcatccgctttatgctgcaggacgtgctggatctgcgagggagcaattgggtgccacgccgaggggatcagggtcccaagaccattgaccagatccataaggaggctgagatggaagaacatcgagagcacatcaaagtgcagcagctcatggccaagggcagtgacaagcgtcggggcggtcctccaggccctcccatcagccgtggacttccccttgtggatgatggtggctggaacacagttcccatcagcaaaggtagccgccccattgacacctcacgactcaccaagatcaccaagcctggctccatcgattctaacaaccagctctttgcacctggagggcgactgagctggggcaagggcagcagcggaggctcaggagccaagccctcagacgcagcatcagaagctgctcgcccagctactagtactttgaatcgcttctcagcccttcaacaagcggtacccacagaaagcacagataatagacgtgtggtgcagaggagtagcttgagccgagaacgaggcgagaaagctggagaccgaggagaccgcctagagcggagtgaacggggaggggaccgtggggaccggcttgatcgtgcgcggacacctgctaccaagcggagcttcagcaaggaagtggaggagcggagtagagaacggccctcccagcctgaggggctgcgcaaggcagctagcctcacggaggatcgggaccgtgggcgggatgccgtgaagcgagaagctgccctacccccagtgagccccctgaaggcggctctctctgaggaggagttagagaagaaatccaaggctatcattgaggaatatctccatctcaatgacatgaaagaggcagtccagtgcgtgcaggagctggcctcaccctccttgctcttcatctttgtacggcatggtgtcgagtctacgctggagcgcagtgccattgctcgtgagcatatggggcagctgctgcaccagctgctctgtgctgggcatctgtctactgctcagtactaccaagggttgtatgaaatcttggaattggctgaggacatggaaattgacatcccccacgtgtggctctacctagcggaactggtaacacccattctgcaggaaggtggggtgcccatgggggagctgttcagggagattacaaagcctctgagaccgttgggcaaagctgcttccctgttgctggagatcctgggcctcctgtgcaaaagcatgggtcctaaaaaggtggggacgctgtggcgagaagccgggcttagctggaaggaatttctacctgaaggccaggacattggtgcattcgtcgctgaacagaaggtggagtataccctgggagaggagtcggaagcccctggccagagggcactcccctccgaggagctgaacaggcagctggagaagctgctgaaggagggcagcagtaaccagcgggtgttcgactggatagaggccaacctgagtgagcagcagatagtatccaacacgttagttcgagccctcatgacggctgtctgctattctgcaattatttttgagactcccctccgagtggacgttgcagtgctgaaagcgcgagcgaagctgctgcagaaatacctgtgtgacgagcagaaggagctacaggcgctctacgccctccaggcccttgtagtgaccttagaacagcctcccaacctgctgcggatgttctttgacgcactgtatgacgaggacgtggtgaaggaggatgccttctacagttgggagagtagcaaggaccccgctgagcagcagggcaagggtgtggcccttaaatctgtcacagccttcttcaagtggctccgtgaagcagaggaggagtctgaccacaactgagggctggtggggccggggacctggagccccatggacacacagatggcccggctagccgcctggactgcaggggggcggcagcagcggcggtggcagtgggtgcctgtagtgtgatgtgtctgaactaataaagtggctgaagaggcaggatggcttggggctgcctgggcccccctccaggatgccgccaggtgtccctctcctccccctggggcacagagatatattatatataaagtcttgaaatttggtgtgtcttggggtggggaggggcaccaacgcctgcccctggggtccttttttttattttctgaaaatcactctcgggactgccgtcctcgctgctgggggcatatgccccagcccctgtaccacccctgctgttgcctgggcagggggaagggggggcacggtgcctgtaattattaaacatgaattcaattaagctca

SEQ ID NO: 57335 - DNA, 3712 bp, Homo sapiens
tcgatctaaggatcccattagactaaataagaaggaggctgttggagaccttctggatgccttcaaggaggcgaacccggcagtaccagaggtggaaaatcagcctcctgcaggcagcaatccaggcccagagtctgagggcagtggtgtgcccccacgtcctgaggaagcagatgagacctgggactcaaaggaagacaaaattcacaatgctgagaacatccagcccggggaacagaagtatgaatataagtcagatcagtggaagcctctaaacctagaggagaaaaaacgttacgaccgtgagttcctgcttggttttcagttcatctttgccagtatgcagaagccagagggattgccacatatcagtgacgtggtgctggacaaggccaataaaacaccactgcggccactggatcccactagactacaaggcataaattgtggcccagacttcactccatcctttgccaaccttggccggacaacccttagcacccgtgggcccccaaggggtgggccaggtggggagctgccccgtgggccggctggcctgggaccccggcgctctcagcagggaccccgaaaagaaccacgcaagatcattgccacagtgttaatgaccgaagatataaaactgaacaaagcagagaaagcctggaaacccagcagcaagcggacggcggctgataaggatcgaggggaagaagatgctgatggcagcaaaacccaggacctattccgcagggtgcgctccatcctgaataaactgacaccccagatgttccagcagctgatgaagcaagtgacgcagctggccatcgacaccgaggaacgcctcaaaggggtcattgacctcatttttgagaaggccatttcagagcccaacttctctgtggcctatgccaacatgtgccgctgcctcatggcgctgaaagtgcccactacggaaaagccaacagtgactgtgaacttccgaaagctgttgttgaatcgatgtcagaaggagtttgagaaagacaaagatgatgatgaggtttttgagaagaagcaaaaagagatggatgaagctgctacggcagaggaacgaggacgcctgaaggaagagctggaagaggctcgggacatagcccggcggcgctctttagggaatatcaagtttattggagagttgttcaaactgaagatgttaacagaggcaataatgcatgactgtgtggtcaaactgcttaagaaccatgatgaagagtcccttgagtgcctttgtcgtctgctcaccaccattggcaaagacctggactttgaaaaagccaagccccgaatggatcagtatttcaaccagatggaaaaaatcattaaagaaaagaagacgtcatcccgcatccgctttatgctgcaggacgtgctggatctgcgagggagcaattgggtgccacgccgaggggatcagggtcccaagaccattgaccagatccataaggaggctgagatggaagaacatcgagagcacatcaaagtgcagcagctcatggccaagggcagtgacaagcgtcggggcggtcctccaggccctcccatcagccgtggacttccccttgtggatgatggtggctggaacacagttcccatcagcaaaggtagccgccccattgacacctcacgactcaccaagatcaccaagcctggctccatcgattctaacaaccagctctttgcacctggagggcgactgagctggggcaagggcagcagcggaggctcaggagccaagccctcagacgcagcatcagaagctgctcgcccagctactagtactttgaatcgcttctcagcccttcaacaagcggtacccacagaaagcacagataatagacgtgtggtgcagaggagtagcttgagccgagaacgaggcgagaaagctggagaccgaggagaccgcctagagcggagtgaacggggaggggaccgtggggaccggcttgatcgtgcgcggacacctgctaccaagcggagcttcagcaaggaagtggaggagcggagtagagaacggccctcccagcctgaggggctgcgcaaggcagctagcctcacggaggatcgggaccgtgggcgggatgccgtgaagcgagaagctgccctacccccagtgagccccctgaaggcggctctctctgaggaggagttagagaagaaatccaaggctatcattgaggaatatctccatctcaatgacatgaaagaggcagtccagtgcgtgcaggagctggcctcaccctccttgctcttcatctttgtacggcatggtgtcgagtctacgctggagcgcagtgccattgctcgtgagcatatggggcagctgctgcaccagctgctctgtgctgggcatctgtctactgctcagtactaccaagggttgtatgaaatcttggaattggctgaggacatggaaattgacatcccccacgtgtggctctacctagcggaactggtaacacccattctgcaggaaggtggggtgcccatgggggagctgttcagggagattacaaagcctctgagaccgttgggcaaagctgcttccctgttgctggagatcctgggcctcctgtgcaaaagcatgggtcctaaaaaggtggggacgctgtggcgagaagccgggcttagctggaaggaatttctacctgaaggccaggacattggtgcattcgtcgctgaacagaaggtggagtataccctgggagaggagtcggaagcccctggccagagggcactcccctccgaggagctgaacaggcagctggagaagctgctgaaggagggcagcagtaaccagcgggtgttcgactggatagaggccaacctgagtgagcagcagatagtatccaacacgttagttcgagccctcatgacggctgtctgctattctgcaattatttttgagactcccctccgagtggacgttgcagtgctgaaagcgcgagcgaagctgctgcagaaatacctgtgtgacgagcagaaggagctacaggcgctctacgccctccaggcccttgtagtgaccttagaacagcctcccaacctgctgcggatgttctttgacgcactgtatgacgaggacgtggtgaaggaggatgccttctacagttgggagagtagcaaggaccccgctgagcagcagggcaagggtgtggcccttaaatctgtcacagccttcttcaagtggctccgtgaagcagaggaggagtctgaccacaactgagggctggtggggccggggacctggagccccatggacacacagatggcccggctagccgcctggactgcaggggggcggcagcagcggcggtggcagtgggtgcctgtagtgtgatgtgtctgaactaataaagtggctgaagaggcaggatggcttggggctgcctgggcccccctccaggatgccgccaggtgtccctctcctccccctggggcacagagatatattatatataaagtcttgaaatttggtgtgtcttggggtggggaggggcaccaacgcctgcccctggggtccttttttttattttctgaaaatcactctcgggactgccgtcctcgctgctgggggcatatgccccagcccctgtaccacccctgctgttgcctgggcagggggaagggggggcacggtgcctgtaattattaaacatgaattcaattaagctca

SEQ ID NO: 57336 - DNA, 5192 bp, Homo sapiens
ccggctgcgcctgcggagaagcggtggccgccgagcgggatctgtgcggggagccggaaatggttgtggactacgtctgtgcggctgcgtggggctcggccgcgcggactgaaggagactgaagcacttctaccctagccgggcccagcccccgagcagtgcagcctcccgagtgcagagtgcagcccctgcccgccctggcccagctgcccatgtctaccctgctggatcccaagtaatgatgatcccttcccagatctcctacccagcctcccagggggcctactacatccctggacaggggcgttccacatacgttgtcccgacacagcagtaccctgtgcagccaggagccccaggcttctatccaggtgcaagccctacagaatttgggacctacgctggcgcctactatccagcccaaggggtgcagcagtttcccactggcgtggcccccgccccagttttgatgaaccagccaccccagattgctcccaagagggagcgtaagacgatccgaattcgagatccaaaccaaggaggaaaggatatcacagaggagatcatgtctggggcccgcactgcctccacacccacccctccccagacgggaggcggtctggagcctcaagctaatggggagacgccccaggttgctgtcattgtccggccagatgaccggtcacagggagcaatcattgctgaccggccagggctgcctggcccagagcatagcccttcagaatcccagccttcgtcgccttctccgaccccatcaccatccccagtcttggaaccggggtctgagcctaatctcgcagtcctctctattcctggggacactatgacaactatacaaatgtctgtagaagaatcaacccccatctcccgtgaaactggggagccatatcgcctctctccagaacccactcctctcgccgaacccatactggaagtagaagtgacacttagcaaaccggttccagaatctgagttttcttccagtcctctccaggctcccacccctttggcatctcacacagtggaaattcatgagcctaatggcatggtcccatctgaagatctggaaccagaggtggagtcaagcccagagcttgctcctcccccagcttgcccctccgaatcccctgtgcccattgctccaactgcccaacctgaggaactgctcaacggagccccctcgccaccagctgtggacttaagcccagtcagtgagccagaggagcaggccaaggaggtgacagcatcagtggcgccccccaccatcccctctgctactccagctacggctccttcagctacttccccagctcaggaggaggaaatggaagaagaagaagaagaggaagaaggagaagcaggagaagcaggagaagctgagagtgagaaaggaggagaggaactgctccccccagagagtacccctattccagccaacttgtctcagaatttggaggcagcagcagccactcaagtggcagtatctgtgccaaagaggagacggaaaattaaggagctaaataagaaggaggctgttggagaccttctggatgccttcaaggaggcgaacccggcagtaccagaggtggaaaatcagcctcctgcaggcagcaatccaggcccagagtctgagggcagtggtgtgcccccacgtcctgaggaagcagatgagacctgggactcaaaggaagacaaaattcacaatgctgagaacatccagcccggggaacagaagtatgaatataagtcagatcagtggaagcctctaaacctagaggagaaaaaacgttacgaccgtgagttcctgcttggttttcagttcatctttgccagtatgcagaagccagagggattgccacatatcagtgacgtggtgctggacaaggccaataaaacaccactgcggccactggatcccactagactacaaggcataaattgtggcccagacttcactccatcctttgccaaccttggccggacaacccttagcacccgtgggcccccaaggggtgggccaggtggggagctgccccgtgggccggctggcctgggaccccggcgctctcagcagggaccccgaaaagaaccacgcaagatcattgccacagtgttaatgaccgaagatataaaactgaacaaagcagagaaagcctggaaacccagcagcaagcggacggcggctgataaggatcgaggggaagaagatgctgatggcagcaaaacccaggacctattccgcagggtgcgctccatcctgaataaactgacaccccagatgttccagcagctgatgaagcaagtgacgcagctggccatcgacaccgaggaacgcctcaaaggggtcattgacctcatttttgagaaggccatttcagagcccaacttctctgtggcctatgccaacatgtgccgctgcctcatggcgctgaaagtgcccactacggaaaagccaacagtgactgtgaacttccgaaagctgttgttgaatcgatgtcagaaggagtttgagaaagacaaagatgatgatgaggtttttgagaagaagcaaaaagagatggatgaagctgctacggcagaggaacgaggacgcctgaaggaagagctggaagaggctcgggacatagcccggcggcgctctttagggaatatcaagtttattggagagttgttcaaactgaagatgttaacagaggcaataatgcatgactgtgtggtcaaactgcttaagaaccatgatgaagagtcccttgagtgcctttgtcgtctgctcaccaccattggcaaagacctggactttgaaaaagccaagccccgaatggatcagtatttcaaccagatggaaaaaatcattaaagaaaagaagacgtcatcccgcatccgctttatgctgcaggacgtgctggatctgcgagggagcaattgggtgccacgccgaggggatcagggtcccaagaccattgaccagatccataaggaggctgagatggaagaacatcgagagcacatcaaagtgcagcagctcatggccaagggcagtgacaagcgtcggggcggtcctccaggccctcccatcagccgtggacttccccttgtggatgatggtggctggaacacagttcccatcagcaaaggtagccgccccattgacacctcacgactcaccaagatcaccaagcctggctccatcgattctaacaaccagctctttgcacctggagggcgactgagctggggcaagggcagcagcggaggctcaggagccaagccctcagacgcagcatcagaagctgctcgcccagctactagtactttgaatcgcttctcagcccttcaacaagcggtacccacagaaagcacagataatagacgtgtggtgcagaggagtagcttgagccgagaacgaggcgagaaagctggagaccgaggagaccgcctagagcggagtgaacggggaggggaccgtggggaccggcttgatcgtgcgcggacacctgctaccaagcggagcttcagcaaggaagtggaggagcggagtagagaacggccctcccagcctgaggggctgcgcaaggcagctagcctcacggaggatcgggaccgtgggcgggatgccgtgaagcgagaagctgccctacccccagtgagccccctgaaggcggctctctctgaggaggagttagagaagaaatccaaggctatcattgaggaatatctccatctcaatgacatgaaagaggcagtccagtgcgtgcaggagctggcctcaccctccttgctcttcatctttgtacggcatggtgtcgagtctacgctggagcgcagtgccattgctctgtgctgggcatctgtctactgctcagtactaccaagggttgtatgaaatcttggaattggctgaggacatggaaattgacatcccccacgtgtggctctacctagcggaactggtaacacccattctgcaggaaggtggggtgcccatgggggagctgttcagggagattacaaagcctctgagaccgttgggcaaagctgcttccctgttgctggagatcctgggcctcctgtgcaaaagcatgggtcctaaaaaggtggggacgctgtggcgagaagccgggcttagctggaaggaatttctacctgaaggccaggacattggtgcattcgtcgctgaacagaaggtggagtataccctgggagaggagtcggaagcccctggccagagggcactcccctccgaggagctgaacaggcagctggagaagctgctgaaggagggcagcagtaaccagcgggtgttcgactggatagaggccaacctgagtgagcagcagatagtatccaacacgttagttcgagccctcatgacggctgtctgctattctgcaattatttttgagactcccctccgagtggacgttgcagtgctgaaagcgcgagcgaagctgctgcagaaatacctgtgtgacgagcagaaggagctacaggcgctctacgccctccaggcccttgtagtgaccttagaacagcctcccaacctgctgcggatgttctttgacgcactgtatgacgaggacgtggtgaaggaggatgccttctacagttgggagagtagcaaggaccccgctgagcagcagggcaagggtgtggcccttaaatctgtcacagccttcttcaagtggctccgtgaagcagaggaggagtctgaccacaactgagggctggtggggccggggacctggagccccatggacacacagatggcccggctagccgcctggactgcaggggggcggcagcagcggcggtggcagtgggtgcctgtagtgtgatgtgtctgaactaataaagtggctgaagaggcaggatggcttggggctgcctgggcccccctccaggatgccgccaggtgtccctctcctccccctggggcacagagatatattatatataaagtcttgaaatttggtgtgtcttggggtggggaggggcaccaacgcctgcccctggggtccttttttttattttctgaaaatcactctcgggactgccgtcctcgctgctgggggcatatgccccagcccctgtaccacccctgctgttgcctgggcagggggaagggggggcacggtgcctgtaattattaaacatgaattcaattaagctca

SEQ ID NO: 57337 - DNA, 2951 bp, Homo sapiens
cggtcaggtaggaggctgggtggtcagtccagcagctgatgaagcaagtgacgcagctggccatcgacaccgaggaacgcctcaaaggggtcattgacctcatttttgagaaggccatttcagagcccaacttctctgtggcctatgccaacatgtgccgctgcctcatggcgctgaaagtgcccactacggaaaagccaacagtgactgtgaacttccgaaagctgttgttgaatcgatgtcagaaggagtttgagaaagacaaagatgatgatgaggtttttgagaagaagcaaaaagagatggatgaagctgctacggcagaggaacgaggacgcctgaaggaagagctggaagaggctcgggacatagcccggcggcgctctttagggaatatcaagtttattggagagttgttcaaactgaagatgttaacagaggcaataatgcatgactgtgtggtcaaactgcttaagaaccatgatgaagagtcccttgagtgcctttgtcgtctgctcaccaccattggcaaagacctggactttgaaaaagccaagccccgaatggatcagtatttcaaccagatggaaaaaatcattaaagaaaagaagacgtcatcccgcatccgctttatgctgcaggacgtgctggatctgcgagggagcaattgggtgccacgccgaggggatcagggtcccaagaccattgaccagatccataaggaggctgagatggaagaacatcgagagcacatcaaagtgcagcagctcatggccaagggcagtgacaagcgtcggggcggtcctccaggccctcccatcagccgtggacttccccttgtggatgatggtggctggaacacagttcccatcagcaaaggtagccgccccattgacacctcacgactcaccaagatcaccaagcctggctccatcgattctaacaaccagctctttgcacctggagggcgactgagctggggcaagggcagcagcggaggctcaggagccaagccctcagacgcagcatcagaagctgctcgcccagctactagtactttgaatcgcttctcagcccttcaacaagcggtacccacagaaagcacagataatagacgtgtggtgcagaggagtagcttgagccgagaacgaggcgagaaagctggagaccgaggagaccgcctagagcggagtgaacggggaggggaccgtggggaccggcttgatcgtgcgcggacacctgctaccaagcggagcttcagcaaggaagtggaggagcggagtagagaacggccctcccagcctgaggggctgcgcaaggcagctagcctcacggaggatcgggaccgtgggcgggatgccgtgaagcgagaagctgccctacccccagtgagccccctgaaggcggctctctctgaggaggagttagagaagaaatccaaggctatcattgaggaatatctccatctcaatgacatgaaagaggcagtccagtgcgtgcaggagctggcctcaccctccttgctcttcatctttgtacggcatggtgtcgagtctacgctggagcgcagtgccattgctcgtgagcatatggggcagctgctgcaccagctgctctgtgctgggcatctgtctactgctcagtactaccaagggttgtatgaaatcttggaattggctgaggacatggaaattgacatcccccacgtgtggctctacctagcggaactggtaacacccattctgcaggaaggtggggtgcccatgggggagctgttcagggagattacaaagcctctgagaccgttgggcaaagctgcttccctgttgctggagatcctgggcctcctgtgcaaaagcatgggtcctaaaaaggtggggacgctgtggcgagaagccgggcttagctggaaggaatttctacctgaaggccaggacattggtgcattcgtcgctgaacagaaggtggagtataccctgggagaggagtcggaagcccctggccagagggcactcccctccgaggagctgaacaggcagctggagaagctgctgaaggagggcagcagtaaccagcgggtgttcgactggatagaggccaacctgagtgagcagcagatagtatccaacacgttagttcgagccctcatgacggctgtctgctattctgcaattatttttgagactcccctccgagtggacgttgcagtgctgaaagcgcgagcgaagctgctgcagaaatacctgtgtgacgagcagaaggagctacaggcgctctacgccctccaggcccttgtagtgaccttagaacagcctcccaacctgctgcggatgttctttgacgcactgtatgacgaggacgtggtgaaggaggatgccttctacagttgggagagtagcaaggaccccgctgagcagcagggcaagggtgtggcccttaaatctgtcacagccttcttcaagtggctccgtgaagcagaggaggagtctgaccacaactgagggctggtggggccggggacctggagccccatggacacacagatggcccggctagccgcctggactgcaggggggcggcagcagcggcggtggcagtgggtgcctgtagtgtgatgtgtctgaactaataaagtggctgaagaggcaggatggcttggggctgcctgggcccccctccaggatgccgccaggtgtccctctcctccccctggggcacagagatatattatatataaagtcttgaaatttggtgtgtcttggggtggggaggggcaccaacgcctgcccctggggtccttttttttattttctgaaaatcactctcgggactgccgtcctcgctgctgggggcatatgccccagcccctgtaccacccctgctgttgcctgggcagggggaagggggggcacggtgcctgtaattattaaacatgaattcaattaagctca

SEQ ID NO: 57338 - DNA, 2955 bp, Homo sapiens
agctcggttccctactctgaaagacatccagtccagcagctgatgaagcaagtgacgcagctggccatcgacaccgaggaacgcctcaaaggggtcattgacctcatttttgagaaggccatttcagagcccaacttctctgtggcctatgccaacatgtgccgctgcctcatggcgctgaaagtgcccactacggaaaagccaacagtgactgtgaacttccgaaagctgttgttgaatcgatgtcagaaggagtttgagaaagacaaagatgatgatgaggtttttgagaagaagcaaaaagagatggatgaagctgctacggcagaggaacgaggacgcctgaaggaagagctggaagaggctcgggacatagcccggcggcgctctttagggaatatcaagtttattggagagttgttcaaactgaagatgttaacagaggcaataatgcatgactgtgtggtcaaactgcttaagaaccatgatgaagagtcccttgagtgcctttgtcgtctgctcaccaccattggcaaagacctggactttgaaaaagccaagccccgaatggatcagtatttcaaccagatggaaaaaatcattaaagaaaagaagacgtcatcccgcatccgctttatgctgcaggacgtgctggatctgcgagggagcaattgggtgccacgccgaggggatcagggtcccaagaccattgaccagatccataaggaggctgagatggaagaacatcgagagcacatcaaagtgcagcagctcatggccaagggcagtgacaagcgtcggggcggtcctccaggccctcccatcagccgtggacttccccttgtggatgatggtggctggaacacagttcccatcagcaaaggtagccgccccattgacacctcacgactcaccaagatcaccaagcctggctccatcgattctaacaaccagctctttgcacctggagggcgactgagctggggcaagggcagcagcggaggctcaggagccaagccctcagacgcagcatcagaagctgctcgcccagctactagtactttgaatcgcttctcagcccttcaacaagcggtacccacagaaagcacagataatagacgtgtggtgcagaggagtagcttgagccgagaacgaggcgagaaagctggagaccgaggagaccgcctagagcggagtgaacggggaggggaccgtggggaccggcttgatcgtgcgcggacacctgctaccaagcggagcttcagcaaggaagtggaggagcggagtagagaacggccctcccagcctgaggggctgcgcaaggcagctagcctcacggaggatcgggaccgtgggcgggatgccgtgaagcgagaagctgccctacccccagtgagccccctgaaggcggctctctctgaggaggagttagagaagaaatccaaggctatcattgaggaatatctccatctcaatgacatgaaagaggcagtccagtgcgtgcaggagctggcctcaccctccttgctcttcatctttgtacggcatggtgtcgagtctacgctggagcgcagtgccattgctcgtgagcatatggggcagctgctgcaccagctgctctgtgctgggcatctgtctactgctcagtactaccaagggttgtatgaaatcttggaattggctgaggacatggaaattgacatcccccacgtgtggctctacctagcggaactggtaacacccattctgcaggaaggtggggtgcccatgggggagctgttcagggagattacaaagcctctgagaccgttgggcaaagctgcttccctgttgctggagatcctgggcctcctgtgcaaaagcatgggtcctaaaaaggtggggacgctgtggcgagaagccgggcttagctggaaggaatttctacctgaaggccaggacattggtgcattcgtcgctgaacagaaggtggagtataccctgggagaggagtcggaagcccctggccagagggcactcccctccgaggagctgaacaggcagctggagaagctgctgaaggagggcagcagtaaccagcgggtgttcgactggatagaggccaacctgagtgagcagcagatagtatccaacacgttagttcgagccctcatgacggctgtctgctattctgcaattatttttgagactcccctccgagtggacgttgcagtgctgaaagcgcgagcgaagctgctgcagaaatacctgtgtgacgagcagaaggagctacaggcgctctacgccctccaggcccttgtagtgaccttagaacagcctcccaacctgctgcggatgttctttgacgcactgtatgacgaggacgtggtgaaggaggatgccttctacagttgggagagtagcaaggaccccgctgagcagcagggcaagggtgtggcccttaaatctgtcacagccttcttcaagtggctccgtgaagcagaggaggagtctgaccacaactgagggctggtggggccggggacctggagccccatggacacacagatggcccggctagccgcctggactgcaggggggcggcagcagcggcggtggcagtgggtgcctgtagtgtgatgtgtctgaactaataaagtggctgaagaggcaggatggcttggggctgcctgggcccccctccaggatgccgccaggtgtccctctcctccccctggggcacagagatatattatatataaagtcttgaaatttggtgtgtcttggggtggggaggggcaccaacgcctgcccctggggtccttttttttattttctgaaaatcactctcgggactgccgtcctcgctgctgggggcatatgccccagcccctgtaccacccctgctgttgcctgggcagggggaagggggggcacggtgcctgtaattattaaacatgaattcaattaagctca

SEQ ID NO: 57339 - DNA, 5210 bp, Homo sapiens
ccggctgcgcctgcggagaagcggtggccgccgagcgggatctgtgcggggagccggaaatggttgtggactacgtctgtgcggctgcgtggggctcggccgcgcggactgaaggagactgaagcacttctaccctagccgggcccagcccccgagcagtgcagcctcccgagtgcagagtgcagcccctgcccgccctggcccagctgcccatgtctaccctgctggatcccaagtaatgatgatcccttcccagatctcctacccagcctcccagggggcctactacatccctggacaggggcgttccacatacgttgtcccgacacagcagtaccctgtgcagccaggagccccaggcttctatccaggtgcaagccctacagaatttgggacctacgctggcgcctactatccagcccaaggggtgcagcagtttcccactggcgtggcccccgccccagttttgatgaaccagccaccccagattgctcccaagagggagcgtaagacgatccgaattcgagatccaaaccaaggaggaaaggatatcacagaggagatcatgtctggggcccgcactgcctccacacccacccctccccagacgggaggcggtctggagcctcaagctaatggggagacgccccaggttgctgtcattgtccggccagatgaccggtcacagggagcaatcattgctgaccggccagggctgcctggcccagagcatagcccttcagaatcccagccttcgtcgccttctccgaccccatcaccatccccagtcttggaaccggggtctgagcctaatctcgcagtcctctctattcctggggacactatgacaactatacaaatgtctgtagaagaatcaacccccatctcccgtgaaactggggagccatatcgcctctctccagaacccactcctctcgccgaacccatactggaagtagaagtgacacttagcaaaccggttccagaatctgagttttcttccagtcctctccaggctcccacccctttggcatctcacacagtggaaattcatgagcctaatggcatggtcccatctgaagatctggaaccagaggtggagtcaagcccagagcttgctcctcccccagcttgcccctccgaatcccctgtgcccattgctccaactgcccaacctgaggaactgctcaacggagccccctcgccaccagctgtggacttaagcccagtcagtgagccagaggagcaggccaaggaggtgacagcatcagtggcgccccccaccatcccctctgctactccagctacggctccttcagctacttccccagctcaggaggaggaaatggaagaagaagaagaagaggaagaaggagaagcaggagaagcaggagaagctgagagtgagaaaggaggagaggaactgctccccccagagagtacccctattccagccaacttgtctcagaatttggaggcagcagcagccactcaagtggcagtatctgtgccaaagaggagacggaaaattaaggagctaaataagaaggaggctgttggagaccttctggatgccttcaaggaggcgaacccggcagtaccagaggtggaaaatcagcctcctgcaggcagcaatccaggcccagagtctgagggcagtggtgtgcccccacgtcctgaggaagcagatgagacctgggactcaaaggaagacaaaattcacaatgctgagaacatccagcccggggaacagaagtatgaatataagtcagatcagtggaagcctctaaacctagaggagaaaaaacgttacgaccgtgagttcctgcttggttttcagttcatctttgccagtatgcagaagccagagggattgccacatatcagtgacgtggtgctggacaaggccaataaaacaccactgcggccactggatcccactagactacaaggcataaattgtggcccagacttcactccatcctttgccaaccttggccggacaacccttagcacccgtgggcccccaaggggtgggccaggtggggagctgccccgtgggccggctggcctgggaccccggcgctctcagcagggaccccgaaaagaaccacgcaagatcattgccacagtgttaatgaccgaagatataaaactgaacaaagcagagaaagcctggaaacccagcagcaagcggacggcggctgataaggatcgaggggaagaagatgctgatggcagcaaaacccaggacctattccgcagggtgcgctccatcctgaataaactgacaccccagatgttccagcagctgatgaagcaagtgacgcagctggccatcgacaccgaggaacgcctcaaaggggtcattgacctcatttttgagaaggccatttcagagcccaacttctctgtggcctatgccaacatgtgccgctgcctcatggcgctgaaagtgcccactacggaaaagccaacagtgactgtgaacttccgaaagctgttgttgaatcgatgtcagaaggagtttgagaaagacaaagatgatgatgaggtttttgagaagaagcaaaaagagatggatgaagctgctacggcagaggaacgaggacgcctgaaggaagagctggaagaggctcgggacatagcccggcggcgctctttagggaatatcaagtttattggagagttgttcaaactgaagatgttaacagaggcaataatgcatgactgtgtggtcaaactgcttaagaaccatgatgaagagtcccttgagtgcctttgtcgtctgctcaccaccattggcaaagacctggactttgaaaaagccaagccccgaatggatcagtatttcaaccagatggaaaaaatcattaaagaaaagaagacgtcatcccgcatccgctttatgctgcaggacgtgctggatctgcgagggagcaattgggtgccacgccgaggggatcagggtcccaagaccattgaccagatccataaggaggctgagatggaagaacatcgagagcacatcaaagtgcagcagctcatggccaagggcagtgacaagcgtcggggcggtcctccaggccctcccatcagccgtggacttccccttgtggatgatggtggctggaacacagttcccatcagcaaaggtagccgccccattgacacctcacgactcaccaagatcaccaagcctggctccatcgattctaacaaccagctctttgcacctggagggcgactgagctggggcaagggcagcagcggaggctcaggagccaagccctcagacgcagcatcagaagctgctcgcccagctactagtactttgaatcgcttctcagcccttcaacaagcggtacccacagaaagcacagataatagacgtgtggtgcagaggagtagcttgagccgagaacgaggcgagaaagctggagaccgaggagaccgcctagagcggagtgaacggggaggggaccgtggggaccggcttgatcgtgcgcggacacctgctaccaagcggagcttcagcaaggaagtggaggagcggagtagagaacggccctcccagcctgaggggctgcgcaaggcagctagcctcacggaggatcgggaccgtgggcgggatgccgtgaagcgagaagctgccctacccccagtgagccccctgaaggcggctctctctgaggaggagttagagaagaaatccaaggctatcattgaggaatatctccatctcaatgacatgaaagaggcagtccagtgcgtgcaggagctggcctcaccctccttgctcttcatctttgtacggcatggtgtcgagtctacgctggagcgcagtgccattgctcgtgagcatatggggcagctgctgcaccagctgctctgtgctgggcatctgtctactgctcagtactaccaagggttgtatgaaatcttggaattggctgaggacatggaaattgacatcccccacgtgtggctctacctagcggaactggtaacacccattctgcaggaaggtggggtgcccatgggggagctgttcagggagattacaaagcctctgagaccgttgggcaaagctgcttccctgttgctggagatcctgggcctcctgtgcaaaagcatgggtcctaaaaaggtggggacgctgtggcgagaagccgggcttagctggaaggaatttctacctgaaggccaggacattggtgcattcgtcgctgaacagaaggtggagtataccctgggagaggagtcggaagcccctggccagagggcactcccctccgaggagctgaacaggcagctggagaagctgctgaaggagggcagcagtaaccagcgggtgttcgactggatagaggccaacctgagtgagcagcagatagtatccaacacgttagttcgagccctcatgacggctgtctgctattctgcaattatttttgagactcccctccgagtggacgttgcagtgctgaaagcgcgagcgaagctgctgcagaaatacctgtgtgacgagcagaaggagctacaggcgctctacgccctccaggcccttgtagtgaccttagaacagcctcccaacctgctgcggatgttctttgacgcactgtatgacgaggacgtggtgaaggaggatgccttctacagttgggagagtagcaaggaccccgctgagcagcagggcaagggtgtggcccttaaatctgtcacagccttcttcaagtggctccgtgaagcagaggaggagtctgaccacaactgagggctggtggggccggggacctggagccccatggacacacagatggcccggctagccgcctggactgcaggggggcggcagcagcggcggtggcagtgggtgcctgtagtgtgatgtgtctgaactaataaagtggctgaagaggcaggatggcttggggctgcctgggcccccctccaggatgccgccaggtgtccctctcctccccctggggcacagagatatattatatataaagtcttgaaatttggtgtgtcttggggtggggaggggcaccaacgcctgcccctggggtccttttttttattttctgaaaatcactctcgggactgccgtcctcgctgctgggggcatatgccccagcccctgtaccacccctgctgttgcctgggcagggggaaaataaggcagggccgaatatacaacccgctct

SEQ ID NO: 57340 - DNA, 5237 bp, Homo sapiens
ccggctgcgcctgcggagaagcggtggccgccgagcgggatctgtgcggggagccggaaatggttgtggactacgtctgtgcggctgcgtggggctcggccgcgcggactgaaggagactgaagcacttctaccctagccgggcccagcccccgagcagtgcagcctcccgagtgcagagtgcagcccctgcccgccctggcccagctgcccatgtctaccctgctggatcccaagtaatgatgatcccttcccagatctcctacccagcctcccagggggcctactacatccctggacaggggcgttccacatacgttgtcccgacacagcagtaccctgtgcagccaggagccccaggcttctatccaggtgcaagccctacagaatttgggacctacgctggcgcctactatccagcccaaggggtgcagcagtttcccactggcgtggcccccgccccagttttgatgaaccagccaccccagattgctcccaagagggagcgtaagacgatccgaattcgagatccaaaccaaggaggaaaggatatcacagaggagatcatgtctggggcccgcactgcctccacacccacccctccccagacgggaggcggtctggagcctcaagctaatggggagacgccccaggttgctgtcattgtccggccagatgaccggtcacagggagcaatcattgctgaccggccagggctgcctggcccagagcatagcccttcagaatcccagccttcgtcgccttctccgaccccatcaccatccccagtcttggaaccggggtctgagcctaatctcgcagtcctctctattcctggggacactatgacaactatacaaatgtctgtagaagaatcaacccccatctcccgtgaaactggggagccatatcgcctctctccagaacccactcctctcgccgaacccatactggaagtagaagtgacacttagcaaaccggttccagaatctgagttttcttccagtcctctccaggctcccacccctttggcatctcacacagtggaaattcatgagcctaatggcatggtcccatctgaagatctggaaccagaggtggagtcaagcccagagcttgctcctcccccagcttgcccctccgaatcccctgtgcccattgctccaactgcccaacctgaggaactgctcaacggagccccctcgccaccagctgtggacttaagcccagtcagtgagccagaggagcaggccaaggaggtgacagcatcagtggcgccccccaccatcccctctgctactccagctacggctccttcagctacttccccagctcaggaggaggaaatggaagaagaagaagaagaggaagaaggagaagcaggagaagcaggagaagctgagagtgagaaaggaggagaggaactgctccccccagagagtacccctattccagccaacttgtctcagaatttggaggcagcagcagccactcaagtggcagtatctgtgccaaagaggagacggaaaattaaggagctaaataagaaggaggctgttggagaccttctggatgccttcaaggaggcgaacccggcagtaccagaggtggaaaatcagcctcctgcaggcagcaatccaggcccagagtctgagggcagtggtgtgcccccacgtcctgaggaagcagatgagacctgggactcaaaggaagacaaaattcacaatgctgagaacatccagcccggggaacagaagtatgaatataagtcagatcagtggaagcctctaaacctagaggagaaaaaacgttacgaccgtgagttcctgcttggttttcagttcatctttgccagtatgcagaagccagagggattgccacatatcagtgacgtggtgctggacaaggccaataaaacaccactgcggccactggatcccactagactacaaggcataaattgtggcccagacttcactccatcctttgccaaccttggccggacaacccttagcacccgtgggcccccaaggggtgggccaggtggggagctgccccgtgggccggctggcctgggaccccggcgctctcagcagggaccccgaaaagaaccacgcaagatcattgccacagtgttaatgaccgaagatataaaactgaacaaagcagagaaagcctggaaacccagcagcaagcggacggcggctgataaggatcgaggggaagaagatgctgatggcagcaaaacccaggacctattccgcagggtgcgctccatcctgaataaactgacaccccagatgttccagcagctgatgaagcaagtgacgcagctggccatcgacaccgaggaacgcctcaaaggggtcattgacctcatttttgagaaggccatttcagagcccaacttctctgtggcctatgccaacatgtgccgctgcctcatggcgctgaaagtgcccactacggaaaagccaacagtgactgtgaacttccgaaagctgttgttgaatcgatgtcagaaggagtttgagaaagacaaagatgatgatgaggtttttgagaagaagcaaaaagagatggatgaagctgctacggcagaggaacgaggacgcctgaaggaagagctggaagaggctcgggacatagcccggcggcgctctttagggaatatcaagtttattggagagttgttcaaactgaagatgttaacagaggcaataatgcatgactgtgtggtcaaactgcttaagaaccatgatgaagagtcccttgagtgcctttgtcgtctgctcaccaccattggcaaagacctggactttgaaaaagccaagccccgaatggatcagtatttcaaccagatggaaaaaatcattaaagaaaagaagacgtcatcccgcatccgctttatgctgcaggacgtgctggatctgcgagggagcaattgggtgccacgccgaggggatcagggtcccaagaccattgaccagatccataaggaggctgagatggaagaacatcgagagcacatcaaagtgcagcagctcatggccaagggcagtgacaagcgtcggggcggtcctccaggccctcccatcagccgtggacttccccttgtggatgatggtggctggaacacagttcccatcagcaaaggtagccgccccattgacacctcacgactcaccaagatcaccaagcctggctccatcgattctaacaaccagctctttgcacctggagggcgactgagctggggcaagggcagcagcggaggctcaggagccaagccctcagacgcagcatcagaagctgctcgcccagctactagtactttgaatcgcttctcagcccttcaacaagcggtacccacagaaagcacagataatagacgtgtggtgcagaggagtagcttgagccgagaacgaggcgagaaagctggagaccgaggagaccgcctagagcggagtgaacggggaggggaccgtggggaccggcttgatcgtgcgcggacacctgctaccaagcggagcttcagcaaggaagtggaggagcggagtagagaacggccctcccagcctgaggggctgcgcaaggcagctagcctcacggaggatcgggaccgtgggcgggatgccgtgaagcgagaagctgccctacccccagtgagccccctgaaggcggctctctctgaggaggagttagagaagaaatccaaggctatcattgaggaatatctccatctcaatgacatgaaagaggcagtccagtgcgtgcaggagctggcctcaccctccttgctcttcatctttgtacggcatggtgtcgagtctacgctggagcgcagtgccattgctcgtgagcatatggggcagctgctgcaccagctgctctgtgctgggcatctgtctactgctcagtactaccaagggttgtatgaaatcttggaattggctgaggacatggaaattgacatcccccacgtgtggctctacctagcggaactggtaacacccattctgcaggaaggtggggtgcccatgggggagctgttcagggagattacaaagcctctgagaccgttgggcaaagctgcttccctgttgctggagatcctgggcctcctgtgcaaaagcatgggtcctaaaaaggtggggacgctgtggcgagaagccgggcttagctggaaggaatttctacctgaaggccaggacattggtgcattcgtcgctgaacagaaggtggagtataccctgggagaggagtcggaagcccctggccagagggcactcccctccgaggagctgaacaggcagctggagaagctgctgaaggagggcagcagtaaccagcgggtgttcgactggatagaggccaacctgagtgagcagcagatagtatccaacacgttagttcgagccctcatgacggctgtctgctattctgcaattatttttgagactcccctccgagtggacgttgcagtgctgaaagcgcgagcgaagctgctgcagaaatacctgtgtgacgagcagaaggagctacaggcgctctacgccctccaggcccttgtagtgaccttagaacagcctcccaacctgctgcggatgttctttgacgcactgtatgacgaggacgtggtgaaggaggatgccttctacagttgggagagtagcaaggaccccgctgagcagcagggcaagggtgtggcccttaaatctgtcacagccttcttcaagtggctccgtgaagcagaggaggagtctgaccacaactgagggctggtggggccggggacctggagccccatggacacacagatggcccggctagccgcctggactgcaggggggcggcagcagcggcggtggcagtgggtgcctgtagtgtgatgtgtctgaactaataaagtggctgaagaggcaggatggcttggggctgcctgggcccccctccaggatgccgccaggtgtccctctcctccccctggggcacagagatatattatatataaagtcttgaaatttggtgtgtcttggggtggggaggggcaccaacgcctgcccctggggtccttttttttattttctgaaaatcactctcaggcacccacaccccactcattggagaatggaaaacaaaccccgaaacaacaccaaaaaaatgtgcaatggatgcattggaattatatgtcattgtataaatggtgcaacagtaataaagttaaacaattaaaaa

SEQ ID NO: 57341 - DNA, 2673 bp, Homo sapiens
cgaatggatcagtatttcaaccagatggatgaagctgctacggcagaggaacgaggacgcctgaaggaagagctggaagaggctcgggacatagcccggcggcgctctttagggaatatcaagtttattggagagttgttcaaactgaagatgttaacagaggcaataatgcatgactgtgtggtcaaactgcttaagaaccatgatgaagagtcccttgagtgcctttgtcgtctgctcaccaccattggcaaagacctggactttgaaaaagccaagccccgaatggatcagtatttcaaccagatggaaaaaatcattaaagaaaagaagacgtcatcccgcatccgctttatgctgcaggacgtgctggatctgcgagggagcaattgggtgccacgccgaggggatcagggtcccaagaccattgaccagatccataaggaggctgagatggaagaacatcgagagcacatcaaagtgcagcagctcatggccaagggcagtgacaagcgtcggggcggtcctccaggccctcccatcagccgtggacttccccttgtggatgatggtggctggaacacagttcccatcagcaaaggtagccgccccattgacacctcacgactcaccaagatcaccaagcctggctccatcgattctaacaaccagctctttgcacctggagggcgactgagctggggcaagggcagcagcggaggctcaggagccaagccctcagacgcagcatcagaagctgctcgcccagctactagtactttgaatcgcttctcagcccttcaacaagcggtacccacagaaagcacagataatagacgtgtggtgcagaggagtagcttgagccgagaacgaggcgagaaagctggagaccgaggagaccgcctagagcggagtgaacggggaggggaccgtggggaccggcttgatcgtgcgcggacacctgctaccaagcggagcttcagcaaggaagtggaggagcggagtagagaacggccctcccagcctgaggggctgcgcaaggcagctagcctcacggaggatcgggaccgtgggcgggatgccgtgaagcgagaagctgccctacccccagtgagccccctgaaggcggctctctctgaggaggagttagagaagaaatccaaggctatcattgaggaatatctccatctcaatgacatgaaagaggcagtccagtgcgtgcaggagctggcctcaccctccttgctcttcatctttgtacggcatggtgtcgagtctacgctggagcgcagtgccattgctcgtgagcatatggggcagctgctgcaccagctgctctgtgctgggcatctgtctactgctcagtactaccaagggttgtatgaaatcttggaattggctgaggacatggaaattgacatcccccacgtgtggctctacctagcggaactggtaacacccattctgcaggaaggtggggtgcccatgggggagctgttcagggagattacaaagcctctgagaccgttgggcaaagctgcttccctgttgctggagatcctgggcctcctgtgcaaaagcatgggtcctaaaaaggtggggacgctgtggcgagaagccgggcttagctggaaggaatttctacctgaaggccaggacattggtgcattcgtcgctgaacagaaggtggagtataccctgggagaggagtcggaagcccctggccagagggcactcccctccgaggagctgaacaggcagctggagaagctgctgaaggagggcagcagtaaccagcgggtgttcgactggatagaggccaacctgagtgagcagcagatagtatccaacacgttagttcgagccctcatgacggctgtctgctattctgcaattatttttgagactcccctccgagtggacgttgcagtgctgaaagcgcgagcgaagctgctgcagaaatacctgtgtgacgagcagaaggagctacaggcgctctacgccctccaggcccttgtagtgaccttagaacagcctcccaacctgctgcggatgttctttgacgcactgtatgacgaggacgtggtgaaggaggatgccttctacagttgggagagtagcaaggaccccgctgagcagcagggcaagggtgtggcccttaaatctgtcacagccttcttcaagtggctccgtgaagcagaggaggagtctgaccacaactgagggctggtggggccggggacctggagccccatggacacacagatggcccggctagccgcctggactgcaggggggcggcagcagcggcggtggcagtgggtgcctgtagtgtgatgtgtctgaactaataaagtggctgaagaggcaggatggcttggggctgcctgggcccccctccaggatgccgccaggtgtccctctcctccccctggggcacagagatatattatatataaagtcttgaaatttggtgtgtcttggggtggggaggggcaccaacgcctgcccctggggtccttttttttattttctgaaaatcactctcgggactgccgtcctcgctgctgggggcatatgccccagcccctgtaccacccctgctgttgcctgggcagggggaagggggggcacggtgcctgtaattattaaacatgaattcaattaagctca

SEQ ID NO: 57342 - DNA, 2786 bp, Homo sapiens
agttgtcatttctccccaaataaatctatagattcaattaagttcctacaaaagtctaaacaggctttttcagggaacttaaactgattctaaaatggttatgaggccaagcatggtggctgatgcctgtaataccagcactttgaaagtgaggtgagcagatcacttgagctcgggagtttgaaatcagcctgggcaacaaggaaaaaacccatctctagaaaaaatataaaaattagctgggtatagtggcacatacctgcagtccctgctacttggaaagatgaggtgggaggattgcgtggcttaagaaccatgatgaagagtcccttgagtgcctttgtcgtctgctcaccaccattggcaaagacctggactttgaaaaagccaagccccgaatggatcagtatttcaaccagatggaaaaaatcattaaagaaaagaagacgtcatcccgcatccgctttatgctgcaggacgtgctggatctgcgagggagcaattgggtgccacgccgaggggatcagggtcccaagaccattgaccagatccataaggaggctgagatggaagaacatcgagagcacatcaaagtgcagcagctcatggccaagggcagtgacaagcgtcggggcggtcctccaggccctcccatcagccgtggacttccccttgtggatgatggtggctggaacacagttcccatcagcaaaggtagccgccccattgacacctcacgactcaccaagatcaccaagcctggctccatcgattctaacaaccagctctttgcacctggagggcgactgagctggggcaagggcagcagcggaggctcaggagccaagccctcagacgcagcatcagaagctgctcgcccagctactagtactttgaatcgcttctcagcccttcaacaagcggtacccacagaaagcacagataatagacgtgtggtgcagaggagtagcttgagccgagaacgaggcgagaaagctggagaccgaggagaccgcctagagcggagtgaacggggaggggaccgtggggaccggcttgatcgtgcgcggacacctgctaccaagcggagcttcagcaaggaagtggaggagcggagtagagaacggccctcccagcctgaggggctgcgcaaggcagctagcctcacggaggatcgggaccgtgggcgggatgccgtgaagcgagaagctgccctacccccagtgagccccctgaaggcggctctctctgaggaggagttagagaagaaatccaaggctatcattgaggaatatctccatctcaatgacatgaaagaggcagtccagtgcgtgcaggagctggcctcaccctccttgctcttcatctttgtacggcatggtgtcgagtctacgctggagcgcagtgccattgctcgtgagcatatggggcagctgctgcaccagctgctctgtgctgggcatctgtctactgctcagtactaccaagggttgtatgaaatcttggaattggctgaggacatggaaattgacatcccccacgtgtggctctacctagcggaactggtaacacccattctgcaggaaggtggggtgcccatgggggagctgttcagggagattacaaagcctctgagaccgttgggcaaagctgcttccctgttgctggagatcctgggcctcctgtgcaaaagcatgggtcctaaaaaggtggggacgctgtggcgagaagccgggcttagctggaaggaatttctacctgaaggccaggacattggtgcattcgtcgctgaacagaaggtggagtataccctgggagaggagtcggaagcccctggccagagggcactcccctccgaggagctgaacaggcagctggagaagctgctgaaggagggcagcagtaaccagcgggtgttcgactggatagaggccaacctgagtgagcagcagatagtatccaacacgttagttcgagccctcatgacggctgtctgctattctgcaattatttttgagactcccctccgagtggacgttgcagtgctgaaagcgcgagcgaagctgctgcagaaatacctgtgtgacgagcagaaggagctacaggcgctctacgccctccaggcccttgtagtgaccttagaacagcctcccaacctgctgcggatgttctttgacgcactgtatgacgaggacgtggtgaaggaggatgccttctacagttgggagagtagcaaggaccccgctgagcagcagggcaagggtgtggcccttaaatctgtcacagccttcttcaagtggctccgtgaagcagaggaggagtctgaccacaactgagggctggtggggccggggacctggagccccatggacacacagatggcccggctagccgcctggactgcaggggggcggcagcagcggcggtggcagtgggtgcctgtagtgtgatgtgtctgaactaataaagtggctgaagaggcaggatggcttggggctgcctgggcccccctccaggatgccgccaggtgtccctctcctccccctggggcacagagatatattatatataaagtcttgaaatttggtgtgtcttggggtggggaggggcaccaacgcctgcccctggggtccttttttttattttctgaaaatcactctcgggactgccgtcctcgctgctgggggcatatgccccagcccctgtaccacccctgctgttgcctgggcagggggaagggggggcacggtgcctgtaattattaaacatgaattcaattaagctca

SEQ ID NO: 57343 - DNA, 2445 bp, Homo sapiens
tcggtaccagcccgtgacctcctggcaagacctggactttgaaaaaccaagccccgaatggatcagtatttcaaccagatggaaaaaatcattaaagaaaagaagacgtcatcccgcatccgctttatgctgcaggacgtgctggatctgcgagggagcaattgggtgccacgccgaggggatcagggtcccaagaccattgaccagatccataaggaggctgagatggaagaacatcgagagcacatcaaagtgcagcagctcatggccaagggcagtgacaagcgtcggggcggtcctccaggccctcccatcagccgtggacttccccttgtggatgatggtggctggaacacagttcccatcagcaaaggtagccgccccattgacacctcacgactcaccaagatcaccaagcctggctccatcgattctaacaaccagctctttgcacctggagggcgactgagctggggcaagggcagcagcggaggctcaggagccaagccctcagacgcagcatcagaagctgctcgcccagctactagtactttgaatcgcttctcagcccttcaacaagcggtacccacagaaagcacagataatagacgtgtggtgcagaggagtagcttgagccgagaacgaggcgagaaagctggagaccgaggagaccgcctagagcggagtgaacggggaggggaccgtggggaccggcttgatcgtgcgcggacacctgctaccaagcggagcttcagcaaggaagtggaggagcggagtagagaacggccctcccagcctgaggggctgcgcaaggcagctagcctcacggaggatcgggaccgtgggcgggatgccgtgaagcgagaagctgccctacccccagtgagccccctgaaggcggctctctctgaggaggagttagagaagaaatccaaggctatcattgaggaatatctccatctcaatgacatgaaagaggcagtccagtgcgtgcaggagctggcctcaccctccttgctcttcatctttgtacggcatggtgtcgagtctacgctggagcgcagtgccattgctcgtgagcatatggggcagctgctgcaccagctgctctgtgctgggcatctgtctactgctcagtactaccaagggttgtatgaaatcttggaattggctgaggacatggaaattgacatcccccacgtgtggctctacctagcggaactggtaacacccattctgcaggaaggtggggtgcccatgggggagctgttcagggagattacaaagcctctgagaccgttgggcaaagctgcttccctgttgctggagatcctgggcctcctgtgcaaaagcatgggtcctaaaaaggtggggacgctgtggcgagaagccgggcttagctggaaggaatttctacctgaaggccaggacattggtgcattcgtcgctgaacagaaggtggagtataccctgggagaggagtcggaagcccctggccagagggcactcccctccgaggagctgaacaggcagctggagaagctgctgaaggagggcagcagtaaccagcgggtgttcgactggatagaggccaacctgagtgagcagcagatagtatccaacacgttagttcgagccctcatgacggctgtctgctattctgcaattatttttgagactcccctccgagtggacgttgcagtgctgaaagcgcgagcgaagctgctgcagaaatacctgtgtgacgagcagaaggagctacaggcgctctacgccctccaggcccttgtagtgaccttagaacagcctcccaacctgctgcggatgttctttgacgcactgtatgacgaggacgtggtgaaggaggatgccttctacagttgggagagtagcaaggaccccgctgagcagcagggcaagggtgtggcccttaaatctgtcacagccttcttcaagtggctccgtgaagcagaggaggagtctgaccacaactgagggctggtggggccggggacctggagccccatggacacacagatggcccggctagccgcctggactgcaggggggcggcagcagcggcggtggcagtgggtgcctgtagtgtgatgtgtctgaactaataaagtggctgaagaggcaggatggcttggggctgcctgggcccccctccaggatgccgccaggtgtccctctcctccccctggggcacagagatatattatatataaagtcttgaaatttggtgtgtcttggggtggggaggggcaccaacgcctgcccctggggtccttttttttattttctgaaaatcactctcgggactgccgtcctcgctgctgggggcatatgccccagcccctgtaccacccctgctgttgcctgggcagggggaagggggggcacggtgcctgtaattattaaacatgaattcaattaagctca

SEQ ID NO: 57344 - DNA, 2421 bp, Homo sapiens
aattaggctaggtagaggcgggggtatcggacgaggaaggatcagtattaccagatggaaaaaatcattaaagaaaagaagacgtcatcccgcatccgctttatgctgcaggacgtgctggatctgcgagggagcaattgggtgccacgccgaggggatcagggtcccaagaccattgaccagatccataaggaggctgagatggaagaacatcgagagcacatcaaagtgcagcagctcatggccaagggcagtgacaagcgtcggggcggtcctccaggccctcccatcagccgtggacttccccttgtggatgatggtggctggaacacagttcccatcagcaaaggtagccgccccattgacacctcacgactcaccaagatcaccaagcctggctccatcgattctaacaaccagctctttgcacctggagggcgactgagctggggcaagggcagcagcggaggctcaggagccaagccctcagacgcagcatcagaagctgctcgcccagctactagtactttgaatcgcttctcagcccttcaacaagcggtacccacagaaagcacagataatagacgtgtggtgcagaggagtagcttgagccgagaacgaggcgagaaagctggagaccgaggagaccgcctagagcggagtgaacggggaggggaccgtggggaccggcttgatcgtgcgcggacacctgctaccaagcggagcttcagcaaggaagtggaggagcggagtagagaacggccctcccagcctgaggggctgcgcaaggcagctagcctcacggaggatcgggaccgtgggcgggatgccgtgaagcgagaagctgccctacccccagtgagccccctgaaggcggctctctctgaggaggagttagagaagaaatccaaggctatcattgaggaatatctccatctcaatgacatgaaagaggcagtccagtgcgtgcaggagctggcctcaccctccttgctcttcatctttgtacggcatggtgtcgagtctacgctggagcgcagtgccattgctcgtgagcatatggggcagctgctgcaccagctgctctgtgctgggcatctgtctactgctcagtactaccaagggttgtatgaaatcttggaattggctgaggacatggaaattgacatcccccacgtgtggctctacctagcggaactggtaacacccattctgcaggaaggtggggtgcccatgggggagctgttcagggagattacaaagcctctgagaccgttgggcaaagctgcttccctgttgctggagatcctgggcctcctgtgcaaaagcatgggtcctaaaaaggtggggacgctgtggcgagaagccgggcttagctggaaggaatttctacctgaaggccaggacattggtgcattcgtcgctgaacagaaggtggagtataccctgggagaggagtcggaagcccctggccagagggcactcccctccgaggagctgaacaggcagctggagaagctgctgaaggagggcagcagtaaccagcgggtgttcgactggatagaggccaacctgagtgagcagcagatagtatccaacacgttagttcgagccctcatgacggctgtctgctattctgcaattatttttgagactcccctccgagtggacgttgcagtgctgaaagcgcgagcgaagctgctgcagaaatacctgtgtgacgagcagaaggagctacaggcgctctacgccctccaggcccttgtagtgaccttagaacagcctcccaacctgctgcggatgttctttgacgcactgtatgacgaggacgtggtgaaggaggatgccttctacagttgggagagtagcaaggaccccgctgagcagcagggcaagggtgtggcccttaaatctgtcacagccttcttcaagtggctccgtgaagcagaggaggagtctgaccacaactgagggctggtggggccggggacctggagccccatggacacacagatggcccggctagccgcctggactgcaggggggcggcagcagcggcggtggcagtgggtgcctgtagtgtgatgtgtctgaactaataaagtggctgaagaggcaggatggcttggggctgcctgggcccccctccaggatgccgccaggtgtccctctcctccccctggggcacagagatatattatatataaagtcttgaaatttggtgtgtcttggggtggggaggggcaccaacgcctgcccctggggtccttttttttattttctgaaaatcactctcgggactgccgtcctcgctgctgggggcatatgccccagcccctgtaccacccctgctgttgcctgggcagggggaagggggggcacggtgcctgtaattattaaacatgaattcaattaagctca

SEQ ID NO: 57345 - DNA, 2253 bp, Homo sapiens
cgctagtacgagggatggggttgaaatcggccgatggaagaacatcgagagcacatcaaagtgcagcagctcatggccaagggcagtgacaagcgtcggggcggtcctccaggccctcccatcagccgtggacttccccttgtggatgatggtggctggaacacagttcccatcagcaaaggtagccgccccattgacacctcacgactcaccaagatcaccaagcctggctccatcgattctaacaaccagctctttgcacctggagggcgactgagctggggcaagggcagcagcggaggctcaggagccaagccctcagacgcagcatcagaagctgctcgcccagctactagtactttgaatcgcttctcagcccttcaacaagcggtacccacagaaagcacagataatagacgtgtggtgcagaggagtagcttgagccgagaacgaggcgagaaagctggagaccgaggagaccgcctagagcggagtgaacggggaggggaccgtggggaccggcttgatcgtgcgcggacacctgctaccaagcggagcttcagcaaggaagtggaggagcggagtagagaacggccctcccagcctgaggggctgcgcaaggcagctagcctcacggaggatcgggaccgtgggcgggatgccgtgaagcgagaagctgccctacccccagtgagccccctgaaggcggctctctctgaggaggagttagagaagaaatccaaggctatcattgaggaatatctccatctcaatgacatgaaagaggcagtccagtgcgtgcaggagctggcctcaccctccttgctcttcatctttgtacggcatggtgtcgagtctacgctggagcgcagtgccattgctcgtgagcatatggggcagctgctgcaccagctgctctgtgctgggcatctgtctactgctcagtactaccaagggttgtatgaaatcttggaattggctgaggacatggaaattgacatcccccacgtgtggctctacctagcggaactggtaacacccattctgcaggaaggtggggtgcccatgggggagctgttcagggagattacaaagcctctgagaccgttgggcaaagctgcttccctgttgctggagatcctgggcctcctgtgcaaaagcatgggtcctaaaaaggtggggacgctgtggcgagaagccgggcttagctggaaggaatttctacctgaaggccaggacattggtgcattcgtcgctgaacagaaggtggagtataccctgggagaggagtcggaagcccctggccagagggcactcccctccgaggagctgaacaggcagctggagaagctgctgaaggagggcagcagtaaccagcgggtgttcgactggatagaggccaacctgagtgagcagcagatagtatccaacacgttagttcgagccctcatgacggctgtctgctattctgcaattatttttgagactcccctccgagtggacgttgcagtgctgaaagcgcgagcgaagctgctgcagaaatacctgtgtgacgagcagaaggagctacaggcgctctacgccctccaggcccttgtagtgaccttagaacagcctcccaacctgctgcggatgttctttgacgcactgtatgacgaggacgtggtgaaggaggatgccttctacagttgggagagtagcaaggaccccgctgagcagcagggcaagggtgtggcccttaaatctgtcacagccttcttcaagtggctccgtgaagcagaggaggagtctgaccacaactgagggctggtggggccggggacctggagccccatggacacacagatggcccggctagccgcctggactgcaggggggcggcagcagcggcggtggcagtgggtgcctgtagtgtgatgtgtctgaactaataaagtggctgaagaggcaggatggcttggggctgcctgggcccccctccaggatgccgccaggtgtccctctcctccccctggggcacagagatatattatatataaagtcttgaaatttggtgtgtcttggggtggggaggggcaccaacgcctgcccctggggtccttttttttattttctgaaaatcactctcgggactgccgtcctcgctgctgggggcatatgccccagcccctgtaccacccctgctgttgcctgggcagggggaagggggggcacggtgcctgtaattattaaacatgaattcaattaagctca

SEQ ID NO: 57346 - DNA, 4626 bp, Homo sapiens
ccggctgcgcctgcggagaagcggtggccgccgagcgggatctgtgcggggagccggaaatggttgtggactacgtctgtgcggctgcgtggggctcggccgcgcggactgaaggagactgaagcacttctaccctagccgggcccagcccccgagcagtgcagcctcccgagtgcagagtgcagcccctgcccgccctggcccagctgcccatgtctaccctgctggatcccaagtaatgatgatcccttcccagatctcctacccagcctcccagggggcctactacatccctggacaggggcgttccacatacgttgtcccgacacagcagtaccctgtgcagccaggagccccaggcttctatccaggtgcaagccctacagaatttgggacctacgctggcgcctactatccagcccaaggggtgcagcagtttcccactggcgtggcccccgccccagttttgatgaaccagccaccccagattgctcccaagagggagcgtaagacgatccgaattcgagatccaaaccaaggaggaaaggatatcacagaggagatcatgtctggggcccgcactgcctccacacccacccctccccagacgggaggcggtctggagcctcaagctaatggggagacgccccaggttgctgtcattgtccggccagatgaccggtcacagggagcaatcattgctgaccggccagggctgcctggcccagagcatagcccttcagaatcccagccttcgtcgccttctccgaccccatcaccatccccagtcttggaaccggggtctgagcctaatctcgcagtcctctctattcctggggacactatgacaactatacaaatgtctgtagaagaatcaacccccatctcccgtgaaactggggagccatatcgcctctctccagaacccactcctctcgccgaacccatactggaagtagaagtgacacttagcaaaccggttccagaatctgagttttcttccagtcctctccaggctcccacccctttggcatctcacacagtggaaattcatgagcctaatggcatggtcccatctgaagatctggaaccagaggtggagtcaagcccagagcttgctcctcccccagcttgcccctccgaatcccctgtgcccattgctccaactgcccaacctgaggaactgctcaacggagccccctcgccaccagctgtggacttaagcccagtcagtgagccagaggagcaggccaaggaggtgacagcatcagtggcgccccccaccatcccctctgctactccagctacggctccttcagctacttccccagctcaggaggaggaaatggaagaagaagaagaagaggaagaaggagaagcaggagaagcaggagaagctgagagtgagaaaggaggagaggaactgctccccccagagagtacccctattccagccaacttgtctcagaatttggaggcagcagcagccactcaagtggcagtatctgtgccaaagaggagacggaaaattaaggagctaaataagaaggaggctgttggagaccttctggatgccttcaaggaggcgaacccggcagtaccagaggtggaaaatcagcctcctgcaggcagcaatccaggcccagagtctgagggcagtggtgtgcccccacgtcctgaggaagcagatgagacctgggactcaaaggaagacaaaattcacaatgctgagaacatccagcccggggaacagaagtatgaatataagtcagatcagtggaagcctctaaacctagaggagaaaaaacgttacgaccgtgagttcctgcttggttttcagttcatctttgccagtatgcagaagccagagggattgccacatatcagtgacgtggtgctggacaaggccaataaaacaccactgcggccactggatcccactagactacaaggcataaattgtggcccagacttcactccatcctttgccaaccttggccggacaacccttagcacccgtgggcccccaaggggtgggccaggtggggagctgccccgtgggccggctggcctgggaccccggcgctctcagcagggaccccgaaaagaaccacgcaagatcattgccacagtgttaatgaccgaagatataaaactgaacaaagcagagaaagcctggaaacccagcagcaagcggacggcggctgataaggatcgaggggaagaagatgctgatggcagcaaaacccaggacctattccgcagggtgcgctccatcctgaataaactgacaccccagatgttccagcagctgatgaagcaagtgacgcagctggccatcgacaccgaggaacgcctcaaaggggtcattgacctcatttttgagaaggccatttcagagcccaacttctctgtggcctatgccaacatgtgccgctgcctcatggcgctgaaagtgcccactacggaaaagccaacagtgactgtgaacttccgaaagctgttgttgaatcgatgtcagaaggagtttgagaaagacaaagatgatgatgaggtttttgagaagaagcaaaaagagatggatgaagctgctacggcagaggaacgaggacgcctgaaggaagagctggaagaggctcgggacatagcccggcggcgctctttagggaatatcaagtttattggagagttgttcaaactgaagatgttaacagaggcaataatgcatgactgtgtggtcaaactgcttaagaaccatgatgaagagtcccttgagtgcctttgtcgtctgctcaccaccattggcaaagacctggactttgaaaaagccaagccccgaatggatcagtatttcaaccagatggaaaaaatcattaaagaaaagaagacgtcatcccgcatccgctttatgctgcaggacgtgctggatctgcgagggagcaattgggtgccacgccgaggggatcagggtcccaagaccattgaccagatccataaggaggctgagatggaagaacatcgagagcacatcaaagtgcagcagctcatggccaagggcagtgacaagcgtcggggcggtcctccaggccctcccatcagccgtggacttccccttgtggatgatggtggctggaacacagttcccatcagcaaaggtagccgccccattgacacctcacgactcaccaagatcaccaagcctggctccatcgattctaacaaccagctctttgcacctggagggcgactgagctggggcaagggcagcagcggaggctcaggagccaagccctcagacgcagcatcagaagctgctcgcccagctactagtactttgaatcgcttctcagcccttcaacaagcggtacccacagaaagcacagataatagacgtgtggtgcagaggagtagcttgagccgagaacgaggcgagaaagctggagaccgaggagaccgcctagagcggagtgaacggggaggggaccgtggggaccggcttgatcgtgcgcggacacctgctaccaagcggagcttcagcaaggaagtggaggagcggagtagagaacggccctcccagcctgaggggctgcgcaaggcagctagcctcacggaggatcgggaccgtgggcgggatgccgtgaagcgagaagctgccctacccccagtgagccccctgaaggcggctctctctgaggaggagttagagaagaaatccaaggctatcattgaggaatatctccatctcaatgacatgaaagaggcagtccagtgcgtgcaggagctggcctcaccctccttgctcttcatctttgtacggcatggtgtcgagtctacgctggagcgcagtgccattgctcgtgagcatatggggcagctgctgcaccagctgctctgtgctgggcatctgtctactgctcagtactaccaagggttgtatgaaatcttggaattggctgaggacatggaaattgacatcccccacgtgtggctctacctagcggaactggtaacacccattctgcaggaaggtggggtgcccatgggggagctgttcagggagattacaaagcctctgagaccgttgggcaaagctgcttccctgttgctggagatcctgggcctcctgtgcaaaagcatgggtcctaaaaaggtggggacgctgtggcgagaagccgggcttagctggaaggaatttctacctgaaggccaggacattggtgcattcgtcgctgaacagaaggtggagtataccctgggagaggagtcggaagcccctggccagagggcactcccctccgaggagctgaacaggcagctggagaagctgctgaaggagggcagcagtaaccagcgggtgttcgactggatagaggccaacctgagtgagcagcagatagtatccaacacgttagttcgagccctcatgacggctgtctgctattctgcaattatttttgagactcccctccgagtggacgttgcagtgctgaaaatcactctcgggactgccgtcctcgctgctgggggcatatgccccagcccctgtaccacccctgctgttgcctgggcagggggaagggggggcacggtgcctgtaattattaaacatgaattcaattaagctca

SEQ ID NO: 57347 - DNA, 4476 bp, Homo sapiens
ccggctgcgcctgcggagaagcggtggccgccgagcgggatctgtgcggggagccggaaatggttgtggactacgtctgtgcggctgcgtggggctcggccgcgcggactgaaggagactgaagcacttctaccctagccgggcccagcccccgagcagtgcagcctcccgagtgcagagtgcagcccctgcccgccctggcccagctgcccatgtctaccctgctggatcccaagtaatgatgatcccttcccagatctcctacccagcctcccagggggcctactacatccctggacaggggcgttccacatacgttgtcccgacacagcagtaccctgtgcagccaggagccccaggcttctatccaggtgcaagccctacagaatttgggacctacgctggcgcctactatccagcccaaggggtgcagcagtttcccactggcgtggcccccgccccagttttgatgaaccagccaccccagattgctcccaagagggagcgtaagacgatccgaattcgagatccaaaccaaggaggaaaggatatcacagaggagatcatgtctggggcccgcactgcctccacacccacccctccccagacgggaggcggtctggagcctcaagctaatggggagacgccccaggttgctgtcattgtccggccagatgaccggtcacagggagcaatcattgctgaccggccagggctgcctggcccagagcatagcccttcagaatcccagccttcgtcgccttctccgaccccatcaccatccccagtcttggaaccggggtctgagcctaatctcgcagtcctctctattcctggggacactatgacaactatacaaatgtctgtagaagaatcaacccccatctcccgtgaaactggggagccatatcgcctctctccagaacccactcctctcgccgaacccatactggaagtagaagtgacacttagcaaaccggttccagaatctgagttttcttccagtcctctccaggctcccacccctttggcatctcacacagtggaaattcatgagcctaatggcatggtcccatctgaagatctggaaccagaggtggagtcaagcccagagcttgctcctcccccagcttgcccctccgaatcccctgtgcccattgctccaactgcccaacctgaggaactgctcaacggagccccctcgccaccagctgtggacttaagcccagtcagtgagccagaggagcaggccaaggaggtgacagcatcagtggcgccccccaccatcccctctgctactccagctacggctccttcagctacttccccagctcaggaggaggaaatggaagaagaagaagaagaggaagaaggagaagcaggagaagcaggagaagctgagagtgagaaaggaggagaggaactgctccccccagagagtacccctattccagccaacttgtctcagaatttggaggcagcagcagccactcaagtggcagtatctgtgccaaagaggagacggaaaattaaggagctaaataagaaggaggctgttggagaccttctggatgccttcaaggaggcgaacccggcagtaccagaggtggaaaatcagcctcctgcaggcagcaatccaggcccagagtctgagggcagtggtgtgcccccacgtcctgaggaagcagatgagacctgggactcaaaggaagacaaaattcacaatgctgagaacatccagcccggggaacagaagtatgaatataagtcagatcagtggaagcctctaaacctagaggagaaaaaacgttacgaccgtgagttcctgcttggttttcagttcatctttgccagtatgcagaagccagagggattgccacatatcagtgacgtggtgctggacaaggccaataaaacaccactgcggccactggatcccactagactacaaggcataaattgtggcccagacttcactccatcctttgccaaccttggccggacaacccttagcacccgtgggcccccaaggggtgggccaggtggggagctgccccgtgggccggctggcctgggaccccggcgctctcagcagggaccccgaaaagaaccacgcaagatcattgccacagtgttaatgaccgaagatataaaactgaacaaagcagagaaagcctggaaacccagcagcaagcggacggcggctgataaggatcgaggggaagaagatgctgatggcagcaaaacccaggacctattccgcagggtgcgctccatcctgaataaactgacaccccagatgttccagcagctgatgaagcaagtgacgcagctggccatcgacaccgaggaacgcctcaaaggggtcattgacctcatttttgagaaggccatttcagagcccaacttctctgtggcctatgccaacatgtgccgctgcctcatggcgctgaaagtgcccactacggaaaagccaacagtgactgtgaacttccgaaagctgttgttgaatcgatgtcagaaggagtttgagaaagacaaagatgatgatgaggtttttgagaagaagcaaaaagagatggatgaagctgctacggcagaggaacgaggacgcctgaaggaagagctggaagaggctcgggacatagcccggcggcgctctttagggaatatcaagtttattggagagttgttcaaactgaagatgttaacagaggcaataatgcatgactgtgtggtcaaactgcttaagaaccatgatgaagagtcccttgagtgcctttgtcgtctgctcaccaccattggcaaagacctggactttgaaaaagccaagccccgaatggatcagtatttcaaccagatggaaaaaatcattaaagaaaagaagacgtcatcccgcatccgctttatgctgcaggacgtgctggatctgcgagggagcaattgggtgccacgccgaggggatcagggtcccaagaccattgaccagatccataaggaggctgagatggaagaacatcgagagcacatcaaagtgcagcagctcatggccaagggcagtgacaagcgtcggggcggtcctccaggccctcccatcagccgtggacttccccttgtggatgatggtggctggaacacagttcccatcagcaaaggtagccgccccattgacacctcacgactcaccaagatcaccaagcctggctccatcgattctaacaaccagctctttgcacctggagggcgactgagctggggcaagggcagcagcggaggctcaggagccaagccctcagacgcagcatcagaagctgctcgcccagctactagtactttgaatcgcttctcagcccttcaacaagcggtacccacagaaagcacagataatagacgtgtggtgcagaggagtagcttgagccgagaacgaggcgagaaagctggagaccgaggagaccgcctagagcggagtgaacggggaggggaccgtggggaccggcttgatcgtgcgcggacacctgctaccaagcggagcttcagcaaggaagtggaggagcggagtagagaacggccctcccagcctgaggggctgcgcaaggcagctagcctcacggaggatcgggaccgtgggcgggatgccgtgaagcgagaagctgccctacccccagtgagccccctgaaggcggctctctctgaggaggagttagagaagaaatccaaggctatcattgaggaatatctccatctcaatgacatgaaagaggcagtccagtgcgtgcaggagctggcctcaccctccttgctcttcatctttgtacggcatggtgtcgagtctacgctggagcgcagtgccattgctcgtgagcatatggggcagctgctgcaccagctgctctgtgctgggcatctgtctactgctcagtactaccaagggttgtatgaaatcttggaattggctgaggacatggaaattgacatcccccacgtgtggctctacctagcggaactggtaacacccattctgcaggaaggtggggtgcccatgggggagctgttcagggagattacaaagcctctgagaccgttgggcaaagctgcttccctgttgctggagatcctgggcctcctgtgcaaaagcatgggtcctaaaaaggtggggacgctgtggcgagaagccgggcttagctggaaggaatttctacctgaaggccaggacattggtgcattcgtcgctgaacagaaggtggagtataccctgggagaggagtcggaagcccctggccagagggcactcccctccgaggagctgaacaggcagctggagaagctgctgaaggagggcagcagtaaccagcgggtgttcgactggatagaggccaacctgagtgagcagcagatagtatccaacacgttagttcgagccctcatgatcgtccgtctcccttcacaaagtaaagagactctccccgagacacatta

SEQ ID NO: 57348 - DNA, 4705 bp, Homo sapiens
ccggctgcgcctgcggagaagcggtggccgccgagcgggatctgtgcggggagccggaaatggttgtggactacgtctgtgcggctgcgtggggctcggccgcgcggactgaaggagactgaagcacttctaccctagccgggcccagcccccgagcagtgcagcctcccgagtgcagagtgcagcccctgcccgccctggcccagctgcccatgtctaccctgctggatcccaagtaatgatgatcccttcccagatctcctacccagcctcccagggggcctactacatccctggacaggggcgttccacatacgttgtcccgacacagcagtaccctgtgcagccaggagccccaggcttctatccaggtgcaagccctacagaatttgggacctacgctggcgcctactatccagcccaaggggtgcagcagtttcccactggcgtggcccccgccccagttttgatgaaccagccaccccagattgctcccaagagggagcgtaagacgatccgaattcgagatccaaaccaaggaggaaaggatatcacagaggagatcatgtctggggcccgcactgcctccacacccacccctccccagacgggaggcggtctggagcctcaagctaatggggagacgccccaggttgctgtcattgtccggccagatgaccggtcacagggagcaatcattgctgaccggccagggctgcctggcccagagcatagcccttcagaatcccagccttcgtcgccttctccgaccccatcaccatccccagtcttggaaccggggtctgagcctaatctcgcagtcctctctattcctggggacactatgacaactatacaaatgtctgtagaagaatcaacccccatctcccgtgaaactggggagccatatcgcctctctccagaacccactcctctcgccgaacccatactggaagtagaagtgacacttagcaaaccggttccagaatctgagttttcttccagtcctctccaggctcccacccctttggcatctcacacagtggaaattcatgagcctaatggcatggtcccatctgaagatctggaaccagaggtggagtcaagcccagagcttgctcctcccccagcttgcccctccgaatcccctgtgcccattgctccaactgcccaacctgaggaactgctcaacggagccccctcgccaccagctgtggacttaagcccagtcagtgagccagaggagcaggccaaggaggtgacagcatcagtggcgccccccaccatcccctctgctactccagctacggctccttcagctacttccccagctcaggaggaggaaatggaagaagaagaagaagaggaagaaggagaagcaggagaagcaggagaagctgagagtgagaaaggaggagaggaactgctccccccagagagtacccctattccagccaacttgtctcagaatttggaggcagcagcagccactcaagtggcagtatctgtgccaaagaggagacggaaaattaaggagctaaataagaaggaggctgttggagaccttctggatgccttcaaggaggcgaacccggcagtaccagaggtggaaaatcagcctcctgcaggcagcaatccaggcccagagtctgagggcagtggtgtgcccccacgtcctgaggaagcagatgagacctgggactcaaaggaagacaaaattcacaatgctgagaacatccagcccggggaacagaagtatgaatataagtcagatcagtggaagcctctaaacctagaggagaaaaaacgttacgaccgtgagttcctgcttggttttcagttcatctttgccagtatgcagaagccagagggattgccacatatcagtgacgtggtgctggacaaggccaataaaacaccactgcggccactggatcccactagactacaaggcataaattgtggcccagacttcactccatcctttgccaaccttggccggacaacccttagcacccgtgggcccccaaggggtgggccaggtggggagctgccccgtgggccggctggcctgggaccccggcgctctcagcagggaccccgaaaagaaccacgcaagatcattgccacagtgttaatgaccgaagatataaaactgaacaaagcagagaaagcctggaaacccagcagcaagcggacggcggctgataaggatcgaggggaagaagatgctgatggcagcaaaacccaggacctattccgcagggtgcgctccatcctgaataaactgacaccccagatgttccagcagctgatgaagcaagtgacgcagctggccatcgacaccgaggaacgcctcaaaggggtcattgacctcatttttgagaaggccatttcagagcccaacttctctgtggcctatgccaacatgtgccgctgcctcatggcgctgaaagtgcccactacggaaaagccaacagtgactgtgaacttccgaaagctgttgttgaatcgatgtcagaaggagtttgagaaagacaaagatgatgatgaggtttttgagaagaagcaaaaagagatggatgaagctgctacggcagaggaacgaggacgcctgaaggaagagctggaagaggctcgggacatagcccggcggcgctctttagggaatatcaagtttattggagagttgttcaaactgaagatgttaacagaggcaataatgcatgactgtgtggtcaaactgcttaagaaccatgatgaagagtcccttgagtgcctttgtcgtctgctcaccaccattggcaaagacctggactttgaaaaagccaagccccgaatggatcagtatttcaaccagatggaaaaaatcattaaagaaaagaagacgtcatcccgcatccgctttatgctgcaggacgtgctggatctgcgagggagcaattgggtgccacgccgaggggatcagggtcccaagaccattgaccagatccataaggaggctgagatggaagaacatcgagagcacatcaaagtgcagcagctcatggccaagggcagtgacaagcgtcggggcggtcctccaggccctcccatcagccgtggacttccccttgtggatgatggtggctggaacacagttcccatcagcaaaggtagccgccccattgacacctcacgactcaccaagatcaccaagcctggctccatcgattctaacaaccagctctttgcacctggagggcgactgagctggggcaagggcagcagcggaggctcaggagccaagccctcagacgcagcatcagaagctgctcgcccagctactagtactttgaatcgcttctcagcccttcaacaagcggtacccacagaaagcacagataatagacgtgtggtgcagaggagtagcttgagccgagaacgaggcgagaaagctggagaccgaggagaccgcctagagcggagtgaacggggaggggaccgtggggaccggcttgatcgtgcgcggacacctgctaccaagcggagcttcagcaaggaagtggaggagcggagtagagaacggccctcccagcctgaggggctgcgcaaggcagctagcctcacggaggatcgggaccgtgggcgggatgccgtgaagcgagaagctgccctacccccagtgagccccctgaaggcggctctctctgaggaggagttagagaagaaatccaaggctatcattgaggaatatctccatctcaatgacatgaaagaggcagtccagtgcgtgcaggagctggcctcaccctccttgctcttcatctttgtacggcatggtgtcgagtctacgctggagcgcagtgccattgctcgtgagcatatggggcagctgctgcaccagctgctctgtgctgggcatctgtctactgctcagtactaccaagggttgtatgaaatcttggaattggctgaggacatggaaattgacatcccccacgtgtggctctacctagcggaactggtaacacccattctgcaggaaggtggggtgcccatgggggagctgttcagggagattacaaagcctctgagaccgttgggcaaagctgcttccctgttgctggagatcctgggcctcctgtgcaaaagcatgggtcctaaaaaggtggggacgctgtggcgagaagccgggcttagctggaaggaatttctacctgaaggccaggacattggtgcattcgtcgctgaacagaaggtggagtataccctgggagaggagtcggaagcccctggccagagggcactcccctccgaggagctgaacaggcagctggagaagctgctgaaggagggcagcagtaaccagcgggtgttcgactggatagagaatctggggatcatttgtttctcccatacagccaacctgagtgagcagcagatagtatccaacacgttagttcgagccctcatgacggctgtctgctattctgcaattatttttgagactcccctccgagtggacgttgcagtgctgaaagcgcgagcgaagctgctgcagaaatacctgtgtgacgagcagaaggagctacaggcgctctacgccctccaggcccttgtagtgaccttagaacagcctcccaacctgctgcggatgttctttgacgcactgtatgacgaggacgtggtgaagtattccgcgctgtctattccggagatcctc

SEQ ID NO: 57349 - DNA, 4458 bp, Homo sapiens
ccggctgcgcctgcggagaagcggtggccgccgagcgggatctgtgcggggagccggaaatggttgtggactacgtctgtgcggctgcgtggggctcggccgcgcggactgaaggagactgaagcacttctaccctagccgggcccagcccccgagcagtgcagcctcccgagtgcagagtgcagcccctgcccgccctggcccagctgcccatgtctaccctgctggatcccaagtaatgatgatcccttcccagatctcctacccagcctcccagggggcctactacatccctggacaggggcgttccacatacgttgtcccgacacagcagtaccctgtgcagccaggagccccaggcttctatccaggtgcaagccctacagaatttgggacctacgctggcgcctactatccagcccaaggggtgcagcagtttcccactggcgtggcccccgccccagttttgatgaaccagccaccccagattgctcccaagagggagcgtaagacgatccgaattcgagatccaaaccaaggaggaaaggatatcacagaggagatcatgtctggggcccgcactgcctccacacccacccctccccagacgggaggcggtctggagcctcaagctaatggggagacgccccaggttgctgtcattgtccggccagatgaccggtcacagggagcaatcattgctgaccggccagggctgcctggcccagagcatagcccttcagaatcccagccttcgtcgccttctccgaccccatcaccatccccagtcttggaaccggggtctgagcctaatctcgcagtcctctctattcctggggacactatgacaactatacaaatgtctgtagaagaatcaacccccatctcccgtgaaactggggagccatatcgcctctctccagaacccactcctctcgccgaacccatactggaagtagaagtgacacttagcaaaccggttccagaatctgagttttcttccagtcctctccaggctcccacccctttggcatctcacacagtggaaattcatgagcctaatggcatggtcccatctgaagatctggaaccagaggtggagtcaagcccagagcttgctcctcccccagcttgcccctccgaatcccctgtgcccattgctccaactgcccaacctgaggaactgctcaacggagccccctcgccaccagctgtggacttaagcccagtcagtgagccagaggagcaggccaaggaggtgacagcatcagtggcgccccccaccatcccctctgctactccagctacggctccttcagctacttccccagctcaggaggaggaaatggaagaagaagaagaagaggaagaaggagaagcaggagaagcaggagaagctgagagtgagaaaggaggagaggaactgctccccccagagagtacccctattccagccaacttgtctcagaatttggaggcagcagcagccactcaagtggcagtatctgtgccaaagaggagacggaaaattaaggagctaaataagaaggaggctgttggagaccttctggatgccttcaaggaggcgaacccggcagtaccagaggtggaaaatcagcctcctgcaggcagcaatccaggcccagagtctgagggcagtggtgtgcccccacgtcctgaggaagcagatgagacctgggactcaaaggaagacaaaattcacaatgctgagaacatccagcccggggaacagaagtatgaatataagtcagatcagtggaagcctctaaacctagaggagaaaaaacgttacgaccgtgagttcctgcttggttttcagttcatctttgccagtatgcagaagccagagggattgccacatatcagtgacgtggtgctggacaaggccaataaaacaccactgcggccactggatcccactagactacaaggcataaattgtggcccagacttcactccatcctttgccaaccttggccggacaacccttagcacccgtgggcccccaaggggtgggccaggtggggagctgccccgtgggccggctggcctgggaccccggcgctctcagcagggaccccgaaaagaaccacgcaagatcattgccacagtgttaatgaccgaagatataaaactgaacaaagcagagaaagcctggaaacccagcagcaagcggacggcggctgataaggatcgaggggaagaagatgctgatggcagcaaaacccaggacctattccgcagggtgcgctccatcctgaataaactgacaccccagatgttccagcagctgatgaagcaagtgacgcagctggccatcgacaccgaggaacgcctcaaaggggtcattgacctcatttttgagaaggccatttcagagcccaacttctctgtggcctatgccaacatgtgccgctgcctcatggcgctgaaagtgcccactacggaaaagccaacagtgactgtgaacttccgaaagctgttgttgaatcgatgtcagaaggagtttgagaaagacaaagatgatgatgaggtttttgagaagaagcaaaaagagatggatgaagctgctacggcagaggaacgaggacgcctgaaggaagagctggaagaggctcgggacatagcccggcggcgctctttagggaatatcaagtttattggagagttgttcaaactgaagatgttaacagaggcaataatgcatgactgtgtggtcaaactgcttaagaaccatgatgaagagtcccttgagtgcctttgtcgtctgctcaccaccattggcaaagacctggactttgaaaaagccaagccccgaatggatcagtatttcaaccagatggaaaaaatcattaaagaaaagaagacgtcatcccgcatccgctttatgctgcaggacgtgctggatctgcgagggagcaattgggtgccacgccgaggggatcagggtcccaagaccattgaccagatccataaggaggctgagatggaagaacatcgagagcacatcaaagtgcagcagctcatggccaagggcagtgacaagcgtcggggcggtcctccaggccctcccatcagccgtggacttccccttgtggatgatggtggctggaacacagttcccatcagcaaaggtagccgccccattgacacctcacgactcaccaagatcaccaagcctggctccatcgattctaacaaccagctctttgcacctggagggcgactgagctggggcaagggcagcagcggaggctcaggagccaagccctcagacgcagcatcagaagctgctcgcccagctactagtactttgaatcgcttctcagcccttcaacaagcggtacccacagaaagcacagataatagacgtgtggtgcagaggagtagcttgagccgagaacgaggcgagaaagctggagaccgaggagaccgcctagagcggagtgaacggggaggggaccgtggggaccggcttgatcgtgcgcggacacctgctaccaagcggagcttcagcaaggaagtggaggagcggagtagagaacggccctcccagcctgaggggctgcgcaaggcagctagcctcacggaggatcgggaccgtgggcgggatgccgtgaagcgagaagctgccctacccccagtgagccccctgaaggcggctctctctgaggaggagttagagaagaaatccaaggctatcattgaggaatatctccatctcaatgacatgaaagaggcagtccagtgcgtgcaggagctggcctcaccctccttgctcttcatctttgtacggcatggtgtcgagtctacgctggagcgcagtgccattgctcgtgagcatatggggcagctgctgcaccagctgctctgtgctgggcatctgtctactgctcagtactaccaagggttgtatgaaatcttggaattggctgaggacatggaaattgacatcccccacgtgtggctctacctagcggaactggtaacacccattctgcaggaaggtggggtgcccatgggggagctgttcagggagattacaaagcctctgagaccgttgggcaaagctgcttccctgttgctggagatcctgggcctcctgtgcaaaagcatgggtcctaaaaaggtggggacgctgtggcgagaagccgggcttagctggaaggaatttctacctgaaggccaggacattggtgcattcgtcgctgaacagaaggtggagtataccctgggagaggagtcggaagcccctggccagagggcactcccctccgaggagctgaacaggcagctggagaagctgctgaaggagggcagcagtaaccagcgggtgttcgactggatagagtaccccaacctgagtgatccagccagatagtatccacaccctatgtatcagacctctcccacgtctatcatcgacttccgctatag

SEQ ID NO: 57350 - DNA, 2034 bp, Homo sapiens
gagggcttggctcctgaggcctccgctgctgcccctgccccagctcagtcgccctccaggtgcaaagagctggttgttagaatcgatggagccaggccctcagacgcagcatcagaagctgctcgcccagctactagtactttgaatcgcttctcagcccttcaacaagcggtacccacagaaagcacagataatagacgtgtggtgcagaggagtagcttgagccgagaacgaggcgagaaagctggagaccgaggagaccgcctagagcggagtgaacggggaggggaccgtggggaccggcttgatcgtgcgcggacacctgctaccaagcggagcttcagcaaggaagtggaggagcggagtagagaacggccctcccagcctgaggggctgcgcaaggcagctagcctcacggaggatcgggaccgtgggcgggatgccgtgaagcgagaagctgccctacccccagtgagccccctgaaggcggctctctctgaggaggagttagagaagaaatccaaggctatcattgaggaatatctccatctcaatgacatgaaagaggcagtccagtgcgtgcaggagctggcctcaccctccttgctcttcatctttgtacggcatggtgtcgagtctacgctggagcgcagtgccattgctcgtgagcatatggggcagctgctgcaccagctgctctgtgctgggcatctgtctactgctcagtactaccaagggttgtatgaaatcttggaattggctgaggacatggaaattgacatcccccacgtgtggctctacctagcggaactggtaacacccattctgcaggaaggtggggtgcccatgggggagctgttcagggagattacaaagcctctgagaccgttgggcaaagctgcttccctgttgctggagatcctgggcctcctgtgcaaaagcatgggtcctaaaaaggtggggacgctgtggcgagaagccgggcttagctggaaggaatttctacctgaaggccaggacattggtgcattcgtcgctgaacagaaggtggagtataccctgggagaggagtcggaagcccctggccagagggcactcccctccgaggagctgaacaggcagctggagaagctgctgaaggagggcagcagtaaccagcgggtgttcgactggatagaggccaacctgagtgagcagcagatagtatccaacacgttagttcgagccctcatgacggctgtctgctattctgcaattatttttgagactcccctccgagtggacgttgcagtgctgaaagcgcgagcgaagctgctgcagaaatacctgtgtgacgagcagaaggagctacaggcgctctacgccctccaggcccttgtagtgaccttagaacagcctcccaacctgctgcggatgttctttgacgcactgtatgacgaggacgtggtgaaggaggatgccttctacagttgggagagtagcaaggaccccgctgagcagcagggcaagggtgtggcccttaaatctgtcacagccttcttcaagtggctccgtgaagcagaggaggagtctgaccacaactgagggctggtggggccggggacctggagccccatggacacacagatggcccggctagccgcctggactgcaggggggcggcagcagcggcggtggcagtgggtgcctgtagtgtgatgtgtctgaactaataaagtggctgaagaggcaggatggcttggggctgcctgggcccccctccaggatgccgccaggtgtccctctcctccccctggggcacagagatatattatatataaagtcttgaaatttggtgtgtcttggggtggggaggggcaccaacgcctgcccctggggtccttttttttattttctgaaaatcactctcgggactgccgtcctcgctgctgggggcatatgccccagcccctgtaccacccctgctgttgcctgggcagggggaagggggggcacggtgcctgtaattattaaacatgaattcaattaagctca

SEQ ID NO: 57351 - DNA, 1877 bp, Homo sapiens
aaccaaactcttctcagtcgatgcccggtgttattcggccgaggcagaggcagtggagtagcttgagccgagaacgaggcgagaaagctggagaccgaggagaccgcctagagcggagtgaacggggaggggaccgtggggaccggcttgatcgtgcgcggacacctgctaccaagcggagcttcagcaaggaagtggaggagcggagtagagaacggccctcccagcctgaggggctgcgcaaggcagctagcctcacggaggatcgggaccgtgggcgggatgccgtgaagcgagaagctgccctacccccagtgagccccctgaaggcggctctctctgaggaggagttagagaagaaatccaaggctatcattgaggaatatctccatctcaatgacatgaaagaggcagtccagtgcgtgcaggagctggcctcaccctccttgctcttcatctttgtacggcatggtgtcgagtctacgctggagcgcagtgccattgctcgtgagcatatggggcagctgctgcaccagctgctctgtgctgggcatctgtctactgctcagtactaccaagggttgtatgaaatcttggaattggctgaggacatggaaattgacatcccccacgtgtggctctacctagcggaactggtaacacccattctgcaggaaggtggggtgcccatgggggagctgttcagggagattacaaagcctctgagaccgttgggcaaagctgcttccctgttgctggagatcctgggcctcctgtgcaaaagcatgggtcctaaaaaggtggggacgctgtggcgagaagccgggcttagctggaaggaatttctacctgaaggccaggacattggtgcattcgtcgctgaacagaaggtggagtataccctgggagaggagtcggaagcccctggccagagggcactcccctccgaggagctgaacaggcagctggagaagctgctgaaggagggcagcagtaaccagcgggtgttcgactggatagaggccaacctgagtgagcagcagatagtatccaacacgttagttcgagccctcatgacggctgtctgctattctgcaattatttttgagactcccctccgagtggacgttgcagtgctgaaagcgcgagcgaagctgctgcagaaatacctgtgtgacgagcagaaggagctacaggcgctctacgccctccaggcccttgtagtgaccttagaacagcctcccaacctgctgcggatgttctttgacgcactgtatgacgaggacgtggtgaaggaggatgccttctacagttgggagagtagcaaggaccccgctgagcagcagggcaagggtgtggcccttaaatctgtcacagccttcttcaagtggctccgtgaagcagaggaggagtctgaccacaactgagggctggtggggccggggacctggagccccatggacacacagatggcccggctagccgcctggactgcaggggggcggcagcagcggcggtggcagtgggtgcctgtagtgtgatgtgtctgaactaataaagtggctgaagaggcaggatggcttggggctgcctgggcccccctccaggatgccgccaggtgtccctctcctccccctggggcacagagatatattatatataaagtcttgaaatttggtgtgtcttggggtggggaggggcaccaacgcctgcccctggggtccttttttttattttctgaaaatcactctcgggactgccgtcctcgctgctgggggcatatgccccagcccctgtaccacccctgctgttgcctgggcagggggaagggggggcacggtgcctgtaattattaaacatgaattcaattaagctca

SEQ ID NO: 57352 - DNA, 1874 bp, Homo sapiens
tatgagctcgtaccttccaccagcaagacagatatagacgtgtggtgcagaggagtagcttgagccgagaacgaggcgagaaagctggagaccgaggagaccgcctagagcggagtgaacggggaggggaccgtggggaccggcttgatcgtgcgcggacacctgctaccaagcggagcttcagcaaggaagtggaggagcggagtagagaacggccctcccagcctgaggggctgcgcaaggcagctagcctcacggaggatcgggaccgtgggcgggatgccgtgaagcgagaagctgccctacccccagtgagccccctgaaggcggctctctctgaggaggagttagagaagaaatccaaggctatcattgaggaatatctccatctcaatgacatgaaagaggcagtccagtgcgtgcaggagctggcctcaccctccttgctcttcatctttgtacggcatggtgtcgagtctacgctggagcgcagtgccattgctcgtgagcatatggggcagctgctgcaccagctgctctgtgctgggcatctgtctactgctcagtactaccaagggttgtatgaaatcttggaattggctgaggacatggaaattgacatcccccacgtgtggctctacctagcggaactggtaacacccattctgcaggaaggtggggtgcccatgggggagctgttcagggagattacaaagcctctgagaccgttgggcaaagctgcttccctgttgctggagatcctgggcctcctgtgcaaaagcatgggtcctaaaaaggtggggacgctgtggcgagaagccgggcttagctggaaggaatttctacctgaaggccaggacattggtgcattcgtcgctgaacagaaggtggagtataccctgggagaggagtcggaagcccctggccagagggcactcccctccgaggagctgaacaggcagctggagaagctgctgaaggagggcagcagtaaccagcgggtgttcgactggatagaggccaacctgagtgagcagcagatagtatccaacacgttagttcgagccctcatgacggctgtctgctattctgcaattatttttgagactcccctccgagtggacgttgcagtgctgaaagcgcgagcgaagctgctgcagaaatacctgtgtgacgagcagaaggagctacaggcgctctacgccctccaggcccttgtagtgaccttagaacagcctcccaacctgctgcggatgttctttgacgcactgtatgacgaggacgtggtgaaggaggatgccttctacagttgggagagtagcaaggaccccgctgagcagcagggcaagggtgtggcccttaaatctgtcacagccttcttcaagtggctccgtgaagcagaggaggagtctgaccacaactgagggctggtggggccggggacctggagccccatggacacacagatggcccggctagccgcctggactgcaggggggcggcagcagcggcggtggcagtgggtgcctgtagtgtgatgtgtctgaactaataaagtggctgaagaggcaggatggcttggggctgcctgggcccccctccaggatgccgccaggtgtccctctcctccccctggggcacagagatatattatatataaagtcttgaaatttggtgtgtcttggggtggggaggggcaccaacgcctgcccctggggtccttttttttattttctgaaaatcactctcgggactgccgtcctcgctgctgggggcatatgccccagcccctgtaccacccctgctgttgcctgggcagggggaagggggggcacggtgcctgtaattattaaacatgaattcaattaagctca

SEQ ID NO: 57353 - DNA, 1901 bp, Homo sapiens
cggaatacacagcgagaccaaggttttgttaaacaaaacagggttccaggaagcggaggttgcagtgagccgagattgcgagtagcttgagccgagaacgaggcgagaaagctggagaccgaggagaccgcctagagcggagtgaacggggaggggaccgtggggaccggcttgatcgtgcgcggacacctgctaccaagcggagcttcagcaaggaagtggaggagcggagtagagaacggccctcccagcctgaggggctgcgcaaggcagctagcctcacggaggatcgggaccgtgggcgggatgccgtgaagcgagaagctgccctacccccagtgagccccctgaaggcggctctctctgaggaggagttagagaagaaatccaaggctatcattgaggaatatctccatctcaatgacatgaaagaggcagtccagtgcgtgcaggagctggcctcaccctccttgctcttcatctttgtacggcatggtgtcgagtctacgctggagcgcagtgccattgctcgtgagcatatggggcagctgctgcaccagctgctctgtgctgggcatctgtctactgctcagtactaccaagggttgtatgaaatcttggaattggctgaggacatggaaattgacatcccccacgtgtggctctacctagcggaactggtaacacccattctgcaggaaggtggggtgcccatgggggagctgttcagggagattacaaagcctctgagaccgttgggcaaagctgcttccctgttgctggagatcctgggcctcctgtgcaaaagcatgggtcctaaaaaggtggggacgctgtggcgagaagccgggcttagctggaaggaatttctacctgaaggccaggacattggtgcattcgtcgctgaacagaaggtggagtataccctgggagaggagtcggaagcccctggccagagggcactcccctccgaggagctgaacaggcagctggagaagctgctgaaggagggcagcagtaaccagcgggtgttcgactggatagaggccaacctgagtgagcagcagatagtatccaacacgttagttcgagccctcatgacggctgtctgctattctgcaattatttttgagactcccctccgagtggacgttgcagtgctgaaagcgcgagcgaagctgctgcagaaatacctgtgtgacgagcagaaggagctacaggcgctctacgccctccaggcccttgtagtgaccttagaacagcctcccaacctgctgcggatgttctttgacgcactgtatgacgaggacgtggtgaaggaggatgccttctacagttgggagagtagcaaggaccccgctgagcagcagggcaagggtgtggcccttaaatctgtcacagccttcttcaagtggctccgtgaagcagaggaggagtctgaccacaactgagggctggtggggccggggacctggagccccatggacacacagatggcccggctagccgcctggactgcaggggggcggcagcagcggcggtggcagtgggtgcctgtagtgtgatgtgtctgaactaataaagtggctgaagaggcaggatggcttggggctgcctgggcccccctccaggatgccgccaggtgtccctctcctccccctggggcacagagatatattatatataaagtcttgaaatttggtgtgtcttggggtggggaggggcaccaacgcctgcccctggggtccttttttttattttctgaaaatcactctcgggactgccgtcctcgctgctgggggcatatgccccagcccctgtaccacccctgctgttgcctgggcagggggaagggggggcacggtgcctgtaattattaaacatgaattcaattaagctca

SEQ ID NO: 57354 - DNA, 4614 bp, Homo sapiens
ccggctgcgcctgcggagaagcggtggccgccgagcgggatctgtgcggggagccggaaatggttgtggactacgtctgtgcggctgcgtggggctcggccgcgcggactgaaggagactgaagcacttctaccctagccgggcccagcccccgagcagtgcagcctcccgagtgcagagtgcagcccctgcccgccctggcccagctgcccatgtctaccctgctggatcccaagtaatgatgatcccttcccagatctcctacccagcctcccagggggcctactacatccctggacaggggcgttccacatacgttgtcccgacacagcagtaccctgtgcagccaggagccccaggcttctatccaggtgcaagccctacagaatttgggacctacgctggcgcctactatccagcccaaggggtgcagcagtttcccactggcgtggcccccgccccagttttgatgaaccagccaccccagattgctcccaagagggagcgtaagacgatccgaattcgagatccaaaccaaggaggaaaggatatcacagaggagatcatgtctggggcccgcactgcctccacacccacccctccccagacgggaggcggtctggagcctcaagctaatggggagacgccccaggttgctgtcattgtccggccagatgaccggtcacagggagcaatcattgctgaccggccagggctgcctggcccagagcatagcccttcagaatcccagccttcgtcgccttctccgaccccatcaccatccccagtcttggaaccggggtctgagcctaatctcgcagtcctctctattcctggggacactatgacaactatacaaatgtctgtagaagaatcaacccccatctcccgtgaaactggggagccatatcgcctctctccagaacccactcctctcgccgaacccatactggaagtagaagtgacacttagcaaaccggttccagaatctgagttttcttccagtcctctccaggctcccacccctttggcatctcacacagtggaaattcatgagcctaatggcatggtcccatctgaagatctggaaccagaggtggagtcaagcccagagcttgctcctcccccagcttgcccctccgaatcccctgtgcccattgctccaactgcccaacctgaggaactgctcaacggagccccctcgccaccagctgtggacttaagcccagtcagtgagccagaggagcaggccaaggaggtgacagcatcagtggcgccccccaccatcccctctgctactccagctacggctccttcagctacttccccagctcaggaggaggaaatggaagaagaagaagaagaggaagaaggagaagcaggagaagcaggagaagctgagagtgagaaaggaggagaggaactgctccccccagagagtacccctattccagccaacttgtctcagaatttggaggcagcagcagccactcaagtggcagtatctgtgccaaagaggagacggaaaattaaggagctaaataagaaggaggctgttggagaccttctggatgccttcaaggaggcgaacccggcagtaccagaggtggaaaatcagcctcctgcaggcagcaatccaggcccagagtctgagggcagtggtgtgcccccacgtcctgaggaagcagatgagacctgggactcaaaggaagacaaaattcacaatgctgagaacatccagcccggggaacagaagtatgaatataagtcagatcagtggaagcctctaaacctagaggagaaaaaacgttacgaccgtgagttcctgcttggttttcagttcatctttgccagtatgcagaagccagagggattgccacatatcagtgacgtggtgctggacaaggccaataaaacaccactgcggccactggatcccactagactacaaggcataaattgtggcccagacttcactccatcctttgccaaccttggccggacaacccttagcacccgtgggcccccaaggggtgggccaggtggggagctgccccgtgggccggctggcctgggaccccggcgctctcagcagggaccccgaaaagaaccacgcaagatcattgccacagtgttaatgaccgaagatataaaactgaacaaagcagagaaagcctggaaacccagcagcaagcggacggcggctgataaggatcgaggggaagaagatgctgatggcagcaaaacccaggacctattccgcagggtgcgctccatcctgaataaactgacaccccagatgttccagcagctgatgaagcaagtgacgcagctggccatcgacaccgaggaacgcctcaaaggggtcattgacctcatttttgagaaggccatttcagagcccaacttctctgtggcctatgccaacatgtgccgctgcctcatggcgctgaaagtgcccactacggaaaagccaacagtgactgtgaacttccgaaagctgttgttgaatcgatgtcagaaggagtttgagaaagacaaagatgatgatgaggtttttgagaagaagcaaaaagagatggatgaagctgctacggcagaggaacgaggacgcctgaaggaagagctggaagaggctcgggacatagcccggcggcgctctttagggaatatcaagtttattggagagttgttcaaactgaagatgttaacagaggcaataatgcatgactgtgtggtcaaactgcttaagaaccatgatgaagagtcccttgagtgcctttgtcgtctgctcaccaccattggcaaagacctggactttgaaaaagccaagccccgaatggatcagtatttcaaccagatggaaaaaatcattaaagaaaagaagacgtcatcccgcatccgctttatgctgcaggacgtgctggatctgcgagggagcaattgggtgccacgccgaggggatcagggtcccaagaccattgaccagatccataaggaggctgagatggaagaacatcgagagcacatcaaagtgcagcagctcatggccaagggcagtgacaagcgtcggggcggtcctccaggccctcccatcagccgtggacttccccttgtggatgatggtggctggaacacagttcccatcagcaaaggtagccgccccattgacacctcacgactcaccaagatcaccaagcctggctccatcgattctaacaaccagctctttgcacctggagggcgactgagctggggcaagggcagcagcggaggctcaggagccaagccctcagacgcagcatcagaagctgctcgcccagctactagtactttgaatcgcttctcagcccttcaacaagcggtacccacagaaagcacagataatagacgtgtggtgcagaggagtagcttgagccgagaacgaggcgagaaagctggagaccgaggagaccgcctagagcggagtgaacggggaggggaccgtggggaccggcttgatcgtgcgcggacacctgctaccaagcggagcttcagcaaggaagtggaggagcggagtagagaacggccctcccagcctgaggggctgcgcaaggcagctagcctcacggaggatcgggaccgtgggcgggatgccgtgaagcgagaagctgccctacccccagtgagccccctgaaggcggctctctctgaggaggagttagagaagaaatccaaggctatcattgaggaatatctccatctcaatgacatgaaagaggcagtccagtgcgtgcaggagctggcctcaccctccttgctcttcatctttgtacggcatggtgtcgagtctacgctggagcgcagtgccattgctcgtgagcatatggggcagctgctgcaccagctgctctgtgctgggcatctgtctactgctcagtactaccaagggttgtatgaaatcttggaattggctgaggacatggaaattgacatcccccacgtgtggctctacctagcggaactggtaacacccattctgcaggaaggtggggtgcccatgggggagctgttcagggagattacaaagcctctgagaccgttgggcaaagctgcttccctgttgctggagatcctgggcctcctgtgcaaaagcatgggtcctaaaaaggtggggacgctgtggcgagaagccgggcttagctggaaggaatttctacctgaaggccaggacattggtgcattcgtcgctgaaggtttggggatggagttgggttaattctagcatttgaggctggccagtcttctttcttgtctcctgttggcaaccttacctcttaactgcgggccttttccattgcagaaggtggagtataccctgggagaggagtcggaagcccctggccagagggcactcccctccgaggagctgaacaggcagctggagaagctgctgaaggagggcagcagtaaccagcgggtgttcgactggatagaggccaacctgagtgagcagcagatagtatccaacacgttagttcgagccctcatgacggctgtctgctattctgcaattatttgtaagaggaaccagggagatggaggggcaagggtgggcctgacaagacaagtgga

SEQ ID NO: 57355 - DNA, 4164 bp, Homo sapiens
ccggctgcgcctgcggagaagcggtggccgccgagcgggatctgtgcggggagccggaaatggttgtggactacgtctgtgcggctgcgtggggctcggccgcgcggactgaaggagactgaagcacttctaccctagccgggcccagcccccgagcagtgcagcctcccgagtgcagagtgcagcccctgcccgccctggcccagctgcccatgtctaccctgctggatcccaagtaatgatgatcccttcccagatctcctacccagcctcccagggggcctactacatccctggacaggggcgttccacatacgttgtcccgacacagcagtaccctgtgcagccaggagccccaggcttctatccaggtgcaagccctacagaatttgggacctacgctggcgcctactatccagcccaaggggtgcagcagtttcccactggcgtggcccccgccccagttttgatgaaccagccaccccagattgctcccaagagggagcgtaagacgatccgaattcgagatccaaaccaaggaggaaaggatatcacagaggagatcatgtctggggcccgcactgcctccacacccacccctccccagacgggaggcggtctggagcctcaagctaatggggagacgccccaggttgctgtcattgtccggccagatgaccggtcacagggagcaatcattgctgaccggccagggctgcctggcccagagcatagcccttcagaatcccagccttcgtcgccttctccgaccccatcaccatccccagtcttggaaccggggtctgagcctaatctcgcagtcctctctattcctggggacactatgacaactatacaaatgtctgtagaagaatcaacccccatctcccgtgaaactggggagccatatcgcctctctccagaacccactcctctcgccgaacccatactggaagtagaagtgacacttagcaaaccggttccagaatctgagttttcttccagtcctctccaggctcccacccctttggcatctcacacagtggaaattcatgagcctaatggcatggtcccatctgaagatctggaaccagaggtggagtcaagcccagagcttgctcctcccccagcttgcccctccgaatcccctgtgcccattgctccaactgcccaacctgaggaactgctcaacggagccccctcgccaccagctgtggacttaagcccagtcagtgagccagaggagcaggccaaggaggtgacagcatcagtggcgccccccaccatcccctctgctactccagctacggctccttcagctacttccccagctcaggaggaggaaatggaagaagaagaagaagaggaagaaggagaagcaggagaagcaggagaagctgagagtgagaaaggaggagaggaactgctccccccagagagtacccctattccagccaacttgtctcagaatttggaggcagcagcagccactcaagtggcagtatctgtgccaaagaggagacggaaaattaaggagctaaataagaaggaggctgttggagaccttctggatgccttcaaggaggcgaacccggcagtaccagaggtggaaaatcagcctcctgcaggcagcaatccaggcccagagtctgagggcagtggtgtgcccccacgtcctgaggaagcagatgagacctgggactcaaaggaagacaaaattcacaatgctgagaacatccagcccggggaacagaagtatgaatataagtcagatcagtggaagcctctaaacctagaggagaaaaaacgttacgaccgtgagttcctgcttggttttcagttcatctttgccagtatgcagaagccagagggattgccacatatcagtgacgtggtgctggacaaggccaataaaacaccactgcggccactggatcccactagactacaaggcataaattgtggcccagacttcactccatcctttgccaaccttggccggacaacccttagcacccgtgggcccccaaggggtgggccaggtggggagctgccccgtgggccggctggcctgggaccccggcgctctcagcagggaccccgaaaagaaccacgcaagatcattgccacagtgttaatgaccgaagatataaaactgaacaaagcagagaaagcctggaaacccagcagcaagcggacggcggctgataaggatcgaggggaagaagatgctgatggcagcaaaacccaggacctattccgcagggtgcgctccatcctgaataaactgacaccccagatgttccagcagctgatgaagcaagtgacgcagctggccatcgacaccgaggaacgcctcaaaggggtcattgacctcatttttgagaaggccatttcagagcccaacttctctgtggcctatgccaacatgtgccgctgcctcatggcgctgaaagtgcccactacggaaaagccaacagtgactgtgaacttccgaaagctgttgttgaatcgatgtcagaaggagtttgagaaagacaaagatgatgatgaggtttttgagaagaagcaaaaagagatggatgaagctgctacggcagaggaacgaggacgcctgaaggaagagctggaagaggctcgggacatagcccggcggcgctctttagggaatatcaagtttattggagagttgttcaaactgaagatgttaacagaggcaataatgcatgactgtgtggtcaaactgcttaagaaccatgatgaagagtcccttgagtgcctttgtcgtctgctcaccaccattggcaaagacctggactttgaaaaagccaagccccgaatggatcagtatttcaaccagatggaaaaaatcattaaagaaaagaagacgtcatcccgcatccgctttatgctgcaggacgtgctggatctgcgagggagcaattgggtgccacgccgaggggatcagggtcccaagaccattgaccagatccataaggaggctgagatggaagaacatcgagagcacatcaaagtgcagcagctcatggccaagggcagtgacaagcgtcggggcggtcctccaggccctcccatcagccgtggacttccccttgtggatgatggtggctggaacacagttcccatcagcaaaggtagccgccccattgacacctcacgactcaccaagatcaccaagcctggctccatcgattctaacaaccagctctttgcacctggagggcgactgagctggggcaagggcagcagcggaggctcaggagccaagccctcagacgcagcatcagaagctgctcgcccagctactagtactttgaatcgcttctcagcccttcaacaagcggtacccacagaaagcacagataatagacgtgtggtgcagaggagtagcttgagccgagaacgaggcgagaaagctggagaccgaggagaccgcctagagcggagtgaacggggaggggaccgtggggaccggcttgatcgtgcgcggacacctgctaccaagcggagcttcagcaaggaagtggaggagcggagtagagaacggccctcccagcctgaggggctgcgcaaggcagctagcctcacggaggatcgggaccgtgggcgggatgccgtgaagcgagaagctgccctacccccagtgagccccctgaaggcggctctctctgaggaggagttagagaagaaatccaaggctatcattgaggaatatctccatctcaatgacatgaaagaggcagtccagtgcgtgcaggagctggcctcaccctccttgctcttcatctttgtacggcatggtgtcgagtctacgctggagcgcagtgccattgctcgtgagcatatggggcagctgctgcaccagctgctctgtgctgggcatctgtctactgctcagtactaccaagggttgtatgaaatcttggaattggctgaggacatggaaattgacatcccccacgtgtggctctacctagcggaactggtaacacccattctgcaggaaggtggggtgcccatgggggagctgttcagggagattacaaagcctctgagaccgttgggcaaagctgcttccctgttgctggagatcctgggcctcctgtgcaaaagcatgggtcttgctggtggaaggtaccgact

SEQ ID NO: 57356 - DNA, 4238 bp, Homo sapiens
ccggctgcgcctgcggagaagcggtggccgccgagcgggatctgtgcggggagccggaaatggttgtggactacgtctgtgcggctgcgtggggctcggccgcgcggactgaaggagactgaagcacttctaccctagccgggcccagcccccgagcagtgcagcctcccgagtgcagagtgcagcccctgcccgccctggcccagctgcccatgtctaccctgctggatcccaagtaatgatgatcccttcccagatctcctacccagcctcccagggggcctactacatccctggacaggggcgttccacatacgttgtcccgacacagcagtaccctgtgcagccaggagccccaggcttctatccaggtgcaagccctacagaatttgggacctacgctggcgcctactatccagcccaaggggtgcagcagtttcccactggcgtggcccccgccccagttttgatgaaccagccaccccagattgctcccaagagggagcgtaagacgatccgaattcgagatccaaaccaaggaggaaaggatatcacagaggagatcatgtctggggcccgcactgcctccacacccacccctccccagacgggaggcggtctggagcctcaagctaatggggagacgccccaggttgctgtcattgtccggccagatgaccggtcacagggagcaatcattgctgaccggccagggctgcctggcccagagcatagcccttcagaatcccagccttcgtcgccttctccgaccccatcaccatccccagtcttggaaccggggtctgagcctaatctcgcagtcctctctattcctggggacactatgacaactatacaaatgtctgtagaagaatcaacccccatctcccgtgaaactggggagccatatcgcctctctccagaacccactcctctcgccgaacccatactggaagtagaagtgacacttagcaaaccggttccagaatctgagttttcttccagtcctctccaggctcccacccctttggcatctcacacagtggaaattcatgagcctaatggcatggtcccatctgaagatctggaaccagaggtggagtcaagcccagagcttgctcctcccccagcttgcccctccgaatcccctgtgcccattgctccaactgcccaacctgaggaactgctcaacggagccccctcgccaccagctgtggacttaagcccagtcagtgagccagaggagcaggccaaggaggtgacagcatcagtggcgccccccaccatcccctctgctactccagctacggctccttcagctacttccccagctcaggaggaggaaatggaagaagaagaagaagaggaagaaggagaagcaggagaagcaggagaagctgagagtgagaaaggaggagaggaactgctccccccagagagtacccctattccagccaacttgtctcagaatttggaggcagcagcagccactcaagtggcagtatctgtgccaaagaggagacggaaaattaaggagctaaataagaaggaggctgttggagaccttctggatgccttcaaggaggcgaacccggcagtaccagaggtggaaaatcagcctcctgcaggcagcaatccaggcccagagtctgagggcagtggtgtgcccccacgtcctgaggaagcagatgagacctgggactcaaaggaagacaaaattcacaatgctgagaacatccagcccggggaacagaagtatgaatataagtcagatcagtggaagcctctaaacctagaggagaaaaaacgttacgaccgtgagttcctgcttggttttcagttcatctttgccagtatgcagaagccagagggattgccacatatcagtgacgtggtgctggacaaggccaataaaacaccactgcggccactggatcccactagactacaaggcataaattgtggcccagacttcactccatcctttgccaaccttggccggacaacccttagcacccgtgggcccccaaggggtgggccaggtggggagctgccccgtgggccggctggcctgggaccccggcgctctcagcagggaccccgaaaagaaccacgcaagatcattgccacagtgttaatgaccgaagatataaaactgaacaaagcagagaaagcctggaaacccagcagcaagcggacggcggctgataaggatcgaggggaagaagatgctgatggcagcaaaacccaggacctattccgcagggtgcgctccatcctgaataaactgacaccccagatgttccagcagctgatgaagcaagtgacgcagctggccatcgacaccgaggaacgcctcaaaggggtcattgacctcatttttgagaaggccatttcagagcccaacttctctgtggcctatgccaacatgtgccgctgcctcatggcgctgaaagtgcccactacggaaaagccaacagtgactgtgaacttccgaaagctgttgttgaatcgatgtcagaaggagtttgagaaagacaaagatgatgatgaggtttttgagaagaagcaaaaagagatggatgaagctgctacggcagaggaacgaggacgcctgaaggaagagctggaagaggctcgggacatagcccggcggcgctctttagggaatatcaagtttattggagagttgttcaaactgaagatgttaacagaggcaataatgcatgactgtgtggtcaaactgcttaagaaccatgatgaagagtcccttgagtgcctttgtcgtctgctcaccaccattggcaaagacctggactttgaaaaagccaagccccgaatggatcagtatttcaaccagatggaaaaaatcattaaagaaaagaagacgtcatcccgcatccgctttatgctgcaggacgtgctggatctgcgagggagcaattgggtgccacgccgaggggatcagggtcccaagaccattgaccagatccataaggaggctgagatggaagaacatcgagagcacatcaaagtgcagcagctcatggccaagggcagtgacaagcgtcggggcggtcctccaggccctcccatcagccgtggacttccccttgtggatgatggtggctggaacacagttcccatcagcaaaggtagccgccccattgacacctcacgactcaccaagatcaccaagcctggctccatcgattctaacaaccagctctttgcacctggagggcgactgagctggggcaagggcagcagcggaggctcaggagccaagccctcagacgcagcatcagaagctgctcgcccagctactagtactttgaatcgcttctcagcccttcaacaagcggtacccacagaaagcacagataatagacgtgtggtgcagaggagtagcttgagccgagaacgaggcgagaaagctggagaccgaggagaccgcctagagcggagtgaacggggaggggaccgtggggaccggcttgatcgtgcgcggacacctgctaccaagcggagcttcagcaaggaagtggaggagcggagtagagaacggccctcccagcctgaggggctgcgcaaggcagctagcctcacggaggatcgggaccgtgggcgggatgccgtgaagcgagaagctgccctacccccagtgagccccctgaaggcggctctctctgaggaggagttagagaagaaatccaaggctatcattgaggaatatctccatctcaatgacatgaaagaggcagtccagtgcgtgcaggagctggcctcaccctccttgctcttcatctttgtacggcatggtgtcgagtctacgctggagcgcagtgccattgctcgtgagcatatggggcagctgctgcaccagctgctctgtgctgggcatctgtctactgctcagtactaccaagggttgtatgaaatcttggaattggctgaggacatggaaattgacatcccccacgtgtggctctacctagcggaactggtaacacccattctgcaggaaggtggggtgcccatgggggagctgttcagggagattacaaagcctctgagaccgttgggcaaagctgcttccctgttgctggagatcctgggcctcctgtgcaaaagcatgggtcctaaaaaggtggggacgctgtggcgagaaataacatggttgttgtccagggtgataaacaccagatgatgagtgaaggaaagatacatcgactacg

SEQ ID NO: 57357 - DNA, 1722 bp, Homo sapiens
tttatgatgcttttccttctgtgtacgtaggtcgaccttagagcgtatacacatagagaacggccctcccagcctgaggggctgcgcaaggcagctagcctcacggaggatcgggaccgtgggcgggatgccgtgaagcgagaagctgccctacccccagtgagccccctgaaggcggctctctctgaggaggagttagagaagaaatccaaggctatcattgaggaatatctccatctcaatgacatgaaagaggcagtccagtgcgtgcaggagctggcctcaccctccttgctcttcatctttgtacggcatggtgtcgagtctacgctggagcgcagtgccattgctcgtgagcatatggggcagctgctgcaccagctgctctgtgctgggcatctgtctactgctcagtactaccaagggttgtatgaaatcttggaattggctgaggacatggaaattgacatcccccacgtgtggctctacctagcggaactggtaacacccattctgcaggaaggtggggtgcccatgggggagctgttcagggagattacaaagcctctgagaccgttgggcaaagctgcttccctgttgctggagatcctgggcctcctgtgcaaaagcatgggtcctaaaaaggtggggacgctgtggcgagaagccgggcttagctggaaggaatttctacctgaaggccaggacattggtgcattcgtcgctgaacagaaggtggagtataccctgggagaggagtcggaagcccctggccagagggcactcccctccgaggagctgaacaggcagctggagaagctgctgaaggagggcagcagtaaccagcgggtgttcgactggatagaggccaacctgagtgagcagcagatagtatccaacacgttagttcgagccctcatgacggctgtctgctattctgcaattatttttgagactcccctccgagtggacgttgcagtgctgaaagcgcgagcgaagctgctgcagaaatacctgtgtgacgagcagaaggagctacaggcgctctacgccctccaggcccttgtagtgaccttagaacagcctcccaacctgctgcggatgttctttgacgcactgtatgacgaggacgtggtgaaggaggatgccttctacagttgggagagtagcaaggaccccgctgagcagcagggcaagggtgtggcccttaaatctgtcacagccttcttcaagtggctccgtgaagcagaggaggagtctgaccacaactgagggctggtggggccggggacctggagccccatggacacacagatggcccggctagccgcctggactgcaggggggcggcagcagcggcggtggcagtgggtgcctgtagtgtgatgtgtctgaactaataaagtggctgaagaggcaggatggcttggggctgcctgggcccccctccaggatgccgccaggtgtccctctcctccccctggggcacagagatatattatatataaagtcttgaaatttggtgtgtcttggggtggggaggggcaccaacgcctgcccctggggtccttttttttattttctgaaaatcactctcgggactgccgtcctcgctgctgggggcatatgccccagcccctgtaccacccctgctgttgcctgggcagggggaagggggggcacggtgcctgtaattattaaacatgaattcaattaagctca

SEQ ID NO: 57358 - DNA, 3878 bp, Homo sapiens
ccggctgcgcctgcggagaagcggtggccgccgagcgggatctgtgcggggagccggaaatggttgtggactacgtctgtgcggctgcgtggggctcggccgcgcggactgaaggagactgaagcacttctaccctagccgggcccagcccccgagcagtgcagcctcccgagtgcagagtgcagcccctgcccgccctggcccagctgcccatgtctaccctgctggatcccaagtaatgatgatcccttcccagatctcctacccagcctcccagggggcctactacatccctggacaggggcgttccacatacgttgtcccgacacagcagtaccctgtgcagccaggagccccaggcttctatccaggtgcaagccctacagaatttgggacctacgctggcgcctactatccagcccaaggggtgcagcagtttcccactggcgtggcccccgccccagttttgatgaaccagccaccccagattgctcccaagagggagcgtaagacgatccgaattcgagatccaaaccaaggaggaaaggatatcacagaggagatcatgtctggggcccgcactgcctccacacccacccctccccagacgggaggcggtctggagcctcaagctaatggggagacgccccaggttgctgtcattgtccggccagatgaccggtcacagggagcaatcattgctgaccggccagggctgcctggcccagagcatagcccttcagaatcccagccttcgtcgccttctccgaccccatcaccatccccagtcttggaaccggggtctgagcctaatctcgcagtcctctctattcctggggacactatgacaactatacaaatgtctgtagaagaatcaacccccatctcccgtgaaactggggagccatatcgcctctctccagaacccactcctctcgccgaacccatactggaagtagaagtgacacttagcaaaccggttccagaatctgagttttcttccagtcctctccaggctcccacccctttggcatctcacacagtggaaattcatgagcctaatggcatggtcccatctgaagatctggaaccagaggtggagtcaagcccagagcttgctcctcccccagcttgcccctccgaatcccctgtgcccattgctccaactgcccaacctgaggaactgctcaacggagccccctcgccaccagctgtggacttaagcccagtcagtgagccagaggagcaggccaaggaggtgacagcatcagtggcgccccccaccatcccctctgctactccagctacggctccttcagctacttccccagctcaggaggaggaaatggaagaagaagaagaagaggaagaaggagaagcaggagaagcaggagaagctgagagtgagaaaggaggagaggaactgctccccccagagagtacccctattccagccaacttgtctcagaatttggaggcagcagcagccactcaagtggcagtatctgtgccaaagaggagacggaaaattaaggagctaaataagaaggaggctgttggagaccttctggatgccttcaaggaggcgaacccggcagtaccagaggtggaaaatcagcctcctgcaggcagcaatccaggcccagagtctgagggcagtggtgtgcccccacgtcctgaggaagcagatgagacctgggactcaaaggaagacaaaattcacaatgctgagaacatccagcccggggaacagaagtatgaatataagtcagatcagtggaagcctctaaacctagaggagaaaaaacgttacgaccgtgagttcctgcttggttttcagttcatctttgccagtatgcagaagccagagggattgccacatatcagtgacgtggtgctggacaaggccaataaaacaccactgcggccactggatcccactagactacaaggcataaattgtggcccagacttcactccatcctttgccaaccttggccggacaacccttagcacccgtgggcccccaaggggtgggccaggtggggagctgccccgtgggccggctggcctgggaccccggcgctctcagcagggaccccgaaaagaaccacgcaagatcattgccacagtgttaatgaccgaagatataaaactgaacaaagcagagaaagcctggaaacccagcagcaagcggacggcggctgataaggatcgaggggaagaagatgctgatggcagcaaaacccaggacctattccgcagggtgcgctccatcctgaataaactgacaccccagatgttccagcagctgatgaagcaagtgacgcagctggccatcgacaccgaggaacgcctcaaaggggtcattgacctcatttttgagaaggccatttcagagcccaacttctctgtggcctatgccaacatgtgccgctgcctcatggcgctgaaagtgcccactacggaaaagccaacagtgactgtgaacttccgaaagctgttgttgaatcgatgtcagaaggagtttgagaaagacaaagatgatgatgaggtttttgagaagaagcaaaaagagatggatgaagctgctacggcagaggaacgaggacgcctgaaggaagagctggaagaggctcgggacatagcccggcggcgctctttagggaatatcaagtttattggagagttgttcaaactgaagatgttaacagaggcaataatgcatgactgtgtggtcaaactgcttaagaaccatgatgaagagtcccttgagtgcctttgtcgtctgctcaccaccattggcaaagacctggactttgaaaaagccaagccccgaatggatcagtatttcaaccagatggaaaaaatcattaaagaaaagaagacgtcatcccgcatccgctttatgctgcaggacgtgctggatctgcgagggagcaattgggtgccacgccgaggggatcagggtcccaagaccattgaccagatccataaggaggctgagatggaagaacatcgagagcacatcaaagtgcagcagctcatggccaagggcagtgacaagcgtcggggcggtcctccaggccctcccatcagccgtggacttccccttgtggatgatggtggctggaacacagttcccatcagcaaaggtagccgccccattgacacctcacgactcaccaagatcaccaagcctggctccatcgattctaacaaccagctctttgcacctggagggcgactgagctggggcaagggcagcagcggaggctcaggagccaagccctcagacgcagcatcagaagctgctcgcccagctactagtactttgaatcgcttctcagcccttcaacaagcggtacccacagaaagcacagataatagacgtgtggtgcagaggagtagcttgagccgagaacgaggcgagaaagctggagaccgaggagaccgcctagagcggagtgaacggggaggggaccgtggggaccggcttgatcgtgcgcggacacctgctaccaagcggagcttcagcaaggaagtggaggagcggagtagagaacggccctcccagcctgaggggctgcgcaaggcagctagcctcacggaggatcgggaccgtgggcgggatgccgtgaagcgagaagctgccctacccccagtgagccccctgaaggcggctctctctgaggaggagttagagaagaaatccaaggctatcattgaggaatatctccatctcaatgacatgaaagaggcagtccaggcgtgcaggagctggcctcaccctcctcgctcgatctggaacggatggggcgagttaagcgagacgcatgccatggcaaacatatcggggaggctgcacacggccggcg

SEQ ID NO: 57359 - DNA, 1299 bp, Homo sapiens
  misc_feature (19)..(19): n is a, c, g, or t
  misc_feature (26)..(26): n is a, c, g, or t
catacgtctaggtacgagnctgggtntgaggacatggaaattgacatcccccacgtgtggctctacctagcggaactggtaacacccattctgcaggaaggtggggtgcccatgggggagctgttcagggagattacaaagcctctgagaccgttgggcaaagctgcttccctgttgctggagatcctgggcctcctgtgcaaaagcatgggtcctaaaaaggtggggacgctgtggcgagaagccgggcttagctggaaggaatttctacctgaaggccaggacattggtgcattcgtcgctgaacagaaggtggagtataccctgggagaggagtcggaagcccctggccagagggcactcccctccgaggagctgaacaggcagctggagaagctgctgaaggagggcagcagtaaccagcgggtgttcgactggatagaggccaacctgagtgagcagcagatagtatccaacacgttagttcgagccctcatgacggctgtctgctattctgcaattatttttgagactcccctccgagtggacgttgcagtgctgaaagcgcgagcgaagctgctgcagaaatacctgtgtgacgagcagaaggagctacaggcgctctacgccctccaggcccttgtagtgaccttagaacagcctcccaacctgctgcggatgttctttgacgcactgtatgacgaggacgtggtgaaggaggatgccttctacagttgggagagtagcaaggaccccgctgagcagcagggcaagggtgtggcccttaaatctgtcacagccttcttcaagtggctccgtgaagcagaggaggagtctgaccacaactgagggctggtggggccggggacctggagccccatggacacacagatggcccggctagccgcctggactgcaggggggcggcagcagcggcggtggcagtgggtgcctgtagtgtgatgtgtctgaactaataaagtggctgaagaggcaggatggcttggggctgcctgggcccccctccaggatgccgccaggtgtccctctcctccccctggggcacagagatatattatatataaagtcttgaaatttggtgtgtcttggggtggggaggggcaccaacgcctgcccctggggtccttttttttattttctgaaaatcactctcgggactgccgtcctcgctgctgggggcatatgccccagcccctgtaccacccctgctgttgcctgggcagggggaagggggggcacggtgcctgtaattattaaacatgaattcaattaagctca

SEQ ID NO: 57360 - DNA, 3570 bp, Homo sapiens
ccggctgcgcctgcggagaagcggtggccgccgagcgggatctgtgcggggagccggaaatggttgtggactacgtctgtgcggctgcgtggggctcggccgcgcggactgaaggagactgaagcacttctaccctagccgggcccagcccccgagcagtgcagcctcccgagtgcagagtgcagcccctgcccgccctggcccagctgcccatgtctaccctgctggatcccaagtaatgatgatcccttcccagatctcctacccagcctcccagggggcctactacatccctggacaggggcgttccacatacgttgtcccgacacagcagtaccctgtgcagccaggagccccaggcttctatccaggtgcaagccctacagaatttgggacctacgctggcgcctactatccagcccaaggggtgcagcagtttcccactggcgtggcccccgccccagttttgatgaaccagccaccccagattgctcccaagagggagcgtaagacgatccgaattcgagatccaaaccaaggaggaaaggatatcacagaggagatcatgtctggggcccgcactgcctccacacccacccctccccagacgggaggcggtctggagcctcaagctaatggggagacgccccaggttgctgtcattgtccggccagatgaccggtcacagggagcaatcattgctgaccggccagggctgcctggcccagagcatagcccttcagaatcccagccttcgtcgccttctccgaccccatcaccatccccagtcttggaaccggggtctgagcctaatctcgcagtcctctctattcctggggacactatgacaactatacaaatgtctgtagaagaatcaacccccatctcccgtgaaactggggagccatatcgcctctctccagaacccactcctctcgccgaacccatactggaagtagaagtgacacttagcaaaccggttccagaatctgagttttcttccagtcctctccaggctcccacccctttggcatctcacacagtggaaattcatgagcctaatggcatggtcccatctgaagatctggaaccagaggtggagtcaagcccagagcttgctcctcccccagcttgcccctccgaatcccctgtgcccattgctccaactgcccaacctgaggaactgctcaacggagccccctcgccaccagctgtggacttaagcccagtcagtgagccagaggagcaggccaaggaggtgacagcatcagtggcgccccccaccatcccctctgctactccagctacggctccttcagctacttccccagctcaggaggaggaaatggaagaagaagaagaagaggaagaaggagaagcaggagaagcaggagaagctgagagtgagaaaggaggagaggaactgctccccccagagagtacccctattccagccaacttgtctcagaatttggaggcagcagcagccactcaagtggcagtatctgtgccaaagaggagacggaaaattaaggagctaaataagaaggaggctgttggagaccttctggatgccttcaaggaggcgaacccggcagtaccagaggtggaaaatcagcctcctgcaggcagcaatccaggcccagagtctgagggcagtggtgtgcccccacgtcctgaggaagcagatgagacctgggactcaaaggaagacaaaattcacaatgctgagaacatccagcccggggaacagaagtatgaatataagtcagatcagtggaagcctctaaacctagaggagaaaaaacgttacgaccgtgagttcctgcttggttttcagttcatctttgccagtatgcagaagccagagggattgccacatatcagtgacgtggtgctggacaaggccaataaaacaccactgcggccactggatcccactagactacaaggcataaattgtggcccagacttcactccatcctttgccaaccttggccggacaacccttagcacccgtgggcccccaaggggtgggccaggtggggagctgccccgtgggccggctggcctgggaccccggcgctctcagcagggaccccgaaaagaaccacgcaagatcattgccacagtgttaatgaccgaagatataaaactgaacaaagcagagaaagcctggaaacccagcagcaagcggacggcggctgataaggatcgaggggaagaagatgctgatggcagcaaaacccaggacctattccgcagggtgcgctccatcctgaataaactgacaccccagatgttccagcagctgatgaagcaagtgacgcagctggccatcgacaccgaggaacgcctcaaaggggtcattgacctcatttttgagaaggccatttcagagcccaacttctctgtggcctatgccaacatgtgccgctgcctcatggcgctgaaagtgcccactacggaaaagccaacagtgactgtgaacttccgaaagctgttgttgaatcgatgtcagaaggagtttgagaaagacaaagatgatgatgaggtttttgagaagaagcaaaaagagatggatgaagctgctacggcagaggaacgaggacgcctgaaggaagagctggaagaggctcgggacatagcccggcggcgctctttagggaatatcaagtttattggagagttgttcaaactgaagatgttaacagaggcaataatgcatgactgtgtggtcaaactgcttaagaaccatgatgaagagtcccttgagtgcctttgtcgtctgctcaccaccattggcaaagacctggactttgaaaaagccaagccccgaatggatcagtatttcaaccagatggaaaaaatcattaaagaaaagaagacgtcatcccgcatccgctttatgctgcaggacgtgctggatctgcgagggagcaattgggtgccacgccgaggggatcagggtcccaagaccattgaccagatccataaggaggctgagatggaagaacatcgagagcacatcaaagtgcagcagctcatggccaagggcagtgacaagcgtcggggcggtcctccaggccctcccatcagccgtggacttccccttgtggatgatggtggctggaacacagttcccatcagcaaaggtagccgccccattgacacctcacgactcaccaagatcaccaagcctggctccatcgattctaacaaccagctctttgcacctggagggcgactgagctggggcaagggcagcagcggaggctcaggagccaagccctcagacgcagcatcagaagctgctcgcccagctactagtactttgaatcgcttctcagcccttcaacaagcggtacccacagaaagcacagataatagacgtgtggtgcagaggagtagcttgagccgagaacgaggcgagaaagctggagaccgaggagaccgcctagagcggagtgaacggggaggggaccgtggggaccggcttgatcgtgcgcggacacctgctacacacgaacttcaagcaggaggaggaggattcgcctaagctcctcgaga

SEQ ID NO: 57361 - DNA, 1271 bp, Homo sapiens
tcatcgagctcggtcccactttaccagtgtggctctacctagcggaactggtaacacccattctgcaggaaggtggggtgcccatgggggagctgttcagggagattacaaagcctctgagaccgttgggcaaagctgcttccctgttgctggagatcctgggcctcctgtgcaaaagcatgggtcctaaaaaggtggggacgctgtggcgagaagccgggcttagctggaaggaatttctacctgaaggccaggacattggtgcattcgtcgctgaacagaaggtggagtataccctgggagaggagtcggaagcccctggccagagggcactcccctccgaggagctgaacaggcagctggagaagctgctgaaggagggcagcagtaaccagcgggtgttcgactggatagaggccaacctgagtgagcagcagatagtatccaacacgttagttcgagccctcatgacggctgtctgctattctgcaattatttttgagactcccctccgagtggacgttgcagtgctgaaagcgcgagcgaagctgctgcagaaatacctgtgtgacgagcagaaggagctacaggcgctctacgccctccaggcccttgtagtgaccttagaacagcctcccaacctgctgcggatgttctttgacgcactgtatgacgaggacgtggtgaaggaggatgccttctacagttgggagagtagcaaggaccccgctgagcagcagggcaagggtgtggcccttaaatctgtcacagccttcttcaagtggctccgtgaagcagaggaggagtctgaccacaactgagggctggtggggccggggacctggagccccatggacacacagatggcccggctagccgcctggactgcaggggggcggcagcagcggcggtggcagtgggtgcctgtagtgtgatgtgtctgaactaataaagtggctgaagaggcaggatggcttggggctgcctgggcccccctccaggatgccgccaggtgtccctctcctccccctggggcacagagatatattatatataaagtcttgaaatttggtgtgtcttggggtggggaggggcaccaacgcctgcccctggggtccttttttttattttctgaaaatcactctcgggactgccgtcctcgctgctgggggcatatgccccagcccctgtaccacccctgctgttgcctgggcagggggaagggggggcacggtgcctgtaattattaaacatgaattcaattaagctca

SEQ ID NO: 57362 - DNA, 1141 bp, Homo sapiens
gagctcggtacccccaggtagacctaacctgggcctcctgtgcaaaagcatgggtcctaaaaaggtggggacgctgtggcgagaagccgggcttagctggaaggaatttctacctgaaggccaggacattggtgcattcgtcgctgaacagaaggtggagtataccctgggagaggagtcggaagcccctggccagagggcactcccctccgaggagctgaacaggcagctggagaagctgctgaaggagggcagcagtaaccagcgggtgttcgactggatagaggccaacctgagtgagcagcagatagtatccaacacgttagttcgagccctcatgacggctgtctgctattctgcaattatttttgagactcccctccgagtggacgttgcagtgctgaaagcgcgagcgaagctgctgcagaaatacctgtgtgacgagcagaaggagctacaggcgctctacgccctccaggcccttgtagtgaccttagaacagcctcccaacctgctgcggatgttctttgacgcactgtatgacgaggacgtggtgaaggaggatgccttctacagttgggagagtagcaaggaccccgctgagcagcagggcaagggtgtggcccttaaatctgtcacagccttcttcaagtggctccgtgaagcagaggaggagtctgaccacaactgagggctggtggggccggggacctggagccccatggacacacagatggcccggctagccgcctggactgcaggggggcggcagcagcggcggtggcagtgggtgcctgtagtgtgatgtgtctgaactaataaagtggctgaagaggcaggatggcttggggctgcctgggcccccctccaggatgccgccaggtgtccctctcctccccctggggcacagagatatattatatataaagtcttgaaatttggtgtgtcttggggtggggaggggcaccaacgcctgcccctggggtccttttttttattttctgaaaatcactctcgggactgccgtcctcgctgctgggggcatatgccccagcccctgtaccacccctgctgttgcctgggcagggggaagggggggcacggtgcctgtaattattaaacatgaattcaattaagctca

SEQ ID NO: 57363 - DNA, 3546 bp, Homo sapiens
ccggctgcgcctgcggagaagcggtggccgccgagcgggatctgtgcggggagccggaaatggttgtggactacgtctgtgcggctgcgtggggctcggccgcgcggactgaaggagactgaagcacttctaccctagccgggcccagcccccgagcagtgcagcctcccgagtgcagagtgcagcccctgcccgccctggcccagctgcccatgtctaccctgctggatcccaagtaatgatgatcccttcccagatctcctacccagcctcccagggggcctactacatccctggacaggggcgttccacatacgttgtcccgacacagcagtaccctgtgcagccaggagccccaggcttctatccaggtgcaagccctacagaatttgggacctacgctggcgcctactatccagcccaaggggtgcagcagtttcccactggcgtggcccccgccccagttttgatgaaccagccaccccagattgctcccaagagggagcgtaagacgatccgaattcgagatccaaaccaaggaggaaaggatatcacagaggagatcatgtctggggcccgcactgcctccacacccacccctccccagacgggaggcggtctggagcctcaagctaatggggagacgccccaggttgctgtcattgtccggccagatgaccggtcacagggagcaatcattgctgaccggccagggctgcctggcccagagcatagcccttcagaatcccagccttcgtcgccttctccgaccccatcaccatccccagtcttggaaccggggtctgagcctaatctcgcagtcctctctattcctggggacactatgacaactatacaaatgtctgtagaagaatcaacccccatctcccgtgaaactggggagccatatcgcctctctccagaacccactcctctcgccgaacccatactggaagtagaagtgacacttagcaaaccggttccagaatctgagttttcttccagtcctctccaggctcccacccctttggcatctcacacagtggaaattcatgagcctaatggcatggtcccatctgaagatctggaaccagaggtggagtcaagcccagagcttgctcctcccccagcttgcccctccgaatcccctgtgcccattgctccaactgcccaacctgaggaactgctcaacggagccccctcgccaccagctgtggacttaagcccagtcagtgagccagaggagcaggccaaggaggtgacagcatcagtggcgccccccaccatcccctctgctactccagctacggctccttcagctacttccccagctcaggaggaggaaatggaagaagaagaagaagaggaagaaggagaagcaggagaagcaggagaagctgagagtgagaaaggaggagaggaactgctccccccagagagtacccctattccagccaacttgtctcagaatttggaggcagcagcagccactcaagtggcagtatctgtgccaaagaggagacggaaaattaaggagctaaataagaaggaggctgttggagaccttctggatgccttcaaggaggcgaacccggcagtaccagaggtggaaaatcagcctcctgcaggcagcaatccaggcccagagtctgagggcagtggtgtgcccccacgtcctgaggaagcagatgagacctgggactcaaaggaagacaaaattcacaatgctgagaacatccagcccggggaacagaagtatgaatataagtcagatcagtggaagcctctaaacctagaggagaaaaaacgttacgaccgtgagttcctgcttggttttcagttcatctttgccagtatgcagaagccagagggattgccacatatcagtgacgtggtgctggacaaggccaataaaacaccactgcggccactggatcccactagactacaaggcataaattgtggcccagacttcactccatcctttgccaaccttggccggacaacccttagcacccgtgggcccccaaggggtgggccaggtggggagctgccccgtgggccggctggcctgggaccccggcgctctcagcagggaccccgaaaagaaccacgcaagatcattgccacagtgttaatgaccgaagatataaaactgaacaaagcagagaaagcctggaaacccagcagcaagcggacggcggctgataaggatcgaggggaagaagatgctgatggcagcaaaacccaggacctattccgcagggtgcgctccatcctgaataaactgacaccccagatgttccagcagctgatgaagcaagtgacgcagctggccatcgacaccgaggaacgcctcaaaggggtcattgacctcatttttgagaaggccatttcagagcccaacttctctgtggcctatgccaacatgtgccgctgcctcatggcgctgaaagtgcccactacggaaaagccaacagtgactgtgaacttccgaaagctgttgttgaatcgatgtcagaaggagtttgagaaagacaaagatgatgatgaggtttttgagaagaagcaaaaagagatggatgaagctgctacggcagaggaacgaggacgcctgaaggaagagctggaagaggctcgggacatagcccggcggcgctctttagggaatatcaagtttattggagagttgttcaaactgaagatgttaacagaggcaataatgcatgactgtgtggtcaaactgcttaagaaccatgatgaagagtcccttgagtgcctttgtcgtctgctcaccaccattggcaaagacctggactttgaaaaagccaagccccgaatggatcagtatttcaaccagatggaaaaaatcattaaagaaaagaagacgtcatcccgcatccgctttatgctgcaggacgtgctggatctgcgagggagcaattgggtgccacgccgaggggatcagggtcccaagaccattgaccagatccataaggaggctgagatggaagaacatcgagagcacatcaaagtgcagcagctcatggccaagggcagtgacaagcgtcggggcggtcctccaggccctcccatcagccgtggacttccccttgtggatgatggtggctggaacacagttcccatcagcaaaggtagccgccccattgacacctcacgactcaccaagatcaccaaggtaggggtgtgtgtgggagtgggtgattcagctcaggtttagatcttagtcccttcacttttctaaagttgagaaggtgacagctgaatgtttcctcttagactaactggttggattgctggagacaggactgccagctgtagagggagggtggtactcccattagtctggaccagtgtttggcaaacacacacacacacacacacacacacacacgtgccagatccagcccattcatacatcccaggacccagtagtggtttttacattttaaagttgcgaaaaatcaaaaagtgaatggtaatttatgctgtggaaattaaataaaatgtaaatgtcagtgtcca

SEQ ID NO: 57364 - DNA, 834 bp, Homo sapiens
cccgcgagaattcctgctgctcccgcgagaattcctgctgctcccgcgagaattcctgctgccccgcgagaattcctgctgctattcctgctgcaccccgcgagattcctgctgctgcagaaatacctgtgtgacgagcagaaggagctacaggcgctctacgccctccaggcccttgtagtgaccttagaacagcctcccaacctgctgcggatgttctttgacgcactgtatgacgaggacgtggtgaaggaggatgccttctacagttgggagagtagcaaggaccccgctgagcagcagggcaagggtgtggcccttaaatctgtcacagccttcttcaagtggctccgtgaagcagaggaggagtctgaccacaactgagggctggtggggccggggacctggagccccatggacacacagatggcccggctagccgcctggactgcaggggggcggcagcagcggcggtggcagtgggtgcctgtagtgtgatgtgtctgaactaataaagtggctgaagaggcaggatggcttggggctgcctgggcccccctccaggatgccgccaggtgtccctctcctccccctggggcacagagatatattatatataaagtcttgaaatttggtgtgtcttggggtggggaggggcaccaacgcctgcccctggggtccttttttttattttctgaaaatcactctcgggactgccgtcctcgctgctgggggcatatgccccagcccctgtaccacccctgctgttgcctgggcagggggaagggggggcacggtgcctgtaattattaaacatgaattcaattaagctca

SEQ ID NO: 57365 - DNA, 2983 bp, Homo sapiens
  misc_feature (2944)..(2944): n is a, c, g, or t
ccggctgcgcctgcggagaagcggtggccgccgagcgggatctgtgcggggagccggaaatggttgtggactacgtctgtgcggctgcgtggggctcggccgcgcggactgaaggagactgaagcacttctaccctagccgggcccagcccccgagcagtgcagcctcccgagtgcagagtgcagcccctgcccgccctggcccagctgcccatgtctaccctgctggatcccaagtaatgatgatcccttcccagatctcctacccagcctcccagggggcctactacatccctggacaggggcgttccacatacgttgtcccgacacagcagtaccctgtgcagccaggagccccaggcttctatccaggtgcaagccctacagaatttgggacctacgctggcgcctactatccagcccaaggggtgcagcagtttcccactggcgtggcccccgccccagttttgatgaaccagccaccccagattgctcccaagagggagcgtaagacgatccgaattcgagatccaaaccaaggaggaaaggatatcacagaggagatcatgtctggggcccgcactgcctccacacccacccctccccagacgggaggcggtctggagcctcaagctaatggggagacgccccaggttgctgtcattgtccggccagatgaccggtcacagggagcaatcattgctgaccggccagggctgcctggcccagagcatagcccttcagaatcccagccttcgtcgccttctccgaccccatcaccatccccagtcttggaaccggggtctgagcctaatctcgcagtcctctctattcctggggacactatgacaactatacaaatgtctgtagaagaatcaacccccatctcccgtgaaactggggagccatatcgcctctctccagaacccactcctctcgccgaacccatactggaagtagaagtgacacttagcaaaccggttccagaatctgagttttcttccagtcctctccaggctcccacccctttggcatctcacacagtggaaattcatgagcctaatggcatggtcccatctgaagatctggaaccagaggtggagtcaagcccagagcttgctcctcccccagcttgcccctccgaatcccctgtgcccattgctccaactgcccaacctgaggaactgctcaacggagccccctcgccaccagctgtggacttaagcccagtcagtgagccagaggagcaggccaaggaggtgacagcatcagtggcgccccccaccatcccctctgctactccagctacggctccttcagctacttccccagctcaggaggaggaaatggaagaagaagaagaagaggaagaaggagaagcaggagaagcaggagaagctgagagtgagaaaggaggagaggaactgctccccccagagagtacccctattccagccaacttgtctcagaatttggaggcagcagcagccactcaagtggcagtatctgtgccaaagaggagacggaaaattaaggagctaaataagaaggaggctgttggagaccttctggatgccttcaaggaggcgaacccggcagtaccagaggtggaaaatcagcctcctgcaggcagcaatccaggcccagagtctgagggcagtggtgtgcccccacgtcctgaggaagcagatgagacctgggactcaaaggaagacaaaattcacaatgctgagaacatccagcccggggaacagaagtatgaatataagtcagatcagtggaagcctctaaacctagaggagaaaaaacgttacgaccgtgagttcctgcttggttttcagttcatctttgccagtatgcagaagccagagggattgccacatatcagtgacgtggtgctggacaaggccaataaaacaccactgcggccactggatcccactagactacaaggcataaattgtggcccagacttcactccatcctttgccaaccttggccggacaacccttagcacccgtgggcccccaaggggtgggccaggtggggagctgccccgtgggccggctggcctgggaccccggcgctctcagcagggaccccgaaaagaaccacgcaagatcattgccacagtgttaatgaccgaagatataaaactgaacaaagcagagaaagcctggaaacccagcagcaagcggacggcggctgataaggatcgaggggaagaagatgctgatggcagcaaaacccaggacctattccgcagggtgcgctccatcctgaataaactgacaccccagatgttccagcagctgatgaagcaagtgacgcagctggccatcgacaccgaggaacgcctcaaaggggtcattgacctcatttttgagaaggccatttcagagcccaacttctctgtggcctatgccaacatgtgccgctgcctcatggcgctgaaagtgcccactacggaaaagccaacagtgactgtgaacttccgaaagctgttgttgaatcgatgtcagaaggagtttgagaaagacaaagatgatgatgaggtttttgagaagaagcaaaaagagatggatgaagctgctacggcagaggaacgaggacgcctgaaggaagagctggaagaggctcgggacatagcccggcggcgctctttagggaatatcaagtttattggagagttgttcaaactgaagatgttaacagaggcaataatgcatgactgtgtggtcaaactgcttaagaaccatgatgaagagtcccttgagtgcctttgtcgtctgctcaccaccattggcaaagacctggactttgaaaaagccaagccccgaatggatcagtatttcaaccagatggaaaaaatcattaaagaaaagaagacgtcatcccgcatccgctttatgctgcaggacgtgctggatctgcgagggagcaantgggtgccacgccgaggggccccatcctcagggagccgg

SEQ ID NO: 57366 - DNA, 822 bp, Homo sapiens
gtgggcactggggtcggttgtgtttcaggggttataggacacgttgcttgggaaggctacccagcagctaggggttgaggagaaagagggcccgaacaggtgatgcttgagttgagtcctgaaggaacaagacacgaggaagtttccggcaaaggatatagcatccacaaaagtgtcaaggccagagaagacctgctgcggatgttctttgacgcactgtatgacgaggacgtggtgaaggaggatgccttctacagttgggagagtagcaaggaccccgctgagcagcagggcaagggtgtggcccttaaatctgtcacagccttcttcaagtggctccgtgaagcagaggaggagtctgaccacaactgagggctggtggggccggggacctggagccccatggacacacagatggcccggctagccgcctggactgcaggggggcggcagcagcggcggtggcagtgggtgcctgtagtgtgatgtgtctgaactaataaagtggctgaagaggcaggatggcttggggctgcctgggcccccctccaggatgccgccaggtgtccctctcctccccctggggcacagagatatattatatataaagtcttgaaatttggtgtgtcttggggtggggaggggcaccaacgcctgcccctggggtccttttttttattttctgaaaatcactctcgggactgccgtcctcgctgctgggggcatatgccccagcccctgtaccacccctgctgttgcctgggcagggggaagggggggcacggtgcctgtaattattaaacatgaattcaattaagctca

SEQ ID NO: 57367 - DNA, 627 bp, Homo sapiens
cttagcaggatgcttagaggcacaaggaggcagaggcacaagtaggaggatgccttctacagttgggagagtagcaaggaccccgctgagcagcagggcaagggtgtggcccttaaatctgtcacagccttcttcaagtggctccgtgaagcagaggaggagtctgaccacaactgagggctggtggggccggggacctggagccccatggacacacagatggcccggctagccgcctggactgcaggggggcggcagcagcggcggtggcagtgggtgcctgtagtgtgatgtgtctgaactaataaagtggctgaagaggcaggatggcttggggctgcctgggcccccctccaggatgccgccaggtgtccctctcctccccctggggcacagagatatattatatataaagtcttgaaatttggtgtgtcttggggtggggaggggcaccaacgcctgcccctggggtccttttttttattttctgaaaatcactctcgggactgccgtcctcgctgctgggggcatatgccccagcccctgtaccacccctgctgttgcctgggcagggggaagggggggcacggtgcctgtaattattaaacatgaattcaattaagctca

SEQ ID NO: 57368 - DNA, 2741 bp, Homo sapiens
cctgtgtgcccctgggccaggcccgaacccggtgtccccgggtggggggtggggacgccacggccgaagcagctagctccgttcgtgatccgggagcctggtgccagcgagacctggaatttccggtctggttggtctggggccccgcggagccaggttgataccctcacctcccaaccccaggccctcggatgcccagaacctgtaggccgcaccgtggacttgttcttaatcgaggggcacttctaccctagccgggcccagcccccgagcagtgcagcctcccgagtgcagagtgcagcccctgcccgccctggcccagctgcccatgtctaccctgctggatcccaagtaatgatgatcccttcccagatctcctacccagcctcccagggggcctactacatccctggacaggggcgttccacatacgttgtcccgacacagcagtaccctgtgcagccaggagccccaggcttctatccaggtgcaagccctacagaatttgggacctacgctggcgcctactatccagcccaaggggtgcagcagtttcccactggcgtggcccccgccccagttttgatgaaccagccaccccagattgctcccaagagggagcgtaagacgatccgaattcgagatccaaaccaaggaggaaaggatatcacagaggagatcatgtctggggcccgcactgcctccacacccacccctccccagacgggaggcggtctggagcctcaagctaatggggagacgccccaggttgctgtcattgtccggccagatgaccggtcacagggagcaatcattgctgaccggccagggctgcctggcccagagcatagcccttcagaatcccagccttcgtcgccttctccgaccccatcaccatccccagtcttggaaccggggtctgagcctaatctcgcagtcctctctattcctggggacactatgacaactatacaaatgtctgtagaagaatcaacccccatctcccgtgaaactggggagccatatcgcctctctccagaacccactcctctcgccgaacccatactggaagtagaagtgacacttagcaaaccggttccagaatctgagttttcttccagtcctctccaggctcccacccctttggcatctcacacagtggaaattcatgagcctaatggcatggtcccatctgaagatctggaaccagaggtggagtcaagcccagagcttgctcctcccccagcttgcccctccgaatcccctgtgcccattgctccaactgcccaacctgaggaactgctcaacggagccccctcgccaccagctgtggacttaagcccagtcagtgagccagaggagcaggccaaggaggtgacagcatcagtggcgccccccaccatcccctctgctactccagctacggctccttcagctacttccccagctcaggaggaggaaatggaagaagaagaagaagaggaagaaggagaagcaggagaagcaggagaagctgagagtgagaaaggaggagaggaactgctccccccagagagtacccctattccagccaacttgtctcagaatttggaggcagcagcagccactcaagtggcagtatctgtgccaaagaggagacggaaaattaaggagctaaataagaaggaggctgttggagaccttctggatgccttcaaggaggcgaacccggcagtaccagaggtggaaaatcagcctcctgcaggcagcaatccaggcccagagtctgagggcagtggtgtgcccccacgtcctgaggaagcagatgagacctgggactcaaaggaagacaaaattcacaatgctgagaacatccagcccggggaacagaagtatgaatataagtcagatcagtggaagcctctaaacctagaggagaaaaaacgttacgaccgtgagttcctgcttggttttcagttcatctttgccagtatgcagaagccagagggattgccacatatcagtgacgtggtgctggacaaggccaataaaacaccactgcggccactggatcccactagactacaaggcataaattgtggcccagacttcactccatcctttgccaaccttggccggacaacccttagcacccgtgggcccccaaggggtgggccaggtggggagctgccccgtgggccggctggcctgggaccccggcgctctcagcagggaccccgaaaagaaccacgcaagatcattgccacagtgttaatgaccgaagatataaaactgaacaaagcagagaaagcctggaaacccagcagcaagcggacggcggctgataaggatcgaggggaagaagatgctgatggcagcaaaacccaggacctattccgcagggtgcgctccatcctgaataaactgacaccccagatgttccagcagctgatgaagcaagtgacgcagctggccatcgacaccgaggaacgcctcaaaggggtcattgacctcatttttgagaaggccatttcagagcccaacttctctgtggcctatgccaacatgtgccgctgcctcatggcgctgaaagtgcccactacggaaaagccaacagtgactgtgaacttccgaaagctgttgttgaatcgatgtcagaaggagtttgagaaagacaaagatgatgatgaggtttttgagaagaagcaaaaagagatggatgaagctgctacggcagagagaaaacccactatcgattccac

SEQ ID NO: 57369 - DNA, 2717 bp, Homo sapiens
cctgtgtgcccctgggccaggcccgaacccggtgtccccgggtggggggtggggacgccacggccgaagcagctagctccgttcgtgatccgggagcctggtgccagcgagacctggaatttccggtctggttggtctggggccccgcggagccaggttgataccctcacctcccaaccccaggccctcggatgcccagaacctgtaggccgcaccgtggacttgttcttaatcgaggggcacttctaccctagccgggcccagcccccgagcagtgcagcctcccgagtgcagagtgcagcccctgcccgccctggcccagctgcccatgtctaccctgctggatcccaagtaatgatgatcccttcccagatctcctacccagcctcccagggggcctactacatccctggacaggggcgttccacatacgttgtcccgacacagcagtaccctgtgcagccaggagccccaggcttctatccaggtgcaagccctacagaatttgggacctacgctggcgcctactatccagcccaaggggtgcagcagtttcccactggcgtggcccccgccccagttttgatgaaccagccaccccagattgctcccaagagggagcgtaagacgatccgaattcgagatccaaaccaaggaggaaaggatatcacagaggagatcatgtctggggcccgcactgcctccacacccacccctccccagacgggaggcggtctggagcctcaagctaatggggagacgccccaggttgctgtcattgtccggccagatgaccggtcacagggagcaatcattgctgaccggccagggctgcctggcccagagcatagcccttcagaatcccagccttcgtcgccttctccgaccccatcaccatccccagtcttggaaccggggtctgagcctaatctcgcagtcctctctattcctggggacactatgacaactatacaaatgtctgtagaagaatcaacccccatctcccgtgaaactggggagccatatcgcctctctccagaacccactcctctcgccgaacccatactggaagtagaagtgacacttagcaaaccggttccagaatctgagttttcttccagtcctctccaggctcccacccctttggcatctcacacagtggaaattcatgagcctaatggcatggtcccatctgaagatctggaaccagaggtggagtcaagcccagagcttgctcctcccccagcttgcccctccgaatcccctgtgcccattgctccaactgcccaacctgaggaactgctcaacggagccccctcgccaccagctgtggacttaagcccagtcagtgagccagaggagcaggccaaggaggtgacagcatcagtggcgccccccaccatcccctctgctactccagctacggctccttcagctacttccccagctcaggaggaggaaatggaagaagaagaagaagaggaagaaggagaagcaggagaagcaggagaagctgagagtgagaaaggaggagaggaactgctccccccagagagtacccctattccagccaacttgtctcagaatttggaggcagcagcagccactcaagtggcagtatctgtgccaaagaggagacggaaaattaaggagctaaataagaaggaggctgttggagaccttctggatgccttcaaggaggcgaacccggcagtaccagaggtggaaaatcagcctcctgcaggcagcaatccaggcccagagtctgagggcagtggtgtgcccccacgtcctgaggaagcagatgagacctgggactcaaaggaagacaaaattcacaatgctgagaacatccagcccggggaacagaagtatgaatataagtcagatcagtggaagcctctaaacctagaggagaaaaaacgttacgaccgtgagttcctgcttggttttcagttcatctttgccagtatgcagaagccagagggattgccacatatcagtgacgtggtgctggacaaggccaataaaacaccactgcggccactggatcccactagactacaaggcataaattgtggcccagacttcactccatcctttgccaaccttggccggacaacccttagcacccgtgggcccccaaggggtgggccaggtggggagctgccccgtgggccggctggcctgggaccccggcgctctcagcagggaccccgaaaagaaccacgcaagatcattgccacagtgttaatgaccgaagatataaaactgaacaaagcagagaaagcctggaaacccagcagcaagcggacggcggctgataaggatcgaggggaagaagatgctgatggcagcaaaacccaggacctattccgcagggtgcgctccatcctgaataaactgacaccccagatgttccagcagctgatgaagcaagtgacgcagctggccatcgacaccgaggaacgcctcaaaggggtcattgacctcatttttgagaaggccatttcagagcccaacttctctgtggcctatgccaacatgtgccgctgcctcatggcgctgaaagtgcccactacggaaaagccaacagtgactgtgaacttccgaaagctgttgttgaatcgatgtcagaaggagtttgagaaagacaaagatgatgatgaggtttttgagaagaagcaaaacctcatcattcatctttgtctttctca

SEQ ID NO: 57370 - DNA, 2314 bp, Homo sapiens
cctgtgtgcccctgggccaggcccgaacccggtgtccccgggtggggggtggggacgccacggccgaagcagctagctccgttcgtgatccgggagcctggtgccagcgagacctggaatttccggtctggttggtctggggccccgcggagccaggttgataccctcacctcccaaccccaggccctcggatgcccagaacctgtaggccgcaccgtggacttgttcttaatcgaggggcacttctaccctagccgggcccagcccccgagcagtgcagcctcccgagtgcagagtgcagcccctgcccgccctggcccagctgcccatgtctaccctgctggatcccaagtaatgatgatcccttcccagatctcctacccagcctcccagggggcctactacatccctggacaggggcgttccacatacgttgtcccgacacagcagtaccctgtgcagccaggagccccaggcttctatccaggtgcaagccctacagaatttgggacctacgctggcgcctactatccagcccaaggggtgcagcagtttcccactggcgtggcccccgccccagttttgatgaaccagccaccccagattgctcccaagagggagcgtaagacgatccgaattcgagatccaaaccaaggaggaaaggatatcacagaggagatcatgtctggggcccgcactgcctccacacccacccctccccagacgggaggcggtctggagcctcaagctaatggggagacgccccaggttgctgtcattgtccggccagatgaccggtcacagggagcaatcattgctgaccggccagggctgcctggcccagagcatagcccttcagaatcccagccttcgtcgccttctccgaccccatcaccatccccagtcttggaaccggggtctgagcctaatctcgcagtcctctctattcctggggacactatgacaactatacaaatgtctgtagaagaatcaacccccatctcccgtgaaactggggagccatatcgcctctctccagaacccactcctctcgccgaacccatactggaagtagaagtgacacttagcaaaccggttccagaatctgagttttcttccagtcctctccaggctcccacccctttggcatctcacacagtggaaattcatgagcctaatggcatggtcccatctgaagatctggaaccagaggtggagtcaagcccagagcttgctcctcccccagcttgcccctccgaatcccctgtgcccattgctccaactgcccaacctgaggaactgctcaacggagccccctcgccaccagctgtggacttaagcccagtcagtgagccagaggagcaggccaaggaggtgacagcatcagtggcgccccccaccatcccctctgctactccagctacggctccttcagctacttccccagctcaggaggaggaaatggaagaagaagaagaagaggaagaaggagaagcaggagaagcaggagaagctgagagtgagaaaggaggagaggaactgctccccccagagagtacccctattccagccaacttgtctcagaatttggaggcagcagcagccactcaagtggcagtatctgtgccaaagaggagacggaaaattaaggagctaaataagaaggaggctgttggagaccttctggatgccttcaaggaggcgaacccggcagtaccagaggtggaaaatcagcctcctgcaggcagcaatccaggcccagagtctgagggcagtggtgtgcccccacgtcctgaggaagcagatgagacctgggactcaaaggaagacaaaattcacaatgctgagaacatccagcccggggaacagaagtatgaatataagtcagatcagtggaagcctctaaacctagaggagaaaaaacgttacgaccgtgagttcctgcttggttttcagttcatctttgccagtatgcagaagccagagggattgccacatatcagtgacgtggtgctggacaaggccaataaaacaccactgcggccactggatcccactagactacaaggcataaattgtggcccagacttcactccatcctttgccaaccttggccggacaacccttagcacccgtgggcccccaaggggtgggccaggtggggagctgccccgtgggccggctggcctgggaccccggcgctctcagcagggaccccgaaaagaaccacgcaagatcattgccacagtgttaatgaccgaagatataaaactgaccaggtagagagcctgcaggggatcttagatgacaggca

SEQ ID NO: 57371 - DNA, 2480 bp, Homo sapiens
  misc_feature (2466)..(2466): n is a, c, g, or t
cctgtgtgcccctgggccaggcccgaacccggtgtccccgggtggggggtggggacgccacggccgaagcagctagctccgttcgtgatccgggagcctggtgccagcgagacctggaatttccggtctggttggtctggggccccgcggagccaggttgataccctcacctcccaaccccaggccctcggatgcccagaacctgtaggccgcaccgtggacttgttcttaatcgaggggcacttctaccctagccgggcccagcccccgagcagtgcagcctcccgagtgcagagtgcagcccctgcccgccctggcccagctgcccatgtctaccctgctggatcccaagtaatgatgatcccttcccagatctcctacccagcctcccagggggcctactacatccctggacaggggcgttccacatacgttgtcccgacacagcagtaccctgtgcagccaggagccccaggcttctatccaggtgcaagccctacagaatttgggacctacgctggcgcctactatccagcccaaggggtgcagcagtttcccactggcgtggcccccgccccagttttgatgaaccagccaccccagattgctcccaagagggagcgtaagacgatccgaattcgagatccaaaccaaggaggaaaggatatcacagaggagatcatgtctggggcccgcactgcctccacacccacccctccccagacgggaggcggtctggagcctcaagctaatggggagacgccccaggttgctgtcattgtccggccagatgaccggtcacagggagcaatcattgctgaccggccagggctgcctggcccagagcatagcccttcagaatcccagccttcgtcgccttctccgaccccatcaccatccccagtcttggaaccggggtctgagcctaatctcgcagtcctctctattcctggggacactatgacaactatacaaatgtctgtagaagaatcaacccccatctcccgtgaaactggggagccatatcgcctctctccagaacccactcctctcgccgaacccatactggaagtagaagtgacacttagcaaaccggttccagaatctgagttttcttccagtcctctccaggctcccacccctttggcatctcacacagtggaaattcatgagcctaatggcatggtcccatctgaagatctggaaccagaggtggagtcaagcccagagcttgctcctcccccagcttgcccctccgaatcccctgtgcccattgctccaactgcccaacctgaggaactgctcaacggagccccctcgccaccagctgtggacttaagcccagtcagtgagccagaggagcaggccaaggaggtgacagcatcagtggcgccccccaccatcccctctgctactccagctacggctccttcagctacttccccagctcaggaggaggaaatggaagaagaagaagaagaggaagaaggagaagcaggagaagcaggagaagctgagagtgagaaaggaggagaggaactgctccccccagagagtacccctattccagccaacttgtctcagaatttggaggcagcagcagccactcaagtggcagtatctgtgccaaagaggagacggaaaattaaggagctaaataagaaggaggctgttggagaccttctggatgccttcaaggaggcgaacccggcagtaccagaggtggaaaatcagcctcctgcaggcagcaatccaggcccagagtctgagggcagtggtgtgcccccacgtcctgaggaagcagatgagacctgggactcaaaggaagacaaaattcacaatgctgagaacatccagcccggggaacagaagtatgaatataagtcagatcagtggaagcctctaaacctagaggagaaaaaacgttacgaccgtgagttcctgcttggttttcagttcatctttgccagtatgcagaagccagagggattgccacatatcagtgacgtggtgctggacaaggccaataaaacaccactgcggccactggatcccactagactacaaggcataaattgtggcccagacttcactccatcctttgccaaccttggccgcactgcctccacacccacccctccccagacgggaggcggtctggagcctcaagctaatggggagacgccccaggttgctgtcattgtccggccagatgaccggtcacagggagcaatcattgctgaccggccagggctgcctggcccagagcatagcccttcagaatcccagccttcgtcgccttctccgaccccatcaccatccccagtcttggaaccggggtctgagcctaatctcgcagtcctctctattcctggggacactatgacaactatacaaatgtctgtagaagaatcaacccccatctcccgtgaaactggggagccatatcgcctctctccagaaccnatcagcctctgggt

SEQ ID NO: 57372 - DNA, 396 bp, Homo sapiens
gccgacgcctactactactaccaaattcgcggccggtcgacgtgggtgcctgtagtgtgatgtgtctgaactaataaagtggctgaagaggcaggatggcttggggctgcctgggcccccctccaggatgccgccaggtgtccctctcctccccctggggcacagagatatattatatataaagtcttgaaatttggtgtgtcttggggtggggaggggcaccaacgcctgcccctggggtccttttttttattttctgaaaatcactctcgggactgccgtcctcgctgctgggggcatatgccccagcccctgtaccacccctgctgttgcctgggcagggggaagggggggcacggtgcctgtaattattaaacatgaattcaattaagctca

SEQ ID NO: 57373 - DNA, 1935 bp, Homo sapiens
cctgtgtgcccctgggccaggcccgaacccggtgtccccgggtggggggtggggacgccacggccgaagcagctagctccgttcgtgatccgggagcctggtgccagcgagacctggaatttccggtctggttggtctggggccccgcggagccaggttgataccctcacctcccaaccccaggccctcggatgcccagaacctgtaggccgcaccgtggacttgttcttaatcgaggggcacttctaccctagccgggcccagcccccgagcagtgcagcctcccgagtgcagagtgcagcccctgcccgccctggcccagctgcccatgtctaccctgctggatcccaagtaatgatgatcccttcccagatctcctacccagcctcccagggggcctactacatccctggacaggggcgttccacatacgttgtcccgacacagcagtaccctgtgcagccaggagccccaggcttctatccaggtgcaagccctacagaatttgggacctacgctggcgcctactatccagcccaaggggtgcagcagtttcccactggcgtggcccccgccccagttttgatgaaccagccaccccagattgctcccaagagggagcgtaagacgatccgaattcgagatccaaaccaaggaggaaaggatatcacagaggagatcatgtctggggcccgcactgcctccacacccacccctccccagacgggaggcggtctggagcctcaagctaatggggagacgccccaggttgctgtcattgtccggccagatgaccggtcacagggagcaatcattgctgaccggccagggctgcctggcccagagcatagcccttcagaatcccagccttcgtcgccttctccgaccccatcaccatccccagtcttggaaccggggtctgagcctaatctcgcagtcctctctattcctggggacactatgacaactatacaaatgtctgtagaagaatcaacccccatctcccgtgaaactggggagccatatcgcctctctccagaacccactcctctcgccgaacccatactggaagtagaagtgacacttagcaaaccggttccagaatctgagttttcttccagtcctctccaggctcccacccctttggcatctcacacagtggaaattcatgagcctaatggcatggtcccatctgaagatctggaaccagaggtggagtcaagcccagagcttgctcctcccccagcttgcccctccgaatcccctgtgcccattgctccaactgcccaacctgaggaactgctcaacggagccccctcgccaccagctgtggacttaagcccagtcagtgagccagaggagcaggccaaggaggtgacagcatcagtggcgccccccaccatcccctctgctactccagctacggctccttcagctacttccccagctcaggaggaggaaatggaagaagaagaagaagaggaagaaggagaagcaggagaagcaggagaagctgagagtgagaaaggaggagaggaactgctccccccagagagtacccctattccagccaacttgtctcagaatttggaggcagcagcagccactcaagtggcagtatctgtgccaaagaggagacggaaaattaaggagctaaataagaaggaggctgttggagaccttctggatgccttcaaggaggcgaacccggcagtaccagaggtggaaaatcagcctcctgcaggcagcaatccaggcccagagtctgaggcagatgtggcctccctgaaccgccgcattcagctggttgaggaggagctggaccgggcccaggagcgcctggctacagccctgcagaagctggaggaggccgagaaggcggctgatgagagcgagagaggaatgaaggcatcgaaaaccgggcatgaaggatga

SEQ ID NO: 57374 - DNA, 915 bp, Homo sapiens
cctgtgtgcccctgggccaggcccgaacccggtgtccccgggtggggggtggggacgccacggccgaagcagctagctccgttcgtgatccgggagcctggtgccagcgagacctggaatttccggtctggttggtctggggccccgcggagccaggttgataccctcacctcccaaccccaggccctcggatgcccagaacctgtaggccgcaccgtggacttgttcttaatcgagggggtgctggggggaccctgatgtggcaccaaatgaaatgaacaaagctccacagtccacaggccccccacccgccccatcccccggactcccacagccagcgtttcccccggggcagacagcgccggtggtgttcagtacgccacaagcgacacaaatgaacacgccttctcagccccgccagcacttctaccctagccgggcccagcccccgagcagtgcagcctcccgagtgcagagtgcagcccctgcccgccctggcccagctgcccatgtctaccctgctggatcccaagtaatgatgatcccttcccagatctcctacccagcctcccagggggcctactacatccctggacaggggcgttccacatacgttgtcccgacacagcagtaccctgtgcagccaggagccccaggcttctatccaggtgcaagccctacagaatttgggacctacgctggcgcctactatccagcccaaggggtgcagcagtttcccactggcgtggcccccgccccagttttgatgaaccagccaccccagattgctcccaagagggagcgtaagacgatccgaattcgagatccagactgaggaagacccggaaacttaggggccacgtgagccacggccacggccgcataggcaagcaccggaagcaccccggcggccgc

SEQ ID NO: 57375 - DNA, 546 bp, Homo sapiens
ctcagagacccactttattcagttctgtacatatggggacatcggtccaagcccaacccaccttagcatgtatcactctgtggagaataaagcaccctttctcaccgacctcttcctgagcgccactctttcccaacaggtgctggggggaccctgatgtggcaccaaatgaaatgaacaaagctccacagtccacaggccccccacccgccccatcccccggactcccacagccagcgtttcccccggggcagacagcgccggtggtgttcagtacgccacaagcgacacaaatgaacacgccttctcagccccgccagcacttctaccctagccgggcccagcccccgagcagtgcagcctcccgagtgcagagtgcagcccctgcccgccctggcccagctgcccatgtctaccctgctggatcccaagtaatgatgatcccttcccagatctcctacccagcctcccagggggcctactacatccctggacaggggggggcacggtgcctgtaattattaaacatgaattcaattaagctca

SEQ ID NO: 57376 - DNA, 276 bp, Homo sapiens
cgaacccggcagtaccagaggtggaaaatcagcctcctgcaggcagcaatccaggcccagagtctgagggcagtggtgtgcccccacgtcctgaggaagcagatgagacctgggactcaaaggaagacaaaattcacaatgctgagaacatccagcccggggaacagaagtatgaatataagtcaggtatgctgaagaaagggttgagaatggcttgagttttcttattagggccagaggaggcagtatgattgcttcattctgttttccttgcag

SEQ ID NO: 57377 - DNA, 530 bp, Homo sapiens
catcccaggacccagtagtggtttttacattttaaagttgcgaaaaatcaaaaagtgaatggtaatttatgctgtggaaattaaataaaatgtaaatgtcagtgtccatgaagttttattggaacacagtcacagcatgcctttatcatctacagctggtttcatgctactgtggcagaattgagtagttgcaatagagactggccctttattaaaaaagattttctgacccctggactgggccattcactacctgtttggttgcatatggtggtgctggccaagggactcagccgggttggacctatgattctactccccttttcttcttcagcctggctccatcgattctaacaaccagctctttgcacctggagggcgactgagctggggcaagggcagcagcggaggctcaggagccaagccctcagacgcaggtatggaggcagtgtcaggagctgggtggttacccgtcagagctcccttgaggacagagccttttctgttagggaggccttcagtacaaggtg

SEQ ID NO: 57378 - DNA, 4818 bp, Homo sapiens
gtgctcgcttcggcagcacatatactaaaatggaacgatacagagaagattagcatggcccctgcgcaaggatgacacgcaaattcgtgaagcgttccatattttatccgaattcgagatccaaaccaaggaggaaaggatatcacagaggagatcatgtctggggcccgcactgcctccacacccacccctccccagacgggaggcggtctggagcctcaagctaatggggagacgccccaggttgctgtcattgtccggccagatgaccggtcacagggagcaatcattgctgaccggccagggctgcctggcccagagcatagcccttcagaatcccagccttcgtcgccttctccgaccccatcaccatccccagtcttggaaccggggtctgagcctaatctcgcagtcctctctattcctggggacactatgacaactatacaaatgtctgtagaagaatcaacccccatctcccgtgaaactggggagccatatcgcctctctccagaacccactcctctcgccgaacccatactggaagtagaagtgacacttagcaaaccggttccagaatctgagttttcttccagtcctctccaggctcccacccctttggcatctcacacagtggaaattcatgagcctaatggcatggtcccatctgaagatctggaaccagaggtggagtcaagcccagagcttgctcctcccccagcttgcccctccgaatcccctgtgcccattgctccaactgcccaacctgaggaactgctcaacggagccccctcgccaccagctgtggacttaagcccagtcagtgagccagaggagcaggccaaggaggtgacagcatcagtggcgccccccaccatcccctctgctactccagctacggctccttcagctacttccccagctcaggaggaggaaatggaagaagaagaagaagaggaagaaggagaagcaggagaagcaggagaagctgagagtgagaaaggaggagaggaactgctccccccagagagtacccctattccagccaacttgtctcagaatttggaggcagcagcagccactcaagtggcagtatctgtgccaaagaggagacggaaaattaaggagctaaataagaaggaggctgttggagaccttctggatgccttcaaggaggcgaacccggcagtaccagaggtggaaaatcagcctcctgcaggcagcaatccaggcccagagtctgagggcagtggtgtgcccccacgtcctgaggaagcagatgagacctgggactcaaaggaagacaaaattcacaatgctgagaacatccagcccggggaacagaagtatgaatataagtcagatcagtggaagcctctaaacctagaggagaaaaaacgttacgaccgtgagttcctgcttggttttcagttcatctttgccagtatgcagaagccagagggattgccacatatcagtgacgtggtgctggacaaggccaataaaacaccactgcggccactggatcccactagactacaaggcataaattgtggcccagacttcactccatcctttgccaaccttggccggacaacccttagcacccgtgggcccccaaggggtgggccaggtggggagctgccccgtgggccggctggcctgggaccccggcgctctcagcagggaccccgaaaagaaccacgcaagatcattgccacagtgttaatgaccgaagatataaaactgaacaaagcagagaaagcctggaaacccagcagcaagcggacggcggctgataaggatcgaggggaagaagatgctgatggcagcaaaacccaggacctattccgcagggtgcgctccatcctgaataaactgacaccccagatgttccagcagctgatgaagcaagtgacgcagctggccatcgacaccgaggaacgcctcaaaggggtcattgacctcatttttgagaaggccatttcagagcccaacttctctgtggcctatgccaacatgtgccgctgcctcatggcgctgaaagtgcccactacggaaaagccaacagtgactgtgaacttccgaaagctgttgttgaatcgatgtcagaaggagtttgagaaagacaaagatgatgatgaggtttttgagaagaagcaaaaagagatggatgaagctgctacggcagaggaacgaggacgcctgaaggaagagctggaagaggctcgggacatagcccggcggcgctctttagggaatatcaagtttattggagagttgttcaaactgaagatgttaacagaggcaataatgcatgactgtgtggtcaaactgcttaagaaccatgatgaagagtcccttgagtgcctttgtcgtctgctcaccaccattggcaaagacctggactttgaaaaagccaagccccgaatggatcagtatttcaaccagatggaaaaaatcattaaagaaaagaagacgtcatcccgcatccgctttatgctgcaggacgtgctggatctgcgagggagcaattgggtgccacgccgaggggatcagggtcccaagaccattgaccagatccataaggaggctgagatggaagaacatcgagagcacatcaaagtgcagcagctcatggccaagggcagtgacaagcgtcggggcggtcctccaggccctcccatcagccgtggacttccccttgtggatgatggtggctggaacacagttcccatcagcaaaggtagccgccccattgacacctcacgactcaccaagatcaccaagcctggctccatcgattctaacaaccagctctttgcacctggagggcgactgagctggggcaagggcagcagcggaggctcaggagccaagccctcagacgcagcatcagaagctgctcgcccagctactagtactttgaatcgcttctcagcccttcaacaagcggtacccacagaaagcacagataatagacgtgtggtgcagaggagtagcttgagccgagaacgaggcgagaaagctggagaccgaggagaccgcctagagcggagtgaacggggaggggaccgtggggaccggcttgatcgtgcgcggacacctgctaccaagcggagcttcagcaaggaagtggaggagcggagtagagaacggccctcccagcctgaggggctgcgcaaggcagctagcctcacggaggatcgggaccgtgggcgggatgccgtgaagcgagaagctgccctacccccagtgagccccctgaaggcggctctctctgaggaggagttagagaagaaatccaaggctatcattgaggaatatctccatctcaatgacatgaaagaggcagtccagtgcgtgcaggagctggcctcaccctccttgctcttcatctttgtacggcatggtgtcgagtctacgctggagcgcagtgccattgctcgtgagcatatggggcagctgctgcaccagctgctctgtgctgggcatctgtctactgctcagtactaccaagggttgtatgaaatcttggaattggctgaggacatggaaattgacatcccccacgtgtggctctacctagcggaactggtaacacccattctgcaggaaggtggggtgcccatgggggagctgttcagggagattacaaagcctctgagaccgttgggcaaagctgcttccctgttgctggagatcctgggcctcctgtgcaaaagcatgggtcctaaaaaggtggggacgctgtggcgagaagccgggcttagctggaaggaatttctacctgaaggccaggacattggtgcattcgtcgctgaacagaaggtggagtataccctgggagaggagtcggaagcccctggccagagggcactcccctccgaggagctgaacaggcagctggagaagctgctgaaggagggcagcagtaaccagcgggtgttcgactggatagaggccaacctgagtgagcagcagatagtatccaacacgttagttcgagccctcatgacggctgtctgctattctgcaattatttttgagactcccctccgagtggacgttgcagtgctgaaagcgcgagcgaagctgctgcagaaatacctgtgtgacgagcagaaggagctacaggcgctctacgccctccaggcccttgtagtgaccttagaacagcctcccaacctgctgcggatgttctttgacgcactgtatgacgaggacgtggtgaaggaggatgccttctacagttgggagagtagcaaggaccccgctgagcagcagggcaagggtgtggcccttaaatctgtcacagccttcttcaagtggctccgtgaagcagaggaggagtctgaccacaactgagggctggtggggccggggacctggagccccatggacacacagatggcccggctagccgcctggactgcaggggggcggcagcagcggcggtggcagtgggtgcctgtagtgtgatgtgtctgaactaataaagtggctgaagaggcaggatggcttggggctgcctgggcccccctccaggatgccgccaggtgtccctctcctccccctggggcacagagatatattatatataaagtcttgaaatttggtgtgtcttggggtggggaggggcaccaacgcctgcccctggggtccttttttttattttctgaaaatcactctcgggactgccgtcctcgctgctgggggcatatgccccagcccctgtaccacccctgctgttgcctgggcagggggaagggggggcacggtgcctgtaattattaaacatgaattcaattaagctca

SEQ ID NO: 57379 - DNA, 4676 bp, Homo sapiens
aaagaagggttgtgggactcttcagtgcaaacttggtaaccctttgtgtcctgcagacgggaggcggtctggagcctcaagctaatggggagacgccccaggttgctgtcattgtccggccagatgaccggtcacagggagcaatcattgctgaccggccagggctgcctggcccagagcatagcccttcagaatcccagccttcgtcgccttctccgaccccatcaccatccccagtcttggaaccggggtctgagcctaatctcgcagtcctctctattcctggggacactatgacaactatacaaatgtctgtagaagaatcaacccccatctcccgtgaaactggggagccatatcgcctctctccagaacccactcctctcgccgaacccatactggaagtagaagtgacacttagcaaaccggttccagaatctgagttttcttccagtcctctccaggctcccacccctttggcatctcacacagtggaaattcatgagcctaatggcatggtcccatctgaagatctggaaccagaggtggagtcaagcccagagcttgctcctcccccagcttgcccctccgaatcccctgtgcccattgctccaactgcccaacctgaggaactgctcaacggagccccctcgccaccagctgtggacttaagcccagtcagtgagccagaggagcaggccaaggaggtgacagcatcagtggcgccccccaccatcccctctgctactccagctacggctccttcagctacttccccagctcaggaggaggaaatggaagaagaagaagaagaggaagaaggagaagcaggagaagcaggagaagctgagagtgagaaaggaggagaggaactgctccccccagagagtacccctattccagccaacttgtctcagaatttggaggcagcagcagccactcaagtggcagtatctgtgccaaagaggagacggaaaattaaggagctaaataagaaggaggctgttggagaccttctggatgccttcaaggaggcgaacccggcagtaccagaggtggaaaatcagcctcctgcaggcagcaatccaggcccagagtctgagggcagtggtgtgcccccacgtcctgaggaagcagatgagacctgggactcaaaggaagacaaaattcacaatgctgagaacatccagcccggggaacagaagtatgaatataagtcagatcagtggaagcctctaaacctagaggagaaaaaacgttacgaccgtgagttcctgcttggttttcagttcatctttgccagtatgcagaagccagagggattgccacatatcagtgacgtggtgctggacaaggccaataaaacaccactgcggccactggatcccactagactacaaggcataaattgtggcccagacttcactccatcctttgccaaccttggccggacaacccttagcacccgtgggcccccaaggggtgggccaggtggggagctgccccgtgggccggctggcctgggaccccggcgctctcagcagggaccccgaaaagaaccacgcaagatcattgccacagtgttaatgaccgaagatataaaactgaacaaagcagagaaagcctggaaacccagcagcaagcggacggcggctgataaggatcgaggggaagaagatgctgatggcagcaaaacccaggacctattccgcagggtgcgctccatcctgaataaactgacaccccagatgttccagcagctgatgaagcaagtgacgcagctggccatcgacaccgaggaacgcctcaaaggggtcattgacctcatttttgagaaggccatttcagagcccaacttctctgtggcctatgccaacatgtgccgctgcctcatggcgctgaaagtgcccactacggaaaagccaacagtgactgtgaacttccgaaagctgttgttgaatcgatgtcagaaggagtttgagaaagacaaagatgatgatgaggtttttgagaagaagcaaaaagagatggatgaagctgctacggcagaggaacgaggacgcctgaaggaagagctggaagaggctcgggacatagcccggcggcgctctttagggaatatcaagtttattggagagttgttcaaactgaagatgttaacagaggcaataatgcatgactgtgtggtcaaactgcttaagaaccatgatgaagagtcccttgagtgcctttgtcgtctgctcaccaccattggcaaagacctggactttgaaaaagccaagccccgaatggatcagtatttcaaccagatggaaaaaatcattaaagaaaagaagacgtcatcccgcatccgctttatgctgcaggacgtgctggatctgcgagggagcaattgggtgccacgccgaggggatcagggtcccaagaccattgaccagatccataaggaggctgagatggaagaacatcgagagcacatcaaagtgcagcagctcatggccaagggcagtgacaagcgtcggggcggtcctccaggccctcccatcagccgtggacttccccttgtggatgatggtggctggaacacagttcccatcagcaaaggtagccgccccattgacacctcacgactcaccaagatcaccaagcctggctccatcgattctaacaaccagctctttgcacctggagggcgactgagctggggcaagggcagcagcggaggctcaggagccaagccctcagacgcagcatcagaagctgctcgcccagctactagtactttgaatcgcttctcagcccttcaacaagcggtacccacagaaagcacagataatagacgtgtggtgcagaggagtagcttgagccgagaacgaggcgagaaagctggagaccgaggagaccgcctagagcggagtgaacggggaggggaccgtggggaccggcttgatcgtgcgcggacacctgctaccaagcggagcttcagcaaggaagtggaggagcggagtagagaacggccctcccagcctgaggggctgcgcaaggcagctagcctcacggaggatcgggaccgtgggcgggatgccgtgaagcgagaagctgccctacccccagtgagccccctgaaggcggctctctctgaggaggagttagagaagaaatccaaggctatcattgaggaatatctccatctcaatgacatgaaagaggcagtccagtgcgtgcaggagctggcctcaccctccttgctcttcatctttgtacggcatggtgtcgagtctacgctggagcgcagtgccattgctcgtgagcatatggggcagctgctgcaccagctgctctgtgctgggcatctgtctactgctcagtactaccaagggttgtatgaaatcttggaattggctgaggacatggaaattgacatcccccacgtgtggctctacctagcggaactggtaacacccattctgcaggaaggtggggtgcccatgggggagctgttcagggagattacaaagcctctgagaccgttgggcaaagctgcttccctgttgctggagatcctgggcctcctgtgcaaaagcatgggtcctaaaaaggtggggacgctgtggcgagaagccgggcttagctggaaggaatttctacctgaaggccaggacattggtgcattcgtcgctgaacagaaggtggagtataccctgggagaggagtcggaagcccctggccagagggcactcccctccgaggagctgaacaggcagctggagaagctgctgaaggagggcagcagtaaccagcgggtgttcgactggatagaggccaacctgagtgagcagcagatagtatccaacacgttagttcgagccctcatgacggctgtctgctattctgcaattatttttgagactcccctccgagtggacgttgcagtgctgaaagcgcgagcgaagctgctgcagaaatacctgtgtgacgagcagaaggagctacaggcgctctacgccctccaggcccttgtagtgaccttagaacagcctcccaacctgctgcggatgttctttgacgcactgtatgacgaggacgtggtgaaggaggatgccttctacagttgggagagtagcaaggaccccgctgagcagcagggcaagggtgtggcccttaaatctgtcacagccttcttcaagtggctccgtgaagcagaggaggagtctgaccacaactgagggctggtggggccggggacctggagccccatggacacacagatggcccggctagccgcctggactgcaggggggcggcagcagcggcggtggcagtgggtgcctgtagtgtgatgtgtctgaactaataaagtggctgaagaggcaggatggcttggggctgcctgggcccccctccaggatgccgccaggtgtccctctcctccccctggggcacagagatatattatatataaagtcttgaaatttggtgtgtcttggggtggggaggggcaccaacgcctgcccctggggtccttttttttattttctgaaaatcactctcgggactgccgtcctcgctgctgggggcatatgccccagcccctgtaccacccctgctgttgcctgggcagggggaagggggggcacggtgcctgtaattattaaacatgaattcaattaagctca

SEQ ID NO: 57380 - DNA, 4247 bp, Homo sapiens
tagctaggtagagctggggttaatcggcagaggaggctcccacccctttggcatctcacacagtggaaattcatgagcctaatggcatggtcccatctgaagatctggaaccagaggtggagtcaagcccagagcttgctcctcccccagcttgcccctccgaatcccctgtgcccattgctccaactgcccaacctgaggaactgctcaacggagccccctcgccaccagctgtggacttaagcccagtcagtgagccagaggagcaggccaaggaggtgacagcatcagtggcgccccccaccatcccctctgctactccagctacggctccttcagctacttccccagctcaggaggaggaaatggaagaagaagaagaagaggaagaaggagaagcaggagaagcaggagaagctgagagtgagaaaggaggagaggaactgctccccccagagagtacccctattccagccaacttgtctcagaatttggaggcagcagcagccactcaagtggcagtatctgtgccaaagaggagacggaaaattaaggagctaaataagaaggaggctgttggagaccttctggatgccttcaaggaggcgaacccggcagtaccagaggtggaaaatcagcctcctgcaggcagcaatccaggcccagagtctgagggcagtggtgtgcccccacgtcctgaggaagcagatgagacctgggactcaaaggaagacaaaattcacaatgctgagaacatccagcccggggaacagaagtatgaatataagtcagatcagtggaagcctctaaacctagaggagaaaaaacgttacgaccgtgagttcctgcttggttttcagttcatctttgccagtatgcagaagccagagggattgccacatatcagtgacgtggtgctggacaaggccaataaaacaccactgcggccactggatcccactagactacaaggcataaattgtggcccagacttcactccatcctttgccaaccttggccggacaacccttagcacccgtgggcccccaaggggtgggccaggtggggagctgccccgtgggccggctggcctgggaccccggcgctctcagcagggaccccgaaaagaaccacgcaagatcattgccacagtgttaatgaccgaagatataaaactgaacaaagcagagaaagcctggaaacccagcagcaagcggacggcggctgataaggatcgaggggaagaagatgctgatggcagcaaaacccaggacctattccgcagggtgcgctccatcctgaataaactgacaccccagatgttccagcagctgatgaagcaagtgacgcagctggccatcgacaccgaggaacgcctcaaaggggtcattgacctcatttttgagaaggccatttcagagcccaacttctctgtggcctatgccaacatgtgccgctgcctcatggcgctgaaagtgcccactacggaaaagccaacagtgactgtgaacttccgaaagctgttgttgaatcgatgtcagaaggagtttgagaaagacaaagatgatgatgaggtttttgagaagaagcaaaaagagatggatgaagctgctacggcagaggaacgaggacgcctgaaggaagagctggaagaggctcgggacatagcccggcggcgctctttagggaatatcaagtttattggagagttgttcaaactgaagatgttaacagaggcaataatgcatgactgtgtggtcaaactgcttaagaaccatgatgaagagtcccttgagtgcctttgtcgtctgctcaccaccattggcaaagacctggactttgaaaaagccaagccccgaatggatcagtatttcaaccagatggaaaaaatcattaaagaaaagaagacgtcatcccgcatccgctttatgctgcaggacgtgctggatctgcgagggagcaattgggtgccacgccgaggggatcagggtcccaagaccattgaccagatccataaggaggctgagatggaagaacatcgagagcacatcaaagtgcagcagctcatggccaagggcagtgacaagcgtcggggcggtcctccaggccctcccatcagccgtggacttccccttgtggatgatggtggctggaacacagttcccatcagcaaaggtagccgccccattgacacctcacgactcaccaagatcaccaagcctggctccatcgattctaacaaccagctctttgcacctggagggcgactgagctggggcaagggcagcagcggaggctcaggagccaagccctcagacgcagcatcagaagctgctcgcccagctactagtactttgaatcgcttctcagcccttcaacaagcggtacccacagaaagcacagataatagacgtgtggtgcagaggagtagcttgagccgagaacgaggcgagaaagctggagaccgaggagaccgcctagagcggagtgaacggggaggggaccgtggggaccggcttgatcgtgcgcggacacctgctaccaagcggagcttcagcaaggaagtggaggagcggagtagagaacggccctcccagcctgaggggctgcgcaaggcagctagcctcacggaggatcgggaccgtgggcgggatgccgtgaagcgagaagctgccctacccccagtgagccccctgaaggcggctctctctgaggaggagttagagaagaaatccaaggctatcattgaggaatatctccatctcaatgacatgaaagaggcagtccagtgcgtgcaggagctggcctcaccctccttgctcttcatctttgtacggcatggtgtcgagtctacgctggagcgcagtgccattgctcgtgagcatatggggcagctgctgcaccagctgctctgtgctgggcatctgtctactgctcagtactaccaagggttgtatgaaatcttggaattggctgaggacatggaaattgacatcccccacgtgtggctctacctagcggaactggtaacacccattctgcaggaaggtggggtgcccatgggggagctgttcagggagattacaaagcctctgagaccgttgggcaaagctgcttccctgttgctggagatcctgggcctcctgtgcaaaagcatgggtcctaaaaaggtggggacgctgtggcgagaagccgggcttagctggaaggaatttctacctgaaggccaggacattggtgcattcgtcgctgaacagaaggtggagtataccctgggagaggagtcggaagcccctggccagagggcactcccctccgaggagctgaacaggcagctggagaagctgctgaaggagggcagcagtaaccagcgggtgttcgactggatagaggccaacctgagtgagcagcagatagtatccaacacgttagttcgagccctcatgacggctgtctgctattctgcaattatttttgagactcccctccgagtggacgttgcagtgctgaaagcgcgagcgaagctgctgcagaaatacctgtgtgacgagcagaaggagctacaggcgctctacgccctccaggcccttgtagtgaccttagaacagcctcccaacctgctgcggatgttctttgacgcactgtatgacgaggacgtggtgaaggaggatgccttctacagttgggagagtagcaaggaccccgctgagcagcagggcaagggtgtggcccttaaatctgtcacagccttcttcaagtggctccgtgaagcagaggaggagtctgaccacaactgagggctggtggggccggggacctggagccccatggacacacagatggcccggctagccgcctggactgcaggggggcggcagcagcggcggtggcagtgggtgcctgtagtgtgatgtgtctgaactaataaagtggctgaagaggcaggatggcttggggctgcctgggcccccctccaggatgccgccaggtgtccctctcctccccctggggcacagagatatattatatataaagtcttgaaatttggtgtgtcttggggtggggaggggcaccaacgcctgcccctggggtccttttttttattttctgaaaatcactctcgggactgccgtcctcgctgctgggggcatatgccccagcccctgtaccacccctgctgttgcctgggcagggggaagggggggcacggtgcctgtaattattaaacatgaattcaattaagctca

SEQ ID NO: 57381 - DNA, 4198 bp, Homo sapiens
  misc_feature (42)..(42): n is a, c, g, or t
  misc_feature (46)..(46): n is a, c, g, or t
  misc_feature (164)..(164): n is a, c, g, or t
cgtcaaagaaatccccagcagcttgggaggctgttctaaggncacnacaagggcctggagggcgtagagcgcctgtagctccttctgctcgtcacacaggtatttctgcagcagcttcgctcgcgctttcagcactgcaacgtccactcggaggggagtctcanaaataattgcagaatagcagacagccgtcatgagggctcgaactaacgtgttggatactatctgctgctcactcaggttggcgccccccaccatcccctctgctactccagctacggctccttcagctacttccccagctcaggaggaggaaatggaagaagaagaagaagaggaagaaggagaagcaggagaagcaggagaagctgagagtgagaaaggaggagaggaactgctccccccagagagtacccctattccagccaacttgtctcagaatttggaggcagcagcagccactcaagtggcagtatctgtgccaaagaggagacggaaaattaaggagctaaataagaaggaggctgttggagaccttctggatgccttcaaggaggcgaacccggcagtaccagaggtggaaaatcagcctcctgcaggcagcaatccaggcccagagtctgagggcagtggtgtgcccccacgtcctgaggaagcagatgagacctgggactcaaaggaagacaaaattcacaatgctgagaacatccagcccggggaacagaagtatgaatataagtcagatcagtggaagcctctaaacctagaggagaaaaaacgttacgaccgtgagttcctgcttggttttcagttcatctttgccagtatgcagaagccagagggattgccacatatcagtgacgtggtgctggacaaggccaataaaacaccactgcggccactggatcccactagactacaaggcataaattgtggcccagacttcactccatcctttgccaaccttggccggacaacccttagcacccgtgggcccccaaggggtgggccaggtggggagctgccccgtgggccggctggcctgggaccccggcgctctcagcagggaccccgaaaagaaccacgcaagatcattgccacagtgttaatgaccgaagatataaaactgaacaaagcagagaaagcctggaaacccagcagcaagcggacggcggctgataaggatcgaggggaagaagatgctgatggcagcaaaacccaggacctattccgcagggtgcgctccatcctgaataaactgacaccccagatgttccagcagctgatgaagcaagtgacgcagctggccatcgacaccgaggaacgcctcaaaggggtcattgacctcatttttgagaaggccatttcagagcccaacttctctgtggcctatgccaacatgtgccgctgcctcatggcgctgaaagtgcccactacggaaaagccaacagtgactgtgaacttccgaaagctgttgttgaatcgatgtcagaaggagtttgagaaagacaaagatgatgatgaggtttttgagaagaagcaaaaagagatggatgaagctgctacggcagaggaacgaggacgcctgaaggaagagctggaagaggctcgggacatagcccggcggcgctctttagggaatatcaagtttattggagagttgttcaaactgaagatgttaacagaggcaataatgcatgactgtgtggtcaaactgcttaagaaccatgatgaagagtcccttgagtgcctttgtcgtctgctcaccaccattggcaaagacctggactttgaaaaagccaagccccgaatggatcagtatttcaaccagatggaaaaaatcattaaagaaaagaagacgtcatcccgcatccgctttatgctgcaggacgtgctggatctgcgagggagcaattgggtgccacgccgaggggatcagggtcccaagaccattgaccagatccataaggaggctgagatggaagaacatcgagagcacatcaaagtgcagcagctcatggccaagggcagtgacaagcgtcggggcggtcctccaggccctcccatcagccgtggacttccccttgtggatgatggtggctggaacacagttcccatcagcaaaggtagccgccccattgacacctcacgactcaccaagatcaccaagcctggctccatcgattctaacaaccagctctttgcacctggagggcgactgagctggggcaagggcagcagcggaggctcaggagccaagccctcagacgcagcatcagaagctgctcgcccagctactagtactttgaatcgcttctcagcccttcaacaagcggtacccacagaaagcacagataatagacgtgtggtgcagaggagtagcttgagccgagaacgaggcgagaaagctggagaccgaggagaccgcctagagcggagtgaacggggaggggaccgtggggaccggcttgatcgtgcgcggacacctgctaccaagcggagcttcagcaaggaagtggaggagcggagtagagaacggccctcccagcctgaggggctgcgcaaggcagctagcctcacggaggatcgggaccgtgggcgggatgccgtgaagcgagaagctgccctacccccagtgagccccctgaaggcggctctctctgaggaggagttagagaagaaatccaaggctatcattgaggaatatctccatctcaatgacatgaaagaggcagtccagtgcgtgcaggagctggcctcaccctccttgctcttcatctttgtacggcatggtgtcgagtctacgctggagcgcagtgccattgctcgtgagcatatggggcagctgctgcaccagctgctctgtgctgggcatctgtctactgctcagtactaccaagggttgtatgaaatcttggaattggctgaggacatggaaattgacatcccccacgtgtggctctacctagcggaactggtaacacccattctgcaggaaggtggggtgcccatgggggagctgttcagggagattacaaagcctctgagaccgttgggcaaagctgcttccctgttgctggagatcctgggcctcctgtgcaaaagcatgggtcctaaaaaggtggggacgctgtggcgagaagccgggcttagctggaaggaatttctacctgaaggccaggacattggtgcattcgtcgctgaacagaaggtggagtataccctgggagaggagtcggaagcccctggccagagggcactcccctccgaggagctgaacaggcagctggagaagctgctgaaggagggcagcagtaaccagcgggtgttcgactggatagaggccaacctgagtgagcagcagatagtatccaacacgttagttcgagccctcatgacggctgtctgctattctgcaattatttttgagactcccctccgagtggacgttgcagtgctgaaagcgcgagcgaagctgctgcagaaatacctgtgtgacgagcagaaggagctacaggcgctctacgccctccaggcccttgtagtgaccttagaacagcctcccaacctgctgcggatgttctttgacgcactgtatgacgaggacgtggtgaaggaggatgccttctacagttgggagagtagcaaggaccccgctgagcagcagggcaagggtgtggcccttaaatctgtcacagccttcttcaagtggctccgtgaagcagaggaggagtctgaccacaactgagggctggtggggccggggacctggagccccatggacacacagatggcccggctagccgcctggactgcaggggggcggcagcagcggcggtggcagtgggtgcctgtagtgtgatgtgtctgaactaataaagtggctgaagaggcaggatggcttggggctgcctgggcccccctccaggatgccgccaggtgtccctctcctccccctggggcacagagatatattatatataaagtcttgaaatttggtgtgtcttggggtggggaggggcaccaacgcctgcccctggggtccttttttttattttctgaaaatcactctcgggactgccgtcctcgctgctgggggcatatgccccagcccctgtaccacccctgctgttgcctgggcagggggaagggggggcacggtgcctgtaattattaaacatgaattcaattaagctca

SEQ ID NO: 57382 - DNA, 3656 bp, Homo sapiens
ctgacctgtaggaggctgattttccacctctggtactgccgggttcgcctcctgcaggcagcaatccaggcccagagtctgagggcagtggtgtgcccccacgtcctgaggaagcagatgagacctgggactcaaaggaagacaaaattcacaatgctgagaacatccagcccggggaacagaagtatgaatataagtcagatcagtggaagcctctaaacctagaggagaaaaaacgttacgaccgtgagttcctgcttggttttcagttcatctttgccagtatgcagaagccagagggattgccacatatcagtgacgtggtgctggacaaggccaataaaacaccactgcggccactggatcccactagactacaaggcataaattgtggcccagacttcactccatcctttgccaaccttggccggacaacccttagcacccgtgggcccccaaggggtgggccaggtggggagctgccccgtgggccggctggcctgggaccccggcgctctcagcagggaccccgaaaagaaccacgcaagatcattgccacagtgttaatgaccgaagatataaaactgaacaaagcagagaaagcctggaaacccagcagcaagcggacggcggctgataaggatcgaggggaagaagatgctgatggcagcaaaacccaggacctattccgcagggtgcgctccatcctgaataaactgacaccccagatgttccagcagctgatgaagcaagtgacgcagctggccatcgacaccgaggaacgcctcaaaggggtcattgacctcatttttgagaaggccatttcagagcccaacttctctgtggcctatgccaacatgtgccgctgcctcatggcgctgaaagtgcccactacggaaaagccaacagtgactgtgaacttccgaaagctgttgttgaatcgatgtcagaaggagtttgagaaagacaaagatgatgatgaggtttttgagaagaagcaaaaagagatggatgaagctgctacggcagaggaacgaggacgcctgaaggaagagctggaagaggctcgggacatagcccggcggcgctctttagggaatatcaagtttattggagagttgttcaaactgaagatgttaacagaggcaataatgcatgactgtgtggtcaaactgcttaagaaccatgatgaagagtcccttgagtgcctttgtcgtctgctcaccaccattggcaaagacctggactttgaaaaagccaagccccgaatggatcagtatttcaaccagatggaaaaaatcattaaagaaaagaagacgtcatcccgcatccgctttatgctgcaggacgtgctggatctgcgagggagcaattgggtgccacgccgaggggatcagggtcccaagaccattgaccagatccataaggaggctgagatggaagaacatcgagagcacatcaaagtgcagcagctcatggccaagggcagtgacaagcgtcggggcggtcctccaggccctcccatcagccgtggacttccccttgtggatgatggtggctggaacacagttcccatcagcaaaggtagccgccccattgacacctcacgactcaccaagatcaccaagcctggctccatcgattctaacaaccagctctttgcacctggagggcgactgagctggggcaagggcagcagcggaggctcaggagccaagccctcagacgcagcatcagaagctgctcgcccagctactagtactttgaatcgcttctcagcccttcaacaagcggtacccacagaaagcacagataatagacgtgtggtgcagaggagtagcttgagccgagaacgaggcgagaaagctggagaccgaggagaccgcctagagcggagtgaacggggaggggaccgtggggaccggcttgatcgtgcgcggacacctgctaccaagcggagcttcagcaaggaagtggaggagcggagtagagaacggccctcccagcctgaggggctgcgcaaggcagctagcctcacggaggatcgggaccgtgggcgggatgccgtgaagcgagaagctgccctacccccagtgagccccctgaaggcggctctctctgaggaggagttagagaagaaatccaaggctatcattgaggaatatctccatctcaatgacatgaaagaggcagtccagtgcgtgcaggagctggcctcaccctccttgctcttcatctttgtacggcatggtgtcgagtctacgctggagcgcagtgccattgctcgtgagcatatggggcagctgctgcaccagctgctctgtgctgggcatctgtctactgctcagtactaccaagggttgtatgaaatcttggaattggctgaggacatggaaattgacatcccccacgtgtggctctacctagcggaactggtaacacccattctgcaggaaggtggggtgcccatgggggagctgttcagggagattacaaagcctctgagaccgttgggcaaagctgcttccctgttgctggagatcctgggcctcctgtgcaaaagcatgggtcctaaaaaggtggggacgctgtggcgagaagccgggcttagctggaaggaatttctacctgaaggccaggacattggtgcattcgtcgctgaacagaaggtggagtataccctgggagaggagtcggaagcccctggccagagggcactcccctccgaggagctgaacaggcagctggagaagctgctgaaggagggcagcagtaaccagcgggtgttcgactggatagaggccaacctgagtgagcagcagatagtatccaacacgttagttcgagccctcatgacggctgtctgctattctgcaattatttttgagactcccctccgagtggacgttgcagtgctgaaagcgcgagcgaagctgctgcagaaatacctgtgtgacgagcagaaggagctacaggcgctctacgccctccaggcccttgtagtgaccttagaacagcctcccaacctgctgcggatgttctttgacgcactgtatgacgaggacgtggtgaaggaggatgccttctacagttgggagagtagcaaggaccccgctgagcagcagggcaagggtgtggcccttaaatctgtcacagccttcttcaagtggctccgtgaagcagaggaggagtctgaccacaactgagggctggtggggccggggacctggagccccatggacacacagatggcccggctagccgcctggactgcaggggggcggcagcagcggcggtggcagtgggtgcctgtagtgtgatgtgtctgaactaataaagtggctgaagaggcaggatggcttggggctgcctgggcccccctccaggatgccgccaggtgtccctctcctccccctggggcacagagatatattatatataaagtcttgaaatttggtgtgtcttggggtggggaggggcaccaacgcctgcccctggggtccttttttttattttctgaaaatcactctcgggactgccgtcctcgctgctgggggcatatgccccagcccctgtaccacccctgctgttgcctgggcagggggaagggggggcacggtgcctgtaattattaaacatgaattcaattaagctca

SEQ ID NO: 57383 - DNA, 5257 bp, Homo sapiens
ccggctgcgcctgcggagaagcggtggccgccgagcgggatctgtgcggggagccggaaatggttgtggactacgtctgtgcggctgcgtggggctcggccgcgcggactgaaggagactgaagcacttctaccctagccgggcccagcccccgagcagtgcagcctcccgagtgcagagtgcagcccctgcccgccctggcccagctgcccatgtctaccctgctggatcccaagtaatgatgatcccttcccagatctcctacccagcctcccagggggcctactacatccctggacaggggcgttccacatacgttgtcccgacacagcagtaccctgtgcagccaggagccccaggcttctatccaggtgcaagccctacagaatttgggacctacgctggcgcctactatccagcccaaggggtgcagcagtttcccactggcgtggcccccgccccagttttgatgaaccagccaccccagattgctcccaagagggagcgtaagacgatccgaattcgagatccaaaccaaggaggaaaggatatcacagaggagatcatgtctggggcccgcactgcctccacacccacccctccccagacgggaggcggtctggagcctcaagctaatggggagacgccccaggttgctgtcattgtccggccagatgaccggtcacagggagcaatcattgctgaccggccagggctgcctggcccagagcatagcccttcagaatcccagccttcgtcgccttctccgaccccatcaccatccccagtcttggaaccggggtctgagcctaatctcgcagtcctctctattcctggggacactatgacaactatacaaatgtctgtagaagaatcaacccccatctcccgtgaaactggggagccatatcgcctctctccagaacccactcctctcgccgaacccatactggaagtagaagtgacacttagcaaaccggttccagaatctgagttttcttccagtcctctccaggctcccacccctttggcatctcacacagtggaaattcatgagcctaatggcatggtcccatctgaagatctggaaccagaggtggagtcaagcccagagcttgctcctcccccagcttgcccctccgaatcccctgtgcccattgctccaactgcccaacctgaggaactgctcaacggagccccctcgccaccagctgtggacttaagcccagtcagtgagccagaggagcaggccaaggaggtgacagcatcagtggcgccccccaccatcccctctgctactccagctacggctccttcagctacttccccagctcaggaggaggaaatggaagaagaagaagaagaggaagaaggagaagcaggagaagcaggagaagctgagagtgagaaaggaggagaggaactgctccccccagagagtacccctattccagccaacttgtctcagaatttggaggcagcagcagccactcaagtggcagtatctgtgccaaagaggagacggaaaattaaggagctaaataagaaggaggctgttggagaccttctggatgccttcaaggaggcgaacccggcagtaccagaggtggaaaatcagcctcctgcaggcagcaatccaggcccagagtctgagggcagtggtgtgcccccacgtcctgaggaagcagatgagacctgggactcaaaggaagacaaaattcacaatgctgagaacatccagcccggggaacagaagtatgaatataagtcagatcagtggaagcctctaaacctagaggagaaaaaacgttacgaccgtgagttcctgcttggttttcagttcatctttgccagtatgcagaagccagagggattgccacatatcagtgacgtggtgctggacaaggccaataaaacaccactgcggccactggatcccactagactacaaggcataaattgtggcccagacttcactccatcctttgccaaccttggccggacaacccttagcacccgtgggcccccaaggggtgggccaggtggggagctgccccgtgggccggctggcctgggaccccggcgctctcagcagggaccccgaaaagaaccacgcaagatcattgccacagtgttaatgaccgaagatataaaactgaacaaagcagagaaagcctggaaacccagcagcaagcggacggcggctgataaggatcgaggggaagaagatgctgatggcagcaaaacccaggacctattccgcagggtgcgctccatcctgaataaactgacaccccagatgttccagcagctgatgaagcaagtgacgcagctggccatcgacaccgaggaacgcctcaaaggggtcattgacctcatttttgagaaggccatttcagagcccaacttctctgtggcctatgccaacatgtgccgctgcctcatggcgctgaaagtgcccactacggaaaagccaacagtgactgtgaacttccgaaagctgttgttgaatcgatgtcagaaggagtttgagaaagacaaagatgatgatgaggtttttgagaagaagcaaaaagagatggatgaagctgctacggcagaggaacgaggacgcctgaaggaagagctggaagaggctcgggacatagcccggcggcgctctttagggaatatcaagtttattggagagttgttcaaactgaagatgttaacagaggcaataatgcatgactgtgtggtcaaactgcttaagaaccatgatgaagagtcccttgagtgcctttgtcgtctgctcaccaccattggcaaagacctggactttgaaaaagccaagccccgaatggatcagtatttcaaccagatggaaaaaatcattaaagaaaagaagacgtcatcccgcatccgctttatgctgcaggacgtgctggatctgcgagggagcaattgggtgccacgccgaggggatcagggtcccaagaccattgaccagatccataaggaggctgagatggaagaacatcgagagcacatcaaagtgcagcagctcatggccaagggcagtgacaagcgtcggggcggtcctccaggccctcccatcagccgtggacttccccttgtggatgatggtggctggaacacagttcccatcagcaaaggtagccgccccattgacacctcacgactcaccaagatcaccaagcctggctccatcgattctaacaaccagctctttgcacctggagggcgactgagctggggcaagggcagcagcggaggctcaggagccaagccctcagacgcagcatcagaagctgctcgcccagctactagtactttgaatcgcttctcagcccttcaacaagcggtacccacagaaagcacagataatagacgtgtggtgcagaggagtagcttgagccgagaacgaggcgagaaagctggagaccgaggagaccgcctagagcggagtgaacggggaggggaccgtggggaccggcttgatcgtgcgcggacacctgctaccaagcggagcttcagcaaggaagtggaggagcggagtagagaacggccctcccagcctgaggggctgcgcaaggcagctagcctcacggaggatcgggaccgtgggcgggatgccgtgaagcgagaagctgccctacccccagtgagccccctgaaggcggctctctctgaggaggagttagagaagaaatccaaggctatcattgaggaatatctccatctcaatgacatgaaagaggcagtccagtgcgtgcaggagctggcctcaccctccttgctcttcatctttgtacggcatggtgtcgagtctacgctggagcgcagtgccattgctcgtgagcatatggggcagctgctgcaccagctgctctgtgctgggcatctgtctactgctcagtactaccaagggttgtatgaaatcttggaattggctgaggacatggaaattgacatcccccacgtgtggctctacctagcggaactggtaacacccattctgcaggaaggtggggtgcccatgggggagctgttcagggagattacaaagcctctgagaccgttgggcaaagctgcttccctgttgctggagatcctgggcctcctgtgcaaaagcatgggtcctaaaaaggtggggacgctgtggcgagaagccgggcttagctggaaggaatttctacctgaaggccaggacattggtgcattcgtcgctgaacagaaggtggagtataccctgggagaggagtcggaagcccctggccagagggcactcccctccgaggagctgaacaggcagctggagaagctgctgaaggagggcagcagtaaccagcgggtgttcgactggatagagaatctggggatcatttgtttctcccatacagccaacctgagtgagcagcagatagtatccaacacgttagttcgagccctcatgacggctgtctgctattctgcaattatttttgagactcccctccgagtggacgttgcagtgctgaaagcgcgagcgaagctgctgcagaaatacctgtgtgacgagcagaaggagctacaggcgctctacgccctccaggcccttgtagtgaccttagaacagcctcccaacctgctgcggatgttctttgacgcactgtatgacgaggacgtggtgaaggaggatgccttctacagttgggagagtagcaaggaccccgctgagcagcagggcaagggtgtggcccttaaatctgtcacagccttcttcaagtggctccgtgaagcagaggaggagtctgaccacaactgagggctggtggggccggggacctggagccccatggacacacagatggcccggctagccgcctggactgcaggggggcggcagcagcggcggtggcagtgggtgcctgtagtgtgatgtgtctgaactaataaagtggctgaagaggcaggatggcttggggctgcctgggcccccctccaggatgccgccaggtgtccctctcctccccctggggcacagagatatattatatataaagtcttgaaatttggtgtgtcttggggtggggaggggcaccaacgcctgcccctggggtccttttttttattttctgaaaatcactctcgggactgccgtcctcgctgctgggggcatatgccccagcccctgtaccacccctgctgttgcctgggcagggggaagggggggcacggtgcctgtaattattaaacatgaattcaattaagctca

SEQ ID NO: 57384 - DNA, 2981 bp, Homo sapiens
ttttttttccttttaatggacttttctccatcctgaataaactgacaccccagatgttccagcagctgatgaagcaagtgacgcagctggccatcgacaccgaggaacgcctcaaaggggtcattgacctcatttttgagaaggccatttcagagcccaacttctctgtggcctatgccaacatgtgccgctgcctcatggcgctgaaagtgcccactacggaaaagccaacagtgactgtgaacttccgaaagctgttgttgaatcgatgtcagaaggagtttgagaaagacaaagatgatgatgaggtttttgagaagaagcaaaaagagatggatgaagctgctacggcagaggaacgaggacgcctgaaggaagagctggaagaggctcgggacatagcccggcggcgctctttagggaatatcaagtttattggagagttgttcaaactgaagatgttaacagaggcaataatgcatgactgtgtggtcaaactgcttaagaaccatgatgaagagtcccttgagtgcctttgtcgtctgctcaccaccattggcaaagacctggactttgaaaaagccaagccccgaatggatcagtatttcaaccagatggaaaaaatcattaaagaaaagaagacgtcatcccgcatccgctttatgctgcaggacgtgctggatctgcgagggagcaattgggtgccacgccgaggggatcagggtcccaagaccattgaccagatccataaggaggctgagatggaagaacatcgagagcacatcaaagtgcagcagctcatggccaagggcagtgacaagcgtcggggcggtcctccaggccctcccatcagccgtggacttccccttgtggatgatggtggctggaacacagttcccatcagcaaaggtagccgccccattgacacctcacgactcaccaagatcaccaagcctggctccatcgattctaacaaccagctctttgcacctggagggcgactgagctggggcaagggcagcagcggaggctcaggagccaagccctcagacgcagcatcagaagctgctcgcccagctactagtactttgaatcgcttctcagcccttcaacaagcggtacccacagaaagcacagataatagacgtgtggtgcagaggagtagcttgagccgagaacgaggcgagaaagctggagaccgaggagaccgcctagagcggagtgaacggggaggggaccgtggggaccggcttgatcgtgcgcggacacctgctaccaagcggagcttcagcaaggaagtggaggagcggagtagagaacggccctcccagcctgaggggctgcgcaaggcagctagcctcacggaggatcgggaccgtgggcgggatgccgtgaagcgagaagctgccctacccccagtgagccccctgaaggcggctctctctgaggaggagttagagaagaaatccaaggctatcattgaggaatatctccatctcaatgacatgaaagaggcagtccagtgcgtgcaggagctggcctcaccctccttgctcttcatctttgtacggcatggtgtcgagtctacgctggagcgcagtgccattgctcgtgagcatatggggcagctgctgcaccagctgctctgtgctgggcatctgtctactgctcagtactaccaagggttgtatgaaatcttggaattggctgaggacatggaaattgacatcccccacgtgtggctctacctagcggaactggtaacacccattctgcaggaaggtggggtgcccatgggggagctgttcagggagattacaaagcctctgagaccgttgggcaaagctgcttccctgttgctggagatcctgggcctcctgtgcaaaagcatgggtcctaaaaaggtggggacgctgtggcgagaagccgggcttagctggaaggaatttctacctgaaggccaggacattggtgcattcgtcgctgaacagaaggtggagtataccctgggagaggagtcggaagcccctggccagagggcactcccctccgaggagctgaacaggcagctggagaagctgctgaaggagggcagcagtaaccagcgggtgttcgactggatagaggccaacctgagtgagcagcagatagtatccaacacgttagttcgagccctcatgacggctgtctgctattctgcaattatttttgagactcccctccgagtggacgttgcagtgctgaaagcgcgagcgaagctgctgcagaaatacctgtgtgacgagcagaaggagctacaggcgctctacgccctccaggcccttgtagtgaccttagaacagcctcccaacctgctgcggatgttctttgacgcactgtatgacgaggacgtggtgaaggaggatgccttctacagttgggagagtagcaaggaccccgctgagcagcagggcaagggtgtggcccttaaatctgtcacagccttcttcaagtggctccgtgaagcagaggaggagtctgaccacaactgagggctggtggggccggggacctggagccccatggacacacagatggcccggctagccgcctggactgcaggggggcggcagcagcggcggtggcagtgggtgcctgtagtgtgatgtgtctgaactaataaagtggctgaagaggcaggatggcttggggctgcctgggcccccctccaggatgccgccaggtgtccctctcctccccctggggcacagagatatattatatataaagtcttgaaatttggtgtgtcttggggtggggaggggcaccaacgcctgcccctggggtccttttttttattttctgaaaatcactctcgggactgccgtcctcgctgctgggggcatatgccccagcccctgtaccacccctgctgttgcctgggcagggggaagggggggcacggtgcctgtaattattaaacatgaattcaattaagctca

SEQ ID NO: 57385 - DNA, 2902 bp, Homo sapiens
gcggccgctccaacatcagaaatggccttctcaaaaatgggtcattgacctcatttttgagaaggccatttcagagcccaacttctctgtggcctatgccaacatgtgccgctgcctcatggcgctgaaagtgcccactacggaaaagccaacagtgactgtgaacttccgaaagctgttgttgaatcgatgtcagaaggagtttgagaaagacaaagatgatgatgaggtttttgagaagaagcaaaaagagatggatgaagctgctacggcagaggaacgaggacgcctgaaggaagagctggaagaggctcgggacatagcccggcggcgctctttagggaatatcaagtttattggagagttgttcaaactgaagatgttaacagaggcaataatgcatgactgtgtggtcaaactgcttaagaaccatgatgaagagtcccttgagtgcctttgtcgtctgctcaccaccattggcaaagacctggactttgaaaaagccaagccccgaatggatcagtatttcaaccagatggaaaaaatcattaaagaaaagaagacgtcatcccgcatccgctttatgctgcaggacgtgctggatctgcgagggagcaattgggtgccacgccgaggggatcagggtcccaagaccattgaccagatccataaggaggctgagatggaagaacatcgagagcacatcaaagtgcagcagctcatggccaagggcagtgacaagcgtcggggcggtcctccaggccctcccatcagccgtggacttccccttgtggatgatggtggctggaacacagttcccatcagcaaaggtagccgccccattgacacctcacgactcaccaagatcaccaagcctggctccatcgattctaacaaccagctctttgcacctggagggcgactgagctggggcaagggcagcagcggaggctcaggagccaagccctcagacgcagcatcagaagctgctcgcccagctactagtactttgaatcgcttctcagcccttcaacaagcggtacccacagaaagcacagataatagacgtgtggtgcagaggagtagcttgagccgagaacgaggcgagaaagctggagaccgaggagaccgcctagagcggagtgaacggggaggggaccgtggggaccggcttgatcgtgcgcggacacctgctaccaagcggagcttcagcaaggaagtggaggagcggagtagagaacggccctcccagcctgaggggctgcgcaaggcagctagcctcacggaggatcgggaccgtgggcgggatgccgtgaagcgagaagctgccctacccccagtgagccccctgaaggcggctctctctgaggaggagttagagaagaaatccaaggctatcattgaggaatatctccatctcaatgacatgaaagaggcagtccagtgcgtgcaggagctggcctcaccctccttgctcttcatctttgtacggcatggtgtcgagtctacgctggagcgcagtgccattgctcgtgagcatatggggcagctgctgcaccagctgctctgtgctgggcatctgtctactgctcagtactaccaagggttgtatgaaatcttggaattggctgaggacatggaaattgacatcccccacgtgtggctctacctagcggaactggtaacacccattctgcaggaaggtggggtgcccatgggggagctgttcagggagattacaaagcctctgagaccgttgggcaaagctgcttccctgttgctggagatcctgggcctcctgtgcaaaagcatgggtcctaaaaaggtggggacgctgtggcgagaagccgggcttagctggaaggaatttctacctgaaggccaggacattggtgcattcgtcgctgaacagaaggtggagtataccctgggagaggagtcggaagcccctggccagagggcactcccctccgaggagctgaacaggcagctggagaagctgctgaaggagggcagcagtaaccagcgggtgttcgactggatagaggccaacctgagtgagcagcagatagtatccaacacgttagttcgagccctcatgacggctgtctgctattctgcaattatttttgagactcccctccgagtggacgttgcagtgctgaaagcgcgagcgaagctgctgcagaaatacctgtgtgacgagcagaaggagctacaggcgctctacgccctccaggcccttgtagtgaccttagaacagcctcccaacctgctgcggatgttctttgacgcactgtatgacgaggacgtggtgaaggaggatgccttctacagttgggagagtagcaaggaccccgctgagcagcagggcaagggtgtggcccttaaatctgtcacagccttcttcaagtggctccgtgaagcagaggaggagtctgaccacaactgagggctggtggggccggggacctggagccccatggacacacagatggcccggctagccgcctggactgcaggggggcggcagcagcggcggtggcagtgggtgcctgtagtgtgatgtgtctgaactaataaagtggctgaagaggcaggatggcttggggctgcctgggcccccctccaggatgccgccaggtgtccctctcctccccctggggcacagagatatattatatataaagtcttgaaatttggtgtgtcttggggtggggaggggcaccaacgcctgcccctggggtccttttttttattttctgaaaatcactctcgggactgccgtcctcgctgctgggggcatatgccccagcccctgtaccacccctgctgttgcctgggcagggggaagggggggcacggtgcctgtaattattaaacatgaattcaattaagctca

SEQ ID NO: 57386 - DNA, 4969 bp, Homo sapiens
ccggctgcgcctgcggagaagcggtggccgccgagcgggatctgtgcggggagccggaaatggttgtggactacgtctgtgcggctgcgtggggctcggccgcgcggactgaaggagactgaagcacttctaccctagccgggcccagcccccgagcagtgcagcctcccgagtgcagagtgcagcccctgcccgccctggcccagctgcccatgtctaccctgctggatcccaagtaatgatgatcccttcccagatctcctacccagcctcccagggggcctactacatccctggacaggggcgttccacatacgttgtcccgacacagcagtaccctgtgcagccaggagccccaggcttctatccaggtgcaagccctacagaatttgggacctacgctggcgcctactatccagcccaaggggtgcagcagtttcccactggcgtggcccccgccccagttttgatgaaccagccaccccagattgctcccaagagggagcgtaagacgatccgaattcgagatccaaaccaaggaggaaaggatatcacagaggagatcatgtctggggcccgcactgcctccacacccacccctccccagacgggaggcggtctggagcctcaagctaatggggagacgccccaggttgctgtcattgtccggccagatgaccggtcacagggagcaatcattgctgaccggccagggctgcctggcccagagcatagcccttcagaatcccagccttcgtcgccttctccgaccccatcaccatccccagtcttggaaccggggtctgagcctaatctcgcagtcctctctattcctggggacactatgacaactatacaaatgtctgtagaagaatcaacccccatctcccgtgaaactggggagccatatcgcctctctccagaacccactcctctcgccgaacccatactggaagtagaagtgacacttagcaaaccggttccagaatctgagttttcttccagtcctctccaggctcccacccctttggcatctcacacagtggaaattcatgagcctaatggcatggtcccatctgaagatctggaaccagaggtggagtcaagcccagagcttgctcctcccccagcttgcccctccgaatcccctgtgcccattgctccaactgcccaacctgaggaactgctcaacggagccccctcgccaccagctgtggacttaagcccagtcagtgagccagaggagcaggccaaggaggtgacagcatcagtggcgccccccaccatcccctctgctactccagctacggctccttcagctacttccccagctcaggaggaggaaatggaagaagaagaagaagaggaagaaggagaagcaggagaagcaggagaagctgagagtgagaaaggaggagaggaactgctccccccagagagtacccctattccagccaacttgtctcagaatttggaggcagcagcagccactcaagtggcagtatctgtgccaaagaggagacggaaaattaaggagctaaataagaaggaggctgttggagaccttctggatgccttcaaggaggcgaacccggcagtaccagaggtggaaaatcagcctcctgcaggcagcaatccaggcccagagtctgagggcagtggtgtgcccccacgtcctgaggaagcagatgagacctgggactcaaaggaagacaaaattcacaatgctgagaacatccagcccggggaacagaagtatgaatataagtcagatcagtggaagcctctaaacctagaggagaaaaaacgttacgaccgtgagttcctgcttggttttcagttcatctttgccagtatgcagaagccagagggattgccacatatcagtgacgtggtgctggacaaggccaataaaacaccactgcggccactggatcccactagactacaaggcataaattgtggcccagacttcactccatcctttgccaaccttggccggacaacccttagcacccgtgggcccccaaggggtgggccaggtggggagctgccccgtgggccggctggcctgggaccccggcgctctcagcagggaccccgaaaagaaccacgcaagatcattgccacagtgttaatgaccgaagatataaaactgaacaaagcagagaaagcctggaaacccagcagcaagcggacggcggctgataaggatcgaggggaagaagatgctgatggcagcaaaacccaggacctattccgcagggtgcgctccatcctgaataaactgacaccccagatgttccagcagctgatgaagcaagtgacgcagctggccatcgacaccgaggaacgcctcaaaggggtcattgacctcatttttgagaaggccatttcagagcccaacttctctgtggcctatgccaacatgtgccgctgcctcatggcgctgaaagtgcccactacggaaaagccaacagtgactgtgaacttccgaaagctgttgttgaatcgatgtcagaaggagtttgagaaagacaaagatgatgatgaggtttttgagaagaagcaaaaagagatggatgaagctgctacggcagaggaacgaggacgcctgaaggaagagctggaagaggctcgggacatagcccggcggcgctctttagggaatatcaagtttattggagagttgttcaaactgaagatgttaacagaggcaataatgcatgactgtgtggtcaaactgcttaagaaccatgatgaagagtcccttgagtgcctttgtcgtctgctcaccaccattggcaaagacctggactttgaaaaagccaagccccgaatggatcagtatttcaaccagatggaaaaaatcattaaagaaaagaagacgtcatcccgcatccgctttatgctgcaggacgtgctggatctgcgagggagcaattgggtgccacgccgaggggatcagggtcccaagaccattgaccagatccataaggaggctgagatggaagaacatcgagagcacatcaaagtgcagcagctcatggccaagggcagtgacaagcgtcggggcggtcctccaggccctcccatcagccgtggacttccccttgtggatgatggtggctggaacacagttcccatcagcaaaggtagccgccccattgacacctcacgactcaccaagatcaccaagcctggctccatcgattctaacaaccagctctttgcacctggagggcgactgagctggggcaagggcagcagcggaggctcaggagccaagccctcagacgcagcatcagaagctgctcgcccagctactagtactttgaatcgcttctcagcccttcaacaagcggtacccacagaaagcacagataatagacgtgtggtgcagaggagtagcttgagccgagaacgaggcgagaaagctggagaccgaggagaccgcctagagcggagtgaacggggaggggaccgtggggaccggcttgatcgtgcgcggacacctgctaccaagcggagcttcagcaaggaagtggaggagcggagtagagaacggccctcccagcctgaggggctgcgcaaggcagctagcctcacggaggatcgggaccgtgggcgggatgccgtgaagcgagaagctgccctacccccagtgagccccctgaaggcggctctctctgaggaggagttagagaagaaatccaaggctatcattgaggaatatctccatctcaatgacatgaaagaggcagtccagtgcgtgcaggagctggcctcaccctccttgctcttcatctttgtacggcatggtgtcgagtctacgctggagcgcagtgccattgctcgtgagcatatggggcagctgctgcaccagctgctctgtgctgggcatctgtctactgctcagtactaccaagggttgtatgaaatcttggaattggctgaggacatggaaattgacatcccccacgtgtggctctacctagcggaactggtaacacccattctgcaggaaggtggggtgcccatgggggagctgttcagggagattacaaagcctctgagaccgttgggcaaagctgcttccctgttgctggagatcgccaacctgagtgagcagcagatagtatccaacacgttagttcgagccctcatgacggctgtctgctattctgcaattatttttgagactcccctccgagtggacgttgcagtgctgaaagcgcgagcgaagctgctgcagaaatacctgtgtgacgagcagaaggagctacaggcgctctacgccctccaggcccttgtagtgaccttagaacagcctcccaacctgctgcggatgttctttgacgcactgtatgacgaggacgtggtgaaggaggatgccttctacagttgggagagtagcaaggaccccgctgagcagcagggcaagggtgtggcccttaaatctgtcacagccttcttcaagtggctccgtgaagcagaggaggagtctgaccacaactgagggctggtggggccggggacctggagccccatggacacacagatggcccggctagccgcctggactgcaggggggcggcagcagcggcggtggcagtgggtgcctgtagtgtgatgtgtctgaactaataaagtggctgaagaggcaggatggcttggggctgcctgggcccccctccaggatgccgccaggtgtccctctcctccccctggggcacagagatatattatatataaagtcttgaaatttggtgtgtcttggggtggggaggggcaccaacgcctgcccctggggtccttttttttattttctgaaaatcactctcgggactgccgtcctcgctgctgggggcatatgccccagcccctgtaccacccctgctgttgcctgggcagggggaagggggggcacggtgcctgtaattattaaacatgaattcaattaagctca

SEQ ID NO: 57387 - DNA, 4936 bp, Homo sapiens
ccggctgcgcctgcggagaagcggtggccgccgagcgggatctgtgcggggagccggaaatggttgtggactacgtctgtgcggctgcgtggggctcggccgcgcggactgaaggagactgaagcacttctaccctagccgggcccagcccccgagcagtgcagcctcccgagtgcagagtgcagcccctgcccgccctggcccagctgcccatgtctaccctgctggatcccaagtaatgatgatcccttcccagatctcctacccagcctcccagggggcctactacatccctggacaggggcgttccacatacgttgtcccgacacagcagtaccctgtgcagccaggagccccaggcttctatccaggtgcaagccctacagaatttgggacctacgctggcgcctactatccagcccaaggggtgcagcagtttcccactggcgtggcccccgccccagttttgatgaaccagccaccccagattgctcccaagagggagcgtaagacgatccgaattcgagatccaaaccaaggaggaaaggatatcacagaggagatcatgtctggggcccgcactgcctccacacccacccctccccagacgggaggcggtctggagcctcaagctaatggggagacgccccaggttgctgtcattgtccggccagatgaccggtcacagggagcaatcattgctgaccggccagggctgcctggcccagagcatagcccttcagaatcccagccttcgtcgccttctccgaccccatcaccatccccagtcttggaaccggggtctgagcctaatctcgcagtcctctctattcctggggacactatgacaactatacaaatgtctgtagaagaatcaacccccatctcccgtgaaactggggagccatatcgcctctctccagaacccactcctctcgccgaacccatactggaagtagaagtgacacttagcaaaccggttccagaatctgagttttcttccagtcctctccaggctcccacccctttggcatctcacacagtggaaattcatgagcctaatggcatggtcccatctgaagatctggaaccagaggtggagtcaagcccagagcttgctcctcccccagcttgcccctccgaatcccctgtgcccattgctccaactgcccaacctgaggaactgctcaacggagccccctcgccaccagctgtggacttaagcccagtcagtgagccagaggagcaggccaaggaggtgacagcatcagtggcgccccccaccatcccctctgctactccagctacggctccttcagctacttccccagctcaggaggaggaaatggaagaagaagaagaagaggaagaaggagaagcaggagaagcaggagaagctgagagtgagaaaggaggagaggaactgctccccccagagagtacccctattccagccaacttgtctcagaatttggaggcagcagcagccactcaagtggcagtatctgtgccaaagaggagacggaaaattaaggagctaaataagaaggaggctgttggagaccttctggatgccttcaaggaggcgaacccggcagtaccagaggtggaaaatcagcctcctgcaggcagcaatccaggcccagagtctgagggcagtggtgtgcccccacgtcctgaggaagcagatgagacctgggactcaaaggaagacaaaattcacaatgctgagaacatccagcccggggaacagaagtatgaatataagtcagatcagtggaagcctctaaacctagaggagaaaaaacgttacgaccgtgagttcctgcttggttttcagttcatctttgccagtatgcagaagccagagggattgccacatatcagtgacgtggtgctggacaaggccaataaaacaccactgcggccactggatcccactagactacaaggcataaattgtggcccagacttcactccatcctttgccaaccttggccggacaacccttagcacccgtgggcccccaaggggtgggccaggtggggagctgccccgtgggccggctggcctgggaccccggcgctctcagcagggaccccgaaaagaaccacgcaagatcattgccacagtgttaatgaccgaagatataaaactgaacaaagcagagaaagcctggaaacccagcagcaagcggacggcggctgataaggatcgaggggaagaagatgctgatggcagcaaaacccaggacctattccgcagggtgcgctccatcctgaataaactgacaccccagatgttccagcagctgatgaagcaagtgacgcagctggccatcgacaccgaggaacgcctcaaaggggtcattgacctcatttttgagaaggccatttcagagcccaacttctctgtggcctatgccaacatgtgccgctgcctcatggcgctgaaagtgcccactacggaaaagccaacagtgactgtgaacttccgaaagctgttgttgaatcgatgtcagaaggagtttgagaaagacaaagatgatgatgaggtttttgagaagaagcaaaaagagatggatgaagctgctacggcagaggaacgaggacgcctgaaggaagagctggaagaggctcgggacatagcccggcggcgctctttagggaatatcaagtttattggagagttgttcaaactgaagatgttaacagaggcaataatgcatgactgtgtggtcaaactgcttaagaaccatgatgaagagtcccttgagtgcctttgtcgtctgctcaccaccattggcaaagacctggactttgaaaaagccaagccccgaatggatcagtatttcaaccagatggaaaaaatcattaaagaaaagaagacgtcatcccgcatccgctttatgctgcaggacgtgctggatctgcgagggagcaattgggtgccacgccgaggggatcagggtcccaagaccattgaccagatccataaggaggctgagatggaagaacatcgagagcacatcaaagtgcagcagctcatggccaagggcagtgacaagcgtcggggcggtcctccaggccctcccatcagccgtggacttccccttgtggatgatggtggctggaacacagttcccatcagcaaaggtagccgccccattgacacctcacgactcaccaagatcaccaagcctggctccatcgattctaacaaccagctctttgcacctggagggcgactgagctggggcaagggcagcagcggaggctcaggagccaagccctcagacgcagcatcagaagctgctcgcccagctactagtactttgaatcgcttctcagcccttcaacaagcggtacccacagaaagcacagataatagacgtgtggtgcagaggagtagcttgagccgagaacgaggcgagaaagctggagaccgaggagaccgcctagagcggagtgaacggggaggggaccgtggggaccggcttgatcgtgcgcggacacctgctaccaagcggagcttcagcaaggaagtggaggagcggagtagagaacggccctcccagcctgaggggctgcgcaaggcagctagcctcacggaggatcgggaccgtgggcgggatgccgtgaagcgagaagctgccctacccccagtgagccccctgaaggcggctctctctgaggaggagttagagaagaaatccaaggctatcattgaggaatatctccatctcaatgacatgaaagaggcagtccagtgcgtgcaggagctggcctcaccctccttgctcttcatctttgtacggcatggtgtcgagtctacgctggagcgcagtgccattgctcgtgagcatatggggcagctgctgcaccagctgctctgtgctgggcatctgtctactgctcagtactaccaagggttgtatgaaatcttggaattggctgaggacatggaaattgacatcccccacgtgtggctctacctagcggaactggtaacacccattctgcaggaaggtggggtgcccatgggggagctgttcagggagattacaaagcctctgagaccgttgggcaaagctgcttccctgttgctggagatcctgggcctcctgtgcaaaagcatgggtcctaaaaaggtggggacgctgtggcgagaagccgggcttagctggaaggaatttctacctgaaggccaggacattggtgcattcgtcgctgaacagaaggtggagtataccctgggagaggagtcggaagcccctggccagagggcactcccctccgaggagctgaacaggcagctggagaagctgctgaaggagggcagcagtaaccagcgggtgttcgactggatagaggccaacctgagtgagcagcagatagtatccaacacgttagttcgagccctcatgacggctgtctgctattctgcaattatttttgagactcccctccgagtggacgttgcagtgctgaaagcgcgagcgaagctgctgcagaaatacctgtgtgacgagcagaaggagctacaggcgctctacgccctccaggcccttgtagtgaccttagaacagcctcccaacctgctgcggatgttctttgacgcactgtatgacgaggacgtggtgaaggaggatgccttctacagttgggagagtagcaaggaccccgctgagcagcagggcaagggtgtggcccttaaatctgtcacagccttcttcaagtggctccgtgaagcagaggaggagtctgaccacaactgagggctggtggggccggggacctggagccccatggacacacagatggcccggctagccgcctggactgcaggggggcggcagcagcggcggtggcagtgggtgcctgtagtgtgatgtgtctgaactaataaagtggctgaagaggcaggatggcttggg

SEQ ID NO: 57388 - DNA, 2769 bp, Homo sapiens
gtgaggtactctagaggacccgtgactgtgaacttccgaaagctgttgttgaatcgatgtcagaaggagtttgagaaagacaaagatgatgatgaggtttttgagaagaagcaaaaagagatggatgaagctgctacggcagaggaacgaggacgcctgaaggaagagctggaagaggctcgggacatagcccggcggcgctctttagggaatatcaagtttattggagagttgttcaaactgaagatgttaacagaggcaataatgcatgactgtgtggtcaaactgcttaagaaccatgatgaagagtcccttgagtgcctttgtcgtctgctcaccaccattggcaaagacctggactttgaaaaagccaagccccgaatggatcagtatttcaaccagatggaaaaaatcattaaagaaaagaagacgtcatcccgcatccgctttatgctgcaggacgtgctggatctgcgagggagcaattgggtgccacgccgaggggatcagggtcccaagaccattgaccagatccataaggaggctgagatggaagaacatcgagagcacatcaaagtgcagcagctcatggccaagggcagtgacaagcgtcggggcggtcctccaggccctcccatcagccgtggacttccccttgtggatgatggtggctggaacacagttcccatcagcaaaggtagccgccccattgacacctcacgactcaccaagatcaccaagcctggctccatcgattctaacaaccagctctttgcacctggagggcgactgagctggggcaagggcagcagcggaggctcaggagccaagccctcagacgcagcatcagaagctgctcgcccagctactagtactttgaatcgcttctcagcccttcaacaagcggtacccacagaaagcacagataatagacgtgtggtgcagaggagtagcttgagccgagaacgaggcgagaaagctggagaccgaggagaccgcctagagcggagtgaacggggaggggaccgtggggaccggcttgatcgtgcgcggacacctgctaccaagcggagcttcagcaaggaagtggaggagcggagtagagaacggccctcccagcctgaggggctgcgcaaggcagctagcctcacggaggatcgggaccgtgggcgggatgccgtgaagcgagaagctgccctacccccagtgagccccctgaaggcggctctctctgaggaggagttagagaagaaatccaaggctatcattgaggaatatctccatctcaatgacatgaaagaggcagtccagtgcgtgcaggagctggcctcaccctccttgctcttcatctttgtacggcatggtgtcgagtctacgctggagcgcagtgccattgctcgtgagcatatggggcagctgctgcaccagctgctctgtgctgggcatctgtctactgctcagtactaccaagggttgtatgaaatcttggaattggctgaggacatggaaattgacatcccccacgtgtggctctacctagcggaactggtaacacccattctgcaggaaggtggggtgcccatgggggagctgttcagggagattacaaagcctctgagaccgttgggcaaagctgcttccctgttgctggagatcctgggcctcctgtgcaaaagcatgggtcctaaaaaggtggggacgctgtggcgagaagccgggcttagctggaaggaatttctacctgaaggccaggacattggtgcattcgtcgctgaacagaaggtggagtataccctgggagaggagtcggaagcccctggccagagggcactcccctccgaggagctgaacaggcagctggagaagctgctgaaggagggcagcagtaaccagcgggtgttcgactggatagaggccaacctgagtgagcagcagatagtatccaacacgttagttcgagccctcatgacggctgtctgctattctgcaattatttttgagactcccctccgagtggacgttgcagtgctgaaagcgcgagcgaagctgctgcagaaatacctgtgtgacgagcagaaggagctacaggcgctctacgccctccaggcccttgtagtgaccttagaacagcctcccaacctgctgcggatgttctttgacgcactgtatgacgaggacgtggtgaaggaggatgccttctacagttgggagagtagcaaggaccccgctgagcagcagggcaagggtgtggcccttaaatctgtcacagccttcttcaagtggctccgtgaagcagaggaggagtctgaccacaactgagggctggtggggccggggacctggagccccatggacacacagatggcccggctagccgcctggactgcaggggggcggcagcagcggcggtggcagtgggtgcctgtagtgtgatgtgtctgaactaataaagtggctgaagaggcaggatggcttggggctgcctgggcccccctccaggatgccgccaggtgtccctctcctccccctggggcacagagatatattatatataaagtcttgaaatttggtgtgtcttggggtggggaggggcaccaacgcctgcccctggggtccttttttttattttctgaaaatcactctcgggactgccgtcctcgctgctgggggcatatgccccagcccctgtaccacccctgctgttgcctgggcagggggaagggggggcacggtgcctgtaattattaaacatgaattcaattaagctca

SEQ ID NO: 57389 - DNA, 4960 bp, Homo sapiens
ccggctgcgcctgcggagaagcggtggccgccgagcgggatctgtgcggggagccggaaatggttgtggactacgtctgtgcggctgcgtggggctcggccgcgcggactgaaggagactgaagcacttctaccctagccgggcccagcccccgagcagtgcagcctcccgagtgcagagtgcagcccctgcccgccctggcccagctgcccatgtctaccctgctggatcccaagtaatgatgatcccttcccagatctcctacccagcctcccagggggcctactacatccctggacaggggcgttccacatacgttgtcccgacacagcagtaccctgtgcagccaggagccccaggcttctatccaggtgcaagccctacagaatttgggacctacgctggcgcctactatccagcccaaggggtgcagcagtttcccactggcgtggcccccgccccagttttgatgaaccagccaccccagattgctcccaagagggagcgtaagacgatccgaattcgagatccaaaccaaggaggaaaggatatcacagaggagatcatgtctggggcccgcactgcctccacacccacccctccccagacgggaggcggtctggagcctcaagctaatggggagacgccccaggttgctgtcattgtccggccagatgaccggtcacagggagcaatcattgctgaccggccagggctgcctggcccagagcatagcccttcagaatcccagccttcgtcgccttctccgaccccatcaccatccccagtcttggaaccggggtctgagcctaatctcgcagtcctctctattcctggggacactatgacaactatacaaatgtctgtagaagaatcaacccccatctcccgtgaaactggggagccatatcgcctctctccagaacccactcctctcgccgaacccatactggaagtagaagtgacacttagcaaaccggttccagaatctgagttttcttccagtcctctccaggctcccacccctttggcatctcacacagtggaaattcatgagcctaatggcatggtcccatctgaagatctggaaccagaggtggagtcaagcccagagcttgctcctcccccagcttgcccctccgaatcccctgtgcccattgctccaactgcccaacctgaggaactgctcaacggagccccctcgccaccagctgtggacttaagcccagtcagtgagccagaggagcaggccaaggaggtgacagcatcagtggcgccccccaccatcccctctgctactccagctacggctccttcagctacttccccagctcaggaggaggaaatggaagaagaagaagaagaggaagaaggagaagcaggagaagcaggagaagctgagagtgagaaaggaggagaggaactgctccccccagagagtacccctattccagccaacttgtctcagaatttggaggcagcagcagccactcaagtggcagtatctgtgccaaagaggagacggaaaattaaggagctaaataagaaggaggctgttggagaccttctggatgccttcaaggaggcgaacccggcagtaccagaggtggaaaatcagcctcctgcaggcagcaatccaggcccagagtctgagggcagtggtgtgcccccacgtcctgaggaagcagatgagacctgggactcaaaggaagacaaaattcacaatgctgagaacatccagcccggggaacagaagtatgaatataagtcagatcagtggaagcctctaaacctagaggagaaaaaacgttacgaccgtgagttcctgcttggttttcagttcatctttgccagtatgcagaagccagagggattgccacatatcagtgacgtggtgctggacaaggccaataaaacaccactgcggccactggatcccactagactacaaggcataaattgtggcccagacttcactccatcctttgccaaccttggccggacaacccttagcacccgtgggcccccaaggggtgggccaggtggggagctgccccgtgggccggctggcctgggaccccggcgctctcagcagggaccccgaaaagaaccacgcaagatcattgccacagtgttaatgaccgaagatataaaactgaacaaagcagagaaagcctggaaacccagcagcaagcggacggcggctgataaggatcgaggggaagaagatgctgatggcagcaaaacccaggacctattccgcagggtgcgctccatcctgaataaactgacaccccagatgttccagcagctgatgaagcaagtgacgcagctggccatcgacaccgaggaacgcctcaaaggggtcattgacctcatttttgagaaggccatttcagagcccaacttctctgtggcctatgccaacatgtgccgctgcctcatggcgctgaaagtgcccactacggaaaagccaacagtgactgtgaacttccgaaagctgttgttgaatcgatgtcagaaggagtttgagaaagacaaagatgatgatgaggtttttgagaagaagcaaaaagagatggatgaagctgctacggcagaggaacgaggacgcctgaaggaagagctggaagaggctcgggacatagcccggcggcgctctttagggaatatcaagtttattggagagttgttcaaactgaagatgttaacagaggcaataatgcatgactgtgtggtcaaactgcttaagaaccatgatgaagagtcccttgagtgcctttgtcgtctgctcaccaccattggcaaagacctggactttgaaaaagccaagccccgaatggatcagtatttcaaccagatggaaaaaatcattaaagaaaagaagacgtcatcccgcatccgctttatgctgcaggacgtgctggatctgcgagggagcaattgggtgccacgccgaggggatcagggtcccaagaccattgaccagatccataaggaggctgagatggaagaacatcgagagcacatcaaagtgcagcagctcatggccaagggcagtgacaagcgtcggggcggtcctccaggccctcccatcagccgtggacttccccttgtggatgatggtggctggaacacagttcccatcagcaaaggtagccgccccattgacacctcacgactcaccaagatcaccaagcctggctccatcgattctaacaaccagctctttgcacctggagggcgactgagctggggcaagggcagcagcggaggctcaggagccaagccctcagacgcagcatcagaagctgctcgcccagctactagtactttgaatcgcttctcagcccttcaacaagcggtacccacagaaagcacagataatagacgtgtggtgcagaggagtagcttgagccgagaacgaggcgagaaagctggagaccgaggagaccgcctagagcggagtgaacggggaggggaccgtggggaccggcttgatcgtgcgcggacacctgctaccaagcggagcttcagcaaggaagtggaggagcggagtagagaacggccctcccagcctgaggggctgcgcaaggcagctagcctcacggaggatcgggaccgtgggcgggatgccgtgaagcgagaagctgccctacccccagtgagccccctgaaggcggctctctctgaggaggagttagagaagaaatccaaggctatcattgaggaatatctccatctcaatgacatgaaagaggcagtccagtgcgtgcaggagctggcctcaccctccttgctcttcatctttgtacggcatggtgtcgagtctacgctggagcgcagtgccattgctcgtgagcatatggggcagctgctgcaccagctgctctgtgctgggcatctgtctactgctcagtactaccaagggttgtatgaaatcttggaattggctgaggacatggaaattgacatcccccacgtgtggctctacctagcggaactggtaacacccattctgcaggaaggtggggtgcccatgggggagctgttcagggagattacaaagcctctgagaccgttgggcaaagctgcttccctgttgctggagatcctgggcctcctgtgcaaaagcatgggtcctaaaaaggtggggacgctgtggcgagaagccgggcttagctggaaggaatttctacctgaaggccaggacattggtgcattcgtcgctgaacagaaggtggagtataccctgggagaggagtcggaagcccctggccagagggcactcccctccgaggagctgaacaggcagctggagaagctgctgaaggagggcagcagtaaccagcgggtgttcgactggatagaggccaacctgagtgagcagcagatagtatccaacacgttagttcgagccctcatgacggctgtctgctattctgcaattatttttgagactcccctccgagtggacgttgcagtgctgaaagcgcgagcgaagctgctgcagaaatacctgtgtgacgagcagaaggagctacaggcgctctacgccctccaggcccttgtagtgaccttagaacagcctcccaacctgctgcggatgttctttgacgcactgtatgacgaggacgtggtgaaggaggatgccttctacagttgggagagtagcaaggaccccgctgagcagcagggcaagggtgtggcccttaaatctgtcacagccttcttcaagtggctccgtgaagcagaggaggagtctgaccacaactgagggctggtggggccggggacctggagccccatggacacacagatggcccggctagccgcctggactgcaggggggcggcagcagcggcggtggcagtgggtgcctgtagtgtgatgtgtctgaactaataaagtggctgaagaggcaggatggcttgggtactacgttggcagtgggatcctc

SEQ ID NO: 57390 - DNA, 2426 bp, Homo sapiens
gggagatctgaaggggcggggttagagccaagccccgaatggatcagtatttcaaccagatggaaaaaatcattaaagaaaagaagacgtcatcccgcatccgctttatgctgcaggacgtgctggatctgcgagggagcaattgggtgccacgccgaggggatcagggtcccaagaccattgaccagatccataaggaggctgagatggaagaacatcgagagcacatcaaagtgcagcagctcatggccaagggcagtgacaagcgtcggggcggtcctccaggccctcccatcagccgtggacttccccttgtggatgatggtggctggaacacagttcccatcagcaaaggtagccgccccattgacacctcacgactcaccaagatcaccaagcctggctccatcgattctaacaaccagctctttgcacctggagggcgactgagctggggcaagggcagcagcggaggctcaggagccaagccctcagacgcagcatcagaagctgctcgcccagctactagtactttgaatcgcttctcagcccttcaacaagcggtacccacagaaagcacagataatagacgtgtggtgcagaggagtagcttgagccgagaacgaggcgagaaagctggagaccgaggagaccgcctagagcggagtgaacggggaggggaccgtggggaccggcttgatcgtgcgcggacacctgctaccaagcggagcttcagcaaggaagtggaggagcggagtagagaacggccctcccagcctgaggggctgcgcaaggcagctagcctcacggaggatcgggaccgtgggcgggatgccgtgaagcgagaagctgccctacccccagtgagccccctgaaggcggctctctctgaggaggagttagagaagaaatccaaggctatcattgaggaatatctccatctcaatgacatgaaagaggcagtccagtgcgtgcaggagctggcctcaccctccttgctcttcatctttgtacggcatggtgtcgagtctacgctggagcgcagtgccattgctcgtgagcatatggggcagctgctgcaccagctgctctgtgctgggcatctgtctactgctcagtactaccaagggttgtatgaaatcttggaattggctgaggacatggaaattgacatcccccacgtgtggctctacctagcggaactggtaacacccattctgcaggaaggtggggtgcccatgggggagctgttcagggagattacaaagcctctgagaccgttgggcaaagctgcttccctgttgctggagatcctgggcctcctgtgcaaaagcatgggtcctaaaaaggtggggacgctgtggcgagaagccgggcttagctggaaggaatttctacctgaaggccaggacattggtgcattcgtcgctgaacagaaggtggagtataccctgggagaggagtcggaagcccctggccagagggcactcccctccgaggagctgaacaggcagctggagaagctgctgaaggagggcagcagtaaccagcgggtgttcgactggatagaggccaacctgagtgagcagcagatagtatccaacacgttagttcgagccctcatgacggctgtctgctattctgcaattatttttgagactcccctccgagtggacgttgcagtgctgaaagcgcgagcgaagctgctgcagaaatacctgtgtgacgagcagaaggagctacaggcgctctacgccctccaggcccttgtagtgaccttagaacagcctcccaacctgctgcggatgttctttgacgcactgtatgacgaggacgtggtgaaggaggatgccttctacagttgggagagtagcaaggaccccgctgagcagcagggcaagggtgtggcccttaaatctgtcacagccttcttcaagtggctccgtgaagcagaggaggagtctgaccacaactgagggctggtggggccggggacctggagccccatggacacacagatggcccggctagccgcctggactgcaggggggcggcagcagcggcggtggcagtgggtgcctgtagtgtgatgtgtctgaactaataaagtggctgaagaggcaggatggcttggggctgcctgggcccccctccaggatgccgccaggtgtccctctcctccccctggggcacagagatatattatatataaagtcttgaaatttggtgtgtcttggggtggggaggggcaccaacgcctgcccctggggtccttttttttattttctgaaaatcactctcgggactgccgtcctcgctgctgggggcatatgccccagcccctgtaccacccctgctgttgcctgggcagggggaagggggggcacggtgcctgtaattattaaacatgaattcaattaagctca

SEQ ID NO: 57391 - DNA, 285 bp, Homo sapiens
ctgctggtgcctcaagggctttgtggggccaagagtggactccaggctccactcacctaacttctcaaaagggatgaaaactcgctcatttctggtgatggagtagggtctgctttagtttttcattgctgctgcaacaaatgaccttaaacttgtgacttgaaacaacccaaatgtatcatcttacaattctcactgggctggaatcaagtggaaggctgccttccttcaggaagctccaagggagaatccatctcttttgtttttttacagcttctagcggca

SEQ ID NO: 57392 - DNA, 382 bp, Homo sapiens
ctttggagaattaatgccgcagttggtaaaatcattctataataatgggtaccattctgctctgtcccacatttttatgaagtctctttaaatttaaaaaggcaatgtgctttgtggttcttgagcaacttaaatacgttgctctgaatagttattgtgatgaggtaatttgtaacaacttttaggatcaatgctaattttcttaaatgtttctgtagtttcccctttattataaagtatattaggctggactcttggctgtaagtgacagaaaactcaactcagattagttaagaaacaaaagggtgttggtgacagtggtggctttcagactattgctgcaggcccacctgccatcctcttaacaccctcaacataccct

SEQ ID NO: 57393 - DNA, 395 bp, Homo sapiens
gaaaatctgtaggctgtagctaaacccaagtgcagtgacatttcagaaacttgccccgtttctaagagctggaacatttttacccagctacatgtccaagactcccttgtaactaaatgtagtcgtaatactaagtcctaactgatgggatacaagtggtagtacaagtattatgctagaaagtcttttttaaaaggaataagtctacagttattctctgccccttcctccattctgatgcctggaatgcagatggaatggctggagctctagcagtcaacttagatcacgaggatgacacaggatcaccttttagggaagactgagtgaaaactcaggaaggagcctaagttttttgtggtctatggagccactctgccagccctgaactgctt

SEQ ID NO: 57394 - DNA, 278 bp, Homo sapiens
ccgctgctccaggagccagcccccaagccaggtggacacagtacaactgcaaacacaagagcaggggccctgtctcctggagctcccggactgccctgacccccaaaggccagctcctcccttgcaccagcagtctctctgtcccctgtgagcccctacctctccgggtctcagctttcagtcttagggaaaaaaaaaaaatctgtgttcatgggctcaggcttcctgcctttagccattcagagggttggggatgaaagacctttcacattaaaaaa

SEQ ID NO: 57395 - DNA, 259 bp, Homo sapiens
  misc_feature (1)..(1): n is a, c, g, or t
  misc_feature (124)..(124): n is a, c, g, or t
  misc_feature (220)..(220): n is a, c, g, or t
ntgctcagagaggcctcctaaaaccactggatagaatttcaataaacagagggagaggaagcgtagtccaggcaggggaatgacacgcaggacagtgaggaggctgtggccatccagttgccgnctttgttgagagcccacagcgaggcagttataacgcactacacacctggtacctccatatgtgcacctgacaacaacctggaggtattattattcntttttcacacacaaggaaactgaggctcaggaaagtaat

SEQ ID NO: 57396 - DNA, 370 bp, Homo sapiens
agtggcttacaaaacacaaatttattatcttaccattctgtgagtcaaaattccaaaataggtgtcactaggctaaaatgaaggactgcatttcttcctgcaggctccaggagagatctatgtcttactcttttcggcttctaaaggctgcccacattcctcgactagtggcgtccctccttcgtctctaaacccagcaacaacaggttgagtcctcatgtcacatctttcttacctttctgtcatctcatctcgctgactgctgctgggaaaaattctccacttttaagggctatcatgattagactatgcccactagataatacaagatctcagatccttaacttccatcacatctgcaaagtcgctt

SEQ ID NO: 57397 - DNA, 297 bp, Homo sapiens
tcagggggtgctccagaaatcccgcccagtttccaaaagggtgagactgatgggctgaattgggatcctccctccccaattcgtatgttgaagtcttaagccccggaacctcagaatgtgactgtggttagagataaggtctttaaagagacaattacatttaaataaggttttagggtgggtcctaatccaataggactgatcttttttttttttttttttttttttttttgagatggagtcttgctttgtctcccaggctggagtgcagtggcacaatctcagctcactgcaacc

SEQ ID NO: 57398 - DNA, 349 bp, Homo sapiens
gtatttctttctgggtactcttcatggcctgctagagaactttactaaattatagtccagtagctggacagagctgcatgtgtattgtctaagtccacctgtgctgctggtcaagattattttgcagtgtttggtggtgttgaagaggaatactgttgtgaaggctgagtcaactgcatgacaattctcatggctcactggctgatgagttgtggcatgactagaaagctctgcttgtattcccagatgacaagtcacacctgaacagctggatactactcgcatccaatttgcttccaagttaacatattttcagaaaatatttgatttggagtacatacaaatattt

SEQ ID NO: 57399 - DNA, 428 bp, Homo sapiens
aaaaatgtctccctcctggcaaagggagatcacagagaaatttgttccttttcatcacagctccaggtgggggaataaagataccacctgaaaacttgaaactggagggtctgccatcactcattcaaggttcaaatttacatatctacatgatctaaaaaaccagaagccaagaaattaacataaagttggcccgggttggtaatgtgccatactgtctggaaaaaacaaatacggatcctctctgtaatgactcacccttagttaagccttttaaaatactcccagattttaagattgtccaatataggctcagagtcaaaaactgtaaaacatatgtgtaagggacagctaaactgacatagactcctaaggacttataggaatgatcagaaacaaattaacatttaaagagatgaaaaatgaaa

SEQ ID NO: 57400 - DNA, 651 bp, Homo sapiens
gagatggagtcttgctctgtcacccaggctagagtgcagtggcgagatctcggcttactgcaacctccgcctcctgggttcaagtgattcccctgcctcagcctcccaagtagctgggattacaggcgcctgccaccgcacccagctaatttttgtatttttagtagagacggggctttatcatcttggccaggctggcctccaactcctgaccatgtgattcacctgcctccacctcccaaagtgctggaattacaggtgtgagtcaccacacccggccggattctgttagttttctttaatgcatattgagtttctttagttttaacaggcacttatcttggttggacccaaactattcactatgtttcttgggtgacagcttgaatcttgggtggcagccattttgttaatagccaggttgctttgtgtgtattccatgcatgggtggatcaggggtcagccacatgtggggagagttggagataccctctttcctttctttccagtgggcatggtttcccagatttagtcttctggcttgcagaccggaaagactgcatttccccctcagcaccccaagctaaaggccatgaaaccatgaactcgttgtgtacagctctcctcctccaagtgtggactccccatgtg

SEQ ID NO: 57401 - DNA, 200 bp, Homo sapiens
acttcctctctcctggcatctgctataaaaataagaaggagcaaatattcttgcctctttttatcacctgatctgaaaacccattgtaactgccatgaaaataagcactggtccatgagaccaatgcccagaaaattcaggctaagattcctggaaagtgggctgtgggcattatttaaaacacacacacaaaatttacc

SEQ ID NO: 57402 - DNA, 245 bp, Homo sapiens
gttattcataccacagcatttaaaaagcaatccgcaagtgataaaaaaaaaaaaaaaaaatgatgtgacatatccattgcctgaattgctcttttgtaagccagtgttgggattatagcagaggagtagcagaaataaatatattcagacacaaacatatagatataataatatccaaccactttatatgatttagggtctcgttaaaatggttaccatttgcttctcctaaaaattatataaat

SEQ ID NO: 57403 - DNA, 377 bp, Homo sapiens
aggctgcagtcagcacagctaaagtcctggctctgctgtggccttagtgggggcccaggtccctctccagccccagtctcctccttctgtccaatgagaaagctgggatcaggggtccctgaggcccctgtccactctgcatgcctcgatggtgaagctctgttggtatggcagaggggaggctgctcaggcatctgcatttcccctgccaatctagaggatgaggaaagctctcaggaatagtaagcagaatgtttgccctggatgaataactgagctgccaattaacaaggggcagggagccttagacagaaggtaccaaatatgcctgatgctccaacattttatttgtaatatccaagacaccctcaaataaa

SEQ ID NO: 57404 - DNA, 416 bp, Homo sapiens
ttaattgcttagaaaaccaagtaatggcatccatctgatttcaaacagccctgacccataagttctttccttggctcatgtcattgtcaatctgtgacacaaaaaatatatttctataaaaagtaatgagagccagagaggacaggaaagtaaattaaagccactgcaaagctcctcaccaattttttgttgttgttctggcattaagtagttattccctttgcccttccctgccttcttccttttctctcttaaatccctccattccatacctctcttcttcactttcaaaccactcagtcagttgaaaccttggcacttaaaatatttctacaggaggaagaggaaaggggcagaagatgtctactgggatcttcatcccttcccaggcctggttctgggcattgtcaggtacc

SEQ ID NO: 57405 - DNA, 484 bp, Homo sapiens
ccgcctcggcctcccaaagtgctgggattacagccgtgatccaccgcgcccggctgtcccagaagctgttgactggaatccctgaggcccctacctgggcccacattggctgggcttcaatttcttccccaacaacctcctgctggtggccccagcccagccccttccccagcaggtcagggctcctctggggggctggtcccttcactgctctggcccaggaaactgaccccaagtcggaggcttctttgggaaccccgttctgtacccagtgagaggagagccagggccaggaggaagcgactctgagtgggagggaaatttctccacccatattgcttccctggtcctgggtcaaatggcaagttaaattagccattaaatctggggttgggcctggcacagtgggggctaaggcgggagtgttgcttgagaccaggaatttgagaccagtctgagcaacgtgacaaaaccagtctctaca

SEQ ID NO: 57406 - DNA, 377 bp, Homo sapiens
gacagaaaatcctaatgatgagcagtaagtgtcataataaagataagccaagccaaaaggcttagccaagcctggtagcttcctggaggaggtgatgtgtgaagtttgcactagtaggaggtggcatcaacaggcccatggggtgagtgttgaaagttcagaaagctggggatggagggagtttggagcattctctttctccttttcatctatctctgtccacttcctctttccctttccctgcttctcttttcccagcttcccctcagtttgccaggccctctcattccaatctctgttcccagttttggcccactgctcaccaaagctaggtccctaataactgtgggtccctatatttatagattccaaaggaa

SEQ ID NO: 57407 - DNA, 964 bp, Homo sapiens
  misc_feature (50)..(51): n is a, c, g, or t
cggaggtgctcatcgctgctgtcatggttagtttgctaaactgcgtcgtnnctgtgtcccagaacatgggcatcggcaagaacgaggacctgccctggccaccgctcaggaatgaattcaggtatttccagagagtgaccacaacctcctcagtagaaggtaaacagaatttggtgattatgggtaggaagatctggttctccattcctgagaagaatcgacctttaaagaatagaattaatttagttctcaggagggaccacaagaacctccacaaggagatcaatttcttgcaagaagtctggatgatgccttaaaacttaataaccagaattagcaaataaagtagacgtgatttggatagttggtggtagttctattttataaggaatccatgaatcactcaagcagtcttaaactatttgtcacaaggatcatacaggactttgaaagtgacacgttttttccagaaattgatttggagaaatataaatttctgccagaatacccaggtgttttctttgatgtccaggaggagaaaggcattaagtacaaatttgaagtacatgagaagaatgattaatatgaaggtgttttctggtttaagttgttccccctccctctgaaaaaagtaggtatttttaaattagaaaaaaaatacttatgttgactttaaatctacggataattatttctaagcaatgtgttcttattccccagtaacctacactatatctgataccatttatgaaacattcttgctgtaactaagtgcctccccaagaccctgactgagtccccagcatgtgctacagtgagctgccattccacaaccttcacatgtggcactcttgccagtccttgacattttcgggcttttcaaatgtcggtagtgtttattaaagatgaagatgcacatacccttccactgagcagtttcactagtgggaaataccaaaaactt

SEQ ID NO: 57408 - DNA, 4161 bp, Homo sapiens
tgagagtggaggggattcaagggggatgactccagcagagcacctcactcctttgaagagcacagaggaagatgtcagcccagtcccttcctgcagcaacaccccccacgcagaagccccctcggatcatccgcccccgccctccttctcgttccagggctgcccagtccccagggcctccccacaatggctcctctccacaagaactaccccgaaactccaatgatgcaccaaccccaatgtgcacccccatcttctgggagcccccagctgcatccctcaagccccctgctcttttgcccccctcagcttctagagccagcctcgactcccagacttccccagactcaccttccagcacccccacacctagtccagtgtcccggcgctccgcctccccagaacctgctccccggtctccagtccccccacccaagccgtctgggtcaccctgcacgcctctgctccccatggctggagtcctggctcagaatggctctgcctcagctcctggcactgtgcggaggctggctggcaggtttgaagggggtgctgaaggccgggctcaggatgcagatgccccggagccaggtctccaagcgagagcagatgtgaatggggagagagaagctcccctcaccgggagtgggtcccaggagaacggtgctccagatgctggcctggcctgccctccctgctgcccctgtgtctgccacaccacccggcctggcctggagctcagatgggtgcctgtggggggctatgaggaggtccccagggtcccccgtcgggcctccccgctgcggacctctcgctcccgcccccaccctccaagcatcggtcaccctgccgttgtcctcacatcctaccgctccactgctgagcgcaaactcctgccactcctcaagcctcccaaaccaactcgtgtcaggcaggatgccaccattttcggggaccccccacagccagatcttgatctgctttctgaagatggaatccaaacaggggacagtcctgatgaagctcctcagaatactcctccagcaactgtggaggggagggaagaggaggggctagaggtgctgaaggagcagaattgggagctgcccctgcaggatgaacctctgtaccagacctaccgagcagccgtgctgtcagaggagctgtggggggtgggtgaggatgggagtccttctccagcaaatgctggagatgcacccaccttcccacgaccccctggacctcgcaacaccctgtggcaggagcttccggctgtgcaagccagcggtcttctggataccctcagcccccaggagaggcgcatgcaggagagtcttttcgaggtggtgacgtccgaggcttcctacctgcgctccctgcggctgctgaccgacaccttcgtgctgagccaggcactccgggacacgctcaccccccgtgatcaccacacactcttctccaatgtgcagcgagtccagggagtcagcgagcggtttctagcaacgctcctgtcccgtgtgcgctcttccccccacatcagcgacttgtgtgatgtggtgcatgcccacgctgtggggcctttctcggtgtatgtggattatgtgcggaaccagcagtatcaggaggagacctacagccgcctcatggacaccaacgtgcgcttctccgccgagctgcgccggctgcagagcctccctaagtgtgagcggctcccgctgccgtccttcctgctactgcccttccagcgcatcacccggctgcgcatgctgctgcagaatatcctgcgccagacagaagaggggtccagccgtcaggagaatgcccagaaggccctgggtgctgtcagcaagatcatcgagcgttgcagcgctgaggtggggcgcatgaagcagactgaagagctgatccggctcacccaaaggctgcgcttccacaaagtcaaggccctgcccctggtctcctggtcacggcgcctggaattccagggagagctgactgagttagggtgccggagggggggcgtgctctttgcctcgcgcccccgcttcacccctctttgcctgctgctctttagcgacctgctgctcatcactcagcctaagagtgggcagcggttacaggttctggactatgcccatcgctccctggtccaggcccagcaggttccggatccatctggaccccctaccttccgcctctcccttctcagcaaccaccagggccgccccacccaccgactactccaagcttcttccctctatcagacatgcagcgctggctgggagccttcccaaccccaggcccccttccctgctccccagacaccatctatgaggactgtgactgttcccaggaactgtgttcagagtcgtctgcacctgccaagactgaaggacggagtctggagtccagggctgcccccaaacacctgcacaagacccctgaaggttggctgaaggggcttcctggggccttccctgcccagctggtgtgtgaagtcacaggggaacacgaaaggaggaggcaccttcgccagaaccagaggcttctcgaggctgttggaccttcttcaggcacccccaatgcccccccaccctaatgcaggctgaggagggggcacatgttgggagacacctaccagtgtggcacggagagaacaaagcccattcatccattggattcactgtcagtggagatactacctctcgtggcaaccatagagatcgagcttcaggacagagcagccaatgaaaacggccgcctgaacccacagcaataagaatgaatgaggatgccttgaatgtgtggccaatggagacagaggcttagtgcagagcagccaatgggtactgagctggctgagcctatggccaatgagtattcctgctatgctcagggccaaggaagacaaatctaggtcatggcagttgaaaaagggcctcattggagataaagtcgtaggataaaattgggaacaggaatgagcaggaagccaatcagccaaagaaaatggtgatctggacccaagagaccagtagtcaccctgcttgtttctgcagcaatgactggtcctgtcttttgagtctgggaaatactagtttccattcctggatgcttcctgtgccctctcaagccagttcttctcttccagaagaattcagagtatgtgtctcagaaaatctgtgtgtgtacatgtgcatgtgtagatatgtgtgtatatgtatcaggaaaggcattctgctgactgtggtgtgtgtgtggtgattgtgctcctgacccacaaatgactgagtgctccatttcttcctttaccccccatttttcctattattcgctccaagaaagatgctaagtctgagctccagaagagactgtgctgggtgtggcttggcacccaggggatgagagccctgagctttgggtctcttggaggctagggttctgtggcagttgcagggcaatgttatggagcagccaacggcctggcagaggagcccaagggactgaagatggccagtagctgggtcctgaggcccctgaagtctgcagacccttctccttgccccaaacactggcctccataattcctgcctgcagatctcccaacttgaactataatccaccagccagcctcagccttgagctttggaaccacattagatcctgcatctgggtgaagaaacgggagctgtggaccacaggccagccagtgaacctcctgggctttcttgcctttgtcctgatcctctcacagaaacactgggccaaacagtggggagagattggagagcgggtgtggctgcccaaccccatccagagcatctgcttccagatgagccagtgcctcgcatgataccagaggaggcgagggacagagacagcaaggcagacagtggctggcaggggggcccaggcccgggacgaggcctccccttcagctcaggcacagcaacttgcccaggactgacactgtcaccctgactgcaggaggcacagggactccgggagactcagagggcgaagagcactggcatttggcatgtccatgacattggagactcccctagcagggtgcctgacgtgtggggaaccctcagtaaatagtggtgcatttgtattgaggctctctgaggaagtgtgtgcttataggagcagtggtct

SEQ ID NO: 57409 - DNA, 2157 bp, Homo sapiens
  misc_feature (1534)..(1534): n is a, c, g, or t
  misc_feature (1757)..(1757): n is a, c, g, or t
ccagaatcacaggaacacacacttggaaacctcagccctgcattcctcgctccaaggggcagacaggacaggctgaaaatagcaactggttccaaaaagataaaggggatgactccagcagagcacctcactcctttgaagagcacagaggaagatgtcagcccagtcccttcctgcagcaacaccccccacgcagaagccccctcggatcatccgcccccgccctccttctcgttccagggctgcccagtccccagggcctccccacaatggctcctctccacaagaactaccccgaaactccaatgatgcaccaaccccaatgtgcacccccatcttctgggagcccccagctgcatccctcaagccccctgctcttttgcccccctcagcttctagagccagcctcgactcccagacttccccagactcaccttccagcacccccacacctagtccagtgtcccggcgctccgcctccccagaacctgctccccggtctccagtccccccacccaagccgtctgggtcaccctgcacgcctctgctccccatggctggagtcctggctcagaatggctctgcctcagctcctggcactgtgcggaggctggctggcaggtttgaagggggtgctgaaggccgggctcaggatgcagatgccccggagccaggtctccaagcgagagcagatgtgaatggggagagagaagctcccctcaccgggagtgggtcccaggagaacggtgctccaggtgagtgtggcgggtggggggcgctgggtgacctcaatccacccatcttctccgttttcagtgctaacaactttcaggggctaccttttcaaaaatggagttaatgtttgggatatctggtttctgtatgtcgggatttgaagggagtcagggtggaggagatctatagatgcctggaccttgatattgcagttgctgggcaggttaaagatggagatggtctgggcgggggtggagctgggccccaagggctttctccttaggctacctgtctcccacagatgctggcctggcctgccctccctgctgcccctgtgtctgccacaccacccggcctggcctggagctcagatgggtgcctgtggggggctatgaggaggtccccagggtcccccgtcgggcctccccgctgcggacctctcgctcccgcccccaccctccaagcatcggtcaccctgccgttgtcctcacatcctaccgctccactgctgagcgcaaactcctgccactcctcaagcctcccaaaccaactcgtgtcaggcaggatgccaccattttcggggaccccccacagccagatcttgatctgctttctgaagatggaatccaaacaggtgcagggcctgggggagtggacctctgggctgtgaggggacaggagagaggcaggggggaactaaagcccagcaaactacaatccccaacaggcactgggctctttgcttccccaccagctgctgctctggtgctgaagagagttgcagtttttatagtaaccntccctgctggggctggagtcgggagtcctggctggggatcctggagtttttttttctcttcactctggcttctctctccaggggacagtcctgatgaagctcctcagaatactcctccagcaactgtggaggggaggtactgaacacccccacccctactccctggttctctccccaccatgcttctacctgagggcagactaaccttcagctccagctaaancccacctccacaaaggtgaggggacaagggccagggctctagagataagcagcccttgtttcgaatcccagctctggcccttatcaattctgtgatcttatagaaggccgggcacggtggcttacatctgtaatcccagcactctgggaggccgcggcagaaggatcacctgaagtcaggagttcaagatcagcctggctaacgtggtgaaaccctgtctctactaaaaatacaaaaattagccgggcatggtgacgggtgcctgtaatcccagctactcgggaggctgaggcaggagaatggcttggacccagggagatggaggttgcagggagccaagagcgtgccactgcactccagcctggtcgacaagagagaaactccatctcaaaaaaaaaaa

SEQ ID NO: 57410 - DNA, 804 bp, Homo sapiens
tccacctgcctcggtcacccagaatgctggcattacaggcgtgagccactgcacccggcctaagacactctcttctatagcaaagcagagagtcctttctaaccaggtctcccaatatggggatctttagagcactggggttgggctgcatgggtcaggcataggggaggagggcccagggtcctagcttcccacggtgaactgggcttcccacgactgcctgcttttctttctagagtcttttcgaggtggtgacgtccgaggcttcctacctgcgctccctgcggctgctgaccgacacttctcaaagctctagcattataggtgtgagctactgagcccagtgaatgaggggatctttatgtgaagagttcccaactagattatcagtgtctttatgatcttattcagctttatctatccccattgtagacaacaaaataataataatgatactaatcaaaatagctcaacagctattaagctttctaggaatggttctaagtgctatacacctgtgtaaccttacctgcaactatgtgagggtaggaactattacttgtcctactttagacatgagaaagctaaggcacaggtcacataacttgcctcaggtcatacagaaataattgatggagacaaaattgtaatctaagcactcttagctactctgctatattgcctgcactaacagttttggttaataattattaaaataataggaaccttcggggcaggcacggtggctcatgcctgtaatcccagcactttgggaggccgaggcgggtggatcatctgaggtca

SEQ ID NO: 57411 - DNA, 692 bp, Homo sapiens
  misc_feature (380)..(380): n is a, c, g, or t
ctcaaaaaaaaataaaaatctgtagcctccccgctgcggacctctcgctcccgcccccaccctccaagcatcggtcaccctgccgttgtcctcacatcctaccgctccactgctgagcgcaaactcctgccactcctcaagcctcccaaaccaactcgtgtcaggcaggatgccaccattttcggggaccccccacagccagatcttgatctgctttctgaagatggaatccaaacaggggacagtcctgatgaagctcctcagaatactcctccagcaactgtggaggggaggtactgaacacccccacccctactccctggttctctccccaccatgcttctacctgagggcagactaaccttcagctccagctaaancccacctccacaaagaaggccgggcacggtggcttacatctgtaatcccagcactctgggaggccgcggcagaaggatcacctgaagtcaggagttcaagatcagcctggctaacgtggtgaaaccctgtctctactaaaaatacaaaaattagccgggcatggtgacgggtgcctgtaatcccagctactcgggaggctgaggcaggagaatggcttggacccagggagatggaggttgcagggagccaagagcgtgccactgcactccagcctggtcgacaagagagaaactccatctcaaaaaaaaaaa

SEQ ID NO: 57412 - DNA, 381 bp, Homo sapiens
gtccagcgggacccctgctgtccttctgaacgacctcatccctgggcagtgggcagcggttacaggttctggactatgcccatcgctccctggtccaggcccagcaggttccggatccatctggaccccctaccttccgcctctcccttctcagcaaccaccagggccgccccacccaccgactactccaagcttcttccctgtgagttgtgtttccctcagaaaacaaccttgggacacttatctgacctctcagacctcccccacttccccagtctctctcttctgtggctcctgcctcagccccagaggatcttttgggccaactgtgacacttcctatatctacgcgaacattttgttgctaaagtttgtgtttcag

SEQ ID NO: 57413 - DNA, 4662 bp, Homo sapiens
ccagaatcacaggaacacacacttggaaacctcagccctgcattcctcgctccaaggggcagacaggacaggctgaaaatagcaactggttccaaaaagataaaggggatgactccagcagagcacctcactcctttgaagagcacagaggaagatgtcagcccagtcccttcctgcagcaacaccccccacgcagaagccccctcggatcatccgcccccgccctccttctcgttccagggctgcccagtccccagggcctccccacaatggctcctctccacaagaactaccccgaaactccaatgatgcaccaaccccaatgtgcacccccatcttctgggagcccccagctgcatccctcaagccccctgctcttttgcccccctcagcttctagagccagcctcgactcccagacttccccagactcaccttccagcacccccacacctagtccagtgtcccggcgctccgcctccccagaacctgctccccggtctccagtccccccacccaagccgtctgggtcaccctgcacgcctctgctccccatggctggagtcctggctcagaatggctctgcctcagctcctggcactgtgcggaggctggctggcaggtttgaagggggtgctgaaggccgggctcaggatgcagatgccccggagccaggtctccaagcgagagcagatgtgaatggggagagagaagctcccctcaccgggagtgggtcccaggagaacggtgctccaggtgagtgtggcgggtggggggcgctgggtgacctcaatccacccatcttctccgttttcagtgctaacaactttcaggggctaccttttcaaaaatggagttaatgtttgggatatctggtttctgtatgtcgggatttgaagggagtcagggtggaggagatctatagatgcctggaccttgatattgcagttgctgggcaggttaaagatggagatggtctgggcgggggtggagctgggccccaagggctttctccttaggctacctgtctcccacagatgctggcctggcctgccctccctgctgcccctgtgtctgccacaccacccggcctggcctggagctcagatgggtgcctgtggggggctatgaggaggtccccagggtcccccgtcgggcctccccgctgcggacctctcgctcccgcccccaccctccaagcatcggtcaccctgccgttgtcctcacatcctaccgctccactgctgagcgcaaactcctgccactcctcaagcctcccaaaccaactcgtgtcaggcaggatgccaccattttcggggaccccccacagccagatcttgatctgctttctgaagatggaatccaaacaggggacagtcctgatgaagctcctcagaatactcctccagcaactgtggaggggagggaagaggaggggctagaggtgctgaaggagcagaattgggagctgcccctgcaggatgaacctctgtaccagacctaccgagcagccgtgctgtcagaggagctgtggggggtgggtgaggatgggagtccttctccagcaaatgctggagatgcacccaccttcccacgaccccctggacctcgcaacaccctgtggcaggagcttccggctgtgcaagccagcggtcttctggataccctcagcccccaggagaggcgcatgcaggagagtcttttcgaggtggtgacgtccgaggcttcctacctgcgctccctgcggctgctgaccgacaccttcgtgctgagccaggcactccgggacacgctcaccccccgtgatcaccacacactcttctccaatgtgcagcgagtccagggagtcagcgagcggtttctagcaacgctcctgtcccgtgtgcgctcttccccccacatcagcgacttgtgtgatgtggtgcatgcccacgctgtggggcctttctcggtgtatgtggattatgtgcggaaccagcagtatcaggaggagacctacagccgcctcatggacaccaacgtgcgcttctccgccgagctgcgccggctgcagagcctccctaagtgtgagcggctcccgctgccgtccttcctgctactgcccttccagcgcatcacccggctgcgcatgctgctgcagaatatcctgcgccagacagaagaggggtccagccgtcaggagaatgcccagaaggccctgggtgctgtcagcaagatcatcgagcgttgcagcgctgaggtggggcgcatgaagcagactgaagagctgatccggctcacccaaaggctgcgcttccacaaagtcaaggccctgcccctggtctcctggtcacggcgcctggaattccagggagagctgactgagttagggtgccggagggggggcgtgctctttgcctcgcgcccccgcttcacccctctttgcctgctgctctttagcgacctgctgctcatcactcagcctaagagtgggcagcggttacaggttctggactatgcccatcgctccctggtccaggcccagcaggttccggatccatctggaccccctaccttccgcctctcccttctcagcaaccaccagggccgccccacccaccgactactccaagcttcttccctgtgagttgtgtttccctcagaaaacaaccttgggacacttatctgacctctcagacctcccccacttccccagtctctctcttctgtggctcctgcctcagccccagaggatcttttgggccaactgtgacacttccctatcagacatgcagcgctggctgggagccttcccaaccccaggcccccttccctgctccccagacaccatctatgaggactgtgactgttcccaggaactgtgttcagagtcgtctgcacctgccaagactgaaggacggagtctggagtccagggctgcccccaaacacctgcacaagacccctgaaggttggctgaaggggcttcctggggccttccctgcccagctggtgtgtgaagtcacaggggaacacgaaaggaggaggcaccttcgccagaaccagaggcttctcgaggctgttggaccttcttcaggcacccccaatgcccccccaccctaatgcaggctgaggagggggcacatgttgggagacacctaccagtgtggcacggagagaacaaagcccattcatccattggattcactgtcagtggagatactacctctcgtggcaaccatagagatcgagcttcaggacagagcagccaatgaaaacggccgcctgaacccacagcaataagaatgaatgaggatgccttgaatgtgtggccaatggagacagaggcttagtgcagagcagccaatgggtactgagctggctgagcctatggccaatgagtattcctgctatgctcagggccaaggaagacaaatctaggtcatggcagttgaaaaagggcctcattggagataaagtcgtaggataaaattgggaacaggaatgagcaggaagccaatcagccaaagaaaatggtgatctggacccaagagaccagtagtcaccctgcttgtttctgcagcaatgactggtcctgtcttttgagtctgggaaatactagtttccattcctggatgcttcctgtgccctctcaagccagttcttctcttccagaagaattcagagtatgtgtctcagaaaatctgtgtgtgtacatgtgcatgtgtagatatgtgtgtatatgtatcaggaaaggcattctgctgactgtggtgtgtgtgtggtgattgtgctcctgacccacaaatgactgagtgctccatttcttcctttaccccccatttttcctattattcgctccaagaaagatgctaagtctgagctccagaagagactgtgctgggtgtggcttggcacccaggggatgagagccctgagctttgggtctcttggaggctagggttctgtggcagttgcagggcaatgttatggagcagccaacggcctggcagaggagcccaagggactgaagatggccagtagctgggtcctgaggcccctgaagtctgcagacccttctccttgccccaaacactggcctccataattcctgcctgcagatctcccaacttgaactataatccaccagccagcctcagccttgagctttggaaccacattagatcctgcatctgggtgaagaaacgggagctgtggaccacaggccagccagtgaacctcctgggctttcttgcctttgtcctgatcctctcacagaaacactgggccaaacagtggggagagattggagagcgggtgtggctgcccaaccccatccagagcatctgcttccagatgagccagtgcctcgcatgataccagaggaggcgagggacagagacagcaaggcagacagtggctggcaggggggcccaggcccgggacgaggcctccccttcagctcaggcacagcaacttgcccaggactgacactgtcaccctgactgcaggaggcacagggactccgggagactcagagggcgaagagcactggcatttggcatgtccatgacattggagactcccctagcagggtgcctgacgtgtggggaaccctcagtaaatagtggtgcatttgtattgaggctctctgaggaagtgtgtgcttataggagcagtggtct

SEQ ID NO: 57414 - DNA, 547 bp, Homo sapiens
ctactactactaaattaacggccggtcgactttggaaccacattagatcctgcatctgggtgaagaaacgggagctgtggaccacaggccagccagtgaacctcctgggctttcttgcctttgtcctgatcctctcacagaaacactgggccaaacagtggggagagattggagagcgggtgtggctgcccaaccccatccagagcatctgcttccagatgagccagtgcctcgcatgataccagaggaggcgagggacagagacagcaaggcagacagtggctggcaggggggcccaggcccgggacgaggcctccccttcagctcaggcacagcaacttgcccaggactgacactgtcaccctgactgcaggaggcacagggactccgggagactcagagggcgaagagcactggcatttggcatgtccatgacattggagactcccctagcagggtgcctgacgtgtggggaaccctcagtaaatagtggtgcatttgtattgaggctctctgaggaagtgtgtgcttataggagcagtggtct

SEQ ID NO: 57415 - DNA, 4592 bp, Homo sapiens
ccagaatcacaggaacacacacttggaaacctcagccctgcattcctcgctccaaggggcagacaggacaggctgaaaatagcaactggttccaaaaagataaaggggatgactccagcagagcacctcactcctttgaagagcacagaggaagatgtcagcccagtcccttcctgcagcaacaccccccacgcagaagccccctcggatcatccgcccccgccctccttctcgttccagggctgcccagtccccagggcctccccacaatggctcctctccacaagaactaccccgaaactccaatgatgcaccaaccccaatgtgcacccccatcttctgggagcccccagctgcatccctcaagccccctgctcttttgcccccctcagcttctagagccagcctcgactcccagacttccccagactcaccttccagcacccccacacctagtccagtgtcccggcgctccgcctccccagaacctgctccccggtctccagtccccccacccaagccgtctgggtcaccctgcacgcctctgctccccatggctggagtcctggctcagaatggctctgcctcagctcctggcactgtgcggaggctggctggcaggtttgaagggggtgctgaaggccgggctcaggatgcagatgccccggagccaggtctccaagcgagagcagatgtgaatggggagagagaagctcccctcaccgggagtgggtcccaggagaacggtgctccaggtgagtgtggcgggtggggggcgctgggtgacctcaatccacccatcttctccgttttcagtgctaacaactttcaggggctaccttttcaaaaatggagttaatgtttgggatatctggtttctgtatgtcgggatttgaagggagtcagggtggaggagatctatagatgcctggaccttgatattgcagttgctgggcaggttaaagatggagatggtctgggcgggggtggagctgggccccaagggctttctccttaggctacctgtctcccacagatgctggcctggcctgccctccctgctgcccctgtgtctgccacaccacccggcctggcctggagctcagatgggtgcctgtggggggctatgaggaggtccccagggtcccccgtcgggcctccccgctgcggacctctcgctcccgcccccaccctccaagcatcggtcaccctgccgttgtcctcacatcctaccgctccactgctgagcgcaaactcctgccactcctcaagcctcccaaaccaactcgtgtcaggcaggatgccaccattttcggggaccccccacagccagatcttgatctgctttctgaagatggaatccaaacaggggacagtcctgatgaagctcctcagaatactcctccagcaactgtggaggggagggaagaggaggggctagaggtgctgaaggagcagaattgggagctgcccctgcaggatgaacctctgtaccagacctaccgagcagccgtgctgtcagaggagctgtggggggtgggtgaggatgggagtccttctccagcaaatgctggagatgcacccaccttcccacgaccccctggacctcgcaacaccctgtggcaggagcttccggctgtgcaagccagcggtcttctggataccctcagcccccaggagaggcgcatgcaggagagtcttttcgaggtggtgacgtccgaggcttcctacctgcgctccctgcggctgctgaccgacaccttcgtgctgagccaggcactccgggacacgctcaccccccgtgatcaccacacactcttctccaatgtgcagcgagtccagggagtcagcgagcggtttctagcaacgctcctgtcccgtgtgcgctcttccccccacatcagcgacttgtgtgatgtggtgcatgcccacgctgtggggcctttctcggtgtatgtggattatgtgcggaaccagcagtatcaggaggagacctacagccgcctcatggacaccaacgtgcgcttctccgccgagctgcgccggctgcagagcctccctaagtgtgagcggctcccgctgccgtccttcctgctactgcccttccagcgcatcacccggctgcgcatgctgctgcagaatatcctgcgccagacagaagaggggtccagccgtcaggagaatgcccagaaggccctgggtgctgtcagcaagatcatcgagcgttgcagcgctgaggtggggcgcatgaagcagactgaagagctgatccggctcacccaaaggctgcgcttccacaaagtcaaggccctgcccctggtctcctggtcacggcgcctggaattccagggagagctgactgagttagggtgccggagggggggcgtgctctttgcctcgcgcccccgcttcacccctctttgcctgctgctctttagcgacctgctgctcatcactcagcctaagagtgggcagcggttacaggttctggactatgcccatcgctccctggtccaggcccagcaggttccggatccatctggaccccctaccttccgcctctcccttctcagcaaccaccagggccgccccacccaccgactactccaagcttcttccctgtgagttgtgtttccctcagaaaacaaccttgggacacttatctgacctctcagacctcccccacttccccagtctctctcttctgtggctcctgcctcagccccagaggatcttttgggccaactgtgacacttccctatcagacatgcagcgctggctgggagccttcccaaccccaggcccccttccctgctccccagacaccatctatgaggactgtgactgttcccaggaactgtgttcagagtcgtctgcacctgccaagactgaaggacggagtctggagtccagggctgcccccaaacacctgcacaagacccctgaaggttggctgaaggggcttcctggggccttccctgcccagctggtgtgtgaagtcacaggggaacacgaaaggaggaggcaccttcgccagaaccagaggcttctcgaggctgttggaccttcttcaggcacccccaatgcccccccaccctaatgcaggctgaggagggggcacatgttgggagacacctaccagtgtggcacggagagaacaaagcccattcatccattggattcactgtcagtggagatactacctctcgtggcaaccatagagatcgagcttcaggacagagcagccaatgaaaacggccgcctgaacccacagcaataagaatgaatgaggatgccttgaatgtgtggccaatggagacagaggcttagtgcagagcagccaatgggtactgagctggctgagcctatggccaatgagtattcctgctatgctcagggccaaggaagacaaatctaggtcatggcagttgaaaaagggcctcattggagataaagtcgtaggataaaattgggaacaggaatgagcaggaagccaatcagccaaagaaaatggtgatctggacccaagagaccagtagtcaccctgcttgtttctgcagcaatgactggtcctgtcttttgagtctgggaaatactagtttccattcctggatgcttcctgtgccctctcaagccagttcttctcttccagaagaattcagagtatgtgtctcagaaaatctgtgtgtgtacatgtgcatgtgtagatatgtgtgtatatgtatcaggaaaggcattctgctgactgtggtgtgtgtgtggtgattgtgctcctgacccacaaatgactgagtgctccatttcttcctttaccccccatttttcctattattcgctccaagaaagatgctaagtctgagctccagaagagactgtgctgggtgtggcttggcacccaggggatgagagccctgagctttgggtctcttggaggctagggttctgtggcagttgcagggcaatgttatggagcagccaacggcctggcagaggagcccaagggactgaagatggccagtagctgggtcctgaggcccctgaagtctgcagacccttctccttgccccaaacactggcctccataattcctgcctgcagatctcccaacttgaactataatccaccagccagcctcagccttgagctttggaaccacattagatcctgcatctgggtgaagaaacgggagctgtggaccacaggccagccagtgaacctcctgggctttcttgcctttgtcctgatcctctcatctgcttccagatgagccagtgcctcgcatgataccagaggaggcgagggacagagacagcaaggcagacagtggctggcaggggggcccaggcccgggacgaggcctccccttcagctcaggcacagcaacttgcccaggactgacactgtcaccctgactgcaggaggcacagggactccgggagactcagagggcgaagagcactggcatttggcatgtccatgacattggagactcccctagcagggtgcctgacgtgtggggaaccctcagtaaatagtggtgcatttgtattgaggctctctgaggaagtgtgtgcttataggagcagtggtct

SEQ ID NO: 57416 - DNA, 1594 bp, Homo sapiens
ccagaatcacaggaacacacacttggaaacctcagccctgcattcctcgctccaaggggcagacaggacaggctgaaaatagcaactggttccaaaaagataaaggggatgactccagcagagcacctcactcctttgaagagcacagaggaagatgtcagcccagtcccttcctgcagcaacaccccccagcctagaatgtcctcccttcggaatcatctcagtaccggagacactcctgttcatcagtaaccatggtggtgtccgaggtacacacattgggggtccctacagaagtgatatcatttatcagacagaggacgctagtaatccagaataataccaaatagaatgcaccaaccactcaaactgatcgcatagccacgcctagtccgataaccatgagagacagcacgccacaaagcactgaaatcactcaatagaaaagaacacacaacgttacccacaagtaacaggataacaacaacagataaagagatataattagaaagaacacacagcagtagaaaaagaaacaagcacaaacaacaaagacagagagaaatcaaaagcagaggaggacgcctggcaggcgcgaacatagaaacacggggcacagagcgcgcgggaggaggagaccgtaccagggatcatgacccgatgcaggagggagacgatacaccatgtcgacagcagcagacaagcggaccgcgaccgcaccgtgacggcacaacagccagcgctgccgcggcagaggaggggcagcgcaacgtaacccgcgcattgacgacgtgtagtgcggcgccggcgcgacaggcccgacaacctccacagaggaacgatccaggacgcagatatagacgggcacgccggcctcacccaacccagcgagggagcacaggagcaccacacctagagccgaaccccagacaggccacctacaccaacgatcacagagcgagacggcccagagacaggcacgccgacccagaccaccccgaccaaccgagcccaacagccacagaccgaaccgccatgtagccgaccctccagacaccacgcccgcgcgacagacaccgcaccacacaagcaccacagaacgaatgagcacaaagccatgccacaccaagacacgacataccagcaagacgaagacgacaggagtaagctgcaccaggcaacagatatcagataatgcctacgacaaacacgacggacaggaaccggagacagcagcacgaaagcggtcaccataggacctgagcacgaggcggagcgacgaacgcaccgacacaagcagcgaaagcactgcggcgacggagagcagaggtcactcgacaccgagcgagcgacaacgcagcacacaacgaccaccagcgcacgacagacgccagacacccacaaacccacaaacagacagaacgagcgacagacccagacggacgacgacagcagcgcacacgcaaagagacaggacggagacaacacgcgacaccgcgacgcaccagagacacgggaggcagacaggggaagcaagagcgacaagccgacacagcacagagcgaccggcgacaaacgacccaagcaacgcgcg

SEQ ID NO: 57417 - DNA, 489 bp, Homo sapiens
gtggccctggggacttccttccctttctttctccacagggaagaggaggggctagaggtgctgaaggagcagaattgggagctgcccctgcaggatgaacctctgtaccagacctaccgagcagccgtgctgtcagaggagctgtggggggtgggtgaggatgggagtccttctccagcaaatgctggagatgcacccaccttcccacgaccccctggacctcgcaacaccctgtggcaggagcttccggctgtgcaagccagcggtcttctggataccctcagcccccaggagaggcgcatgcaggagagtcttttcgaggtggtgacgtccgaggcttcctacctgcgctccctgcggctgctgaccgacaccttcgtgctgagccaggcactccgggacacgctcaccccccgtgatcaccacacactcttctccaatgtgcagcgagtccagggagtcagcgagcggtcagtggctttccgtcct

SEQ ID NO: 57418 - DNA, 4636 bp, Homo sapiens
ccagaatcacaggaacacacacttggaaacctcagccctgcattcctcgctccaaggggcagacaggacaggctgaaaatagcaactggttccaaaaagataaaggggatgactccagcagagcacctcactcctttgaagagcacagaggaagatgtcagcccagtcccttcctgcagcaacaccccccacgcagaagccccctcggatcatccgcccccgccctccttctcgttccagggctgcccagtccccagggcctccccacaatggctcctctccacaagaactaccccgaaactccaatgatgcaccaaccccaatgtgcacccccatcttctgggagcccccagctgcatccctcaagccccctgctcttttgcccccctcagcttctagagccagcctcgactcccagacttccccagactcaccttccagcacccccacacctagtccagtgtcccggcgctccgcctccccagaacctgctccccggtctccagtccccccacccaagccgtctgggtcaccctgcacgcctctgctccccatggctggagtcctggctcagaatggctctgcctcagctcctggcactgtgcggaggctggctggcaggtttgaagggggtgctgaaggccgggctcaggatgcagatgccccggagccaggtctccaagcgagagcagatgtgaatggggagagagaagctcccctcaccgggagtgggtcccaggagaacggtgctccaggtgagtgtggcgggtggggggcgctgggtgacctcaatccacccatcttctccgttttcagtgctaacaactttcaggggctaccttttcaaaaatggagttaatgtttgggatatctggtttctgtatgtcgggatttgaagggagtcagggtggaggagatctatagatgcctggaccttgatattgcagttgctgggcaggttaaagatggagatggtctgggcgggggtggagctgggccccaagggctttctccttaggctacctgtctcccacagatgctggcctggcctgccctccctgctgcccctgtgtctgccacaccacccggcctggcctggagctcagatgggtgcctgtggggggctatgaggaggtccccagggtcccccgtcgggcctccccgctgcggacctctcgctcccgcccccaccctccaagcatcggtcaccctgccgttgtcctcacatcctaccgctccactgctgagcgcaaactcctgccactcctcaagcctcccaaaccaactcgtgtcaggcaggatgccaccattttcggggaccccccacagccagatcttgatctgctttctgaagatggaatccaaacaggggacagtcctgatgaagctcctcagaatactcctccagcaactgtggaggggagggaagaggaggggctagaggtgctgaaggagcagaattgggagctgcccctgcaggatgaacctctgtaccagacctaccgagcagccgtgctgtcagaggagctgtggggggtgggtgaggatgggagtccttctccagcaaatgctggagatgcacccaccttcccacgaccccctggacctcgcaacaccctgtggcaggagcttccggctgtgcaagccagcggtcttctggataccctcagcccccaggagaggcgcatgcaggagagtcttttcgaggtggtgacgtccgaggcttcctacctgcgctccctgcggctgctgaccgacaccttcgtgctgagccaggcactccgggacacgctcaccccccgtgatcaccacacactcttctccaatgtgcagcgagtccagggagtcagcgagcggtttctagcaacgctcctgtcccgtgtgcgctcttccccccacatcagcgacttgtgtgatgtggtgcatgcccacgctgtggggcctttctcggtgtatgtggattatgtgcggaaccagcagtatcaggaggagacctacagccgcctcatggacaccaacgtgcgcttctccgccgagctgcgccggctgcagagcctccctaagtgtgagcggctcccgctgccgtccttcctgctactgcccttccagcgcatcacccggctgcgcatgctgctgcagaatatcctgcgccagacagaagaggggtccagccgtcaggagaatgcccagaaggccctgggtgctgtcagcaagatcatcgagcgttgcagcgctgaggtggggcgcatgaagcagactgaagagctgatccggctcacccaaaggctgcgcttccacaaagtcaaggccctgcccctggtctcctggtcacggcgcctggaattccagggagagctgactgagttagggtgccggagggggggcgtgctctttgcctcgcgcccccgcttcacccctctttgcctgctgctctttagcgacctgctgctcatcactcagcctaagagtgggcagcggttacaggttctggactatgcccatcgctccctggtccaggcccagcaggttccggatccatctggaccccctaccttccgcctctcccttctcagcaaccaccagggccgccccacccaccgactactccaagcttcttccctgtgagttgtgtttccctcagaaaacaaccttgggacacttatctgacctctcagacctcccccacttccccagtctctctcttctgtggctcctgcctcagccccagaggatcttttgggccaactgtgacacttccctatcagacatgcagcgctggctgggagccttcccaaccccaggcccccttccctgctccccagacaccatctatgaggactgtgactgttcccaggaactgtgttcagagtcgtctgcacctgccaagactgaaggacggagtctggagtccagggctgcccccaaacacctgcacaagacccctgaaggttggctgaaggggcttcctggggccttccctgcccagctggtgtgtgaagtcacaggggaacacgaaaggaggaggcaccttcgccagaaccagaggcttctcgaggctgttggaccttcttcaggcacccccaatgcccccccaccctaatgcaggctgaggagggggcacatgttgggagacacctaccagtgtggcacggagagaacaaagcccattcatccattggattcactgtcagtggagatactacctctcgtggcaaccatagagatcgagcttcaggacagagcagccaatgaaaacggccgcctgaacccacagcaataagaatgaatgaggatgccttgaatgtgtggccaatggagacagaggcttagtgcagagcagccaatgggtactgagctggctgagcctatggccaatgagtattcctgctatgctcagggccaaggaagacaaatctaggtcatggcagttgaaaaagggcctcattggagataaagtcgtaggataaaattgggaacaggaatgagcaggaagccaatcagccaaagaaaatggtgatctggacccaagagaccagtagtcaccctgcttgtttctgcagcaatgactggtcctgtcttttgagtctgggaaatactagtttccattcctggatgcttcctgtgccctctcaagccagttcttctcttccagaagaattcagagtatgtgtctcagaaaatctgtgtgtgtacatgtgcatgtgtagatatgtgtgtatatgtatcaggaaaggcattctgctgactgtggtgtgtgtgtggtgatttgctccatttcttcctttaccccccatttttcctattattcgctccaagaaagatgctaagtctgagctccagaagagactgtgctgggtgtggcttggcacccaggggatgagagccctgagctttgggtctcttggaggctagggttctgtggcagttgcagggcaatgttatggagcagccaacggcctggcagaggagcccaagggactgaagatggccagtagctgggtcctgaggcccctgaagtctgcagacccttctccttgccccaaacactggcctccataattcctgcctgcagatctcccaacttgaactataatccaccagccagcctcagccttgagctttggaaccacattagatcctgcatctgggtgaagaaacgggagctgtggaccacaggccagccagtgaacctcctgggctttcttgcctttgtcctgatcctctcacagaaacactgggccaaacagtggggagagattggagagcgggtgtggctgcccaaccccatccagagcatctgcttccagatgagccagtgcctcgcatgataccagaggaggcgagggacagagacagcaaggcagacagtggctggcaggggggcccaggcccgggacgaggcctccccttcagctcaggcacagcaacttgcccaggactgacactgtcaccctgactgcaggaggcacagggactccgggagactcagagggcgaagagcactggcatttggcatgtccatgacattggagactcccctagcagggtgcctgacgtgtggggaaccctcagtaaatagtggtgcatttgtattgaggctctctgaggaagtgtgtgcttataggagcagtggtct

SEQ ID NO: 57419 - DNA, 4617 bp, Homo sapiens
ccagaatcacaggaacacacacttggaaacctcagccctgcattcctcgctccaaggggcagacaggacaggctgaaaatagcaactggttccaaaaagataaaggggatgactccagcagagcacctcactcctttgaagagcacagaggaagatgtcagcccagtcccttcctgcagcaacaccccccacgcagaagccccctcggatcatccgcccccgccctccttctcgttccagggctgcccagtccccagggcctccccacaatggctcctctccacaagaactaccccgaaactccaatgatgcaccaaccccaatgtgcacccccatcttctgggagcccccagctgcatccctcaagccccctgctcttttgcccccctcagcttctagagccagcctcgactcccagacttccccagactcaccttccagcacccccacacctagtccagtgtcccggcgctccgcctccccagaacctgctccccggtctccagtccccccacccaagccgtctgggtcaccctgcacgcctctgctccccatggctggagtcctggctcagaatggctctgcctcagctcctggcactgtgcggaggctggctggcaggtttgaagggggtgctgaaggccgggctcaggatgcagatgccccggagccaggtctccaagcgagagcagatgtgaatggggagagagaagctcccctcaccgggagtgggtcccaggagaacggtgctccaggtgagtgtggcgggtggggggcgctgggtgacctcaatccacccatcttctccgttttcagtgctaacaactttcaggggctaccttttcaaaaatggagttaatgtttgggatatctggtttctgtatgtcgggatttgaagggagtcagggtggaggagatctatagatgcctggaccttgatattgcagttgctgggcaggttaaagatggagatggtctgggcgggggtggagctgggccccaagggctttctccttaggctacctgtctcccacagatgctggcctggcctgccctccctgctgcccctgtgtctgccacaccacccggcctggcctggagctcagatgggtgcctgtggggggctatgaggaggtccccagggtcccccgtcgggcctccccgctgcggacctctcgctcccgcccccaccctccaagcatcggtcaccctgccgttgtcctcacatcctaccgctccactgctgagcgcaaactcctgccactcctcaagcctcccaaaccaactcgtgtcaggcaggatgccaccattttcggggaccccccacagccagatcttgatctgctttctgaagatggaatccaaacaggggacagtcctgatgaagctcctcagaatactcctccagcaactgtggaggggagggaagaggaggggctagaggtgctgaaggagcagaattgggagctgcccctgcaggatgaacctctgtaccagacctaccgagcagccgtgctgtcagaggagctgtggggggtgggtgaggatgggagtccttctccagcaaatgctggagatgcacccaccttcccacgaccccctggacctcgcaacaccctgtggcaggagcttccggctgtgcaagccagcggtcttctggataccctcagcccccaggagaggcgcatgcaggagagtcttttcgaggtggtgacgtccgaggcttcctacctgcgctccctgcggctgctgaccgacaccttcgtgctgagccaggcactccgggacacgctcaccccccgtgatcaccacacactcttctccaatgtgcagcgagtccagggagtcagcgagcggtttctagcaacgctcctgtcccgtgtgcgctcttccccccacatcagcgacttgtgtgatgtggtgcatgcccacgctgtggggcctttctcggtgtatgtggattatgtgcggaaccagcagtatcaggaggagacctacagccgcctcatggacaccaacgtgcgcttctccgccgagctgcgccggctgcagagcctccctaagtgtgagcggctcccgctgccgtccttcctgctactgcccttccagcgcatcacccggctgcgcatgctgctgcagaatatcctgcgccagacagaagaggggtccagccgtcaggagaatgcccagaaggccctgggtgctgtcagcaagatcatcgagcgttgcagcgctgaggtggggcgcatgaagcagactgaagagctgatccggctcacccaaaggctgcgcttccacaaagtcaaggccctgcccctggtctcctggtcacggcgcctggaattccagggagagctgactgagttagggtgccggagggggggcgtgctctttgcctcgcgcccccgcttcacccctctttgcctgctgctctttagcgacctgctgctcatcactcagcctaagagtgggcagcggttacaggttctggactatgcccatcgctccctggtccaggcccagcaggttccggatccatctggaccccctaccttccgcctctcccttctcagcaaccaccagggccgccccacccaccgactactccaagcttcttccctgtgagttgtgtttccctcagaaaacaaccttgggacacttatctgacctctcagacctcccccacttccccagtctctctcttctgtggctcctgcctcagccccagaggatcttttgggccaactgtgacacttccctatcagacatgcagcgctggctgggagccttcccaaccccaggcccccttccctgctccccagacaccatctatgaggactgtgactgttcccaggaactgtgttcagagtcgtctgcacctgccaagactgaaggacggagtctggagtccagggctgcccccaaacacctgcacaagacccctgaaggttggctgaaggggcttcctggggccttccctgcccagctggtgtgtgaagtcacaggggaacacgaaaggaggaggcaccttcgccagaaccagaggcttctcgaggctgttggaccttcttcaggcacccccaatgcccccccaccctaatgcaggctgaggagggggcacatgttgggagacacctaccagtgtggcacggagagaacaaagcccattcatccattggattcactgtcagtggagatactacctctcgtggcaaccatagagatcgagcttcaggacagagcagccaatgaaaacggccgcctgaacccacagcaataagaatgaatgaggatgccttgaatgtgtggccaatggagacagaggcttagtgcagagcagccaatgggtactgagctggctgagcctatggccaatgagtattcctgctatgctcagggccaaggaagacaaatctaggtcatggcagttgaaaaagggcctcattggagataaagtcgtaggataaaattgggaacaggaatgagcaggaagccaatcagccaaagaaaatggtgatctggacccaagagaccagtagtcaccctgcttgtttctgcagcaatgactggtcctgtcttttgagtctgggaaatactagtttccattcctggatgcttcctgtgccctctcaagccagttcttctcttccagaagaattcagagtatgtgtctcagaaaatctgtgtgtgtacatgtgcatgtgtagatatgtgtgtatatgtatcaggaaaggcattctgctgactgtggtgtgtgtgtggtgattgtgctcctgacccacaaatgactgagtgctccatttcttcctttaccccccatttttcctattattcgctccaagaaagatgctaagtctgagctccagaagagactgtgctgggtgtggcttggcacccaggggatgagagccctgagctttgggtctcttggaggctagggttctgtggcagttgcagggcaatgttatggagcagccaacggcctggcagaggagcccaagggactgaagatggccagtagctgggtcctgaggcccctgaagtctgcagacccttctccttgccccaaacactggcctccataattcctgcctgcagatctcccaacttgaactataatccaccagccagcctcagccttgagctttggaaccacattagatcctgcatctgggtgaagaaacgggagctgtggaccacaggccagccagtgaacctcctgggctttcttgcctttgtcctgatcctctcacagaaacactgggccaaacagtggggagagattggagagcgggtgtggctgcccaaccccatccagagcatctgcttccagatgagccagtgcctcgcatgataccagaggaggcgagggacagagacagcaaggcagacagtggctggcaggggggcccaggcccgggacgaggcctccccttcagctcaggcacagcaacttgcccaggactgacactgtcaccctgactgcaggaggcacagggactccgggagactcagagggcgaagagcaccactatttactgaggttccccacacgtcagacaccctgctaggggagtccccaatgtcatgggactgccaaatgccagtgctcttcgg

SEQ ID NO: 57420 - DNA, 4741 bp, Homo sapiens
cgcggagaagcttgggtacctgagccgcggtcccgggtgacaccctcagtgacgccaggcgcgttccttcctcttcctctctcctctccggccccgccttcccttccctccgcccacctccctgaagcggagccgccgtcgccaccagcgccgtcatgtcggcccccgccgggtcctctcacccggccgccagcgcccggatcccgcccaagttcggcggatcggccgtctcaggagccgcagcgcccgcgggcccgggtgcgggcccggcgccgcaccagcagaacggtccagcccagaatcaaatgcaggttccatctggatatggattgcatcatcaaaactatattgctccctcaggacattactctcaaggacctgggaaaatgacctcattgccattggatacccagtgtggtgattactactctgctctctatacagtaccaacacaaaatgtgactcctaacacagtgaaccagcaaccaggagcacagcagttgtacagcaggggtcctcctgcccctcatattgtgggatccactctaggatctttccaaggtgctgcatcgtcagcatcccatttgcatacgagtgcctcccaaccatactcctcttttgtgaatcactacaatagtccagccatgtactctgccagctcttctgttgcgtctcagggatttccctctacttgtggtcattatgctatgtcaactgtttctaatgccgcgtatcctagtgtttcatatccctctctgcctgctggtgatacatatgggcaaatgtttacctcacagaatgctccgactgttaggccagttaaagataattcattctctggtcaaaatacagctatcagccatccatcgccacttccacctctaccatcacaacagcaccaccagcagcaaagtctttcaggatacagtactctaacgtggtcatctccaggccttccatcgactcaagacaatctcatccgaaaccacacaggatccctggctgtagcgaacaacaacccaaccattactgttgcagattctttatcctgtcctgttatgcaaaatgttcagcctcccaagtccagcccagtggtatccactgttttatcaggatcctcaggatcctcatcaacaagaacacctcccactgcaaatcacccagttgagcctgtgacctcagttacacagccatcagagctattacaacaaaaaggcgtgcagtatggtgaatatgttaataaccaagctagctccgcaccaactcccttgtcatcaacttccgatgatgaggaagaggaggaggaggatgaggaagcaggtgttgacagctcttctaccacaagcagtgcttctccaatgcccaacagttatgatgccctggaaggaggcagttacccagatatgctttcttcatcagcaagcagtcctgctcctgatcccgcccctgaacctgatcctgcttctgctccagctccagcttcagctccagctcctgtcgtccctcagccttcaaaaatggctaagccttttggctatggctatccaacacttcagcctggttatcagaatgctacagcaccacttatttctggagtacagcccagtaacccggtatattctggattccagcagtatcctcaacagtatcctggtgtgaaccagctatcctccagtataggaggattgagtcttcagagttctccacaaccagaaagcctgagacctgtaaaccttactcaggagaggaatattttacctatgactcctgtttgggctcctgtacctaacttgaatgcagacctcaaaaaattaaactgtagcccagattcatttcggtgtactttgacaaatattccacagacacaggctttactgaataaagctaagcttcctttaggattgttgttacatcccttcagagacctaacgcaattaccagtgataacatcaaataccattgtgaggtgccgatcctgtcgaacgtatattaacccctttgtatccttcattgatcaacgtagatggaaatgcaatttgtgctatagagtaaacgatgttcctgaagaatttatgtataacccccttacccgatcttatggagagcctcataaacgaccagaagttcagaattcaactgtggagttcattgcttcttcagattacatgctgcgtcctcctcaacctgcagtttacttgtttgttttagatgtgtctcataatgcagtggaagctggatatttgacaattttgtgccagtcactcctagaaaatctagacaagcttcctggagattcacgaacaagaataggattcatgacctttgatagcactattcatttctacaatttacaagaaggattatcacagcctcaaatgttgattgtgtctgatatagatgatgtttttctacctacaccggatagtttacttgtgaatctatatgaaagtaaagagcttataaaagacttactgaatgcattaccaaacatgttcaccaatacaagagaaacacacagtgcccttggtcctgcacttcaggctgcctttaaattaatgtctccaacaggtggccgtgtgtctgtatttcagacacagttaccttccttgggtgcaggacttctgcaatccagagaagatcctaatcagagatcaagtacaaaggtggtacaacatcttggccctgcaactgatttttataagaaacttgcattagattgctcgggacagcaaactgcagtggatttgttccttttaagttcacagtattctgatcttgcttctctagcttgcatgtccaagtattctgcagggtgcatctattattatccatcattccactatactcacaatccttcacaagcagaaaagttacaaaaagacctaaaacggtatctcacaagaaaaattgggtttgaagctgttatgagaataaggtgtactaaaggtctttcaatgcacacttttcacggtaacttctttgtccgttctactgatttgttatcccttgccaacatcaatcctgatgctggatttgcggtgcagttgtcaattgaagaaagtttaacagatacttccttagtatgttttcaaacagccctattatatacatcaagcaaaggtgagcggagaattagagtacatacactttgtttgccagtggtaagttcactagcagatgtatatgcgggagtggatgtacaagctgccatctgccttctggcaaacatggctgtggatcggtccgtttcatcaagtctgtcagatgcaagagatgccttagtgaatgctgtagtggactcattgtctgcatatggctcaactgtctcaaatttacagcactctgcattgatggcgcccagctccctcaagttgtttcctctctatgttttggcccttctcaaacagaaagcatttagaacgggtacaagcacacggctggatgatcgtgtatatgccatgtgtcagataaagtctcagccacttgttcatctaatgaaaatgattcatcccaacttatacaggatagacagattgacagatgagggtgcagtacatgttaatgacaggattgtaccacagccacctcttcaaaaattgtctgcagagaagctgacaagagaaggtgctttccttatggactgtggctctgttttttacatttgggttgggaaaggctgtgacaataacttcatagaggatgtgcttggatatactaattttgcatcaataccacagaaaatgacacatcttccagagctagatacactttcatcagaaagagccagatccttcataacttggcttagagacagcagaccattaagtccaatccttcacatagtaaaagatgagagtcctgccaaagcagaattttttcagcatttgattgaagaccggacagaggctgcattttcttactatgaatttttgcttcatgttcagcagcagatttgtaagtgaagtagaataaaattgaataagaaaaagatctataacctaggtaaagcataatctgtcagagaagcgcgtgagaaatttgaaatgaaggcatttgttaatacaagatgcaacgcacagcactctgtctgaggctttggtaaaaagtaaaggggaagaaagaacttgacagatctttttcaactcaaattaatggtaacgatgatgctgtttcaccaagtatattttgaattggtttctacacatttccagtagtatggcagtacagtgctctgttcattgcaagctggcaaatttatgtagctatgtggaatgatatgtcataatgtaaaattagataaattcttttttcttataattaatataacatttctggacttgaactctggcaagagatgccaaaaggcattggtaccgtgttatttgtttatatgaattactttttaacaaggaatgtttcttattcattaaatgaattcaacattttctctgtaaaaacaatagagtttcagtacatgaactatagaaaaaaatctatatataatgtacataaatgttacatttgtaaagaaaatgtaaaaatgtaactatagcatatgaattgcttaaactgtgctgcattgttggatgacaactctttttgtcacagttagagaatgaggttgactaatgcatattatgaattgagtccacaaaggaacacaaaactctttgtaattctgttaaatcttttatgtagatttatttatgatcagcctactaattaaaactatttcgcttga

SEQ ID NO: 57421 - DNA, 582 bp, Homo sapiens
tcccccttcatttcacagggctctagaagaaacataaagccgccacacaatactggtgacatgctaatcgttgtttatgttttattgacttaccaagaaaaatatagtcagttaaaatgtcagtgacatacttgtcattgcacatattttattgacttatccagaaaaatataaacagatttttcaacagtttaaattttatttgtgtagttgctgctgttgaggctaagaaatagagtgctggcagttgggggtgatggtaggaatcatgattttgttctattactgctgaagtctatgagaaaggaaagtttcctaattgtatttcttttaccagacacatcttccagagctagatacactttcatcagaaagagccagatccttcataacttggcttagagacagcagaccattaagtccaatccttcacatagtaaagtaagtacttttgtaacttaattatgaagttgtctttcctatgtagtctgtggaattgcttgtcttcaaagcaaactttaaatagtagcaaaatatattctgatggtaaaatgttgttacttgatttaaatcccctgtatt

SEQ ID NO: 57422 - DNA, 991 bp, Homo sapiens
tgggaggctgaggcaggagaatcacttgaacctaggagacagaagttgcagtgagctgtgatcacaccattgcactccagcctaagagacagagcaagactccgtctcaaaaaaaaaaaaaagaaagaaagaaagaaaaaaagtatttgacatgtttgctttgctttatttcctttttgatctaatgtattttcaatgactttttttttaggtgagcggagaattagagtacatacactttgtttgccagtggtaagttcactagcagatgtatatgcgggagtggatgtacaagctgccatctgccttctggcaaacatgggtgagtaaaaattgaaggaacatgtgaaatgtatttttctatcttaaaaactgaagcttggctggtggcagtgcgtccgcctgtaatcccagcattttgggaggctgaggcggacggaccacgaggtcaggagtttgagaccaggctggccaacatggtgaaaccccatctctactaaaaatacgaaaaaatagccgagcgtggtggcaggcgcctgtaatcgcagcttctcaggagactgagacaggagaattgcttgaacctgagaggcggacgttgcagtgagccgagaccgcatcactccaatcactccactccagcttgggcaacagagtgagactctgtctcaaaaaaaaaaagaaagaaagaaactgaagctaggattttctcttatttaaaaagcatatgttttacatttttatttactgcattgtgaatcagactgtcctcacatttcttccttaatcttactttcaaaatctttgagggaattcataatctctaaaaatgtggtaaaaactgaaatgtccttcaaataatatatgcacaatccatggtacactcatacaatagaatataatgcagcaataaaaaggaatgaactgtcaatacttaaacaaacatggatgcctctcaaagacattgtgctgaataaaagaagctagactc

SEQ ID NO: 57423 - DNA, 249 bp, Homo sapiens
tcagcggaccttacgcgcatcttcacatagtaaagatgagagtcctgccaaagcagaattttttcagcatttgattgaagaccggacagaggctgcattttcttactatgaatttttgcttcatgttcagcagcagatttgtaagtgaagtagaataaaattgaataagaaaaagatctataacctaggtaaagcataatctgtcagagaagcgcgtaagggccagcagacgcgcgtaagggccagcag

SEQ ID NO: 57424 - DNA, 3573 bp, Homo sapiens
tcatcggtacctgtttgagcctgctgagcagagctattacaacaaaagcgtgcagtatggtgaatatgttaataaccaagctagctccgcaccaactcccttgtcatcaacttccgatgatgaggaagaggaggaggaggatgaggaagcaggtgttgacagctcttctaccacaagcagtgcttctccaatgcccaacagttatgatgccctggaaggaggcagttacccagatatgctttcttcatcagcaagcagtcctgctcctgatcccgcccctgaacctgatcctgcttctgctccagctccagcttcagctccagctcctgtcgtccctcagccttcaaaaatggctaagccttttggctatggctatccaacacttcagcctggttatcagaatgctacagcaccacttatttctggagtacagcccagtaacccggtatattctggattccagcagtatcctcaacagtatcctggtgtgaaccagctatcctccagtataggaggattgagtcttcagagttctccacaaccagaaagcctgagacctgtaaaccttactcaggagaggaatattttacctatgactcctgtttgggctcctgtacctaacttgaatgcagacctcaaaaaattaaactgtagcccagattcatttcggtgtactttgacaaatattccacagacacaggctttactgaataaagctaagcttcctttaggattgttgttacatcccttcagagacctaacgcaattaccagtgataacatcaaataccattgtgaggtgccgatcctgtcgaacgtatattaacccctttgtatccttcattgatcaacgtagatggaaatgcaatttgtgctatagagtaaacgatgttcctgaagaatttatgtataacccccttacccgatcttatggagagcctcataaacgaccagaagttcagaattcaactgtggagttcattgcttcttcagattacatgctgcgtcctcctcaacctgcagtttacttgtttgttttagatgtgtctcataatgcagtggaagctggatatttgacaattttgtgccagtcactcctagaaaatctagacaagcttcctggagattcacgaacaagaataggattcatgacctttgatagcactattcatttctacaatttacaagaaggattatcacagcctcaaatgttgattgtgtctgatatagatgatgtttttctacctacaccggatagtttacttgtgaatctatatgaaagtaaagagcttataaaagacttactgaatgcattaccaaacatgttcaccaatacaagagaaacacacagtgcccttggtcctgcacttcaggctgcctttaaattaatgtctccaacaggtggccgtgtgtctgtatttcagacacagttaccttccttgggtgcaggacttctgcaatccagagaagatcctaatcagagatcaagtacaaaggtggtacaacatcttggccctgcaactgatttttataagaaacttgcattagattgctcgggacagcaaactgcagtggatttgttccttttaagttcacagtattctgatcttgcttctctagcttgcatgtccaagtattctgcagggtgcatctattattatccatcattccactatactcacaatccttcacaagcagaaaagttacaaaaagacctaaaacggtatctcacaagaaaaattgggtttgaagctgttatgagaataaggtgtactaaaggtctttcaatgcacacttttcacggtaacttctttgtccgttctactgatttgttatcccttgccaacatcaatcctgatgctggatttgcggtgcagttgtcaattgaagaaagtttaacagatacttccttagtatgttttcaaacagccctattatatacatcaagcaaaggtgagcggagaattagagtacatacactttgtttgccagtggtaagttcactagcagatgtatatgcgggagtggatgtacaagctgccatctgccttctggcaaacatggctgtggatcggtccgtttcatcaagtctgtcagatgcaagagatgccttagtgaatgctgtagtggactcattgtctgcatatggctcaactgtctcaaatttacagcactctgcattgatggcgcccagctccctcaagttgtttcctctctatgttttggcccttctcaaacagaaagcatttagaacgggtacaagcacacggctggatgatcgtgtatatgccatgtgtcagataaagtctcagccacttgttcatctaatgaaaatgattcatcccaacttatacaggatagacagattgacagatgagggtgcagtacatgttaatgacaggattgtaccacagccacctcttcaaaaattgtctgcagagaagctgacaagagaaggtgctttccttatggactgtggctctgttttttacatttgggttgggaaaggctgtgacaataacttcatagaggatgtgcttggatatactaattttgcatcaataccacagaaaatgacacatcttccagagctagatacactttcatcagaaagagccagatccttcataacttggcttagagacagcagaccattaagtccaatccttcacatagtaaaagatgagagtcctgccaaagcagaattttttcagcatttgattgaagaccggacagaggctgcattttcttactatgaatttttgcttcatgttcagcagcagatttgtaagtgaagtagaataaaattgaataagaaaaagatctataacctaggtaaagcataatctgtcagagaagcgcgtgagaaatttgaaatgaaggcatttgttaatacaagatgcaacgcacagcactctgtctgaggctttggtaaaaagtaaaggggaagaaagaacttgacagatctttttcaactcaaattaatggtaacgatgatgctgtttcaccaagtatattttgaattggtttctacacatttccagtagtatggcagtacagtgctctgttcattgcaagctggcaaatttatgtagctatgtggaatgatatgtcataatgtaaaattagataaattcttttttcttataattaatataacatttctggacttgaactctggcaagagatgccaaaaggcattggtaccgtgttatttgtttatatgaattactttttaacaaggaatgtttcttattcattaaatgaattcaacattttctctgtaaaaacaatagagtttcagtacatgaactatagaaaaaaatctatatataatgtacataaatgttacatttgtaaagaaaatgtaaaaatgtaactatagcatatgaattgcttaaactgtgctgcattgttggatgacaactctttttgtcacagttagagaatgaggttgactaatgcatattatgaattgagtccacaaaggaacacaaaactctttgtaattctgttaaatcttttatgtagatttatttatgatcagcctactaattaaaactatttcgcttga

SEQ ID NO: 57425 - DNA, 2338 bp, Homo sapiens
aaaattgaggctgtgataactacttctagttaaatctaatataaagtaaagagcttataaaagacttactgaatgcattaccaaacatgttcaccaatacaagagaaacacacagtgcccttggtcctgcacttcaggctgcctttaaattaatgtctccaacaggtggccgtgtgtctgtatttcagacacagttaccttccttgggtgcaggacttctgcaatccagagaagatcctaatcagagatcaagtacaaaggtggtacaacatcttggccctgcaactgatttttataagaaacttgcattagattgctcgggacagcaaactgcagtggatttgttccttttaagttcacagtattctgatcttgcttctctagcttgcatgtccaagtattctgcagggtgcatctattattatccatcattccactatactcacaatccttcacaagcagaaaagttacaaaaagacctaaaacggtatctcacaagaaaaattgggtttgaagctgttatgagaataaggtgtactaaaggtctttcaatgcacacttttcacggtaacttctttgtccgttctactgatttgttatcccttgccaacatcaatcctgatgctggatttgcggtgcagttgtcaattgaagaaagtttaacagatacttccttagtatgttttcaaacagccctattatatacatcaagcaaaggtgagcggagaattagagtacatacactttgtttgccagtggtaagttcactagcagatgtatatgcgggagtggatgtacaagctgccatctgccttctggcaaacatggctgtggatcggtccgtttcatcaagtctgtcagatgcaagagatgccttagtgaatgctgtagtggactcattgtctgcatatggctcaactgtctcaaatttacagcactctgcattgatggcgcccagctccctcaagttgtttcctctctatgttttggcccttctcaaacagaaagcatttagaacgggtacaagcacacggctggatgatcgtgtatatgccatgtgtcagataaagtctcagccacttgttcatctaatgaaaatgattcatcccaacttatacaggatagacagattgacagatgagggtgcagtacatgttaatgacaggattgtaccacagccacctcttcaaaaattgtctgcagagaagctgacaagagaaggtgctttccttatggactgtggctctgttttttacatttgggttgggaaaggctgtgacaataacttcatagaggatgtgcttggatatactaattttgcatcaataccacagaaaatgacacatcttccagagctagatacactttcatcagaaagagccagatccttcataacttggcttagagacagcagaccattaagtccaatccttcacatagtaaaagatgagagtcctgccaaagcagaattttttcagcatttgattgaagaccggacagaggctgcattttcttactatgaatttttgcttcatgttcagcagcagatttgtaagtgaagtagaataaaattgaataagaaaaagatctataacctaggtaaagcataatctgtcagagaagcgcgtgagaaatttgaaatgaaggcatttgttaatacaagatgcaacgcacagcactctgtctgaggctttggtaaaaagtaaaggggaagaaagaacttgacagatctttttcaactcaaattaatggtaacgatgatgctgtttcaccaagtatattttgaattggtttctacacatttccagtagtatggcagtacagtgctctgttcattgcaagctggcaaatttatgtagctatgtggaatgatatgtcataatgtaaaattagataaattcttttttcttataattaatataacatttctggacttgaactctggcaagagatgccaaaaggcattggtaccgtgttatttgtttatatgaattactttttaacaaggaatgtttcttattcattaaatgaattcaacattttctctgtaaaaacaatagagtttcagtacatgaactatagaaaaaaatctatatataatgtacataaatgttacatttgtaaagaaaatgtaaaaatgtaactatagcatatgaattgcttaaactgtgctgcattgttggatgacaactctttttgtcacagttagagaatgaggttgactaatgcatattatgaattgagtccacaaaggaacacaaaactctttgtaattctgttaaatcttttatgtagatttatttatgatcagcctactaattaaaactatttcgcttga

SEQ ID NO: 57426 - DNA, 1335 bp, Homo sapiens
tcccccttcatttcacagggctctagaagaaacataaagccgccacacaatactggtgacatgctaatcgttgtttatgttttattgacttaccaagaaaaatatagtcagttaaaatgtcagtgacatacttgtcattgcacatattttattgacttatccagaaaaatataaacagatttttcaacagtttaaattttatttgtgtagttgctgctgttgaggctaagaaatagagtgctggcagttgggggtgatggtaggaatcatgattttgttctattactgctgaagtctatgagaaaggaaagtttcctaattgtatttcttttaccagacacatcttccagagctagatacactttcatcagaaagagccagatccttcataacttggcttagagacagcagaccattaagtccaatccttcacatagtaaaagatgagagtcctgccaaagcagaattttttcagcatttgattgaagaccggacagaggctgcattttcttactatgaatttttgcttcatgttcagcagcagatttgtaagtgaagtagaataaaattgaataagaaaaagatctataacctaggtaaagcataatctgtcagagaagcgcgtgagaaatttgaaatgaaggcatttgttaatacaagatgcaacgcacagcactctgtctgaggctttggtaaaaagtaaaggggaagaaagaacttgacagatctttttcaactcaaattaatggtaacgatgatgctgtttcaccaagtatattttgaattggtttctacacatttccagtagtatggcagtacagtgctctgttcattgcaagctggcaaatttatgtagctatgtggaatgatatgtcataatgtaaaattagataaattcttttttcttataattaatataacatttctggacttgaactctggcaagagatgccaaaaggcattggtaccgtgttatttgtttatatgaattactttttaacaaggaatgtttcttattcattaaatgaattcaacattttctctgtaaaaacaatagagtttcagtacatgaactatagaaaaaaatctatatataatgtacataaatgttacatttgtaaagaaaatgtaaaaatgtaactatagcatatgaattgcttaaactgtgctgcattgttggatgacaactctttttgtcacagttagagaatgaggttgactaatgcatattatgaattgagtccacaaaggaacacaaaactctttgtaattctgttaaatcttttatgtagatttatttatgatcagcctactaattaaaactatttcgcttga

SEQ ID NO: 57427 - DNA, 3795 bp, Homo sapiens
cgcggagaagcttgggtacctgagccgcggtcccgggtgacaccctcagtgacgccaggcgcgttccttcctcttcctctctcctctccggccccgccttcccttccctccgcccacctccctgaagcggagccgccgtcgccaccagcgccgtcatgtcggcccccgccgggtcctctcacccggccgccagcgcccggatcccgcccaagttcggcggatcggccgtctcaggagccgcagcgcccgcgggcccgggtgcgggcccggcgccgcaccagcagaacggtccagcccagaatcaaatgcaggttccatctggatatggattgcatcatcaaaactatattgctccctcaggacattactctcaaggacctgggaaaatgacctcattgccattggatacccagtgtggtgattactactctgctctctatacagtaccaacacaaaatgtgactcctaacacagtgaaccagcaaccaggagcacagcagttgtacagcaggggtcctcctgcccctcatattgtgggatccactctaggatctttccaaggtgctgcatcgtcagcatcccatttgcatacgagtgcctcccaaccatactcctcttttgtgaatcactacaatagtccagccatgtactctgccagctcttctgttgcgtctcagggatttccctctacttgtggtcattatgctatgtcaactgtttctaatgccgcgtatcctagtgtttcatatccctctctgcctgctggtgatacatatgggcaaatgtttacctcacagaatgctccgactgttaggccagttaaagataattcattctctggtcaaaatacagctatcagccatccatcgccacttccacctctaccatcacaacagcaccaccagcagcaaagtctttcaggatacagtactctaacgtggtcatctccaggccttccatcgactcaagacaatctcatccgaaaccacacaggatccctggctgtagcgaacaacaacccaaccattactgttgcagattctttatcctgtcctgttatgcaaaatgttcagcctcccaagtccagcccagtggtatccactgttttatcaggatcctcaggatcctcatcaacaagaacacctcccactgcaaatcacccagttgagcctgtgacctcagttacacagccatcagagctattacaacaaaaaggtgttgacagctcttctaccacaagcagtgcttctccaatgcccaacagttatgatgccctggaaggaggcagttacccagatatgctttcttcatcagcaagcagtcctgctcctgatcccgcccctgaacctgatcctgcttctgctccagctccagcttcagctccagctcctgtcgtccctcagccttcaaaaatggctaagccttttggctatggctatccaacacttcagcctggttatcagaatgctacagcaccacttatttctggagtacagcccagtaacccggtatattctggattccagcagtatcctcaacagtatcctggtgtgaaccagctatcctccagtataggaggattgagtcttcagagttctccacaaccagaaagcctgagacctgtaaaccttactcaggagaggaatattttacctatgactcctgtttgggctcctgtacctaacttgaatgcagacctcaaaaaattaaactgtagcccagattcatttcggtgtactttgacaaatattccacagacacaggctttactgaataaagctaagcttcctttaggattgttgttacatcccttcagagacctaacgcaattaccagtgataacatcaaataccattgtgaggtgccgatcctgtcgaacgtatattaacccctttgtatccttcattgatcaacgtagatggaaatgcaatttgtgctatagagtaaacgatgttcctgaagaatttatgtataacccccttacccgatcttatggagagcctcataaacgaccagaagttcagaattcaactgtggagttcattgcttcttcagattacatgctgcgtcctcctcaacctgcagtttacttgtttgttttagatgtgtctcataatgcagtggaagctggatatttgacaattttgtgccagtcactcctagaaaatctagacaagcttcctggagattcacgaacaagaataggattcatgacctttgatagcactattcatttctacaatttacaagaaggattatcacagcctcaaatgttgattgtgtctgatatagatgatgtttttctacctacaccggatagtttacttgtgaatctatatgaaagtaaagagcttataaaagacttactgaatgcattaccaaacatgttcaccaatacaagagaaacacacagtgcccttggtcctgcacttcaggctgcctttaaattaatgtctccaacaggtggccgtgtgtctgtatttcagacacagttaccttccttgggtgcaggacttctgcaatccagagaagatcctaatcagagatcaagtacaaaggtggtacaacatcttggccctgcaactgatttttataagaaacttgcattagattgctcgggacagcaaactgcagtggatttgttccttttaagttcacagtattctgatcttgcttctctagcttgcatgtccaagtattctgcagggtgcatctattattatccatcattccactatactcacaatccttcacaagcagaaaagttacaaaaagacctaaaacggtatctcacaagaaaaattgggtttgaagctgttatgagaataaggtgtactaaaggtctttcaatgcacacttttcacggtaacttctttgtccgttctactgatttgttatcccttgccaacatcaatcctgatgctggatttgcggtgcagttgtcaattgaagaaagtttaacagatacttccttagtatgttttcaaacagccctattatatacatcaagcaaaggtgagcggagaattagagtacatacactttgtttgccagtggtaagttcactagcagatgtatatgcgggagtggatgtacaagctgccatctgccttctggcaaacatgggtgagtaaaaattgaaggaacatgtgaaatgtatttttctatcttaaaaactgaagcttggctggtggcagtgcgtccgcctgtaatcccagcattttgggaggctgaggcggacggaccacgaggtcaggagtttgagaccaggctggccaacatggtgaaaccccatctctactaaaaatacgaaaaaatagccgagcgtggtggcaggcgcctgtaatcgcagcttctcaggagactgagacaggagaattgcttgaacctgagaggcggacgttgcagtgagccgagaccgcatcactccaatcactccactccagcttgggcaacagagtgagactctgtctcaaaaaaaaaaagaaagaaagaaactgaagctaggattttctcttatttaaaaagcatatgttttacatttttatttactgcattgtgaatcagactgtcctcacatttcttccttaatcttactttcaaaatctttgagggaattcataatctctaaaaatgtggtaaaaactgaaatgtccttcaaataatatatgcacaatccatggtacactcatacaatagaatataatgcagcaataaaaaggaatgaactgtcaatacttaaacaaacatggatgcctctcaaagacattgtgctgaataaaagaagctagactc

SEQ ID NO: 57428 - DNA, 1089 bp, Homo sapiens
  misc_feature (868)..(868): n is a, c, g, or t
  misc_feature (910)..(910): n is a, c, g, or t
  misc_feature (924)..(925): n is a, c, g, or t
  misc_feature (936)..(936): n is a, c, g, or t
  misc_feature (941)..(941): n is a, c, g, or t
  misc_feature (956)..(958): n is a, c, g, or t
  misc_feature (960)..(961): n is a, c, g, or t
  misc_feature (972)..(973): n is a, c, g, or t
  misc_feature (982)..(982): n is a, c, g, or t
  misc_feature (984)..(984): n is a, c, g, or t
  misc_feature (993)..(993): n is a, c, g, or t
cgcggagaagcttgggtacctgagccgcggtcccgggtgacaccctcagtgacgccaggcgcgttccttcctcttcctctctcctctccggccccgccttcccttccctccgcccacctccctgaagcggagccgccgtcgccaccagcgccgtcatgtcggcccccgccgggtcctctcacccggccgccagcgcccggatcccgcccaagttcggcggatcggccgtctcaggagccgcagcgcccgcgggcccgggtgcgggcccggcgccgcaccagcagaacggtccagcccagaatcaaatgcaggttccatctggatatggattgcatcatcaaaactatattgctccctcaggacattactctcaaggacctgggaaaatgacctcattgccattggatacccagtgtggtgattactactctgctctctatacagtaccaacacaaaatgtgactcctaacacagtgaaccagcaaccaggagcacagcagttgtacagcaggggtcctcctgcccctcatattgtgggatccactctaggatctttccaaggtgctgcatcgtcagcatcccatttgcatacgagtgcctcccaaccatactcctcttttgtgaatcactacaatagtccagccatgtactctgccagctcttctgttgcgtctcagggatttccctctacttgtggtcattatgctatgtcaactgtttctaatgccgcgtatcctagtgtttcatatccctctctgcctgctggtgatacatatgggcaaatgtttacctcacagaatgctccgactgttaggccagttaaagataattcattctctggtcaaaatacagctgttaacagataagnttaacttgcatctgcagtattgcatgttagggataagtgctnatctttaagagctnnggagttcttanatatnaaccatggcactttnnncnngacccttcctnngggattcangnatgagaaanttttcattgagccttttaaaattgtacgactcgtccctgggctttagtgatgggatagacaacttattaaaggcattgcattcttaaataattctt

SEQ ID NO: 57429 - DNA, 471 bp, Homo sapiens
  misc_feature (452)..(452): n is a, c, g, or t
ccatgttggtcaggctgttctcaaactcctgacctcgtgatccgcccgccgcggccgcccaaagtgctgggattgcaggcgtgagccaccgccctgatctattttttaaggagggcttaagggattgatttttaccattaaatgttcgcagaactgttgctaaacctcgtgtaaatattgataatagatatttatttttaggtgtgtatatatgtgtttagttacaaattgtgtctctaaatttgtactgggacctcttatctagttcctgaagaatttatgtataacccccttacccgatcttatggagagcctcataaacgaccagaagttcagaattcaactgtggagttcattgcttcttcagattacatggtaactattcagtgttaagatttgttatggaacacaattacattggtcatttgtaattttctgttaagtgaactctnatcgagattttgaagtcac

SEQ ID NO: 57430 - DNA, 574 bp, Homo sapiens
tcccaaagtgctgggattacaggcatgagccaccatgtccagcctggctaaatgtttttagacttaagagattaaaacaaaaatgtccaaaagaatctagacttgttctgattgtcagatttatttcagaaaaaaatgtataagaagacatttgaaatgagggagctgatgaaatgcatttttccatcctaaaaacttagctgaattttgtttcttaaataatgcgtataaattttctctcttatagtgcccattggattctaatggttaaaatacctttcactttggttgctttttagctgtggatcggtccgtttcatcaagtctgtcagatgcaagagatgccttagtgaatgctgtagtggactcattgtctgcatatggctcaactgtctcaaatttacagcactctgcattgatggcgcccagctccctcaagttgtttcctctctatgttttggcccttctcaaacaggtagctttttacacattgctatatttaagagtgttttttaaaattctcagatatgtacatgaagaaaggaaatctaggttgttttctaatacttaacta

SEQ ID NO: 57431 - DNA, 4636 bp, Homo sapiens
cgcggagaagcttgggtacctgagccgcggtcccgggtgacaccctcagtgacgccaggcgcgttccttcctcttcctctctcctctccggccccgccttcccttccctccgcccacctccctgaagcggagccgccgtcgccaccagcgccgtcatgtcggcccccgccgggtcctctcacccggccgccagcgcccggatcccgcccaagttcggcggatcggccgtctcaggagccgcagcgcccgcgggcccgggtgcgggcccggcgccgcaccagcagaacggtccagcccagaatcaaatgcaggttccatctggatatggattgcatcatcaaaactatattgctccctcaggacattactctcaaggacctgggaaaatgacctcattgccattggatacccagtgtggtgattactactctgctctctatacagtaccaacacaaaatgtgactcctaacacagtgaaccagcaaccaggagcacagcagttgtacagcaggggtcctcctgcccctcatattgtgggatccactctaggatctttccaaggtgctgcatcgtcagcatcccatttgcatacgagtgcctcccaaccatactcctcttttgtgaatcactacaatagtccagccatgtactctgccagctcttctgttgcgtctcagggatttccctctacttgtggtcattatgctatgtcaactgtttctaatgccgcgtatcctagtgtttcatatccctctctgcctgctggtgatacatatgggcaaatgtttacctcacagaatgctccgactgttaggccagttaaagataattcattctctggtcaaaatacagctatcagccatccatcgccacttccacctctaccatcacaacagcaccaccagcagcaaagtctttcaggatacagtactctaacgtggtcatctccaggccttccatcgactcaagacaatctcatccgaaaccacacaggatccctggctgtagcgaacaacaacccaaccattactgttgcagattctttatcctgtcctgttatgcaaaatgttcagcctcccaagtccagcccagtggtatccactgttttatcaggatcctcaggatcctcatcaacaagaacacctcccactgcaaatcacccagttgagcctgtgacctcagttacacagccatcagagctattacaacaaaaaggtgttgacagctcttctaccacaagcagtgcttctccaatgcccaacagttatgatgccctggaaggaggcagttacccagatatgctttcttcatcagcaagcagtcctgctcctgatcccgcccctgaacctgatcctgcttctgctccagctccagcttcagctccagctcctgtcgtccctcagccttcaaaaatggctaagccttttggctatggctatccaacacttcagcctggttatcagaatgctacagcaccacttatttctggagtacagcccagtaacccggtatattctggattccagcagtatcctcaacagtatcctggtgtgaaccagctatcctccagtataggaggattgagtcttcagagttctccacaaccagaaagcctgagacctgtaaaccttactcaggagaggaatattttacctatgactcctgtttgggctcctgtacctaacttgaatgcagacctcaaaaaattaaactgtagcccagattcatttcggtgtactttgacaaatattccacagacacaggctttactgaataaagctaagcttcctttaggattgttgttacatcccttcagagacctaacgcaattaccagtgataacatcaaataccattgtgaggtgccgatcctgtcgaacgtatattaacccctttgtatccttcattgatcaacgtagatggaaatgcaatttgtgctatagagtaaacgatgttcctgaagaatttatgtataacccccttacccgatcttatggagagcctcataaacgaccagaagttcagaattcaactgtggagttcattgcttcttcagattacatgctgcgtcctcctcaacctgcagtttacttgtttgttttagatgtgtctcataatgcagtggaagctggatatttgacaattttgtgccagtcactcctagaaaatctagacaagcttcctggagattcacgaacaagaataggattcatgacctttgatagcactattcatttctacaatttacaagaaggattatcacagcctcaaatgttgattgtgtctgatatagatgatgtttttctacctacaccggatagtttacttgtgaatctatatgaaagtaaagagcttataaaagacttactgaatgcattaccaaacatgttcaccaatacaagagaaacacacagtgcccttggtcctgcacttcaggctgcctttaaattaatgtctccaacaggtggccgtgtgtctgtatttcagacacagttaccttccttgggtgcaggacttctgcaatccagagaagatcctaatcagagatcaagtacaaaggtggtacaacatcttggccctgcaactgatttttataagaaacttgcattagattgctcgggacagcaaactgcagtggatttgttccttttaagttcacagtattctgatcttgcttctctagcttgcatgtccaagtattctgcagggtgcatctattattatccatcattccactatactcacaatccttcacaagcagaaaagttacaaaaagacctaaaacggtatctcacaagaaaaattgggtttgaagctgttatgagaataaggtgtactaaaggtctttcaatgcacacttttcacggtaacttctttgtccgttctactgatttgttatcccttgccaacatcaatcctgatgctggatttgcggtgcagttgtcaattgaagaaagtttaacagatacttccttagtatgttttcaaacagccctattatatacatcaagcaaaggtgagcggagaattagagtacatacactttgtttgccagtggtaagttcactagcagatgtatatgcgggagtggatgtacaagctgccatctgccttctggcaaacatggctgtggatcggtccgtttcatcaagtctgtcagatgcaagagatgccttagtgaatgctgtagtggactcattgtctgcatatggctcaactgtctcaaatttacagcactctgcattgatggcgcccagctccctcaagttgtttcctctctatgttttggcccttctcaaacagaaagcatttagaacgggtacaagcacacggctggatgatcgtgtatatgccatgtgtcagataaagtctcagccacttgttcatctaatgaaaatgattcatcccaacttatacaggatagacagattgacagatgagggtgcagtacatgttaatgacaggattgtaccacagccacctcttcaaaaattgtctgcagagaagctgacaagagaaggtgctttccttatggactgtggctctgttttttacatttgggttgggaaaggctgtgacaataacttcatagaggatgtgcttggatatactaattttgcatcaataccacagaaaatgacacatcttccagagctagatacactttcatcagaaagagccagatccttcataacttggcttagagacagcagaccattaagtccaatccttcacatagtaaaagatgagagtcctgccaaagcagaattttttcagcatttgattgaagaccggacagaggctgcattttcttactatgaatttttgcttcatgttcagcagcagatttgtaagtgaagtagaataaaattgaataagaaaaagatctataacctaggtaaagcataatctgtcagagaagcgcgtgagaaatttgaaatgaaggcatttgttaatacaagatgcaacgcacagcactctgtctgaggctttggtaaaaagtaaaggggaagaaagaacttgacagatctttttcaactcaaattaatggtaacgatgatgctgtttcaccaagtatattttgaattggtttctacacatttccagtagtatggcagtacagtgctctgttcattgcaagctggcaaatttatgtagctatgtggaatgatatgtcataatgtaaaattagataaattcttttttcttataattaatataacatttctggacttgaactctggcaagagatgccaaaaggcattggtaccgtgttatttgtttatatgaattactttttaacaaggaatgtttcttattcattaaatgaattcaacattttctctgtaaaaacaatagagtttcagtacatgaactatagaaaaaaatctatatataatgtacataaatgttacatttgtaaagaaaatgtaaaaatgtaactatagcatatgaattgcttaaactgtgctgcattgttggatgacaactctttttgtcacagttagagaatgaggttgactaatgcatattatgaattgagtccacaaaggaacacaaaactctttgtaattctgttaaatcttttatgtagatttatttatgatcagcctactaattaaaactatttcgcttga

SEQ ID NO: 57432 - DNA, 5385 bp, Homo sapiens
cgcggagaagcttgggtacctgagccgcggtcccgggtgacaccctcagtgacgccaggcgcgttccttcctcttcctctctcctctccggccccgccttcccttccctccgcccacctccctgaagcggagccgccgtcgccaccagcgccgtcatgtcggcccccgccgggtcctctcacccggccgccagcgcccggatcccgcccaagttcggcggatcggccgtctcaggagccgcagcgcccgcgggcccgggtgcgggcccggcgccgcaccagcagaacggtccagcccagaatcaaatgcaggttccatctggatatggattgcatcatcaaaactatattgctccctcaggacattactctcaaggacctgggaaaatgacctcattgccattggatacccagtgtggtgattactactctgctctctatacagtaccaacacaaaatgtgactcctaacacagtgaaccagcaaccaggagcacagcagttgtacagcaggggtcctcctgcccctcatattgtgggatccactctaggatctttccaaggtgctgcatcgtcagcatcccatttgcatacgagtgcctcccaaccatactcctcttttgtgaatcactacaatagtccagccatgtactctgccagctcttctgttgcgtctcagggatttccctctacttgtggtcattatgctatgtcaactgtttctaatgccgcgtatcctagtgtttcatatccctctctgcctgctggtgatacatatgggcaaatgtttacctcacagaatgctccgactgttaggccagttaaagataattcattctctggtcaaaatacagctatcagccatccatcgccacttccacctctaccatcacaacagcaccaccagcagcaaagtctttcaggatacagtactctaacgtggtcatctccaggccttccatcgactcaagacaatctcatccgaaaccacacaggatccctggctgtagcgaacaacaacccaaccattactgttgcagattctttatcctgtcctgttatgcaaaatgttcagcctcccaagtccagcccagtggtatccactgttttatcaggatcctcaggatcctcatcaacaagaacacctcccactgcaaatcacccagttgagcctgtgacctcagttacacagccatcagagctattacaacaaaaaggtgttgacagctcttctaccacaagcagtgcttctccaatgcccaacagttatgatgccctggaaggaggcagttacccagatatgctttcttcatcagcaagcagtcctgctcctgatcccgcccctgaacctgatcctgcttctgctccagctccagcttcagctccagctcctgtcgtccctcagccttcaaaaatggctaagccttttggctatggctatccaacacttcagcctggttatcagaatgctacagcaccacttatttctggagtacagcccagtaacccggtatattctggattccagcagtatcctcaacagtatcctggtgtgaaccagctatcctccagtataggaggattgagtcttcagagttctccacaaccagaaagcctgagacctgtaaaccttactcaggagaggaatattttacctatgactcctgtttgggctcctgtacctaacttgaatgcagacctcaaaaaattaaactgtagcccagattcatttcggtgtactttgacaaatattccacagacacaggctttactgaataaagctaagcttcctttaggattgttgttacatcccttcagagacctaacgcaattaccagtgataacatcaaataccattgtgaggtgccgatcctgtcgaacgtatattaacccctttgtatccttcattgatcaacgtagatggaaatgcaatttgtgctatagagtaaacgatgttcctgaagaatttatgtataacccccttacccgatcttatggagagcctcataaacgaccagaagttcagaattcaactgtggagttcattgcttcttcagattacatgctgcgtcctcctcaacctgcagtttacttgtttgttttagatgtgtctcataatgcagtggaagctggatatttgacaattttgtgccagtcactcctagaaaatctagacaagcttcctggagattcacgaacaagaataggattcatgacctttgatagcactattcatttctacaatttacaagaaggattatcacagcctcaaatgttgattgtgtctgatatagatgatgtttttctacctacaccggatagtttacttgtgaatctatatgaaagtaaagagcttataaaagacttactgaatgcattaccaaacatgttcaccaatacaagagaaacacacagtgcccttggtcctgcacttcaggctgcctttaaattaatgtctccaacaggtggccgtgtgtctgtatttcagacacagttaccttccttgggtgcaggacttctgcaatccagagaagatcctaatcagagatcaagtacaaaggtggtacaacatcttggccctgcaactgatttttataagaaacttgcattagattgctcgggacagcaaactgcagtggatttgttccttttaagttcacagtattctgatcttgcttctctagcttgcatgtccaagtattctgcagggtgcatctattattatccatcattccactatactcacaatccttcacaagcagaaaagttacaaaaagacctaaaacggtatctcacaagaaaaattgggtttgaagctgttatgagaataaggtgtactaaaggtctttcaatgcacacttttcacggtaacttctttgtccgttctactgatttgttatcccttgccaacatcaatcctgatgctggatttgcggtgcagttgtcaattgaagaaagtttaacagatacttccttagtatgttttcaaacagccctattatatacatcaagcaaaggtgagcggagaattagagtacatacactttgtttgccagtggtaagttcactagcagatgtatatgcgggagtggatgtacaagctgccatctgccttctggcaaacatggctgtggatcggtccgtttcatcaagtctgtcagatgcaagagatgccttagtgaatgctgtagtggactcattgtctgcatatggctcaactgtctcaaatttacagcactctgcattgatggcgcccagctccctcaagttgtttcctctctatgttttggcccttctcaaacagaaagcatttagaacgggtacaagcacacggctggatgatcgtgtatatgccatgtgtcagataaagtctcagccacttgttcatctaatgaaaatgattcatcccaacttatacaggatagacagattgacagatgagggtgcagtacatgttaatgacaggattgtaccacagccacctcttcaaaaattgtctgcagagaagctgacaagagaaggtgctttccttatggactgtggctctgttttttacatttgggttgggaaaggctgtgacaataacttcatagaggatgtgcttggatatactaattttgcatcaataccacagaaaatgacacatcttccagagctagatacactttcatcagaaagagccagatccttcataacttggcttagagacagcagaccattaagtccaatccttcacatagtaaaagatgagagtcctgccaaagcagaattttttcagcatttgattgaagaccggacagaggctgcattttcttactatgaatttttgcttcatgttcagcagcagatttgtaagtgaagtagaataaaattgaataagaaaaagatctataacctaggtaaagcataatctgtcagagaagcgcgtgagaaatttgaaatgaaggcatttgttaatacaagatgcaacgcacagcactctgtctgaggctttggtaaaaagtaaaggggaagaaagaacttgacagatctttttcaactcaaattaatggtaacgatgatgctgtttcaccaagtatattttgaattggtttctacacatttccagtagtatggcagtacagtgctctgttcattgcaagctggcaaatttatgtagctatgtggaatgatatgtcataatgtaaaattagataaattcttttttcttataattaatataacatttctggacttgaactctggcaagagatgccaaaaggcattggtaccgtgttatttgtttatatgaattactttttaacaaggaatgtttcttattcattaaatgaattcaacattttctctgtaaaaacaatagagtttcagtacatgaactatagaaaaaaatctatatataatgtacataaatgttacatttgtaaagaaaatgtaaaaatgtaactatagcatatgaattgcttaaactgtgctgcattgttggatgacaactctttttgtcacagttagagaatgaggttgactaatgcatattatgaattgagtccacaaaggaacacaaaactctttgtaattctgttaaatcttttatgtagatttatttatgatcagcctactaattaaaactatttcgcttgacagtatggtttggtgattttttggggtttttgtttgattggttttttgtggggattggtgggtttttttacatacaggatgtattgaatttactaattggggaagtgcagtgatactgcatttcagttagtaatatatatgaatcaggccaggcgcggtggctcacgcctgtaatcccagcgctttgggaggccaaggtgggcagatgacttgaggtcaggtgttcatgacctgcctgaccaacatgatgaaaccccatctctgctaaaaataccaaaattagccaggggtgctggcgggcacctgtaatcccagctactcaggaggctgaagcagtagaatcgcttgaacctggaggctgaggttgcagtcagctaagatcacgccactgcactccagcctgggcaacagagtgagactccatcttaaaaaaaaaaaaaaagtaatatatatgaatcaatacactttcattagtctgtggacattaccaagtacttattctgtttgtattctaaaacaaagtggtgctactttcaaaaatattcttaactagtaagtataatcttaaattgtctttcttatttacattagatatttttgcctgcacacttatagcaagaaaattttagtaacacatatcactatcccatttatttaattgactttaagattgccatcttgaattttgaaagtgattttcttctgatcaagaaacctctcattcactaacaacttatttactataaaaa

SEQ ID NO: 57433 - DNA, 1375 bp, Homo sapiens
cgcggagaagcttgggtacctgagccgcggtcccgggtgacaccctcagtgacgccaggcgcgttccttcctcttcctctctcctctccggccccgccttcccttccctccgcccacctccctgaagcggagccgccgtcgccaccagcgccgtcatgtcggcccccgccgggtcctctcacccggccgccagcgcccggatcccgcccaagttcggcggatcggccgtctcaggagccgcagcgcccgcgggcccgggtgcgggcccggcgccgcaccagcagaacggtccagcccagaatcaaatgcaggttccatctggatatggattgcatcatcaaaactatattgctccctcaggacattactctcaaggacctgggaaaatgacctcattgccattggatacccagtgtggtgattactactctgctctctatacagtaccaacacaaaatgtgactcctaacacagtgaaccagcaaccaggagcacagcagttgtacagcaggggtcctcctgcccctcatattgtgggatccactctaggatctttccaaggtgctgcatcgtcagcatcccatttgcatacgagtgcctcccaaccatactcctcttttgtgaatcactacaatagtccagccatgtactctgccagctcttctgttgcgtctcagggatttccctctacttgtggtcattatgctatgtcaactgtttctaatgccgcgtatcctagtgtttcatatccctctctgcctgctggtgatacatatgggcaaatgtttacctcacagaatgctccgactgttaggccagttaaagataattcattctctggtcaaaatacagctatcagccatccatcgccacttccacctctaccatcacaacagcaccaccagcagcaaagtctttcaggatacagtactctaacgtggtcatctccaggccttccatcgactcaagacaatctcatccgaaaccacacaggatccctggctgtagcgaacaacaacccaaccattactgttgcagattctttatcctgtcctgttatgcaaaatgttcagcctcccaagtccagcccagtggtatccactgttttatcaggatcctcaggatcctcatcaacaagaacacctcccactgcaaatcacccagttgagcctgtgacctcagttacacagccatcagagctattacaacaaaaaggtgttgacagctcttctaccacaagcagtgcttctccaatgcccaacagttatgatgccctggaaggaggcagttacccagatatgctttcttcatcagcaagcagtcctgctcctgatccctaagccccaagtcaaaagaaatttagagctgatcctca

SEQ ID NO: 57434 - DNA, 1031 bp, Homo sapiens
  misc_feature (868)..(868): n is a, c, g, or t
  misc_feature (910)..(910): n is a, c, g, or t
  misc_feature (924)..(925): n is a, c, g, or t
  misc_feature (936)..(936): n is a, c, g, or t
  misc_feature (941)..(941): n is a, c, g, or t
  misc_feature (956)..(958): n is a, c, g, or t
  misc_feature (960)..(961): n is a, c, g, or t
  misc_feature (972)..(973): n is a, c, g, or t
  misc_feature (982)..(982): n is a, c, g, or t
  misc_feature (984)..(984): n is a, c, g, or t
  misc_feature (993)..(993): n is a, c, g, or t
cgcggagaagcttgggtacctgagccgcggtcccgggtgacaccctcagtgacgccaggcgcgttccttcctcttcctctctcctctccggccccgccttcccttccctccgcccacctccctgaagcggagccgccgtcgccaccagcgccgtcatgtcggcccccgccgggtcctctcacccggccgccagcgcccggatcccgcccaagttcggcggatcggccgtctcaggagccgcagcgcccgcgggcccgggtgcgggcccggcgccgcaccagcagaacggtccagcccagaatcaaatgcaggttccatctggatatggattgcatcatcaaaactatattgctccctcaggacattactctcaaggacctgggaaaatgacctcattgccattggatacccagtgtggtgattactactctgctctctatacagtaccaacacaaaatgtgactcctaacacagtgaaccagcaaccaggagcacagcagttgtacagcaggggtcctcctgcccctcatattgtgggatccactctaggatctttccaaggtgctgcatcgtcagcatcccatttgcatacgagtgcctcccaaccatactcctcttttgtgaatcactacaatagtccagccatgtactctgccagctcttctgttgcgtctcagggatttccctctacttgtggtcattatgctatgtcaactgtttctaatgccgcgtatcctagtgtttcatatccctctctgcctgctggtgatacatatgggcaaatgtttacctcacagaatgctccgactgttaggccagttaaagataattcattctctggtcaaaatacagctgttaacagataagnttaacttgcatctgcagtattgcatgttagggataagtgctnatctttaagagctnnggagttcttanatatnaaccatggcactttnnncnngacccttcctnngggattcangnatgagaaantttcatcgagccttttattgctcttaaataattcttat

SEQ ID NO: 57435 - DNA, 300 bp, Homo sapiens
gaagggcatatttaatagctgctgcaaacatatggaatagtgctttaatcagtggtgaacaagaaattgctgttgttggttataaaaacaagggacattaatgttcttgttcttgtaccatagtaatgagaaaaaaaaatagtggttgaatggtgtttaatttgtacagtttgtgtcaaagtagaatgggcagatattttggtggataggcttttgtcttagttataaaaattaggacatttggtatgataaaggcagagaatcttaacaattggcactggcccagaaaattcagggtgc

SEQ ID NO: 57436 - DNA, 1363 bp, Homo sapiens
agttaggggcttcagcacccctctgtcagtagttaacagagccagcagacagaaaatcagtaaggttatagttgacctatgtaacaatgccatcaaacaactgaatctaatttacattcatagaatacttcatgaacaacagcagaatgcacattctttacaaattcacatggtctattcaccaagactatattctggactataaaagacatctcaagaaaattaaaatcatagacatcatataaaatatggtcttgattataatgaaattaaacttcaatggaattaaatttaataacataaagatagctgcaaatctctaaatatttggagaataaaaatacacttccaaataacacataagtcaaagcagaaatctcaagggaaatttaaattatttgtaactaaatgaaaatataacctatcaaaatgtgggatgcaatgaaatcactgcttcacagaaacttataacattgaatgcatagattagaaaagaaaaaagatttgaaatcaatagtcgaagcttccaccttagaaaactggagtaagaagtgcaatatcagcctaaaacaagcagaagaaagaaaataataaaacttagaccagaaatcagctacattgagaccaggaaaccagtagagaaaatcagcaaaactaaaatctggttctttaaaaatgtcaataaaattggtaaacctctaacctggctatcaagcaaaaagaagacatgaattattaatattggaaataaaagagaactcatcaggaatgctttcatagatgttaaaaggataataattaaagggataatagggttatgaaaagccctgtagccataaatttgaatacttggatgaaataaactaatttcttgaaggacacagactatcaagatttgtataaggagaaacagatattctgaatgggcctatatcaatgaaagaaattgactcaataattaataaccttccaaaaaagatagcatcaggcaccagtgtttgcactagtgaaatctaccaactcttaaagaaaaaaaatgataccaattctttgcaatctcttcctaaaaataaaagctgagctgacgttatgtctcatgactatgatctcagcactttgagaagccgcagcgggcggattgcttgagctcaggatttccagaccagcctgggcaacatgacaaaccctgtctctacaaaaaatacaaataattatctgagcatggaggcacatggctatagtcccagctacttgggaggctgaggtgggagaattacttcagcctgggagacagaggttgtagtgagcagagatctagccactgcactccagactaagtgacagagtgagacccaatctcaaa

SEQ ID NO: 57437 - DNA, 318 bp, Homo sapiens
aatgggcctgcctcccagagctggggattctatccaccctcaaagaggcagcagcagaggctgtgacccggagggaatattgtggtggtggaatggcacagtgccttccgtcccacaagcatgagtgagctgctactacgtgccaggcaccgtgtcaggtgctggagaccccacactacttgctgcctgggacccgggcacaggggttctagtccctgcactgccacttgctgactccgtggcatgaccaagtcccttcctttttgggcctcatgttcttcaaagtcaaggtgaagatttggactagatgagccctgt

SEQ ID NO: 57438 - DNA, 334 bp, Homo sapiens
acttatcatagacttacgcttcatccctttttttggtttggtttatttctgataagaaataaaagttaaaaaattattaaaataatcaaggctctctaattgatttaaaaatccattatctagtactttttagtgaatcaaaaagtcagaaagagtagaggaaaaaactaagactgtattgtactcacatatttcatctcgctgctttttttgtttgtttgtttgaaaagatcgaatgcttatcattagaaagggtcacacaggttctttatttctgcaatggaccgttagacaatttgatacatagctaagttgaagctttggcaaactaaag

SEQ ID NO: 57439 - DNA, 748 bp, Homo sapiens
gataggcgtcaatacatttaagaaaattgaaattatatcaagcactctctcagaccacagtggaataaaactggagatcaactccaaaaggaatcttctataccatgcaaatacgtggaaattaaataacctgctcctgaatgagcattgggtcaaaaatgaaatcaatatgaaaattaaaaaattcttcaaactaaacaacaataatgatacaacctatcaaaacctctgggatccagctaaggtggtgttaagaggaaagttcatagccctaaatgcctacatcaaaaaatctgaaagagcacaaacagacggtctaaggtcacacctcaaggaagaagagaaacaaaaacaaaccaaacccaaacccagcagaaaaaaggaaatagccaagatcggagcagaactaaatgaaattgaaacaacaacaacaacaaaaaccaaaagataaatgaaacagaaagttggttctttgaaaagacaaataaaattgatagaccattagcaacattaactaagaaaagaagagagaaaatccaaataacctcactaagaaacaaaacaggagatattacaactgacaccgctgaaatacaaaagatcattcaaaacttctatgaacacctttacacacatacactagaaaacctagaagagatggataaattactggaaaaagataaccctcctagcttaaatcaggaagaattagatactctgaacagaccaataacaagcagcgagattg

SEQ ID NO: 57440 - DNA, 1335 bp, Homo sapiens
ggggacttcttgaacttgcagggagaataacttgcgcaccccactttgcgccggtgcctttgccccagcggagcctgcttcgccatctccgagccccaccgcccctccactcctcggccttgcccgacactgagacgctgttcccagcgtgaaaagagagactgcgcggccggcacccgggagaaggaggaggcaaagaaaaggaacggacattcggtccttgcgccaggtcctttgaccagagtttttccatgtggacgctctttcaatggacgtgtccccgcgtgcttcttagacggactgcggtctcctaaagcgttgctgcttccccaggtcctcctgggcggcgcggctggcctcgttccggagctgggccgcaggaagttcgcggcggcgtcgtcgggccgcccctcatcccagccctctgacgaggtcctgagcgagttcgagttgcggctgctcagcatgttcggcctgaaacagagacccacccccagcagggacgccgtggtgcccccctacatgctagacctgtatcgcaggcactcaggtcagccgggctcacccgccccagaccaccggttggagagggcagccagccgagccaacactgtgcgcagcttccaccatgaagaatctttggaagaactaccagaaacgagtgggaaaacaacccggagattcttctttaatttaagttctatccccacggaggagtttatcacctcagcagagcttcaggttttccgagaacagatgcaagatgctttaggaaacaatagcagtttccatcaccgaattaatatttatgaaatcataaaacctgcaacagccaactcgaaattccccgtgaccagacttttggacaccaggttggtgaatcagaatgcaagcaggtgggaaagttttgatgtcacccccgctgtgatgcggtggactgcacagggacacgccaaccatggattcgtggtggaagtggcccacttggaggagaaacaaggtgtctccaagagacatgttaggataagcaggtctttgcaccaagatgaacacagctggtcacagataaggccattgctagtaacttttcctctggctgatcatctgaactccactaatcatgccattgttcagacgttggtcaactctgttaactctaagattcctaaggcatgctgtgtcccgacagaactcagtgctatctcgatgctgtaccttgacgagaatgaaaaggttgtattaaagaactatcaggacatggttgtggagggttgtgggtgtcgctagtacagcaaaattaaatacataaatatatatatatatatatattttaga

SEQ ID NO: 57441 - DNA, 1562 bp, Homo sapiens
ggggacttcttgaacttgcagggagaataacttgcgcaccccactttgcgccggtgcctttgccccagcggagcctgcttcgccatctccgagccccaccgcccctccactcctcggccttgcccgacactgagacgctgttcccagcgtgaaaagagagactgcgcggccggcacccgggagaaggaggaggcaaagaaaaggaacggacattcggtccttgcgccaggtcctttgaccagagtttttccatgtggacgctctttcaatggacgtgtccccgcgtgcttcttagacggactgcggtctcctaaaggtcgaccatggtggccgggacccgctgtcttctagcgttgctgcttccccaggtcctcctgggcggcgcggctggcctcgttccggagctgggccgcaggaagttcgcggcggcgtcgtcgggccgcccctcatcccagccctctgacgaggtcctgagcgagttcgagttgcggctgctcagcatgttcggcctgaaacagagacccacccccagcagggacgccgtggtgcccccctacatgctagacctgtatcgcaggcactcaggtcagccgggctcacccgccccagaccaccggttggagagggcagccagccgagccaacactgtgcgcagcttccaccatgaagaatctttggaagaactaccagaaacgagtgggaaaacaacccggagattcttctttaatttaagttctatccccacggaggagtttatcacctcagcagagcttcaggttttccgagaacagatgcaagatgctttaggaaacaatagcagtttccatcaccgaattaatatttatgaaatcataaaacctgcaacagccaactcgaaattccccgtgaccagacttttggacaccaggttggtgaatcagaatgcaagcaggtgggaaagttttgatgtcacccccgctgtgatgcggtggactgcacagggacacgccaaccatggattcgtggtggaagtggcccacttggaggagaaacaaggtgtctccaagagacatgttaggataagcaggtctttgcaccaagatgaacacagctggtcacagataaggccattgctagtaacttttggccatgatggaaaagggcatcctctccacaaaagagaaaaacgtcaagccaaacacaaacagcggaaacgccttaagtccagctgtaagagacaccctttgtacgtggacttcagtgacgtggggtggaatgactggattgtggctcccccggggtatcacgccttttactgccacggagaatgcccttttcctctggctgatcatctgaactccactaatcatgccattgttcagacgttggtcaactctgttaactctaagattcctaaggcatgctgtgtcccgacagaactcagtgctatctcgatgctgtaccttgacgagaatgaaaaggttgtattaaagaactatcaggacatggttgtggagggttgtgggtgtcgctagtacagcaaaattaaatacataaatatatatatatatatatattttaga

SEQ ID NO: 57442 - DNA, 398 bp, Homo sapiens
  misc_feature (11)..(11): n is a, c, g, or t
  misc_feature (14)..(15): n is a, c, g, or t
tctaaaatatntanntatatatatatttatgtatttaattttgctgtaagagacaccctttgtacgtggacttcagtgacgtggggtggaatgactggattgtggctcccccggggtatcacgccttttactgccacggagaatgcccttttcctctggctgatcatctgaactccactaatcatgccattgttcagacgttggtcaactctgttaactctaagattcctaaggcatgctgtgtcccgacagaactcagtgctatctcgatgctgtaccttgacgagaatgaaaaggttgtattaaagaactatcaggacatggttgtggagggttgtgggtgtcgctagtacagcaaaattaaatacataaatatatatatatatatatattttaga

SEQ ID NO: 57443 - DNA, 2667 bp, Homo sapiens
ggggacttcttgaacttgcagggagaataacttgcgcaccccactttgcgccggtgcctttgccccagcggagcctgcttcgccatctccgagccccaccgcccctccactcctcggccttgcccgacactgagacgctgttcccagcgtgaaaagagagactgcgcggccggcacccgggagaaggaggaggcaaagaaaaggaacggacattcggtccttgcgccaggtcctttgaccagagtttttccatgtggacgctctttcaatggacgtgtccccgcgtgcttcttagacggactgcggtctcctaaagcgttgctgcttccccaggtcctcctgggcggcgcggctggcctcgttccggagctgggccgcaggaagttcgcggcggcgtcgtcgggccgcccctcatcccagccctctgacgaggtcctgagcgagttcgagttgcggctgctcagcatgttcggcctgaaacagagacccacccccagcagggacgccgtggtgcccccctacatgctagacctgtatcgcaggcactcaggtcagccgggctcacccgccccagaccaccggttggagagggcagccagccgagccaacactgtgcgcagcttccaccatgaagaatctttggaagaactaccagaaacgagtgggaaaacaacccggagattcttctttaatttaagttctatccccacggaggagtttatcacctcagcagagcttcaggttttccgagaacagatgcaagatgctttaggaaacaatagcagtttccatcaccgaattaatatttatgaaatcataaaacctgcaacagccaactcgaaattccccgtgaccagacttttggacaccaggttggtgaatcagaatgcaagcaggtgggaaagttttgatgtcacccccgctgtgatgcggtggactgcacagggacacgccaaccatggattcgtggtggaagtggcccacttggaggagaaacaaggtgtctccaagagacatgttaggataagcaggtctttgcaccaagatgaacacagctggtcacagataaggccattgctagtaacttttggccatgatggaaaagggcatcctctccacaaaagagaaaaacgtcaagccaaacacaaacagcggaaacgccttaagtccagctgtaagagacaccctttgtacgtggacttcagtgacgtggggtggaatgactggattgtggctcccccggggtatcacgccttttactgccacggagaatgcccttttcctctggctgatcatctgaactccactaatcatgccattgttcagacgttggtcaactctgttaactctaagattcctaaggcatgctgtgtcccgacagaactcagtgctatctcgatgctgtaccttgacgagaatgaaaaggttgtattaaagaactatcaggacatggttgtggagggttgtgggtgtcgctagtacagcaaaattaaatacataaatatatatatatatatatattttagaaaaaagaaaaaaacaaacaaacaaaaaaaccccaccccagttgacactttaatatttcccaatgaagactttatttatggaatggaatggaaaaaaaaacagctattttgaaaatatatttatatctacgaaaagaagttgggaaaacaaatattttaatcagagaattattccttaaagatttaaaatgtatttagttgtacattttatatgggttcaaccccagcacatgaagtataatggtcagatttattttgtatttatttactattataaccactttttaggaaaaaaatagctaatttgtatttatatgtaatcaaaagaagtatcgggtttgtacataattttccaaaaattgtagttgttttcagttgtgtgtatttaagatgaaaagtctacatggaaggttactctggcaaagtgcttagcacgtttgcttttttgcagtgctactgttgagttcacaagttcaagtccagaaaaaaaaagtggataatccactctgctgactttcaagattattatattattcaattctcaggaatgttgcagagtggttgtccaatccatgagaatttacatccttattaggtggaatatttggataagaaccagacattgctgatctattatagaaactctcctcctgccccttaatttacagaaagaataaagcaggatccatagaaataattaggaaaacgatgaacctgcaggaaagtgaatgatggtttgttgttcttctttcctaaattagtgatcccttcaaaggggctgatctggccaaagtattcaataaaacgtaagatttcttcattattgatattgtggtcatatatatttaaaattgatatctcgtggccctcatcaagggttggaaatttatttgtgttttacctttacctcatctgagagctctttattctccaaagaacccagttttctaactttttgcccaacacgcagcaaaattatgcacatcgtgttttctgcccaccctctgttctctgacctatcagcttgcttttctttccaaggttgtgtgtttgaacacatttctccaaatgttaaacctatttcagataataaatatcaaatctctggcatttcattctataaagtccaacctgtaagaga

SEQ ID NO: 57444 - DNA, 1538 bp, Homo sapiens
  misc_feature (11)..(11): n is a, c, g, or t
  misc_feature (14)..(15): n is a, c, g, or t
tctaaaatatntanntatatatatatttatgtatttaattttgctgtaagagacaccctttgtacgtggacttcagtgacgtggggtggaatgactggattgtggctcccccggggtatcacgccttttactgccacggagaatgcccttttcctctggctgatcatctgaactccactaatcatgccattgttcagacgttggtcaactctgttaactctaagattcctaaggcatgctgtgtcccgacagaactcagtgctatctcgatgctgtaccttgacgagaatgaaaaggttgtattaaagaactatcaggacatggttgtggagggttgtgggtgtcgctagtacagcaaaattaaatacataaatatatatatatatatatattttagaaaaaagaaaaaaacaaacaaacaaaaaaaccccaccccagttgacactttaatatttcccaatgaagactttatttatggaatggaatggaaaaaaaaacagctattttgaaaatatatttatatctacgaaaagaagttgggaaaacaaatattttaatcagagaattattccttaaagatttaaaatgtatttagttgtacattttatatgggttcaaccccagcacatgaagtataatggtcagatttattttgtatttatttactattataaccactttttaggaaaaaaatagctaatttgtatttatatgtaatcaaaagaagtatcgggtttgtacataattttccaaaaattgtagttgttttcagttgtgtgtatttaagatgaaaagtctacatggaaggttactctggcaaagtgcttagcacgtttgcttttttgcagtgctactgttgagttcacaagttcaagtccagaaaaaaaaagtggataatccactctgctgactttcaagattattatattattcaattctcaggaatgttgcagagtggttgtccaatccatgagaatttacatccttattaggtggaatatttggataagaaccagacattgctgatctattatagaaactctcctcctgccccttaatttacagaaagaataaagcaggatccatagaaataattaggaaaacgatgaacctgcaggaaagtgaatgatggtttgttgttcttctttcctaaattagtgatcccttcaaaggggctgatctggccaaagtattcaataaaacgtaagatttcttcattattgatattgtggtcatatatatttaaaattgatatctcgtggccctcatcaagggttggaaatttatttgtgttttacctttacctcatctgagagctctttattctccaaagaacccagttttctaactttttgcccaacacgcagcaaaattatgcacatcgtgttttctgcccaccctctgttctctgacctatcagcttgcttttctttccaaggttgtgtgtttgaacacatttctccaaatgttaaacctatttcagataataaatatcaaatctctggcatttcattctataaagtccaacctgtaagaga

SEQ ID NO: 57445 - DNA, 1321 bp, Homo sapiens
ggggacttcttgaacttgcagggagaataacttgcgcaccccactttgcgccggtgcctttgccccagcggagcctgcttcgccatctccgagccccaccgcccctccactcctcggccttgcccgacactgagacgctgttcccagcgtgaaaagagagactgcgcggccggcacccgggagaaggaggaggcaaagaaaaggaacggacattcggtccttgcgccaggtcctttgaccagagtttttccatgtggacgctctttcaatggacgtgtccccgcgtgcttcttagacggactgcggtctcctaaaggtcgaccatggtggccgggacccgctgtcttctagcgttgctgcttccccaggtcctcctgggcggcgcggctggcctcgttccggagctgggccgcaggaagttcgcggcggcgtcgtcgggccgcccctcatcccagccctctgacgaggtcctgagcgagttcgagttgcggctgctcagcatgttcggcctgaaacagagacccacccccagcagggacgccgtggtgcccccctacatgctagacctgtatcgcaggcactcaggtcagccgggctcacccgccccagaccaccggttggagagggcagccagccgagccaacactgtgcgcagcttccaccatgaagaatctttggaagaactaccagaaacgagtgggaaaacaacccggagattcttctttaatttaagttctatccccacggaggagtttatcacctcagcagagcttcaggttttccgagaacagatgcaagatgctttaggaaacaatagcagtttccatcaccgaattaatatttatgaaatcataaaacctgcaacagccaactcgaaattccccgtgaccagacttttggacaccaggttggtgaatcagaatgcaagcaggtgggaaagttttgatgtcacccccgctgtgatgcggtggactgcacagggacacgccaaccatggattcgtggtggaagtggcccacttggaggagaaacaaggtgtctccaagagacatgttaggataagcaggtctttgcaccaagatgaacacagctggtcacagataaggccattgctagtaacttttggccatgatggaaaagggcatcctctccacaaaagagaaaaacgtcaagccaaacacaaacagcggaaacgccttaagtccagctgtaagagacaccctttgtacgtggacttcagtgacgtggggtggaatgactggattgtggctcccccggggtatcacgcctatctgaacatgggccgagctcgatgacgggt

SEQ ID NO: 57446 - DNA, 2702 bp, Homo sapiens
ggggacttcttgaacttgcagggagaataacttgcgcaccccactttgcgccggtgcctttgccccagcggagcctgcttcgccatctccgagccccaccgcccctccactcctcggccttgcccgacactgagacgctgttcccagcgtgaaaagagagactgcgcggccggcacccgggagaaggaggaggcaaagaaaaggaacggacattcggtccttgcgccaggtcctttgaccagagtttttccatgtggacgctctttcaatggacgtgtccccgcgtgcttcttagacggactgcggtctcctaaaggtcgaccatggtggccgggacccgctgtcttctagcgttgctgcttccccaggtcctcctgggcggcgcggctggcctcgttccggagctgggccgcaggaagttcgcggcggcgtcgtcgggccgcccctcatcccagccctctgacgaggtcctgagcgagttcgagttgcggctgctcagcatgttcggcctgaaacagagacccacccccagcagggacgccgtggtgcccccctacatgctagacctgtatcgcaggcactcaggtcagccgggctcacccgccccagaccaccggttggagagggcagccagccgagccaacactgtgcgcagcttccaccatgaagaatctttggaagaactaccagaaacgagtgggaaaacaacccggagattcttctttaatttaagttctatccccacggaggagtttatcacctcagcagagcttcaggttttccgagaacagatgcaagatgctttaggaaacaatagcagtttccatcaccgaattaatatttatgaaatcataaaacctgcaacagccaactcgaaattccccgtgaccagacttttggacaccaggttggtgaatcagaatgcaagcaggtgggaaagttttgatgtcacccccgctgtgatgcggtggactgcacagggacacgccaaccatggattcgtggtggaagtggcccacttggaggagaaacaaggtgtctccaagagacatgttaggataagcaggtctttgcaccaagatgaacacagctggtcacagataaggccattgctagtaacttttggccatgatggaaaagggcatcctctccacaaaagagaaaaacgtcaagccaaacacaaacagcggaaacgccttaagtccagctgtaagagacaccctttgtacgtggacttcagtgacgtggggtggaatgactggattgtggctcccccggggtatcacgccttttactgccacggagaatgcccttttcctctggctgatcatctgaactccactaatcatgccattgttcagacgttggtcaactctgttaactctaagattcctaaggcatgctgtgtcccgacagaactcagtgctatctcgatgctgtaccttgacgagaatgaaaaggttgtattaaagaactatcaggacatggttgtggagggttgtgggtgtcgctagtacagcaaaattaaatacataaatatatatatatatatatattttagaaaaaagaaaaaaacaaacaaacaaaaaaaccccaccccagttgacactttaatatttcccaatgaagactttatttatggaatggaatggaaaaaaaaacagctattttgaaaatatatttatatctacgaaaagaagttgggaaaacaaatattttaatcagagaattattccttaaagatttaaaatgtatttagttgtacattttatatgggttcaaccccagcacatgaagtataatggtcagatttattttgtatttatttactattataaccactttttaggaaaaaaatagctaatttgtatttatatgtaatcaaaagaagtatcgggtttgtacataattttccaaaaattgtagttgttttcagttgtgtgtatttaagatgaaaagtctacatggaaggttactctggcaaagtgcttagcacgtttgcttttttgcagtgctactgttgagttcacaagttcaagtccagaaaaaaaaagtggataatccactctgctgactttcaagattattatattattcaattctcaggaatgttgcagagtggttgtccaatccatgagaatttacatccttattaggtggaatatttggataagaaccagacattgctgatctattatagaaactctcctcctgccccttaatttacagaaagaataaagcaggatccatagaaataattaggaaaacgatgaacctgcaggaaagtgaatgatggtttgttgttcttctttcctaaattagtgatcccttcaaaggggctgatctggccaaagtattcaataaaacgtaagatttcttcattattgatattgtggtcatatatatttaaaattgatatctcgtggccctcatcaagggttggaaatttatttgtgttttacctttacctcatctgagagctctttattctccaaagaacccagttttctaactttttgcccaacacgcagcaaaattatgcacatcgtgttttctgcccaccctctgttctctgacctatcagcttgcttttctttccaaggttgtgtgtttgaacacatttctccaaatgttaaacctatttcagataataaatatcaaatctctggcatttcattctataaagtccaacctgtaagaga

SEQ ID NO: 57447 - DNA, 2647 bp, Homo sapiens
ggggacttcttgaacttgcagggagaataacttgcgcaccccactttgcgccggtgcctttgccccagcggagcctgcttcgccatctccgagccccaccgcccctccactcctcggccttgcccgacactgagacgctgttcccagcgtgaaaagagagactgcgcggccggcacccgggagaaggaggaggcaaagaaaaggaacggacattcggtccttgcgccaggtcctttgaccagagtttttccatgtggacgctctttcaatggacgtgtccccgcgtgcttcttagacggactgcggtctcctaaaggtcgaccatggtggccgggacccgctgtcttctagcgttgctgcttccccaggtcctcctgggcggcgcggctggcctcgttccggagctgggccgcaggaagttcgcggcggcgtcgtcgggccgcccctcatcccagccctctgacgaggtcctgagcgagttcgagttgcggctgctcagcatgttcggcctgaaacagagacccacccccagcagggacgccgtggtgcccccctacatgctagacctgtatcgcaggcactcaggtcagccgggctcacccgccccagaccaccggttggagagggcagccagccgagccaacactgtgcgcagcttccaccatgaagaatctttggaagaactaccagaaacgagtgggaaaacaacccggagattcttctttaatttaagttctatccccacggaggagtttatcacctcagcagagcttcaggttttccgagaacagatgcaagatgctttaggaaacaatagcagtttccatcaccgaattaatatttatgaaatcataaaacctgcaacagccaactcgaaattccccgtgaccagacttttggacaccaggttggtgaatcagaatgcaagcaggtgggaaagttttgatgtcacccccgctgtgatgcggtggactgcacagggacacgccaaccatggattcgtggtggaagtggcccacttggaggagaaacaaggtgtctccaagagacatgttaggataagcaggtctttgcaccaagatgaacacagctggtcacagataaggccattgctagtaacttttggccatgatggaaaagggcatcctctccacaaaagagaaaaacgtcaagccaaacacaaacagcggaaacgccttaagtccagattgtggctcccccggggtatcacgccttttactgccacggagaatgcccttttcctctggctgatcatctgaactccactaatcatgccattgttcagacgttggtcaactctgttaactctaagattcctaaggcatgctgtgtcccgacagaactcagtgctatctcgatgctgtaccttgacgagaatgaaaaggttgtattaaagaactatcaggacatggttgtggagggttgtgggtgtcgctagtacagcaaaattaaatacataaatatatatatatatatatattttagaaaaaagaaaaaaacaaacaaacaaaaaaaccccaccccagttgacactttaatatttcccaatgaagactttatttatggaatggaatggaaaaaaaaacagctattttgaaaatatatttatatctacgaaaagaagttgggaaaacaaatattttaatcagagaattattccttaaagatttaaaatgtatttagttgtacattttatatgggttcaaccccagcacatgaagtataatggtcagatttattttgtatttatttactattataaccactttttaggaaaaaaatagctaatttgtatttatatgtaatcaaaagaagtatcgggtttgtacataattttccaaaaattgtagttgttttcagttgtgtgtatttaagatgaaaagtctacatggaaggttactctggcaaagtgcttagcacgtttgcttttttgcagtgctactgttgagttcacaagttcaagtccagaaaaaaaaagtggataatccactctgctgactttcaagattattatattattcaattctcaggaatgttgcagagtggttgtccaatccatgagaatttacatccttattaggtggaatatttggataagaaccagacattgctgatctattatagaaactctcctcctgccccttaatttacagaaagaataaagcaggatccatagaaataattaggaaaacgatgaacctgcaggaaagtgaatgatggtttgttgttcttctttcctaaattagtgatcccttcaaaggggctgatctggccaaagtattcaataaaacgtaagatttcttcattattgatattgtggtcatatatatttaaaattgatatctcgtggccctcatcaagggttggaaatttatttgtgttttacctttacctcatctgagagctctttattctccaaagaacccagttttctaactttttgcccaacacgcagcaaaattatgcacatcgtgttttctgcccaccctctgttctctgacctatcagcttgcttttctttccaaggttgtgtgtttgaacacatttctccaaatgttaaacctatttcagataataaatatcaaatctctggcatttcattctataaagtccaacctgtaagaga

SEQ ID NO: 57448 - DNA, 1370 bp, Homo sapiens
ggggacttcttgaacttgcagggagaataacttgcgcaccccactttgcgccggtgcctttgccccagcggagcctgcttcgccatctccgagccccaccgcccctccactcctcggccttgcccgacactgagacgctgttcccagcgtgaaaagagagactgcgcggccggcacccgggagaaggaggaggcaaagaaaaggaacggacattcggtccttgcgccaggtcctttgaccagagtttttccatgtggacgctctttcaatggacgtgtccccgcgtgcttcttagacggactgcggtctcctaaaggtcgaccatggtggccgggacccgctgtcttctagcgttgctgcttccccaggtcctcctgggcggcgcggctggcctcgttccggagctgggccgcaggaagttcgcggcggcgtcgtcgggccgcccctcatcccagccctctgacgaggtcctgagcgagttcgagttgcggctgctcagcatgttcggcctgaaacagagacccacccccagcagggacgccgtggtgcccccctacatgctagacctgtatcgcaggcactcaggtcagccgggctcacccgccccagaccaccggttggagagggcagccagccgagccaacactgtgcgcagcttccaccatgaagaatctttggaagaactaccagaaacgagtgggaaaacaacccggagattcttctttaatttaagttctatccccacggaggagtttatcacctcagcagagcttcaggttttccgagaacagatgcaagatgctttaggaaacaatagcagtttccatcaccgaattaatatttatgaaatcataaaacctgcaacagccaactcgaaattccccgtgaccagacttttggacaccaggttggtgaatcagaatgcaagcaggtgggaaagttttgatgtcacccccgctgtgatgcggtggactgcacagggacacgccaaccatggattcgtggtggaagtggcccacttggaggagaaacaaggtgtctccaagagacatgttaggataagcaggtctttgcaccaagatgaacacagctggtcacagataaggccattgctagtaacttttcctctggctgatcatctgaactccactaatcatgccattgttcagacgttggtcaactctgttaactctaagattcctaaggcatgctgtgtcccgacagaactcagtgctatctcgatgctgtaccttgacgagaatgaaaaggttgtattaaagaactatcaggacatggttgtggagggttgtgggtgtcgctagtacagcaaaattaaatacataaatatatatatatatatatattttaga

SEQ ID NO: 57449 - DNA, 244 bp, Homo sapiens
ggaggaggcttggaggcatggagttgtggtggaagcaggttctgaaaagcagaactctgaagctggctcattctcacgaagtcatctggcccagcctcccgcctccaagcacatcctgcctgcagagggtctggctagctgccttttcagctctcgagggatagagattctacaacctccctctgtcatcagttccagagccactcccctttgcactagaagttctatgagggtgtgagggagg

SEQ ID NO: 57450 - DNA, 1084 bp, Homo sapiens
gtgaaaacataaacattcatagtgaagagtatacttatgctttgttaattcttcatgttccatagctttaaaaaaattgcaagaagtctgtgtatccctttttttctggccctacacttttcttctgccacccctatagaactgtcagcctgcacactgaaactgttctcagaaaacaaaggcatcatcaacttctcaaggttaaggtagtgatttaaggctaacagaccccacactcatgtgataataattagttaagcaattacaggtcacaagcagtcacttgtccagtgacattttaaatctctagtcatgactttgtcattggtttacttttgcccctgggaaaagttgaaaattccttagcatggaatcaaaactctcacatcagtgtggttcttgtcaggttattcagccttctctttcgccacttaccatactctgcacctttgttctatcatccagccaaactagactacatggagctccacagtgatcgtcttcacctccagctctttgcatttacttcttccctctatcctacatgtgttttccttccctttcagatatcaacctatgaattgcctctaccaaaaagcctacaatattgacacaaacctgggctagtatcccttctatgtcttctaataagtgctgtcttatgcctgtcactgtatgtatgactctgtatgggaattgcctgtttgttttttcagattatagcaaacagttgttgaggggtggaccatatcatctttatcttgtaattccagtgcttgtcctagtaccttagcacatggttgctgaatacatgaatgaagagtgagaaaccagaagctctgatatttaactgccgtgataatgaattcaatgtgcaactatgggcaaattgtatttaatagtaattgcatattgtacatatttttcattcttattaacactgataaacttttcaacttatactgactttaataaaattgtattactaggctattaacatgatattttgtttcccattaaatgtgacatgcaaagacgtttattaaatgaaaatatttttgtatcttttatgtctgatgaaaat

SEQ ID NO: 57451 - DNA, 635 bp, Homo sapiens
gtacaaaaccttcaagctgagtgcagaaagcgccgtcttttactagaagacagtaaaaggttggtaaatgaattgaatcatttgaaagaaaaagaacgccaatatgaaaaaaagcaagcagaaagagaacttcaagaaacacaggatcaacttacagctactataagatgtactaaggggatggaaggcgacgcacaaaagcttgaagtagaaaatgccatgatgagaaaaactattaaaaaacaggatgaccaaattgagcgacttgagaaaatcctgcagcgttcaagtttgatgccacaggtgttcaagagctagatgaagtgcttgtcctagtaccttagcacatggttgctgaatacatgaatgaagagtgagaaaccagaagctctgatatttaactgccgtgataatgaattcaatgtgcaactatgggcaaattgtatttaatagtaattgcatattgtacatatttttcattcttattaacactgataaacttttcaacttatactgactttaataaaattgtattactaggctattaacatgatattttgtttcccattaaatgtgacatgcaaagacgtttattaaatgaaaatatttttgtatcttttatgtctgatgaaaat

SEQ ID NO: 57452 - DNA, 228 bp, Homo sapiens
gtacaaaaccttcaagctgagtgcagaaagcgccgtcttttactagaagacagtaaaaggttggtaaatgaattgaatcatttgaaagaaaaagaacgccaatatgaaaaaaagcaagcagaaagagaagtaagtatcaagaaaaataagtatttttcaaacttcctgaagtaaaatttaaagtaatatttggttacagctgaatgttggatctagttgaatataaaa

SEQ ID NO: 57453 - DNA, 1197 bp, Homo sapiens
aagaatgttgtgtttcagtcctagagcaggggtcagtgaactttctgtaaagggccagatagtattatttaaggctttgtgaaccataagatccttgttgcaataactcagccctgtagttatagcacaaaagtagccattaacgatatgcagattgaaggggtgtagcagtgtcccactaaaattaattacaaaaaacaggtaatgggatgatttctcctacattatgaccttttttaaataaaaaagattgtgatagtctaaaatattttatatatattttgttgattcattcatctactgatggacatttaggtcatttctaaatgtaattttttttaattctttgttttagcttcaagaaacacaggatcaacttacagctactataagatgtactaaggggatggaaggcgacgcacaaaagtaaaatttgaagcagcgcacaaaataacttgagtatttataaagcaaaagagcactgtagtatgaaaattgtatcagttatgataataagtatgtctttgtgaagccaaaaaagtttcatttgtaagctgtattgaaatacatcatttttctacattattcctaaattttgcatattatcgacaaaacacagttagaaaaatgacacagtagcccaatcatctacttttgtgatcgctaagaatttgtgtaattataccttcagaagtttgtttagaatttacatgataaaaaaaattatgtgtgagagtaattattttaaaatgcacattttaggcttgaagtagaaaatgccatgatgagaaaaactattaaaaaacaggatgaccaaattgagcgacttgagaaaatcctgcagcgttcaagtttgatgccacaggtgttcaagagctagatgaagtgcttgtcctagtaccttagcacatggttgctgaatacatgaatgaagagtgagaaaccagaagctctgatatttaactgccgtgataatgaattcaatgtgcaactatgggcaaattgtatttaatagtaattgcatattgtacatatttttcattcttattaacactgataaacttttcaacttatactgactttaataaaattgtattactaggctattaacatgatattttgtttcccattaaatgtgacatgcaaagacgtttattaaatgaaaatatttttgtatcttttatgtctgatgaaaat

SEQ ID NO: 57454 - DNA, 1050 bp, Homo sapiens
aagaatgttgtgtttcagtcctagagcaggggtcagtgaactttctgtaaagggccagatagtattatttaaggctttgtgaaccataagatccttgttgcaataactcagccctgtagttatagcacaaaagtagccattaacgatatgcagattgaaggggtgtagcagtgtcccactaaaattaattacaaaaaacaggtaatgggatgatttctcctacattatgaccttttttaaataaaaaagattgtgatagtctaaaatattttatatatattttgttgattcattcatctactgatggacatttaggtcatttctaaatgtaattttttttaattctttgttttagcttcaagaaacacaggatcaacttacagctactataagatgtactaaggggatggaaggcgacgcacaaaagtaaaatttgaagcagcgcacaaaataacttgagtatttataaagcaaaagagcactgtagtatgaaaattgtatcagttatgataataagtatgtctttgtgaagccaaaaaagtttcatttgtaagctgtattgaaatacatcatttttctacattattcctaaattttgcatattatcgacaaaacacagttagaaaaatgacacagtagcccaatcatctacttttgtgatcgctaagaatttgtgtaattataccttcagaagtttgtttagaatttacatgataaaaaaaattatgtgtgagagtaattattttaaaatgcacattttaggcttgaagtagaaaatgccatgatgagaaaaactattaaaaaacaggatgaccaaattgagcgacttgagaaaatcctgcagcgttcaagtttgattgtgttcacctattgaaaattaaaaatacattttgtttatggaaaagattaataaaacttaaagataaccactgtgagcaacttagagtaaaaattcgaaaactgaaaaataaggctagtgtactacaaaagagaatatctgaaaaagaagaaataaaatcgcagttaaagcatgaaatacttgaattggaa

SEQ ID NO: 57455 - DNA, 729 bp, Homo sapiens
  misc_feature (5)..(6): n is a, c, g, or t
  misc_feature (30)..(30): n is a, c, g, or t
gattnngcaggagacaaggtcagggtaatngccccagcacctggactcatttagatttaagtaaatgtactgaggctccagagaaaggtctccaagacttagactagagttacagattaaaagaagttaatcacttatatctttagataaatgcacactgacacgtagacatacatcttagaaaatatataagctctggaaaaccttgtaatttacagttggtctggagatattttctgggccttctctctgtaaccggttccagaaataaaaaactctcttcctccccagtttatctgcatctcgttattgggccgtgagaaatagcagccagaccctgagtttggtctgggaacacactggctgggcttcctgcctggcggtagagcttcactgtcctccttcccagccaaaatgtggcccttgaaggcttcctccccaactgaccggttttgggttctaggtactcagggaacaccgtcttcaaggaggccattttcatactgttcctggtttgatttttctgaaattaggaaatgccccttgaggcatccaggattgtctttatttcccctgaagcttcccctcctgaagaaaaaagttctcaaacaccctcaggactcaaaccccaagttcaccctgtgaaacattcccatttcctaaacccaggcaggctcatggccctcagcctctcagaccccatggaaaggggggggggggggggggggg

SEQ ID NO: 57456 - DNA, 312 bp, Homo sapiens
ggcaaaggcttttctccgtaaataaacctgaagttgcttcttttagccactgaactcggcattgctcgtgggagttgggggctcagggagaagtggtgcctggagccagaacgactggctgtcactcttggactctgcaggtttggccctggagtgggctgtgttccctgggtcgggatgagtttgattttgtgccttccatttataacaggtctggctgcccttagtgaggggcttgggggtggagaagtctctgctcagaaatttgctttgctcactgtaaacctttgtgttttataccattaaaccaaa

SEQ ID NO: 57457 - DNA, 522 bp, Homo sapiens
ctatatataagatcatgtcatctgcaaataggaacaatttgatgtcctcctttccgatttgaatgccctttatttctttctcttgtctaattactcttgataggacttcacatttatatactttgaatatttaaaatgtttacataaatgtcagaatcaactttcatttttcatagaaaaagaagatcctacttgttttgtagttttaatattaatcaattattattatctgagacaaattattaacaaaccatctattaaaatatttcaccacaaataaattccataaggaaaatatctacaactgtttttatgaaagaaaaaaaggcttctctacagttgcttaggcctggtgccatggcacacacctataaatcccagcgctgtgggaggccatggcaagaggatcctttgagcccaggagtttgagaccagcatggacaacaaagtgagacctcatctctacaaaaaataaaaaagaaattagctggccatggtggtgcgtgcctgtggtcctagcta

SEQ ID NO: 57458 - DNA, 428 bp, Homo sapiens
cagcctgagtcaccccactccttcatgtcttctcccagagcaggttggaacctcatccacattggatttatcacttcctattgtaatcctttgtcaaccagccagtctctcccacaagagtcccaaaagttctcaaatgccagtgtgcacaaaatcacctgcagcatgataaacagcaggtcacctggttccacgaccaagattccaatctggggcccaggaatgaacattttcataaacataccaggtgatcttcatgcaggtgatcctggggccccacactagatctgctgctctcatgggttccaggcttggggaatcttgtcttcttcaggggtaggcgtccccagctccagctcagcgcccatcacatggaataataaatgagagaccttggctcacagcatggcttccccccttctgccagc

SEQ ID NO: 57459 - DNA, 257 bp, Homo sapiens
gatttaaaagcaagtgatttttaaatccacgaaagatgcctaccttggatcctgctctggtccttattagccacacctctcttgacaggcagaggagttaggagtgaggggatattcccaccaagaccctacaaattgcactcttaggccatgccctgggtacccaaactctagaattccctcctcaaagggaccttaacccaacttcagagcctatataggccaattccttggtccattttccaaggggtggccaa

SEQ ID NO: 57460 - DNA, 261 bp, Homo sapiens
cttcactataaatgggttaacacatttactcatacaatcacactttaagtgaaaactgctaacatctatagagagggatggttttggcactaaaaggccaatacacttactttaataaatgctcatctgtataattatacataataagtgttttggacaaagacttcaaagtcttttaagcatttatcataaacgatgtgaactagtacaagaaagaagacccctgggccccaccataccacaggcttaggcatcatccca

SEQ ID NO: 57461 - DNA, 769 bp, Homo sapiens
atctctagattacttataatacaatgaaaatgctatgtaaatagttgttatactgtatttagggaataatgataagaaaaaaagtcggtacatgttcagtacagatgcaactgtagttttcttttgaatattttttatctcaggacgaagccccaaatgcagaattcatagatacagagggccaactgttcttggaatttgggttgaaagctgttaaagttcttttcagccaaaaaaaaatgcctcgtaataaattgtcatgtttgaaatgtatcatgcttgttttgctctacatagttttttggtactacataactgtagacttaagtatctttttggtggaaataaaatatgaaatctctttaattttgttaatgttaggtctggtattcgttccattaagttccactttaaagtatggaaaaatgttataaacatctgctttaaacaatgaatggtactgcaatagtcctgtaaagaaaaatgaatggagtaaagtccttcaagttttcatttaaagaatggcatagctttataatacattaagtttttaatatgcggaatgtatttaatatcctaaagcgatgaattgtcttggcattatgctatcttatgaaacactttcttactctcacattgtgtctttatagttttcaatatcagcaaaacctttaaatagtcttagttgggtgttgtgtatcattgtacagcaactgttagtacatgtggtatttctgatccatgtaataaagtacatttgtcatgtaac

SEQ ID NO: 57462 - DNA, 517 bp, Homo sapiens
ttcacatctgttaggatggcatccgttaaaagataaaacaaaataacaagtgttgacaaagatagggagaaactggaacccttgtacactgtggtgggaatgtcaaatggtgcatctgctatggaaaacgttatggcggtttctcagaaagttaaagaatacaactatcgtatgttctagcagtcatgcttgtgggtatatacccaaaataatcaggaggaggatttacttgcacacccatgttcacagcagccttattcataacagccaaaaggtggaaggaaccaaaggctccatcagcaggtgaatggataaacaatgtggtatagacatactctgggatgttattctgccttaaaagggaaagaaatcctgtccattgctacatggatgtaccttggaggacatcatgttatatgaaataagctggtcacaaaaggacaaatacagttgatcctttgtatccgtgggctctgcatccatgagcttaaccaaccactgatggaaaatatttgga

SEQ ID NO: 57463 - DNA, 1272 bp, Homo sapiens
gcaaaagaatgcatgtgcagttgtccacaagccggcttcggactgcccctggtatgggagaccagagtggctgctatcggtgtgggaaagaagggcactggtccaaagcagtgcccagtagatcgtacgggtcgtgtggcagactttactgagcagtataatgaacaatatggagcagttcgaacaccttacaccatgggctacggggaatccatgtattacaacgatgcatatggagcactcgactactataagcgataccgggtccgctcttatgaggcagtagcagcggcggcagcggcttctgcatacaactacgcagagcagaccatgtcccatctgcctcaagtccaaagcacaactgtgaccagccacctcaactctacttctgttgatccctatgacagacacctattgccaaactctggcgctgctgccacttcagctgctatggctgctgctgcagccaccacttcctcctactatggaagggacaggagcccactgcgtcgtgctgcagccatgctccccacagttggagagggctacggttatgggccagagagtgaattatctcaggcttccgcagctacacggaattctctgtatgacatggcccggtatgaacgggagcagtatgtggaccgagcccggtactcagccttttaaaaactggaggtaggataattgcggactgaaccctcgggctgcggtcatatatgagaacttgctccgcgcggtcccctttgccgggatgtttccattgcttcatgtttcagtaaacaaaaggagtttgtgaccaactatgttttctttcttaattcttctaagttgacttttctttcctcctgaaactagtctctgtagcctttcactctgttccttatattctcagcctctgagcagccctaggtaaggattatgctggcatcccctttttcctgtgcagtggaacccctcttatcttgctttccctaggagttgaatccttctccctgcctacctgcagcatctcctttccctttaaaatgaccatgtagtggcaagcagccttttactcttctgttagctctggactcttaacacttaagttactcttctgaaattgctaggaccattgggggttttgttgttttgtttgttttttatgtccgacctgtgatcgtggtacagcattagctgaaatttacccttgttttactccactcctcccttttttaaaaaaattttttgacaaataaatgtttctaacacttaaataacattcaaagt

SEQ ID NO: 57464 - DNA, 1264 bp, Homo sapiens
gcaaaagaatgcatgtgcagttgtccacaagccggcttcggactgcccctggtatgggagaccagagtggctgctatcggtgtgggaaagaagggcactggtccaaagcagtgcccagtagatcgtacgggtcgtgtggcagactttactgagcagtataatgaacaatatggagcagttcgaacaccttacaccatgggctacggggaatccatgtattacaacgatgcatatggagcactcgactactataagcgataccgggtccgctcttatgaggcagtagcagcggcggcagcggcttctgcatacaactacgcagagcagaccatgtcccatctgcctcaagtccaaagcacaactgtgaccagccacctcaactctacttctgttgatccctatgacagacacctattgccaaactctggcgctgctgccacttcagctgctatggctgctgctgcagccaccacttcctcctactatggaagggacaggagcccactgcgtcgtgctgcagccatgctccccacagttggagagggctacggttatgggccagagagtgaattatctcaggcttccgcagctacacggaattctctgtatgacatggcccggtatgaacgggagcagtatgtggaccgagcccggtactcagccttttaaaaactggaggtgtgaacctcaaatggactgaataaccctgagttggttgcagtcccaggagcctgatgttaatgaggctgccaggatgaaatactccagaactgttggggatccaaattcgggtctcaccctagcagaactgatccaagaacgtcacaacttttgaagtcgattggcacagatcaagaccaagatttggccctttgtctgtaataagtagaggaacttggtgtgagttaactttttttttcccccagccattggtgtctggagttcccatcatcaatagaaggattagagaattctaggaatgatttcttttgatttggcaagggagatttggtcaattaggggaactactggaactgtggctctcactctgtgacagtgtgacatgtaggtgtgttggaattgggtgaatgactggctgctccttgatatcctaccccttgtgaccatcatttctgaaagcttgtttactgtgaaagattaaaacaaaaacatttagaatagtgcattcgccatatatgacatctcagcatcttctgcttttcctggactccaaaattaaattgcagttcttgaaaatgtatgt

SEQ ID NO: 57465 - DNA, 788 bp, Homo sapiens
ggtggattcctatatatagctattgatagactcctaggtaattacatgggatatgagttagatccagtctgacttggtttgttttgttcttttttttccccccggaatacaggacaggacccagggcgcttgtacgcggagccaggctgctctccaggcattgtgtaagcctcttgtgttgtgctctctttcaggtaggataattgcggactgaaccctcgggctgcggtcatatatgagaacttgctccgcgcggtcccctttgccgggatgtttccattgcttcatgtttcagtaaacaaaaggagtttgtgaccaactatgttttctttcttaattcttctaagttgacttttctttcctcctgaaactagtctctgtagcctttcactctgttccttatattctcagcctctgagcagccctaggtaaggattatgctggcatcccctttttcctgtgcagtggaacccctcttatcttgctttccctaggagttgaatccttctccctgcctacctgcagcatctcctttccctttaaaatgaccatgtagtggcaagcagccttttactcttctgttagctctggactcttaacacttaagttactcttctgaaattgctaggaccattgggggttttgttgttttgtttgttttttatgtccgacctgtgatcgtggtacagcattagctgaaatttacccttgttttactccactcctcccttttttaaaaaaattttttgacaaataaatgtttctaacacttaaataacattcaaagt

SEQ ID NO: 57466 - DNA, 1001 bp, Homo sapiens
aaaaagcaaagccacagcaatttgctcttttatgtgaattgagaagcaaatgttatgaacctgtaataagttgtaccctatatgcatgtcagcaagacttgagatctcttgagaccaccatgcagctagtctgtgtttatgtgtgaagcaaatgatcttaaaatttatagtttgccattaatttttacttttaatgcagctggatctagcatggggtgggacatgcttccgaagtaagctggtataaatctatcagataacctgtctcttatgtttcaaagttaaatattaaattcatatattgtggtcttcaaaaggtattgctaggacattttaaaatgaattttgactgcaagcagtggttgttcaactaacctctttttagcgatgacttttaaagaaacttaccttccaggtgtgaacctcaaatggactgaataaccctgagttggttgcagtcccaggagcctgatgttaatgaggctgccaggatgaaatactccagaactgttggggatccaaattcgggtctcaccctagcagaactgatccaagaacgtcacaacttttgaagtcgattggcacagatcaagaccaagatttggccctttgtctgtaataagtagaggaacttggtgtgagttaactttttttttcccccagccattggtgtctggagttcccatcatcaatagaaggattagagaattctaggaatgatttcttttgatttggcaagggagatttggtcaattaggggaactactggaactgtggctctcactctgtgacagtgtgacatgtaggtgtgttggaattgggtgaatgactggctgctccttgatatcctaccccttgtgaccatcatttctgaaagcttgtttactgtgaaagattaaaacaaaaacatttagaatagtgcattcgccatatatgacatctcagcatcttctgcttttcctggactccaaaattaaattgcagttcttgaaaatgtatgt

SEQ ID NO: 57467 - DNA, 784 bp, Homo sapiens
gcaaaagaatgcatgtgcagttgtccacaagccggcttcggactgcccctggtatgggagaccagagtggctgctatcggtgtgggaaagaagggcactggtccaaagcagtgcccagtagatcgtacgggtcgtgtggcagactttactgagcagtataatgaacaatatggagcagttcgaacaccttacaccatgggctacggggaatccatgtattacaacgatgcatatggagcactcgactactataagcgataccgggtccgctcttatgaggcagtagcagcggcggcagcggcttctgcatacaactacgcagagcagaccatgtcccatctgcctcaagtccaaagcacaactgtgaccagccacctcaactctacttctgttgatccctatgacagacacctattgccaaactctggcgctgctgccacttcagctgctatggctgctgctgcagccaccacttcctcctactatggaagggacaggagcccactgcgtcgtgctgcagccatgctccccacagttggagagggctacggttatgggccagagagtgaattatctcaggcttccgcagctacacggaattctctgtatgacatggcccggtatgaacgggagcagtatgtggaccgagcccggtactcagccttttaaaaactggaggtgagagatgggtgggaatggttaaaagattccatttagttcccttgaaagagacccatgcttcataaaagtggctagagccacctgtgctctccggacagtatcc

SEQ ID NO: 57468 - DNA, 1226 bp, Homo sapiens
gcaaaagaatgcatgtgcagttgtccacaagccggcttcggactgcccctggtatgggagaccagagtggctgctatcggtgtgggaaagaagggcactggtccaaagcagtgcccagtagatcgtacgggtcgtgtggcagactttactgagcagtataatgaacaatatggagcagttcgaacaccttacaccatgggctacggggaatccatgtattacaacgatgcatatggagcactcgactactataagcgataccgggtccgctcttatgaggcagtagcagcggcggcagcggcttctgcatacaactacgcagagcagaccatgtcccatctgcctcaagtccaaagcacaactgtgaccagccacctcaactctacttctgttgatccctatgacagacacctattgccaaactctggcgctgctgccacttcagctgctatggctgctgctgcagccaccacttcctcctactatggaagggacaggagcccactgcgtcgtgctgcagccatgctccccacagttggagagggctacggttatgggccagagagtgaattatctcaggcttccgcagctacacggaattctctgtatgacatggcccggtatgaacgggagcagtatgtggaccgagcccggtactcagccttttaaaaactggaggtaggataattgcggactgaaccctcgggctgcggtcatatatgagaacttgctccgcgcggtcccctttgccgggatgtttccattgcttcatgtttcagtaaacaaaaggagtttgtgaccaactatgttttctttcttaattcttctaagttgacttttctttcctcctgaaactagtctctgtagcctttcactctgttccttatattctcagcctctgagcagccctaggtaaggattatgctggcatcccctttttcctgtgcagtggaacccctcttatcttgctttcccctttaaaatgaccatgtagtggcaagcagccttttactcttctgttagctctggactcttaacacttaagttactcttctgaaattgctaggaccattgggggttttgttgttttgtttgttttttatgtccgacctgtgatcgtggtacagcattagctgaaatttacccttgttttactccactcctcccttttttaaaaaaattttttgacaaataaatgtttctaacacttaaataacattcaaagt

SEQ ID NO: 57469 - DNA, 356 bp, Homo sapiens
ctgaggccaagagactggccaccagcataactcgggaggtcccagggcactgacttaagcctaggcatctggacagccagtttgcccacagccacctcattgcataagagctatgctctcgatgagaaatgtgcaccccagggagcagatatgggggtgtggctgagatttggcactggacttccaaagctgcaggaggtgtggctggcacctgtgggcccaggaccctccctgacacatgggaggcctgtctccagaggctccttattccctcttacaggccctaaaaataaagctaccaggacacagttattctggcctcagtgttaaacagagccctgggaaagaaaggggct

SEQ ID NO: 57470 - DNA, 264 bp, Homo sapiens
gctcaggcggtaatacgagtgacgaggagtagctgcagatacagatggagctcacctgccactcacctcctgctgtgcagcctggtccctaacaaaccacggacctatacttgtcgggtccatggccctggggttgggggcctctgatctcaagggtccttataagtaaaaagcggaactgagagagagaataaagaaagatttgaagattctagacagctggctttggagatgaagataggggaagccaaggaatgcaaatga

SEQ ID NO: 57471 - DNA, 433 bp, Homo sapiens
atccagtagagggcaggattcctagctggtcctcccctgttacctggttcccaaccattttgcttgagctaaatttgcaatgggtagcagcagcctaagccactggtatcacagctcccaccatgcttatgaatatgggcacaaggggcttcctgatgacttgtgagtacccggcaggatcaagccttgatgtcacattctatttgcatttatattagccggattcaactacatgcccttacccaataaaaagggtgggtgaggaagagaaaagcaatttaaaaggcgaggcttagccaggggtgagcatcaagtgcgaaacgctaattcgatgttcgtttggttgccattcctatgagcagctcactgtagcgtttgtgattatagtatttatatactgaacaagtactttttatatgaattgtgtaactgc

SEQ ID NO: 57472 - DNA, 2177 bp, Homo sapiens
  misc_feature (18)..(19): n is a, c, g, or t
  misc_feature (21)..(21): n is a, c, g, or t
ggttggaagccccgcccnncngaggagtttcccaaaaccctgcgcggcggctttgaccgcgctaagatggcgactcccatgcatcggctaatagcccggagacaagctgaagcaaataagcaacatgtaagatgtcagaaatgcttggaatttggacattggacttatgaatgcacaggaaaaagaaaatacctacataggccctcaaggacagcagaactaaagaaagctttaaaagaaaaagaaaacagattattattgcaacaaagcattggagaaaccaatgtagaaagaaaggccaagaaaaaaaggtctaagagtgtaaccagttccagtagcagtagcagtgacagttctgccagtgattcttcatcagagagtgaagaaacatctacctcttcctcctcagaggacagtgacactgatgaaagctcctctagttcctcatcctcagcctcctccacaacctcttcctcctcctctgattcagactcagattccagctcttccagtagcagtagcaccagcacagatagcagctctgacgatgaaccaccaaagaagaagaaaaagaaatagagttgctccattcatattggactgatggactgaaaacattgatgtgattcttgaaagggaatttagaatatgttaaggccaagtaggttaactggtgaacatttctagaattcaaaagtttctaaatgttttacattgtaagagcatagagaatattaataatggcttatagagagagacttttatttgaagggtgaatcttgttttttttatctttaaaatatatctctagaacttaaagctgaaatctgcaaatctgtttgtgtgatgaaactatcttttctctctgtgaaataaatgccatactttgttatatatgttagtggtatgtatcagacatattttcaggatggtgcgtcaggatatctggcagtggatttctaatgcttttggctgtatgttatgtaagatttaatatgttgttactgtaagcttaggagttttcctactattaataaatgtgctctatttttacatttatgttcagaaagttatctgactttttgtcctaagtggtatgttcaaggagcctattaatatatttatagtttttgaatgctgtaagtttcaaattgctgtgttacgtcattcattttcttctggttccttaagtttttcaagttatccttttctgaggaaaattattctagaggaacctaaaaagggacaaaaaaattgaaacttcttaggagtctaatcttggtgccttctgttaaaagtcagtgtatcagaaaagaaagcagccatgtaagaggctaacttaaatagaagtgctagaaatatctttgtgtattaacatgcaataaaaggtaccattcaaagcagggggaaaggtaggaagaagaggtaatttttactgaaaattagggcaatgttggtcgccttttattaaaagctttttttaagctttcataaagattgctttttgctatttttgaaaatatggtattatagtttgtatggtaactggtcatatatgacagtctactgcatatatatgaatgactaggattaatctggtgtgtttacataggatatacatagttgaaatctagcatgaaaggttaaaaaggagatactgcacaatatttcttaaaagtaaaatgctgttattgtgatgagtctttggtttaacatcacagtattctgtgatgtctttttaactttttggaaagaggtatcatttgtagaaaaaatttgatttgggttaaatataggtttttaaaactataaatgttgtcttttttatatttttatgaaaaagcagtagaaaattacttttgaagaaaacaggctatttaaatattgaaatatatgtatgttgtgagtttaaggagcctgtaattgtcagttttacaaaaccatctgtgttcaatggttgtaaataaattctcaaaacatcatttcaaaggctgcctacagaatattatcacttgacagatagagttaataaattaccaatcaggcacattttataatgtttgtctctgtaaaggtaatattagcagttaaagaacacggatgagaaaagaatgtgttacataggttgcatcacttgcagttaaataaaactcacaatttgtgctcacaagcttaaa

SEQ ID NO: 57473 - DNA, 732 bp, Homo sapiens
gcaaaaagcaatctttatgaaagcttaaaaaaagcttttaataaaaggcgaccaacattgccctatttttgaaaatatggtattatagtttgtatggtaactggtcatatatgacagtctactgcatatatatgaatgactaggattaatctggtgtgtttacataggatatacatagttgaaatctagcatgaaaggttaaaaaggagatactgcacaatatttcttaaaagtaaaatgctgttattgtgatgagtctttggtttaacatcacagtattctgtgatgtctttttaactttttggaaagaggtatcatttgtagaaaaaatttgatttgggttaaatataggtttttaaaactataaatgttgtcttttttatatttttatgaaaaagcagtagaaaattacttttgaagaaaacaggctatttaaatattgaaatatatgtatgttgtgagtttaaggagcctgtaattgtcagttttacaaaaccatctgtgttcaatggttgtaaataaattctcaaaacatcatttcaaaggctgcctacagaatattatcacttgacagatagagttaataaattaccaatcaggcacattttataatgtttgtctctgtaaaggtaatattagcagttaaagaacacggatgagaaaagaatgtgttacataggttgcatcacttgcagttaaataaaactcacaatttgtgctcacaagcttaaa

SEQ ID NO: 57474 - DNA, 2506 bp, Homo sapiens
  misc_feature (18)..(19): n is a, c, g, or t
  misc_feature (21)..(21): n is a, c, g, or t
  misc_feature (2359)..(2359): n is a, c, g, or t
ggttggaagccccgcccnncngaggagtttcccaaaaccctgcgcggcggctttgaccgcgctaagatggcgactcccatgcatcggctaatagcccggagacaagctgaagcaaataagcaacatgtaagatgtcagaaatgcttggaatttggacattggacttatgaatgcacaggaaaaagaaaatacctacataggccctcaaggacagcagaactaaagaaagctttaaaagaaaaagaaaacagattattattgcaacaaagcattggagaaaccaatgtagaaagaaaggccaagaaaaaaaggtctaagagtgtaaccagttccagtagcagtagcagtgacagttctgccagtgattcttcatcagagagtgaagaaacatctacctcttcctcctcagaggacagtgacactgatgaaagctcctctagttcctcatcctcagcctcctccacaacctcttcctcctcctctgattcagactcagattccagctcttccagtagcagtagcaccagcacagatagcagctctgacgatgaaccaccaaagaagaagaaaaagaaatagagttgctccattcatattggactgatggactgaaaacattgatgtgattcttgaaagggaatttagaatatgttaaggccaagtaggttaactggtgaacatttctagaattcaaaagtttctaaatgttttacattgtaagagcatagagaatattaataatggcttatagagagagacttttatttgaagggtgaatcttgttttttttatctttaaaatatatctctagaacttaaagctgaaatctgcaaatctgtttgtgtgatgaaactatcttttctctctgtgaaataaatgccatactttgttatatatgttagtggtatgtatcagacatattttcaggatggtgcgtcaggatatctggcagtggatttctaatgcttttggctgtatgttatgtaagatttaatatgttgttactgtaagcttaggagttttcctactattaataaatgtgctctatttttacatttatgttcagaaagttatctgactttttgtcctaagtggtatgttcaaggagcctattaatatatttatagtttttgaatgctgtaagtttcaaattgctgtgttacgtcattcattttcttctggttccttaagtttttcaagttatccttttctgaggaaaattattctagaggaacctaaaaagggacaaaaaaattgaaacttcttaggagtctaatcttggtgccttctgttaaaagtcagtgtatcagaaaagaaagcagccatgtaagaggctaacttaaatagaagtgctagaaatatctttgtgtattaacatgcaataaaaggtaccattcaaagcagggggaaaggtaggaagaagaggtaatttttactgaaaattagggcaatgttggtcgccttttattaaaagctttttttaagctttcataaagattgctttttgctatttttgaaaatatggtattatagtttgtatggtaactggtcatatatgacagtctactgcatatatatgaatgactaggattaatctggtgtgtttacataggatatacatagttgaaatctagcatgaaaggttaaaaaggagatactgcacaatatttcttaaaagtaaaatgctgttattgtgatgagtctttggtttaacatcacagtattctgtgatgtctttttaactttttggaaagaggtatcatttgtagaaaaaatttgatttgggttaaatataggtttttaaaactataaatgttgtcttttttatatttttatgaaaaagcagtagaaaattacttttgaagaaaacaggctatttaaatattgaaatatatgtatgttgtgagtttaaggagcctgtaattgtcagttttacaaaaccatctgtgttcaatggttgtaaataaattctcaaaacatcatttcaaaggctgcctacagaatattatcacttgacagatagagttaataaattaccaatcaggcacattttataatgtttgtctctgtaaaggtaatattagcagttaaagaacacggatgagaaaagaatgtgttacataggttgcatcacttgcagttaaataaaactcacaatttgtgctcacaagcttaaaaaaaaaaaaaaaaaaaaaaaaaaaatttttggggggctgggcccgaaaaagtttttaaaaccattaccgtgggggcgccggggccccatgtaggcgtaacggcgaaccatgggcgcaaacgcggtggccccatcaggaaagacccggggccacagacataggtcgctgggggtttctccccnccgatgaaaaaaaaacggccggggggggcagacccaaacgtgtccggaaaccaatcccacagagggagattccatgaggagccatacacagggggtccttccaaccacgggggctcccacgaggagcctcagcaatctcaacatacg

SEQ ID NO: 57475 - DNA, 2293 bp, Homo sapiens
  misc_feature (18)..(19): n is a, c, g, or t
  misc_feature (21)..(21): n is a, c, g, or t
ggttggaagccccgcccnncngaggagtttcccaaaaccctgcgcggcggctttgaccgcgctaagatggcgactcccatgcatcggctaatagcccggagacaagcatggggtttcaccatgttagccaggatggtctcaatctcctgacctcgtaatccgcctgccttagcctcccaaagtgctgggattataggtgtgagccaccacacccagccggaaatgaagcaaataagcaacatgtaagatgtcagaaatgcttggaatttggacattggacttatgaatgcacaggaaaaagaaaatacctacataggccctcaaggacagcagaactaaagaaagctttaaaagaaaaagaaaacagattattattgcaacaaagcattggagaaaccaatgtagaaagaaaggccaagaaaaaaaggtctaagagtgtaaccagttccagtagcagtagcagtgacagttctgccagtgattcttcatcagagagtgaagaaacatctacctcttcctcctcagaggacagtgacactgatgaaagctcctctagttcctcatcctcagcctcctccacaacctcttcctcctcctctgattcagactcagattccagctcttccagtagcagtagcaccagcacagatagcagctctgacgatgaaccaccaaagaagaagaaaaagaaatagagttgctccattcatattggactgatggactgaaaacattgatgtgattcttgaaagggaatttagaatatgttaaggccaagtaggttaactggtgaacatttctagaattcaaaagtttctaaatgttttacattgtaagagcatagagaatattaataatggcttatagagagagacttttatttgaagggtgaatcttgttttttttatctttaaaatatatctctagaacttaaagctgaaatctgcaaatctgtttgtgtgatgaaactatcttttctctctgtgaaataaatgccatactttgttatatatgttagtggtatgtatcagacatattttcaggatggtgcgtcaggatatctggcagtggatttctaatgcttttggctgtatgttatgtaagatttaatatgttgttactgtaagcttaggagttttcctactattaataaatgtgctctatttttacatttatgttcagaaagttatctgactttttgtcctaagtggtatgttcaaggagcctattaatatatttatagtttttgaatgctgtaagtttcaaattgctgtgttacgtcattcattttcttctggttccttaagtttttcaagttatccttttctgaggaaaattattctagaggaacctaaaaagggacaaaaaaattgaaacttcttaggagtctaatcttggtgccttctgttaaaagtcagtgtatcagaaaagaaagcagccatgtaagaggctaacttaaatagaagtgctagaaatatctttgtgtattaacatgcaataaaaggtaccattcaaagcagggggaaaggtaggaagaagaggtaatttttactgaaaattagggcaatgttggtcgccttttattaaaagctttttttaagctttcataaagattgctttttgctatttttgaaaatatggtattatagtttgtatggtaactggtcatatatgacagtctactgcatatatatgaatgactaggattaatctggtgtgtttacataggatatacatagttgaaatctagcatgaaaggttaaaaaggagatactgcacaatatttcttaaaagtaaaatgctgttattgtgatgagtctttggtttaacatcacagtattctgtgatgtctttttaactttttggaaagaggtatcatttgtagaaaaaatttgatttgggttaaatataggtttttaaaactataaatgttgtcttttttatatttttatgaaaaagcagtagaaaattacttttgaagaaaacaggctatttaaatattgaaatatatgtatgttgtgagtttaaggagcctgtaattgtcagttttacaaaaccatctgtgttcaatggttgtaaataaattctcaaaacatcatttcaaaggctgcctacagaatattatcacttgacagatagagttaataaattaccaatcaggcacattttataatgtttgtctctgtaaaggtaatattagcagttaaagaacacggatgagaaaagaatgtgttacataggttgcatcacttgcagttaaataaaactcacaatttgtgctcacaagcttaaa

SEQ ID NO: 57476 - DNA, 2271 bp, Homo sapiens
  misc_feature (18)..(19): n is a, c, g, or t
  misc_feature (21)..(21): n is a, c, g, or t
ggttggaagccccgcccnncngaggagtttcccaaaaccctgcgcggcggctttgaccgcgctaagatggcgactcccatgcatcggctaatagcccggagacaagcattcgacacagagttgcagcctgtcaagaccttttggatcctgattcagccatccatcgttattagtgaagcaaataagcaacatgtaagatgtcagaaatgcttggaatttggacattggacttatgaatgcacaggaaaaagaaaatacctacataggccctcaaggacagcagaactaaagaaagctttaaaagaaaaagaaaacagattattattgcaacaaaggagcttttttccccctcgtgtttatcagcattggagaaaccaatgtagaaagaaaggccaagaaaaaaaggtctaagagtgtaaccagttccagtagcagtagcagtgacagttctgccagtgattcttcatcagagagtgaagaaacatctacctcttcctcctcagaggacagtgacactgatgaaagctcctctagttcctcatcctcagcctcctccacaacctcttcctcctcctctgattcagactcagattccagctcttccagtagcagtagcaccagcacagatagcagctctgacgatgaaccaccaaagaagaagaaaaagaaatagagttgctccattcatattggactgatggactgaaaacattgatgtgattcttgaaagggaatttagaatatgttaaggccaagtaggttaactggtgaacatttctagaattcaaaagtttctaaatgttttacattgtaagagcatagagaatattaataatggcttatagagagagacttttatttgaagggtgaatcttgttttttttatctttaaaatatatctctagaacttaaagctgaaatctgcaaatctgtttgtgtgatgaaactatcttttctctctgtgaaataaatgccatactttgttatatatgttagtggtatgtatcagacatattttcaggatggtgcgtcaggatatctggcagtggatttctaatgcttttggctgtatgttatgtaagatttaatatgttgttactgtaagcttaggagttttcctactattaataaatgtgctctatttttacatttatgttcagaaagttatctgactttttgtcctaagtggtatgttcaaggagcctattaatatatttatagtttttgaatgctgtaagtttcaaattgctgtgttacgtcattcattttcttctggttccttaagtttttcaagttatccttttctgaggaaaattattctagaggaacctaaaaagggacaaaaaaattgaaacttcttaggagtctaatcttggtgccttctgttaaaagtcagtgtatcagaaaagaaagcagccatgtaagaggctaacttaaatagaagtgctagaaatatctttgtgtattaacatgcaataaaaggtaccattcaaagcagggggaaaggtaggaagaagaggtaatttttactgaaaattagggcaatgttggtcgccttttattaaaagctttttttaagctttcataaagattgctttttgctatttttgaaaatatggtattatagtttgtatggtaactggtcatatatgacagtctactgcatatatatgaatgactaggattaatctggtgtgtttacataggatatacatagttgaaatctagcatgaaaggttaaaaaggagatactgcacaatatttcttaaaagtaaaatgctgttattgtgatgagtctttggtttaacatcacagtattctgtgatgtctttttaactttttggaaagaggtatcatttgtagaaaaaatttgatttgggttaaatataggtttttaaaactataaatgttgtcttttttatatttttatgaaaaagcagtagaaaattacttttgaagaaaacaggctatttaaatattgaaatatatgtatgttgtgagtttaaggagcctgtaattgtcagttttacaaaaccatctgtgttcaatggttgtaaataaattctcaaaacatcatttcaaaggctgcctacagaatattatcacttgacagatagagttaataaattaccaatcaggcacattttataatgtttgtctctgtaaaggtaatattagcagttaaagaacacggatgagaaaagaatgtgttacataggttgcatcacttgcagttaaataaaactcacaatttgtgctcacaagcttaaa

SEQ ID NO: 57477 - DNA, 1973 bp, Homo sapiens
  misc_feature (18)..(19): n is a, c, g, or t
  misc_feature (21)..(21): n is a, c, g, or t
ggttggaagccccgcccnncngaggagtttcccaaaaccctgcgcggcggctttgaccgcgctaagatggcgactcccatgcatcggctaatagcccggagacaagcgtctaagagtgtaaccagttccagtagcagtagcagtgacagttctgccagtgattcttcatcagagagtgaagaaacatctacctcttcctcctcagaggacagtgacactgatgaaagctcctctagttcctcatcctcagcctcctccacaacctcttcctcctcctctgattcagactcagattccagctcttccagtagcagtagcaccagcacagatagcagctctgacgatgaaccaccaaagaagaagaaaaagaaatagagttgctccattcatattggactgatggactgaaaacattgatgtgattcttgaaagggaatttagaatatgttaaggccaagtaggttaactggtgaacatttctagaattcaaaagtttctaaatgttttacattgtaagagcatagagaatattaataatggcttatagagagagacttttatttgaagggtgaatcttgttttttttatctttaaaatatatctctagaacttaaagctgaaatctgcaaatctgtttgtgtgatgaaactatcttttctctctgtgaaataaatgccatactttgttatatatgttagtggtatgtatcagacatattttcaggatggtgcgtcaggatatctggcagtggatttctaatgcttttggctgtatgttatgtaagatttaatatgttgttactgtaagcttaggagttttcctactattaataaatgtgctctatttttacatttatgttcagaaagttatctgactttttgtcctaagtggtatgttcaaggagcctattaatatatttatagtttttgaatgctgtaagtttcaaattgctgtgttacgtcattcattttcttctggttccttaagtttttcaagttatccttttctgaggaaaattattctagaggaacctaaaaagggacaaaaaaattgaaacttcttaggagtctaatcttggtgccttctgttaaaagtcagtgtatcagaaaagaaagcagccatgtaagaggctaacttaaatagaagtgctagaaatatctttgtgtattaacatgcaataaaaggtaccattcaaagcagggggaaaggtaggaagaagaggtaatttttactgaaaattagggcaatgttggtcgccttttattaaaagctttttttaagctttcataaagattgctttttgctatttttgaaaatatggtattatagtttgtatggtaactggtcatatatgacagtctactgcatatatatgaatgactaggattaatctggtgtgtttacataggatatacatagttgaaatctagcatgaaaggttaaaaaggagatactgcacaatatttcttaaaagtaaaatgctgttattgtgatgagtctttggtttaacatcacagtattctgtgatgtctttttaactttttggaaagaggtatcatttgtagaaaaaatttgatttgggttaaatataggtttttaaaactataaatgttgtcttttttatatttttatgaaaaagcagtagaaaattacttttgaagaaaacaggctatttaaatattgaaatatatgtatgttgtgagtttaaggagcctgtaattgtcagttttacaaaaccatctgtgttcaatggttgtaaataaattctcaaaacatcatttcaaaggctgcctacagaatattatcacttgacagatagagttaataaattaccaatcaggcacattttataatgtttgtctctgtaaaggtaatattagcagttaaagaacacggatgagaaaagaatgtgttacataggttgcatcacttgcagttaaataaaactcacaatttgtgctcacaagcttaaa

SEQ ID NO: 57478 - DNA, 2081 bp, Homo sapiens
  misc_feature (18)..(19): n is a, c, g, or t
  misc_feature (21)..(21): n is a, c, g, or t
ggttggaagccccgcccnncngaggagtttcccaaaaccctgcgcggcggctttgaccgcgctaagatggcgactcccatgcatcggctaatagcccggagacaagcattcgacacagagttgcagcctgtcaagaccttttggatcctgattcagccatccatcgttattagcattggagaaaccaatgtagaaagaaaggccaagaaaaaaaggtctaagagtgtaaccagttccagtagcagtagcagtgacagttctgccagtgattcttcatcagagagtgaagaaacatctacctcttcctcctcagaggacagtgacactgatgaaagctcctctagttcctcatcctcagcctcctccacaacctcttcctcctcctctgattcagactcagattccagctcttccagtagcagtagcaccagcacagatagcagctctgacgatgaaccaccaaagaagaagaaaaagaaatagagttgctccattcatattggactgatggactgaaaacattgatgtgattcttgaaagggaatttagaatatgttaaggccaagtaggttaactggtgaacatttctagaattcaaaagtttctaaatgttttacattgtaagagcatagagaatattaataatggcttatagagagagacttttatttgaagggtgaatcttgttttttttatctttaaaatatatctctagaacttaaagctgaaatctgcaaatctgtttgtgtgatgaaactatcttttctctctgtgaaataaatgccatactttgttatatatgttagtggtatgtatcagacatattttcaggatggtgcgtcaggatatctggcagtggatttctaatgcttttggctgtatgttatgtaagatttaatatgttgttactgtaagcttaggagttttcctactattaataaatgtgctctatttttacatttatgttcagaaagttatctgactttttgtcctaagtggtatgttcaaggagcctattaatatatttatagtttttgaatgctgtaagtttcaaattgctgtgttacgtcattcattttcttctggttccttaagtttttcaagttatccttttctgaggaaaattattctagaggaacctaaaaagggacaaaaaaattgaaacttcttaggagtctaatcttggtgccttctgttaaaagtcagtgtatcagaaaagaaagcagccatgtaagaggctaacttaaatagaagtgctagaaatatctttgtgtattaacatgcaataaaaggtaccattcaaagcagggggaaaggtaggaagaagaggtaatttttactgaaaattagggcaatgttggtcgccttttattaaaagctttttttaagctttcataaagattgctttttgctatttttgaaaatatggtattatagtttgtatggtaactggtcatatatgacagtctactgcatatatatgaatgactaggattaatctggtgtgtttacataggatatacatagttgaaatctagcatgaaaggttaaaaaggagatactgcacaatatttcttaaaagtaaaatgctgttattgtgatgagtctttggtttaacatcacagtattctgtgatgtctttttaactttttggaaagaggtatcatttgtagaaaaaatttgatttgggttaaatataggtttttaaaactataaatgttgtcttttttatatttttatgaaaaagcagtagaaaattacttttgaagaaaacaggctatttaaatattgaaatatatgtatgttgtgagtttaaggagcctgtaattgtcagttttacaaaaccatctgtgttcaatggttgtaaataaattctcaaaacatcatttcaaaggctgcctacagaatattatcacttgacagatagagttaataaattaccaatcaggcacattttataatgtttgtctctgtaaaggtaatattagcagttaaagaacacggatgagaaaagaatgtgttacataggttgcatcacttgcagttaaataaaactcacaatttgtgctcacaagcttaaa

SEQ ID NO: 57479 - DNA, 1076 bp, Homo sapiens
  misc_feature (18)..(19): n is a, c, g, or t
  misc_feature (21)..(21): n is a, c, g, or t
ggttggaagccccgcccnncngaggagtttcccaaaaccctgcgcggcggctttgaccgcgctaagatggcgactcccatgcatcggctaatagcccggagacaagcattcgacacagagttgcagcctgtcaagaccttttggatcctgattcagccatccatcgttattagtgaagcaaataagcaacatgtaagatgtcagaaatgcttggaatttggacattggacttatgaatgcacaggaaaaagaaaatacctacataggccctcaaggacagcagaactaaagaaagctttaaaagaaaaagaaaacagattattattgcaacaaaggtctaagagtgtaaccagttccagtagcagtagcagtgacagttctgccagtgattcttcatcagagagtgaagaaacatctacctcttcctcctcagaggacagtgacactgatgaaagctcctctagttcctcatcctcagcctcctccacaacctcttcctcctcctctgattcagactcagattccagctcttccagtagcagtagcaccagcacagatagcagctctgacgatgaaccaccaaagaagaagaaaaagaaatagagttgctccattcatattggactgatggactgaaaacattgatgtgattcttgaaagggaatttagaatatgttaaggccaagtaggttaactggtgaacatttctagaattcaaaagtttctaaatgttttacattgtaagagcatagagaatattaataatggcttatagagagagacttttatttgaagggtgaatcttgttttttttatctttaaaatatatctctagaacttaaagctgaaatctgcaaatctgtttgtgtgatgaaactatcttttctctctgtgaaataaatgccatactttgttatatatgttagtggtatgtatcagacatattttcaggatggtgcgtcaggatatctggcagtggatttctaatgcttttggctgtatgttatgtaagatttaatatgttgttactgtaagcttaggagttttcctactattaataaatgtgctctattttt

SEQ ID NO: 57480 - DNA, 403 bp, Homo sapiens
cttgaacctgggaggcagaggttgcagtgagctgagattgtgccactgcactccacactgggcaacagagcaagactctgtctcgaaaagaaaaaaaaaatgaaattgcttttaacattctattacatgtcaccttcccatgtatataactctgtattgtctaataggtctaagagtgtaaccagttccagtagcagtagcagtgacagttctgccagtgattcttcatcagagagtgaagaaacatctacctcttcctcctcagaggacagtgacactgatgaaagctcctctagttcctcatcctcagcctcctccacaacctcttcctcctcctctgattcagactcagattccagctcttccagtagcagtagcaccagcacagatagcagctctgacg

SEQ ID NO: 57481 - DNA, 437 bp, Homo sapiens
tgtgattcttgaaagggaatttagaatatgttaaggccaagtaggttaactggtgaacatttctagaattcaaaagtttctaaatgttttacattgtaagagcatagagaatattaataatggcttatagagagagacttttatttgaagggtgaatcttgttttttttatctttaaaatatatctctagaacttaaagctgaaatctgcaaatctgtttgtgtgatgaaactatcttttctctctgtgaaataaatgccatactttgttatatatgttagtggtatgtatcagacatattttcaggatggtgcgtcaggatatctggcagtggatttctaatgcttttggctgtatgttatgtaagatttaatatgttgttactgtaagcttaggagttttcctactattaataaatgtgctctatttttacattt

SEQ ID NO: 57482 - DNA, 1052 bp, Homo sapiens
  misc_feature (18)..(19): n is a, c, g, or t
  misc_feature (21)..(21): n is a, c, g, or t
ggttggaagccccgcccnncngaggagtttcccaaaaccctgcgcggcggctttgaccgcgctaagatggcgactcccatgcatcggctaatagcccggagacaagctgaagcaaataagcaacatgtaagatgtcagaaatgcttggaatttggacattggacttatgaatgcacaggaaaaagaaaatacctacataggccctcaaggacagcagaactaaagaaagctttaaaagaaaaagaaaacagattattattgcaacaaagcattggagaaaccaatgtagaaagaaaggccaagaaaaaaaggtctaagagtgtaaccagttccagtagcagtagcagtgacagttctgccagtgattcttcatcagagagtgaagaaacatctacctcttcctcctcagaggacagtgacactgatgaaagctcctctagttcctcatcctcagcctcctccacaacctcttcctcctcctctgattcagactcagattccagctcttccagtagcagtagcaccagcacagatagcagctctgacgatgaaccaccaaagaagaagaaaaagaaatagagttgctccattcatattggactgatggactgaaaacattgatgtgattcttgaaagggaatttagaatatgttaaggccaagtaggttaactggtgaacatttctagaattcaaaagtttctaaatgttttacattgtaagagcatagagaatattaataatggcttatagagagagacttttatttgaagggtgaatcttgttttttttatctttaaaatatatctctagaacttaaagctgaaatctgcaaatctgtttgtgtgatgaaactatcttttctctctgtgaaataaatgccatactttgttatatatgttagtggtatgtatcagacatattttcaggatggtgcgtcaggatatctggcagtggatttctaatgcttttggctgtatgttatgtaagatttaatatgttgttactgtaagcttaggagttttcctactattaataaatgtgctctattttt

SEQ ID NO: 57483 - DNA, 2243 bp, Homo sapiens
  misc_feature (18)..(19): n is a, c, g, or t
  misc_feature (21)..(21): n is a, c, g, or t
ggttggaagccccgcccnncngaggagtttcccaaaaccctgcgcggcggctttgaccgcgctaagatggcgactcccatgcatcggctaatagcccggagacaagcattcgacacagagttgcagcctgtcaagaccttttggatcctgattcagccatccatcgttattagtgaagcaaataagcaacatgtaagatgtcagaaatgcttggaatttggacattggacttatgaatgcacaggaaaaagaaaatacctacataggccctcaaggacagcagaactaaagaaagctttaaaagaaaaagaaaacagattattattgcaacaaagcattggagaaaccaatgtagaaagaaaggccaagaaaaaaaggtctaagagtgtaaccagttccagtagcagtagcagtgacagttctgccagtgattcttcatcagagagtgaagaaacatctacctcttcctcctcagaggacagtgacactgatgaaagctcctctagttcctcatcctcagcctcctccacaacctcttcctcctcctctgattcagactcagattccagctcttccagtagcagtagcaccagcacagatagcagctctgacgatgaaccaccaaagaagaagaaaaagaaatagagttgctccattcatattggactgatggactgaaaacattgatgtgattcttgaaagggaatttagaatatgttaaggccaagtaggttaactggtgaacatttctagaattcaaaagtttctaaatgttttacattgtaagagcatagagaatattaataatggcttatagagagagacttttatttgaagggtgaatcttgttttttttatctttaaaatatatctctagaacttaaagctgaaatctgcaaatctgtttgtgtgatgaaactatcttttctctctgtgaaataaatgccatactttgttatatatgttagtggtatgtatcagacatattttcaggatggtgcgtcaggatatctggcagtggatttctaatgcttttggctgtatgttatgtaagatttaatatgttgttactgtaagcttaggagttttcctactattaataaatgtgctctatttttacatttatgttcagaaagttatctgactttttgtcctaagtggtatgttcaaggagcctattaatatatttatagtttttgaatgctgtaagtttcaaattgctgtgttacgtcattcattttcttctggttccttaagtttttcaagttatccttttctgaggaaaattattctagaggaacctaaaaagggacaaaaaaattgaaacttcttaggagtctaatcttggtgccttctgttaaaagtcagtgtatcagaaaagaaagcagccatgtaagaggctaacttaaatagaagtgctagaaatatctttgtgtattaacatgcaataaaaggtaccattcaaagcagggggaaaggtaggaagaagaggtaatttttactgaaaattagggcaatgttggtcgccttttattaaaagctttttttaagctttcataaagattgctttttgctatttttgaaaatatggtattatagtttgtatggtaactggtcatatatgacagtctactgcatatatatgaatgactaggattaatctggtgtgtttacataggatatacatagttgaaatctagcatgaaaggttaaaaaggagatactgcacaatatttcttaaaagtaaaatgctgttattgtgatgagtctttggtttaacatcacagtattctgtgatgtctttttaactttttggaaagaggtatcatttgtagaaaaaatttgatttgggttaaatataggtttttaaaactataaatgttgtcttttttatatttttatgaaaaagcagtagaaaattacttttgaagaaaacaggctatttaaatattgaaatatatgtatgttgtgagtttaaggagcctgtaattgtcagttttacaaaaccatctgtgttcaatggttgtaaataaattctcaaaacatcatttcaaaggctgcctacagaatattatcacttgacagatagagttaataaattaccaatcaggcacattttataatgtttgtctctgtaaaggtaatattagcagttaaagaacacggatgagaaaagaatgtgttacataggttgcatcacttgcagttaaataaaactcacaatttgtgctcacaagcttaaa

SEQ ID NO: 57484 - DNA, 2205 bp, Homo sapiens
  misc_feature (18)..(19): n is a, c, g, or t
  misc_feature (21)..(21): n is a, c, g, or t
ggttggaagccccgcccnncngaggagtttcccaaaaccctgcgcggcggctttgaccgcgctaagatggcgactcccatgcatcggctaatagcccggagacaagctgaagcaaataagcaacatgtaagatgtcagaaatgcttggaatttggacattggacttatgaatgcacaggaaaaagaaaatacctacataggccctcaaggacagcagaactaaagaaagctttaaaagaaaaagaaaacagattattattgcaacaaaggagcttttttccccctcgtgtttatcagcattggagaaaccaatgtagaaagaaaggccaagaaaaaaaggtctaagagtgtaaccagttccagtagcagtagcagtgacagttctgccagtgattcttcatcagagagtgaagaaacatctacctcttcctcctcagaggacagtgacactgatgaaagctcctctagttcctcatcctcagcctcctccacaacctcttcctcctcctctgattcagactcagattccagctcttccagtagcagtagcaccagcacagatagcagctctgacgatgaaccaccaaagaagaagaaaaagaaatagagttgctccattcatattggactgatggactgaaaacattgatgtgattcttgaaagggaatttagaatatgttaaggccaagtaggttaactggtgaacatttctagaattcaaaagtttctaaatgttttacattgtaagagcatagagaatattaataatggcttatagagagagacttttatttgaagggtgaatcttgttttttttatctttaaaatatatctctagaacttaaagctgaaatctgcaaatctgtttgtgtgatgaaactatcttttctctctgtgaaataaatgccatactttgttatatatgttagtggtatgtatcagacatattttcaggatggtgcgtcaggatatctggcagtggatttctaatgcttttggctgtatgttatgtaagatttaatatgttgttactgtaagcttaggagttttcctactattaataaatgtgctctatttttacatttatgttcagaaagttatctgactttttgtcctaagtggtatgttcaaggagcctattaatatatttatagtttttgaatgctgtaagtttcaaattgctgtgttacgtcattcattttcttctggttccttaagtttttcaagttatccttttctgaggaaaattattctagaggaacctaaaaagggacaaaaaaattgaaacttcttaggagtctaatcttggtgccttctgttaaaagtcagtgtatcagaaaagaaagcagccatgtaagaggctaacttaaatagaagtgctagaaatatctttgtgtattaacatgcaataaaaggtaccattcaaagcagggggaaaggtaggaagaagaggtaatttttactgaaaattagggcaatgttggtcgccttttattaaaagctttttttaagctttcataaagattgctttttgctatttttgaaaatatggtattatagtttgtatggtaactggtcatatatgacagtctactgcatatatatgaatgactaggattaatctggtgtgtttacataggatatacatagttgaaatctagcatgaaaggttaaaaaggagatactgcacaatatttcttaaaagtaaaatgctgttattgtgatgagtctttggtttaacatcacagtattctgtgatgtctttttaactttttggaaagaggtatcatttgtagaaaaaatttgatttgggttaaatataggtttttaaaactataaatgttgtcttttttatatttttatgaaaaagcagtagaaaattacttttgaagaaaacaggctatttaaatattgaaatatatgtatgttgtgagtttaaggagcctgtaattgtcagttttacaaaaccatctgtgttcaatggttgtaaataaattctcaaaacatcatttcaaaggctgcctacagaatattatcacttgacagatagagttaataaattaccaatcaggcacattttataatgtttgtctctgtaaaggtaatattagcagttaaagaacacggatgagaaaagaatgtgttacataggttgcatcacttgcagttaaataaaactcacaatttgtgctcacaagcttaaa

SEQ ID NO: 57485 - DNA, 450 bp, Homo sapiens
  misc_feature (18)..(19): n is a, c, g, or t
  misc_feature (21)..(21): n is a, c, g, or t
ggttggaagccccgcccnncngaggagtttcccaaaaccctgcgcggcggctttgaccgcgctaagatggcgactcccatgcatcggctaatagcccggagacaagcattcgacacagagttgcagcctgtcaagaccttttggatcctgattcagccatccatcgttattagtgaagcaaataagcaacatgtaagatgtcagaaatgcttggaatttggacattggacttatgaatgcacaggaaaaagaaaatgagaaattgataaaagaactcactcaaaaactagagcagaacaaaaaatgaaccgagattatacaaggaatgcttctaatctggaaagaaatgacctacggattgaggatggcatctcttccacactgccgtccaaagaatcaagaaggaagggtggtctggactacctaaagcaggtagagaatgaacaagaa

SEQ ID NO: 57486 - DNA, 294 bp, Homo sapiens
gcccaatttccttagcagggaagtttccaaacatttaaatatgcaaatgtataaaggcaaatgagatatcatttaatttgtttattgtcttacagtgaaagagagcaaatgagcaagttgatgcctttatggcaattatttttagtatgatttcttttgtgctaaggtgtagctgaaggcaaacctcaaattctagcatgaacatgcagcagcaataacatgaatattttaggggctatgcgattctttttgtgggttatggttggaaataaaattttaagttacaactccttt

SEQ ID NO: 57487 - DNA, 337 bp, Homo sapiens
tggaggcagaaaatgtttaacaaatttatgataaagcaattttttttctatcaatcaatccctagagggcattaactgctcttaggaagtttattgcagaagatgacacaaccgacgtgcacaaaaaaacagtaagcatgctgtgaagtggaggaggaaatggaacactctaacatcacatcccggccataccaaggtccattgaccctgtattctttccagataattaatttactacacattaaacctcgatgtgaagaaggctgttgtgcatcaattgtgtcggaataaaaagtgttattgatttaggatttctattgtatcatgtgctgacaga

SEQ ID NO: 57488 - DNA, 349 bp, Homo sapiens
ctatgtaaaggttgatttcttaactttattcatgttgaatttcatattattctatttaatttatctaaacaaatggattattttcctacagtactgaaatactacctcattgatttatttcattttctggttgttacctggtgattaatttctgtaaatcagcagaagtaataggactatactgtaatatcattgtactgtagtcatagatacttggaaagctgaggtaggaagatagcttgagctcaggagttggaggctggcttaggagttgaaggctgcagtgagctatgattgcgctactgcactccagcctgggcaacagggtgagaccttgtctcctaaggaa

SEQ ID NO: 57489 - DNA, 595 bp, Homo sapiens
cactaaagtactctcatagatgataaaaagtagtaactgaatatcacaaattttgggttatatttcaagggtgctaatttgccaattataaaatgggttcttcttcaaggaattttaaaaagtggaatgcaaacaggccagaaataaaatggtggtttgttctgtaaaagctgtgctatctgcactgggtaagcaaacttccaccagcacttcctgtctgaaacaaaagcagagctccacagtgtgcacataaatatcaaccccagacactacaaagagcaaacagcattttgatcaggaattttgatattaagactattttctgatgaaaaagggagcaacaacatcaagttaactgaaaaactattcaaattagtgtttgaaaaaagttaggctctagaccaagtggaaatattgcctttgatttcaacataaagtttactgcattcttattaagtatacagaattggaaaaggaggggaagtggcaggtggtatagacctcggaattctaaaccaccatcccttgcctgtaaggaagtcccacaatctagaatgtagcatttaccttctcttagaaattaaagagcaaaatt

SEQ ID NO: 57490 - DNA, 332 bp, Homo sapiens
ttttgagaataacattttgccataaattttatagatatttaccattaatccatttgtagtcctacaacatatagttgattacagttatacattttttgctgagtctttggttcaaagcatgcagttcccaattacaaagacattcctaatggaataaaacatccactttgtgactgatttaaggttgttttcttaaaggcacaccgcagccaaaagtgggacacagcttgaataggcaaattttttcctttttgttgttgttgcttcatccaataactgttaccaaattcccgtagaaaagtgttgcccactcccacatcgacctttggaag

SEQ ID NO: 57491 - DNA, 564 bp, Homo sapiens
taatgggtgcagcacaccaacatggcacatgtatacatatgttacaaacctgcacgttgtgcacatgtaccctaaaacttaaagtataaataataataaaataaaagattagtattttaaaagtaaaattaggttgctcgttaatgcatttttgtatttttttttttagctgttgtattttggcttgtttattcaagttttgaaattaggactgtggttaaacagcagaacttggctgtcaaagctcaaggccagttcagtctaaggctagtacctgttcatatatgtcattctgcagagctctccctctcatgctttagagttgggatatgtatatacttgctcacttgaatctctatgttagttagactcgacctccctttatgtagtatgcctaaagagcagactttctggctgggcgggcggctcacgcatgtaatcccagcactttgggaggccgaggcgtgcggatcacctgagatttggagtttgagaccagcctgaccacatgtaaaaactccttttctactaaaagtacaaaatgatctgggcatggtgacgagt

SEQ ID NO: 57492 - DNA, 360 bp, Homo sapiens
taaaataaatgctctggatgggagaaatgtggaagttactttggaactggataataagtaaaggctgaaagagtactgatatacatgctaaataaaaccaatatttccctgaatgaactattcaaagcaattctggtgggtgttagacaggacatagagacctggagaagaagctcccattttcataaagaacacaaacaatcatgtatagaatgttggtagaaatatgaatggtgaaggtcaatgtaatgaagtcttagatgggaataagaaaggttattagacaagggagaaaaggtaatccttgttataaagtggcaaagaacttggctgaattgtattcatgttctagtgctttct

SEQ ID NO: 57493 - DNA, 430 bp, Homo sapiens
gacctcttttatttaccagagccacagccctgctgcctcaggaccttttcattctgccggtgctggggctgtctatctgcaagctggaggtgttgagagcaggaaaaggaggctgtgaggaagggttcgggcagctcctcctgctctcagaggtggcctcctcctccaggcatggaggtctgtccactactgggcttctgggctatttgcccctgatttgctccctggtacgggctcttgttaacaggcaggcaaggggtgcggggaccaggcgagggcttcaaagggtacagtaccaaatcttccaaactcagcacttgtgccctggggtctccaaactgtcttctgccctaggatttattcatactgttaaattaccagtttatgcaaatgatatgtaaataaagctcaattttttgaaacttcatgc

SEQ ID NO: 57494 - DNA, 2121 bp, Homo sapiens
tcctgaatccattcaaggtagtaaagaaaaaggcatatggaagccagaaacacctcaggactcatcaggtctcgctccatttaaaaccaaagaaccatccactcggatcgggaagatacaagcaaatttagcgatcaacccagcggccttgctgcccacagcggcttcccagatctctgaagtaaagcctgttttgccagaattggcttttccttcatctgaacacagaaggagccacggtctggaaagtgtgcctgtccttcccgggagtggggaggccggtgtgagttttgatcttccagctcaggcagacaccttacacagtgcaaacaagagccgtgtcaagatgagagggaagcgtagaccgcagacccgtgcagctaggcggctggctgctcaggagtccagcgagactgaggacatgagcgtccccagaggacccattgcacagtgggctgatggcgccatttccccaaatggccatcggccacagctcagagcagccagtggagaagacagcactgaggaggccctggcagctgccgctgcaccttgggaaggtggtcctgtgcctggagtggacagaagcccctttgcaaagtctctgggtcattccagaggggaggctgacctttttgattctggggacatcttttccacgggcactggatctcagtctgtggagagaacaaaacccaaggcaaagatagcagagaatcctgccaacccaccagtgggtggtaaagcaaagagccccatgtttcctgctctaggtgaggccagcagtgatgatgatctctttcagtctgctaaaccaaaaccagcaaagaaaacaaatacctttcctctcctggaagatgaggatgacctctttacagatcagaaagtcaagaagaatgagacaaaatccaatagtcagcaggatgtcatattaacaacacaagatatttttgaggatgatatatttgctacggaagcaattaaaccctctcagaaaaccagagagaaggagaaaacattggaatctaatttatttgatgataacattgatatctttgctgacttaactgtaaaaccaaaagaaaagtccaaaaagaaagtggaagccaagtctatatttgatgatgatatggatgacatcttctcctctggtatccaggctaagacaaccaaaccaaaaagccgatctgcacaggccgcacctgaaccaagatttgaacacaaggtgtccaacatctttgatgatcccctgaatgcctttggaggccagtagagcacacagggtatccacaggttaccctgcagctacattgttgagttagtgatgatgttgtatatgctgatggtcttaactggattacaaaaagcaaatactagaacagctagctcatcgttcacccaatgtacttggtatttttctgcactggtttaatcatgcttaatactacaaaacaaaaataaatatttcacagtggttggtttgttttgtttttaaaccacagtttgatttagttagccttgctggggccataatatgcttcagggtgtgtaaaagaagaaatctctttgtggctttcatgggcagggaatcccagagatagcaaatgccacctgaccagaagtctttgttatatggatgggaaccctaacttagggcctgggcaggggaaagagaaagaaggtgagagattatacttcatgagtcttagcaatatgggagcaggttttcactgaattctgagggtgcctctgcatgtcctccaaggcaaagtttggcaaactgtggcccccccactgtcatattttgttaataaaattttattggaacacaaccacaaaaaaaaaaaaaagcaatacaacaacaaaacatagtagcacgcactagcacaccgaacacagcgcaaacaaaccaaggggggggggcccccaaagaaaaatcccccgcgaagagcgccaacatcatcgactcgccccctttcgtctgcaacaagagggccccgcaagaagggaccgaccatataaaatcaacagcaccgcgggcacgtaaaacagcgcgtcggagagggaacaactcccccgcgtgcgacaccggggggagaaccccacactggggggggacac

SEQ ID NO: 57495 - DNA, 1084 bp, Homo sapiens
gggtctttggtggtttgccttgccatgtgtccttaaaaagtaccctttcctcccaacccctcttcagcaaccgtttttcttttttctttcctaaagatgacatcttctcctctggtatccaggctaagacaaccaaaccaaaaagccgatctgcacaggccgcacctgaaccaagatttgaacacaaggtgtccaacatctttgatgatcccctgaatgcctttggaggccagtagagcacacagggtatccacaggttaccctgcagctacattgttgagttagtgatgatgttgtatatgctgatggtcttaactggattacaaaaagcaaatactagaacagctagctcatcgttcacccaatgtacttggtatttttctgcactggtttaatcatgcttaatactacaaaacaaaaataaatatttcacagtggttggtttgttttgtttttaaaccacagtttgatttagttagccttgctggggccataatatgcttcagggtgtgtaaaagaagaaatctctttgtggctttcatgggcagggaatcccagagatagcaaatgccacctgaccagaagtctttgttatatggatgggaaccctaacttagggcctgggcaggggaaagagaaagaaggtgagagattatacttcatgagtcttagcaatatgggagcaggttttcactgaattctgagggtgcctctgcatgtcctccaaggcaaagtttggcaaactgtggcccccccactgtcatattttgttaataaaattttattggaacacaaccacaaaaaaaaaaaaaagcaatacaacaacaaaacatagtagcacgcactagcacaccgaacacagcgcaaacaaaccaaggggggggggcccccaaagaaaaatcccccgcgaagagcgccaacatcatcgactcgccccctttcgtctgcaacaagagggccccgcaagaagggaccgaccatataaaatcaacagcaccgcgggcacgtaaaacagcgcgtcggagagggaacaactcccccgcgtgcgacaccggggggagaaccccacactggggggggacac

SEQ ID NO: 57496 - DNA, 929 bp, Homo sapiens
tcctgaatccattcaaggtagtaaagaaaaaggcatatggaagccagaaacacctcaggactcatcaggtctcgctccatttaaaaccaaagaaccatccactcggatcgggaagatacaagcaaatttagcgatcaacccagcggccttgctgcccacagcggcttcccagatctctgaagtaaagcctgttttgccagaattggcttttccttcatctgaacacagaaggagccacggtctggaaagtgtgcctgtccttcccgggagtggggaggccggtgtgagttttgatcttccagctcaggcagacaccttacacagtgcaaacaagagccgtgtcaagatgagagggaagcgtagaccgcagacccgtgcagctaggcggctggctgctcaggagtccagcgagactgaggacatgagcgtccccagaggacccattgcacagtgggctgatggcgccatttccccaaatggccatcggccacagctcagagcagccagtggagaagacagcactgaggaggccctggcagctgccgctgcaccttgggaaggtggtcctgtgcctggagtggacagaagcccctttgcaaagtctctgggtcattccagaggggaggctgacctttttgattctggggacatcttttccacgggcactggatctcagtctgtggagagaacaaaacccaaggcaaagatagcagagaatcctgccaacccaccagtgggtggtaaagcaaagagccccatgtttcctgctctaggtgaggccagcagtgatgatgatctctttcagtctgctaaaccaaaaccagcaaagaaaacaaatacctttcctctcctggaagatgaggatgacctctttacagatcagaaagtcaagaagtataagcgttggagtacacctgccgtgtaatcct

SEQ ID NO: 57497 - DNA, 2046 bp, Homo sapiens
tcctgaatccattcaaggtagtaaagaaaaaggcatatggaagccagaaacacctcaggactcatcaggtctcgctccatttaaaaccaaagaaccatccactcggatcgggaagatacaagcaaatttagcgatcaacccagcggccttgctgcccacagcggcttcccagatctctgaagtaaagcctgttttgccagaattggcttttccttcatctgaacacagaaggagccacggtctggaaagtgtgcctgtccttcccgggagtggggaggccggtgtgagttttgatcttccagctcaggcagacaccttacacagtgcaaacaagagccgtgtcaagatgagagggaagcgtagaccgcagacccgtgcagctaggcggctggctgctcaggagtccagcgagactgaggacatgagcgtccccagaggacccattgcacagtgggctgatggcgccatttccccaaatggccatcggccacagctcagagcagccagtggagaagacagcactgaggaggccctggcagctgccgctgcaccttgggaaggtggtcctgtgcctggagtggacagaagcccctttgcaaagtctctgggtcattccagaggggaggctgacctttttgattctggggacatcttttccacgggcactggatctcagtctgtggagagaacaaaacccaaggcaaagatagcagagaatcctgccaacccaccagtgggtggtaaagcaaagagccccatgtttcctgctctaggtgaggccagcagtgatgatgatctctttcagtctgctaaaccaaaaccagcaaagaaaacaaatacctttcctctcctggaagatgaggatgacctctttacagatcagaaagtcaagaagaatgagacaaaatccaatagtcagcaggatgtcatattaacaacacaagatatttttgaggatgatatatttgctacggaagcaattaaaccctctcagaaaaccagagagaaggagaaaacattggaatctaatttatttgatgataacattgatatctttgctgacttaactgtaaaaccaaaagaaaagtccaaaaagaaagtggaagccaagtctatatttgatgatgatatggatgacatcttctcctctggtatccaggctaagacaaccaaaccaaaaagccgatctgcacaggccgcacctgaaccaagatttgaacacaaggtgtccaacatctttgatgatcccctgaatgcctttggaggccagtagagcacacagggtatccacaggttaccctgcagctacattgttgagttagtgatgatgttgtatatgctgatggtcttaactggattacaaaaagcaaatactagaacagctagctcatcgttcacccaatgtacttggtatttttctgcactggtttaatcatgcttaatactacaaaacaaaaataaatatttcacagtggttggtttgttttgtttttaaaccacagtttgatttagttagccttagatagcaaatgccacctgaccagaagtctttgttatatggatgggaaccctaacttagggcctgggcaggggaaagagaaagaaggtgagagattatacttcatgagtcttagcaatatgggagcaggttttcactgaattctgagggtgcctctgcatgtcctccaaggcaaagtttggcaaactgtggcccccccactgtcatattttgttaataaaattttattggaacacaaccacaaaaaaaaaaaaaagcaatacaacaacaaaacatagtagcacgcactagcacaccgaacacagcgcaaacaaaccaaggggggggggcccccaaagaaaaatcccccgcgaagagcgccaacatcatcgactcgccccctttcgtctgcaacaagagggccccgcaagaagggaccgaccatataaaatcaacagcaccgcgggcacgtaaaacagcgcgtcggagagggaacaactcccccgcgtgcgacaccggggggagaaccccacactggggggggacac

SEQ ID NO: 57498 - DNA, 402 bp, Homo sapiens
ctggcctgagcatctctcctgcaccttcctgagagacagaccgagtgatcactgtgtgaattaaagcccatttcctagaaactcactcttctcttgaagcttttaggaagactaagagataaagccatccaccaagagataaagccaggaaaagtgtctgtcccagtgcaagtgtgtgagggttgttagtggtgggggatgggcatccttcattctttcagccaggggactgcacgtccgtggagtgaacaccccagaggtgggcagggaccaagtccagcatgggagacaggacccctgggtcaaaggctgttcttaggtaagcttcgtgacaaacatggcatttgagctgggtcttgagtggagccaggagaaaacaggaattttgaaaattcctgaggg

SEQ ID NO: 57499 - DNA, 445 bp, Homo sapiens
tggagcagtgttccacatgtgcttgaaaataatgtatattcaggtgttgtggatggagtattctactgatgtctgttagattagttgtttatagtattgttcaagtctcctgtttccttgttgatcttctgtctagttagtggttctatgcaatgttgaaagtgagttattggccaggccatggtgtctcatgcctataatcccagcacttagggaggccgagggggtgaatcatattagcccaagaatttgagaccagcctggccaacatggtgaaacccagtctctataaaacacacaaaaattagcttagcattgtggctcacgcctgtggtcccagctacttgggaggttgaggtgggaggattgcctgagcctgggaggttgaggcttcagtgagctgagattgtaccactgatctctagcctaggtgacagagagaccc

SEQ ID NO: 57500 - DNA, 302 bp, Homo sapiens
tcccattttctcattctctctcagctcatcttctgtctgtacttctagatctcattcgcccattcatttatccacagataacatatttttactaaattttaaggaggtgacagtaatttttataataagtgcagatcttaatagaaaagaacactaacatctaccagattataacctcagtttagaggctacgccctcagtatataaaacttgtgtgcatttaataattaggattcatgatccttttgagttaggactccaaatttctaattgctgggatgtgcatgtttaacattgtctgg

SEQ ID NO: 57501 - DNA, 404 bp, Homo sapiens
ctgcaagagaaaagcccaagggcctaggtaaacaatggacagcatcctggatgatgatgcaattttaagcctgaaaagaatatttggtcttcaatcttggcaagcatacctgtaaagtagatggtaaggctgctgatgagtatttttagaaaaaatgatcaatgagaaaattgcaccagaggacccacattgggacttttgagttgaacacattacttagcaaatgctaacatgggaacttgaggatatttagtgaacctgctgaagtcaacacattcatgcaactgaaaccaatagagaagaagctatctaaccttggcattttggggtctaaaaaaagcttttacccactattgtgctttgtaacctataaaataaatcaaaataaatcaaaacataacaac

SEQ ID NO: 57502 - DNA, 342 bp, Homo sapiens
cttcctaaagatcccttgaacataaccatttctctcctctccactgccatctctagaccaagccactatcatttgtcacttggacaattgctgcacattcctacctgagccacaacttattcccatgaaagtgaacaaatagtaatataatattttgaaaacatttactatgttttgctcactgattcattttttgttttccataatgacattagagatatacacattagccaggcacagtggctcacacctataatcctaagacttttgagaagccaaggagggtggatcgcttgagctcaggagttcgagaccagcctgggcaacatggcaaaaccctgt

SEQ ID NO: 57503 - DNA, 213 bp, Homo sapiens
tatctcccctatttctgaagacatatctacctcttttatgagaaaattaagattttgattttgtatattcagagaaatgttttgttttttacactgaagtgtcagaataaagggagctcccttaaaacagtgaaaatgattatttttataaatatgatctaaaatcaactattaccacgtgtatactgcacatacacagacacatacaaacac

SEQ ID NO: 57504 - DNA, 423 bp, Homo sapiens
tccttggtggggtcacctctgccggtctattaggaggacaagtctacatttacatacttttttatatatcaaaattcagcattttgttaaccaagaaagtaaaaaatctagccagatttgagaagtattagccttaaaatattatcttaaaaactaagaaatcccacttaattccctttgatgattctcctaaaacaaatttggtttcagattttttctaaataaatatatgaaaactatattcatattctttttgagaaggcctccaatatataaaatctttctgtgaaattgaactctcctggtgtaacaatgacagccctataatgatataattttaagggagaaaatcagaaataaaagattgataccttaagggaagactatgctggcataatcagattaaatgaggatccgattttc

SEQ ID NO: 57505 - DNA, 1305 bp, Homo sapiens
gtgtggggggcggggaggattctgagaccagccaggtaggagttgctgccgaaaaaggagcggaaattagcccaacctggcttccctacatcctggggaggaattagagagaacagagcccgagatgtagttgccagagaacaaattacttaaaatgagagcgtgctagggacagaaacccagtttggggctgactcatggtgagaaaacagttttgtccccctgggtgcctcccgaagaggaggtccagcccagtgtttgcttgcatgtggcgggaattttaatttattttttaaaatgttggtgccaggtacaggttgctaattagaaagcacaggcagtttttaaaaatgaccatctattgtcactgtcatctcaggggaatggaaaatatatgaatctttaaaaaataaaaagcagctatataatcttggaataaaagcctgtccttcccaagagaagacaggtttgcagcagtgcagggagcttcctccatggatcagtgagcactggttcacatggcgtgtttgagaactgctggcatacccctttgtcgtgatctgacgtgttagttcccagatgaggatgaatttgtgttgaccagtagctcttctctgtccttagactgaccagttgctcctcagcagctgggcatctcatgcgttggcctcagtggtcacatggtggggctcaggcctggcaagaggccgaggagcagccttgtaactgggtgggccatggggcttgcctggctggtagcactgggccacagcaggctgcgtggttgatgcagtgatgacccagggagaccctgggttggttttaagcttgattcaccacatggagtctccatgccttccattaaactgccccgccaagcctttccttctgctccctgggaaactggttggcctagaggtgctgtcttagcatctgtgacgttcagctgctgccccatctggagtgactggaaggacactctggggcaacactgagcgccaggctgccgaacagagagtgccatttgctctttcagcagacccctcacttcctgcagacaggccctgcctggcagtgggatatggtggggtccctcccctgcgtttgatctgagcttttctagctctccagcgagactctgcagggtgtgggcctggagtctggatgtggcccctccctggccttaggaagctcagaaggtggctgaggactccgaccggtaggaaagtataaagatgatgttacatccagggcacagaggccaacttgcacagagctgaggctgggggcgtgaatttggctatg

SEQ ID NO: 57506 - DNA, 460 bp, Homo sapiens
attctgagcatggccgtgcctactataataggtctcagcttatggaaagagttttttcccagattaatgacagaattaatggaactacaggaattctatgacccagatacagtggaacttatgacctggataaaaaggcaagctccagttgcagctgtgtttgcagggagtccacagttaatgggtgcgattaaattatgcactggatggatggtgacaagtttgcctctttacaatgatgatgatcttctcaagagaaatgaaaatatctaccaaatctattcaaagcgatctgctgaggatatttataaaatactgacatcttacaaagctaattacctaattgtagaggatgctatctgcaatgaggtgggacccatgagaggctgtagggttaaagatttattagacattgcaaatggccacatggtttgtgaagaaggtgacaagctaacctact

SEQ ID NO: 57507 - DNA, 162 bp, Homo sapiens
  misc_feature (126)..(126): n is a, c, g, or t
gctttactgacttggaatctatgaaacaggtaaagttgaagaacgcctttctcttctgtttcctccccatgctctaggagtctcaataaagaataatgaatcctgagctggcctttcaaaatgtgntcaaaaaaataaccgaactccaggggtcattagtcc

SEQ ID NO: 57508 - DNA, 481 bp, Homo sapiens
gtggcacatgcctgtaattttagctactcgggaggccaaggcaggagaatctcttgaaccaggaggtggaggttgcagtgagtcgagatcccaccattccactccagtctgggcgacagagactcaaaaaaaaaaaaaaaaaaagagcagagaaaatgataaacaacttgcaggttgttgtgtggtataatggtcattcattattttctactctttctggtaaagagttggtgtgtcatggaaagtacctgttctatgtgtgtgtgtctgtgtgtataattcggtgtgaaaattaaagagaaaaaaacaataaaaaaccctttcctatacttatgtgtaaattaccatggtgtgctgcaaaaaacatatgtcaaggtgatagaattattttgactttcctgtacagttataaaatgactcagtgagtttggttagatatcctcgttctttgaatctatatccttgtctgcttatgatgaaa

SEQ ID NO: 57509 - DNA, 252 bp, Homo sapiens
ttaaattttatatatttattgataaaacatgttattttgaaccatgtatacatttgtggaatggcttaacagggcaaattaacactgacaatggcatttaaaaaaatgacttttgctagccaagaaaacctcaaacaatactttctgtttcagatctctaaattcagttcatacgttttaaaggatgcttactgaatacatataatttatttccctggaaaaggtaacacgccattttctctgtcaaaaaaa

SEQ ID NO: 57510 - DNA, 205 bp, Homo sapiens
accagttaggaagcttctgcagttggagcatgatgactcagacaacggttgttcaagtggagacagtgtggaatggtgagatttggagtaaatttcgaaggtagagacaacaggatttactggtggagtgaatattgggtgtgtgaaaaaagaaaagtcaagaatgacttcaagattttaggcttaaacaactgttaggatggaa

SEQ ID NO: 57511 - DNA, 574 bp, Homo sapiens
attatgcctctctctgctcctggggctgtacaggacagagtaggagaggtgcaggccccatggaggccaaggaaaagcagactgagcatttccaaatggtggggccactggagatccacaaagtcactgctcagaggaggactcttgagtgatttctgcaattttcatgtaaatctgtagaaagcaaagtctatttctcttcagtaatgtttgaccaatcagacgctatccgcatagagacaggtcaaagaaacagccagaggggattgcttctctgaggtttgttactaaacaaatcttctctgattactaaacttctaaggcaattactctctttgctgccacaaatgctacattttctaattcttgtcttaaagtgtacaaaatgttacaaagagcagggttatctctctataccgcattgtcaatttaaagattgtctttttaagttgactgtttaatcatcagatgctattaagtggatctctgtttttatcctctgacggtacgaggatttattttcaactcttgccaagagtcttaggtaaaataaaataagtgtctgtcactcatt

SEQ ID NO: 57512 - DNA, 469 bp, Homo sapiens
tggttgtgctctgagagcttgaccttgctctggaatcctttatggtgattgtcaaactagcttaaatgaagtgggtggggacattctctttcctcccctctcccactcccctgcttagttaaatcaggtaaccttttcctatacttcttagggagacctcacgcttgaaacttgcctccattctgagctcctcaccgcttcctggctcaatctgtgtgtctgtctgtaatgcctaggagctggatctgtatggctgagtttggatgcgtgtccagttggcttgggagtggagaggggcaccatcacctgggtctgtgggttggaggatggtgacagatgaatttaatatggggtgctttgctttatttaacagacgttactgtggaaacacttggtgcaaatcgagtgttttgagcgtgttgttttaaaagactttaaaatgatttcaaacttacagaaaagttgtaaa

SEQ ID NO: 57513 - DNA, 1062 bp, Homo sapiens
atggaaaccaacttctccattcctctgaatgaaactgaggaggtgctccctgagcctgctggccacaccgttctgtggatcttctcattgctagtccacggagtcacctttgtcttcggggtcctgggcaatgggcttgtgatctgggtggctggattccggatgacacgcacagtcaacaccatctgttacctgaacctggccctagctgacttctctttcagtgccatcctaccattccgaatggtctcagtcgccatgagagaaaaatggccttttgcgtcattcctatgtaagttagttcatgttatgatagacatcaacctgtttgtcagtgtctacctgatcaccatcattgctctggaccgctgtatttgtgtcctgcatccagcctgggcccagaaccatcgcaccatgagtctggccaagagggtgatgacgggactctggattttcaccatagtccttaccttaccaaatttcatcttctggactacaataagtactacgaatggggacacatactgtattttcaactttgcattctggggtgacactgctgtagagaggttgaacgtgttcattaccatggccaaggtctttctgatcctccacttcattattggcttcacggtgcctatgtccatcatcacagtctgctatgggatcatcgctgccaaaattcacagaaaccacatgattaaatccagccgtcccttacgtgtcttcgctgctgtggtggcttctttcttcatctgttggttcccttatgaactaattggcattctaatggcagtctggctcaaagagatgttgttaaatggcaaatacaaaatcattcttgtcctgattaacccaacaagctccttggccttttttaacagctgcctcaacccaattctctacgtctttatgggtcgtaacttccaagaaagactgattcgctctttgcccactagtttggagagggccctgactgaggtccctgactcagcccagaccagcaacacacacaccacttctgcttcacctcctgaggagacggagttacaagcaatgtga

SEQ ID NO: 57514 - DNA, 389 bp, Homo sapiens
aatgctagttaatgccactagtgatgaatgagaacagatttggaccttgtctatcccttaaaccagtgtaaagtacagctgacccttgcacaacatgggggttagggatgccaactctctgtgcagtctaaaattagcataaaacgtttgattccccaaaaatcttaactactaatagcctattgttgaccagaagccttactgattacataaacagtcaatcaacacatattttgtatgttatgtgtatttatactgtattcttaagactaagctagagaaaaaaatttatgaaaatcataaaaaagaaaaaatatatttactgtattaaatggaagtggaccatcataaaggtcttcatcctcattgtctttactttgagtaggctg

SEQ ID NO: 57515 - DNA, 392 bp, Homo sapiens
gaagatttagccaagctcagtgactgccttagcagttatgagtcatattaataatgcctacatctgcctccaccaaaaggctctagggtctgtctccgaagtttattaaactcttccttgggagacttgtgcttgggacttagggttctaagtcttttctttcattatttttggctgtaactcacttttacgtggttgtggccctgggcaaaattttgaaataggtaacttccctttgcattctcccagtactataagactcatacgtcctgggttttaggggtgcaagccagtccttgcattttaccaggattcttgaaggctgcaaactcgggatgtaaacacaagccattactgggagagcatacttgagacattggaggcctcttaag

SEQ ID NO: 57516 - DNA, 230 bp, Homo sapiens
tctcttttactttccaaactattttatttaaaaaaaacctgcagtgcagtattaaaaagcaatacattcagcaggagtgacaaccaacagaaacaaagggaggagggtacagaataccagggaccctacctcaactgatccccaggtctggaggccaggggcagactgggaaggagcacgggtggtggggaagggagaaaagggcacccaccaaaaaggaaaaggcagaa

SEQ ID NO: 57517 - DNA, 2280 bp, Homo sapiens
aggattggggtggggttcatcccacccagaccacagagactgaaaataagaaaggggtgaggcctaagggacaatcaggatgtttttcagagagaagtgtggatgctggacaggaagaaccacagataccagatacgggacatactttattcagctgggtgctgaaaaagaatcttggaaattaggaaactgaatgaggcctcatttcacactcagaatgtgggttgcaatagtcacttcctctgctgctgggaaagaaagaattatactaccttttgaattttggattaaggagagaggtgttggcttgtcaaactaccatgtattcctcaagacatatttttgtggctttataaaattcaatatatatgtctaaattcaaaaatattttgttgcaatctggcccttggacaaactgaggccctagcaactgatgtttatggctttccgtagaacctttcagataaaatttacacagcattttactgcagctatttcacacaaagcagaggattttgccacaaaactgaaagaaaaaagaaactgcattcttaaatttttcataaatcaaaaggtataaaaatatctacctaaacgataaaggagatgagaaaccccacccatgatgggaagaaagcctatttcagttttgcctttacttcaagttcttttttccatatctggaatgcaatcagaattttaatcttgccttgggttcctcctggatttggggagaagacaaaacctgaaaatctctaatctgcatgtgttcagctgcgtatcttctggatacggaaggatcacactgcacagagtgctggacttgcaggagccccgcttctcaacctccatcgctttatgaatgaattcaccagaaagaaaaggaagaatcaacactttcagagatggagcctgttgagccacagtaccaactagtcaatgctgaatcgacttctccctttctacattgcctgagagaagtcattggggaatactctgtacacgaattttcactgttggggaaaacagagagtcaagggattggattgtggattgcattggtggttttcctcagtttcctcatcttctccacaagtttctacatatcgaatgcagagcagcccttcttcaaaggacctcctacggaagctgctaaggaactcagtctgtagctctgcgtggagccatgtgtaaacactgaactgagacctgccacctcctactacctaagggcccattttcatctgatatcatcccccagaaacaaactcatgatgacttccatgttttttttagattagatacatggagaattttcctttcccttagaattaaaatcctgcattctaaaaatcagtaagcttttttatttctgaataattttaaatttaaagagaagttgcaaagatagtatagaatgttcccttatacctgtttttatttagagtgatgttcccaggagaaatgataatgcagcaatggacaagaacaggaacaagagacagtcttaccatcttcttacaatttatagatgggacagtggaaagagaagccacatcggggttgggcatgcagagacctggtcctaaatctgtgtgacttttgcgaaatccttttgcctcacagagctctaggttcttatctgtcaaacaggaaccagaccatcagatccgtagagatccaaccaatgaaggagacttcgaaaacttcacattgccgtgtcaatgtgaggttgctggatggttatgacaagaaatcacattaaattcactggggtaacattgttcatgaaacgggataatgtgtttcagcgatgaaccacccatggccttactacagacatatttccactttgaaaatgtgtgtgagtgtacatgtctgtgtgtgaggcagagattagaaagtgtaaatgtgtgcgttttcattttacacatcttacattttcctttaatttgtttgaaagcctgttttgtttgtggcttccattcctggaagtcccatgagttgttagtggtgaagatggaacagatgtgtccaacccgggggactcctgccctcagggactgagcagctgcaaacctctctctcatctgattccactgtttcttccacatgtacacatcatgagaaatattgttcaatcaatatcttcccttaaatcaactcatatgcttatttacatgaatttacctaaaacagaaacttgatatcacttctgtaaatgaaaaaattaaactttctggctttaaataaagcataacaataataatcatgtcaaaa

SEQ ID NO: 57518 - DNA, 1914 bp, Homo sapiens
cggaagatggttccgaatcaactggataggatttttaatttccgaaggcacgagctcccctggcatccgcaaatgtgacccgcaatttagagaggaagaggagcgcagaccctacctgtccggagtaacggtcaggagagaggtggggaagggctgggcccctctcggtgtcccgggttcccggcagaagtctccagggctgaggcagtctgcagacacggagtttccgtgccagaggagagggtccacgcggacaggcagttccagctccgggtaagtgcggccccatctcctctccgtccccggctccgccagcagcagtcccggagagatttcccctccccgccgcccgcgctctctctcctcctgcgcccaggccggtctccggctccggagtcggacggcgacggtgcagatgagggcgcacaggggacggtcctggagcccgggaagggtgcgagatggagacggcggttcagaaaagttgtcaggtctccagcccgggcagtggcgggagctggagccgcggtggagacgactcgaggggacgcagcccgcctggcacaaagggccacgggcgcgagggactcgatgagctgggagatcgcggccccggcaggtgcggcgcgctggggcgggtgcttggcgccttccccggcacagagagtcaagggattggattgtggattgcattggtggttttcctcagtttcctcatcttctccacaagtttctacatatcgaatgcagagcagcccttcttcaaaggacctcctacggaagctgctaaggaactcagtctgtagctctgcgtggagccatgtgtaaacactgaactgagacctgccacctcctactacctaagggcccattttcatctgatatcatcccccagaaacaaactcatgatgacttccatgttttttttagattagatacatggagaattttcctttcccttagaattaaaatcctgcattctaaaaatcagtaagcttttttatttctgaataattttaaatttaaagagaagttgcaaagatagtatagaatgttcccttatacctgtttttatttagagtgatgttcccaggagaaatgataatgcagcaatggacaagaacaggaacaagagacagtcttaccatcttcttacaatttatagatgggacagtggaaagagaagccacatcggggttgggcatgcagagacctggtcctaaatctgtgtgacttttgcgaaatccttttgcctcacagagctctaggttcttatctgtcaaacaggaaccagaccatcagatccgtagagatccaaccaatgaaggagacttcgaaaacttcacattgccgtgtcaatgtgaggttgctggatggttatgacaagaaatcacattaaattcactggggtaacattgttcatgaaacgggataatgtgtttcagcgatgaaccacccatggccttactacagacatatttccactttgaaaatgtgtgtgagtgtacatgtctgtgtgtgaggcagagattagaaagtgtaaatgtgtgcgttttcattttacacatcttacattttcctttaatttgtttgaaagcctgttttgtttgtggcttccattcctggaagtcccatgagttgttagtggtgaagatggaacagatgtgtccaacccgggggactcctgccctcagggactgagcagctgcaaacctctctctcatctgattccactgtttcttccacatgtacacatcatgagaaatattgttcaatcaatatcttcccttaaatcaactcatatgcttatttacatgaatttacctaaaacagaaacttgatatcacttctgtaaatgaaaaaattaaactttctggctttaaataaagcataacaataataatcatgtcaaaa

SEQ ID NO: 57519 - DNA, 1349 bp, Homo sapiens
aggattggggtggggttcatcccacccagaccacagagactgaaaataagaaaggggtgaggcctaagggacaatcaggatgtttttcagagagaagtgtggatgctggacaggaagaaccacagataccagatacgggacatactttattcagctgggtgctgaaaaagaatcttggaaattaggaaactgaatgaggcctcatttcacactcagaatgtgggttgcaatagtcacttcctctgctgctgggaaagaaagaattatactaccttttgaattttggattaaggagagaggtgttggcttgtcaaactaccatgtattcctcaagacatatttttgtggctttataaaattcaatatatatgtctaaattcaaaaatattttgttgcaatctggcccttggacaaactgaggccctagcaactgatgtttatggctttccgtagaacctttcagataaaatttacacagcattttactgcagctatttcacacaaagcagaggattttgccacaaaactgaaagaaaaaagaaactgcattcttaaatttttcataaatcaaaaggtataaaaatatctacctaaacgataaaggagatgagaaaccccacccatgatgggaagaaagcctatttcagttttgcctttacttcaagttcttttttccatatctggaatgcaatcagaattttaatcttgccttgggttcctcctggatttggggagaagacaaaacctgaaaatctctaatctgcatgtgttcagctgcgtatcttctggatacggaaggatcacactgcacagagtgctggacttgcaggagccccgcttctcaacctccatcgctttatgaatgaattcaccagaaagaaaaggaagaatcaacactttcagagatggagcctgttgagccacagtaccaactagtcaatgctgaatcgacttctccctttctacattgcctgagagaagtcattggggaatactctgtacacgaattttcactgttggggaaaacagagagtcaagggattggattgtggattgcattggtggttttcctcagtttcctcatcttctccacaagtttctacatatcgaatgcagagcagcccttcttcaaaggacctcctacggaagctgctaaggaactcagtctgtagctctgcgtggagccatgtgtaaacactgaactgagacctgccacctcctactacctaagggcccattttcatctgatatcatcccccagaaacaaactcatgatgacttccatgttttttttagattagatacatggagaattttcctttcccttagaattaaaatcctgcattcta

SEQ ID NO: 57520 - DNA, 2415 bp, Homo sapiens
cggaagatggttccgaatcaactggataggatttttaatttccgaaggcacgagctcccctggcatccgcaaatgtgacccgcaatttagagaggaagaggagcgcagaccctacctgtccggagtaacggtcaggagagaggtggggaagggctgggcccctctcggtgtcccgggttcccggcagaagtctccagggctgaggcagtctgcagacacggagtttccgtgccagaggagagggtccacgcggacaggcagttccagctccgggacatactttattcagctgggtgctgaaaaagaatcttggaaattaggaaactgaatgaggcctcatttcacactcagaatgtgggttgcaatagtcacttcctctgctgctgggaaagaaagaattatactaccttttgaattttggattaaggagagaggtgttggcttgtcaaactaccatgtattcctcaagacatatttttgtggctttataaaattcaatatatatgtctaaattcaaaaatattttgttgcaatctggcccttggacaaactgaggccctagcaactgatgtttatggctttccgtagaacctttcagataaaatttacacagcattttactgcagctatttcacacaaagcagaggattttgccacaaaactgaaagaaaaaagaaactgcattcttaaatttttcataaatcaaaaggtataaaaatatctacctaaacgataaaggagatgagaaaccccacccatgatgggaagaaagcctatttcagttttgcctttacttcaagttcttttttccatatctggaatgcaatcagaattttaatcttgccttgggttcctcctggatttggggagaagacaaaacctgaaaatctctaatctgcatgtgttcagctgcgtatcttctggatacggaaggatcacactgcacagagtgctggacttgcaggagccccgcttctcaacctccatcgctttatgaatgaattcaccagaaagaaaaggaagaatcaacactttcagagatggagcctgttgagccacagtaccaactagtcaatgctgaatcgacttctccctttctacattgcctgagagaagtcattggggaatactctgtacacgaattttcactgttggggaaaacagagagtcaagggattggattgtggattgcattggtggttttcctcagtttcctcatcttctccacaagtttctacatatcgaatgcagagcagcccttcttcaaaggacctcctacggaagctgctaaggaactcagtctgtagctctgcgtggagccatgtgtaaacactgaactgagacctgccacctcctactacctaagggcccattttcatctgatatcatcccccagaaacaaactcatgatgacttccatgttttttttagattagatacatggagaattttcctttcccttagaattaaaatcctgcattctaaaaatcagtaagcttttttatttctgaataattttaaatttaaagagaagttgcaaagatagtatagaatgttcccttatacctgtttttatttagagtgatgttcccaggagaaatgataatgcagcaatggacaagaacaggaacaagagacagtcttaccatcttcttacaatttatagatgggacagtggaaagagaagccacatcggggttgggcatgcagagacctggtcctaaatctgtgtgacttttgcgaaatccttttgcctcacagagctctaggttcttatctgtcaaacaggaaccagaccatcagatccgtagagatccaaccaatgaaggagacttcgaaaacttcacattgccgtgtcaatgtgaggttgctggatggttatgacaagaaatcacattaaattcactggggtaacattgttcatgaaacgggataatgtgtttcagcgatgaaccacccatggccttactacagacatatttccactttgaaaatgtgtgtgagtgtacatgtctgtgtgtgaggcagagattagaaagtgtaaatgtgtgcgttttcattttacacatcttacattttcctttaatttgtttgaaagcctgttttgtttgtggcttccattcctggaagtcccatgagttgttagtggtgaagatggaacagatgtgtccaacccgggggactcctgccctcagggactgagcagctgcaaacctctctctcatctgattccactgtttcttccacatgtacacatcatgagaaatattgttcaatcaatatcttcccttaaatcaactcatatgcttatttacatgaatttacctaaaacagaaacttgatatcacttctgtaaatgaaaaaattaaactttctggctttaaataaagcataacaataataatcatgtcaaaa

SEQ ID NO: 57521 - DNA, 369 bp, Homo sapiens
ttttcttttttgtttaaaaggaatgaagtgcttcgtgctgcatcctgccttcaacgacaggaaactgagtttgttacacaaatctctggaagatatggagctaggaagagccgttgccgtctgcagctactgaacacagtgtgatagcacactttatctgccagagctcagttcccaactgtactaaggtttttaaaggcacattgaagttgcagccagcaaacttcagtaagcaacacagcaactcctaaaatcgccctatttggggagggggaggctaagacttattaacttcattatattatcgccaacagtgtttatgtctttcaatttatgtcttattaaatattcattatttttaaacccacc

SEQ ID NO: 57522 - DNA, 326 bp, Homo sapiens
  misc_feature (213)..(213): n is a, c, g, or t
tttcgtggttgcatagtattccatgatgtatacgtaccacgtgttctttatccaatccactgttgatgggcagctaggttgagtccatgtctttgctattgtgaatagtgctgcaatgaacatatgagtgcatgtgttgttaagttccatttcttgacgtaggtggtgcactgtgcctggcctggaaaactaaatattgtaaagatataaatncttccaaatttatctatgtagattcagtgtggtttcaaataaagttgcagtagacagtatttataacaaaagtaggtgacgtggtgtgtgagggatggagatggccacccagg

SEQ ID NO: 57523 - DNA, 329 bp, Homo sapiens
gggaatacccaagacccttttgccatccacaaacagtggtaccactgtgctagtagtcattatattcttcaccgtcatgcactaggtttcatttaagaatgtgcatgaagacaccataaaactaatgcttttattaaaacttgaaccatcttaataatattttgtatttgacaaaatgggaagtattaacatacatataaagcagttctgcataccaaagtgcagtgattgtctcaaggaatggtgccttctggattgaaccagagactgcagaatcatgcatgggtaaaagatccattcaaagtgcaaagtaggctgggcatggtggc

SEQ ID NO: 57524 - DNA, 861 bp, Homo sapiens
gtttgcagcccctttctccctgcttcctgccggcgcgagcagccccccgccgcggcctttccgcgacccgacggccgccccccattgatttgaagttcacattcttcgaggttcacgcccccttggcccagagatttttttttttccccagccaaaaaatagtgagatgaaataacgggatcgagggagaggaatgttgctaccatttatctttgttgttgttgccgttgttaatatttgggggttttaatcagttggaggtgtttggagaaagggagcgttgagatttggggagttagatttttccagttaaatgttgcgagtagtttttcttatttcctggaaattctggtcaccctttgaaaagggaggtttgggaagcgtcagtcattaggacgttgacagctaagttagattaattcagacgtaccttaaataggctttgttctcaccattcccttgtttcgagttgccttcagattattttggaagagttcttactacaagatgaggctttttatttcacaaataatgaatctacacacagaaaataagtggtttgggtttttggtgtttcgtgggggttttttgctagctttgtgatttgcttttgtcttaaatttaagaaggaaagaaagcaataattctttccataatttctaatagttatgttagcatctagagaaattttctctttacgtcatcttgacacttaactatttaagaagttcgatatttgtgactttttcagaccatatttatctactgttaagtgtctaaatctgtcgctaaaattggggagtaaaaataagtgcttggtatttttcagagtgctagagtcgatttgatgctgtaaaagta

SEQ ID NO: 57525 - DNA, 807 bp, Homo sapiens
gtttgcagcccctttctccctgcttcctgccggcgcgagcagccccccgccgcggcctttccgcgacccgacggccgccccccattgatttgaagttcacattcttcgaggttcacgcccccttggcccagagatttttttttttccccagccaaaaaatagtgagatgaaataacgggatcgagggagaggaatgttgctaccatttatctttgttgttgttgccgttgttaatatttgggggttttaatcagttggaggtgtttggagaaagggagcgttgagatttggggagttagatttttccagttaaatgttgcgagtagtttttcttatttcctggaaattctggtcaccctttgtaattcagacgtaccttaaataggctttgttctcaccattcccttgtttcgagttgccttcagattattttggaagagttcttactacaagatgaggctttttatttcacaaataatgaatctacacacagaaaataagtggtttgggtttttggtgtttcgtgggggttttttgctagctttgtgatttgcttttgtcttaaatttaagaaggaaagaaagcaataattctttccataatttctaatagttatgttagcatctagagaaattttctctttacgtcatcttgacacttaactatttaagaagttcgatatttgtgactttttcagaccatatttatctactgttaagtgtctaaatctgtcgctaaaattggggagtaaaaataagtgcttggtatttttcagagtgctagagtcgatttgatgctgtaaaagta

SEQ ID NO: 57526 - DNA, 138 bp, Homo sapiens
gggacctggaagacaagggggatcaggaagtgagtcttgcagcttgtcactaggaagccttgtttggggtccccatgcccttgaaccaggtgaacagggcggggagctaaggcgagctctggcctcttccgtccccag

SEQ ID NO: 57527 - DNA, 331 bp, Homo sapiens
ttggctctgagggcacccccatgagacgctgacctacagtgctggggcattcactcagctccccaaactttgcttccgggtgtctggcgcactccagcagcaccagcagtttccacccggccctgactctgcagctaaagacccacatgcctagaccagggcgtctccctagaagggcttctcctggagatctctagggactgactccttggcaggctgggccgggctctggcttccatccttatcattggaaatcatcaccgggcactggaactagagggtaagaggggagggagaagtgcagaggctggacaggcaaaggacagagcag

SEQ ID NO: 57528 - DNA, 702 bp, Homo sapiens
caactcccctcattgtgtgtccttgagcaagtgacctttgtctgagcctcagtgtcctttcctgggactgttatgaggacccagtgtgatcatgggtgacacttgacagacatgtcagagttggtggcaggtggtggttcgcaattttggcagggacgtttcagggaaggtgttcccgataaaggtgacatttaagatatgacctgagggagggagccgtgtggctatttgaaggaagagagatccaggtggggagagaataacaggcataaaagccttcgagcaggagagtgtgcagaattccaggagccacaaggagctcagtgtggctgaagcagggtgaacgggtgacaggtcagaccttgagggccttgaggaccaacaggaagactttggcttttgccagtcattgttgctcatgtgtctactcctagctctttgggaggctgaagcgggaggatcacttgagcccaggagttgtcccagctaattgggaggcccagatgggaggtttgtttgagctggggagttcgaggttgcagtgagtaatgattgtcccactgtatccagcctgggtgacagagtgagaccctgtctcaataaaataaaataaaagaagttctgcagtaggactgttcatgttaggaagaaaacatctttttcatatttttattaaaataaaataaaagaagttaaaacgtt

SEQ ID NO: 57529 - DNA, 411 bp, Homo sapiens
tgaaaccctgtctgaaaagaataataataaaataggccaggcatcgtggattatacctgtaattctagcaccacgggaggctgaggtgggtggatctactgagctcaggagtttgagaccagcttgggcaacatggtgaaacccagtctctacaaaaaattagctgggggtggtggtacacgtctgtaatcccagctacttgggggctgaggaaggaggattgcttgagcccaggtggcagaggttgcagtgagccgagatcatgccactgcactccagcctgggtgacagagtgagaccctgtctcaataaaataaaataaaagaagttctgcagtaggactgttcatgttaggaagaaaacatctttttcatatttttattaaaataaaataaaagaagttaaaacgtt

SEQ ID NO: 57530 - DNA, 174 bp, Homo sapiens
aaatgtaaatcaaacgcaatgtggtaggcgaaatcggtgccctcacagcatccggcaaaaggtgaaagcgacccaggagtacctgagctccaggtaaccgccctgcccgctgggcttgggacaagccggcgggcgaggtgcctcccaggccaacaagagaccctggcccagggg

SEQ ID NO: 57531 - DNA, 257 bp, Homo sapiens
gacggtggctagggggaaaaggcctgaacagaggaggtagccaacccaggtacgctaggaggcgggggccccagagtactcccctctgcagcgatggtcaggaggcccacgaggtggctgcggggcaggggggctttttctctgccctggcgtggccattagcgggtgggagaagcaggctgagctggggcaccaggcatgaagactcggttgtctggctcagctgctgatggaggagtgccccagaagcagaagtg

SEQ ID NO: 57532 - DNA, 991 bp, Homo sapiens
aactgtagaagcattctgttgacaatgaaatgcaagagaagaatggattttaaaaatcttactctatttgtaaaaattcatttcaacgaagatctcagtgtttacaaaaaaaacctctaccaactatacatgatctttattttatcttaattttattcttctaaacatcttcatcttagtatgctgcccatttggagaaatacatatatttcactgtcattcctagactttctttatttgcagtgattaaattatggcctatatagtcttgccttgcaggtcccttgccctaagaaatacactcacatgacatgactagatggtgtcaccagctactgaaagtacatttttgaaattgtcatattgtatgagcattttttcaatttaaagtaaatcaaatcttctgtgtaggttcatagaaactaaacaaccaaaccttgaaaaattagttaaaaacagcttaaagtagaaatgattaaaatgctagttgatgtattcagttatgattttttttggctactcatcttctacacttcgatattattatatagatgtctagaatgtttcatatgtatgtttttaccttgctgtacaaaataaggtattatatgtattcatctacttgtgtgtatagaggttgtattatataaatgccaggcatacattttaaaaagccattttgtataatattttgattatgaatgattcattttcaaaataacatatgctgtggttgaaaaaaatagttatgttgggccactgtttattccactgggtgaatgggagatacttctttgttcataagtaaatatttggttcaagcctgggccaggacaagttagttcaaagaggaagggtcaaatgggaatgttattgatcactgcaaatagaagaacttcatacagaataattacccatctagatagcaacaaaaggaccatctcctgaaatgataatcttggcactatcttagagtccaactaaaaaaaaa

SEQ ID NO: 57533 - DNA, 370 bp, Homo sapiens
ttgtatttttagtagagacagggtttcaccatgttgcccaggctggtgtcgaactcctgacctcaggtcatccacccacctcggcctcccacagtgctgggattacgggtgtcagctactgtgcccagcccagaataagggaactttatgttcaaacacgaataatatcaaaaatataattctgagcaaagacagctgcagaaagatatttgcagtatggtgccacttaaaacttttaaatgtgcaaaataatattgtttggggacacttaaatgtgtaacgagtataaagccagtatgagagtgattaaactctaagttcaggactggagaacttcagggggagcgggagaggagggaaggagggaaat

SEQ ID NO: 57534 - DNA, 951 bp, Homo sapiens
cggtagtggtccgtgaagtccgcggagtgggcgctgatggtggggctatcccttcccactgtccgcgaggtgcgccgtggtaacgcgcggggacacagcgcgggtgtggaccccctgcccacagctggcgcacagccattgagtgtagacccgactggggcacgaccactgaaccctgcacttggcgtcctccgggccccgcgaggggccttgctgggcgggtccgcggcaccccgggttcccagaagtcgaggccccgaatgcgcctcccctcgcctggaatcggagagcggagggctcctgcgggcaggtggccgtgctccgaagagcgccctgccacccatgaggtggccctgggggcgtcgctagccttcccagctgggtgtcctcatccggagacacaaacacctgcctcaggattaaagcgaggagctgtatttcagaccgtctcaggagaaatagcaagaggctgcctcactcctttgcccttgttcaagtttgaggcattaagaaggataagacatcaatttgaaaagagcccctgtcagagcaacatgacttgaaagcaagaagaaaaaacaaaaaatgaagcaagaacaaacatcaaatttatgctgagtttggctgcaagaatggtgaaatcattgatactttacaagacactaatcaggacagtgccccaaaggaatcagcagtttacaaatggatataacctgttttcagaagagacaagattaatttgaagatgaagcagtggcggaccatccatgtcaatttatgagaaaaaaattcattctgttcatgccctaactgaagaggactgacaacagcacaaacaatagccaacatcatagacatctcaactggttcagcttactcaattctgactgaaagttaaagttgagcaaactttccactcaatgagtgtcgaaaccctcatgcccagatcag

SEQ ID NO: 57535 - DNA, 1074 bp, Homo sapiens
  misc_feature (16)..(16): n is a, c, g, or t
agcgggtcactcagtncagctcccatgcaaagttgcttttagttctcattgtgagatcacaagtggaggctccaaccagtccagaagttcctttctatggggaagctgtggcagcaaggccgtgaagagagtctgacttaattgcaaagacgaggtttcaccatgttgaccaggctgatctcaaacatctgacctcaggaagtcagaggcaccaatgtgaggttccacctgctttccagcacattcttggtttcctcacttctgctagacaacgtttgatcagaaggaacagggaacgagaaggagctgctggatgacgataagcctgggaaagggaggctgggtgagcagagacagaaaagaaacacctacctgctgtgacctcacaaacacccaggctgagttttgataagacaggttgaatcacactggggtgacagcctcatccctccaggtacaaacaagaacaggccatggttaaccaaagctcccccatgggcttcctccttctgggcttctctgaacacccagcactggaaaggactctctttgtggttgtcttcacttcctacctcttgaccctggtggggaacacactcatcatcctgctgtctgtactgtaccccaggctccactctccaatgtactttttcctctctgacctctccttcttggacctctgctttaccacaagttgtgtcccccagatgctggtcaacctctggggcccaaagaagaccatcagcttcctgggatgctctgtccagctcttcatcttcctgtccctggggaccactgagtgcatcctcctgacagtgatggcctttgaccgatacgttgctgtctgccagcccctccactatgccaccatcatccacccccgcctgtgctggcagctggcatctgtggcctgggttatgagtctggttcaatcgatagtccagacaccatccaccctccacttgcccttctgtccccaccagcagatagatgactttttatgtgaggtcccatctctgattcgactctcctgtggagatacctcctacaatgaaatccagttggctgtgtcca

SEQ ID NO: 57536 - DNA, 821 bp, Homo sapiens
  misc_feature (16)..(16): n is a, c, g, or t
agcgggtcactcagtncagctcccatgcaaagttgcttttagttctcattgtgagatcacaagtggaggctccaaccagtccagaagttcctttctatggggaagctgtggcagcaaggccgtgaagagagtctgacttaattgcaaagacgaggtttcaccatgttgaccaggctgatctcaaacatctgacctcaggaagtcagaggcaccaatgtgaggttccacctgctttccagcacattcttggtttcctcacttctgctagacaacgtttgatcagaaggaacagggaacgagaaggagctgctggatgacgataagcctgggaaagggaggctgggtgagcagagacagaaaagaaacacctacctgctgtgacctcacaaacacccaggctgagttttgataagacaggttgaatcacactggggtgacagcctcatccctccagatgctggtcaacctctggggcccaaagaagaccatcagcttcctgggatgctctgtccagctcttcatcttcctgtccctggggaccactgagtgcatcctcctgacagtgatggcctttgaccgatacgttgctgtctgccagcccctccactatgccaccatcatccacccccgcctgtgctggcagctggcatctgtggcctgggttatgagtctggttcaatcgatagtccagacaccatccaccctccacttgcccttctgtccccaccagcagatagatgactttttatgtgaggtcccatctctgattcgactctcctgtggagatacctcctacaatgaaatccagttggctgtgtcca

SEQ ID NO: 57537 - DNA, 1151 bp, Homo sapiens
ataaccatgcttttttcatctccaaggtggtaatgtgatggatttaggtgatattcaaggagattcagtcaataatgagacataatgaacatacagaatcattacaatatatattgcctataaaagtggttttatgacagagatcctaagaaaaatattttagtaacagaaatatatactttggaagacaataatgagattactttgagaaacattatatgggtgactatattagcatgcttctaataatatgctttgtgagtattgtttacttttgtatatcatattttatatcagtgaatactagataaagggtaatcagcaaatgttttttgaatggataatctctaactgaaagttaatttctactttttccactaaatattgattagttaactgtacagtcccgagtcacctaacatcagggattcattctgagaactgcattgtcaggcaagttctttgttttgcaaacaccatagagtgcacttccacaaaccccgacaggatagcctactacacacctaggctatattgtacagtctgttgctcctagtctacaaagctgcacagtgtgttactatactgtaggcagttgtaacacaatgataagtatttatgtacctaatcatatctaaacctagaaaaagtacagtaaaaatatggttttgtaatcttatggccagacattcctatactgcctggtgttggctgaaatgtcattagatggcgcatgactgtattattcttatagtatgtagatttcagttattctagagttattttagaaaatgactgtgtgacaatattgaatactaagaaaactgtcaaattggggaatgacttcaaaatatttaaagtgcgtttgagttgtctttaaatttagattcatcacacttacatacttacgagtgagagtacctcatattttaagggaaatgcttgagaaatttacatgatttttgaaaagaatgagaacacagtaagaattctcttgcctgctgctttcttggaaatttctatttgaacagtctgttcagagcgatggggcaaagatgaggatgaggctgattaatcaaaatagtcttccgtcttccaactttatttgaaacagtttaagacagagtgagactccgtctcaaaaaaaaaaa

SEQ ID NO: 57538 - DNA, 374 bp, Homo sapiens
ggtcttgatctcctgacctcgtgatccacccgcctgggcctcccaaagtgctgggattacaggcgtgagccaccgtgcctggccgagataattattttttagtgacgatttagcaacctgaaaaccttgggtctttgggatatgacctcagtatcaacacagaatatttgaatgctggttaatatatttgttttaaactgtgatagaattgaaatcttgtagccacattttgaaagtttattcttcattaactagtcttttctcacctgattttctacaagagagaattttccaaaaggttagttgtcgttacattaagaacttgggttttgtttgacatgaaatgtttctacaccagcaggtctcagatgaat

SEQ ID NO: 57539 - DNA, 274 bp, Homo sapiens
ttttccgtagacagggtttcgccttgctggccaggctggtcttgaactcctgacctcaagtgatctgcctgcgtcagcctcccaaagggctgggattacaggcatgagccactgcacctggtcccttgaactctttttaatctatactcatttccgtgatctcatccagtctcctgactttcagtaccatctaagatatataatatcatcatatatgatgacaactcttaaatttatatctccagctcggatctcttacctgaactccagattc

SEQ ID NO: 57540 - DNA, 3079 bp, Homo sapiens
ccgggcaggcttggcggcccgcgtgggctcctccccgcggcgctggctcagtgcgaacccggcgagggcggctgggcgctttagaactgccctgcaggccaggaacctctgtaggtttccctggggaggtctggggtgggagttccgtacgccctgagctccaggttcttgtacttttcttagttgtgagggagggaatttgcgaaagaattttccttatcaggagattcaaacttgtcctcgcaaggaaatggataactcacatccacagcatgtcccttccttttcagccatttaaagttttggcaactgaaactgtaagtcacaaggcattagatgcagatatatacagtgcaattccaacagaaaaagtggatggaacatgttgttatgttactacctataaagatcagccatacctttgggctcgactagatagaaaacccaacaaacaagctgaaaaaagatttaaaaattttctacattcaaaagaaaacccaaaagaatttttttggaacgttgaggaggacttcaaaccagctccggagtgctggataccagcaaaggagacagaacaaataaatgggaacccagtgcctgatgaaaatggacacattcctggtatcatgatatctcttctagtgcagttttgtgtttactagtaaaatgatcaaaatatccattcaatcagaaattacagaattttaatctgggtcttcattaatatgtatagcacagaatttctgaatcaaatttatgtaaagtcctacatacattttatatcaaagatgtttcatatcaagaatgtcctcttaggtttagaatcttttctaagatgggcattttttactagctgtagtctgtgacaataaagcgtcaaaagagaatagccttgaggccaggtgcagtggtcacacctgtaatcccagcactttgggaggctgaggtgggtggattgcttgagcctaggagttttaagactaacctgggcaacatggcaaaaccctgtctctaccaaaaatacaaaaaattagttgggcatggcattgtgcgcctgtagtctcagctactcgggagactaatgtgggaaacacctaagccccggaagttgagactgcagtgaaccatgatcgtgccactgcactctagcctgagagttggactgtgaccttgtctcaaaaaaacaacaaaagaagagggaatagcttccaagttcttgtcaggatagatgagatgatctagtctgaaatgagatttcaagaagtggctatacctttagattagggatgggaaaattttgcgaaggtatgctgaataggaagatatcccagattaaggttataggttctcaaccggcatgtcttgagtgcccattatgtgcaaagtcctcttagtttctggtaatacaaaaatgaaggtcagaacccttgtcctcaatgatctttaattagacattgggagaaattaaccaataatagtatgatttaagaactaacaggaatgaatacatcaggtgccactggagaaaagaggaattcctcattcagcttgtggttagtggaggctcccaagaggagtagacatctgtactgaagcttaaggaccaggaagtcagctgacaaggaagagggaagatcagcttaggcaaactcccaggaagagggaatatcagcttaggcaaactcccaggaagaggagagggcatggggtattttgaatattttatgtaacactttattgcagctagaatgttcagggtatatgacatcatgaagtggctgtaaaagttgaggctagaagtgtggtgggctcagatcggaaaggcccttttattccatctaaaggagtttgaagtttatcctgaagataatggtttttaatcagtggtacagcaaaagcaaatttaagttttagaaatagaactatgataaaagtgggttggatttcactggaggctaggtgaccagcaaagaagttattacagtaatctagtgtgagtaatgaaggaattctggcaataagaatgagaagggtaatagcaataacattcaataaacgtggcatcagtaaattgttcggtatatattggaacattttaataaacttggaacacttaactgcattatgtccattgtccctgaagcttgagagaaggcagagagaaaacttattttatataaaaaattttgagtgctgtgtcttagaataatgttcagttcttaatgaataagggtgaattttctagtaagagaatgctaggtgctgtgtagtgaataataggttaattctacagaataaaaaatgaacccttatgattttttaaaaagtaataaactgttaactttcccactgaattttaaagtaatatctctttgcgatagacacccagaaaacatgagaaatttacaacaaaaatataaattacctgtagtgtcagtccaaagaaaaacgatctaataacaaataattttcttctttatatgataggttgggtaccagtagagaaaaacaacaaacagtattgctggcattcctctgtagttaattatgaatttgaaattgccctggtactaaaacatcatcctgatgattctggacttttggaaattagtgcagtgccactttcagatctcttagaacaaacactggaactcataggaacaaatatcaatggaaacccatatgggttagggagcaagaaacatccattacatcttcttataccacatggagcatttcaaataagaaatctaccttcattgaagcacaatgatctcctgtcctggtttgaagattgcaaagagggtaaaattgaaggaatagtgtggcattgcagtgatggctgtttaataaaggtccatcgccatcatcttggcttatgctggccaattccagatacttacatgaattcaagaccagttattatcaacatgaacctgaacaaatgtgactctgcctttgatattaagtgtttgtttaatcattttttaaaaatagataatcagaaatttgttagactcaaagatataatatttgatgtataaaatgcaaataaaattagtttatcattatattctaa

SEQ ID NO: 57541 - DNA, 920 bp, Homo sapiens
  misc_feature (831)..(831): n is a, c, g, or t
  misc_feature (837)..(837): n is a, c, g, or t
  misc_feature (841)..(841): n is a, c, g, or t
  misc_feature (843)..(845): n is a, c, g, or t
  misc_feature (851)..(851): n is a, c, g, or t
  misc_feature (853)..(853): n is a, c, g, or t
tcccagaaggcgccgcggccaggaagccgcttctggacgggcgttcccgcccctcgctgggcttggtagttggggcgcagccgcggtggctgggcgcggagtgtgcgtggcctgagccgtgcgggtgactgcttcagggcttctccgcgactggaccgggcgccgctcgaaagcacgccctccattcgcactgcttgttgggctcatcatgaagcgcttgggctccgtgcagcggaaaatgccgtgtgtgtttgtgacggaggtgaaagaggagccttcctccaaaagggagcatcagccatttaaagttttggcaactgaaactgtaagtcacaaggcattagatgcagatatatacagtgcaattccaacagaaaaagtggatggaacatgttgttatgttactacctataaagatcagccatacctttgggctcgactagatagaaaacccaacaaacaagctgaaaaaagatttaaaaattttctacattcaaaagaaaacccaaaagaatttttttggaacgttgaggaggacttcaaaccagctccggagtgctggataccagcaaaggagacagaacaaataaatgggaacccagtgcctgatgaaaatggacacattcctggttgggtaccagtagagaaaaacaacaaacagtattgctggcattcctctgtagttaattatgaatttgaaattgccctggtactaaaacatcatcctgatgattctggacttttggaaattagtgcagtgccactttcagatctcttagaacaaacactggaactcataggaacaattcatggacccttggggtttgggcnagaaantccntnnntttttncnatggggttcctagaatatctcctgaggcaggtgccgtcggtgaaatggcgagcgcatcgagagcacg

SEQ ID NO: 57542 - DNA, 1337 bp, Homo sapiens
tcccagaaggcgccgcggccaggaagccgcttctggacgggcgttcccgcccctcgctgggcttggtagttggggcgcagccgcggtggctgggcgcggagtgtgcgtggcctgagccgtgcgggtgactgcttcagggcttctccgcgactggaccgggcgccgctcgaaagcacgccctccattcgcactgcttgttgggctcatcatgaagcgcttgggctccgtgcagcggaaaatgccgtgtgtgtttgtgacggaggtgaaagaggagccttcctccaaaagggagcatcaggtcagcaccttttggggaaaccccctaatcagccatttaaagttttggcaactgaaactgtaagtcacaaggcattagatgcagatatatacagtgcaattccaacagaaaaagtggatggaacatgttgttatgttactacctataaagatcagccatacctttgggctcgactagatagaaaacccaacaaacaagctgaaaaaagatttaaaaattttctacattcaaaagaaaacccaaaagaatttttttggaacgttgaggaggacttcaaaccagctccggagtgctggataccagcaaaggagacagaacaaataaatgggaacccagtgcctgatgaaaatggacacattcctggttgggtaccagtagagaaaaacaacaaacagtattgctggcattcctctgtagttaattatgaatttgaaattgccctggtactaaaacatcatcctgatgattctggacttttggaaattagtgcagtgccactttcagatctcttagaacaaacactggaactcataggaacaaatatcaatggaaacccatatggtgagtgaagactttttcttgttcagttattgtaactgacatttataaagagaactttctaggtcaacttaaaaaacatacacacactaaagaaatgactaacaaatttgagttagtttcctaggattatatccatttctgttaactttacattcacagagaaatgaaaccattttattaatccaaaaggttgatttttatcctcattctttcctgtaataacattacacaactatatatgaaaagtaatgactcagttgtaacccccttgcttttaaaaattcaggtgagttgagtcgattgatgaaaatgcacttttcatggttattatagcatcaatttaaatagccaacggtataaagaattggcaatgaataataccatgttaagtatcaaaatatatatcatgatgaattgagtgcaagtactgagagcactatgggttacaccttgctgacaaggggatgggaagacagac

SEQ ID NO: 57543 - DNA, 1221 bp, Homo sapiens
tcccagaaggcgccgcggccaggaagccgcttctggacgggcgttcccgcccctcgctgggcttggtagttggggcgcagccgcggtggctgggcgcggagtgtgcgtggcctgagccgtgcgggtgactgcttcagggcttctccgcgactggaccgggcgccgctcgaaagcacgccctccattcgcactgcttgttgggctcatcatgaagcgcttgggctccgtgcagcggaaaatgccgtgtgtgtttgtgacggaggtgaaagaggagccttcctccaaaagggagcatcagccatttaaagttttggcaactgaaactgtaagtcacaaggcattagatgcagatatatacagtgcaattccaacagaaaaagtggatggaacatgttgttatgttactacctataaagatcagccatacctttgggctcgactagatagaaaacccaacaaacaagctgaaaaaagatttaaaaattttctacattcaaaagaaaacccaaaagaatttttttggaacgttgaggaggacttcaaaccagctccggagtgctggataccagcaaaggagacagaacaaataaatgggaacccagtgcctgatgaaaatggacacattcctggttgggtaccagtagagaaaaacaacaaacagtattgctggcattcctctgtagttaattatgaatttgaaattgccctggtactaaaacatcatcctgatgattctggacttttggaaattagtgcagtgccactttcagatctcttagaacaaacactggaactcataggaacaaatatcaatggaaacccatatgggttagggagcaagaaacatccattacatcttcttataccacatggagcatttcaaataagaaatctaccttcattgaagcacaatgatctcctgtcctggtttgaagattgcaaagagggtaaaattgaaggaatagtgtggcattgcagtgatggctgtttaataaaggtccatcgccatcatcttggcttatgctggccaattccagatacttacatgaattcaagaccagttattatcaacatgaacctgaacaaatgtgactctgcctttgatattaagtgtttgtttaatcattttttaaaaatagataatcagaaatttgttagactcaaagatataatatttgatgtataaaatgcaaataaaattagtttatcattatattctaa

SEQ ID NO: 57544 - DNA, 1103 bp, Homo sapiens
tcccagaaggcgccgcggccaggaagccgcttctggacgggcgttcccgcccctcgctgggcttggtagttggggcgcagccgcggtggctgggcgcggagtgtgcgtggcctgagccgtgcgggtgactgcttcagggcttctccgcgactggaccgggcgccgctcgaaagcacgccctccattcgcactgcttgttgggctcatcatgaagcgcttgggctccgtgcagcggaaaatgccgtgtgtgtttgtgacggaggtgaaagaggagccttcctccaaaagggagcatcagatcagccatacctttgggctcgactagatagaaaacccaacaaacaagctgaaaaaagatttaaaaattttctacattcaaaagaaaacccaaaagaatttttttggaacgttgaggaggacttcaaaccagctccggagtgctggataccagcaaaggagacagaacaaataaatgggaacccagtgcctgatgaaaatggacacattcctggttgggtaccagtagagaaaaacaacaaacagtattgctggcattcctctgtagttaattatgaatttgaaattgccctggtactaaaacatcatcctgatgattctggacttttggaaattagtgcagtgccactttcagatctcttagaacaaacactggaactcataggaacaaatatcaatggaaacccatatgggttagggagcaagaaacatccattacatcttcttataccacatggagcatttcaaataagaaatctaccttcattgaagcacaatgatctcctgtcctggtttgaagattgcaaagagggtaaaattgaaggaatagtgtggcattgcagtgatggctgtttaataaaggtccatcgccatcatcttggcttatgctggccaattccagatacttacatgaattcaagaccagttattatcaacatgaacctgaacaaatgtgactctgcctttgatattaagtgtttgtttaatcattttttaaaaatagataatcagaaatttgttagactcaaagatataatatttgatgtataaaatgcaaataaaattagtttatcattatattctaa

SEQ ID NO: 57545 - DNA, 1432 bp, Homo sapiens
  misc_feature (1432)..(1432): n is a, c, g, or t
tcccagaaggcgccgcggccaggaagccgcttctggacgggcgttcccgcccctcgctgggcttggtagttggggcgcagccgcggtggctgggcgcggagtgtgcgtggcctgagccgtgcgggtgactgcttcagggcttctccgcgactggaccgggcgccgctcgaaagcacgccctccattcgcactgcttgttgggctcatcatgaagcgcttgggctccgtgcagcggaaaatgccgtgtgtgtttgtgacggaggtgaaagaggagccttcctccaaaagggagcatcagccatttaaagttttggcaactgaaactgtaagtcacaaggcattagatgcagatatatacagtgcaattccaacagaaaaagtggatggaacatgttgttatgttactacctataaagatcagccatacctttgggctcgactagatagaaaacccaacaaacaagctgaaaaaagatttaaaaattttctacattcaaaagaaaacccaaaagaatttttttggaacgttgaggaggacttcaaaccagctccggagtgctggataccagcaaaggagacagaacaaataaatgggaacccagtgcctgatgaaaatggacacattcctggttgggtaccagtagagaaaaacaacaaacagtattgctggcattcctctgtagttaattatgaatttgaaattgccctggtactaaaacatcatcctgatgattctggacttttggaaattagtgcagtgccactttcagatctcttagaacaaacactggaactcataggaacaaatatcaatggaaacccatatgggttagggagcaagaaacatccattacatcttcttataccacatggagcatttcaaataagaaatctaccttcattgaagcacaatgatctcctgtcctggtttgaagattgcaaagagggtaaaattgaaggaatagtgtggcattgcagtgatggctgtttaataaaggtccatcgccatcatcttggcttatgctggccaattccagatacttacatgaattcaagaccagttattatcaacatgaacctgaacaaatgtgactctgcctttgatattaagtgtttgtttaatcattttttaaaaatagataatcagaaatttgttagactcaaagatataatatttgatgtataaaatgcaaataaaattagtttatcattatattctaaaaaaaaaaaaaacacaaacaaacacaaccttttggggcgggctgggcccgagaaagagttttaaccattcggttgggcgccgggctgggggttagcgacctgccccggcgtccaggagaaccggcccgcaagggtgggttcaccaaaaaaccccggggccccgccttgaacacccaagggtggggcccggctcacgggcccggcccgtatn

SEQ ID NO: 57546 - DNA, 1305 bp, Homo sapiens
tcccagaaggcgccgcggccaggaagccgcttctggacgggcgttcccgcccctcgctgggcttggtagttggggcgcagccgcggtggctgggcgcggagtgtgcgtggcctgagccgtgcgggtgactgcttcagggcttctccgcgactggaccgggcgccgctcgaaagcacgccctccattcgcactgcttgttgggctcatcatgaagcgcttgggctccgtgcagcggaaaatgccgtgtgtgtttgtgacggaggtgaaagaggagccttcctccaaaagggagcatcagccatttaaagttttggcaactgaaactgtaagtcacaaggcattagatgcagatatatacagtgcaattccaacagaaaaagtggatggaacatgttgttatgttactacctataaagatcagccatacctttgggctcgactagatagaaaacccaacaaacaagctgaaaaaagatttaaaaattttctacattcaaaagaaaacccaaaagaatttttttggaacgttgaggaggacttcaaaccagctccggagtgctggataccagcaaaggagacagaacaaataaatgggaacccagtgcctgatgaaaatggacacattcctggttgggtaccagtagagaaaaacaacaaacagtattgctggcattcctctgtagttaattatgaatttgaaattgccctggtactaaaacatcatcctgatgattctggacttttggaaattagtgcagtgccactttcagatctcttagaacaaacactggaactcataggaacaaatatcaatggaaacccatatggtgagtgaagactttttcttgttcagttattgtaactgacatttataaagagaactttctaggtcaacttaaaaaacatacacacactaaagaaatgactaacaaatttgagttagtttcctaggattatatccatttctgttaactttacattcacagagaaatgaaaccattttattaatccaaaaggttgatttttatcctcattctttcctgtaataacattacacaactatatatgaaaagtaatgactcagttgtaacccccttgcttttaaaaattcaggtgagttgagtcgattgatgaaaatgcacttttcatggttattatagcatcaatttaaatagccaacggtataaagaattggcaatgaataataccatgttaagtatcaaaatatatatcatgatgaattgagtgcaagtactgagagcactatgggttacaccttgctgacaaggggatgggaagacagac

SEQ ID NO: 57547 - DNA, 480 bp, Homo sapiens
tgttcctggcatgtttccaggtgctggacatacacagtcaacaaaacaaggtgtctgccttcatgaagctcacattctaatggggaagatagacaataaacaaatatgtaatatgtcaggagaagaccagctataaaaaaaaaaacagtaagataaagtggagtcttacccagtacctggcagacagtgggcactcaaatatttctaagtgaatgaagatagtatctgtatgctaaagctaataccttttttctctttccaggtccatcgccatcatcttggcttatgctggccaattccagatacttacatgaattcaagaccagttattatcaacatgaacctgaacaaatgtgactctgcctttgatattaagtgtttgtttaatcattttttaaaaatagataatcagaaatttgttagactcaaagatataatatttgatgtataaaatgcaaataaaattagtttatcattata

SEQ ID NO: 57548 - DNA, 406 bp, Homo sapiens
agtcactcagaaacttactttgcttacagcctcattattgttttttgtatttgttaagatattccgtgtgatgacatattttgccttaaattttctaatttttctggccattgctttcctgtgatttgaaaatgttacggtaagtgcttagtttggaaactatactgtcaacatatattgcattacttcagcagagctgtagttccataacataataaaatgatgctttttttaataagaagatcatacacatttcattatgccctaaaagatgaacattcaaagttcacttttctcttgttttgatatgacggatatatatcagtaaaataaaaaatgctgcagaacaatatgcactaactcaaacatgctgtgatttgtagtgcactgagtagcaatgtcaaag

SEQ ID NO: 57549 - DNA, 448 bp, Homo sapiens
agaaatgaaggttaggaaagtagacagaaccttgtccgtcactgtgatacttgtttgaaaaataccagacacacagcacagtctactttcacagcagctagggctaatctacagctgtatatgtgtgtgcacacacatatgcacacttccatagaaacgtggttgacaccctggatgttacttctgtagttgaaaacagaccccttccctccatcccttgatccctacttctgctccagttatagcctctttctagaaatctttctgggtttctggcctatcctcctcctggtgggcagtactgttccttttgcacacaaagcagagccatcgtggaaaggcagttctggagagccccatgaacaggtgtgcaaaccaggaccagacagatctggaaaaagcagacagctagaggttggtgcaaggggtacaggcaggtaagcaggga

SEQ ID NO: 57550 - DNA, 1165 bp, Homo sapiens
tttttttttttaattcatggtcttgctctgttgcccatgccgtagtgcaggggcatgatcagggctcactatagcctcaacctcccgggctcaagccatcctcctgcctcagccccctgagtagctgggactggcatgagccaccacactcagacatataaaggatcttacataaaagtcagtttcgctttggattattgcttagatgatgtatctctacagatgtactgagattctgctgtagttttaagattttactgggacagtttgggcagtttatcagaatgtagaaagtatgtcacaatctgtctgccttaaccaaaatagtgggtatgtaataggtatgccacgttgaccttgattcctggaagttggctaaaactaggattgagcaagcatgcccagatataagatcaacctctgttgatggaaacctacatttgactaaagatcctcatcagcagtatggaatagttattttagttatttgtcactcaaaattttgctgtcttttttaagaaaatatttattattagtagagaaggaagtcttctgataaaactagcatatcttttaggagatttaaggcattatgctcatatcactttgagttctgtgttttatggtgggtagaccacagtctgacggacttatgaaacattctgaatcgtgagggctccctgagacccagttaagtattcgcccagtgaggtttttggccttctcctgtgcctttgcctgccttagctctctctcattggttggtgagtcaagttgatccttgcaagagctgctgtttattgtgtgctcatgattcagccaggcactaagtacttctcatgaattacttctgttccttacacgaaagcatgtaggaaatgagaggctgatatgggagctgaatctggggctgtcttactctgaggtctgggtcactccatataccatgctacctctctggttcactctagtaaatctagcttctaaccaaggtgttttcagttgttgatgagaaaagcctctctgtgtattgactccagaaaagcattgatgctcgtccaaaggtagtgagttagctcagttgattgttcacagtcagttacggatcgaacagtctcgttctagtctttcctcccttactattgcacttgactagtctttaaaa

SEQ ID NO: 57551 - DNA, 254 bp, Homo sapiens
ggtgggcgctattattagccacgttttaccgaaggggaaactgaggcttagagcggtgaaatgctttgttggaggtcacacagatggtaattggttgagcctgaactgaaactcaggctatctgatgccagaacccaaactgtttccccaactttcgacgaccctgctttatcatctctcttgggggtaggcaagcttctgtgaagtcataaaacccatgtttttggctctgtgggccacaagagctccactgc

SEQ ID NO: 57552 - DNA, 1461 bp, Homo sapiens
actgattggaacactttcctcctcttccttcctagccccagctattcactggggactgtcatagctgggattctaaaggtgccacatttttcagtttcatctccactaggttggttcccgggcaggaagtcaggcagcagggaaggacacgggaacagcaggtggagaattcctacagtctttcttaccctgctagcaatagctctcagtttcagaggcacagtctttggagaccattcagcactgagaaagcaatatttagaacctattgcaaaactgggcctgagttaggcatggtgatgaatgcatcagcaaggaatagaaagttcttatcgtgaaacccttcaacctcaactatgccttcatagacacacacgttcatgcacatgtaggcacatgtaccatctcacatcttcactttcccgagatgccatatacaattacctacattaataactgtagcactatgccttttgagcccgagagagggaattagtgactctaagtgaaggtcactgacacagagaagcagtatgtgtctggggcttccaggacctgcaggcccactagcgtgcacttaccagaatggcatacacaggacctgatcatgaggaagaccaggtttccagtgtaaactactcttgttcccaccacctctggagcactcagggagccccatacagtacttacaatgtctttaatggacttgattctgtttaattttttgttttatattaggcacactgtattaattttccaaaatgttataccacactatgttcttggtcctgacctattgctctggaggaaagagttgtataagaacgtggctcatgtgaacttttgctagcttcatttgaggacctgagaatcatggggaaagggaaggtaatgttttcattgaaatcatcacagtgatttttattccctgggaacacagcgtgtactaaaaatacatgagaaaatagcatgtatatgaaagctattctcaaaagtcacctgagctcaccatcttcatagccaaccctaccagttataaagatggcagctctatcacttgattaagtgggaggtggtcaaatattttggtgcctcattttcttcatctgtgagatgggaactgttatgcctggcttactaagagtcttgtgagagactgagaagttgattttgttcatatccaatctgtaaatgcgaagtcaggggaagtaatgtccctgaaataaacgggttcatgccatctagggacaataaatggttttcttgttgtaattcgataccaaaaaagatgaaactacagaaactcaaatttaaaaaaaactttaaaagaaacaaaaaaatactcaacgattctttcagctttattaacattttccattgtttcttgcgacttgtgtctcgttctttgtagtattgatgatgaacatttgataatgaatgttcttgtatattcagataaag

SEQ ID NO: 57553 - DNA, 4569 bp, Homo sapiens
actgattggaacactttcctcctcttccttcctagccccagctattcactggggactgtcatagctgggattctaaaggtgccacatttttcagtttcatctccactaggttggttcccgggcaggaagtcaggcagcagggaaggacacgggaacagcaggtggagaattcctacagtctttcttaccctgctagcaatagctctcagtttcagaggcacagtctttggagaccattcagcactgagaaagcaatatttagaacctattgcaaaactgggcctgagttaggcatggtgatgaatgcatcagcaaggaatagaaagttcttatcgtgaaacccttcaacctcaactatgccttcatagacacacacgttcatgcacatgtaggcacatgtaccatctcacatcttcactttcccgagatgccatatacaattacctacattaataactgtagcactatgccttttgagcccgagagagggaattagtgactctaagtgaaggtcactgacacagagaagcagtatgtgtctggggcttccaggacctgcaggcccactagcgtgcacttaccagaatggcatacacaggacctgatcatgaggaagaccaggtttccagtgtaaactactcttgttcccaccacctctggagcactcagggagccccatacagtacttacaatgtctttaatggacttgattctgtttaattttttgttttatattaggcacactgtattaattttccaaaatgttataccacactatgttcttggtcctgacctattgctctggaggaaagagttgtataagaacgtggctcatgtgaacttttgctagcttcatttgaggacctgagaatcatggggaaagggaaggtaatgttttcattgaaatcatcacagtgatttttattccctgggaacacagcgtgtactaaaaatacatgagaaaatagcatgtatatgaaagctattctcaaaagtcacctgagctcaccatcttcatagccaaccctaccagttataaagatggcagctctatcacttgattaagtgggaggtggtcaaatattttggtgcctcattttcttcatctgtgagatgggaactgttatgcctggcttactaagagtcttgtgagagactgagaagttgattttgttcatatccaatctgtaaatgcgaagtcaggggaagtaatgtccctgaaataaacgggttcatgccatctagggacaataaatggttttcttgttgtaacttctggttaatatcagtaccttgatgtcatcaccgtgatgacaaagagaagagttattgttgatcttcttggttttggtctgtctcttttcttaggataaagaaaaacttccaaactagaaaaacaggccctggttcccttagtttgcacttgaacccaatatgttgccttgtacatacttggtccctgtcacattgactgcttgggaggcttccagggagaagtatgagaccctgaggggtgagaatgggcagctagcaagaacatggaaattctgcttggcactacagtcataaatagaaaacactgtgtgtgctcaggggagcaggggatgccactgaagaaactcaagggaatgtgtatttgaaggaaatgcaaaaactaagtatttagcaaaatgaaattatgccttgatgactaaaaggcactagaaaggttgtgtctactaacttcagccctaatcagaacagatgcctagaaggagcatttttgtgacaacttcatagtgattagaatcagtggagaactccatcttagtggcaggaatataatgaaactacccacgcaagaacatggttgaatcacatttgcttgacttagggcaaagtacgaaagagagacaaaagggttctcttggaaacaagaagagtgactccagatgtggcctgaataattgccatgttaagttaatgcaaaagatcagaacagggctacatttgcacaggcagtttctctccgggccgtagttttcactgatgatcacctttcacagcattttccccaaccagcatttcacttagtcttctctatacccagcacctcccccggcacccccggcaagcccactatcacttccgacttccaacgtggcatccgtgagatctgtccacattaggcgaagcaggagaacactgagagcagcaggatgggtttggaaagagcatgcctctggaaacacagcttcctgggaattcacatgaggccagtcctacagagagcaagatgcaccccaggatttcttcattttctaatagatgtgggagtgctccattttccccgacagcgaatttcccctgagaaacgatactagaccctgggtttgcccaccttgtaactcttccttatctcctccttttcatccctaattcatcctccctctggcatggaattgacgcccgtgcagtacatttgccaagtggcaccttctttcaatttatgttttattttgctatggtggtgattctttatttgctggttgtcttttctcacacatctttctctctgtctctctctttcctgctctttgtttttctgcccagaaaaacctgacttcgataccaaaaaagatgaaactacagaaactcaaatttaaaaaaaactttaaaagaaacaaaaaaatactcaacgattctttcagctttattaacattttccattgtttcttgcgacttgtgtctcgttctttgtagtattgatgatgaacatttgataatgaatgttcttgtatattcagataaagaaaaaaaaaaccaaaaaagcggtctgaatttaatagtgtttataataaaaattttaaaaatgaccctcatagcacgcaaaacaggatggggaatttcccctcttctttctgtgacaatgcgcatcattcctgcattagtttttaacaccagactacctacattcatcatttccctcatttttcttttattttcttgcatttgtgaattagttcaagaatgctagaaaagtgtcgagttgtgcacatccatttcttgtttcacaatgtttaaaagtgacagtaattcattttgtaaactaaaaaaaaaaaaaaaaaggttggaatagtgagcataataggtacaacctaacacattattatgtttattaactttgagacccagaaataaattcttttcttttcttgattcttgctcttaaaaatacaaaaaaaaaaatgttttgttttgtgttatttttggtttgtttattggggggctttttttaattgtcaggattatgatcttgctgtttttcttcaatatgtatacaaggtgatgtgaaaagatgacttgggcagaggagtaagaacaagtaggcttgttcttctactttgcttcagaattcagttaatgccaaaagcgaagatcaagcccatgttgatgtctcgttgctcacctgcatttccagagagtgtgacactcatgcagtccctgagaaaaataaaatcagggacatacttctccttttagccttttaaaaattcaaaaacgtttagtccaagggaactttttatgctatcaggaaaggtttttgctgtttttgattctgattatcacagccaagtactttgttttatttctccctaattaataactacattccatgaggcctcttccaaccaaagaggccttttcttccaggagagtcccgcaggagatgctggtatgatgggcaccattggttaagtaaactacatgcaggaagaagtccttggggccagtctgccagctgagtcctggttttggatgaagagttaatgagatattgggccaggctcaatgctgtagttttaatgctaagaggttacgtttacttcacagagtacacctcttagtaacctctgacttaggcagctgcttaaagcaaattgcaaaactggcttgatttggaatgtttttattagaggaaaaaagaaagccatattatctggaaaaaaattcattttaaataccatcattcaacaaattatgttcagaaagtggtcagaacttaagcaagaaaagtaaagaaagaatgcagaattgtggagcaatgctttaggaaatatttctacctgaacacttgtactcttgaagtcacaacaaaataatgatgagcttttcacatcacctttatggtttcaatccctagctcaaagcttcctggaatcttttattttttgtaaacttttttttcttttgttaaaataaataaaacattcaatgtttttctccttttctctcttattacttctttcctttggcattttcaatttgaaatgctttcctttggttgttggttttattctccccctacccctccccttttcttattattcagaatataaacctgcaaagctctgctctgttttggttttgaaagtttaagcttttctgcttctgtgagagcacaggcttctgtcccttttgattccaactgaacttttgtgttctctaatgatactaacacggtgtaggttttacagtctcctaatttgtactggtaatgcatattccaaataaatagtttcttttgtt

SEQ ID NO: 57554 - DNA, 4590 bp, Homo sapiens
actgattggaacactttcctcctcttccttcctagccccagctattcactggggactgtcatagctgggattctaaaggtgccacatttttcagtttcatctccactaggttggttcccgggcaggaagtcaggcagcagggaaggacacgggaacagcaggtggagaattcctacagtctttcttaccctgctagcaatagctctcagtttcagaggcacagtctttggagaccattcagcactgagaaagcaatatttagaacctattgcaaaactgggcctgagttaggcatggtgatgaatgcatcagcaaggaatagaaagttcttatcgtgaaacccttcaacctcaactatgccttcatagacacacacgttcatgcacatgtaggcacatgtaccatctcacatcttcactttcccgagatgccatatacaattacctacattaataactgtagcactatgccttttgagcccgagagagggaattagtgactctaagtgaaggtcactgacacagagaagcagtatgtgtctggggcttccaggacctgcaggcccactagcgtgcacttaccagaatggcatacacaggacctgatcatgaggaagaccaggtttccagtgtaaactactcttgttcccaccacctctggagcactcagggagccccatacagtacttacaatgtctttaatggacttgattctgtttaattttttgttttatattaggcacactgtattaattttccaaaatgttataccacactatgttcttggtcctgacctattgctctggaggaaagagttgtataagaacgtggctcatgtgaacttttgctagcttcatttgaggacctgagaatcatggggaaagggaaggtaatgttttcattgaaatcatcacagtgatttttattccctgggaacacagcgtgtactaaaaatacatgagaaaatagcatgtatatgaaagctattctcaaaagtcacctgagctcaccatcttcatagccaaccctaccagttataaagatggcagctctatcacttgattaagtgggaggtggtcaaatattttggtgcctcattttcttcatctgtgagatgggaactgttatgcctggcttactaagagtcttgtgagagactgagaagttgattttgttcatatccaatctgtaaatgcgaagtcaggggaagtaatgtccctgaaataaacgggttcatgccatctagggacaataaatggttttcttgttgtaacttctggttaatatcagtaccttgatgtcatcaccgtgatgacaaagagaagagttattgttgatcttcttggttttggtctgtctcttttcttaggataaagaaaaacttccaaactagaaaaacaggccctggttcccttagtttgcacttgaacccaatatgttgccttgtacatacttggtccctgtcacattgactgcttgggaggcttccagggagaagtatgagaccctgaggggtgagaatgggcagctagcaagaacatggaaattctgcttggcactacagtcataaatagaaaacactgtgtgtgctcaggggagcaggggatgccactgaagaaactcaagggaatgtgtatttgaaggaaatgcaaaaactaagtatttagcaaaatgaaattatgccttgatgactaaaaggcactagaaaggttgtgtctactaacttcagccctaatcagaacagatgcctagaaggagcatttttgtgacaacttcatagtgattagaatcagtggagaactccatcttagtggcaggaatataatgaaactacccacgcaagaacatggttgaatcacatttgcttgacttagggcaaagtacgaaagagagacaaaagggttctcttggaaacaagaagagtgactccagatgtggcctgaataattgccatgttaagttaatgcaaaagatcagaacagggctacatttgcacaggcagtttctctccgggccgtagttttcactgatgatcacctttcacagcattttccccaaccagcatttcacttagtcttctctatacccagcacctcccccggcacccccggcaagcccactatcacttccgacttccaacgtggcatccgtgagatctgtccacattaggcgaagcaggagaacactgagagcagcaggatgggtttggaaagagcatgcctctggaaacacagcttcctgggaattcacatgaggccagtcctacagagagcaagatgcaccccaggatttcttcattttctaatagatgtgggagtgctccattttccccgacagcgaatttcccctgagaaacgatactagaccctgggtttgcccaccttgtaactcttccttatctcctccttttcatccctaattcatcctccctctggcatggaattgacgcccgtgcagtacatttgccaagtggcaccttctttcaatttatgttttattttgctatggtggtgattctttatttgctggttgtcttttctcacacatctttctctctgtctctctctttcctgctctttgtttttctgcccagaaaaacctgacttcgataccaaaaaagatgaaactacagaaactcaaatttaaaaaaaactttaaaagaaacaaaaaaatactcaacgattctttcagctttattaacattttccattgtttcttgcgacttgtgtctcgttctttgtagtattgatgatgaacatttgataatgaatgttcttgtatattcagataaagaaaaaaaaaaccaaaaaagcggtctgaatttaatagtgtttataataaaaattttaaaaatgaccctcatagcacgcaaaacaggatggggaatttcccctcttctttctgtgacaatgcgcatcattcctgcattagtttttaacaccagactacctacattcatcatttccctcatttttcttttattttcttgcatttgtgaattagttcaagaatgctagaaaagtgtcgagttgtgcacatccatttcttgtttcacaatgtttaaaagtgacagtaattcattttgtaaactaaaaaaaaaaaaaaaaaggttggaatagtgagcataataggtacaacctaacacattattatgtttattaactttgagacccagaaataaattcttttcttttcttgattcttgctcttaaaaatacaaaaaaaaaaatgttttgttttgtgttatttttggtttgtttattggggggctttttttaattgtcaggattatgatcttgctgtttttcttcaatatgtatacaaggtgatgtgaaaagatgacttgggcagaggagtaagaacaagtaggcttgttcttctactttgcttcagaattcagttaatgccaaaagcgaagatcaagcccatgttgatgtctcgttgctcacctgcatttccagagagtgtgacactcatgcagtccctgagaaaaataaaatcagggacatacttctccttttagccttttaaaaattcaaaaacgtttagtccaagggaactttttatgctatcaggaaaggtttttgctgtttttgattctgattatcacagccaagtactttgttttatttctccctaattaataactacattccatgaggcctcttccaaccaaagaggccttttcttccaggagagtcccgcaggagatgctggtatgatgggcaccattggttaagtaaactacatgcaggaagaagtccttggggccagtctgccagctgagtcctggttttggatgaagagttaatgagatattgggccaggctcaatgctgtagttttaatgctaagaggttacgtttacttcacagagtacacctcttagtaacctctgacttaggcagctgcttaaagcaaattgcaaaactggcttgatttggaatgtttttattagaggaaaaaagaaagccatattatctggaaaaaaattcattttaaataccatcattcaacaaattatgttcagaaagtggtcagaacttaagcaagaaaagtaaagaaagaatgcagaattgtggagcaatgctttaggaaatatttctacctgaacacttgtactcttgaagtcacaacaaaataatgatgagcttttcacatcacctttatggtttcaatccctagctcaaagcttcctggaatcttttattttttgtaaacttttttttcttttgttaaaataaataaaacattcaatgtttttctccttttctctcttattacttctttcctttggcattttcaatttgaaatgctttcctttggttgttggttttattctccccctacccctccccttttcttattattcagaatataaacctgcaaagctctgctctgttttggttttgaaagtttaagcttttctgcttctgtgagagcacaggcttctgtcccttttgattccaactgaacttttgtgttctctaatgatactaacacggtgtaggttttacagtctcctaatttgtactggtaatgcatattccaaataaatagtttcttttgttttgcaaaaaaaaatacttgta

SEQ ID NO: 57555 - DNA, 5048 bp, Homo sapiens
actgattggaacactttcctcctcttccttcctagccccagctattcactggggactgtcatagctgggattctaaaggtgccacatttttcagtttcatctccactaggttggttcccgggcaggaagtcaggcagcagggaaggacacgggaacagcaggtggagaattcctacagtctttcttaccctgctagcaatagctctcagtttcagaggcacagtctttggagaccattcagcactgagaaagcaatatttagaacctattgcaaaactgggcctgagttaggcatggtgatgaatgcatcagcaaggaatagaaagttcttatcgtgaaacccttcaacctcaactatgccttcatagacacacacgttcatgcacatgtaggcacatgtaccatctcacatcttcactttcccgagatgccatatacaattacctacattaataactgtagcactatgccttttgagcccgagagagggaattagtgactctaagtgaaggtcactgacacagagaagcagtatgtgtctggggcttccaggacctgcaggcccactagcgtgcacttaccagaatggcatacacaggacctgatcatgaggaagaccaggtttccagtgtaaactactcttgttcccaccacctctggagcactcagggagccccatacagtacttacaatgtctttaatggacttgattctgtttaattttttgttttatattaggcacactgtattaattttccaaaatgttataccacactatgttcttggtcctgacctattgctctggaggaaagagttgtataagaacgtggctcatgtgaacttttgctagcttcatttgaggacctgagaatcatggggaaagggaaggtaatgttttcattgaaatcatcacagtgatttttattccctgggaacacagcgtgtactaaaaatacatgagaaaatagcatgtatatgaaagctattctcaaaagtcacctgagctcaccatcttcatagccaaccctaccagttataaagatggcagctctatcacttgattaagtgggaggtggtcaaatattttggtgcctcattttcttcatctgtgagatgggaactgttatgcctggcttactaagagtcttgtgagagactgagaagttgattttgttcatatccaatctgtaaatgcgaagtcaggggaagtaatgtccctgaaataaacgggttcatgccatctagggacaataaatggttttcttgttgtaacttctggttaatatcagtaccttgatgtcatcaccgtgatgacaaagagaagagttattgttgatcttcttggttttggtctgtctcttttcttaggataaagaaaaacttccaaactagaaaaacaggccctggttcccttagtttgcacttgaacccaatatgttgccttgtacatacttggtccctgtcacattgactgcttgggaggcttccagggagaagtatgagaccctgaggggtgagaatgggcagctagcaagaacatggaaattctgcttggcactacagtcataaatagaaaacactgtgtgtgctcaggggagcaggggatgccactgaagaaactcaagggaatgtgtatttgaaggaaatgcaaaaactaagtatttagcaaaatgaaattatgccttgatgactaaaaggcactagaaaggttgtgtctactaacttcagccctaatcagaacagatgcctagaaggagcatttttgtgacaacttcatagtgattagaatcagtggagaactccatcttagtggcaggaatataatgaaactacccacgcaagaacatggttgaatcacatttgcttgacttagggcaaagtacgaaagagagacaaaagggttctcttggaaacaagaagagtgactccagatgtggcctgaataattgccatgttaagttaatgcaaaagatcagaacagggctacatttgcacaggcagtttctctccgggccgtagttttcactgatgatcacctttcacagcattttccccaaccagcatttcacttagtcttctctatacccagcacctcccccggcacccccggcaagcccactatcacttccgacttccaacgtggcatccgtgagatctgtccacattaggcgaagcaggagaacactgagagcagcaggatgggtttggaaagagcatgcctctggaaacacagcttcctgggaattcacatgaggccagtcctacagagagcaagatgcaccccaggatttcttcattttctaatagatgtgggagtgctccattttccccgacagcgaatttcccctgagaaacgatactagaccctgggtttgcccaccttgtaactcttccttatctcctccttttcatccctaattcatcctccctctggcatggaattgacgcccgtgcagtacatttgccaagtggcaccttctttcaatttatgttttattttgctatggtggtgattctttatttgctggttgtcttttctcacacatctttctctctgtctctctctttcctgctctttgtttttctgcccagaaaaacctgacttcgataccaaaaaagatgaaactacagaaactcaaatttaaaaaaaactttaaaagaaacaaaaaaatactcaacgattctttcagctttattaacattttccattgtttcttgcgacttgtgtctcgttctttgtagtattgatgatgaacatttgataatgaatgttcttgtatattcagataaagaaaaaaaaaaccaaaaaagcggtctgaatttaatagtgtttataataaaaattttaaaaatgaccctcatagcacgcaaaacaggatggggaatttcccctcttctttctgtgacaatgcgcatcattcctgcattagtttttaacaccagactacctacattcatcatttccctcatttttcttttattttcttgcatttgtgaattagttcaagaatgctagaaaagtgtcgagttgtgcacatccatttcttgtttcacaatgtttaaaagtgacagtaattcattttgtaaactaaaaaaaaaaaaaaaaaggttggaatagtgagcataataggtacaacctaacacattattatgtttattaactttgagacccagaaataaattcttttcttttcttgattcttgctcttaaaaatacaaaaaaaaaaatgttttgttttgtgttatttttggtttgtttattggggggctttttttaattgtcaggattatgatcttgctgtttttcttcaatatgtatacaaggtgatgtgaaaagatgacttgggcagaggagtaagaacaagtaggcttgttcttctactttgcttcagaattcagttaatgccaaaagcgaagatcaagcccatgttgatgtctcgttgctcacctgcatttccagagagtgtgacactcatgcagtccctgagaaaaataaaatcagggacatacttctccttttagccttttaaaaattcaaaaacgtttagtccaagggaactttttatgctatcaggaaaggtttttgctgtttttgattctgattatcacagccaagtactttgttttatttctccctaattaataactacattccatgaggcctcttccaaccaaagaggccttttcttccaggagagtcccgcaggagatgctggtatgatgggcaccattggttaagtaaactacatgcaggaagaagtccttggggccagtctgccagctgagtcctggttttggatgaagagttaatgagatattgggccaggctcaatgctgtagttttaatgctaagaggttacgtttacttcacagagtacacctcttagtaacctctgacttaggcagctgcttaaagcaaattgcaaaactggcttgatttggaatgtttttattagaggaaaaaagaaagccatattatctggaaaaaaattcattttaaataccatcattcaacaaattatgttcagaaagtggtcagaacttaagcaagaaaagtaaagaaagaatgcagaattgtggagcaatgctttaggaaatatttctacctgaacacttgtactcttgaagtcacaacaaaataatgatgagcttttcacatcacctttatggtttcaatccctagctcaaagcttcctggaatcttttattttttgtaaacttttttttcttttgttaaaataaataaaacattcaatgtttttctccttttctctcttattacttctttcctttggcattttcaatttgaaatgctttcctttggttgttggttttattctccccctacccctccccttttcttattattcagaatataaacctgcaaagctctgctctgttttggttttgaaagtttaagcttttctgcttctgtgagagcacaggcttctgtcccttttgattccaactgaacttttgtgttctctaatgatactaacacggtgtaggttttacagtctcctaatttgtactggtaatgcatattccaaataaatagtttcttttgttgtggttccaagaagaaacatacgaataatcaagaataacagaaacagatcgtgtgtgcggcgcgcgccccttgggccccttcgagaaaagagccttttctatagaaccccatttcgcgtgtgtggggcgcgcgcgcgcggggcccccagttggtgctctagagtgtgaacccgtgtgggccccatatagcgctgtgtgtttctcctatgagagagagaaactcgcgtggggctccaagaggaaccaaataaggcgcgcggtgggggaattctcttctccacgcgaattataaaaaaaaaaagcgccccgcgggggggggggaaaacccccgaaagcgcggttctcgtgaacaacaaaatctcgcgagaagttggggacttctcgaggaggggctcataatcaagggggaagctcatatctaaacggggggggagtctccccagagggaaagcctccgaattattcaaaatttagcgccc

SEQ ID NO: 57556 - DNA, 4439 bp, Homo sapiens
actgattggaacactttcctcctcttccttcctagccccagctattcactggggactgtcatagctgggattctaaaggtgccacatttttcagtttcatctccactaggttggttcccgggcaggaagtcaggcagcagggaaggacacgggaacagcaggtggagaattcctacagtctttcttaccctgctagcaatagctctcagtttcagaggcacagtctttggagaccattcagcactgagaaagcaatatttagaacctattgcaaaactgggcctgagttaggcatggtgatgaatgcatcagcaaggaatagaaagttcttatcgtgaaacccttcaacctcaactatgccttcatagacacacacgttcatgcacatgtaggcacatgtaccatctcacatcttcactttcccgagatgccatatacaattacctacattaataactgtagcactatgccttttgagcccgagagagggaattagtgactctaagtgaaggtcactgacacagagaagcagtatgtgtctggggcttccaggacctgcaggcccactagcgtgcacttaccagaatggcatacacaggacctgatcatgaggaagaccaggtttccagtgtaaactactcttgttcccaccacctctggagcactcagggagccccatacagtacttacaatgtctttaatggacttgattctgtttaattttttgttttatattaggcacactgtattaattttccaaaatgttataccacactatgttcttggtcctgacctattgctctggaggaaagagttgtataagaacgtggctcatgtgaacttttgctagcttcatttgaggacctgagaatcatggggaaagggaaggtaatgttttcattgaaatcatcacagtgatttttattccctgggaacacagcgtgtactaaaaatacatgagaaaatagcatgtatatgaaagctattctcaaaagtcacctgagctcaccatcttcatagccaaccctaccagttataaagatggcagctctatcacttgattaagtgggaggtggtcaaatattttggtgcctcattttcttcatctgtgagatgggaactgttatgcctggcttactaagagtcttgtgagagactgagaagttgattttgttcatatccaatctgtaaatgcgaagtcaggggaagtaatgtccctgaaataaacgggttcatgccatctagggacaataaatggttttcttgttgtaacttctggttaatatcagtaccttgatgtcatcaccgtgatgacaaagagaagagttattgttgatcttcttggttttggtctgtctcttttcttaggataaagaaaaacttccaaactagaaaaacaggccctggttcccttagtttgcacttgaacccaatatgttgccttgtacatacttggtccctgtcacattgactgcttgggaggcttccagggagaagtatgagaccctgaggggtgagaatgggcagctagcaagaacatggaaattctgcttggcactacagtcataaatagaaaacactgtgtgtgctcaggggagcaggggatgccactgaagaaactcaagggaatgtgtatttgaaggaaatgcaaaaactaagtatttagcaaaatgaaattatgccttgatgactaaaaggcactagaaaggttgtgtctactaacttcagccctaatcagaacagatgcctagaaggagcatttttgtgacaacttcatagtgattagaatcagtggagaactccatcttagtggcaggaatataatgaaactacccacgcaagaacatggttgaatcacatttgcttgacttagggcaaagtacgaaagagagacaaaagggttctcttggaaacaagaagagtgactccagatgtggcctgaataattgccatgttaagttaatgcaaaagatcagaacagggctacatttgcacaggcagtttctctccgggccgtagttttcactgatgatcacctttcacagcattttccccaaccagcatttcacttagtcttctctatacccagcacctcccccggcacccccggcaagcccactatcacttccgacttccaacgtggcatccgtgagatctgtccacattaggcgaagcaggagaacactgagagcagcaggatgggtttggaaagagcatgcctctggaaacacagcttcctgggaattcacatgaggccagtcctacagagagcaagatgcaccccaggatttcttcattttctaatagatgtgggagtgctccattttccccgacagcgaatttcccctgagaaacgatactagaccctgggtttgcccaccttgtaactcttccttatctcctccttttcatccctaattcatcctccctctggcatggaattgacgcccgtgcagtacatttgccaagtggcaccttctttcaatttatgttttattttgctatggtggtgattctttatttgctggttgtcttttctcacacatctttctctctgtctctctctttcctgctctttgtttttctgcccagaaaaacctgacttcgataccaaaaaagatgaaactacagaaactcaaatttaaaaaaaactttaaaagaaacaaaaaaatactcaacgattctttcagctttattaacattttccattgtttcttgcgacttgtgtctcgttctttgtagtattgatgatgaacatttgataatgaatgttcttgtatattcagataaagaaaaaaaaaaccaaaaaagcggtctgaatttaatagtgtttataataaaaattttaaaaatgaccctcatagcacgcaaaacaggatggggaatttcccctcttctttctgtgacaatgcgcatcattcctgcattagtttttaacaccagactacctacattcatcatttccctcatttttcttttattttcttgcatttgtgaattagttcaagaatgctagaaaagtgtcgagttgtgcacatccatttcttgtttcacaatgtttaaaagtgacagtaattcattttgtaaactaaaaaaaaaaaaaaaaaggttggaatagtgagcataataggtacaacctaacacattattatgtttattaactttgagacccagaaataaattcttttcttttcttgattcttgctcttaaaaatacaaaaaaaaaaatgttttgttttgtgttatttttggtttgtttattggggggctttttttaattgtcaggattatgatcttgctgtttttcttcaatatgtatacaaggtgatgtgaaaagatgacttgggcagaggagtaagaacaagtaggcttgttcttctactttgcttcagaattcagttaatgccaaaagcgaagatcaagcccatgttgatgtctcgttgctcacctgcatttccagagagtgtgacactcatgcagtccctgagaaaaataaaatcagggacatacttctccttttagccttttaaaaattcaaaaacgtttagtccaagggaactttttatgctatcaggaaaggtttttgctgtttttgattctgattatcacagccaagtactttgttttatttctccctaattaataactacattccatgaggcctcttccaaccaaagaggccttttcttccaggagagtcccgcaggagatgctggtatgatgggcaccattggttaagtaaactacatgcaggaagaagtccttggggccagtctgccagctgagtcctggttttggatgaagagttaatgagatattgggccaggctcaatgctgtagttttaatgctaagaggttacgtttacttcacagagtacacctcttagtaacctctgacttaggcagctgcttaaagcaaattgcaaaactggcttgatttggaatgtttttattagaggaaaaaagaaagccatattatctggaaaaaaattcattttaaataccatcattcaacaaattatgttcagaaagtggtcagaacttaagcaagaaaagtaaagaaagaatgcagaattgtggagcaatgctttaggaaatatttctacctgaacacttgtactcttgaagtcacaacaaaataatgatgagcttttcacatcacctttatggtttcaatccctagctcaaagcttcctggaatcttttattttttgtaaacttttttttcttttgttaaaataaataaaacattcaatgtttttctccttttctctcttattacttctttcctttggcattttcaatttgaaatgctttcctttggttgttggttttattctccccctacccctccccttttcttattattacttctttcctttggcattttcaatttgaaatgctttccttgtggccgaaccccggggaactcctctaga

SEQ ID NO: 57557 - DNA, 2965 bp, Homo sapiens
  misc_feature (7)..(7): n is a, c, g, or t
  misc_feature (9)..(9): n is a, c, g, or t
  misc_feature (11)..(11): n is a, c, g, or t
ccaattngncnttggccggggggaatgtgtatttgaaggaaatgcaaaaactaagtatttagcaaaatgaaattatgccttgatgactaaaaggcactagaaaggttgtgtctactaacttcagccctaatcagaacagatgcctagaaggagcatttttgtgacaacttcatagtgattagaatcagtggagaactccatcttagtggcaggaatataatgaaactacccacgcaagaacatggttgaatcacatttgcttgacttagggcaaagtacgaaagagagacaaaagggttctcttggaaacaagaagagtgactccagatgtggcctgaataattgccatgttaagttaatgcaaaagatcagaacagggctacatttgcacaggcagtttctctccgggccgtagttttcactgatgatcacctttcacagcattttccccaaccagcatttcacttagtcttctctatacccagcacctcccccggcacccccggcaagcccactatcacttccgacttccaacgtggcatccgtgagatctgtccacattaggcgaagcaggagaacactgagagcagcaggatgggtttggaaagagcatgcctctggaaacacagcttcctgggaattcacatgaggccagtcctacagagagcaagatgcaccccaggatttcttcattttctaatagatgtgggagtgctccattttccccgacagcgaatttcccctgagaaacgatactagaccctgggtttgcccaccttgtaactcttccttatctcctccttttcatccctaattcatcctccctctggcatggaattgacgcccgtgcagtacatttgccaagtggcaccttctttcaatttatgttttattttgctatggtggtgattctttatttgctggttgtcttttctcacacatctttctctctgtctctctctttcctgctctttgtttttctgcccagaaaaacctgacttcgataccaaaaaagatgaaactacagaaactcaaatttaaaaaaaactttaaaagaaacaaaaaaatactcaacgattctttcagctttattaacattttccattgtttcttgcgacttgtgtctcgttctttgtagtattgatgatgaacatttgataatgaatgttcttgtatattcagataaagaaaaaaaaaaccaaaaaagcggtctgaatttaatagtgtttataataaaaattttaaaaatgaccctcatagcacgcaaaacaggatggggaatttcccctcttctttctgtgacaatgcgcatcattcctgcattagtttttaacaccagactacctacattcatcatttccctcatttttcttttattttcttgcatttgtgaattagttcaagaatgctagaaaagtgtcgagttgtgcacatccatttcttgtttcacaatgtttaaaagtgacagtaattcattttgtaaactaaaaaaaaaaaaaaaaaggttggaatagtgagcataataggtacaacctaacacattattatgtttattaactttgagacccagaaataaattcttttcttttcttgattcttgctcttaaaaatacaaaaaaaaaaatgttttgttttgtgttatttttggtttgtttattggggggctttttttaattgtcaggattatgatcttgctgtttttcttcaatatgtatacaaggtgatgtgaaaagatgacttgggcagaggagtaagaacaagtaggcttgttcttctactttgcttcagaattcagttaatgccaaaagcgaagatcaagcccatgttgatgtctcgttgctcacctgcatttccagagagtgtgacactcatgcagtccctgagaaaaataaaatcagggacatacttctccttttagccttttaaaaattcaaaaacgtttagtccaagggaactttttatgctatcaggaaaggtttttgctgtttttgattctgattatcacagccaagtactttgttttatttctccctaattaataactacattccatgaggcctcttccaaccaaagaggccttttcttccaggagagtcccgcaggagatgctggtatgatgggcaccattggttaagtaaactacatgcaggaagaagtccttggggccagtctgccagctgagtcctggttttggatgaagagttaatgagatattgggccaggctcaatgctgtagttttaatgctaagaggttacgtttacttcacagagtacacctcttagtaacctctgacttaggcagctgcttaaagcaaattgcaaaactggcttgatttggaatgtttttattagaggaaaaaagaaagccatattatctggaaaaaaattcattttaaataccatcattcaacaaattatgttcagaaagtggtcagaacttaagcaagaaaagtaaagaaagaatgcagaattgtggagcaatgctttaggaaatatttctacctgaacacttgtactcttgaagtcacaacaaaataatgatgagcttttcacatcacctttatggtttcaatccctagctcaaagcttcctggaatcttttattttttgtaaacttttttttcttttgttaaaataaataaaacattcaatgtttttctccttttctctcttattacttctttcctttggcattttcaatttgaaatgctttcctttggttgttggttttattctccccctacccctccccttttcttattattcagaatataaacctgcaaagctctgctctgttttggttttgaaagtttaagcttttctgcttctgtgagagcacaggcttctgtcccttttgattccaactgaacttttgtgttctctaatgatactaacacggtgtaggttttacagtctcctaatttgtactggtaatgcatattccaaataaatagtttcttttgtt

SEQ ID NO: 57558 - DNA, 3238 bp, Homo sapiens
actgattggaacactttcctcctcttccttcctagccccagctattcactggggactgtcatagctgggattctaaaggtgccacatttttcagtttcatctccactaggttggttcccgggcaggaagtcaggcagcagggaaggacacgggaacagcaggtggagaattcctacagtctttcttaccctgctagcaatagctctcagtttcagaggcacagtctttggagaccattcagcactgagaaagcaatatttagaacctattgcaaaactgggcctgagttaggcatggtgatgaatgcatcagcaaggaatagaaagttcttatcgtgaaacccttcaacctcaactatgccttcatagacacacacgttcatgcacatgtaggcacatgtaccatctcacatcttcactttcccgagatgccatatacaattacctacattaataactgtagcactatgccttttgagcccgagagagggaattagtgactctaagtgaaggtcactgacacagagaagcagtatgtgtctggggcttccaggacctgcaggcccactagcgtgcacttaccagaatggcatacacaggacctgatcatgaggaagaccaggtttccagtgtaaactactcttgttcccaccacctctggagcactcagggagccccatacagtacttacaatgtctttaatggacttgattctgtttaattttttgttttatattaggcacactgtattaattttccaaaatgttataccacactatgttcttggtcctgacctattgctctggaggaaagagttgtataagaacgtggctcatgtgaacttttgctagcttcatttgaggacctgagaatcatggggaaagggaaggtaatgttttcattgaaatcatcacagtgatttttattccctgggaacacagcgtgtactaaaaatacatgagaaaatagcatgtatatgaaagctattctcaaaagtcacctgagctcaccatcttcatagccaaccctaccagttataaagatggcagctctatcacttgattaagtgggaggtggtcaaatattttggtgcctcattttcttcatctgtgagatgggaactgttatgcctggcttactaagagtcttgtgagagactgagaagttgattttgttcatatccaatctgtaaatgcgaagtcaggggaagtaatgtccctgaaataaacgggttcatgccatctagggacaataaatggttttcttgttgtaattcgataccaaaaaagatgaaactacagaaactcaaatttaaaaaaaactttaaaagaaacaaaaaaatactcaacgattctttcagctttattaacattttccattgtttcttgcgacttgtgtctcgttctttgtagtattgatgatgaacatttgataatgaatgttcttgtatattcagataaagaaaaaaaaaaccaaaaaagcggtctgaatttaatagtgtttataataaaaattttaaaaatgaccctcatagcacgcaaaacaggatggggaatttcccctcttctttctgtgacaatgcgcatcattcctgcattagtttttaacaccagactacctacattcatcatttccctcatttttcttttattttcttgcatttgtgaattagttcaagaatgctagaaaagtgtcgagttgtgcacatccatttcttgtttcacaatgtttaaaagtgacagtaattcattttgtaaactaaaaaaaaaaaaaaaaaggttggaatagtgagcataataggtacaacctaacacattattatgtttattaactttgagacccagaaataaattcttttcttttcttgattcttgctcttaaaaatacaaaaaaaaaaatgttttgttttgtgttatttttggtttgtttattggggggctttttttaattgtcaggattatgatcttgctgtttttcttcaatatgtatacaaggtgatgtgaaaagatgacttgggcagaggagtaagaacaagtaggcttgttcttctactttgcttcagaattcagttaatgccaaaagcgaagatcaagcccatgttgatgtctcgttgctcacctgcatttccagagagtgtgacactcatgcagtccctgagaaaaataaaatcagggacatacttctccttttagccttttaaaaattcaaaaacgtttagtccaagggaactttttatgctatcaggaaaggtttttgctgtttttgattctgattatcacagccaagtactttgttttatttctccctaattaataactacattccatgaggcctcttccaaccaaagaggccttttcttccaggagagtcccgcaggagatgctggtatgatgggcaccattggttaagtaaactacatgcaggaagaagtccttggggccagtctgccagctgagtcctggttttggatgaagagttaatgagatattgggccaggctcaatgctgtagttttaatgctaagaggttacgtttacttcacagagtacacctcttagtaacctctgacttaggcagctgcttaaagcaaattgcaaaactggcttgatttggaatgtttttattagaggaaaaaagaaagccatattatctggaaaaaaattcattttaaataccatcattcaacaaattatgttcagaaagtggtcagaacttaagcaagaaaagtaaagaaagaatgcagaattgtggagcaatgctttaggaaatatttctacctgaacacttgtactcttgaagtcacaacaaaataatgatgagcttttcacatcacctttatggtttcaatccctagctcaaagcttcctggaatcttttattttttgtaaacttttttttcttttgttaaaataaataaaacattcaatgtttttctccttttctctcttattacttctttcctttggcattttcaatttgaaatgctttcctttggttgttggttttattctccccctacccctccccttttcttattattcagaatataaacctgcaaagctctgctctgttttggttttgaaagtttaagcttttctgcttctgtgagagcacaggcttctgtcccttttgattccaactgaacttttgtgttctctaatgatactaacacggtgtaggttttacagtctcctaatttgtactggtaatgcatattccaaataaatagtttcttttgtt

SEQ ID NO: 57559 - DNA, 2792 bp, Homo sapiens
actgattggaacactttcctcctcttccttcctagccccagctattcactggggactgtcatagctgggattctaaaggtgccacatttttcagtttcatctccactaggttggttcccgggcaggaagtcaggcagcagggaaggacacgggaacagcaggtggagaattcctacagtctttcttaccctgctagcaatagctctcagtttcagaggcacagtctttggagaccattcagcactgagaaagcaatatttagaacctattgcaaaactgggcctgagttaggcatggtgatgaatgcatcagcaaggaatagaaagttcttatcgtgaaacccttcaacctcaactatgccttcatagacacacacgttcatgcacatgtaggcacatgtaccatctcacatcttcactttcccgagatgccatatacaattacctacattaataactgtagcactatgccttttgagcccgagagagggaattagtgactctaagtgaaggtcactgacacagagaagcagtatgtgtctggggcttccaggacctgcaggcccactagcgtgcacttaccagaatggcatacacaggacctgatcatgaggaagaccaggtttccagtgtaaactactcttgttcccaccacctctggagcactcagggagccccatacagtacttacaatgtctttaatggacttgattctgtttaattttttgttttatattaggcacactgtattaattttccaaaatgttataccacactatgttcttggtcctgacctattgctctggaggaaagagttgtataagaacgtggctcatgtgaacttttgctagcttcatttgaggacctgagaatcatggggaaagggaaggtaatgttttcattgaaatcatcacagtgatttttattccctgggaacacagcgtgtactaaaaatacatgagaaaatagcatgtatatgaaagctattctcaaaagtcacctgagctcaccatcttcatagccaaccctaccagttataaagatggcagctctatcacttgattaagtgggaggtggtcaaatattttggtgcctcattttcttcatctgtgagatgggaactgttatgcctggcttactaagagtcttgtgagagactgagaagttgattttgttcatatccaatctgtaaatgcgaagtcaggggaagtaatgtccctgaaataaacgggttcatgccatctagggacaataaatggttttcttgttgtaacttctggttaatatcagtaccttgatgtcatcaccgtgatgacaaagagaagagttattgttgatcttcttggttttggtctgtctcttttcttaggataaagaaaaacttccaaactagaaaaacaggccctggttcccttagtttgcacttgaacccaatatgttgccttgtacatacttggtccctgtcacattgactgcttgggaggcttccagggagaagtatgagaccctgaggggtgagaatgggcagctagcaagaacatggaaattctgcttggcactacagtcataaatagaaaacactgtgtgtgctcaggggagcaggggatgccactgaagaaactcaagggaatgtgtatttgaaggaaatgcaaaaactaagtatttagcaaaatgaaattatgccttgatgactaaaaggcactagaaaggttgtgtctactaacttcagccctaatcagaacagatgcctagaaggagcatttttgtgacaacttcatagtgattagaatcagtggagaactccatcttagtggcaggaatataatgaaactacccacgcaagaacatggttgaatcacatttgcttgacttagggcaaagtacgaaagagagacaaaagggttctcttggaaacaagaagagtgactccagatgtggcctgaataattgccatgttaagttaatgcaaaagatcagaacagggctacatttgcacaggcagtttctctccgggccgtagttttcactgatgatcacctttcacagcattttccccaaccagcatttcacttagtcttctctatacccagcacctcccccggcacccccggcaagcccactatcacttccgacttccaacgtggcatccgtgagatctgtccacattaggcgaagcaggagaacactgagagcagcaggatgggtttggaaagagcatgcctctggaaacacagcttcctgggaattcacatgaggccagtcctacagagagcaagatgcaccccaggatttcttcattttctaatagatgtgggagtgctccattttccccgacagcgaatttcccctgagaaacgatactagaccctgggtttgcccaccttgtaactcttccttatctcctccttttcatccctaattcatcctccctctggcatggaattgacgcccgtgcagtacatttgccaagtggcaccttctttcaatttatgttttattttgctatggtggtgattctttatttgctggttgtcttttctcacacatctttctctctgtctctctctttcctgctctttgtttttctgcccagaaaaacctgacttcgataccaaaaaagatgaaactacagaaactcaaatttaaaaaaaactttaaaagaaacaaaaaaatactcaacgattctttcagctttattaacattttccattgtttcttgcgacttgtgtctcgttctttgtagtattgatgatgaacatttgataatgaatgttcttgtatattcagataaag

SEQ ID NO: 57560 - DNA, 1872 bp, Homo sapiens
acatgtataactgtcactgttaaacattgtgaaacaagaaatggatgtgcacaactcgacacttttctagcattcttgaactaattcacaaatgcaaaaaaaaaaccaaaaaagcggtctgaatttaatagtgtttataataaaaattttaaaaatgaccctcatagcacgcaaaacaggatggggaatttcccctcttctttctgtgacaatgcgcatcattcctgcattagtttttaacaccagactacctacattcatcatttccctcatttttcttttattttcttgcatttgtgaattagttcaagaatgctagaaaagtgtcgagttgtgcacatccatttcttgtttcacaatgtttaaaagtgacagtaattcattttgtaaactaaaaaaaaaaaaaaaaaggttggaatagtgagcataataggtacaacctaacacattattatgtttattaactttgagacccagaaataaattcttttcttttcttgattcttgctcttaaaaatacaaaaaaaaaaatgttttgttttgtgttatttttggtttgtttattggggggctttttttaattgtcaggattatgatcttgctgtttttcttcaatatgtatacaaggtgatgtgaaaagatgacttgggcagaggagtaagaacaagtaggcttgttcttctactttgcttcagaattcagttaatgccaaaagcgaagatcaagcccatgttgatgtctcgttgctcacctgcatttccagagagtgtgacactcatgcagtccctgagaaaaataaaatcagggacatacttctccttttagccttttaaaaattcaaaaacgtttagtccaagggaactttttatgctatcaggaaaggtttttgctgtttttgattctgattatcacagccaagtactttgttttatttctccctaattaataactacattccatgaggcctcttccaaccaaagaggccttttcttccaggagagtcccgcaggagatgctggtatgatgggcaccattggttaagtaaactacatgcaggaagaagtccttggggccagtctgccagctgagtcctggttttggatgaagagttaatgagatattgggccaggctcaatgctgtagttttaatgctaagaggttacgtttacttcacagagtacacctcttagtaacctctgacttaggcagctgcttaaagcaaattgcaaaactggcttgatttggaatgtttttattagaggaaaaaagaaagccatattatctggaaaaaaattcattttaaataccatcattcaacaaattatgttcagaaagtggtcagaacttaagcaagaaaagtaaagaaagaatgcagaattgtggagcaatgctttaggaaatatttctacctgaacacttgtactcttgaagtcacaacaaaataatgatgagcttttcacatcacctttatggtttcaatccctagctcaaagcttcctggaatcttttattttttgtaaacttttttttcttttgttaaaataaataaaacattcaatgtttttctccttttctctcttattacttctttcctttggcattttcaatttgaaatgctttcctttggttgttggttttattctccccctacccctccccttttcttattattcagaatataaacctgcaaagctctgctctgttttggttttgaaagtttaagcttttctgcttctgtgagagcacaggcttctgtcccttttgattccaactgaacttttgtgttctctaatgatactaacacggtgtaggttttacagtctcctaatttgtactggtaatgcatattccaaataaatagtttcttttgtt

SEQ ID NO: 57561 - DNA, 2139 bp, Homo sapiens
actgattggaacactttcctcctcttccttcctagccccagctattcactggggactgtcatagctgggattctaaaggtgccacatttttcagtttcatctccactaggttggttcccgggcaggaagtcaggcagcagggaaggacacgggaacagcaggtggagaattcctacagtctttcttaccctgctagcaatagctctcagtttcagaggcacagtctttggagaccattcagcactgagaaagcaatatttagaacctattgcaaaactgggcctgagttaggcatggtgatgaatgcatcagcaaggaatagaaagttcttatcgtgaaacccttcaacctcaactatgccttcatagacacacacgttcatgcacatgtaggcacatgtaccatctcacatcttcactttcccgagatgccatatacaattacctacattaataactgtagcactatgccttttgagcccgagagagggaattagtgactctaagtgaaggtcactgacacagagaagcagtatgtgtctggggcttccaggacctgcaggcccactagcgtgcacttaccagaatggcatacacaggacctgatcatgaggaagaccaggtttccagtgtaaactactcttgttcccaccacctctggagcactcagggagccccatacagtacttacaatgtctttaatggacttgattctgtttaattttttgttttatattaggcacactgtattaattttccaaaatgttataccacactatgttcttggtcctgacctattgctctggaggaaagagttgtataagaacgtggctcatgtgaacttttgctagcttcatttgaggacctgagaatcatggggaaagggaaggtaatgttttcattgaaatcatcacagtgatttttattccctgggaacacagcgtgtactaaaaatacatgagaaaatagcatgtatatgaaagctattctcaaaagtcacctgagctcaccatcttcatagccaaccctaccagttataaagatggcagctctatcacttgattaagtgggaggtggtcaaatattttggtgcctcattttcttcatctgtgagatgggaactgttatgcctggcttactaagagtcttgtgagagactgagaagttgattttgttcatatccaatctgtaaatgcgaagtcaggggaagtaatgtccctgaaataaacgggttcatgccatctagggacaataaatggttttcttgttgtaacttctggttaatatcagtaccttgatgtcatcaccgtgatgacaaagagaagagttattgttgatcttcttggttttggtctgtctcttttcttaggataaagaaaaacttccaaactagaaaaacaggccctggttcccttagtttgcacttgaacccaatatgttgccttgtacatacttggtccctgtcacattgactgcttgggaggcttccagggagaagtatgagaccctgaggggtgagaatgggcagctagcaagaacatggaaattctgcttggcactacagtcataaatagaaaacactgtgtgtgctcaggggagcaggggatgccactgaagaaactcaagggaatgtgtatttgaaggaaatgcaaaaactaagtatttagcaaaatgaaattatgccttgatgactaaaaggcactagaaaggttgtgtctactaacttcagccctaatcagaacagatgcctagaaggagcatttttgtgacaacttcatagtgattagaatcagtggagaactccatcttagtggcaggaatataatgaaactacccacgcaagaacatggttgaatcacatttgcttgacttagggcaaagtacgaaagagagacaaaagggttctcttggaaacaagaagagtgactccagatgtggcctgaataattgccatgttaagttaatgcaaaagatcagaacagggctacatttgcacaggcagtttctctccgggccgtagttttcactgatgatcacctttcacagcattttcgcaatccaggtcaagaaatagaacatgaccagcactccagaaacccctattctctctcccagttactattttctctcgccagctccc

SEQ ID NO: 57562 - DNA, 1990 bp, Homo sapiens
actgattggaacactttcctcctcttccttcctagccccagctattcactggggactgtcatagctgggattctaaaggtgccacatttttcagtttcatctccactaggttggttcccgggcaggaagtcaggcagcagggaaggacacgggaacagcaggtggagaattcctacagtctttcttaccctgctagcaatagctctcagtttcagaggcacagtctttggagaccattcagcactgagaaagcaatatttagaacctattgcaaaactgggcctgagttaggcatggtgatgaatgcatcagcaaggaatagaaagttcttatcgtgaaacccttcaacctcaactatgccttcatagacacacacgttcatgcacatgtaggcacatgtaccatctcacatcttcactttcccgagatgccatatacaattacctacattaataactgtagcactatgccttttgagcccgagagagggaattagtgactctaagtgaaggtcactgacacagagaagcagtatgtgtctggggcttccaggacctgcaggcccactagcgtgcacttaccagaatggcatacacaggacctgatcatgaggaagaccaggtttccagtgtaaactactcttgttcccaccacctctggagcactcagggagccccatacagtacttacaatgtctttaatggacttgattctgtttaattttttgttttatattaggcacactgtattaattttccaaaatgttataccacactatgttcttggtcctgacctattgctctggaggaaagagttgtataagaacgtggctcatgtgaacttttgctagcttcatttgaggacctgagaatcatggggaaagggaaggtaatgttttcattgaaatcatcacagtgatttttattccctgggaacacagcgtgtactaaaaatacatgagaaaatagcatgtatatgaaagctattctcaaaagtcacctgagctcaccatcttcatagccaaccctaccagttataaagatggcagctctatcacttgattaagtgggaggtggtcaaatattttggtgcctcattttcttcatctgtgagatgggaactgttatgcctggcttactaagagtcttgtgagagactgagaagttgattttgttcatatccaatctgtaaatgcgaagtcaggggaagtaatgtccctgaaataaacgggttcatgccatctagggacaataaatggttttcttgttgtaacttctggttaatatcagtaccttgatgtcatcaccgtgatgacaaagagaagagttattgttgatcttcttggttttggtctgtctcttttcttaggataaagaaaaacttccaaactagaaaaacaggccctggttcccttagtttgcacttgaacccaatatgttgccttgtacatacttggtccctgtcacattgactgcttgggaggcttccagggagaagtatgagaccctgaggggtgagaatgggcagctagcaagaacatggaaattctgcttggcactacagtcataaatagaaaacactgtgtgtgctcaggggagcaggggatgccactgaagaaactcaagggaatgtgtatttgaaggaaatgcaaaaactaagtatttagcaaaatgaaattatgccttgatgactaaaaggcactattctttcctttggcattttcaatttgaaatgctttcctttggttgttggttttattctccccctacccctccccttttcttattattcagaatataaacctgcaaagctctgctctgttttggttttgaaagtttaagcttttctgcttctgtgagagcacaggcttctgtcccttttgattccaactgaacttttgtgttctctaatgatactaacacggtgtaggttttacagtctcctaatttgtactggtaatgcatattccaaataaatagtttcttttgtt

SEQ ID NO: 57563 - DNA, 760 bp, Homo sapiens
ggttactaagaggtgtactctgtgaagtaaacgtaacctattagcattaaaactacagcattgagcctggcccaatatctcattaactcttcatccaaaaccaggactcagctggcagactggcttgatttggaatgtttttattagaggaaaaaagaaagccatattatctggaaaaaaattcattttaaataccatcattcaacaaattatgttcagaaagtggtcagaacttaagcaagaaaagtaaagaaagaatgcagaattgtggagcaatgctttaggaaatatttctacctgaacacttgtactcttgaagtcacaacaaaataatgatgagcttttcacatcacctttatggtttcaatccctagctcaaagcttcctggaatcttttattttttgtaaacttttttttcttttgttaaaataaataaaacattcaatgtttttctccttttctctcttattacttctttcctttggcattttcaatttgaaatgctttcctttggttgttggttttattctccccctacccctccccttttcttattattcagaatataaacctgcaaagctctgctctgttttggttttgaaagtttaagcttttctgcttctgtgagagcacaggcttctgtcccttttgattccaactgaacttttgtgttctctaatgatactaacacggtgtaggttttacagtctcctaatttgtactggtaatgcatattccaaataaatagtttcttttgtt

SEQ ID NO: 57564 - DNA, 636 bp, Homo sapiens
tgctggccggccccaagttatagaagaaaaaagaaagccatattatctggaaaaaaattcattttaaataccatcattcaacaaattatgttcagaaagtggtcagaacttaagcaagaaaagtaaagaaagaatgcagaattgtggagcaatgctttaggaaatatttctacctgaacacttgtactcttgaagtcacaacaaaataatgatgagcttttcacatcacctttatggtttcaatccctagctcaaagcttcctggaatcttttattttttgtaaacttttttttcttttgttaaaataaataaaacattcaatgtttttctccttttctctcttattacttctttcctttggcattttcaatttgaaatgctttcctttggttgttggttttattctccccctacccctccccttttcttattattcagaatataaacctgcaaagctctgctctgttttggttttgaaagtttaagcttttctgcttctgtgagagcacaggcttctgtcccttttgattccaactgaacttttgtgttctctaatgatactaacacggtgtaggttttacagtctcctaatttgtactggtaatgcatattccaaataaatagtttcttttgtt

SEQ ID NO: 57565 - DNA, 461 bp, Homo sapiens
gaacttcattatcatgctgtttgaagatttaaactgtcctgtttgggaaattaggtgtcctctctctcctgatttcttagaagataacatagcttagtttaggtttagcgatgtagaccttaaggtgaatgactccatttttatttttagtctgccctgttggggcctagtataggagtttagtggcctcctataatttttatttcacaaaacaaaagtatacatcatatcagtgaatatttgctaagaacaggaaagagaagtcttcctttcaaatagcttattgttcattggaatgaattaatctaggcacagtggctcatgcctgtgatcccaacactttgggagaagaggtgggaggattacttgaggcttggagtttgagactactctgggcaacatagcaagacctccatttctacaaaaaataaaaataaaaaaatgaattaaatacataaagc

SEQ ID NO: 57566 - DNA, 957 bp, Homo sapiens
ggttgcttccaaattttggctgttgtgaatagtgctgcaacaaacatgggagtgcaaatatattttctatatactgatttcctttcttttgagtatatgcccagtagattgttgggtcatatggtaactctatttttacttttatgagaaacctccaaactcttctccatagtggttgtactaatttacattctcatcaacaacatatgagggtttccttttctctacctcctctccagcatttgttactgccctggtgttattttgcttcttaagtattagaactatacttagtgttatatgttctgtgattataagtaaaactgcctttgctatatagtatgcatagaatattttaaagttattactagaagctgacacattgttgttttctattacaaacaataaaattagtttccatttattgagggcctgtttcatgttaactgctttacaaatattccttatctcatttaattctcccaacaatcctacaagaaagctaatattatcccattttatagatgaggaaattgaggcttacagagggcaagtaacttgcccaaagtcactcagtaccagcaaacggacttttccccctctccctgcccccaaataccagccccccactgcaaaaaaacaaaaacaaaaacaaaacaaaactacttctgtagagctagttgtctatttccaaatgcaaggcttaaattttaagccttggagttttcaatttaaagcctttgccatgaaatacagcatattactttataatagaaaacaaatagaaagagcctttcatgatagatacagtgaacactaaattctttcttttaggctgcatctaacaattctctccttaacccaatagatactatttcaacaaattagcccagttttgatttggatggcaagactcaaagacaacaacaacaataaaatcacaacttgatttaaaag

SEQ ID NO: 57567 - DNA, 832 bp, Homo sapiens
ctatctccacccatattactttttcttttgttattttcatattttgttttcagttcaagtgccttgactttttgtaatataagaatttgaaattcttgcaagaaaatttctttggaacttttgtttgagtaaaatgattttaatgaaatgaaagctatgatttacattactagatcaccagtgtgaatagaattacaaataaatagcctcttttatttttatgtggtttatttagagtaggaaagtagctattgtagctccctggtctgttgcactttttgcagttccccttctgtgatgcgcttttatacaattagctataaggtttttgctttttttccccccaaattttgcttttttcccccaaaattagtgttgtgtttaaatagatacagtatttggatgtagtatttagatatagtacttagttactaaggattatgtttaaaatccttgatattgtgtgtatttgaagtttaagagaggaatttaatactttacaacaaacatactttatagcccctgacataatgtaatcatactacaagactaaatacttgttccacgattgctgatcttgtacgtaacgttttttgttctgattttggaattgtcctcaagacaatctcattcaacatttattcctttatttattaatttgtttttaaacaactaaaaaatacagtaaaattttacaaattgagtttcatttattggtatagttttgttattttatagtatcactttttatatggcaaagaagctatgatttgcttttaataggcttattgtaagtatgccattaactttttcattttgaaaactgtatttc

SEQ ID NO: 57568 - DNA, 776 bp, Homo sapiens
  misc_feature (613)..(613): n is a, c, g, or t
ctatctccacccatattactttttcttttgttattttcatattttgttttcagttcaagtgccttgactttttgtaatataagaatttgaaattcttgcaagaaaatttctttggaacttttgtttgagtaaaatgattttaatgaaatgaaagctatgatttacattactagatcaccagtgtgaatagaattacaaataaatagcctcttttatttttatgtggtttatttagagtaggaaagtagctattgtagctccctggtctgttgcactttttgcagttccccttctgtgatgcgcttttatacaattagctataaggtttttgctttttttccccccaaattttgcttttttcccccaaaattagtgttgtgtttaaatagatacagtatttggatgtagtatttagatatagtacttagttactaaggattatgtttaaaatccttgatattgtgtgtatttgaagtttaagagaggaatttaatactttacagcatttctcttgtattgatttctatttttattccattgtggtctgagaagatagctgacatgattttttcagttattttaaaatttggttgagacttgttttatgtcctanaatatggtcaattctggagaatgtttcatgtgctgctataaaaatgtgtattctgctgctcttaggtgaaatgttctgtaaatagctgttggttttatttggtctatgatgcagttgaaaactatgtttctttgttatattctgtctagatgatcatgcagcg

SEQ ID NO: 57569 - DNA, 607 bp, Homo sapiens
cacctcaaaaaaagaaaaaagaaaaaaaagaaaaagaaaagaaaaagaaatggaatctcccttacagtgtgacatgcagctgggttgtccttggttgctcacctgacacctcatcccaaggtatagctgtgttcagtgtactgtacaccagttccttgatcacctcttgccaacgtagggcaggaaataggagagaatctctttctattttggggaaacaaaactagtatctaacctaacttgagaaggtccccttgcaagaagaggtttttcaagtactctcagaccagcaataattgcttgtgagatctctcaccaaaagagtactataaaagtcacttaacacacagcagtctatacactaactattaggtctggaaccaagctctggaaaacaaactatcttttaaaataaatatgtttttctttcaacagcagcctcaccccaggtggaggggtactgacagcatgtgactgtggaggtccacactctcttcattcaaccatagcgctcttactcatcagagggcactgtcactttcgtcaatacagatgcctgaagatggctaacagaggccctagccatttcaccgctgtgtcaaattgg

SEQ ID NO: 57570 - DNA, 434 bp, Homo sapiens
cggcacgaggtaccaaaccaaattcaaaggcatattaaaatcatacacgatgactgagggagccttattcctaggatgcaaggatggctcaacacacaaaaatcagtaaatgtaatacaccacattaaccgaatgaaggacaaaaatcatgtaacaatctgaactggtgcagaaaaagcatctgacaaaattcaacacctttcatgataaaaacactcaacaaactaggaaggaatagaaggaaattacctgaacataataaagaccatacataaaaagtccacagcaaacattacaatggtgaaaaactgaaagctttccctctaagatcaggaacaagactaggaagtccactctcaccacttctactcaacacagtacaatcagaaaaaggaggcaagaaaaaaaggcatccaaattggaaaggaagaagt

SEQ ID NO: 57571 - DNA, 365 bp, Homo sapiens
cctcttggaggtttctatgctgtttatcttttttcaagcaaagggaagtaaaaagcaataggagaactttctttaggccactgtttccatgagatcgcattcctccacacgagggctcttcaaaaaattgaagatggtctattttacaattaaaaattaacttattaggttaagtgtttataattcctttaagaatttccttggagtaagcagattgagaaacttccccacttttcaactcaggtgttttccactcataattttctttcaaaatggattccgtgaattttcttaggccaaattgtcacctcctttttaatgataccaggcagaaagaattgtagccctgtttcaagaaatgtact

SEQ ID NO: 57572 - DNA, 298 bp, Homo sapiens
aaaatatcgagtgaaacaaaatagcttatatatttggggagtgcacagacatgatgtaaaagggataaaggggattataaatacagtttagtgtttcaaagtgaaaaaatgatgcatatttcttaagataacagcattaaaagctatacatgattgaccagattgtcatcttagagagcactttttcttggaaataggccttttataactctcttcttgacagattttgaagtgttatacttgtgttttaggggaaatttgatttatcaaattggtggatagagagaaagaaatactg

SEQ ID NO: 57573 - DNA, 489 bp, Homo sapiens
ttgggatgcatcatgctgactatggttttctactttgacctgttaatatggtgaattaaatataatgacatatcatcgatcatccttcaatccaatcttatttggtgttacactttagttttgttattttctttaggattattgtgtcaatattcaaaagtcaaattcatgtgtgttatatgtttgcatgtaatatatttcaatattgtgctttcttcatacatacattttggtagattttcttctttctcttgtggaaaatctgattggctaaagttttctgggcatgggctgtgtgtgtgtgtgtgtgtgtgtgttttagagggggcaaagggtttttgtttctttctgttggagagagatttatttatttagagatggagtctcgctctgttgcccaggctggagcccgggaggtggaggttgcggtgggccgggatcgcgccactgcactccagcctggccacagagcgagagtccatctaaaaa

SEQ ID NO: 57574 - DNA, 1191 bp, Homo sapiens
ttgggatgcatcatgctgactatggttttctactttgacctgttaatatggtgaattaaatataatgacatatcatcgatcatccttcaatccaatcttatttggtgttacactttagttttgttattttctttaggattattgtgtcaatattcaaaagtcaaattcatgtgtgttatatgtttgcatgtaatatatttcaatattgtgctttcttcatacatacattttggtagattttcttctttctcttgtggaaaatctgattggctaaagttttctgggcatgggctgtgtgtgtgtgtgtgtgtgtgtgttttagagggggcaaagggtttttgtttctttctgttggagagagatttatttatttagagatggagtctcgctctgttgcccaggctggagtccagtggtgcaatcttggctcactgcaacctccacctcccaagttcaagcaattctcctgcctcagcctcccgagtagctgggattacaggcatatacaagcacgctcagctaatttttgtatttttagtagagatggggtttcaccatgttggccaggctggctcaaactcctgacttcaagtgatctgccttcctcggcctcccaaagtgctgggatgacaggcgtgagtcactgtacccggctgggaaatgaatttttaaaaaaaaaactttatgtatttctacttcttcattggaaagtcattcgtatttacttaagttttcaaatatcacagtgcagattagaacaaagtagttgtttataattcttccgcatcctccaagtgtatggagaagctcgcattcttcttgttttgtgctgtcattattttagtttgttatcttcgtctactttagttttctcagataatgtttaaattatttggcaaatcatttctcaattttcaatgcattaatttcctccacctgcttttctggagtttcatgtgatacccactctccccacacaggatgacttctcgagttgaatgttcattccatttattttcattctttcttgcttaatgttgtaaacaggcgaggttctaacttttcatctgtgtactacaagctctcaagttctttcatggggagtttgtatcatggtcattttctagtatttagcattttcagcttttgtttcctgtcaactcaacattaaaagttttttaaaacgtcagg

SEQ ID NO: 57575 - DNA, 289 bp, Homo sapiens
gacaaattcaacccaccacataggccctcccgaggccacctctgcgtcatctttgtatacagattctgtgtccgtcttcctctcctcattgactctgcatgaaggggatttctggtggagtaagggtagcagctcttgccgcacgtgcagagagagaggaacttccagtgcccgctatggagccacagcccacagcatggggaagtccccatccagaggcagtgctgcagctagaggtagctccagagtcctccgggccctgcaccgatacagccaaagaccagcaaag

SEQ ID NO: 57576 - DNA, 3446 bp, Homo sapiens
ggggaagcgacgagtccgggacgcccagcgcgggcccggagcagggggaagggaagtgcggctcggtcggcgcgggtggagggggcgtgaggccgccctacggtggccgtcgagggacggcgctacggctcccacgctaggccaaacgcctccggcggccgcgcccgagagccccttcacctgcagggcgaccccagccggcgacgcgtgaaccacgccctcagccgccttgccagcgcccccagccgcgcgccccagcaccatgcggccgccctgcgcacggagccccgagggacaggggcacccgcaggcccggcccctagcaccgccggccggccccgaggtccgggacgccggcgccgccgcggagagggcaccgggtgagctgcgggcggggacccggcctaggcgggggccgtctccagggcaacgcgcggcgcgggacccggaagtggctccggcaggggctctgcagccagggggcccggcgcggcgcggcgcaggcccggtgctcacgcggagttggccggggcccgttgcgtctctgcggccccgaggaaacagtcctgggtccatgggccgggccgagcgggcgtctgcagaaacgcagggacccggatggagccgcgggccgcgagaccctgcggggacacagctccgccgagtcgcgtttgagtggcaccgccatggctggggtcccggccggggcgagctccaggccaaggccggccttaaatagggccgctctggcccctgcaccccgtggaggagccgggcggagggagagggcgaggtcgggcccctgcgggcacgggagggtcaggcggccccggcccctccctcctccgccctggccaggtccccacggcagggccccaggctgaatctgaaggcaggcgaagctcttggcaacagtcccctgtaatgttaccaactttcctgctcagattttatttcctgacctttgagttcattccgtctacagattatttcggcaaggtataacgccgacgcctccccccagggtcagctgcgggctcccaggcctaggcgcccatgacccctacgccaaccgccgcctggacaccgccgccgccactgcgacctagcgccgccgccgccggggcccaatgccggtcatgcccattccgcggcgggtgcgctccttccacggcccgcacaccacctgcctgcatgcggcctgcgggcccgtgcgcgcctcccacctggcccgcaccaagtacaacaacttcgacgtgtacatcaagacgcgctggctgtacggcttcatccgcttcctactctactttagctgcagcctgttcactgcggcgctctggggtgcgctggccgccctcttctgcctacagtacctgggcgttcgcgtcctgctgcgcttccagcgcaagctgtcggtgctgctgctgctgctgggccgccggcgcgtggacttccgcctggtgaacgagctgctcgtctatggcatccacgtcaccatgctgctggtcgggggcctgggctggtgcttcatggtcttcgtggacatgtgagggccgtgggtgcgagcttgatgtatcgtcccggcctgtggctgtgttctctccatgggtggggtcggccagcgccttcccttcgcccatcccccaggcagtcgctgctgcccggcgcccacggagagaaaagaaagggctgagacttctgtgatgggggcgcggacaccacccctaggctggcttcctggacccaccctccccgtatgcactctcaggggcagcgcccacctgccggtggctcctgctcacatgtcttcgggtcgtactgcggggtgggccctccgttccgcctctctgtgggcctctctccaggaccacagctgccagggactttagacatcaccctgggaggcccctggacacagagggctgtgtgcccaggagcaattccggaggggggccctcctggctgcacagccccttctgcgtgccctggccccagccccagccaacgggacacggaaggctcccctcgctgacacaccacactgccacaaagctgcttactctgccctgggccgcctgaggcctggcactgcccgcggaccaccctgtgtgtgtcatcctgaggggctgtgtgggtcctgagtccccagccagccttcagggtccccttggattgtgtagatgcagtctagcggggggccggagaagggctcaggtgggaggggcctcagcaggctcccagctcaggggctggcctggggggaaccctgggagccaggggctgactccagcaacactggcctgtctgcctgttctgggagggctgtgaggatgtcttgcagatgctctggatttctgcggaggcacctccattcctttctggctttttttgcgggggagggctttgggcctctttctttgagggaacaccgtcaaagaaagcctgggagatcgaggcttcagtgagccaggatggaaacgcgtgtcccaagtgtccggagcaggcggcagaggcctcagtgcggcaaacacagccccagagcctgtgtggcaccagcagcatcttagagccccaggtatatgctgagatcttatctcacgctgtcctccagtgtctggggggcccaaatgatggcacaggggcaggtgggctggaggggcgcagatgcctgtgttcagggagggtggccaccatgggccgaggtctcacccaggaccccttgctctgctcctcagccttgcagtcacggcagcactatggtggactgcccatggccgtgtgactttgggggcaagtgggagggcgccctgaataatgattgcaaggacaacaggcagaggctaccctagagcaggacacagggtgtggtactgacaaccctagtgtcacctcaaatccatgtccccacactctgggcatgggtgggacttgtgaccctaccctgtcaggcggaccagtggcccaggagccatgaggacagttgtgtgccactggaagagaaactttttgaaaaaccctaaatcaggtagagaaagcaaaaaatctctggccgtaaaccgtgctctctaatttatcggcagcttctgtggatgacctctgatgagcccgggctgcgtccacgccctgggcaggtaggcgggagcttccctgcgtgggcctcatttcttgctgcagagaatcttttgcactaagtcatgctgtttcctcaaagaagctttgttttttgttaacgtattactcagagtcacccaagcctcttggctgagggtgaaggtgggacgggaggcgggagggggctggtggtgccgctcgtgcggtgtcaacgctgcagggagttgtggcaccttggtgccctctgagcacctggccgcctgctgtccccggtgcctgtgaaattcgtcatgccatgacccacctgcattaaacctatttttttaatgtgttga

SEQ ID NO: 57577 - DNA, 2416 bp, Homo sapiens
cgacggccaccgtagggcggcctcacgccccctccacccgcgccgaccgagccgcacttcccttccccctgcgacctagcgccgccgccgccggggcccaatgccggtcatgcccattccgcggcgggtgcgctccttccacggcccgcacaccacctgcctgcatgcggcctgcgggcccgtgcgcgcctcccacctggcccgcaccaagtacaacaacttcgacgtgtacatcaagacgcgctggctgtacggcttcatccgcttcctactctactttagctgcagcctgttcactgcggcgctctggggtgcgctggccgccctcttctgcctacagtacctgggcgttcgcgtcctgctgcgcttccagcgcaagctgtcggtgctgctgctgctgctgggccgccggcgcgtggacttccgcctggtgaacgagctgctcgtctatggcatccacgtcaccatgctgctggtcgggggcctgggctggtgcttcatggtcttcgtggacatgtgagggccgtgggtgcgagcttgatgtatcgtcccggcctgtggctgtgttctctccatgggtggggtcggccagcgccttcccttcgcccatcccccaggcagtcgctgctgcccggcgcccacggagagaaaagaaagggctgagacttctgtgatgggggcgcggacaccacccctaggctggcttcctggacccaccctccccgtatgcactctcaggggcagcgcccacctgccggtggctcctgctcacatgtcttcgggtcgtactgcggggtgggccctccgttccgcctctctgtgggcctctctccaggaccacagctgccagggactttagacatcaccctgggaggcccctggacacagagggctgtgtgcccaggagcaattccggaggggggccctcctggctgcacagccccttctgcgtgccctggccccagccccagccaacgggacacggaaggctcccctcgctgacacaccacactgccacaaagctgcttactctgccctgggccgcctgaggcctggcactgcccgcggaccaccctgtgtgtgtcatcctgaggggctgtgtgggtcctgagtccccagccagccttcagggtccccttggattgtgtagatgcagtctagcggggggccggagaagggctcaggtgggaggggcctcagcaggctcccagctcaggggctggcctggggggaaccctgggagccaggggctgactccagcaacactggcctgtctgcctgttctgggagggctgtgaggatgtcttgcagatgctctggatttctgcggaggcacctccattcctttctggctttttttgcgggggagggctttgggcctctttctttgagggaacaccgtcaaagaaagcctgggagatcgaggcttcagtgagccaggatggaaacgcgtgtcccaagtgtccggagcaggcggcagaggcctcagtgcggcaaacacagccccagagcctgtgtggcaccagcagcatcttagagccccaggtatatgctgagatcttatctcacgctgtcctccagtgtctggggggcccaaatgatggcacaggggcaggtgggctggaggggcgcagatgcctgtgttcagggagggtggccaccatgggccgaggtctcacccaggaccccttgctctgctcctcagccttgcagtcacggcagcactatggtggactgcccatggccgtgtgactttgggggcaagtgggagggcgccctgaataatgattgcaaggacaacaggcagaggctaccctagagcaggacacagggtgtggtactgacaaccctagtgtcacctcaaatccatgtccccacactctgggcatgggtgggacttgtgaccctaccctgtcaggcggaccagtggcccaggagccatgaggacagttgtgtgccactggaagagaaactttttgaaaaaccctaaatcaggtagagaaagcaaaaaatctctggccgtaaaccgtgctctctaatttatcggcagcttctgtggatgacctctgatgagcccgggctgcgtccacgccctgggcaggtaggcgggagcttccctgcgtgggcctcatttcttgctgcagagaatcttttgcactaagtcatgctgtttcctcaaagaagctttgttttttgttaacgtattactcagagtcacccaagcctcttggctgagggtgaaggtgggacgggaggcgggagggggctggtggtgccgctcgtgcggtgtcaacgctgcagggagttgtggcaccttggtgccctctgagcacctggccgcctgctgtccccggtgcctgtgaaattcgtcatgccatgacccacctgcattaaacctatttttttaatgtgttga

SEQ ID NO: 57578 - DNA, 2640 bp, Homo sapiens
ggggaagcgacgagtccgggacgcccagcgcgggcccggagcagggggaagggaagtgcggctcggtcggcgcgggtggagggggcgtgaggccgccctacggtggccgtcgagggacggcgctacggctcccacgctaggccaaacgcctccggcggccgcgcccgagagccccttcacctgcagggcgaccccagccggcgacgcgtgaaccacgccctcagccgccttgccagcgcccccagccgcgcgccccagcaccatgcggccgccctgcgcacggagccccgagggacaggggcacccgcaggcccggcccctagcaccgccggccggccccgaggtccgggacgccggcgccgccgcggagagggcaccgggccgacgcctccccccagggtcagctgcggggcctcccacctggcccgcaccaagtacaacaacttcgacgtgtacatcaagacgcgctggctgtacggcttcatccgcttcctactctactttagctgcagcctgttcactgcggcgctctggggtgcgctggccgccctcttctgcctacagtacctgggcgttcgcgtcctgctgcgcttccagcgcaagctgtcggtgctgctgctgctgctgggccgccggcgcgtggacttccgcctggtgaacgagctgctcgtctatggcatccacgtcaccatgctgctggtcgggggcctgggctggtgcttcatggtcttcgtggacatgtgagggccgtgggtgcgagcttgatgtatcgtcccggcctgtggctgtgttctctccatgggtggggtcggccagcgccttcccttcgcccatcccccaggcagtcgctgctgcccggcgcccacggagagaaaagaaagggctgagacttctgtgatgggggcgcggacaccacccctaggctggcttcctggacccaccctccccgtatgcactctcaggggcagcgcccacctgccggtggctcctgctcacatgtcttcgggtcgtactgcggggtgggccctccgttccgcctctctgtgggcctctctccaggaccacagctgccagggactttagacatcaccctgggaggcccctggacacagagggctgtgtgcccaggagcaattccggaggggggccctcctggctgcacagccccttctgcgtgccctggccccagccccagccaacgggacacggaaggctcccctcgctgacacaccacactgccacaaagctgcttactctgccctgggccgcctgaggcctggcactgcccgcggaccaccctgtgtgtgtcatcctgaggggctgtgtgggtcctgagtccccagccagccttcagggtccccttggattgtgtagatgcagtctagcggggggccggagaagggctcaggtgggaggggcctcagcaggctcccagctcaggggctggcctggggggaaccctgggagccaggggctgactccagcaacactggcctgtctgcctgttctgggagggctgtgaggatgtcttgcagatgctctggatttctgcggaggcacctccattcctttctggctttttttgcgggggagggctttgggcctctttctttgagggaacaccgtcaaagaaagcctgggagatcgaggcttcagtgagccaggatggaaacgcgtgtcccaagtgtccggagcaggcggcagaggcctcagtgcggcaaacacagccccagagcctgtgtggcaccagcagcatcttagagccccaggtatatgctgagatcttatctcacgctgtcctccagtgtctggggggcccaaatgatggcacaggggcaggtgggctggaggggcgcagatgcctgtgttcagggagggtggccaccatgggccgaggtctcacccaggaccccttgctctgctcctcagccttgcagtcacggcagcactatggtggactgcccatggccgtgtgactttgggggcaagtgggagggcgccctgaataatgattgcaaggacaacaggcagaggctaccctagagcaggacacagggtgtggtactgacaaccctagtgtcacctcaaatccatgtccccacactctgggcatgggtgggacttgtgaccctaccctgtcaggcggaccagtggcccaggagccatgaggacagttgtgtgccactggaagagaaactttttgaaaaaccctaaatcaggtagagaaagcaaaaaatctctggccgtaaaccgtgctctctaatttatcggcagcttctgtggatgacctctgatgagcccgggctgcgtccacgccctgggcaggtaggcgggagcttccctgcgtgggcctcatttcttgctgcagagaatcttttgcactaagtcatgctgtttcctcaaagaagctttgttttttgttaacgtattactcagagtcacccaagcctcttggctgagggtgaaggtgggacgggaggcgggagggggctggtggtgccgctcgtgcggtgtcaacgctgcagggagttgtggcaccttggtgccctctgagcacctggccgcctgctgtccccggtgcctgtgaaattcgtcatgccatgacccacctgcattaaacctatttttttaatgtgttga

SEQ ID NO: 57579 - DNA, 2312 bp, Homo sapiens
ggggaagcgacgagtccgggacgcccagcgcgggcccggagcagggggaagggaagtgcggctcggtcggcgcgggtggagggggcgtgaggccgccctacggtggccgtcgagggacggcgctacggctcccacgctaggccaaacgcctccggcggccgcgcccgagagccccttcacctgcagggcgaccccagccggcgacgcgtgaaccacgccctcagccgccttgccagcgcccccagccgcgcgccccagcaccatgcggccgccctgcgcacggagccccgagggacaggggcacccgcaggcccggcccctagcaccgccggccggccccgaggtccgggacgccggcgccgccgcggagagggcaccgggccgacgcctccccccagggtcagctgcgggctcccaggcctaggcgcccatgacccctacgccaaccgccgcctggacaccgccgccgccactgcgacctagcgccgccgccgccggggcccaatgccggtcatgcccattccgcggcgggtgcgctccttccacggcccgcacaccacctgcctgcatgcggcctgcgggcccgtgcgcgcctcccacctggcccgcaccaagtacaacaacttcgacgtgtacatcaagacgcgctggctgtacggcttcatccgcttcctactctactttagctgcagcctgttcactgcggcgctctggggtgcgctggccgccctcttctgcctacagtacctgggcgttcgcgtcctgctgcgcttccagcgcaagctgtcggtgctgctgctgctgctgggccgccggcgcgtggacttccgcctggtgaacgagctgctcgtctatggcatccacgtcaccatgctgctggtcgggggcctgggctggtgcttcatggtcttcgtggacatgtgagggccgtgggtgcgagcttgatgtatcgtcccggcctgtggctgtgttctctccatgggtggggtcggccagcgccttcccttcgcccatcccccaggcagtcgctgctgcccggcgcccacggagagaaaagaaagggctgagacttctgtgatgggggcgcggacaccacccctaggctggcttcctggacccaccctccccgtatgcactctcaggggcagcgcccacctgccggtggctcctgctcacatgtcttcgggtcgtactgcggggtgggccctccgttccgcctctctgtgggcctctctccaggaccacagctgccagggactttagacatcaccctgggaggcccctggacacagagggctgtgtgcccaggagcaattccggaggggggccctcctggctgcacagccccttctgcgtgccctggccccagccccagccaacgggacacggaaggctcccctcgctgacacaccacactgccacaaagctgcttactctgccctgggccgcctgaggcctggcactgcccgcggaccaccctgtgtgtgtcatcctgaggggctgtgtgggtcctgagtccccagccagccttcagggtccccttggattgtgtagatgcagtctagcggggggccggagaagggctcaggtgggaggggcctcagcaggctcccagctcaggggctggcctggggggaaccctgggagccaggggctgactccagcaacactggcctgtctgcctgttctgggagggctgtgaggatgtcttgcagatgctctggatttctgcggaggcacctccattcctttctggctttttttgcgggggagggctttgggcctctttctttgagggaacaccgtcaaagaaagcctgggagatcgaggcttcagtgagccaggatggaaacgcgtgtcccaagtgtccggagcaggcggcagaggcctcagtgcggcaaacacagccccagagcctgtgtggcaccagcagcatcttagagccccttctgtggatgacctctgatgagcccgggctgcgtccacgccctgggcaggtaggcgggagcttccctgcgtgggcctcatttcttgctgcagagaatcttttgcactaagtcatgctgtttcctcaaagaagctttgttttttgttaacgtattactcagagtcacccaagcctcttggctgagggtgaaggtgggacgggaggcgggagggggctggtggtgccgctcgtgcggtgtcaacgctgcagggagttgtggcaccttggtgccctctgagcacctggccgcctgctgtccccggtgcctgtgaaattcgtcatgccatgacccacctgcattaaacctatttttttaatgtgttga

SEQ ID NO: 57580 - DNA, 1348 bp, Homo sapiens
ggggaagcgacgagtccgggacgcccagcgcgggcccggagcagggggaagggaagtgcggctcggtcggcgcgggtggagggggcgtgaggccgccctacggtggccgtcgagggacggcgctacggctcccacgctaggccaaacgcctccggcggccgcgcccgagagccccttcacctgcagggcgaccccagccggcgacgcgtgaaccacgccctcagccgccttgccagcgcccccagccgcgcgccccagcaccatgcggccgccctgcgcacggagccccgagggacaggggcacccgcaggcccggcccctagcaccgccggccggccccgaggtccgggacgccggcgccgccgcggagagggcaccgggtgagctgcgggcggggacccggcctaggcgggggccgtctccagggcaacgcgcggcgcgggacccggaagtggctccggcaggggctctgcagccagggggcccggcgcggcgcggcgcaggcccggtgctcacgcggagttggccggggcccgttgcgtctctgcggccccgaggaaacagtcctgggtccatgggccgggccgagcgggcgtctgcagaaacgcagggacccggatggagccgcgggccgcgagaccctgcggggacacagctccgccgagtcgcgtttgagtggcaccgccatggctggggtcccggccggggcgagctccaggccaaggccggccttaaatagggccgctctggcccctgcaccccgtggaggagccgggcggagggagagggcgaggtcgggcccctgcgggcacgggagggtcaggcggccccggcccctccctcctccgccctggccaggtccccacggcagggccccaggctgaatctgaaggcaggcgaagctcttggcaacagtcccctgtaatgttaccaactttcctgctcagattttatttcctgacctttgagttcattccgtctacagattatttcggcaaggtataaccccgggctgcgtccacgccctgggcaggtaggcgggagcttccctgcgtgggcctcatttcttgctgcagagaatcttttgcactaagtcatgctgtttcctcaaagaagctttgttttttgttaacgtattactcagagtcacccaagcctcttggctgagggtgaaggtgggacgggaggcgggagggggctggtggtgccgctcgtgcggtgtcaacgctgcagggagttgtggcaccttggtgccctctgagcacctggccgcctgctgtccccggtgcctgtgaaattcgtcatgccatgacccacctgcattaaacctatttttttaatgtgttga

SEQ ID NO: 57581 - DNA, 2820 bp, Homo sapiens
ggggaagcgacgagtccgggacgcccagcgcgggcccggagcagggggaagggaagtgcggctcggtcggcgcgggtggagggggcgtgaggccgccctacggtggccgtcgagggacggcgctacggctcccacgctaggccaaacgcctccggcggccgcgcccgagagccccttcacctgcagggcgaccccagccggcgacgcgtgaaccacgccctcagccgccttgccagcgcccccagccgcgcgccccagcaccatgcggccgccctgcgcacggagccccgagggacaggggcacccgcaggcccggcccctagcaccgccggccggccccgaggtccgggacgccggcgccgccgcggagagggcaccgggccgacgcctccccccagggtcagctgcgggctcccaggcctaggcgcccatgacccctacgccaaccgccgcctggacaccgccgccgccactgcgacctagcgccgccgccgccggggcccaatgccggtcatgcccattccgcggcgggtgcgctccttccacggcccgcacaccacctgcctgcatgcggcctgcgggcccgtgcgcgcctcccacctggcccgcaccaagtacaacaacttcgacgtgtacatcaagacgcgctggctgtacggcttcatccgcttcctactctactttagctgcagcctgttcactgcggcgctctggggtgcgctggccgccctcttctgcctacagtacctgggcgttcgcgtcctgctgcgcttccagcgcaagctgtcggtgctgctgctgctgctgggccgccggcgcgtggacttccgcctggtgaacgagctgctcgtctatggcatccacgtcaccatgctgctggtcgggggcctgggctggtgcttcatggtcttcgtggacatgtgagggccgtgggtgcgagcttgatgtatcgtcccggcctgtggctgtgttctctccatgggtggggtcggccagcgccttcccttcgcccatcccccaggcagtcgctgctgcccggcgcccacggagagaaaagaaagggctgagacttctgtgatgggggcgcggacaccacccctaggctggcttcctggacccaccctccccgtatgcactctcaggggcagcgcccacctgccggtggctcctgctcacatgtcttcgggtcgtactgcggggtgggccctccgttccgcctctctgtgggcctctctccaggaccacagctgccagggactttagacatcaccctgggaggcccctggacacagagggctgtgtgcccaggagcaattccggaggggggccctcctggctgcacagccccttctgcgtgccctggccccagccccagccaacgggacacggaaggctcccctcgctgacacaccacactgccacaaagctgcttactctgccctgggccgcctgaggcctggcactgcccgcggaccaccctgtgtgtgtcatcctgaggggctgtgtgggtcctgagtccccagccagccttcagggtccccttggattgtgtagatgcagtctagcggggggccggagaagggctcaggtgggaggggcctcagcaggctcccagctcaggggctggcctggggggaaccctgggagccaggggctgactccagcaacactggcctgtctgcctgttctgggagggctgtgaggatgtcttgcagatgctctggatttctgcggaggcacctccattcctttctggctttttttgcgggggagggctttgggcctctttctttgagggaacaccgtcaaagaaagcctgggagatcgaggcttcagtgagccaggatggaaacgcgtgtcccaagtgtccggagcaggcggcagaggcctcagtgcggcaaacacagccccagagcctgtgtggcaccagcagcatcttagagccccaggtatatgctgagatcttatctcacgctgtcctccagtgtctggggggcccaaatgatggcacaggggcaggtgggctggaggggcgcagatgcctgtgttcagggagggtggccaccatgggccgaggtctcacccaggaccccttgctctgctcctcagccttgcagtcacggcagcactatggtggactgcccatggccgtgtgactttgggggcaagtgggagggcgccctgaataatgattgcaaggacaacaggcagaggctaccctagagcaggacacagggtgtggtactgacaaccctagtgtcacctcaaatccatgtccccacactctgggcatgggtgggacttgtgaccctaccctgtcaggcggaccagtggcccaggagccatgaggacagttgtgtgccactggaagagaaactttttgaaaaaccctaaatcaggtagagaaagcaaaaaatctctggccgtaaaccgtgctctctaatttatcggcagcttctgtggatgacctctgatgagcccgggctgcgtccacgccctgggcaggtaggcgggagcttccctgcgtgggcctcatttcttgctgcagagaatcttttgcactaagtcatgctgtttcctcaaagaagctttgttttttgttaacgtattactcagagtcacccaagcctcttggctgagggtgaaggtgggacgggaggcgggagggggctggtggtgccgctcgtgcggtgtcaacgctgcagggagttgtggcaccttggtgccctctgagcacctggccgcctgctgtccccggtgcctgtgaaattcgtcatgccatgacccacctgcattaaacctatttttttaatgtgttga

SEQ ID NO: 57582 - DNA, 3233 bp, Homo sapiens
ggggaagcgacgagtccgggacgcccagcgcgggcccggagcagggggaagggaagtgcggctcggtcggcgcgggtggagggggcgtgaggccgccctacggtggccgtcgagggacggcgctacggctcccacgctaggccaaacgcctccggcggccgcgcccgagagccccttcacctgcagggcgaccccagccggcgacgcgtgaaccacgccctcagccgccttgccagcgcccccagccgcgcgccccagcaccatgcggccgccctgcgcacggagccccgagggacaggggcacccgcaggcccggcccctagcaccgccggccggccccgaggtccgggacgccggcgccgccgcggagagggcaccgggtgagctgcgggcggggacccggcctaggcgggggccgtctccagggcaacgcgcggcgcgggacccggaagtggctccggcaggggctctgcagccagggggcccggcgcggcgcggcgcaggcccggtgctcacgcggagttggccggggcccgttgcgtctctgcggccccgaggaaacagtcctgggtccatgggccgggccgagcgggcgtctgcagaaacgcagggacccggatggagccgcgggccgcgagaccctgcggggacacagctccgccgagtcgcgtttgagtggcaccgccatggctggggtcccggccggggcgagctccaggccaaggccggccttaaatagggccgctctggcccctgcaccccgtggaggagccgggcggagggagagggcgaggccgacgcctccccccagggtcagctgcgggctcccaggcctaggcgcccatgacccctacgccaaccgccgcctggacaccgccgccgccactgcgacctagcgccgccgccgccggggcccaatgccggtcatgcccattccgcggcgggtgcgctccttccacggcccgcacaccacctgcctgcatgcggcctgcgggcccgtgcgcgcctcccacctggcccgcaccaagtacaacaacttcgacgtgtacatcaagacgcgctggctgtacggcttcatccgcttcctactctactttagctgcagcctgttcactgcggcgctctggggtgcgctggccgccctcttctgcctacagtacctgggcgttcgcgtcctgctgcgcttccagcgcaagctgtcggtgctgctgctgctgctgggccgccggcgcgtggacttccgcctggtgaacgagctgctcgtctatggcatccacgtcaccatgctgctggtcgggggcctgggctggtgcttcatggtcttcgtggacatgtgagggccgtgggtgcgagcttgatgtatcgtcccggcctgtggctgtgttctctccatgggtggggtcggccagcgccttcccttcgcccatcccccaggcagtcgctgctgcccggcgcccacggagagaaaagaaagggctgagacttctgtgatgggggcgcggacaccacccctaggctggcttcctggacccaccctccccgtatgcactctcaggggcagcgcccacctgccggtggctcctgctcacatgtcttcgggtcgtactgcggggtgggccctccgttccgcctctctgtgggcctctctccaggaccacagctgccagggactttagacatcaccctgggaggcccctggacacagagggctgtgtgcccaggagcaattccggaggggggccctcctggctgcacagccccttctgcgtgccctggccccagccccagccaacgggacacggaaggctcccctcgctgacacaccacactgccacaaagctgcttactctgccctgggccgcctgaggcctggcactgcccgcggaccaccctgtgtgtgtcatcctgaggggctgtgtgggtcctgagtccccagccagccttcagggtccccttggattgtgtagatgcagtctagcggggggccggagaagggctcaggtgggaggggcctcagcaggctcccagctcaggggctggcctggggggaaccctgggagccaggggctgactccagcaacactggcctgtctgcctgttctgggagggctgtgaggatgtcttgcagatgctctggatttctgcggaggcacctccattcctttctggctttttttgcgggggagggctttgggcctctttctttgagggaacaccgtcaaagaaagcctgggagatcgaggcttcagtgagccaggatggaaacgcgtgtcccaagtgtccggagcaggcggcagaggcctcagtgcggcaaacacagccccagagcctgtgtggcaccagcagcatcttagagccccaggtatatgctgagatcttatctcacgctgtcctccagtgtctggggggcccaaatgatggcacaggggcaggtgggctggaggggcgcagatgcctgtgttcagggagggtggccaccatgggccgaggtctcacccaggaccccttgctctgctcctcagccttgcagtcacggcagcactatggtggactgcccatggccgtgtgactttgggggcaagtgggagggcgccctgaataatgattgcaaggacaacaggcagaggctaccctagagcaggacacagggtgtggtactgacaaccctagtgtcacctcaaatccatgtccccacactctgggcatgggtgggacttgtgaccctaccctgtcaggcggaccagtggcccaggagccatgaggacagttgtgtgccactggaagagaaactttttgaaaaaccctaaatcaggtagagaaagcaaaaaatctctggccgtaaaccgtgctctctaatttatcggcagcttctgtggatgacctctgatgagcccgggctgcgtccacgccctgggcaggtaggcgggagcttccctgcgtgggcctcatttcttgctgcagagaatcttttgcactaagtcatgctgtttcctcaaagaagctttgttttttgttaacgtattactcagagtcacccaagcctcttggctgagggtgaaggtgggacgggaggcgggagggggctggtggtgccgctcgtgcggtgtcaacgctgcagggagttgtggcaccttggtgccctctgagcacctggccgcctgctgtccccggtgcctgtgaaattcgtcatgccatgacccacctgcattaaacctatttttttaatgtgttga

SEQ ID NO: 57583 - DNA, 2241 bp, Homo sapiens
ggggaagcgacgagtccgggacgcccagcgcgggcccggagcagggggaagggaagtgcggctcggtcggcgcgggtggagggggcgtgaggccgccctacggtggccgtcgagggacggcgctacggctcccacgctaggccaaacgcctccggcggccgcgcccgagagccccttcacctgcagggcgaccccagccggcgacgcgtgaaccacgccctcagccgccttgccagcgcccccagccgcgcgccccagcaccatgcggccgccctgcgcacggagccccgagggacaggggcacccgcaggcccggcccctagcaccgccggccggccccgaggtccgggacgccggcgccgccgcggagagggcaccgggccgacgcctccccccagggtcagctgcgggctcccaggcctaggcgcccatgacccctacgccaaccgccgcctggacaccgccgccgccactgcgacctagcgccgccgccgccggggcccaatgccggtcatgcccattccgcggcgggtgcgctccttccacggcccgcacaccacctgcctgcatgcggcctgcgggcccgtgcgcgcctcccacctggcccgcaccaagtacaacaacttcgacgtgtacatcaagacgcgctggctgtacggcttcatccgcttcctactctactttagctgcagcctgttcactgcggcgctctggggtgcgctggccgccctcttctgcctacagtacctgggcgttcgcgtcctgctgcgcttccagcgcaagctgtcggtgctgctgctgctgctgggccgccggcgcgtggacttccgcctggtgaacgagctgctcgtctatggcatccacgtcaccatgctgctggtcgggggcctgggctggtgcttcatggtcttcgtggacatgtgagggccgtgggtgcgagcttgatgtatcgtcccggcctgtggctgtgttctctccatgggtggggtcggccagcgccttcccttcgcccatcccccaggcagtcgctgctgcccggcgcccacggagagaaaagaaagggctgagacttctgtgatgggggcgcggacaccacccctaggctggcttcctggacccaccctccccgtatgcactctcaggggcagcgcccacctgccggtggctcctgctcacatgtcttcgggtcgtactgcggggtgggccctccgttccgcctctctgtgggcctctctccaggaccacagctgccagggactttagacatcaccctgggaggcccctggacacagagggctgtgtgcccaggagcaattccggaggggggccctcctggctgcacagccccttctgcgtgccctggcccccaggtatatgctgagatcttatctcacgctgtcctccagtgtctggggggcccaaatgatggcacaggggcaggtgggctggaggggcgcagatgcctgtgttcagggagggtggccaccatgggccgaggtctcacccaggaccccttgctctgctcctcagccttgcagtcacggcagcactatggtggactgcccatggccgtgtgactttgggggcaagtgggagggcgccctgaataatgattgcaaggacaacaggcagaggctaccctagagcaggacacagggtgtggtactgacaaccctagtgtcacctcaaatccatgtccccacactctgggcatgggtgggacttgtgaccctaccctgtcaggcggaccagtggcccaggagccatgaggacagttgtgtgccactggaagagaaactttttgaaaaaccctaaatcaggtagagaaagcaaaaaatctctggccgtaaaccgtgctctctaatttatcggcagcttctgtggatgacctctgatgagcccgggctgcgtccacgccctgggcaggtaggcgggagcttccctgcgtgggcctcatttcttgctgcagagaatcttttgcactaagtcatgctgtttcctcaaagaagctttgttttttgttaacgtattactcagagtcacccaagcctcttggctgagggtgaaggtgggacgggaggcgggagggggctggtggtgccgctcgtgcggtgtcaacgctgcagggagttgtggcaccttggtgccctctgagcacctggccgcctgctgtccccggtgcctgtgaaattcgtcatgccatgacccacctgcattaaacctatttttttaatgtgttga

SEQ ID NO: 57584 - DNA, 2222 bp, Homo sapiens
ggggaagcgacgagtccgggacgcccagcgcgggcccggagcagggggaagggaagtgcggctcggtcggcgcgggtggagggggcgtgaggccgccctacggtggccgtcgagggacggcgctacggctcccacgctaggccaaacgcctccggcggccgcgcccgagagccccttcacctgcagggcgaccccagccggcgacgcgtgaaccacgccctcagccgccttgccagcgcccccagccgcgcgccccagcaccatgcggccgccctgcgcacggagccccgagggacaggggcacccgcaggcccggcccctagcaccgccggccggccccgaggtccgggacgccggcgccgccgcggagagggcaccgggccgacgcctccccccagggtcagctgcgggctcccaggcctaggcgcccatgacccctacgccaaccgccgcctggacaccgccgccgccactgcgacctagcgccgccgccgccggggcccaatgccggtcatgcccattccgcggcgggtgcgctccttccacggcccgcacaccacctgcctgcatgcggcctgcgggcccgtgcgcgcctcccacctggcccgcaccaagtacaacaacttcgacgtgtacatcaagacgcgctggctgtacggcttcatccgcttcctactctactttagctgcagcctgttcactgcggcgctctggggtgcgctggccgccctcttctgcctacagtacctgggcgttcgcgtcctgctgcgcttccagcgcaagctgtcggtgctgctgctgctgctgggccgccggcgcgtggacttccgcctggtgaacgagctgctcgtctatggcatccacgtcaccatgctgctggtcgggggcctgggctggtgcttcatggtcttcgtggacatgtgagggccgtgggtgcgagcttgatgtatcgtcccggcctgtggctgtgttctctccatgggtggggtcggccagcgccttcccttcgcccatcccccaggcagtcgctgctgcccggcgcccacggagagaaaagaaagggctgagacttctgtgatgggggcgcggacaccacccctaggctggcttcctggacccaccctccccgtatgcactctcaggggcagcgcccacctgccggtggctcctgctcacatgtcttcgggtcgtactgcggggtgggccctccgttccgcctctctgtgggcctctctccaggaccacagctgccagggactttagacatcaccctgggaggcccctggacacagagggctgtgtgcccaggagcaattccggaggggggccctcctggctgcacagccccttctgcgtgccctggccccagccccagccaacgggacacggaaggctcccctcgctgacacaccacactgccacaaagctgcttactctgccctgggccgcctgaggcctggcactgcccgcggaccaccctgtgtgtgtcatcctgaggggctgtgtgggtcctgagtccccagccagccttcagggtccccttggattgtgtagatgcagtctagcggggggccggagaagggctcaggtgggaggggcctcagcaggctcccagctcaggggctggcctggggggaaccctgggagccaggggctgactccagcaacactggcctgtctgcctgttctgggagggctgtgaggatgtcttgcagatgctctggatttctgcggaggcacctccattcctttctggctttttttgcgggggagggctttgggcctctttctttgagggaacaccgtcaaagaaagcctgggagatcgaggcttcagtgagccaggatggaaacgcgtgtcccaagtgtccggagcaggcggcagaggcctcagtgcggcaaacacagccccagagcctgtgtggcaccagcagcatcttagagccccttctgtggatgacctctgatgagcccgggctgcgtccacgccctgggcaggtaggcgggagcttccctgcgtgggcctcatttcttgctgcagagaatcttttgcactaagtcatgctgtttcctcaaagaagctttgttttttgttaacgtattactcagagtcacccaagcctcttggctgagggtgaaggtgggacgggaggcgggagggggctggtatttactatctttactaatgaacttcggggaacgttttcctctctataattatat

SEQ ID NO: 57585 - DNA, 299 bp, Homo sapiens
ggggaagagcaccccctggctgttgaggggtcagcgcagaggccgcggggatggagcatggctgcatgtgaaggaacgggaaggaggcctgcgtgcctggaaggaaggagcggtgagagatgaggaagagagatgaggtcagagaggtaagagggagcttaattttagggcctagttaatgtaaagactttagattttactgtgactgaagtatacaggattggagggttttgacaggagtgatgtaatctgagttttattttttccaaattttatgatgaaaaatttcaaacatacaa

SEQ ID NO: 57586 - DNA, 362 bp, Homo sapiens
ctattgctgagactgggagcttgtttttaaagacctggcaagggtttcaaacacccacatgcataaccaatgaagcaggttggaaaatctgaactatgctaatttcaccataattactcattgcttgaagtcttatgtatttgtgttttcttggtagtctctttaaaacatgtttcaatatgaaacgtatatgtattaaatcactccgcttagaattttaggaatatagttttgtttttccccctaaaagatgtagaatgcagcaggttctctaaagcacatgtattctttgttacgtgatttggttctttggaacttcttttatcatgtagctattaaagggtagctgtcagaattaccca

SEQ ID NO: 57587 - DNA, 465 bp, Homo sapiens
agacagttgtgagaaggtgcctgggaaggcgtacagcataatgaaagtgatgtttcagaggattctcctggctgcagtgtgcatgatggcttagaaggtggagtgagatggggagatcagcaaggaggctatggcaataagtcaagttaactaaatccagcacctgtctttttcttattttcccctgatgttgatgatacagtgcagaattcagcaatgcctaataccacagaatgtacatttcaatccttcatgctcttcctgtgcctgccctgtgttccatctagattctctcggccctccttgccagctcagcctgccatttggaggcctacttctttatcccccacctttagggtagagtcacatagaaacccttccaaccctgataaaaatcctcacatttaagaaccccagaaaagagcatatagggatggccgggtggggccatctatggaagtatgc

SEQ ID NO: 57588 - DNA, 407 bp, Homo sapiens
ctgtttgcaacttctccccgtacgcccaattcaacgaattgttatctctggaccactgggctcacatcgtgaacagctgctccaccctctgtctttcaccagcaagtttttctggtaacaagaccacataggtctcacttaagccatcttcaccaactaccaactattaaactggttaattcgtctttcagatcagaaacaagaggccaggagtaaaaactgtgccaatcagagaagaattacctggccaccaaattaccagtcactcactcatctcaactctcctccctggctcctttaccttgaagcttaggtctgcaatggttattttatatagaagagcaaaatatgctcctttcaaatttcacttttttttcttttttttgggcgtacggggagggtaccga

SEQ ID NO: 57589 - DNA, 203 bp, Homo sapiens
tgtatctacacctgtaatattgtgagcttcttatttctttacctcttttggggcagaatcatgtgtatccaacaaggtaaaagatatatgagaacttcaaaatgagaataaagtaccaaaagaattgcttagcttagttgaacagagaacacatatttagttgaaggtggtaaaatggttaacagaaattgatcatggacttt

SEQ ID NO: 57590 - DNA, 323 bp, Homo sapiens
gagccagtggtggcccccaacagcccaatctggtactcagtccagcctatcagcagagagcagatgggacaaatgctgacgcggatcctggtgataagagaaattcaggaggccatcgcagtggccaatgcaagcactatgcactgagatgccttggccaaaaggaaaatataaaagaaaataaaatctcacattggtgcttagcaggagaatttttaaagacttacaaatcaacaagctgttcaaataaataatgaatgctgcagctggctcttacatgggcctgagtgtccaatagtagcagatgtcccagttctataaat

SEQ ID NO: 57591 - DNA, 181 bp, Homo sapiens
cagtttccccaaagtaaggaaggctttagtaaacccctgtggcattcccctgtggtttgtaatgaaggcagacagcttagagtaaataatttcttgttttaggacctcttggttgtgatttaaattaaaaacgagaagatcctttcggtctgggcccccgtaactgttgtaattggagaga

SEQ ID NO: 57592 - DNA, 618 bp, Homo sapiens
aagacattttagtctttgaggttcatcccattctgttttaattttttcgagacaaaaaatgaccaatctcttatttgcgtattcaagcattcttaataagtcactaaaactcttatttttcataactctccttttattaaaaaccttggggaagagaacaaaacattccacattgaccttagtgagttgttcctaggtaggcatgatgaaaatgcaaaactgaaccccaaatctagccaactgaaagacattgatttttctagaacagcaccttccaaacaccagtctgtggaccagtcactgcttgcccaagacaaagttctcaccagcgtgaggtaaaatgaggaaaataacagcaatgtgtctaaattcattcaacctaaagacttcctttcattctttattgttgtccttcctatttctttgattatttgaacatctttacttctataaaaggaagttgccagcagatggtagttgttctcttttaacgtttctacttagtgaagttaacatttaacacacacctatgttggtcctcccacacccactttatttttttctcatccgtgaaaactagatatctagaaactactgctaggctaagggatagcttct

SEQ ID NO: 57593 - DNA, 336 bp, Homo sapiens
acaacacatacttgaaactgattatgactgtgtttgaatgcattttgattccttagctatgcctctcaggtgaaaggaccaatggcaagaggaagcagaggattcatgcactagaaaatactgagagagatcagagtattctgtctacttcactgaagatatggtctattgagggaaaactaattaacagttgatccaaggaacaaaagaatgctgttatgtgacattttgttgggaaactgactgtaataataataaaacaaatgtccagagaatgtgtcacataattacagtgtttatggttgataattcaaaggcatagatgaattggattct

SEQ ID NO: 57594 - DNA, 1611 bp, Homo sapiens
gactttcagccgagatgtgctagtttcatcaccaggattttctgtggtacagaacatgtctaagcatgctggggactgccagcagcggaagagatccctgtgagtcagcagtcagcccagctactccctacctacatctgcactgcctcccgtgactaattcctttagcagggcagattagataaagccaaatgaattcctggctcacccctcattaaggagtcagcttcattctctgccagtcagagctaaaaatagaaattgtgtaggagacaaaccttgttaattccctagaaatacattaagaggatagagtggaattttttttctctgcaatcttgcatttttttaatggctcttttttttttcctgataaaaacctttggtaggtagggaagttatgttttcaggggtaaatgtgctacttttgtcttctaaattttgctcttttttgactggtctagtcaagtgacagcccgattattttgctactccttaaaagtactattctgtctcttgggagtatggttgatggcaattccagttaactgctgtgcagctctcatctcattgtgcacacagcatggaaatctttctcaaaactgtttcactcaggtcagggtaacaagtttggtagagcaaaccggtgaatgatactctcatgcaaaactgaacagatatgcaaacatatgtatgtggttcagcttgggttgcatgggttcagactttgcaatgtgtagtttaataggtaattacccttaacgcttttgcagggaacccaactaccttgaagaaactttaatttttttgtgcttctaatttgtctccatgtcacatagccaaaatatagaatgttcaagtgttttctcctcaaaagtataattactagaatatactggtttttaaaataagtttatttttataaatttgtttccagaatccacattcatctcaatggaaggatcctgccttaagtcaacttatttgtttttgccgggaaagtcgctacatggatcaatgggttccagtgattaatctccctgaacggtgatggcatctgaatgaaaataactgaaccaaattgcactgaagtttttgaaatacctttgtagttactcaagcagttactccctacactgatgcaaggattacagaaactgatgccaaggggctgagtgagttcaactacatgttctgggggcccggagatagatgactttgcagatggaaagaggtgaaaatgaagaaggaagctgtgttgaaacagaaaaataagtcaaaaggaacaaaaattacaaagaaccatgcaggaaggaaaactatgtattaatttagaatggttgagttacattaaaataaaccaaatatgttaaagtttaagtgtgcagccatagtttgggtatttttggtttatatgccctcaagtaaaagaaaagccgaaagggttaatcatatttgaaaaccatattttattgtattttgatgagatattaaattctcaaagttttattataaattctactaagttattttatgacatgaaaagttatttatgctataaattttttgaaacacaatacctacaataaactggtatgaataattgcatca

SEQ ID NO: 57595 - DNA, 1360 bp, Homo sapiens
tgtcctccagtggctggtaggcagtggctgggaggcagcggcccaattagtgtcgtgcggcccgtggcgaggcgaggtccggggagcgagcgagcaagcaaggcgggaggggtggccggagctgcggcggctggcacaggaggaggagcccgggcgggcgaggggcggccggagagcgccagggcctgagctgccggagcggcgcctgtgagtgagtgcagaaagcaggcgcccgcgcgctagccgtggcaggagcagcccgcacgccgcgctctctccctgggcgacctgcagtttgcaatatgactttggaggaattctcggctggagagcagaagaccgaaaggatggataaggtgggggatgccctggaggaagtgctcagcaaagccctgagtcagcgcacgatcactgtcggggtgtacgaagcggccaagctgctcaacgtcgaccccgataacgtggtgttgtgcctgctggcggcggacgaggacgacgacagagatgtggctctgcagatccacttcaccctgatccaggcgttttgctgcgagaacgacatcaacatcctgcgcgtcagcaacccgggccggctggcggagctcctgctcttggagaccgacgctggccccgcggcgagcgagggcgccgagcagcccccggacctgcactgcgtgctggtgacgaatccacattcatctcaatggaaggatcctgccttaagtcaacttatttgtttttgccgggaaagtcgctacatggatcaatgggttccagtgattaatctccctgaacggtgatggcatctgaatgaaaataactgaaccaaattgcactgaagtttttgaaatacctttgtagttactcaagcagttactccctacactgatgcaaggattacagaaactgatgccaaggggctgagtgagttcaactacatgttctgggggcccggagatagatgactttgcagatggaaagaggtgaaaatgaagaaggaagctgtgttgaaacagaaaaataagtcaaaaggaacaaaaattacaaagaaccatgcaggaaggaaaactatgtattaatttagaatggttgagttacattaaaataaaccaaatatgttaaagtttaagtgtgcagccatagtttgggtatttttggtttatatgccctcaagtaaaagaaaagccgaaagggttaatcatatttgaaaaccatattttattgtattttgatgagatattaaattctcaaagttttattataaattctactaagttattttatgacatgaaaagttatttatgctataaattttttgaaacacaatacctacaataaactggtatgaataattgcatca

SEQ ID NO: 57596 - DNA, 1016 bp, Homo sapiens
tgtcctccagtggctggtaggcagtggctgggaggcagcggcccaattagtgtcgtgcggcccgtggcgaggcgaggtccggggagcgagcgagcaagcaaggcgggaggggtggccggagctgcggcggctggcacaggaggaggagcccgggcgggcgaggggcggccggagagcgccagggcctgagctgccggagcggcgcctgtgagtgagtgcagaaagcaggcgcccgcgcgctagccgtggcaggagcagcccgcacgccgcgctctctccctgggcgacctgcagtttgcaatatgactttggaggaattctcggctggagagcagaagaccgaaaggatggataaggtgggggatgccctggaggaagtgctcagcaaagccctgagtcagcgcacgatcactgtcggggtgtacgaagcggccaagctgctcaacgtcgaccccgataacgtggtgttgtgcctgctggcggcggacgaggacgacgacagagatgtggctctgcagatccacttcaccctgatccaggcgttttgctgcgagaacgacatcaacatcctgcgcgtcagcaacccgggccggctggcggagctcctgctcttggagaccgacgctggccccgcggcgagcgagggcgccgagcagcccccggacctgcactgcgtgctggtgacgaatccacattcatctcaatggaaggatcctgccttaagtcaacttatttgtttttgccgggaaagtcgctacatggatcaatgggttccagtgattaatctccctgaacggtgatggcatctgaatgaaaataactgaaccaaattgcactgaagtttttgaaatacctttgtagttactcaagcagttactccctacactgatgcaaggattacagaaactgatgccaaggggctgagtgagttcaactacatgttctgggggcccggagatagatgactttgcagatggaaagaggtgaaaatgaagaaggaagctgtgttgaaacag

SEQ ID NO: 57597 - DNA, 1258 bp, Homo sapiens
tgtcctccagtggctggtaggcagtggctgggaggcagcggcccaattagtgtcgtgcggcccgtggcgaggcgaggtccggggagcgagcgagcaagcaaggcgggaggggtggccggagctgcggcggctggcacaggaggaggagcccgggcgggcgaggggcggccggagagcgccagggcctgagctgccggagcggcgcctgtgagtgagtgcagaaagcaggcgcccgcgcgctagccgtggcaggagcagcccgcacgccgcgctctctccctgggcgacctgcagtttgcaatatgactttggaggaattctcggctggagagcagaagaccgaaagcgaccccgataacgtggtgttgtgcctgctggcggcggacgaggacgacgacagagatgtggctctgcagatccacttcaccctgatccaggcgttttgctgcgagaacgacatcaacatcctgcgcgtcagcaacccgggccggctggcggagctcctgctcttggagaccgacgctggccccgcggcgagcgagggcgccgagcagcccccggacctgcactgcgtgctggtgacgaatccacattcatctcaatggaaggatcctgccttaagtcaacttatttgtttttgccgggaaagtcgctacatggatcaatgggttccagtgattaatctccctgaacggtgatggcatctgaatgaaaataactgaaccaaattgcactgaagtttttgaaatacctttgtagttactcaagcagttactccctacactgatgcaaggattacagaaactgatgccaaggggctgagtgagttcaactacatgttctgggggcccggagatagatgactttgcagatggaaagaggtgaaaatgaagaaggaagctgtgttgaaacagaaaaataagtcaaaaggaacaaaaattacaaagaaccatgcaggaaggaaaactatgtattaatttagaatggttgagttacattaaaataaaccaaatatgttaaagtttaagtgtgcagccatagtttgggtatttttggtttatatgccctcaagtaaaagaaaagccgaaagggttaatcatatttgaaaaccatattttattgtattttgatgagatattaaattctcaaagttttattataaattctactaagttattttatgacatgaaaagttatttatgctataaattttttgaaacacaatacctacaataaactggtatgaataattgcatca

SEQ ID NO: 57598 - DNA, 712 bp, Homo sapiens
ggccgcgggagcgccgggttttcgtagagcccaggtgcgcggtggtgcttgcattcgagagggaggggcgtggtaccggacgaggggggcggcgatggccccgagggcaccggggctgacgggacccctcgcccttgcccgcgtgtaggatggataaggtgggggatgccctggaggaagtgctcagcaaagccctgagtcagcgcacgatcactgtcggggtgtacgaagcggccaagctgctcaacgtgtaagtggggcccttgcgcgtcccccatggcaccccttcccgccccagcccgggaggtcgccttggctgggcgcccctcgcccggccgcgccacttcctgtcgcttttctgcctgtctcggaagggagggggcgagcgggccgggcggcgacccccagggacccgggcagggggttgagggcgcccgcgcttctgcgctcactggccccgcccgctgcccccagcgaccccgataacgtggtgttgtgcctgctggcggcggacgaggacgacgacagagatgtggctctgcagatccacttcaccctgatccaggcgttttgctgcgagaacgacatcaacatcctgcgcgtcagcaacccgggccggctggcggagctcctgctcttggagaccgacgctggccccgcggcgagcgagggcgccgagcagcccccggacctgcactgcgtgctggtgacg

SEQ ID NO: 57599 - DNA, 1584 bp, Homo sapiens
tgtcctccagtggctggtaggcagtggctgggaggcagcggcccaattagtgtcgtgcggcccgtggcgaggcgaggtccggggagcgagcgagcaagcaaggcgggaggggtggccggagctgcggcggctggcacaggaggaggagcccgggcgggcgaggggcggccggagagcgccagggcctgagctgccggagcggcgcctgtgagtgagtgcagaaagcaggcgcccgcgcgctagccgtggcaggagcagcccgcacgccgcgctctctccctgggcgacctgcagtttgcaatatgactttggaggaattctcggctggagagcagaagaccgaaaggatggataaggtgggggatgccctggaggaagtgctcagcaaagccctgagtcagcgcacgatcactgtcggggtgtacgaagcggccaagctgctcaacgtgtaagtggggcccttgcgcgtcccccatggcaccccttcccgccccagcccgggaggtcgccttggctgggcgcccctcgcccggccgcgccacttcctgtcgcttttctgcctgtctcggaagggagggggcgagcgggccgggcggcgacccccagggacccgggcagggggttgagggcgcccgcgcttctgcgctcactggccccgcccgctgcccccagcgaccccgataacgtggtgttgtgcctgctggcggcggacgaggacgacgacagagatgtggctctgcagatccacttcaccctgatccaggcgttttgctgcgagaacgacatcaacatcctgcgcgtcagcaacccgggccggctggcggagctcctgctcttggagaccgacgctggccccgcggcgagcgagggcgccgagcagcccccggacctgcactgcgtgctggtgacgaatccacattcatctcaatggaaggatcctgccttaagtcaacttatttgtttttgccgggaaagtcgctacatggatcaatgggttccagtgattaatctccctgaacggtgatggcatctgaatgaaaataactgaaccaaattgcactgaagtttttgaaatacctttgtagttactcaagcagttactccctacactgatgcaaggattacagaaactgatgccaaggggctgagtgagttcaactacatgttctgggggcccggagatagatgactttgcagatggaaagaggtgaaaatgaagaaggaagctgtgttgaaacagaaaaataagtcaaaaggaacaaaaattacaaagaaccatgcaggaaggaaaactatgtattaatttagaatggttgagttacattaaaataaaccaaatatgttaaagtttaagtgtgcagccatagtttgggtatttttggtttatatgccctcaagtaaaagaaaagccgaaagggttaatcatatttgaaaaccatattttattgtattttgatgagatattaaattctcaaagttttattataaattctactaagttattttatgacatgaaaagttatttatgctataaattttttgaaacacaatacctacaataaactggtatgaataattgcatca

SEQ ID NO: 57600 - DNA, 1299 bp, Homo sapiens
  misc_feature (1178)..(1181): n is a, c, g, or t
  misc_feature (1185)..(1185): n is a, c, g, or t
  misc_feature (1188)..(1190): n is a, c, g, or t
  misc_feature (1193)..(1198): n is a, c, g, or t
  misc_feature (1200)..(1201): n is a, c, g, or t
  misc_feature (1203)..(1203): n is a, c, g, or t
  misc_feature (1221)..(1221): n is a, c, g, or t
  misc_feature (1225)..(1225): n is a, c, g, or t
  misc_feature (1229)..(1231): n is a, c, g, or t
  misc_feature (1270)..(1270): n is a, c, g, or t
tgtcctccagtggctggtaggcagtggctgggaggcagcggcccaattagtgtcgtgcggcccgtggcgaggcgaggtccggggagcgagcgagcaagcaaggcgggaggggtggccggagctgcggcggctggcacaggaggaggagcccgggcgggcgaggggcggccggagagcgccagggcctgagctgccggagcggcgcctgtgagtgagtgcagaaagcaggcgcccgcgcgctagccgtggcaggagcagcccgcacgccgcgctctctccctgggcgacctgcagtttgcaatatgactttggaggaattctcggctggagagcagaagaccgaaaggatggataaggtgggggatgccctggaggaagtgctcagcaaagccctgagtcagcgcacgatcactgtcggggtgtacgaagcggccaagctgctcaacgtcgaccccgataacgtggtgttgtgcctgctggcggcggacgaggacgacgacagagatgtggctctgcagatccacttcaccctgatccaggcgttttgctgcgagaacgacatcaacatcctgcgcgtcagcaacccgggccggctggcggagctcctgctcttggagaccgacgctggccccgcggcgagcgagggcgccgagcagcccccggacctgcactgcgtgctggtgacgaatccacattcatctcaatggaaggatcctgccttaagtcaacttatttgtttttgccgggaaagtcgctacatggatcaatgggttccagtgattaatctccctgaacggtgatggcatctgaatgaaaataactgaaccaaattgcactgaagtttttgaaatacctttgtagttactcaagcagttactccctacactgatgcaaggattacagaaactgatgccaaggggctgagtgagttcaactacatgttctgggggcccggagatagatgactttgcagatggaaagaggtgaaaatgaagaaggaagctgtgttgaaacagaaaaataagtcaaaaggaacaaaaattacaaagaaccatgcaggaaggaaaactatgtattaatttagaatggttgagttacattaaaataaaccaaatatgttaaagtttaaaaaaaaaaaaaaaaaaaccacccccccccccccccccccccccccccannnnaaancannnaannnnnnannantcaaagagaaaaaaaaangggngggnnntttaaatattttatgagggggggaatttttttttttcanaattttttttttaaaggggattttttaaa

SEQ ID NO: 57601 - DNA, 897 bp, Homo sapiens
caggcacccaccaccacgcctggctaattttttgtatttttagtggagatggggtttcaccatgttagccaggatggtctcgatctcctgaccttgtgatctgtccgcctcagcctcccaaagtgctgggattacaggcgtgagccaccgcgcccggcccctttcttctattttctttatcctggtagtagacaaagaatgttgcctatttgacctatgtccagagaaggcagagtgtcagtcacactgggtttctatccagccccagtcctgtccagtgggtaactctcagccccactcctcatcccccaaaggccccagtgacctctatgctgcagaggtgcactgggtgggccctagagctgggctgcagagcaagcaactggctgcatgcctgggcctccctgcgcagttcctcacatgcatgctgtggtcccagcctgacctctccatctggagggggccgcctcgctgggctgttccaaagctggagtcctggtggcagctgctttgccaagtcgcgcagtagccagggcttgcctgcagcccagaacactcagacagggtcaggccttccagggttcacagcacgtcccatgcccctatgtcctggcatctggggaaaagctgtcactggccagacgtggagtggcttcctgccctaagctggcaggctgtcctgcctcacatgccagagccaagaccggcaaaccccagctgtcagggcagggaagtgggcaagggggcagcaagctgctggtgtctatgccttgactccgagataaatagatgacctaacagtggccaacttttgcctctcacctttctgacggtgaaatggaatcgagccccagacctgaccagggtacagtaaaaggtcttcctttaaacacaaaa

SEQ ID NO: 57602 - DNA, 393 bp, Homo sapiens
ttgcaacagaaaagataaaaaatgcttactgcttcaccttttgcttctggctgcagaacaagtagaaaggagcaattacacccaaaacgttaaaaaaaaaaaaaaagcaattaggctaaaggctgaggaaatgatcataacatgatggaagttccagcagccaagatgaatcagaaagtagctatgtagcctatcatgataggaaagctgggcatagacatagatcagtgttttccaaccaagtgtgggccaggagtggtgtcacgcctgtaatcccagctactcatgaggctgaggcaggagaatcacttgaacctgttagatggaggttgcagttagccaagactgtgccactgcactccagcctgggcgacagaccaagactcagtctca

SEQ ID NO: 57603 - DNA, 5340 bp, Homo sapiens
cggctgctcgcgagctgctttctctcctcttccctttccgggtgcacggcgaggagaaagtctctatgcaactaagccccggcgcgcacttggccaggtatgtaccgcgggagcggcgcgttctgcgcggaagcagatgctgctgccgccacggcggcggcggctgccagctcctgagctctgtaactgtcacactgcacctgagctgaacttgaaaagagagtgaaggggcgattgggcgaacgcttttggcagacacagagggtgtttgtagacgtgggggaggagaatctctattaacgccccccaccgtaaccactgcacatcacctccatctctgcaaatacagcccgaggagtagaggcagcagcagctggacccccaaagagagacgtggggcagcggctgtgaccgcatctcctgagctacaacaacaggtcgcctttttgagactcctttggcgggaagggctacttggaaaggaaggtttgaaagagtgagaagggtaggtgtaagggttccctaattcgtcgaaagaattctattgggtgactctcgttcgtcttctctatcctacactccacatactgaccctatattatccagactgtgccggggagaaatcaaaaacacctgtttgaagaaacggctgcacctgtgtgcttatttgtgccagagggtggcctagcccacctgcaggaagagatttggctgggttctgttgagggtgattgttaggacgttgtattttgttgccattattccaaatacctgtcttggagggaaagttgcccttctgagaactgtgactttaccaggagccctatcttggaataagagttacacctctggaccacgtttctcactagtactttgcttgactggaggaagtgggtgacttttggctgcttcggtgacccattgtagacgcctcgttacccttcttccttccgcttcaagtaatcatggcggcgggggtggcagcgtggctgccttttgcaagggcagcggctatcgggtggatgcctgtggcctcggggcctatgccggctcccccgaggcaggagaggaaaaggacccaagatgctctcattgtgctgaatgtgagtggcacccgcttccagacgtggcaggacaccctggaacgttacccagacactctactgggcagttctgagagggactttttctaccacccagaaactcagcagtatttctttgaccgtgacccagacatcttccgccacatcctgaatttctaccgcactgggaagctccactatcctcgccacgagtgcatctctgcttacgatgaagaactggccttctttggcctcatcccggaaatcatcggcgactgctgttatgaggagtacaaggatcgcaggcgagagaacgccgagcgcctgcaggacgacgcggataccgacaccgctggggagagcgccttgcccaccatgactgcaaggcagagggtctggagggccttcgagaacccccacaccagcacgatggccctggtgttctactatgtcacggggtttttcattgccgtctctgtcatcgcgaatgtggtggaaacagtgccgtgcggatcaagcccaggtcacattaaagaactgccctgtggagagcggtatgctgtggccttcttctgcttggacacggcctgcgtcatgatcttcacagttgagtatttgcttcgcctggctgcagcgcctagtcgttaccgttttgtgcgtagtgtcatgagtatcatcgacgtggtggccatcctgccttattacattgggctggtgatgacagacaatgaggacgtcagcggagcctttgtcacactccgagtcttccgggtcttcaggatctttaagttttcccgccactctcaaggcctgcgcatcctggggtacacactgaagagttgtgcctcagaattgggcttcttgcttttctcgctcaccatggctatcatcatcttcgctacagttatgttctacgcagagaaggggtcttcggctagcaagttcaccagcatccctgcagccttctggtataccatcgtcaccatgacaacactagggtatggtgacatggtgccaaaaaccatagcagggaagatttttggttctatctgttcgctgagtggggtcttggtcattgctctacctgttccggtgattgtatccaacttcagtcgcatctaccaccagaatcaacgagcagacaaacgaagggcacaaaagaaagctagactggccaggatccgggcagccaaaagcggaagcgcaaatgcttacatgcagagcaaacggaatggtttactcagtaatcagctgcagtcctcagaggatgagcaggcttttgttagcaaatccggctccagctttgaaacccagcaccaccacctgcttcactgcctggaaaaaaccacgaatcacgagtttgtggacgaacaagtctttgaagaaagctgcatggaagttgcaactgttaatcgtccttcaagtcacagtccttcactgtcttcacaacaaggagtcaccagcacctgctgttcacgacgacacaaaaaaacttttcgcatcccaaatgccaatgtatcaggaagccatcaaggtagtatacaagaactcagcacgattcagatcagatgtgtggagagaacacctctgtctaacagccgatccagtttaaatgccaaaatggaagagtgtgttaaactaaactgtgaacaaccttatgtgactacagcaataataagcatcccaacacctccagtaaccacaccagaaggagacgataggccagaatcccctgagtactcaggaggaaatattgtcagagtttctgctttgtaagacaattggaataaggtctaagagaattcgagccctggctgtgaaaagaatctcaacatagaagaaagaagaaacaataaatattctgcagattaatgcagcaaagaaagaaggttggtagtgaaacacaaagcttccaatcttaaggatgtgaataaaaccaccaaatggcatttctagacagtttgacctgttatacagagtaatattctgtggccctttgactttgtgaatgagcacaatgaaatgccgcctactgatgcttcttatgatcagaactcttttttaataaaataaataacataaatcgttgaacataatgttccagttgaatgcaaaacaaaaaaaatatggaaaacattttgataaaattttttcctgttaaaaccatgaacattggctatgatgaagattattacatatgaaaaaaaaactcacacaacatatttgtattgactgaaggaaaccatcataatgcatgctagaattctttgaagcagtgatctcagtttccttatgttgtcttcagaataggcatgataaactataattgtagaaaggggtaatttctgtgcacttacaacaagctgagtgttcatgttccatggtgggctgtgcaaataaactccttttagacctgcagtatttctcatggggatgctcattagtaaatctaaagtgttcagatagttcagtattcattatcgtttaactttgcacctagatactgttacaactgcaataatttgttgtacaactgttgtatcaggaatcaggatttttttgttgttgtactttccagatccttatagatacggtaagagccacattcgtagaaaaacttctggtgtggccaggttttaggtaactttttaatccaaaactattgtgccataaatgtttttcagtaatattttttggtccactgtattcctgtgacacagtgcattatctgttcttgtatttctatagcacctctctattgggtttatcatcatcaacaagactactgtttactgtagttcaagtgactttcctacttttgtatttccaaaaaaaattatcttgtaagtagcttgtcatcaatccccttgtcgaaaactagaaaaaaaggagttgacccatataaattatctctaacgtctttgttgtttatggaaaagcccagatactggatatatcactatgtattttatgaacagaattgactgggactaatatcacaggatcaatcatctcagaatcttacttgatgcattatttattttgctttagatcttgaatacattttgagaataactaatgtggattgaaatgtagagatacactggagtgctttatttagcaatatttgatgaaagcatgctttctacgccattcaggaaggcagcacaaatttatctcagaaaggttcctgtgtattgcaaggtacaattttctccaataaatcaggagaacaggagtttgatgatgcaaagttgatctctgtacatttaagtgaaaagtctttataacttttcacccttaaaatatttcagcagacatgtctgcacatgacagtgtaaaaaagtttaatgtcaaatgcaaagtttttattcattccaagccaccactgtaaggaataaagcttagcttctgtacatggaaagagctaataattatccctctgtcagagatgagatttttaaatgcttatgatatttaatcataaaaagggattaatccaaccattttcaagtaaagccagaaattcttgcttcccatttctagaatagtttctagaacagtgctatgcacatattagatcttaataaacatttgctgagtgaaagtaagataaactcaactatctcttgggaagaactggcttcattcctagtacatcttttaaaaagttactaattttccagcagtacaaatattaacaattatattaacacctgcctcatgtcagtttatgcttctagagcaatgtctagtgaaacttatctgatggcatttattgaaaaccttctaaaaagtagactaaggaaaccataatcagaattactatgtcttttgattcccaatgagaagttctattttcatgttcttaatattacatacaagaaaatgcagttaggttatttcaattgacaattctgcctcctcttttgatttatcacttacccaaaattattaattttattaggcttttggaaaagaaaaaaaactttttgatgttttaggtgatttaaaaatataccgtgttggtggtgaatgactattgatgactgtgttaagtgcatctgtattgtaagtgaaatgtaattatttctgtgtaccatatggagtaactaaggtcattgtttttgacaattttgtttgaaattcatatatcttatttcaaaggatagcataatatctgcattatgctggaaaaaaatagacctttggagaatacttaaataaaacatgtgcatgcttgaacaggacaaaatgt

SEQ ID NO: 57604 - DNA, 1521 bp, Homo sapiens
aggtgaatgtccccccagttatagggtgatgtcccccagttataggtgaatgtctccccagttatagggtaagtccccacagttatagggtgacgtccatcagttatagggcaatgtccccccagttactgggctgtgtcccccaattacagggcaatgtcccctcatagtgtctcccagttatacagtattgtccccccattataaggtagtatccccagttactagatagtgtcccccagtaacaggataatgtcccccaattgcagggcaatgtcccccattatagtgtccccaagttataagctggagtcccccagtaacaggataataggatagtgttccccagtacagggcagtgtccccagttactcactagtgtcccctagtaacagggcagtgtccacccagatacagcctagtgtccctcagttacacaatagtgtgtcccccagtggtaggacagtctactactgagtcctcctggcatgagtcgagctgagattaggatagggtaatgacccttcagttttggggaagggaccagagctcggccagtgagaagcttccagctccgtctggccatatccaggctgctgagggtcctgggctctgtccttaaacctcatcactgacatgacccagcaaacctcctcaagaggaaaaagtccccttgggtcaaacacagcttgtgcagttctcggggacctcctcctgccatcctggggatgctgtggagaatggagatgcacagggggctttgtcctctcctctgccttttggagaaaatatttcactcaaggcaaacgcagcctgagggcagcacaggggaccccaaggctcactgcgcatttctagtcgcccccaaacgcgtgggttttcctcctgttctcctcgtgggtgcctttgctcattctcatcctcctgttctcatccagtctgcccagtctgaccggctcccagcagcatccgcccaaaagtttctcccatgacagcaggaagcagcctcagacaatacatgatggacaggcctggctgtgttccaatagaaccccgagtcagtcagcccgagcctccctctcagctggatactgttaatgacaggggtacacattcccctcccctttccaatgttttaaaactctaggacagtgattctcaaacactttggtctcaaaacccctaagagcatttgcttatgtggcttttatctgttgatagttgctacctgagaaattaaaactgagaaatctaaaaatagatttattttaggaagtcactaaaaataataagcccattgcatgttaacatgaaatagcatatttttacaaaaaaataaattttctaaaaacaaaacatctaagtgagaagagtggcattgttgtacttgttttgcaaatcttttcagtgtccggtttatgagatgacagcactttggtttgttgccaaccattcacttataaagaaacccttttccaataattagctggggctggtgctagagcaataccagaagttcag

SEQ ID NO: 57605 - DNA, 274 bp, Homo sapiens
ctatgaggaccagcaattagattttatagcagtacttcccattaaagtgaataaccaaaatcactttaaggtcaagatcttagtcaatacattatgtaaaaacatatacaacagacaatacaccagaaactaaatcttttgcaaccttttaaacttatgatgaaaaacattaatgtcagctctaaaatgtattaagcagtttttacaaaaaaaatgtatagaatacaggagccaaaacatttaacaattaccctaacttgctgacacagaatac

SEQ ID NO: 57606 - DNA, 230 bp, Homo sapiens
cttgaactcctgaccacagatgatacaccaaccttggcctcctaaagtgctgggattacaggtgtgagccaccacgcctggcctacattggcatattttgtctatttatatttaatgtaattattaatatgtttgagtttaaagtcttctatcttactatgtattctggatttgtcccatcttttgtttctcttttcctttcctgtcatttgagtgaactagctattttt

SEQ ID NO: 57607 - DNA, 515 bp, Homo sapiens
cttgactggtctgtcttgtggaaccccacagcatctaggccagcagttcctgtgtcctttactgcctaaatgttataaatcttaaataggtaaagaggagaagttttgtggaaaagatgtggtttgtggataaagaacactgagtttagagttttcaatttgggctctaaattttgaaatagactaatagaattgtgtccttagacaagactaccctctataaaatggtggtgacaggccaggcgcagtggctcatgcctgtaatcccagcactttgggaggccgaggcaggcagatcacctgagggtgggatttcgagaccagcctgaccaacatagagaaagcccatctctattaaaaatacaaaattagctgggcgtggtggcacatgcctgtaatctcagctactcgggagactgaggcaggaaaatcacttgaaccggggaggcggaggttgcggtgagctgagatcacaccattgcactccagcctgagcaacaagagcaaaactccat

SEQ ID NO: 57608 - DNA, 972 bp, Homo sapiens
gacccgctgcccctgtgggagcaccctgcttcaggaagcctccctccctccctctgcctcccttccccaggacaccaagagcgccctctcctgagccctggcagaccgactgcaggtagcaggattgcaggaccctctgcctggcctggcgtttcaggagagaggggaagtggggcctgtgctctgggaggcgtggtcatccgagacaggagtccaggggagagaggaggggacaaaggcgccgtctgggggaggtcgatgagcctgtgctggcatccgcgggccccacgctttgccaactcctccagccacaggcaaggccacggctccgggctgttgcgctctaagggttctgtgattggatggaacagagctgctggggaggagactggaagtttctgcattccttcaacagaacatttaatgaagtactctatatatatatataaatatatatataaatatatatatatacttctatttgtgggtactttaggaaaatgccctttggtcactgtaaatatgaattgtgaccccatcccttcccgcatgagcccagtgagtcccagcagctatcagcctccctgaacgattaaacagctcctcccagcatttgcatttgcccttctgtttctgtgaggccggcagcccttggggctggggagagcacagcttgccttggacttgcttctgaacacgaattcttcgagaactaggctcagatgctctgctggagtgttggcctcaccccagtccccttgccagcaacatcactgcccttggacgagactcagtggaagacacttcccctcggacccgttcccaggaggtgcaggggcccagcaataaacggcgaaaggggccttggctcttgccctgtggcagtgaccttggggtccgtactatgcccaggtgtcagcaggaaacaaggccttgctcacaggagcacaggctgtaccaccacaaggagcc

SEQ ID NO: 57609 - DNA, 888 bp, Homo sapiens
ctgtcagcgggtatcgcgagcgaggctgaggcggccgctcctgctgctgctactgccgccgccgcagcggctgctcgggctgagcacgccccggaacaggccgccgcgcgctgcgcgccggacccgctgcccctgccggcccggccgggtcgggcggcccagggcggcaccttcctacttctgcccagccacagccctcccctcacagttgagcacctgtttgcctgaagttaatttccagaagcaggagtccccagagccaggcagggggatgaaccgcgagggagctcccgggaagagtccggaggagatgtacattcagcagaaggtccgagtgctgctcatgctgcggaagatgggatcaaacctgacagccagcgaggaggagttcctgcgcacctatgcaggggtggtcaacagccagctcagccagctgcctccgcactccatcgaccagggtgcagaggacgtggtgatggcgttttccaggtcggagacggaagaccggaggcagtagctgcaaagcccttggaacaccctggatgctgttgagggccaagagatctgtgtggctcctgggccggctgagtggcacagaggcccttggacaacaaaatacaaaagaagcaaaaaaaaaaggaaagaacacaaacaacaagaaaagaacaaaagaacacagaaaaagcagagacacaacaccaaaaaacaaaaagcacaaaagaaaacagcaacacaacaaccaaaaaaaaaccgaacagaaagaacacgaagcgagacggaaacaagcaaaaaaacaccacagagcaaacaagcgaaaccgaaaaagaacaggcaacgcaaaacaaacagcacgacgaaaaccaaagaaccaaggacaaaaaaaaaaaa

SEQ ID NO: 57610 - DNA, 676 bp, Homo sapiens
cgggaacacagcgcctgtcccgaagcggactcaggcatacaggtaagaacatgtgcccttccccagacatcccccccaagccgtgttagattcaaggcaactgtggggaaccgacttacaaccctaccctgggcggggacctaagaccatctcaggaggggcagggcatgtgtgcatgtcttgtggaagtgagcacacccggtgtgcacactcatacacatgtgcacacacacgcactctccccgcccaggagacctccagctaaacaccaacccctgacctaccccagccaggctcctacctgtctgctgccagcacagtaggtcccggccagctctggagttctctcatcggaggcccatgccctccactccactgcctttggaagggtctctctccaggtcagcctggaagggacagtatcgtttgtttatgaaatgccccctctttgtagctcctataaagggcccacacctggtggatacctggttgagcgtgtggtctctgccccagcctgtccttgtcacgatcacaggccttgcttttgtaacaatgatgaccccggcctgtctcatcttctgaagaggaaaagtcaaagtgttgctgtggctccatatttcaactaaaaatatatctgttggagaaagaaattaacaataaagaattttcataggtt

SEQ ID NO: 57611 - DNA, 365 bp, Homo sapiens
cagtagagcctgaagacatagcccaggatcttcagtgttctggggcagccaaggaaacttcctcaggctccacatgccttcctgtttgcattgttttcagctgaatttcaagaggctgtcagagcaggcctgccagggcggcaccttcctacttctgcccagccacagccctcccctcacagttgagcacctgtttgcctgaagttaatttccagaagcaggagtccccagagccaggcagggggatgaaccgcgagggagctcccgggaagagtccggaggagatgtacattcagcagaaggtccgagtgctgctcatgctgcggaagatgggatcaaacgagtgcctgtggggtgtcaggcag

SEQ ID NO: 57612 - DNA, 3172 bp, Homo sapiens
cgactggtataaccacggttgggcccaaattgaggaccaaggtgaaaaagcagccggaacgcggcagaagaaggtcctaaggagcgagctgggcggattcggccaagccgggcgttcagcgggccggccttcacagcccgccggagccagatgccgccccctccgccggtccctcccccggcggctggcgcctccctccctccccaccgcggtgactctcggagcgggaggcggaggctgaggcggccgctcctgctgctgctactgccgccgccgcagcggctgctcgggctgagcacgccccggaacaggccgccgcgcgctgcgcgccggacccgctgcccctgccggcccggccgggtcgggcggcccagggcggcaccttcctacttctgcccagccacagccctcccctcacagttgagcacctgtttgcctgaagttaatttccagaagcaggagtccccagagccaggcagggggatgaaccgcgagggagctcccgggaagagtccggaggagatgtacattcagcagaaggtccgagtgctgctcatgctgcggaagatgggatcaaacctgacagccagcgaggaggagttcctgcgcacctatgcaggggtggtcaacagccagctcagccagctgcctccgcactccatcgaccagggtgcagaggacgtggtgatggcgttttccaggtcggagacggaagaccggaggcagtagctgcaaagcccttggaacaccctggatgctgttgagggccaagagatctgtgtggctcctgggccggctgagtggcagcagccccccttgccccacctcccccttcccctacccaaccctgccctgccccaccccacctcacagctactcagtggggctggcatcaagggagacaccagtggtgcgtttataattggcttaaagggatggacttgtgattggctgcaggaagaaacttttttattttttaaatcttgaccaacagaaaccttttatttttatttctgactcttattttttaaaaaatttgcgcctcggtatctggcttccctggaagctctccgagctctggtgctttagttaggtcatttttttagaaatgtgaagaggtctgattggctgcttaaactggaaagggatctgtgattggctggttaatgggaaacggtttttttctttggctgcaggtgttctgctgatatcaacagcttccctattttgaatgcagaaaacagggtctgggacattagtcgttatatttgacttgaaaagaaagaaaccaagtgcgctttgcaatatttattacacaaagaacttgctgctgccttcacatttggggtttgtgtttgattggctttcgatgcgtgtgtttggtttcccattggttcacctgtgactcctgttgccatggattcacccccctctgctgccggctctgggcctgagggtccacctggagagtacatttgctttaatgagtgcacctgcctccaccagcaaggggaccccgagaaccctgagcagggtccacagctggaaagttgggcccctgaggagctttgtgtcgtcttgaacgagcagcccagggcctagaggtaaccgttaggcgggatttatgtgcactgcctgcatgagctggcaaccagccagcgtcccttggtgagaaagggattgctgaggcaccgtccaggccccaccggccaggccgcgcccagcagaggcgtactacccagctctgtcctcttggccatccttctgtgtaccacttcctgaggcctcattttgggggtcatcttggaaaggggaggagcttctcccagtgtgagaccccaaagactctggaggtcatctggcggaggtctctgggagcccagaacccacataaaagccccagcttggctcacaaggcccaggagacctccagctaaacaccaacccctgacctaccccagccaggctcctacctgtctgctgccagcacagtaggtcccggccagctctggagttctctcatcggaggcccatgccctccactccactgcctttggaagggtctctctccaggtcagcctggaagggacagtatcgtttgtttatgaaatgccactgggacagctggctgggccttcaccaagcaagtcccttcagactggcccttaagccaaactcaggcccagaattgcagttcagaatggcagtcctggaggcagggggtgaggggcaggtctagtgttcctgcaccaaacctaagtccttccacctgccacccccttccctgggagggaggtggtcctcctatctccctggctcactggcaggtgtgggatctggggagagcggctggagaaagatgcagtcctcaggaagggggccgccaccctcccctatgctggtagatgctgaggcccctaggtgcccagggccagtgggaccctctcagaaccaaatctttcccctttctcggggcttggggctcgggccgtaggggctcctgagtgtcatgaagtgcacaggagccaaatgaccgagccctggagagccccatggtgggtaggtggttcgtgctgtgctctggcaccatcagcctgttccagaaggaggattcgagcatcaggctaagaccctgtgtcctccaccatgcactcacccctagccctggttagctgacagtcagctgtggggaacacagctacaaccctaccctggcagggacctgagagcatctcaggaggggcagcgcatgtgtgcatgtgctgtgtgagtgagcacacccgtgtgcacactcatacacatgtgcacacacacgcactctccccgctcaggggcctggaggtctggctgagcccctggggaaaggtgagttctttcatctccctcctccaggtcggagtgcctggagtcaggtgtcgaggccacattgctggctgccccctctttgtagctcctataaagggcccacacctggtggatacctggttgagcgtgtggtctctgccccagcctgtccttgtcacgatcacaggccttgcttttgtaacaatgatgaccccggcctgtctcatcttctgaagaggaaaagtcaaagtgttgctgtggctccatatttcaactaaaaatatatctgttggagaaagaaattaacaataaagaattttcataggtt

SEQ ID NO: 57613 - DNA, 2844 bp, Homo sapiens
tcccagaggtgtgggtgcaggtttcctgggcttgccagacacacagggcggcaccttcctacttctgcccagccacagccctcccctcacagttgagcacctgtttgcctgaagttaatttccagaagcaggagtccccagagccaggcagggggatgaaccgcgagggagctcccgggaagagtccggaggagatgtacattcagcagaaggtccgagtgctgctcatgctgcggaagatgggatcaaacctgacagccagcgaggaggagttcctgcgcacctatgcaggggtggtcaacagccagctcagccagctgcctccgcactccatcgaccagggtgcagaggacgtggtgatggcgttttccaggtcggagacggaagaccggaggcagtagctgcaaagcccttggaacaccctggatgctgttgagggccaagagatctgtgtggctcctgggccggctgagtggcagcagccccccttgccccacctcccccttcccctacccaaccctgccctgccccaccccacctcacagctactcagtggggctggcatcaagggagacaccagtggtgcgtttataattggcttaaagggatggacttgtgattggctgcaggaagaaacttttttattttttaaatcttgaccaacagaaaccttttatttttatttctgactcttattttttaaaaaatttgcgcctcggtatctggcttccctggaagctctccgagctctggtgctttagttaggtcatttttttagaaatgtgaagaggtctgattggctgcttaaactggaaagggatctgtgattggctggttaatgggaaacggtttttttctttggctgcaggtgttctgctgatatcaacagcttccctattttgaatgcagaaaacagggtctgggacattagtcgttatatttgacttgaaaagaaagaaaccaagtgcgctttgcaatatttattacacaaagaacttgctgctgccttcacatttggggtttgtgtttgattggctttcgatgcgtgtgtttggtttcccattggttcacctgtgactcctgttgccatggattcacccccctctgctgccggctctgggcctgagggtccacctggagagtacatttgctttaatgagtgcacctgcctccaccagcaaggggaccccgagaaccctgagcagggtccacagctggaaagttgggcccctgaggagctttgtgtcgtcttgaacgagcagcccagggcctagaggtaaccgttaggcgggatttatgtgcactgcctgcatgagctggcaaccagccagcgtcccttggtgagaaagggattgctgaggcaccgtccaggccccaccggccaggccgcgcccagcagaggcgtactacccagctctgtcctcttggccatccttctgtgtaccacttcctgaggcctcattttgggggtcatcttggaaaggggaggagcttctcccagtgtgagaccccaaagactctggaggtcatctggcggaggtctctgggagcccagaacccacataaaagccccagcttggctcacaaggcccaggagacctccagctaaacaccaacccctgacctaccccagccaggctcctacctgtctgctgccagcacagtaggtcccggccagctctggagttctctcatcggaggcccatgccctccactccactgcctttggaagggtctctctccaggtcagcctggaagggacagtatcgtttgtttatgaaatgccactgggacagctggctgggccttcaccaagcaagtcccttcagactggcccttaagccaaactcaggcccagaattgcagttcagaatggcagtcctggaggcagggggtgaggggcaggtctagtgttcctgcaccaaacctaagtccttccacctgccacccccttccctgggagggaggtggtcctcctatctccctggctcactggcaggtgtgggatctggggagagcggctggagaaagatgcagtcctcaggaagggggccgccaccctcccctatgctggtagatgctgaggcccctaggtgcccagggccagtgggaccctctcagaaccaaatctttcccctttctcggggcttggggctcgggccgtaggggctcctgagtgtcatgaagtgcacaggagccaaatgaccgagccctggagagccccatggtgggtaggtggttcgtgctgtgctctggcaccatcagcctgttccagaaggaggattcgagcatcaggctaagaccctgtgtcctccaccatgcactcacccctagccctggttagctgacagtcagctgtggggaacacagctacaaccctaccctggcagggacctgagagcatctcaggaggggcagcgcatgtgtgcatgtgctgtgtgagtgagcacacccgtgtgcacactcatacacatgtgcacacacacgcactctccccgctcaggggcctggaggtctggctgagcccctggggaaaggtgagttctttcatctccctcctccaggtcggagtgcctggagtcaggtgtcgaggccacattgctggctgccccctctttgtagctcctataaagggcccacacctggtggatacctggttgagcgtgtggtctctgccccagcctgtccttgtcacgatcacaggccttgcttttgtaacaatgatgaccccggcctgtctcatcttctgaagaggaaaagtcaaagtgttgctgtggctccatatttcaactaaaaatatatctgttggagaaagaaattaacaataaagaattttcataggtt

SEQ ID NO: 57614 - DNA, 2707 bp, Homo sapiens
aggggacacaggcatagtgtaaaccccggctgaaacgacggcagtactatacggtctaggtagcgaggctgaggcggccgctcctgctgctgctactgccgccgccgcagcggctgctcgggctgagcacgccccggaacaggccgccgcgcgctgcgcgccggacccgctgcccctgccggcccggccgggtcgggcggcccaggtgcagaggacgtggtgatggcgttttccaggtcggagacggaagaccggaggcagtagctgcaaagcccttggaacaccctggatgctgttgagggccaagagatctgtgtggctcctgggccggctgagtggcagcagccccccttgccccacctcccccttcccctacccaaccctgccctgccccaccccacctcacagctactcagtggggctggcatcaagggagacaccagtggtgcgtttataattggcttaaagggatggacttgtgattggctgcaggaagaaacttttttattttttaaatcttgaccaacagaaaccttttatttttatttctgactcttattttttaaaaaatttgcgcctcggtatctggcttccctggaagctctccgagctctggtgctttagttaggtcatttttttagaaatgtgaagaggtctgattggctgcttaaactggaaagggatctgtgattggctggttaatgggaaacggtttttttctttggctgcaggtgttctgctgatatcaacagcttccctattttgaatgcagaaaacagggtctgggacattagtcgttatatttgacttgaaaagaaagaaaccaagtgcgctttgcaatatttattacacaaagaacttgctgctgccttcacatttggggtttgtgtttgattggctttcgatgcgtgtgtttggtttcccattggttcacctgtgactcctgttgccatggattcacccccctctgctgccggctctgggcctgagggtccacctggagagtacatttgctttaatgagtgcacctgcctccaccagcaaggggaccccgagaaccctgagcagggtccacagctggaaagttgggcccctgaggagctttgtgtcgtcttgaacgagcagcccagggcctagaggtaaccgttaggcgggatttatgtgcactgcctgcatgagctggcaaccagccagcgtcccttggtgagaaagggattgctgaggcaccgtccaggccccaccggccaggccgcgcccagcagaggcgtactacccagctctgtcctcttggccatccttctgtgtaccacttcctgaggcctcattttgggggtcatcttggaaaggggaggagcttctcccagtgtgagaccccaaagactctggaggtcatctggcggaggtctctgggagcccagaacccacataaaagccccagcttggctcacaaggcccaggagacctccagctaaacaccaacccctgacctaccccagccaggctcctacctgtctgctgccagcacagtaggtcccggccagctctggagttctctcatcggaggcccatgccctccactccactgcctttggaagggtctctctccaggtcagcctggaagggacagtatcgtttgtttatgaaatgccactgggacagctggctgggccttcaccaagcaagtcccttcagactggcccttaagccaaactcaggcccagaattgcagttcagaatggcagtcctggaggcagggggtgaggggcaggtctagtgttcctgcaccaaacctaagtccttccacctgccacccccttccctgggagggaggtggtcctcctatctccctggctcactggcaggtgtgggatctggggagagcggctggagaaagatgcagtcctcaggaagggggccgccaccctcccctatgctggtagatgctgaggcccctaggtgcccagggccagtgggaccctctcagaaccaaatctttcccctttctcggggcttggggctcgggccgtaggggctcctgagtgtcatgaagtgcacaggagccaaatgaccgagccctggagagccccatggtgggtaggtggttcgtgctgtgctctggcaccatcagcctgttccagaaggaggattcgagcatcaggctaagaccctgtgtcctccaccatgcactcacccctagccctggttagctgacagtcagctgtggggaacacagctacaaccctaccctggcagggacctgagagcatctcaggaggggcagcgcatgtgtgcatgtgctgtgtgagtgagcacacccgtgtgcacactcatacacatgtgcacacacacgcactctccccgctcaggggcctggaggtctggctgagcccctggggaaaggtgagttctttcatctccctcctccaggtcggagtgcctggagtcaggtgtcgaggccacattgctggctgccccctctttgtagctcctataaagggcccacacctggtggatacctggttgagcgtgtggtctctgccccagcctgtccttgtcacgatcacaggccttgcttttgtaacaatgatgaccccggcctgtctcatcttctgaagaggaaaagtcaaagtgttgctgtggctccatatttcaactaaaaatatatctgttggagaaagaaattaacaataaagaattttcataggtt

SEQ ID NO: 57615 - DNA, 3407 bp, Homo sapiens
cgactggtataaccacggttgggcccaaattgaggaccaaggtgaaaaagcagccggaacgcggcagaagaaggtcctaaggagcgagctgggcggattcggccaagccgggcgttcagcgggccggccttcacagcccgccggagccagatgccgccccctccgccggtccctcccccggcggctggcgcctccctccctccccaccgcggtgactctcggagcgggaggcggaggctgaggcggccgctcctgctgctgctactgccgccgccgcagcggctgctcgggctgagcacgccccggaacaggccgccgcgcgctgcgcgccggacccgctgcccctgccggcccggccgggtcgggcggcccagggcggcaccttcctacttctgcccagccacagccctcccctcacagttgagcacctgtttgcctgaagttaatttccagaagcaggagtccccagagccaggcagggggatgaaccgcgagggagctcccgggaagagtccggaggagatgtacattcagcagaaggtccgagtgctgctcatgctgcggaagatgggatcaaacctgacagccagcgaggaggagttcctgcgcacctatgcaggggtggtcaacagccagctcagccagctgcctccgcactccatcgaccagggtgcagaggacgtggtgatggcgttttccaggtcggagacggaagaccggaggcagtagctgcaaagcccttggaacaccctggatgctgttgagggccaagagatctgtgtggctcctgggccggctgagtggcagcagccccccttgccccacctcccccttcccctacccaaccctgccctgccccaccccacctcacagctactcagtggggctggcatcaagggagacaccagtggtgcgtttataattggcttaaagggatggacttgtgattggctgcaggaagaaacttttttattttttaaatcttgaccaacagaaaccttttatttttatttctgactcttattttttaaaaaatttgcgcctcggtatctggcttccctggaagctctccgagctctggtgctttagttaggtcatttttttagaaatgtgaagaggtctgattggctgcttaaactggaaagggatctgtgattggctggttaatgggaaacggtttttttctttggctgcaggtgttctgctgatatcaacagcttccctattttgaatgcagaaaacagggtctgggacattagtcgttatatttgacttgaaaagaaagaaaccaagtgcgctttgcaatatttattacacaaagaacttgctgctgccttcacatttggggtttgtgtttgattggctttcgatgcgtgtgtttggtttcccattggttcacctgtgactcctgttgccatggattcacccccctctgctgccggctctgggcctgagggtccacctggagagtacatttgctttaatgagtgcacctgcctccaccagcaaggggaccccgagaaccctgagcagggtccacagctggaaagttgggcccctgaggagctttgtgtcgtcttgaacgagcagcccagggcctagaggtaaccgttaggcgggatttatgtgcactgcctgcatgagctggcaaccagccagcgtcccttggtgagaaagggattgctgaggcaccgtccaggccccaccggccaggccgcgcccagcagaggcgtactacccagctctgtcctcttggccatccttctgtgtaccacttcctgaggcctcattttgggggtcatcttggaaaggggaggagcttctcccagtgtgagaccccaaagactctggaggtcatctggcggaggtctctgggagcccagaacccacataaaagccccagcttggctcacaaggcccaggagacctccagctaaacaccaacccctgacctaccccagccaggctcctacctgtctgctgccagcacagtaggtcccggccagctctggagttctctcatcggaggcccatgccctccactccactgcctttggaagggtctctctccaggtcagcctggaagggacagtatcgtttgtttatgaaatgccactgggacagctggctgggccttcaccaagcaagtcccttcagactggcccttaagccaaactcaggcccagaattgcagttcagaatggcagtcctggaggcagggggtgaggggcaggtctagtgttcctgcaccaaacctaagtccttccacctgccacccccttccctgggagggaggtggtcctcctatctccctggctcactggcaggtgtgggatctggggagagcggctggagaaagatgcagtcctcaggaagggggccgccaccctcccctatgctggtagatgctgaggcccctaggtgcccagggccagtgggaccctctcagaaccaaatctttcccctttctcggggcttggggctcgggccgtaggggctcctgagtgtcatgaagtgcacaggagccaaatgaccgagccctggagagccccatggtgggtaggtggttcgtgctgtgctctggcaccatcagcctgttccagaaggaggattcgagcatcaggctaagaccctgtgtcctccaccatgcactcacccctagccctggttagctgacagtcagctgtggggaacacagctacaaccctaccctggcagggacctgagagcatctcaggaggggcagcgcatgtgtgcatgtgctgtgtgagtgagcacacccgtgtgcacactcatacacatgtgcacacacacgcactctccccgctcaggggcctggaggtctggctgagcccctggggaaaggtgagttctttcatctccctcctccaggtcggagtgcctggagtcaggtgtcgaggccacattgctggctgccccctctttgtagctcctataaagggcccacacctggtggatacctggttgagcgtgtggtctctgccccagcctgtccttgtcacgatcacaggccttgcttttgtaacaatgatgaccccggcctgtctcatcttctgaagaggaaaagtcaaagtgttgctgtggctccatatttcaactaaaaatatatctgttggagaaagaaattaacaataaagaattttcataggttaacaacacgcgacggaaagaaaaagccgagaggccaccaccaatgcaggaggatgcgggaccaaacacgcaggggcacccgaaagcggggcccgacggggccagataggtaggttgccggggaaccccaagacgacccaggccacacaaagcaggccacgactccaggggagtccgccccgataagaggaaccggaataacgtccgaacagacccagggtaaccccgcgcatcag

SEQ ID NO: 57616 - DNA, 1391 bp, Homo sapiens
aaacataggctagtagagccgggtaaatcggacgagggcttctcccagtgtgagaccccaaagactctggaggtcatctggcggaggtctctgggagcccagaacccacataaaagccccagcttggctcacaaggcccaggagacctccagctaaacaccaacccctgacctaccccagccaggctcctacctgtctgctgccagcacagtaggtcccggccagctctggagttctctcatcggaggcccatgccctccactccactgcctttggaagggtctctctccaggtcagcctggaagggacagtatcgtttgtttatgaaatgccactgggacagctggctgggccttcaccaagcaagtcccttcagactggcccttaagccaaactcaggcccagaattgcagttcagaatggcagtcctggaggcagggggtgaggggcaggtctagtgttcctgcaccaaacctaagtccttccacctgccacccccttccctgggagggaggtggtcctcctatctccctggctcactggcaggtgtgggatctggggagagcggctggagaaagatgcagtcctcaggaagggggccgccaccctcccctatgctggtagatgctgaggcccctaggtgcccagggccagtgggaccctctcagaaccaaatctttcccctttctcggggcttggggctcgggccgtaggggctcctgagtgtcatgaagtgcacaggagccaaatgaccgagccctggagagccccatggtgggtaggtggttcgtgctgtgctctggcaccatcagcctgttccagaaggaggattcgagcatcaggctaagaccctgtgtcctccaccatgcactcacccctagccctggttagctgacagtcagctgtggggaacacagctacaaccctaccctggcagggacctgagagcatctcaggaggggcagcgcatgtgtgcatgtgctgtgtgagtgagcacacccgtgtgcacactcatacacatgtgcacacacacgcactctccccgctcaggggcctggaggtctggctgagcccctggggaaaggtgagttctttcatctccctcctccaggtcggagtgcctggagtcaggtgtcgaggccacattgctggctgccccctctttgtagctcctataaagggcccacacctggtggatacctggttgagcgtgtggtctctgccccagcctgtccttgtcacgatcacaggccttgcttttgtaacaatgatgaccccggcctgtctcatcttctgaagaggaaaagtcaaagtgttgctgtggctccatatttcaactaaaaatatatctgttggagaaagaaattaacaataaagaattttcataggtt

SEQ ID NO: 57617 - DNA, 1994 bp, Homo sapiens
cgactggtataaccacggttgggcccaaattgaggaccaaggtgaaaaagcagccggaacgcggcagaagaaggtcctaaggagcgagctgggcggattcggccaagccgggcgttcagcgggccggccttcacagcccgccggagccagatgccgccccctccgccggtccctcccccggcggctggcgcctccctccctccccaccgcggtgactctcggagcgggaggcggaggctgaggcggccgctcctgctgctgctactgccgccgccgcagcggctgctcgggctgagcacgccccggaacaggccgccgcgcgctgcgcgccggacccgctgcccctgccggcccggccgggtcgggcggcccagggcggcaccttcctacttctgcccagccacagccctcccctcacagttgagcacctgtttgcctgaagttaatttccagaagcaggagtccccagagccaggcagggggatgaaccgcgagggagctcccgggaagagtccggaggagatgtacattcagcagaaggtccgagtgctgctcatgctgcggaagatgggatcaaacctgacagccagcgaggaggagttcctgcgcacctatgcaggggtggtcaacagccagctcagccagctgcctccgcactccatcgaccagggtgcagaggacgtggtgatggcgttttccaggtcggagacggaagaccggaggcagtagctgcaaagcccttggaacaccctggatgctgttgagggccaagagatctgtgtggctcctgggccggctgagtggcagcagccccccttgccccacctcccccttcccctacccaaccctgccctgccccaccccacctcacagctactcagtggggctggcatcaagggagacaccagtggtgcgtttataattggcttaaagggatggacttgtgattggctgcaggaagaaacttttttattttttaaatcttgaccaacagaaaccttttatttttatttctgactcttattttttaaaaaatttgcgcctcggtatctggcttccctggaagctctccgagctctggtgctttagttaggtcatttttttagaaatgtgaagaggtctgattggctgcttaaactggaaagggatctgtgattggctggttaatgggaaacggtttttttctttggctgcaggtgttctgctgatatcaacagcttccctattttgaatgcagaaaacagggtctgggacattagtcgttatatttgacttgaaaagaaagaaaccaagtgcgctttgcaatatttattacacaaagaacttgctgctgccttcacatttggggtttgtgtttgattggctttcgatgcgtgtgtttggtttcccattggttcacctgtgactcctgttgccatggattcacccccctctgctgccggctctgggcctgagggtccacctgtctgctgccagcacagtaggtcccggccagctctggagttctctcatcggaggcccatgccctccactccactgcctttggaagggtctctctccaggtcagcctggttgagcgtgtggtctctgccccagcctgtccttgtcacgatcacaggccttgcttttgtaacaatgatgaccccggcctgtctcatcttctgaagaggaaaagtcaaagtgttgctgtggctccatatttcaactaaaaatatatctgttggagaaagaaattaacaataaagaattttcataggttaacaacacgcgacggaaagaaaaagccgagaggccaccaccaatgcaggaggatgcgggaccaaacacgcaggggcacccgaaagcggggcccgacggggccagataggtaggttgccggggaaccccaagacgacccaggccacacaaagcaggccacgactccaggggagtccgccccgataagaggaaccggaataacgtccgaacagacccagggtaaccccgcgcatcag

SEQ ID NO: 57618 - DNA, 3037 bp, Homo sapiens
aggggacacaggcatagtgtaaaccccggctgaaacgacggcagtactatacggtctaggtagcgaggctgaggcggccgctcctgctgctgctactgccgccgccgcagcggctgctcgggctgagcacgccccggaacaggccgccgcgcgctgcgcgccggacccgctgcccctgccggcccggccgggtcgggcggcccagggaccgacagacttgacaacggtgacagcactggggcggcaccttcctacttctgcccagccacagccctcccctcacagttgagcacctgtttgcctgaagttaatttccagaagcaggagtccccagagccaggcagggggatgaaccgcgagggagctcccgggaagagtccggaggagatgtacattcagcagaaggtccgagtgctgctcatgctgcggaagatgggatcaaacctgacagccagcgaggaggagttcctgcgcacctatgcaggggtggtcaacagccagctcagccagctgcctccgcactccatcgaccagggtgcagaggacgtggtgatggcgttttccaggtcggagacggaagaccggaggcagtagctgcaaagcccttggaacaccctggatgctgttgagggccaagagatctgtgtggctcctgggccggctgagtggcagcagccccccttgccccacctcccccttcccctacccaaccctgccctgccccaccccacctcacagctactcagtggggctggcatcaagggagacaccagtggtgcgtttataattggcttaaagggatggacttgtgattggctgcaggaagaaacttttttattttttaaatcttgaccaacagaaaccttttatttttatttctgactcttattttttaaaaaatttgcgcctcggtatctggcttccctggaagctctccgagctctggtgctttagttaggtcatttttttagaaatgtgaagaggtctgattggctgcttaaactggaaagggatctgtgattggctggttaatgggaaacggtttttttctttggctgcaggtgttctgctgatatcaacagcttccctattttgaatgcagaaaacagggtctgggacattagtcgttatatttgacttgaaaagaaagaaaccaagtgcgctttgcaatatttattacacaaagaacttgctgctgccttcacatttggggtttgtgtttgattggctttcgatgcgtgtgtttggtttcccattggttcacctgtgactcctgttgccatggattcacccccctctgctgccggctctgggcctgagggtccacctggagagtacatttgctttaatgagtgcacctgcctccaccagcaaggggaccccgagaaccctgagcagggtccacagctggaaagttgggcccctgaggagctttgtgtcgtcttgaacgagcagcccagggcctagaggtaaccgttaggcgggatttatgtgcactgcctgcatgagctggcaaccagccagcgtcccttggtgagaaagggattgctgaggcaccgtccaggccccaccggccaggccgcgcccagcagaggcgtactacccagctctgtcctcttggccatccttctgtgtaccacttcctgaggcctcattttgggggtcatcttggaaaggggaggagcttctcccagtgtgagaccccaaagactctggaggtcatctggcggaggtctctgggagcccagaacccacataaaagccccagcttggctcacaaggcccaggagacctccagctaaacaccaacccctgacctaccccagccaggctcctacctgtctgctgccagcacagtaggtcccggccagctctggagttctctcatcggaggcccatgccctccactccactgcctttggaagggtctctctccaggtcagcctggaagggacagtatcgtttgtttatgaaatgccactgggacagctggctgggccttcaccaagcaagtcccttcagactggcccttaagccaaactcaggcccagaattgcagttcagaatggcagtcctggaggcagggggtgaggggcaggtctagtgttcctgcaccaaacctaagtccttccacctgccacccccttccctgggagggaggtggtcctcctatctccctggctcactggcaggtgtgggatctggggagagcggctggagaaagatgcagtcctcaggaagggggccgccaccctcccctatgctggtagatgctgaggcccctaggtgcccagggccagtgggaccctctcagaaccaaatctttcccctttctcggggcttggggctcgggccgtaggggctcctgagtgtcatgaagtgcacaggagccaaatgaccgagccctggagagccccatggtgggtaggtggttcgtgctgtgctctggcaccatcagcctgttccagaaggaggattcgagcatcaggctaagaccctgtgtcctccaccatgcactcacccctagccctggttagctgacagtcagctgtggggaacacagctacaaccctaccctggcagggacctgagagcatctcaggaggggcagcgcatgtgtgcatgtgctgtgtgagtgagcacacccgtgtgcacactcatacacatgtgcacacacacgcactctccccgctcaggggcctggaggtctggctgagcccctggggaaaggtgagttctttcatctccctcctccaggtcggagtgcctggagtcaggtgtcgaggccacattgctggctgccccctctttgtagctcctataaagggcccacacctggtggatacctggttgagcgtgtggtctctgccccagcctgtccttgtcacgatcacaggccttgcttttgtaacaatgatgaccccggcctgtctcatcttctgaagaggaaaagtcaaagtgttgctgtggctccatatttcaactaaaaatatatctgttggagaaagaaattaacaataaagaattttcataggtt

SEQ ID NO: 57619 - DNA, 2842 bp, Homo sapiens
cttgtgacccatcaggagtttttgtcccgataccgtttcccacaggcggcaccttcctacttctgcccagccacagccctcccctcacagttgagcacctgtttgcctgaagttaatttccagaagcaggagtccccagagccaggcagggggatgaaccgcgagggagctcccgggaagagtccggaggagatgtacattcagcagaaggtccgagtgctgctcatgctgcggaagatgggatcaaacctgacagccagcgaggaggagttcctgcgcacctatgcaggggtggtcaacagccagctcagccagctgcctccgcactccatcgaccagggtgcagaggacgtggtgatggcgttttccaggtcggagacggaagaccggaggcagtagctgcaaagcccttggaacaccctggatgctgttgagggccaagagatctgtgtggctcctgggccggctgagtggcagcagccccccttgccccacctcccccttcccctacccaaccctgccctgccccaccccacctcacagctactcagtggggctggcatcaagggagacaccagtggtgcgtttataattggcttaaagggatggacttgtgattggctgcaggaagaaacttttttattttttaaatcttgaccaacagaaaccttttatttttatttctgactcttattttttaaaaaatttgcgcctcggtatctggcttccctggaagctctccgagctctggtgctttagttaggtcatttttttagaaatgtgaagaggtctgattggctgcttaaactggaaagggatctgtgattggctggttaatgggaaacggtttttttctttggctgcaggtgttctgctgatatcaacagcttccctattttgaatgcagaaaacagggtctgggacattagtcgttatatttgacttgaaaagaaagaaaccaagtgcgctttgcaatatttattacacaaagaacttgctgctgccttcacatttggggtttgtgtttgattggctttcgatgcgtgtgtttggtttcccattggttcacctgtgactcctgttgccatggattcacccccctctgctgccggctctgggcctgagggtccacctggagagtacatttgctttaatgagtgcacctgcctccaccagcaaggggaccccgagaaccctgagcagggtccacagctggaaagttgggcccctgaggagctttgtgtcgtcttgaacgagcagcccagggcctagaggtaaccgttaggcgggatttatgtgcactgcctgcatgagctggcaaccagccagcgtcccttggtgagaaagggattgctgaggcaccgtccaggccccaccggccaggccgcgcccagcagaggcgtactacccagctctgtcctcttggccatccttctgtgtaccacttcctgaggcctcattttgggggtcatcttggaaaggggaggagcttctcccagtgtgagaccccaaagactctggaggtcatctggcggaggtctctgggagcccagaacccacataaaagccccagcttggctcacaaggcccaggagacctccagctaaacaccaacccctgacctaccccagccaggctcctacctgtctgctgccagcacagtaggtcccggccagctctggagttctctcatcggaggcccatgccctccactccactgcctttggaagggtctctctccaggtcagcctggaagggacagtatcgtttgtttatgaaatgccactgggacagctggctgggccttcaccaagcaagtcccttcagactggcccttaagccaaactcaggcccagaattgcagttcagaatggcagtcctggaggcagggggtgaggggcaggtctagtgttcctgcaccaaacctaagtccttccacctgccacccccttccctgggagggaggtggtcctcctatctccctggctcactggcaggtgtgggatctggggagagcggctggagaaagatgcagtcctcaggaagggggccgccaccctcccctatgctggtagatgctgaggcccctaggtgcccagggccagtgggaccctctcagaaccaaatctttcccctttctcggggcttggggctcgggccgtaggggctcctgagtgtcatgaagtgcacaggagccaaatgaccgagccctggagagccccatggtgggtaggtggttcgtgctgtgctctggcaccatcagcctgttccagaaggaggattcgagcatcaggctaagaccctgtgtcctccaccatgcactcacccctagccctggttagctgacagtcagctgtggggaacacagctacaaccctaccctggcagggacctgagagcatctcaggaggggcagcgcatgtgtgcatgtgctgtgtgagtgagcacacccgtgtgcacactcatacacatgtgcacacacacgcactctccccgctcaggggcctggaggtctggctgagcccctggggaaaggtgagttctttcatctccctcctccaggtcggagtgcctggagtcaggtgtcgaggccacattgctggctgccccctctttgtagctcctataaagggcccacacctggtggatacctggttgagcgtgtggtctctgccccagcctgtccttgtcacgatcacaggccttgcttttgtaacaatgatgaccccggcctgtctcatcttctgaagaggaaaagtcaaagtgttgctgtggctccatatttcaactaaaaatatatctgttggagaaagaaattaacaataaagaattttcataggtt

SEQ ID NO: 57620 - DNA, 2918 bp, Homo sapiens
aggggacacaggcatagtgtaaaccccggctgaaacgacggcagtactatacggtctaggtagcgaggctgaggcggccgctcctgctgctgctactgccgccgccgcagcggctgctcgggctgagcacgccccggaacaggccgccgcgcgctgcgcgccggacccgctgcccctgccggcccggccgggtcgggcggcccaggagtccccagagccaggcagggggatgaaccgcgagggagctcccgggaagagtccggaggagatgtacattcagcagaaggtccgagtgctgctcatgctgcggaagatgggatcaaacctgacagccagcgaggaggagttcctgcgcacctatgcaggggtggtcaacagccagctcagccagctgcctccgcactccatcgaccagggtgcagaggacgtggtgatggcgttttccaggtcggagacggaagaccggaggcagtagctgcaaagcccttggaacaccctggatgctgttgagggccaagagatctgtgtggctcctgggccggctgagtggcagcagccccccttgccccacctcccccttcccctacccaaccctgccctgccccaccccacctcacagctactcagtggggctggcatcaagggagacaccagtggtgcgtttataattggcttaaagggatggacttgtgattggctgcaggaagaaacttttttattttttaaatcttgaccaacagaaaccttttatttttatttctgactcttattttttaaaaaatttgcgcctcggtatctggcttccctggaagctctccgagctctggtgctttagttaggtcatttttttagaaatgtgaagaggtctgattggctgcttaaactggaaagggatctgtgattggctggttaatgggaaacggtttttttctttggctgcaggtgttctgctgatatcaacagcttccctattttgaatgcagaaaacagggtctgggacattagtcgttatatttgacttgaaaagaaagaaaccaagtgcgctttgcaatatttattacacaaagaacttgctgctgccttcacatttggggtttgtgtttgattggctttcgatgcgtgtgtttggtttcccattggttcacctgtgactcctgttgccatggattcacccccctctgctgccggctctgggcctgagggtccacctggagagtacatttgctttaatgagtgcacctgcctccaccagcaaggggaccccgagaaccctgagcagggtccacagctggaaagttgggcccctgaggagctttgtgtcgtcttgaacgagcagcccagggcctagaggtaaccgttaggcgggatttatgtgcactgcctgcatgagctggcaaccagccagcgtcccttggtgagaaagggattgctgaggcaccgtccaggccccaccggccaggccgcgcccagcagaggcgtactacccagctctgtcctcttggccatccttctgtgtaccacttcctgaggcctcattttgggggtcatcttggaaaggggaggagcttctcccagtgtgagaccccaaagactctggaggtcatctggcggaggtctctgggagcccagaacccacataaaagccccagcttggctcacaaggcccaggagacctccagctaaacaccaacccctgacctaccccagccaggctcctacctgtctgctgccagcacagtaggtcccggccagctctggagttctctcatcggaggcccatgccctccactccactgcctttggaagggtctctctccaggtcagcctggaagggacagtatcgtttgtttatgaaatgccactgggacagctggctgggccttcaccaagcaagtcccttcagactggcccttaagccaaactcaggcccagaattgcagttcagaatggcagtcctggaggcagggggtgaggggcaggtctagtgttcctgcaccaaacctaagtccttccacctgccacccccttccctgggagggaggtggtcctcctatctccctggctcactggcaggtgtgggatctggggagagcggctggagaaagatgcagtcctcaggaagggggccgccaccctcccctatgctggtagatgctgaggcccctaggtgcccagggccagtgggaccctctcagaaccaaatctttcccctttctcggggcttggggctcgggccgtaggggctcctgagtgtcatgaagtgcacaggagccaaatgaccgagccctggagagccccatggtgggtaggtggttcgtgctgtgctctggcaccatcagcctgttccagaaggaggattcgagcatcaggctaagaccctgtgtcctccaccatgcactcacccctagccctggttagctgacagtcagctgtggggaacacagctacaaccctaccctggcagggacctgagagcatctcaggaggggcagcgcatgtgtgcatgtgctgtgtgagtgagcacacccgtgtgcacactcatacacatgtgcacacacacgcactctccccgctcaggggcctggaggtctggctgagcccctggggaaaggtgagttctttcatctccctcctccaggtcggagtgcctggagtcaggtgtcgaggccacattgctggctgccccctctttgtagctcctataaagggcccacacctggtggatacctggttgagcgtgtggtctctgccccagcctgtccttgtcacgatcacaggccttgcttttgtaacaatgatgaccccggcctgtctcatcttctgaagaggaaaagtcaaagtgttgctgtggctccatatttcaactaaaaatatatctgttggagaaagaaattaacaataaagaattttcataggtt

SEQ ID NO: 57621 - DNA, 2736 bp, Homo sapiens
aggggacacaggcatagtgtaaaccccggctgaaacgacggcagtactatacggtctaggtagcgaggctgaggcggccgctcctgctgctgctactgccgccgccgcagcggctgctcgggctgagcacgccccggaacaggccgccgcgcgctgcgcgccggacccgctgcccctgccggcccggccgggtcgggcggcccagggcggcaccttcctacttctgcccagccacagccctcccctcacagttgagcacctgtttgcctgaagttaatttccagaagcaggagtccccagagccaggcagggggatgaaccgcgagggagctcccgggaagagtccggaggagatgtacattcagcagaaggtccgagtgctgctcatgctgcggaagatgggatcaaaccctgccctgccccaccccacctcacagctactcagtggggctggcatcaagggagacaccagtggtgcgtttataattggcttaaagggatggacttgtgattggctgcaggaagaaacttttttattttttaaatcttgaccaacagaaaccttttatttttatttctgactcttattttttaaaaaatttgcgcctcggtatctggcttccctggaagctctccgagctctggtgctttagttaggtcatttttttagaaatgtgaagaggtctgattggctgcttaaactggaaagggatctgtgattggctggttaatgggaaacggtttttttctttggctgcaggtgttctgctgatatcaacagcttccctattttgaatgcagaaaacagggtctgggacattagtcgttatatttgacttgaaaagaaagaaaccaagtgcgctttgcaatatttattacacaaagaacttgctgctgccttcacatttggggtttgtgtttgattggctttcgatgcgtgtgtttggtttcccattggttcacctgtgactcctgttgccatggattcacccccctctgctgccggctctgggcctgagggtccacctggagagtacatttgctttaatgagtgcacctgcctccaccagcaaggggaccccgagaaccctgagcagggtccacagctggaaagttgggcccctgaggagctttgtgtcgtcttgaacgagcagcccagggcctagaggtaaccgttaggcgggatttatgtgcactgcctgcatgagctggcaaccagccagcgtcccttggtgagaaagggattgctgaggcaccgtccaggccccaccggccaggccgcgcccagcagaggcgtactacccagctctgtcctcttggccatccttctgtgtaccacttcctgaggcctcattttgggggtcatcttggaaaggggaggagcttctcccagtgtgagaccccaaagactctggaggtcatctggcggaggtctctgggagcccagaacccacataaaagccccagcttggctcacaaggcccaggagacctccagctaaacaccaacccctgacctaccccagccaggctcctacctgtctgctgccagcacagtaggtcccggccagctctggagttctctcatcggaggcccatgccctccactccactgcctttggaagggtctctctccaggtcagcctggaagggacagtatcgtttgtttatgaaatgccactgggacagctggctgggccttcaccaagcaagtcccttcagactggcccttaagccaaactcaggcccagaattgcagttcagaatggcagtcctggaggcagggggtgaggggcaggtctagtgttcctgcaccaaacctaagtccttccacctgccacccccttccctgggagggaggtggtcctcctatctccctggctcactggcaggtgtgggatctggggagagcggctggagaaagatgcagtcctcaggaagggggccgccaccctcccctatgctggtagatgctgaggcccctaggtgcccagggccagtgggaccctctcagaaccaaatctttcccctttctcggggcttggggctcgggccgtaggggctcctgagtgtcatgaagtgcacaggagccaaatgaccgagccctggagagccccatggtgggtaggtggttcgtgctgtgctctggcaccatcagcctgttccagaaggaggattcgagcatcaggctaagaccctgtgtcctccaccatgcactcacccctagccctggttagctgacagtcagctgtggggaacacagctacaaccctaccctggcagggacctgagagcatctcaggaggggcagcgcatgtgtgcatgtgctgtgtgagtgagcacacccgtgtgcacactcatacacatgtgcacacacacgcactctccccgctcaggggcctggaggtctggctgagcccctggggaaaggtgagttctttcatctccctcctccaggtcggagtgcctggagtcaggtgtcgaggccacattgctggctgccccctctttgtagctcctataaagggcccacacctggtggatacctggttgagcgtgtggtctctgccccagcctgtccttgtcacgatcacaggccttgcttttgtaacaatgatgaccccggcctgtctcatcttctgaagaggaaaagtcaaagtgttgctgtggctccatatttcaactaaaaatatatctgttggagaaagaaattaacaataaagaattttcataggtt

SEQ ID NO: 57622 - DNA, 2348 bp, Homo sapiens
cgactggtataaccacggttgggcccaaattgaggaccaaggtgaaaaagcagccggaacgcggcagaagaaggtcctaaggagcgagctgggcggattcggccaagccgggcgttcagcgggccggccttcacagcccgccggagccagatgccgccccctccgccggtccctcccccggcggctggcgcctccctccctccccaccgcggtgactctcggagcgggaggcggaggctgaggcggccgctcctgctgctgctactgccgccgccgcagcggctgctcgggctgagcacgccccggaacaggccgccgcgcgctgcgcgccggacccgctgcccctgccggcccggccgggtcgggcggcccagggcggcaccttcctacttctgcccagccacagccctcccctcacagttgagcacctgtttgcctgaagttaatttccagaagcaggagtccccagagccaggcagggggatgaaccgcgagggagctcccgggaagagtccggaggagatgtacattcagcagaaggtccgagtgctgctcatgctgcggaagatgggatcaaacctgacagccagcgaggaggagttcctgcgcacctatgcaggggtggtcaacagccagctcagccagctgcctccgcactccatcgaccagggtgcagaggacgtggtgatggcgttttccaggtcggagacggaagaccggaggcagtagctgcaaagcccttggaacaccctggatgctgttgagggccaagagatctgtgtggctcctgggccggctgagtggcagcagccccccttgccccacctcccccttcccctacccaaccctgccctgccccaccccacctcacagctactcagtggggctggcatcaagggagacaccagtggtgcgtttataattggcttaaagggatggacttgtgattggctgcaggaagaaacttttttattttttaaatcttgaccaacagaaaccttttatttttatttctgactcttattttttaaaaaatttgcgcctcggtatctggcttccctggaagctctccgagctctggtgctttagttaggtcatttttttagaaatgtgaagaggtctgattggctgcttaaactggaaagggatctgtgattggctggttaatgggaaacggtttttttctttggctgcaggtgttctgctgatatcaacagcttccctattttgaatgcagaaaacagggtctgggacattagtcgttatatttgacttgaaaagaaagaaaccaagtgcgctttgcaatatttattacacaaagaacttgctgctgccttcacatttggggtttgtgtttgattggctttcgatgcgtgtgtttggtttcccattggttcacctgtgactcctgttgccatggattcacccccctctgctgccggctctgggcctgagggtccacctggagagtacatttgctttaatgagtgcacctgcctccaccagcaaggggaccccgagaaccctgagcagggtccacagctggaaagttgggcccctgaggagctttgtgtcgtcttgaacgagcagcccagggcctagaggtaaccgttaggcgggatttatgtgcactgcctgcatgagctggcaaccagccagcgtcccttggtgagaaagggattgctgaggcaccgtccaggccccaccggccaggccgcgcccagcagaggcgtactacccagctctgtcctcttggccatccttctgtgtaccacttcctgaggcctcattttgggggtcatcttggaaaggggaggagcttctcccagtgtgagaccccaaagactctggaggtcatctggcggaggtctctgggagcccagaacccacataaaagccccagcttggctcacaaggcccaggagacctccagctaaacaccaacccctgacctaccccagccaggctcctacctgtctgctgccagcacagtaggtcccggccagctctggagttctctcatcggaggcccatgccctccactccactgcctttggaagggtctctctccaggtcagcctggaagggacagtatcgtttgtttatgaaatgccccctctttgtagctcctataaagggcccacacctggtggatacctggttgagcgtgtggtctctgccccagcctgtccttgtcacgatcacaggccttgcttttgtaacaatgatgaccccggcctgtctcatcttctgaagaggaaaagtcaaagtgttgctgtggctccatatttcaactaaaaatatatctgttggagaaagaaattaacaataaagaattttcataggtt

SEQ ID NO: 57623 - DNA, 1089 bp, Homo sapiens
cgactggtataaccacggttgggcccaaattgaggaccaaggtgaaaaagcagccggaacgcggcagaagaaggtcctaaggagcgagctgggcggattcggccaagccgggcgttcagcgggccggccttcacagcccgccggagccagatgccgccccctccgccggtccctcccccggcggctggcgcctccctccctccccaccgcggtgactctcggagcgggaggcggaggctgaggcggccgctcctgctgctgctactgccgccgccgcagcggctgctcgggctgagcacgccccggaacaggccgccgcgcgctgcgcgccggacccgctgcccctgccggcccggccgggtcgggcggcccagggcggcaccttcctacttctgcccagccacagccctcccctcacagttgagcacctgtttgcctgaagttaatttccagaagcaggagtccccagagccaggcagggggatgaaccgcgagggagctcccgggaagagtccggaggagatgtacattcagcagaaggtccgagtgctgctcatgctgcggaagatgggatcaaacctgacagccagcgaggaggagttcctgcgcacctatgcaggggtggtcaacagccagctcagccagctgcctccgcactccatcgaccagggtgcagaggacgtggtgatggcgttttccaggtcggagacggaagaccggaggcagtagctgcaaagcccttggaacaccctggatgctgttgagggccaagagatctgtgtggctcctgggccggctgagtggcagcagccccccttgccccacctctcgaggtgggaccacggggagggttctataaaaagattttttgcaaaagtgcgagcacattatgtagaaaccacaagtccgccaggactagtaaaagccagactcccactgaggccactaatcctgaaggaatgaggagggagcagttacccaaatcccgaggtggagaaggctgtgtggaaaagagggtccccctctcggagctaagacctcaggggagccagcccgagcatcccctgtcgggacctctagaacgccacc

SEQ ID NO: 57624 - DNA, 570 bp, Homo sapiens
aggaagctatttgtgcttatgtaatgatatgggttgcaaatgatttttctaagtgtttaatttactttttgatttttttttgcatatagagtttctgattattatatagttaaatatgtcaatatgaagtccagaaatcttaaaaactcttagttagaaaagcttttaccacttgaagtgataaaatgttttttgtatcatttcattcagtgcttttatttaattaatttttatttttagagacatgtcctgctctgtcacccaggctagggctcagtggcatgatcatagctcactgtagccttgaagtcctgcactcacatgactctcccgccttggtctcccagaagtgctgggattacaggcatgagccaccacgcctaacccatttagtgcttttataagttttattttagactcattttatgacttcagttttacatttaaatcttagactcatttggaaatttttttatggtatgagggattgattgatgattttttttcccccagatatttgaatatagctatccctaaacttattttttttttagacaggatcttgcactg

SEQ ID NO: 57625 - DNA, 309 bp, Homo sapiens
gaccccgtatggatgtgatggccccttgccatcatgggtcactgaagggcagctgcaataaccctcatccagttctgccctctcaataatctctggcactgcctgtgttttctcttattcaagtgagggcaagcaccttctagtccacaggggttgggcacagactgagacacgaagtcatgtgccttagaaaggtcaaggttggttcataggcctcttagagcaaagaagggcaggagagaaagaaaaactagcatttattgaaaacttagaatgtggtcaggcacagtggcccacacctatcatccc

SEQ ID NO: 57626 - DNA, 343 bp, Homo sapiens
cagcaggctggttgggacccattgagaaggagctggtcagctacaggtaggagcctaaaccttgatcctgtgggcactggggagccaaggagggcttcaagcagaaggaggtgccgtcggctctgtgtgaggctggaaaggaaggtgggcacctgctctcaggcttcacctcctgtttcctttgattcacaggtccgtcagagccgccccacaccttggttgggctccccaggtcccctccaccttggcctgagccagggatgggggtggggaaggctctctgtggccacaacaccgtgcaacacccagggaggaagaggatgtggttgtcagggaaccggct

SEQ ID NO: 57627 - DNA, 300 bp, Homo sapiens
ctgaaactttgtacactttgcccaatacctcccctcctcacagccccacccccagtccctgagagccaggcttggaggagaccaaatgccttgaaatagctggctccagcctttctcttttcctgcttccagccaggtcctggagaactcaaatctcgctgatttgggatactacaaatccatgcacttttccatgccagttcttactcaaactcaggggttctcaacctcggcactcgatattttggtggagatatttctttgccggtgaactcttgttttctgcctggtgcctctcag

SEQ ID NO: 57628 - DNA, 3658 bp, Homo sapiens
agcggttgagtaaccaagataattattttcccccttgctctctatattaatacgtagctataaagcaacagttggttttcttatcctttgataaaagcatcccataaaatataaagtagtaagttaacatagtattattgtcacacacaatgctttttttggttaaatgttgatacgaagcaatgttttggaattactttaattgatggagtagtggtggtagagagaaattaataacaaaaagagtgaaaatattttaattagcagtagatggtgctactggctttcatttgctgacttgattattccctttctcttaaaaaccatggcattagactgcactaaattaacaagcatgttagttgctggtagaggttttggaggttaatttaccttaaattggaagacttttaattgcagtctctttctaccttccctctgttagtcatttgtaaattctaaatggtcaccataaaatgtattaggtaggagaagatacgttttatgtataatatatctcagactgagttactgcctgtcttatcaggatggataaaacactacagtctcttatcaggaaatagagatgatgtggatatttatatattacatatataaccaccagactccattttatatattagcattttccttgcttatgggaaaatagcaaaacaacatttcatttatactttgtttacccctctctgagacaggtttgataaccactgaaatggtagaatatgtgagatacaaatattgagttgtagaactttctttttaaggtgaataagtcatgccttaacatccaaataagagttcatcttcagagtggttcttttgggagcactgtttattccagctatactgcaaaagtataatgtttttggaactgttctagagcataccatgaaaagcagtttgttattatgcaggaaaatcagtttcatcattttagttacactaaacacttttggcagcttaatatgacctttttaaattttttttattttttttatttttatttctttaagatggagtcttgctctgttgcccgggctggagtacaatggcatgatctcagctcactgcaacctccacctcctgggttcaagcatttctcctgcctcagcctcccaagtagctgggattacaggcagcaccacacctggctaattttcatatttttagtagagatggggtttcaacatattggccaggctggtctcaaactcctgacctcaagtgatccgccctccccagcctcccaaagtgctgggattacaggtgtgagccaccacagccagccagtatgacctatcttaatcatcagctcaactgtaatttaaatttggctgttctctggagctaaaccattagggaagttcaaaggaatgtgccatgatttccgaatttgcacaagagaatgttttaagcattggtagcatcattgaataaaagaatagtttcctgatgtcactattttgaagtggaaattatcacttggatgtggaggttttactttttaaaaacattcagcttaattaccttaccttaattaccttagttagatatactaatggaaaaaaaccaagtcctttctctagaacttgttttctatttttgttccttttcatgaaaacttctcaatttaattttaactactgtaggatagtattgattgaatggatactatggaaaagtggatccaatatttaagatagaagtagtttaaggagacaacagcctttactgccatttttttttaaatgttttcactcagatgaacaatttgactttaataaaagactggagatttttgtacaaagaaataggaataagtttcatatactaattatgctgagttttaagcctacatatcacaaaatatttagaattgtataaccttttcatatatttataacttttaatgtctttttaaaagatgtgggaccaaaaatatatttataatttggaaatgtgactgcataccaataagaaaacttaccttattttgaaatttatctgggatattaaagaatctaccaattcttaaaaacacagatttatactttaagcttattttaaaattaaagaatatataccaattcttagaaacactttaaggactactcttaaataacttaaatatcagagttttgttgtaatattaaaatttaccatggaaatcactgttgttcagctatcaccttaattgtgtatgatatgataaatgtttagcagtaaagctatcttaagatttaatggaaaagtttaatttgaagatgtaacaaaaattctgaccacagttgattctgaatttttaaggctttcctaataggctgatcacagagaataatccattttgaaggtataaaactgcactgtatgtctgtcacttgtagctgaactgattcacattttgacaaaagagagaaaatacaaaaatgagttttgcaaatgtaataactttttctgcatatagaactaaataattgaaaaatatgggctatagttctcaaaggtagatagtaaaatcactggctttttccagctgtatgtttttccactgtgcgtgtacacacacactggaaaataattaggctgattttgcaggtcttcattgttagagattctgaagtatttactgtcaattcataggtttcagtttatttaggaaattagtgtttgacagctttttttaaattatttcactgaagctgagattattagtgatacaaagttaaaatttcaatatttaatttctctatatattattaatattaaattgttttttacttataaattcatgttctcatctgatttaatattaaatttgtataggtgggcgtttcttaccattttgcacaagtttttgtttttctgaaatacttaattgtgcaggttgtaaaaaagattagtgcattttcattttaaggatgctttgctccttaaattgttcgacagaaatgactttttagggaaagtagtttttttggagctactaacttgtatttattattgtacatgcataaccagggtggtgagggcactaatcttgtaggaaacacttacttgatgttttatttgaacttttcctataggtttaacttttactgcatagaattaacactaggaacagtgtcatgaaatctgggttgaaggagaatacagtatatatgagaacacttaaagttcaaatagaaatcatttctgaagacaaaagcagaggaatattgtcagtgccaagtaatggaagaataagggcggcatttacactgtgcaagtattgagaagagtgcataaagacagggaactactctcatggagacagtttctctcttataatcaagtaactagaaggggaaaaatcatctaagttatgaaatccaacataggcgctatattacaaactgtgccggattatgcaaattgtagttgttactgatcaaagtttaattgcttcatttttgtttaaaaagggatactgatgtcagaaaatctgtaatatgttttattcaaaagatgtaaataatgtatacagacttgtatgtgatgggatgggaaatatttaaattctaggtgtttttttttttttaaagaagaaactcaatgtttataagaaaaaaatgaataaatagttacgtttggccatgaa

SEQ ID NO: 57629 - DNA, 3693 bp, Homo sapiens
agcggttgagtaaccaagataattattttcccccttgctctctatattaatacgtagctataaagcaacagttggttttcttatcctttgataaaagcatcccataaaatataaagtagtaagttaacatagtattattgtcacacacaatgctttttttggttaaatgttgatacgaagcaatgttttggaattactttaattgatggagtagtggtggtagagagaaattaataacaaaaagagtgaaaatattttaattagcagtagatggtgctactggctttcatttgctgacttgattattccctttctcttaaaaaccatggcattagactgcactaaattaacaagcatgttagttgctggtagaggttttggaggttaatttaccttaaattggaagacttttaattgcagtctctttctaccttccctctgttagtcatttgtaaattctaaatggtcaccataaaatgtattaggtaggagaagatacgttttatgtataatatatctcagactgagttactgcctgtcttatcaggatggataaaacactacagtctcttatcaggaaatagagatgatgtggatatttatatattacatatataaccaccagactccattttatatattagcattttccttgcttatgggaaaatagcaaaacaacatttcatttatactttgtttacccctctctgagacaggtttgataaccactgaaatggtagaatatgtgagatacaaatattgagttgtagaactttctttttaaggtgaataagtcatgccttaacatccaaataagagttcatcttcagagtggttcttttgggagcactgtttattccagctatactgcaaaagtataatgtttttggaactgttctagagcataccatgaaaagcagtttgttattatgcaggaaaatcagtttcatcattttagttacactaaacacttttggcagcttaatatgacctttttaaattttttttattttttttatttttatttctttaagatggagtcttgctctgttgcccgggctggagtacaatggcatgatctcagctcactgcaacctccacctcctgggttcaagcatttctcctgcctcagcctcccaagtagctgggattacaggcagcaccacacctggctaattttcatatttttagtagagatggggtttcaacatattggccaggctggtctcaaactcctgacctcaagtgatccgccctccccagcctcccaaagtgctgggattacaggtgtgagccaccacagccagccagtatgacctatcttaatcatcagctcaactgtaatttaaatttggctgttctctggagctaaaccattagggaagttcaaaggaatgtgccatgatttccgaatttgcacaagagaatgttttaagcattggtagcatcattgaataaaagaatagtttcctgatgtcactattttgaagtggaaattatcacttggatgtggaggttttactttttaaaaacattcagcttaattaccttaccttaattaccttagttagatatactaatggaaaaaaaccaagtcctttctctagaacttgttttctatttttgttccttttcatgaaaacttctcaatttaattttaactactgtaggatagtattgattgaatggatactatggaaaagtggatccaatatttaagatagaagtagtttaaggagacaacagcctttactgccatttttttttaaatgttttcactcagatgaacaatttgactttaataaaagactggagatttttgtacaaagaaataggaataagtttcatatactaattatgctgagttttaagcctacatatcacaaaatatttagaattgtataaccttttcatatatttataacttttaatgtctttttaaaagatgtgggaccaaaaatatatttataatttggaaatgtgactgcataccaataagaaaacttaccttattttgaaatttatctgggatattaaagaatctaccaattcttaaaaacacagatttatactttaagcttattttaaaattaaagaatatataccaattcttagaaacactttaaggactactcttaaataacttaaatatcagagttttgttgtaatattaaaatttaccatggaaatcactgttgttcagctatcaccttaattgtgtatgatatgataaatgtttagcagtaaagctatcttaagatttaatggaaaagtttaatttgaagatgtaacaaaaattctgaccacagttgattctgaatttttaaggctttcctaataggctgatcacagagaataatccattttgaaggtataaaactgcactgtatgtctgtcacttgtagctgaactgattcacattttgacaaaagagagaaaatacaaaaatgagttttgcaaatgtaataactttttctgcatatagaactaaataattgaaaaatatgggctatagttctcaaaggtagatagtaaaatcactggctttttccagctgtatgtttttccactgtgcgtgtacacacacactggaaaataattaggctgattttgcaggtcttcattgttagagattctgaagtatttactgtcaattcataggtttcagtttatttaggaaattagtgtttgacagctttttttaaattatttcactgaagctgagattattagtgatacaaagttaaaatttcaatatttaatttctctatatattattaatattaaattgttttttacttataaattcatgttctcatctgatttaatattaaatttgtataggtgggcgtttcttaccattttgcacaagtttttgtttttctgaaatacttaattgtgcaggttgtaaaaaagattagtgcattttcattttaaggatgctttgctccttaaattgttcgacagaaatgactttttagggaaagtagtttttttggagctactaacttgtatttattattgtacatgcataaccagggtggtgagggcactaatcttgtaggaaacacttacttgatgttttatttgaacttttcctataggtttaacttttactgcatagaattaacactaggaacagtgtcatgaaatctgggttgaaggagaatacagtatatatgagaacacttaaagttcaaatagaaatcatttctgaagacaaaagcagaggaatattgtcagtgccaagtaatggaagaataagggcggcatttacactgtgcaagtattgagaagagtgcataaagacagggaactactctcatggagacagtttctctcttataatcaagtaactagaaggggaaaaatcatctaagttatgaaatccaacataggcgctatattacaaactgtgccggattatgcaaattgtagttgttactgatcaaagtttaattgcttcatttttgtttaaaaagggatactgatgtcagaaaatctgtaatatgttttattcaaaagatgtaaataatgtatacagacttgtatgtgatgggatgggaaatatttaaattctaggtgtttttttttttttaaagaagaaactcaatgtttataagaaaaaaatgaataaatagttacgtttggccatgaaaaaaagtcgacgcggccgcgaatttagtagtagta

SEQ ID NO: 57630 - DNA, 531 bp, Homo sapiens
gctggcccagttctgcagccctcataaaatacacccatgtcggtcgggcgtcgctgcccggcgcactgccttgcagcagggaccttttcgagcttattttcttcggtaggaaacacgaaaactagccactgccccgtcgtgttttttccttgcgtaaaagaaaggggctccttactacaggtcggccaccggctcttcaggtacagagatctgaacttggaaagacctgcctttctaaagggagtgataatgaacactgcggcgtaagtgtcccaggatttaaaaccgaaactccaacaaaaaaaaattttttaaactctgctactagcaagagcacattgtgtaaaacactgacacgggacatggtttaaacatgtcaacattttctaacattgggatgaagtggtgtctacctcccgtcccgtgaagcgtcagggcaccgaccacacggacccccctccgtggagctcacggccctgtgctcagctctgctaagaccagcgagttttccagagctgggggagcccggtt

SEQ ID NO: 57631 - DNA, 191 bp, Homo sapiens
agagtcatcctaacccctaggacctagtgacaggggcaaagttggagtaattaatttagaagggggctgactggttttccacctctccaattacacatatttgatttgcctatcctgtctgacgttttaattgttagtttatactggtttaatctgaaatatttaagtatatttgctttgataatcttaac

SEQ ID NO: 57632 - DNA, 1528 bp, Homo sapiens
gcgcaggcgcagtctccgcgtgcgcgcctcgccggcgcctccatcccggatccttgctgcagcgtcagcgccgccgcccgtgcctttcctcttcctcctcctcctccttggcatccgcctcttcttcctcctgcgtcctcccccgctgcctccgctgctcccgacgcggagcccggagcccgcgccgagcccctggcctcgcggtgccatgctgccccggcggcggcgctgaaggatggcgacgccgctgcctccgccctccccgcggcacctgcggctgctgcggctgctgctctccggcctcgtcctcggcgccgccctgcgtggagccgccgccggccacccggatgtagccgcctgtcccgggagcctggactgtgccctgaagaggcgggcaaggtgtcctcctggtgcacatgcctgtgggccctgccttcagcccttccaggaggaccagcaagggctctgtgtgcccaggatgcgccggcctccaggcgggggccggccccagcccagactggaagatgagattgacttcctggcccaggagcttgcccggaaggagtctggacactcaactccgcccctacccaaggaccgacagcggctcccggagcctgccaccctgggcttctcggcacgggggcaggggctggagctggggcctcccctccactccagggaacccccacgcccacgccccacacctccctgggctcccctgtgtcatccgacccggtgcacatgtcgcccctggagccccggggagggcaaggcgacggcctcgcccttgtgctgatcctggcgttctgtgtggccggtgcagccgccctctccgtagcctccctctgctggtgcaggctgcagcgtgagatccgcctgactcagaaggccgactacgccactgcgaaggcccctggctcacctgcagctccccggatctcgcctggggaccagcggctggcacagagcgcggagatgtaccactaccagcaccaacggcaacagatgctgtgcctggagcggcataaagagccacccaaggagctggacacggcctcctcggatgaggagaatgaggacggagacttcacggtgtacgagtgcccgggcctggccccgaccggggaaatggaggtgcgcaaccctctgttcgaccacgccgcactgtccgcgcccctgccggcccccagctcaccgcctgcactgccatgacctggaggcagacagacgcccacctgctccccgacctcgaggcccccggggaggggcagggcctggagcttcccactaaaaacatgttttgatgctgtgtgcttttggctgggcctcgggctccaggccctgggaccccttgccagggagacccccgaacctttgtgccaggacacctcctggtcccctgcacctctcctgttcggtttagacccccaaactggagggggcatggagaaccgtagagcgcaggaacgggtgggtaattctagagacaaaagccaattaaagtccatttcagacctgcggcttc

SEQ ID NO: 57633 - DNA, 337 bp, Homo sapiens
gcctactactactaaattctcccccctcgacgcagacagacgcccacctgctccccgacctcgaggcccccggggaggggcagggcctggagcttcccactaaaaacatgttttgatgctgtgtgcttttggctgggcctcgggctccaggccctgggaccccttgccagggagacccccgaacctttgtgccaggacacctcctggtcccctgcacctctcctgttcggtttagacccccaaactggagggggcatggagaaccgtagagcgcaggaacgggtgggtaattctagagacaaaagccaattaaagtccatttcagacctgcggcttc

SEQ ID NO: 57634 - DNA, 671 bp, Homo sapiens
gggtcggggcctcagtgctgctctgcctgtcctcacgccttgggtggcgctgggcaccggccttgtgcgccatggtgggcgctgaagttctgggggcacttatggcgcaggctcggggtgctgttctagcttcaataggagggagactgttgcagcctcagagcctccgcctgcatcccctgccctcgagggcactggcattctgtctttgggactgagggctgcaggtggactccggaggagggtgataagcccagggtcctgggacaccctctcacctgcacagatgggtcctgagggtccagagagcagagctccctgcaggaacccaggatgcaaagctgacgtttttctggggggactgaactgggagactttgcgactgcattcgtacagtactcctggcagccctgcagaagaggtgctgtgagcccgttttacaggcaaggaatccgaggcatggagaagttaagtggattgtggcacagctgaggcgctgtcctgggcagcctggttctgtgtgtgtggcctcaaggggccagagtgaggccggcttcctcctgggctcagtgcccctggatgggaggtgggcatgaacaggactggcacccaccacccacccgggctcagcacagcagctgcagccccgtttcacatgaatagcgcatcgc

SEQ ID NO: 57635 - DNA, 1469 bp, Homo sapiens
cgctggtactggtctggagtttttgggatctcttcctcctcctcctccttggcatccgcctcttcttcctcctgcgtcctcccccgctgcctccgctgctcccgacgcggagcccggagcccgcgccgagcccctggcctcgcggtgccatgctgccccggcggcggcgctgaaggatggcgacgccgctgcctccgccctccccgcggcacctgcggctgctgcggctgctgctctccggcctcgtcctcggcgccgccctgcgtggagccgccgccggccacccggatgtagccgcctgtcccgggagcctggactgtgccctgaagaggcgggcaaggtgtcctcctggtgcacatgcctgtgggccctgccttcagcccttccaggaggaccagcaagggctctgtgtgcccaggatgcgccggcctccaggcgggggccggccccagcccagactggaagatgagattgacttcctggcccaggagcttgcccggaaggagtctggacactcaactccgcccctacccaaggaccgacagcggctcccggagcctgccaccctgggcttctcggcacgggggcaggggctggagctggggcctcccctccactccagggaacccccacgcccacgccccacacctccctgggctcccctgtgtcatccgacccggtgcacatgtcgcccctggagccccggggagggcaaggcgacggcctcgcccttgtgctgatcctggcgttctgtgtggccggtgcagccgccctctccgtagcctccctctgctggtgcaggctgcagcgtgagatccgcctgactcagaaggccgactacgccactgcgaaggcccctggctcacctgcagctccccggatctcgcctggggaccagcggctggcacagagcgcggagatgtaccactaccagcaccaacggcaacagatgctgtgcctggagcggcataaagagccacccaaggagctggacacggcctcctcggatgaggagaatgaggacggagacttcacggtgtacgagtgcccgggcctggccccgaccggggaaatggaggtgcgcaaccctctgttcgaccacgccgcactgtccgcgcccctgccggcccccagctcaccgcctgcactgccatgacctggaggcagacagacgcccacctgctccccgacctcgaggcccccggggaggggcagggcctggagcttcccactaaaaacatgttttgatgctgtgtgcttttggctgggcctcgggctccaggccctgggaccccttgccagggagacccccgaacctttgtgccaggacacctcctggtcccctgcacctctcctgttcggtttagacccccaaactggagggggcatggagaaccgtagagcgcaggaacgggtgggtaattctagagacaaaagccaattaaagtccatttcagacctgcggcttc

SEQ ID NO: 57636 - DNA, 3554 bp, Homo sapiens
gggtcggggcctcagtgctgctctgcctgtcctcacgccttgggtggcgctgggcaccggccttgtgcgccatggtgggcgctgaagttctgggggcacttatggcgcaggctcggggtgctgttctagcttcaataggagggagactgttgcagcctcagagcctccgcctgcatcccctgccctcgagggcactggcattctgtctttgggactgagggctgcaggtggactccggaggagggtgataagcccagggtcctgggacaccctctcacctgcacagatgggtcctgagggtccagagagcagagctccctgcaggaacccaggatgcaaagctgacgtttttctggggggactgaactgggagactttgcgactgcattcgtacagtactcctggcagccctgcagaagaggtgctgtgagcccgttttacaggcaaggaatccgaggcatggagaagttaagtggattgtggcacagctgaggcgctgtcctgggcagcctggttctgtgtgtgtggcctcaaggggccagagtgaggccggcttcctcctgggctcagtgcccctggatgggaggtgggcatgaacaggagaggcttccgagaatcagagtgtgctcagccaggaaaggcggaggccacctattcaggaaacggggctgcagctgctgtgctgagcccgggtgggtggcgggtgccagtcctcagttcaccggcctctgcagcttcgtgtctgcctcaccgggagacctggcagggccctccctaggcaactcctcccattcccagtgcccagtgcttggaagggagggccctcaggcagcccagacgttggcgggtggaggggggtgtgccagccaccgtccagctgctcttgttcctgcgacctcttttcaggaggaggaagtgggggatggaggctcctgggctggggaaaagggctaggaggggcctggaacccagaccctagagccagctttgtacctcaggcccctgcctttggcgtggtggacggtggggtatcagcacaggagcggggactgcctcactccccaggtgccaagttggcgggtgggcccaggtggacctgctggcacaggtttaatgtttaacgtgcccaagtcccggcccactgatactggaggctgctgccccaggttgtggagggtgtgcggtgcctggcgttggctcctgtgcccacctgccactgcggctgctggaactgccttgaaggaaggcggacagcctgagggccctgagtgtcaggttaccaaggaaaccaagccagccaaccaaggtctggagaaggatgatgccccgtgtggcccccgtggccctgcctgcagtgtgcagtgtggggctgggcagagaggaagagtcctggttagccagaggtgccaccgcagactccccaggcagggttgatggccctgctggggttcccctggctccactggcttgctgtgactggggacattccttagctttgaggcaactcagctatatcccagaggggaaactgaggcagagggccattgccccctcgccccgttctccagcaccaggataagactgattagccacatgtgtcagctggcaccgtggcctgggcccctcatcagcgagatgaaagtgtggttaggaactagggaactagggcctggcctgccatccccagcactgccaacctcggcctcctgaggccctcgggtgccacctggcccctgactgcagcccctggtgtggtggctttgggagtgacctgcctgggttctgtgtctgaggccagtgaggtcagcagactccatcttaggtgtcctcggtgcctgggggacaagccagaggctggaggagcagcatcccttccaggctgcacacttgtcagtgccgggttctggggagagccgcacgggaaggagaggtcgctggcggcatcgtttgctgctccccagagacagacctgggcccttccctctgggactcccaatctggacggggttcctggcttgctgtggggcatgttgaggccggaggctgggcttgtggggctgcacggccctgcccaggagaactcagcactgcctggacggtgaggctcagcttctgagctgagggctctatcaggcctggaagtggaccctggggaggggtggggcagggtagttctgataagtcctaggactgttcgcttccgggttctgagccctggcgtcagggaggaagggcatgtccagaacaatggccagaaccaggcccggccagctcggggggtgacgggggcgggtggctggggcagcgctgccgtgtgcaggggccgagccctgcggggccgtgagccggccctgccttctgcttccttcccagatgtagccgcctgtcccgggagcctggactgtgccctgaagaggcgggcaaggtgtcctcctggtgcacatgcctgtgggccctgccttcagcccttccaggaggaccagcaagggctctgtgtgcccaggatgcgccggcctccaggcgggggccggccccagcccagactggaagatgagattgacttcctggcccaggagcttgcccggaaggagtctggacactcaactccgcccctacccaaggaccgacagcggctcccggagcctgccaccctgggcttctcggcacgggggcaggggctggagctggggcctcccctccactccagggaacccccacgcccacgccccacacctccctgggctcccctgtgtcatccgacccggtgcacatgtcgcccctggagccccggggagggcaaggcgacggcctcgcccttgtgctgatcctggcgttctgtgtggccggtgcagccgccctctccgtagcctccctctgctggtgcaggctgcagcgtgagatccgcctgactcagaaggccgactacgccactgcgaaggcccctggctcacctgcagctccccggatctcgcctggggaccagcggctggcacagagcgcggagatgtaccactaccagcaccaacggcaacagatgctgtgcctggagcggcataaagagccacccaaggagctggacacggcctcctcggatgaggagaatgaggacggagacttcacggtgtacgagtgcccgggcctggccccgaccggggaaatggaggtgcgcaaccctctgttcgaccacgccgcactgtccgcgcccctgccggcccccagctcaccgcctgcactgccatgacctggaggcagacagacgcccacctgctccccgacctcgaggcccccggggaggggcagggcctggagcttcccactaaaaacatgttttgatgctgtgtgcttttggctgggcctcgggctccaggccctgggaccccttgccagggagacccccgaacctttgtgccaggacacctcctggtcccctgcacctctcctgttcggtttagacccccaaactggagggggcatggagaaccgtagagcgcaggaacgggtgggtaattctagagacaaaagccaattaaagtccatttcagacctgcggcttc

SEQ ID NO: 57637 - DNA, 1458 bp, Homo sapiens
gcgcaggcgcagtctccgcgtgcgcgcctcgccggcgcctccatcccggatccttgctgcagcgtcagcgccgccgcccgtgcctttcctcttcctcctcctcctccttggcatccgcctcttcttcctcctgcgtcctcccccgctgcctccgctgctcccgacgcggagcccggagcccgcgccgagcccctggcctcgcggtgccatgctgccccggcggcggcgctgaaggatggcgacgccgctgcctccgccctccccgcggcacctgcggctgctgcggctgctgctctccggcctcgtcctcggcgccgccctgcgtggagccgccgccggccacccggatgtagccgcctgtcccgggagcctggactgtgccctgaagaggcgggcaaggtgtcctcctggtgcacatgcctgtgggccctgccttcagcccttccaggaggaccagcaagggctctgtgtgcccaggatgcgccggcctccaggcgggggccggccccagcccagactggaagatgagattgacttcctggcccaggagcttgcccggaaggagtctggacactcaactccgcccctacccaaggaccgacagcggctcccggagcctgccaccctgggcttctcggcacgggggcaggggctggagctggggcctcccctccactccagggaacccccacgcccacgccccacacctccctgggctccccttgctgatcctggcgttctgtgtggccggtgcagccgccctctccgtagcctccctctgctggtgcaggctgcagcgtgagatccgcctgactcagaaggccgactacgccactgcgaaggcccctggctcacctgcagctccccggatctcgcctggggaccagcggctggcacagagcgcggagatgtaccactaccagcaccaacggcaacagatgctgtgcctggagcggcataaagagccacccaaggagctggacacggcctcctcggatgaggagaatgaggacggagacttcacggtgtacgagtgcccgggcctggccccgaccggggaaatggaggtgcgcaaccctctgttcgaccacgccgcactgtccgcgcccctgccggcccccagctcaccgcctgcactgccatgacctggaggcagacagacgcccacctgctccccgacctcgaggcccccggggaggggcagggcctggagcttcccactaaaaacatgttttgatgctgtgtgcttttggctgggcctcgggctccaggccctgggaccccttgccagggagacccccgaacctttgtgccaggacacctcctggtcccctgcacctctcctgttcggtttagacccccaaactggagggggcatggagaaccgtagagcgcaggaacgggtgggtaattctagagacaaaagccaattaaagtccatttcagacctgcggcttc

SEQ ID NO: 57638 - DNA, 1436 bp, Homo sapiens
gcgcaggcgcagtctccgcgtgcgcgcctcgccggcgcctccatcccggatccttgctgcagcgtcagcgccgccgcccgtgcctttcctcttcctcctcctcctccttggcatccgcctcttcttcctcctgcgtcctcccccgctgcctccgctgctcccgacgcggagcccggagcccgcgccgagcccctggcctcgcggtgccatgctgccccggcggcggcgctgaaggatggcgacgccgctgcctccgccctccccgcggcacctgcggctgctgcggctgctgctctccggcctcgtcctcggcgccgccctgcgtggagccgccgccggccacccggcccttccaggaggaccagcaagggctctgtgtgcccaggatgcgccggcctccaggcgggggccggccccagcccagactggaagatgagattgacttcctggcccaggagcttgcccggaaggagtctggacactcaactccgcccctacccaaggaccgacagcggctcccggagcctgccaccctgggcttctcggcacgggggcaggggctggagctggggcctcccctccactccagggaacccccacgcccacgccccacacctccctgggctcccctgtgtcatccgacccggtgcacatgtcgcccctggagccccggggagggcaaggcgacggcctcgcccttgtgctgatcctggcgttctgtgtggccggtgcagccgccctctccgtagcctccctctgctggtgcaggctgcagcgtgagatccgcctgactcagaaggccgactacgccactgcgaaggcccctggctcacctgcagctccccggatctcgcctggggaccagcggctggcacagagcgcggagatgtaccactaccagcaccaacggcaacagatgctgtgcctggagcggcataaagagccacccaaggagctggacacggcctcctcggatgaggagaatgaggacggagacttcacggtgtacgagtgcccgggcctggccccgaccggggaaatggaggtgcgcaaccctctgttcgaccacgccgcactgtccgcgcccctgccggcccccagctcaccgcctgcactgccatgacctggaggcagacagacgcccacctgctccccgacctcgaggcccccggggaggggcagggcctggagcttcccactaaaaacatgttttgatgctgtgtgcttttggctgggcctcgggctccaggccctgggaccccttgccagggagacccccgaacctttgtgccaggacacctcctggtcccctgcacctctcctgttcggtttagacccccaaactggagggggcatggagaaccgtagagcgcaggaacgggtgggtaattctagagacaaaagccaattaaagtccatttcagacctgcggcttc

SEQ ID NO: 57639 - DNA, 1616 bp, Homo sapiens
gcgcaggcgcagtctccgcgtgcgcgcctcgccggcgcctccatcccggatccttgctgcagcgtcagcgccgccgcccgtgcctttcctcttcctcctcctcctccttggcatccgcctcttcttcctcctgcgtcctcccccgctgcctccgctgctcccgacgcggagcccggagcccgcgccgagcccctggcctcgcggtgccatgctgccccggcggcggcgctgaaggatggcgacgccgctgcctccgccctccccgcggcacctgcggctgctgcggctgctgctctccggcctcgtcctcggcgccgccctgcgtggagccgccgccggccacccggatgtagccgcctgtcccgggagcctggactgtgccctgaagaggcgggcaaggtgtcctcctggtgcacatgcctgtgggccctgccttcagcccttccaggaggaccagcaagggctctgtgtgcccaggatgcgccggcctccaggcgggggccggccccagcccagactggaagatgagattgacttcctggcccaggagcttgcccggaaggagtctggacactcaactccgcccctacccaaggaccgacagcggctcccggagcctgccaccctgggcttctcggcacgggggcaggggctggagctggggcctcccctccactccagggaacccccacgcccacgccccacacctccctgggctcccctgtgtcatccgacccggtgcacatgtcgcccctggagccccggggagggcaaggcgacggcctcgcccttgtgctgatcctggcgttctgtgtggccggtgcagccgccctctccgtagcctccctctgctggtgcaggctgcagcgtgagatccgcctgactcagaaggccgactacgccactgcgaaggcccctggctcacctgcagctccccggatctcgcctggggaccagcggctggcacagagcgcggagatgtaccactaccagcaccaacggcaacagatgctgtgcctggagcgggctgaggtgggctgagtgcccacttccagactgggccactggcacctcgagggcatggggaggacccagcgatccccccccacccaggcataaagagccacccaaggagctggacacggcctcctcggatgaggagaatgaggacggagacttcacggtgtacgagtgcccgggcctggccccgaccggggaaatggaggtgcgcaaccctctgttcgaccacgccgcactgtccgcgcccctgccggcccccagctcaccgcctgcactgccatgacctggaggcagacagacgcccacctgctccccgacctcgaggcccccggggaggggcagggcctggagcttcccactaaaaacatgttttgatgctgtgtgcttttggctgggcctcgggctccaggccctgggaccccttgccagggagacccccgaacctttgtgccaggacacctcctggtcccctgcacctctcctgttcggtttagacccccaaactggagggggcatggagaaccgtagagcgcaggaacgggtgggtaattctagagacaaaagccaattaaagtccatttcagacctgcggcttc

SEQ ID NO: 57640 - DNA, 1405 bp, Homo sapiens
gcgcaggcgcagtctccgcgtgcgcgcctcgccggcgcctccatcccggatccttgctgcagcgtcagcgccgccgcccgtgcctttcctcttcctcctcctcctccttggcatccgcctcttcttcctcctgcgtcctcccccgctgcctccgctgctcccgacgcggagcccggagcccgcgccgagcccctggcctcgcggtgccatgctgccccggcggcggcgctgaaggatggcgacgccgctgcctccgccctccccgcggcacctgcggctgctgcggctgctgctctccggcctcgtcctcggcgccgccctgcgtggagccgccgccggccacccggatgtagccgcctgtcccgggagcctggactgtgccctgaagaggcgggcaaggtgtcctcctggtgcacatgcctgtgggccctgccttcagcccttccaggaggaccagcaagggctctgtgtgcccaggatgcgccggcctccaggcgggggccggccccagcccagactggaagatgagattgacttcctggcccaggagcttgcccggaaggagtctggacactcaactccgcccctacccaaggaccgacagcggctcccggagcctgccaccctgggcttctcggcacgggggcaggggctggagctggggcctccctgctgatcctggcgttctgtgtggccggtgcagccgccctctccgtagcctccctctgctggtgcaggctgcagcgtgagatccgcctgactcagaaggccgactacgccactgcgaaggcccctggctcacctgcagctccccggatctcgcctggggaccagcggctggcacagagcgcggagatgtaccactaccagcaccaacggcaacagatgctgtgcctggagcggcataaagagccacccaaggagctggacacggcctcctcggatgaggagaatgaggacggagacttcacggtgtacgagtgcccgggcctggccccgaccggggaaatggaggtgcgcaaccctctgttcgaccacgccgcactgtccgcgcccctgccggcccccagctcaccgcctgcactgccatgacctggaggcagacagacgcccacctgctccccgacctcgaggcccccggggaggggcagggcctggagcttcccactaaaaacatgttttgatgctgtgtgcttttggctgggcctcgggctccaggccctgggaccccttgccagggagacccccgaacctttgtgccaggacacctcctggtcccctgcacctctcctgttcggtttagacccccaaactggagggggcatggagaaccgtagagcgcaggaacgggtgggtaattctagagacaaaagccaattaaagtccatttcagacctgcggcttc

SEQ ID NO: 57641 - DNA, 1565 bp, Homo sapiens
gcgcaggcgcagtctccgcgtgcgcgcctcgccggcgcctccatcccggatccttgctgcagcgtcagcgccgccgcccgtgcctttcctcttcctcctcctcctccttggcatccgcctcttcttcctcctgcgtcctcccccgctgcctccgctgctcccgacgcggagcccggagcccgcgccgagcccctggcctcgcggtgccatgctgccccggcggcggcgctgaaggatggcgacgccgctgcctccgccctccccgcggcacctgcggctgctgcggctgctgctctccggcctcgtcctcggcgccgccctgcgtggagccgccgccggccacccggatgtagccgcctgtcccgggagcctggactgtgccctgaagaggcgggcaaggtgtcctcctggtgcacatgcctgtgggccctgccttcagcccttccaggaggaccagcaagggctctgtgtgcccaggatgcgccggcctccaggcgggggccggccccagcccagactggaagatgagattgacttcctggcccaggagcttgcccggaaggagtctggacactcaactccgcccctacccaaggaccgacagcggctcccggagcctgccaccctgggcttctcggcacgggggcaggggctggagctggggcctcccctccactccagggaacccccacgcccacgccccacacctccctgggctcccctgtgtcatccgacccggtgcacatgtcgcccctggagccccggggagggcaaggcgacggcctcgcccttgtgctgatcctggcgttctgtgtggccggtgcagccgccctctccgtagcctccctctgctggtgcaggctgcagcgtgagatccgcctgactcagaaggccgactacgccactgcgaaggcccctggctcacctgcagctccccggatctcgcctggggaccagcggctggcacagagcgcggagatgtaccactaccagcaccaacggcaacagatgctgtgcctggagcggcataaagagccacccaaggagctggacacggcctcctcggatgaggagaatgaggacggagacttcacggtgtacgagtgcccgggcctggccccgaccggggaaatggaggtgcgcaaccctctgttcgaccacgccgcactgtccgcgcccctgccggcccccagctcaccgcctgcactgccatgacctggaggcagacagacgcccacctgctccccgacctcgaggcccccggggaggggcagggcctggagcttcccactaaaaacatgttttgatgctgtgtgcttttggctgggcctcgggctccaggccctgggaccccttgccagggagacccccgaacctttgtgccaggacacctcctggtcccctgcacctctcctgttcggtttagacccccaaactggagggggcatggagaaccgtagagcgcaggaacgggtgggtaattctagagacaaaagccaattaaagtccatttcagacctgcggcttcaaaaaacaaaaaccacacaaaacaaaaaaaaaagggg

SEQ ID NO: 57642 - DNA, 1837 bp, Homo sapiens
gcgcaggcgcagtctccgcgtgcgcgcctcgccggcgcctccatcccggatccttgctgcagcgtcagcgccgccgcccgtgcctttcctcttcctcctcctcctccttggcatccgcctcttcttcctcctgcgtcctcccccgctgcctccgctgctcccgacgcggagcccggagcccgcgccgagcccctggcctcgcggtgccatgctgccccggcggcggcgctgaaggatggcgacgccgctgcctccgccctccccgcggcacctgcggctgctgcggctgctgctctccggcctcgtcctcggcgccgccctgcgtggagccgccgccggccacccggatgtagccgcctgtcccgggagcctggactgtgccctgaagaggcgggcaaggtgtcctcctggtgcacatgcctgtgggccctgccttcagcccttccaggaggaccagcaagggctctgtgtgcccaggatgcgccggcctccaggcgggggccggccccagcccagactggaagatgagattgacttcctggcccaggagcttgcccggaaggagtctggacactcaactccgcccctacccaaggaccgacagcggctcccggagcctgccaccctgggcttctcggcacgggggcaggggctggagctggggcctcccctccactccagggaacccccacgcccacgccccacacctccctgggctcccctgtgtcatccgacccggtgcacatgtcgcccctggagccccggggagggcaaggcgacggcctcgcccttgtgctgatcctggcgttctgtgtggccggtgcagccgccctctccgtagcctccctctgctggtgcaggctgcagcgtgagatccgcctgactcagaaggccgactacgccactgcgaaggcccctggctcacctgcagctccccggatctcgcctggggaccagcggctggcacagagcgcggagatgtaccactaccagcaccaacggcaacagatgctgtgcctggagcggcataaagagccacccaaggagctggacacggcctcctcggatgaggagaatgaggacggagacttcacggtgtacgagtgcccgggcctggccccgaccggggaaatggaggtgcgcaaccctctgttcgaccacgccgcactgtccgcgcccctgccggcccccagctcaccgcctgcactgccatgacctggaggcagacagacgcccacctgctccccgacctcgaggcccccggggaggggcagggcctggagcttcccactaaaaacatgttttgatgctgtgtgcttttggctgggcctcgggctccaggccctgggaccccttgccagggagacccccgaacctttgtgccaggacacctcctggtcccctgcacctctcctgttcggtttagacccccaaactggagggggcatggagaaccgtagagcgcaggaacgggtgggtaattctagagacaaaagccaattaaagtccatttcagacctgcggcttcaaaaaaaaaaaaaaaaaaaaaaaaaaaaaaaaaaaaaaaaacaaacaaaacacaaaaaaaaaaaaacacaaaaaaaaaaaacacacaaaaaaaagcaaacaaataaacgaaaaaaacagagggtcacaacaagagagcaaaaaaaaaacaacgaaaaagaggagggggcagagaaaggaagcacgcaccgagcagcgcagcagcaacgacagaacgcacgacaccaggaagagaagaacagggccggcacccacgagccacgaaaccacaagacgagggggaaccacaaagcgacaaagagagcgcaga

SEQ ID NO: 57643 - DNA, 1469 bp, Homo sapiens
gcgcaggcgcagtctccgcgtgcgcgcctcgccggcgcctccatcccggatccttgctgcagcgtcagcgccgccgcccgtgcctttcctcttcctcctcctcctccttggcatccgcctcttcttcctcctgcgtcctcccccgctgcctccgctgctcccgacgcggagcccggagcccgcgccgagcccctggcctcgcggtgccatgctgccccggcggcggcgctgaaggatggcgacgccgctgcctccgccctccccgcggcacctgcggctgctgcggctgctgctctccggcctcgtcctcggcgccgccctgcgtggagccgccgccggccacccggatgtagccgcctgtcccgggagcctggactgtgccctgaagaggcgggcaaggtgtcctcctggtgcacatgcctgtgggccctgccttcagcccttccaggaggaccagcaagggctctgtgtgcccaggatgcgccggcctccaggcgggggccggccccagcccagactggaagatgagattgacttcctggcccaggagcttgcccggaaggagtctggacactcaactccgcccctacccaaggaccgacagcggctcccggagcctgccaccctgggcttctcggcacgggggcaggggctggagctggggcctcccctccactccagggaacccccacgcccacgccccacacctccctgggctcccctgtgtcatccgacccggtgcacatgtcgcccctggagccccggggagggcaaggcgacggcctcgcccttgtgctgatcctggcgttctgtgtggccggtgcagccgccctctccgtagcctccctctgctggtgcaggctgcagcgtgagatccgcctgactcagaaggccgactacgccactgcgaaggcccctggctcacctgcagctccccggatctcgcctggggaccagcggctggcacagagcgcggagatgtaccactaccagcaccaacggcaacagatgctgtgcctggagcggcataaagagccacccaaggagctggacacggcctcctcggatgaggagaatgaggacggagacttcacggtgtacgagtgcccgggcctggccccgaccggggaaatggaggtgcgcaaccctctgttcgaccacgccgcactgtccgcgcccctgccggcccccagctcaccgcctgcactgccatgacctggaggcagacagacgcccacctgctccccgacctcgaggcccccggggaggggcagggcctggagcttcccactaaaaacatgttttgatgctgtgtgcttttggctgggcctcgggctccaggccctgggaccccttgccagggagacccccgaacctttgtgccaggacacctcctggtcccctgcacctctcctgttcggtttagacccccaaactggagggggagaattaatttaattaaggatcct

SEQ ID NO: 57644 - DNA, 1459 bp, Homo sapiens
gcgcaggcgcagtctccgcgtgcgcgcctcgccggcgcctccatcccggatccttgctgcagcgtcagcgccgccgcccgtgcctttcctcttcctcctcctcctccttggcatccgcctcttcttcctcctgcgtcctcccccgctgcctccgctgctcccgacgcggagcccggagcccgcgccgagcccctggcctcgcggtgccatgctgccccggcggcggcgctgaaggatggcgacgccgctgcctccgccctccccgcggcacctgcggctgctgcggctgctgctctccggcctcgtcctcggcgccgccctgcgtggagccgccgccggccacccggatgtagccgcctgtcccgggagcctggactgtgccctgaagaggcgggcaaggtgtcctcctggtgcacatgcctgtgggccctgccttcagcccttccaggaggaccagcaagggctctgtgtgcccaggatgcgccggcctccaggcgggggccggccccagcccagactggaagatgagattgacttcctggcccaggagcttgcccggaaggagtctggacactcaactccgcccctacccaaggaccgacagcggctcccggagcctgccaccctgggcttctcggcacgggggcaggggctggagctggggcctcccctccactccagggaacccccacgcccacgccccacacctccctgggctcccctgtgtcatccgacccggtgcacatgtcgcccctggagccccggggagggcaaggcgacggcctcgcccttgtgctgatcctggcgttctgtgtggccggtgcagccgccctctccgtagcctccctctgctggtgcaggctgcagcgtgagatccgcctgactcagaaggccgactacgccactgcgaaggcccctggctcacctgcagctccccggatctcgcctggggaccagcggctggcacagagcgcggagatgtaccactaccagcaccaacggcaacagatgctgtgcctggagcggcataaagagccacccaaggagctggacacggcctcctcggatgaggagaatgaggacggagacttcacggtgtacgagtgcccgggcctggccccgaccggggaaatggaggtgcgcaaccctctgttcgaccacacgcccacctgctccccgacctcgaggcccccggggaggggcagggcctggagcttcccactaaaaacatgttttgatgctgtgtgcttttggctgggcctcgggctccaggccctgggaccccttgccagggagacccccgaacctttgtgccaggacacctcctggtcccctgcacctctcctgttcggtttagacccccaaactggagggggcatggagaaccgtagagcgcaggaacgggtgggtaattctagagacaaaagccaattaaagtccatttcagacctgcggcttc

SEQ ID NO: 57645 - DNA, 653 bp, Homo sapiens
  misc_feature (115)..(115): n is a, c, g, or t
tgcttttcccaccacagtgaccgttacttcctccactgaagtcttgaacccctcaaggttacccatgaaggttagaatcaacttcttccaaactccttttcatgttgattcgtcnagcatcatacggcaacagatgctgtgcctggagcggcataaagagccacccaaggagctggacacggcctcctcggatgaggagaatgaggacggagacttcacggtgtacgagtgcccgggcctggccccgaccggggaaatggaggtgcgcaaccctctgttcgaccacgccgcactgtccgcgcccctgccggcccccagctcaccgcctgcactgccatgacctggaggcagacagacgcccacctgctccccgacctcgaggcccccggggaggggcagggcctggagcttcccactaaaaacatgttttgatgctgtgtgcttttggctgggcctcgggctccaggccctgggaccccttgccagggagacccccgaacctttgtgccaggacacctcctggtcccctgcacctctcctgttcggtttagacccccaaactggagggggcatggagaaccgtagagcgcaggaacgggtgggtaattctagagacaaaagccaattaaagtccatttcagacctgcggcttc

SEQ ID NO: 57646 - DNA, 728 bp, Homo sapiens
tttccacctcccctggccaactttaccccaggccctgccaccctcacctgcacgctaaccttcacctcccccgccgccctgcaccctcacctcccctggccaacttcaccctgggctgtgctcccctgccaccccagggctgaggtgggctgagtgcccacttccagactgggccactggcacctcgagggcatggggaggacccagcgatccccccccacccaggcataaagagccacccaaggagctggacacggcctcctcggatgaggagaatgaggacggagacttcacggtgtacgagtgcccgggcctggccccgaccggggaaatggaggtgcgcaaccctctgttcgaccacgccgcactgtccgcgcccctgccggcccccagctcaccgcctgcactgccatgacctggaggcagacagacgcccacctgctccccgacctcgaggcccccggggaggggcagggcctggagcttcccactaaaaacatgttttgatgctgtgtgcttttggctgggcctcgggctccaggccctgggaccccttgccagggagacccccgaacctttgtgccaggacacctcctggtcccctgcacctctcctgttcggtttagacccccaaactggagggggcatggagaaccgtagagcgcaggaacgggtgggtaattctagagacaaaagccaattaaagtccatttcagacctgcggcttc

SEQ ID NO: 57647 - DNA, 593 bp, Homo sapiens
gtcttggtactctgaggatccgcgattaggaataacgcgcggacattttagcataccagcacaacgcgaacagatgctgtgcctggagcggcataaagagccacccaaggagctggacacggcctcctcggatgaggagaatgaggacggagacttcacggtgtacgagtgcccgggcctggccccgaccggggaaatggaggtgcgcaaccctctgttcgaccacgccgcactgtccgcgcccctgccggcccccagctcaccgcctgcactgccatgacctggaggcagacagacgcccacctgctccccgacctcgaggcccccggggaggggcagggcctggagcttcccactaaaaacatgttttgatgctgtgtgcttttggctgggcctcgggctccaggccctgggaccccttgccagggagacccccgaacctttgtgccaggacacctcctggtcccctgcacctctcctgttcggtttagacccccaaactggagggggcatggagaaccgtagagcgcaggaacgggtgggtaattctagagacaaaagccaattaaagtccatttcagacctgcggcttc

SEQ ID NO: 57648 - DNA, 2792 bp, Homo sapiens
gggtcggggcctcagtgctgctctgcctgtcctcacgccttgggtggcgctgggcaccggccttgtgcgccatggtgggcgctgaagttctgggggcacttatggcgcaggctcggggtgctgttctagcttcaataggagggagactgttgcagcctcagagcctccgcctgcatcccctgccctcgagggcactggcattctgtctttgggactgagggctgcaggtggactccggaggagggtgataagcccagggtcctgggacaccctctcacctgcacagatgggtcctgagggtccagagagcagagctccctgcaggaacccaggatgcaaagctgacgtttttctggggggactgaactgggagactttgcgactgcattcgtacagtactcctggcagccctgcagaagaggtgctgtgagcccgttttacaggcaaggaatccgaggcatggagaagttaagtggattgtggcacagctgaggcgctgtcctgggcagcctggttctgtgtgtgtggcctcaaggggccagagtgaggccggcttcctcctgggctcagtgcccctggatgggaggtgggcatgaacaggagaggcttccgagaatcagagtgtgctcagccaggaaaggcggaggccacctattcaggaaacggggctgcagctgctgtgctgagcccgggtgggtggcgggtgccagtcctcagttcaccggcctctgcagcttcgtgtctgcctcaccgggagacctggcagggccctccctaggcaactcctcccattcccagtgcccagtgcttggaagggagggccctcaggcagcccagacgttggcgggtggaggggggtgtgccagccaccgtccagctgctcttgttcctgcgacctcttttcaggaggaggaagtgggggatggaggctcctgggctggggaaaagggctaggaggggcctggaacccagaccctagagccagctttgtacctcaggcccctgcctttggcgtggtggacggtggggtatcagcacaggagcggggactgcctcactccccaggtgccaagttggcgggtgggcccaggtggacctgctggcacaggtttaatgtttaacgtgcccaagtcccggcccactgatactggaggctgctgccccaggttgtggagggtgtgcggtgcctggcgttggctcctgtgcccacctgccactgcggctgctggaactgccttgaaggaaggcggacagcctgagggccctgagtgtcaggttaccaaggaaaccaagccagccaaccaaggtctggagaaggatgatgccccgtgtggcccccgtggccctgcctgcagtgtgcagtgtggggctgggcagagaggaagagtcctggttagccagaggtgccaccgcagactccccaggcagggttgatggccctgctggggttcccctggctccactggcttgctgtgactggggacattccttagctttgaggcaactcagctatatcccagaggggaaactgaggcagagggccattgccccctcgccccgttctccagcaccaggataagactgattagccacatgtgtcagctggcaccgtggcctgggcccctcatcagcgagatgaaagtgtggttaggaactagggaactagggcctggcctgccatccccagcactgccaacctcggcctcctgaggccctcgggtgccacctggcccctgactgcagcccctggtgtggtggctttgggagtgacctgcctgggttctgtgtctgaggccagtgaggtcagcagactccatcttaggtgtcctcggtgcctgggggacaagccagaggctggaggagcagcatcccttccaggctgcacacttgtcagtgccgggttctggggagagccgcacgggaaggagaggtcgctggcggcatcgtttgctgctccccagagacagacctgggcccttccctctgggactcccaatctggacggggttcctggcttgctgtggggcatgttgaggccggaggctgggcttgtggggctgcacggccctgcccaggagaactcagcactgcctggacggtgaggctcagcttctgagctgagggctctatcaggcctggaagtggaccctggggaggggtggggcagggtagttctgataagtcctaggactgttcgcttccgggttctgagccctggcgtcagggaggaagggcatgtccagaacaatggccagaaccaggcccggccagctcggggggtgacgggggcgggtggctggggcagcgctgccgtgtgcaggggccgagccctgcggggccgtgagccggccctgccttctgcttccttcccagatgtagccgcctgtcccgggagcctggactgtgccctgaagaggcgggcaaggtgtcctcctggtgcacatgcctgtgggccctgccttcagcccttccaggaggaccagcaagggctctgtgtgcccaggatgcgccggcctccaggtacgagagcaaagggggaagtcgatggggggatgtccctgcatgaacctctccctgtaagaagcggccggctgggcgcggtggctcatgcctgtaatcccagcactgtgggaggcccaggctgttggatctcatgaggtcaggagttcaagaccagcctggccaacatggtgaaaccccgtctctactaaaaatacaaagtagccgggtgtggtggcacacacctgtagtcccagctactcaggaggctgaggcaggagaattgctttaac

SEQ ID NO: 57649 - DNA, 456 bp, Homo sapiens
ccagcaagtatccccccagcccacccactgcccagcctgacacccacattcgcagaccggggaaatggaggtgcgcaaccctctgttcgaccacgccgcactgtccgcgcccctgccggcccccagctcaccgcctgcactgccatgacctggaggcagacagacgcccacctgctccccgacctcgaggcccccggggaggggcagggcctggagcttcccactaaaaacatgttttgatgctgtgtgcttttggctgggcctcgggctccaggccctgggaccccttgccagggagacccccgaacctttgtgccaggacacctcctggtcccctgcacctctcctgttcggtttagacccccaaactggagggggcatggagaaccgtagagcgcaggaacgggtgggtaattctagagacaaaagccaattaaagtccatttcagacctgcg

SEQ ID NO: 57650 - DNA, 380 bp, Homo sapiens
  misc_feature (10)..(10): n is a, c, g, or t
  misc_feature (23)..(23): n is a, c, g, or t
  misc_feature (28)..(28): n is a, c, g, or t
atagctgtcnagaggatcccggnagcanacggcaacagatgctgtgcctggagcggcataaagagccacccaaggagctggacacggcctcctcggatgaggagaatgaggacggagacttcacggtgtacgagtgcccgggcctggccccgaccggggaaatggaggtgcgcaaccctctgttcgaccacgccgcactgtccgcgcccctgccggcccccagctcaccgcctgcactgccatgacctggaggcagacagacgcccacctgctccccgacctcgaggcccccggggaggggcagggcctggagcttcccactaaaaacatgttttgatgctgacacggggatcctctggaacgactatgaccatgatagt

SEQ ID NO: 57651 - DNA, 1444 bp, Homo sapiens
  misc_feature (16)..(16): n is a, c, g, or t
  misc_feature (23)..(23): n is a, c, g, or t
tcaggctgtacgcccnggagttntgatatgtctaccacgcgctcgcctgcgtcctcccccgctgcctccgctgctcccgacgcggagcccggagcccgcgccgagcccctggcctcgcggtgccatgctgccccggcggcggcgctgaaggatggcgacgccgctgcctccgccctccccgcggcacctgcggctgctgcggctgctgctctccggcctcgtcctcggcgccgccctgcgtggagccgccgccggccacccggatgtagccgcctgtcccgggagcctggactgtgccctgaagaggcgggcaaggtgtcctcctggtgcacatgcctgtgggccctgccttcagcccttccaggaggaccagcaagggctctgtgtgcccaggatgcgccggcctccaggcgggggccggccccagcccagactggaagatgagattgacttcctggcccaggagcttgcccggaaggagtctggacactcaactccgcccctacccaaggaccgacagcggctcccggagcctgccaccctgggcttctcggcacgggggcaggggctggagctggggcctcccctccactccagggaacccccacgcccacgccccacacctccctgggctcccctgtgtcatccgacccggtgcacatgtcgcccctggagccccggggagggcaaggcgacggcctcgcccttgtgctgatcctggcgttctgtgtggccggtgcagccgccctctccgtagcctccctctgctggtgcaggctgcagcgtgagatccgcctgactcagaaggccgactacgccactgcgaaggcccctggctcacctgcagctccccggatctcgcctggggaccagcggctggcacagagcgcggagatgtaccactaccagcaccaacggcaacagatgctgtgcctggagcggcataaagagccacccaaggagctggacacggcctcctcggatgaggagaatgaggacggagacttcacggtgtacgagtgcccgggcctggccccgaccggggaaatggaggtgcgcaaccctctgttcgaccacgccgcactgtccgcgcccctgccggcccccagctcaccgcctgcactgccatgacctggaggcagacagacgcccacctgctccccgacctcgaggcccccggggaggggcagggcctggagcttcccactaaaaacatgttttgatgctgtgtgcttttggctgggcctcgggctccaggccctgggaccccttgccagggagacccccgaacctttgtgccaggacacctcctggtcccctgcacctctcctgttcggtttagacccccaaactggagggggcatggagaaccgtagagcgcaggaacgggtgggtaattctagagacaaaagccaattaaagtccatttcagacctgcggcttc

SEQ ID NO: 57652 - DNA, 2100 bp, Homo sapiens
ggtggcgtttggggtgtagagaaagcacgtatcattatcctttgaggcaactcagctatatcccagaggggaaactgaggcagagggccattgccccctcgccccgttctccagcaccaggataagactgattagccacatgtgtcagctggcaccgtggcctgggcccctcatcagcgagatgaaagtgtggttaggaactagggaactagggcctggcctgccatccccagcactgccaacctcggcctcctgaggccctcgggtgccacctggcccctgactgcagcccctggtgtggtggctttgggagtgacctgcctgggttctgtgtctgaggccagtgaggtcagcagactccatcttaggtgtcctcggtgcctgggggacaagccagaggctggaggagcagcatcccttccaggctgcacacttgtcagtgccgggttctggggagagccgcacgggaaggagaggtcgctggcggcatcgtttgctgctccccagagacagacctgggcccttccctctgggactcccaatctggacggggttcctggcttgctgtggggcatgttgaggccggaggctgggcttgtggggctgcacggccctgcccaggagaactcagcactgcctggacggtgaggctcagcttctgagctgagggctctatcaggcctggaagtggaccctggggaggggtggggcagggtagttctgataagtcctaggactgttcgcttccgggttctgagccctggcgtcagggaggaagggcatgtccagaacaatggccagaaccaggcccggccagctcggggggtgacgggggcgggtggctggggcagcgctgccgtgtgcaggggccgagccctgcggggccgtgagccggccctgccttctgcttccttcccagatgtagccgcctgtcccgggagcctggactgtgccctgaagaggcgggcaaggtgtcctcctggtgcacatgcctgtgggccctgccttcagcccttccaggaggaccagcaagggctctgtgtgcccaggatgcgccggcctccaggcgggggccggccccagcccagactggaagatgagattgacttcctggcccaggagcttgcccggaaggagtctggacactcaactccgcccctacccaaggaccgacagcggctcccggagcctgccaccctgggcttctcggcacgggggcaggggctggagctggggcctcccctccactccagggaacccccacgcccacgccccacacctccctgggctcccctgtgtcatccgacccggtgcacatgtcgcccctggagccccggggagggcaaggcgacggcctcgcccttgtgctgatcctggcgttctgtgtggccggtgcagccgccctctccgtagcctccctctgctggtgcaggctgcagcgtgagatccgcctgactcagaaggccgactacgccactgcgaaggcccctggctcacctgcagctccccggatctcgcctggggaccagcggctggcacagagcgcggagatgtaccactaccagcaccaacggcaacagatgctgtgcctggagcggcataaagagccacccaaggagctggacacggcctcctcggatgaggagaatgaggacggagacttcacggtgtacgagtgcccgggcctggccccgaccggggaaatggaggtgcgcaaccctctgttcgaccacgccgcactgtccgcgcccctgccggcccccagctcaccgcctgcactgccatgacctggaggcagacagacgcccacctgctccccgacctcgaggcccccggggaggggcagggcctggagcttcccactaaaaacatgttttgatgctgtgtgcttttggctgggcctcgggctccaggccctgggaccccttgccagggagacccccgaacctttgtgccaggacacctcctggtcccctgcacctctcctgttcggtttagacccccaaactggagggggcatggagaaccgtagagcgcaggaacgggtgggtaattctagagacaaaagccaattaaagtccatttcagacctgcggcttc

SEQ ID NO: 57653 - DNA, 1378 bp, Homo sapiens
tctacccgagaaggtgcttggaggtggggaagcagaaggggctgtgctggccagccctttatggacatgggttggggcgagagaccccactccttcctccccgtgcccggtctttggacgtttccctagcgcctcctcccttgccctgcctccactttccgggaagcactgcccctcacaggaagcgcccgcgctgtcaccatggcaatctgggagggagagggcctccaggcgtgtacccagtcctcaggctcctgggaggaacctgccagaagcggggaggccgggcctggggctacctcctggacggacccctccacctgatggcccctcaccctccccaggcgggggccggccccagcccagactggaagatgagattgacttcctggcccaggagcttgcccggaaggagtctggacactcaactccgcccctacccaaggaccgacagcggctcccggagcctgccaccctgggcttctcggcacgggggcaggggctggagctggggcctcccctccactccagggaacccccacgcccacgccccacacctccctgggctcccctgtgtcatccgacccggtgcacatgtcgcccctggagccccggggagggcaaggcgacggcctcgcccttgtgctgatcctggcgttctgtgtggccggtgcagccgccctctccgtagcctccctctgctggtgcaggctgcagcgtgagatccgcctgactcagaaggccgactacgccactgcgaaggcccctggctcacctgcagctccccggatctcgcctggggaccagcggctggcacagagcgcggagatgtaccactaccagcaccaacggcaacagatgctgtgcctggagcggcataaagagccacccaaggagctggacacggcctcctcggatgaggagaatgaggacggagacttcacggtgtacgagtgcccgggcctggccccgaccggggaaatggaggtgcgcaaccctctgttcgaccacgccgcactgtccgcgcccctgccggcccccagctcaccgcctgcactgccatgacctggaggcagacagacgcccacctgctccccgacctcgaggcccccggggaggggcagggcctggagcttcccactaaaaacatgttttgatgctgtgtgcttttggctgggcctcgggctccaggccctgggaccccttgccagggagacccccgaacctttgtgccaggacacctcctggtcccctgcacctctcctgttcggtttagacccccaaactggagggggcatggagaaccgtagagcgcaggaacgggtgggtaattctagagacaaaagccaattaaagtccatttcagacctgcggcttc

SEQ ID NO: 57654 - DNA, 1586 bp, Homo sapiens
gcgcaggcgcagtctccgcgtgcgcgcctcgccggcgcctccatcccggatccttgctgcagcgtcagcgccgccgcccgtgcctttcctcttcctcctcctcctccttggcatccgcctcttcttcctcctgcgtcctcccccgctgcctccgctgctcccgacgcggagcccggagcccgcgccgagcccctggcctcgcggtgccatgctgccccggcggcggcgctgaaggatggcgacgccgctgcctccgccctccccgcggcacctgcggctgctgcggctgctgctctccggcctcgtcctcggcgccgccctgcgtggagccgccgccggccacccggatgtagccgcctgtcccgggagcctggactgtgccctgaagaggcgggcaaggtgtcctcctggtgcacatgcctgtgggccctgccttcagcccttccaggaggaccagcaagggctctgtgtgcccaggatgcgccggcctccaggcgggggccggccccagcccagactggaagatgagattgacttcctggcccaggagcttgcccggaaggagtctggacactcaactccgcccctacccaaggaccgacagcggctcccggagcctgccaccctgggcttctcggcacgggggcaggggctggagctggggcctcccctccactccagggaacccccacgcccacgccccacacctccctgggctcccctgtgtcatccgacccggtgcacatgtcgcccctggagccccggggagggcaaggcgacggcctcgcccttgtgctgatcctggcgttctgtgtggccggtgcagccgccctctccgtagcctccctctgctggtgcaggctgcagcgtgagatccgcctgactcagaaggccgactacgccactgcgaaggcccctggctcacctgcagctccccggatctcgcctggggaccagcggctggcacagagcgcggagatgtaccactaccagcaccaacggcaacagatgctgtgcctggagcgactgggccactggcacctcgagggcatggggaggacccagcgatccccccccacccaggcataaagagccacccaaggagctggacacggcctcctcggatgaggagaatgaggacggagacttcacggtgtacgagtgcccgggcctggccccgaccggggaaatggaggtgcgcaaccctctgttcgaccacgccgcactgtccgcgcccctgccggcccccagctcaccgcctgcactgccatgacctggaggcagacagacgcccacctgctccccgacctcgaggcccccggggaggggcagggcctggagcttcccactaaaaacatgttttgatgctgtgtgcttttggctgggcctcgggctccaggccctgggaccccttgccagggagacccccgaacctttgtgccaggacacctcctggtcccctgcacctctcctgttcggtttagacccccaaactggagggggcatggagaaccgtagagcgcaggaacgggtgggtaattctagagacaaaagccaattaaagtccatttcagacctgcggcttc

SEQ ID NO: 57655 - DNA, 1605 bp, Homo sapiens
gcgcaggcgcagtctccgcgtgcgcgcctcgccggcgcctccatcccggatccttgctgcagcgtcagcgccgccgcccgtgcctttcctcttcctcctcctcctccttggcatccgcctcttcttcctcctgcgtcctcccccgctgcctccgctgctcccgacgcggagcccggagcccgcgccgagcccctggcctcgcggtgccatgctgccccggcggcggcgctgaaggatggcgacgccgctgcctccgccctccccgcggcacctgcggctgctgcggctgctgctctccggcctcgtcctcggcgccgccctgcgtggagccgccgccggccacccggatgtagccgcctgtcccgggagcctggactgtgccctgaagaggcgggcaaggtgtcctcctggtgcacatgcctgtgggccctgccttcagcccttccaggaggaccagcaagggctctgtgtgcccaggatgcgccggcctccaggcgggggccggccccagcccagactggaagatgagattgacttcctggcccaggagcttgcccggaaggagtctggacactcaactccgcccctacccaaggaccgacagcggctcccggagcctggtgagacccccgcttcccctgccccacggccctgtccctagcccagtgctctcattctaacctgtcctctctcgcagccaccctgggcttctcggcacgggggcaggggctggagctggggcctcccctccactccagggaacccccacgcccacgccccacacctccctgggctcccctgtgtcatccgacccggtgcacatgtcgcccctggagccccggggagggcaaggcgacggcctcgcccttgtgctgatcctggcgttctgtgtggccggtgcagccgccctctccgtagcctccctctgctggtgcaggctgcagcgtgagatccgcctgactcagaaggccgactacgccactgcgaaggcccctggctcacctgcagctccccggatctcgcctggggaccagcggctggcacagagcgcggagatgtaccactaccagcaccaacggcaacagatgctgtgcctggagcggcataaagagccacccaaggagctggacacggcctcctcggatgaggagaatgaggacggagacttcacggtgtacgagtgcccgggcctggccccgaccggggaaatggaggtgcgcaaccctctgttcgaccacgccgcactgtccgcgcccctgccggcccccagctcaccgcctgcactgccatgacctggaggcagacagacgcccacctgctccccgacctcgaggcccccggggaggggcagggcctggagcttcccactaaaaacatgttttgatgctgtgtgcttttggctgggcctcgggctccaggccctgggaccccttgccagggagacccccgaacctttgtgccaggacacctcctggtcccctgcacctctcctgttcggtttagacccccaaactggagggggcatggagaaccgtagagcgcaggaacgggtgggtaattctagagacaaaagccaattaaagtccatttcagacctgcggcttc

SEQ ID NO: 57656 - DNA, 1524 bp, Homo sapiens
gcgcaggcgcagtctccgcgtgcgcgcctcgccggcgcctccatcccggatccttgctgcagcgtcagcgccgccgcccgtgcctttcctcttcctcctcctcctccttggcatccgcctcttcttcctcctgcgtcctcccccgctgcctccgctgctcccgacgcggagcccggagcccgcgccgagcccctggcctcgcggtgccatgctgccccggcggcggcgctgaaggatggcgacgccgctgcctccgccctccccgcggcacctgcggctgctgcggctgctgctctccggcctcgtcctcggcgccgccctgcgtggagccgccgccggccacccggatgtagccgcctgtcccgggagcctggactgtgccctgaagaggcgggcaaggtgtcctcctggtgcacatgcctgtgggccctgccttcagcccttccaggaggaccagcaagggctctgtgtgcccaggatgcgccggcctccaggcgggggccggccccagcccagactggaagatgagattgacttcctggcccaggagcttgcccggaaggagtctggacactcaactccgcccctacccaaggaccgacagcggctcccggagcctgccaccctgggcttctcggcacgggggcaggggctggagctggggcctcccctccactccagggaacccccacgcccacgccccacacctccctgggctcccctgtgtcatccgacccggtgcacatgtcgcccctggagccccggggagggcaaggcgacggcctcgcccttgtgctgatcctggcgttctgtgtggccggtgcagccgccctctccgtagcctccctctgctggtgcaggctgcagcgtgagatccgcctgactcagaaggccgactacgccactgcgaaggcccctggctcacctgcagctccccggatctcgcctggggaccagcggctggcacagagcgcggagatgtaccactaccagcaccaacggcaacagatgctgtgcctggagcggcataaagagccacccaaggagctggacacggcctcctcggatgaggagaatgaggacggagacttcacggtgtacgagtgcccgggcctggccccgaccggggaaatggaggtgcgcaaccctctgttcgaccacgccgcactgtccgcgcccctgccggcccccagctcaccgcctgcactgccatgacctggaggcagacagacgcccacctgctccccgacctcgaggcccccggggaggggcagggcctggagcttcccactaaaaacatgttttgatgctgtgtgcttttggctgggcctcgggctccaggccctgggaccccttgccagggagacccccgaacctttgtgccaggacacctcctggtcccctgcacctctcctgttcggtttagacccccaaactggagggggcatggagaaccgtagagcgcaggaacgggtggtattttagccaggcccatatatactcgtcgctagtttggttgtgtgg

SEQ ID NO: 57657 - DNA, 761 bp, Homo sapiens
gtgtcgccgaatcgggatctcgcccttgctgatcctggcgttctgtgtggccggtgcagccgccctctccgtagcctccctctgctggtgcaggctgcagcgtgagatccgcctgactcagaaggccgactacgccactgcgaaggcccctggctcacctgcagctccccggatctcgcctggggaccagcggctggcacagagcgcggagatgtaccactaccagcaccaacggcaacagatgctgtgcctggagcggcataaagagccacccaaggagctggacacggcctcctcggatgaggagaatgaggacggagacttcacggtgtacgagtgcccgggcctggccccgaccggggaaatggaggtgcgcaaccctctgttcgaccacgccgcactgtccgcgcccctgccggcccccagctcaccgcctgcactgccatgacctggaggcagacagacgcccacctgctccccgacctcgaggcccccggggaggggcagggcctggagcttcccactaaaaacatgttttgatgctgtgtgcttttggctgggcctcgggctccaggccctgggaccccttgccagggagacccccgaacctttgtgccaggacacctcctggtcccctgcacctctcctgttcggtttagacccccaaactggagggggcatggagaaccgtagagcgcaggaacgggtgggtaattctagagacaaaagccaattaaagtccatttcagacctgcggcttc

SEQ ID NO: 57658 - DNA, 1452 bp, Homo sapiens
gcgcaggcgcagtctccgcgtgcgcgcctcgccggcgcctccatcccggatccttgctgcagcgtcagcgccgccgcccgtgcctttcctcttcctcctcctcctccttggcatccgcctcttcttcctcctgcgtcctcccccgctgcctccgctgctcccgacgcggagcccggagcccgcgccgagcccctggcctcgcggtgccatgctgccccggcggcggcgctgaaggatggcgacgccgctgcctccgccctccccgcggcacctgcggctgctgcggctgctgctctccggcctcgtcctcggcgccgccctgcgtggagccgccgccggccacccggatgtagccgcctgtcccgggagcctggactgtgccctgaagaggcgggcaaggtgtcctcctggtgcacatgcctgtgggccctgccttcagcccttccaggaggaccagcaagggctctgtgtgcccaggatgcgccggcctccaggcgggggccggccccagcccagactggaagatgagattgacttcctggcccaggagcttgcccggaaggagtctggacactcaactccgcccctacccaaggaccgacagcggctcccggagcctgccaccctgggcttctcggcacgggggcaggggctggagctggggcctcccctccactccagggaacccccacgcccacgccccacacctccctgggctcccctgtgtcatccgacccggtgcacatgtcgcccctggagccccggggagggcaaggcgacggcctcgcccttgtgctgatcctggcgttctgtgtggccggtgcagccgccctctccgtagcctccctctgctggtgcaggctgcagcgtgagatccgcctgactcagaaggccgactacgccactgcgaaggcccctggctcacctgcagctccccggatctcgcctggggaccagcggctggcacagagcgcggagatgtaccactaccagcaccaacggcaacagatgctgtgcctggagcggcataaagagccacccaaggagctggacacggcctcctcggatgaggagaatgaggacggagacttcacggtgtacgagtgcccgggcctggccccggtcccacataggccgtctgcaagctgaggagcatggagagccagcccgagtctcaaagctgaacttggagtccgatgttcgagggcaggaagcgtccagcacaggagaaagatgtaggctgggaggcgaggcctgtcgtctccttttcacgtttttctggttgacattcgctggcagctgattagatggtgcccaccagatgaagggtgggtctgccttccgcagcccactgactctagtgttaatctcttttggcaacaccctctcagacacacccagcatcaatactttgtatccttcaatccaattaaattgacagtattaaccatc

SEQ ID NO: 57659 - DNA, 646 bp, Homo sapiens
  misc_feature (10)..(10): n is a, c, g, or t
  misc_feature (23)..(23): n is a, c, g, or t
  misc_feature (28)..(28): n is a, c, g, or t
atagctgtcnagaggatcccggnagcanacggcaacagatgctgtgcctggagcgggctgaggtgggctgagtgcccacttccagactgggccactggcacctcgagggcatggggaggacccagcgatccccccccacccaggcataaagagccacccaaggagctggacacggcctcctcggatgaggagaatgaggacggagacttcacggtgtacgagtgcccgggcctggccccgaccggggaaatggaggtgcgcaaccctctgttcgaccacgccgcactgtccgcgcccctgccggcccccagctcaccgcctgcactgccatgacctggaggcagacagacgcccacctgctccccgacctcgaggcccccggggaggggcagggcctggagcttcccactaaaaacatgttttgatgctgtgtgcttttggctgggcctcgggctccaggccctgggaccccttgccagggagacccccgaacctttgtgccaggacacctcctggtcccctgcacctctcctgttcggtttagacccccaaactggagggggcatggagaaccgtagagcgcaggaacgggtgggtaattctagagacaaaagccaattaaagtccatttcagacctgcggcttc

SEQ ID NO: 57660 - DNA, 558 bp, Homo sapiens
  misc_feature (10)..(10): n is a, c, g, or t
  misc_feature (23)..(23): n is a, c, g, or t
  misc_feature (28)..(28): n is a, c, g, or t
atagctgtcnagaggatcccggnagcanacggcaacagatgctgtgcctggagcggcataaagagccacccaaggagctggacacggcctcctcggatgaggagaatgaggacggagacttcacggtgtacgagtgcccgggcctggccccgaccggggaaatggaggtgcgcaaccctctgttcgaccacgccgcactgtccgcgcccctgccggcccccagctcaccgcctgcactgccatgacctggaggcagacagacgcccacctgctccccgacctcgaggcccccggggaggggcagggcctggagcttcccactaaaaacatgttttgatgctgtgtgcttttggctgggcctcgggctccaggccctgggaccccttgccagggagacccccgaacctttgtgccaggacacctcctggtcccctgcacctctcctgttcggtttagacccccaaactggagggggcatggagaaccgtagagcgcaggaacgggtgggtaattctagagacaaaagccaattaaagtccatttcagacctgcggcttc

SEQ ID NO: 57661 - DNA, 383 bp, Homo sapiens
tagattatttcatgtgttataatactattggggttatgtttttaaaaagtgttatcttttagaaataaagtataaaagtatttgtagctgaagtgataaaatatctgagatttgctttaaaaataatcggggaatgtagatgaagcaagattagccatgtgttaatctttgttgacatggtgggggttcattgtacttttctcaatacttttgaatatatatggaagttttcactgtaaaagttttttaaaaatcacatctcaggccaggcgtggtggcttacgcctgtaatcccagcactttgggaggccgaggcgggcggatcatgaggtcagtagttagagaccagcctgaccaacatggtaaaaccctgtttctactaa

SEQ ID NO: 57662 - DNA, 157 bp, Homo sapiens
cttagatatttgccatctgggcctatacagaataagtttgccagctcctgcagtagaacaacagttctcaaagtgtggtccctgaccagcagcatcagcagtatgtaggaactggttacaaataccaattgtcagatcccacccagaattagacagt

SEQ ID NO: 57663 - DNA, 291 bp, Homo sapiens
gattctcatgcaaaaaatatatatattttctatcaccatcgaactagacactgacttcacagcaagagctactaaagctgcaggttaccattcaagtccccccaagagaaaaataaagtaaatcaaatgttacagcattcacagctcctaacttgcatttcctactttgctattgtccctgaatgttataatagcattttgacctttcacaagtggggaatgcatgaatgtagaaagaaggtcatttcgcacatttttctatgtggtgcacattcatgcacaggtgggtca

SEQ ID NO: 57664 - DNA, 516 bp, Homo sapiens
agccaacagcagcttgggtactcttccctcctgtgggtagtttgatctttataatcttgctgatgctcagtttttgtgtctgctctatgtttatgagctgtaacactcaccgtagaagtctgtggttttactcctgaaatcagcaagaccacgcacccatggggaggaacaaacaattccagacgtgccgcttttaagagttgtaacactccgtgcgaaggtctggcttcactcctgaagtcagcgaacccactgggaggaaagaacaactctgggcacgccacctttaagagctgtaacactgaaggtttgcggcttcacgccttaagtcagggagactacaaaaccgcaagggagtaatgaactctggtcgcgccacatttaaaagctgttaacactcacagcgaaggtctgcagcttcactcctgaaatcagcgagaccacgaacccaccagaagaaagaaactccggactcacaatcttttaggaactgtaacacttacttcgagggtctaa

SEQ ID NO: 57665 - DNA, 924 bp, Homo sapiens
cagagccccacgaaggaccagaacaagacagagtgcctcctgccgatccaaacatgagccgcctgcccgtcctgctcctgctccaactcctggtccgccccggactccaagctcccatgacccagacaacgcccttgaagacaagctgggttaactgctctaacatgatcgatgaaattataacacacttaaagcagccacctttgcctttgctggacttcaacaacctcaatggggaagaccaagacattctgatggaaaataaccttcgaaggccaaacctggaggcattcaacagggctgtcaagagtttacagaacgcatcagcaattgagagcattcttaaaaatctcctgccatgtctgcccctggccacggccgcacccacgcgacatccaatccatatcaaggacggtgactggaatgaattccggaggaaactgacgttctatctgaaaacccttgagaatgcgcaggctcaacagacgactttgagcctcgcgatcttttagtccaacgtccagctcgttctctgggccttctcaccacagagcctcgggacatcaaaaacagcagaacttctgaaacctctgggtcatctctcacacattccaggaccagaagcatttcaccttttcctgcggcatcagatgaattgttaattatctaatttctgaaatgtgcagctcccatttggccttgtgcggttgtgttctcatttttatcccattgagactatttatttatgtatgtatgtatttatttatttattgcctggagtgtgaactgtatttattttagcagaggagccatgtcctgctgcttctgcaaaaaactcagagtggggtggggagcatgttcatttgtacctcgagttttaaactggttcctagggatgtgtgagaataaactagactctgaaca

SEQ ID NO: 57666 - DNA, 236 bp, Homo sapiens
ggtgatatgagataatcaggaattgtgttaaacattccctaattccctacttccagtgaaagattaaatttcccatggaaacacctaactaatactgttttataactaggtagactaggatagccttttccagctcacagagtgctttaatcctccatatactgttaagaggtagcgttttctccgttttgtggttcagaagactgaggcccagagaattcagggacatgccaggg

SEQ ID NO: 57667 - DNA, 477 bp, Homo sapiens
cagagggggaccctggagagcagggaagcacccatctattaaataattcacggcagcagccccagagctcagcagcccacccaatccagagaaggcaccgaggaaagatctctgctgaatgacaggatgcctggaatgctcaggcagcccaggctgtaagagggcaccatgctcgcccaggccataggaacccaggggggcccggcccaggtcctagtccgaggactccctggggcatgtggcagtggtgagtggactgaggaccccacagggccaggagtgctgggctcccttctccctggggatggtgccttgttggagggaagcctcccgacagggtctctgagggtagacaggagagtctgaggcagcaggagggaaggagtcagggtggggtgagaccctggagtcaccctttcagggcctgttgctccagctttgctgtacttgagcgttgttagactcaacagtcgctgt

SEQ ID NO: 57668 - DNA, 1122 bp, Homo sapiens
cctcggtttataaggcaccactgaatggcttcatggcatgcttgggaattacaaatgtcaaatcaaacaacatgaaattgtgcccttcttttgtgtgcgttcattagaaggacttggaaaaccaaatcatgatgtatcggtatttgttttttatacagaaacaatattgaaaaaaaggcccctcgatgaattcgtaaattaaggcaaggagatgcttacttgaaatgttgaaagcccccacagatctaatactccaaaccaaaaattatatgcagcactgatagcagatgttttcgtcctatctaaatatgaaaaagtattatatgttatgttgacatttaggctaaatctttcccttataaggtgtttgacataaatagcttttgttatgtaactcttcaatagaaggcatacacacacatttcttaaaggtcccagctgctattgttatcactggaggcataaaattggaatcctaacttccaatatcaaatttgagcacaaaccctataaaatgtatcttgtcagaatgtgccagaaccgctaagctcttttcggcggaacaaattgcagctggtgtccttaaaggtcgagaatcaaacttgctgtatcctcagggtttaggcagcaaattggtcccagttttcaccctgccgcagggctggctggggagggcagcggtttagattagccgtggcctaggccgtttgacggggtgacacgagcctgcagggccgagtccaaggcccggagataggaccaaccgtcaggaatgcgaggaatgtttttcttcggactctatcgaggcacacagacagaccatggggattctgtctacagtgacagccttaacatttgccagagccctggacggctgcagaaatggcattgcccaccctgcaagtgagaagcacagactcgagaaatgtagggaactcgagagcagccactcggccccaggatcaacccagcaccgaagaaaaacaaccagaagaaattattcttcagcctgaaatgaagccgggatcaaatggttgctgatcagagcccatatttaaattggaaaagtcaaattgagcattattaaataaagcttgtttaatatgtctcaaacagaaaaag

SEQ ID NO: 57669 - DNA, 340 bp, Homo sapiens
atattactattagtttttgcaaataactggtgaaaaaagaaaataaacaaaggggaatgtcccaaaacctagattcctgtactactctggctaaatgttttcaagaaagataagttggtcaagtgtctaaaaggtacatataacttctgcccacttaatagtattataaattattgaactttgttgtgacagtttaggttcttcataaactttgataactgtgttagttataactgatggagtcaactgatggtgaaaacgaagagcctcccaactgtacacgattgttttatttcccccaaggagtccaaaaggcagatgcagatagcgggcaagtgct

SEQ ID NO: 57670 - DNA, 554 bp, Homo sapiens
caattactggcatggtaatacctgtaaatcgtggctttgatggatcacggggtagtagagtaaccctttctgattgccctgagtcttttgatgtcccaagctttcagcctatttattgtcaagataccgaaaactagatcccacctggaaaagggagacacccctggctttgagaaagcacctcgttcactccaaacccatgccacattgcctcatgagatgacctcaaagccacgtacagttcccaccaggactggctgagatactgaagcaggatggtcaggcttacctagagagaagctcaagtgaagatagaaaatccatcacaatacaatgtccagaataagcaaatccatagagatggaaggtagatttgtgtcatcagggactggggaatgggaaaaatggagagtgactgctaatgggtatgggatttctttctagggtgatggttacacaactctgaatacaccagaaaccactaacttctccactttatttatttatttctttatttgaggcagggtctcgctcagtcgcccaggctggagtgc

SEQ ID NO: 57671 - DNA, 472 bp, Homo sapiens
agtgctgatggtggctccggccagcacattccaagcatccttgggtagcctgataaatggagtgcagaatgttcggtagctctgcaaggagtgggagtatttattgggtctgagtgcttgatgcgaaactttcctccaaagttccaattttctatccgccaagataagtgatggaggtttatggttcatgttgtagcacatccacccaggccaaggacctacaactctgaatttctggcctgcctccttccagctagaagtgaatctagatttacatgccatcaggaacaagcatcgtcttcctgttctgtgagttcctagttgtagtaggtactgctttcatcctgagaatatcaatctacatgcacaaggtccctctctgtggaggagtaggtacttaaacccaagataagtggaaactttatatccaaggagacagaaaataaaatttcagtatgttttatattaaaca

SEQ ID NO: 57672 - DNA, 543 bp, Homo sapiens
agtgctgatggtggctccggccagcacattccaagcatccttgggtagcctgataaatggagtgcagaatgttcggtagctctgcaaggagtgggagtatttattgggtctgagtgcttgatgcgaaactttcctccaaagttccaattttctatccgccaagataagtgatggaggtttatggttcatgttgtagcacatccacccaggccaaggacctacaactctgaatttctggcctgcctccttccagctagaagtgaatctagatttacatgccatcaggaacaagcatcgtcttcctgttctgtgagttcctagttgtagtaggtactgctttcatcctgagaatatcaatctacatgcacaaggtccctctctgtggaggagtaggtacttaaacccaagataagtggaaactttatatccaaggagacagaaaataaaatttcagtatgttttatattaaacaacttattatacttctatccttttatgaacataaggtcatcagtaggccaaaagtctgaaaacagtctcagt

SEQ ID NO: 57673 - DNA, 406 bp, Homo sapiens
ctcttcctgtctcacaggattaccatgataatcaaatgaaataacataattcctagtaaccatctgtcaccacttcatctacaccacagctttcccagtaaaatgggatatttaggccaccaagaaagcgtgatcaatgaaaattgcagaggaagtaagatgctaacttgctctacctgccactaccctgaacctttttttttttcaacccccttaacctctttaaagagcttctggcatgctcatgggtttttctttctagaactttccctgccctgaatttgttcagtatgcattgtcacttgtgaggacttcttttcacaataaatacccaagtgctttagaatgtctggatggtgggccaggcacagtggctcaagcttgtaatcccagcaatttgggaagc

SEQ ID NO: 57674 - DNA, 1143 bp, Homo sapiens
aacagaacttaaaaaaaaaaacaaactgtaattactaggaaattgactctaccagggaaattaacagacttgtccaaaattgtccctgtagacagagagggctggtaaggctggaatgaacccgtcgtaatttgaatgcttaaaactttttccattttattgtcaaaattattgcctgaacttcctttttctcctcatttgcctatttcccttgctttttatcttgtgcaccaccagtatacaacatagtggtgtttaactacttcctgaaggcattattagtcatcaggaacaccaggtcattatcgaagtagataaatgggcattccgcccatcgactaccccttggactaatttggaaaatatggttccttccctcagaagaaacagcccatgctcctctggacacttataaaatagccatgcgcacgtctctgttccttctgaacaactggaattaatgtgtcctgcttgatgctaaactggagtttaattcacaatggcaaggacgcttcacctagaatatctgtccatgtgaaaggtggggagcagtgcagcttccatctccctgtctgttttttggtgggctttcagcttttctgtcccatgactgttagtgactgcagcgtaaccccaaatctttcaccagatgttgtctcaccatcttaaggaaagaagaaagttctaatggatgttttgaatgtgctcgacttttattttgttcagacccaaactgaatgaggcagaggttaaaatcttttcttgttccatctgagtaagcacgaaaacctatgatccttaatcttttagaagaaaaataacccttctctgttagtgggatttctgattcatttcttctgccctgctcccctgctctgcatttttttagtcaaatactgtctggacttttgtgagccaataacctccctcctcaccttattcccctctcttcccctcccctgtgatcacacaaagagcagagagccctcaaaagcctgggtttctgggttttgtattttaaagagaggatgaaatacttgctgtacttcaaaacataaaaccgatctgttaaaactttcccaaaagaaactgattggcatcagcatagggggaataagaaaagtaagagaaattgagattaaa

SEQ ID NO: 57675 - DNA, 882 bp, Homo sapiens
ggtaaaataagttgtattgtgtttcataaaatcatgactaaaattaaggcaagtctatagatcactatagaacattaactaaatttttgaaacatttcagtgtactgcccacaactcttattttgaaaagtttttgaaatccttaattcacagccatacttaatagttgatttctgtttgtgtagtagtcatccctatggtctttcagaacttggcagttaatcctcctgggttttgactagttcagtgttttaacccctaagttagctttgggagctaggacacaagttcacaagtgtggacaggaacattaaactttctgccagccgaaatctgtcaggagcttggttcagattttttttaactctaaaaagcgctttggttcaaagcagattcgttaagagtgtggggagtttttgttttgttttattttaagctgcattaaactccaatgtatatgaaaggggcatttttataattgtaagttataatgtaaaacttttcctaatgtaaagttagtcaagggtacaatgaggtgttttaaccagaaaatcgtaatcagaatattctagattgccattgtagtcgttcagtgtttcaacatctgaataaattctgtgtcattgtttagctgtcacagtgtgaaaaacgttttgattcacaaagacaagtacttaaaaagaggtaacagtttttgacagcttaccttgcacactctgaataatgttcatttaaattgatacagcctgtagttccagctacctgggaggctgaggcaggagaattgcctgaacccaagaggcagaggttgcggtgacccaagattgagccactgcactccatcctgggcaacagagtgagaccctgtctccaaaaaaaaaa

SEQ ID NO: 57676 - DNA, 502 bp, Homo sapiens
caggtcttgggcagaaaaaatccaaactgctgtgaacttctccacctggtggaaggcacagatgccctagacacagatgcaactccggtctgctgtcttttacagaaggctttattctgcacatgaggacagcaggtacacatgtaagacttcatgcagtttgcctagaaaatacctccgaaatgcatgggctgcacacatagctatgtacccactccctcctgtgacaaggatctctcaagtcagatgaaattgctggccgctgtttgcacatactctttctcatgtaatgctcctttaatacccagaataagttcaaaagtgcccagtgtctgcttttcttgcttggggctttctttgccagcctcacagtagactgaggaattctaaacatgtgtctgcgacctggtgaggccgctgctgtgtgaggccatatgttttattggggtctatatcctgagagagataccagaaagaaactctgagatgtctgccaagtaaa

SEQ ID NO: 57677 - DNA, 362 bp, Homo sapiens
cacgcccctccctgctcattcagttgaggcctctcctcaagaagatatctttgcatttgttgtttttgtgttgctttgttttgtgttgccgtaaagatgtgagatgctgctcctgggactccaggctgattcctgacaccagcatgtctgcatttttgcagaagaccagagaattctggggttcgaagctatgaggttttggggtttctctaaggcagtggtgggaggaagacctctcccctgagccctctctcctcagccaaccaggaagctcagaattccacagcctccctgactcccacctcagcaggcaccaagattgctgtaattcggcactggcaggtcttgcaggagttcaactg

SEQ ID NO: 57678 - DNA, 298 bp, Homo sapiens
ccagcttctgcatatcagggtggtgatgcttgggctgagacaggtctagacagcactgtctgaaagggggctcaaggaagtagctgtgaaaggcccctgggatgttttctgctcccctttctgcaaattccctggagggagatcctgttagtcactacagggtgtgtgtgtgggtgtgtgtgtgtgtgtgtgtgtgtgtgtgtgtgttcatcacttgttgcttgggggtgggaagagacaacaaaagcctacagaatctatagttctcagttcatctcccatcctagtccaatcatgg

SEQ ID NO: 57679 - DNA, 4321 bp, Homo sapiens
  misc_feature (5)..(6): n is a, c, g, or t
  misc_feature (647)..(647): n is a, c, g, or t
  misc_feature (1046)..(1046): n is a, c, g, or t
  misc_feature (1400)..(1400): n is a, c, g, or t
  misc_feature (2014)..(2014): n is a, c, g, or t
  misc_feature (2378)..(2378): n is a, c, g, or t
accgnngagagcagccttggcgctacggaggagcctagggctaaccctcagccatacctggggctggtcctggagttgctacgcagggttgtggcagcactgactgaaggtatgagacccgattctcatccttatggttttccatgggaattggtgatacgtgcagctgttgctggattttttgctgttctcttcttgtggagaagttttagatcagttacgagtcggctttatgtgagaagagagaaaaagtttgctgtggcactttctggactaattgaagaaaaatgtaaactacttgaaaaatttagccttgttcaaaaagagtatgaaggctatgaagtagagtcatctttaaagaatgccagctttgagaaggaggcaacagaagcacaaagtttggaggcaacctgcgaaaagctgaacaggttcaattctgaacttgtgcatgaaatactctgtctagaaaaagagttaaaagaagagaaatctaaacattctgaacaaaatgaattgatggcggatatttccaaaaggatacagtcgctagaagatgagtcaaaatccctcaaatcacaagtagctgaagccaaaatgaccttcaagagatttcaagcgaatgaagaacggttggagatagaaatacnagatgcttggaaagaaaattctgaacttcaggaaagccagaaacagcttttgcaagaagctgaagtatggaaagaacaagtgagtgaacttattaaacagaaaagaacatttgaagactccaaagtacatgcagaacaagttctaaatgataaagaaaatcacatcaagactctgactgaacgcttgctaaagatgaaagatggggttgctatgcttgaagaagatgtaacggatgatgataacttggaattagaaatgaacagtgaatcggaagatggtgcttacttagataatcctccaaaaggagctttgaagaaactgattcatgctgctaagttaaatgcttccttaaaaaccttagaaggagaaagaaaccaaatttatattcaattatctgnagttgataaaacaaaggaagagcttacagagcatattaaaaatcttcagactgaacaagcatctttgcagtcagaaaacacacattttgaaagtgagaatcagaagcttcagcagaaacttaaagtaatgactgaattatatcaagaaaatgaaatgaaactctacaggaaattaatagtagaggaaaaatgccggttagagaaagaagagaaactttctaaagtagacgaaatgatcagccatgccactgaagagctggagacctaccgaaagcgagccaaagatcttaaagaatttgagaaaactattcatttttatcaaaagaagattattctccatgagaaaaaagcacntgataattggtcggcagcttggactgctgaaagaaacctcaatgatttaaggaaagaaaatgctcacaacagacaaaaattaactgaaatagagtttaaaataaaacttttagaaaaagatccttatggacttgatgttccaaatacagcatttggcagacagcattccccatatggtccctcaccattgggttggccttcatctgaaacgagagcttctctctatcctccaactttgttggaaggtcctctcagactctcacctttgcttccacggggaggaggaagaggctccagaggcccagggaatcctccggaccatcagattaccaaagaaagaggagaatcaagctgtgataggttaactgatcctcacagggctccttctgacgctgggcccctggcacctccgtgggaacaggactataggatgatgtttcctccaccaggacaatcatatcctgattcagctctccctccacaaaggcaagacagattttattctaattgtgctagactctctggaccagcagaactcagaagttttaatatgccttctttggataaaatggatgggtcaatgccttcagaaatggaatccagtagaaatgatnccaaagataatcttggtaatttaaaggtgcctgattcatctctccccgctgaaaatgaagcaactggccctggctttgttcctccacctcttgctccaatcagaggtttattgtttccggtagatacaaggggcccgttcataagaagaggacctcctttccccccacctcctccaggaaccgtgtttggagcttctccagattatttttctccaagggatgtcccaggtccaccacgtgctccatttgcaatgagaaatgtctatttaccgagaggttttcttccttaccgtcccccaagacctgcatttttcccccagcccccacattctgaaggtagaatgagtttccatcagggttgagnccgacttcaaatgagcctgctgctgaacatccagaacgacagcaagaaacctaacaacatgtttgccctcttcaaaagtaattttgactgatctcattttcagtttaagtaactgctgttacttaagtgattacacttttgttcagattgaaacttaatggaactataattcccaggatagtattttgtaaatgaggatgatttaaatatgaatcttatgagtaaattatttcattttattttattctagatagtataacttttaatttgattaatccactattatataaagaatggtgggagctttatatatgtaatcttgcaggtggggaggctttaaattgtctttatgtcaagaactgtatttactgtggttgtagacaaatgtgaaagtaactttatgcttaaataagttttagttgattaaaaaaatttaaaaaatttaaaaaaagaaatatataaatatgcacaggtgggaaggtagaatactatgtaactgttagaatatttcactttaaaccaagatgatcttggatctcctgtcttatagattttatatcctctttcagtactttgagagtgtaaaacatttatagcagaaagtattcgtgtttcctctgttttcctcaagaatggtttcttcgccctccctttccttcccttcgtcttccctaagctaatttcttcctatgtttgtcatcatatcattacataattgtgttgttatttcttttgttttatttttatttggtgggaacaactttatccagaacttttacttgccccagaattatatagatcagtttctcctgacttctttcccaacctttacctctgttggtgttctaatagttttagttttatgttctgcttttctcttgctgtggcaaggggaaggagtaaatctaagatagtgcttaattgcagttggtgaatttgatctctgattgagctctcttctctggaattctgttaaaagatgaaatgtatcgtgttccctgagagacgccctcaaattttggattagtccttcatgcaagctgggccaccaagccattgcttcttttggggacaacctgccctcacttttaaaaagcatcctagctcacatgcctcccctagcagttaatgccactccagtctctgcttgaatgtaataaaataaaagaaaagtaactatttgagacatgaggtgcccttattgtacactggggcttcctatacattttccgtcttcccttgaaccaccactatcctcagctactttatgcttctgttctgttaaagccctatttgctagtggaaaaatttaactcctggtgatttttttaatactaggcctcttgccttccttccagtgagagaaaaatagaatggtaagcctagtggtttcttccttcactgttgaatactatttatccaaggtatcaaggaagaacttctaatcagaaaagacatgtattattttcacaactgggtagcatatctcactcccagaatggaagttaggtgggaattgcaagattaaggagatttttctggatttctgtctatgtatcatatccacagaactctttctagaggaattttatattgagccaggcatccatttccacagtcttgcatttctagatacttccaaagttatagcactgttcctaaatcatttttggctttatttattaatttattgttcacttcatttcattaggttcagtatgaaacaggtattgtcatctctttgtgtctactttgccacctttccccagaataggcctgaatgagattgaaaacgttacttcagttccttgtgtctgacattgcttgtttgtaactaagaaaaataatatttgcttttgttgaatgactactaatttttttccatgaacctaataaactaaaaagaaagttgaaataataaagagtgaataagtataaaaatc

SEQ ID NO: 57680 - DNA, 3825 bp, Homo sapiens
  misc_feature (5)..(6): n is a, c, g, or t
  misc_feature (647)..(647): n is a, c, g, or t
  misc_feature (1046)..(1046): n is a, c, g, or t
  misc_feature (1400)..(1400): n is a, c, g, or t
  misc_feature (2014)..(2014): n is a, c, g, or t
  misc_feature (2378)..(2378): n is a, c, g, or t
accgnngagagcagccttggcgctacggaggagcctagggctaaccctcagccatacctggggctggtcctggagttgctacgcagggttgtggcagcactgactgaaggtatgagacccgattctcatccttatggttttccatgggaattggtgatacgtgcagctgttgctggattttttgctgttctcttcttgtggagaagttttagatcagttacgagtcggctttatgtgagaagagagaaaaagtttgctgtggcactttctggactaattgaagaaaaatgtaaactacttgaaaaatttagccttgttcaaaaagagtatgaaggctatgaagtagagtcatctttaaagaatgccagctttgagaaggaggcaacagaagcacaaagtttggaggcaacctgcgaaaagctgaacaggttcaattctgaacttgtgcatgaaatactctgtctagaaaaagagttaaaagaagagaaatctaaacattctgaacaaaatgaattgatggcggatatttccaaaaggatacagtcgctagaagatgagtcaaaatccctcaaatcacaagtagctgaagccaaaatgaccttcaagagatttcaagcgaatgaagaacggttggagatagaaatacnagatgcttggaaagaaaattctgaacttcaggaaagccagaaacagcttttgcaagaagctgaagtatggaaagaacaagtgagtgaacttattaaacagaaaagaacatttgaagactccaaagtacatgcagaacaagttctaaatgataaagaaaatcacatcaagactctgactgaacgcttgctaaagatgaaagatggggttgctatgcttgaagaagatgtaacggatgatgataacttggaattagaaatgaacagtgaatcggaagatggtgcttacttagataatcctccaaaaggagctttgaagaaactgattcatgctgctaagttaaatgcttccttaaaaaccttagaaggagaaagaaaccaaatttatattcaattatctgnagttgataaaacaaaggaagagcttacagagcatattaaaaatcttcagactgaacaagcatctttgcagtcagaaaacacacattttgaaagtgagaatcagaagcttcagcagaaacttaaagtaatgactgaattatatcaagaaaatgaaatgaaactctacaggaaattaatagtagaggaaaaatgccggttagagaaagaagagaaactttctaaagtagacgaaatgatcagccatgccactgaagagctggagacctaccgaaagcgagccaaagatcttaaagaatttgagaaaactattcatttttatcaaaagaagattattctccatgagaaaaaagcacntgataattggtcggcagcttggactgctgaaagaaacctcaatgatttaaggaaagaaaatgctcacaacagacaaaaattaactgaaatagagtttaaaataaaacttttagaaaaagatccttatggacttgatgttccaaatacagcatttggcagacagcattccccatatggtccctcaccattgggttggccttcatctgaaacgagagcttctctctatcctccaactttgttggaaggtcctctcagactctcacctttgcttccacggggaggaggaagaggctccagaggcccagggaatcctccggaccatcagattaccaaagaaagaggagaatcaagctgtgataggttaactgatcctcacagggctccttctgacgctgggcccctggcacctccgtgggaacaggactataggatgatgtttcctccaccaggacaatcatatcctgattcagctctccctccacaaaggcaagacagattttattctaattgtgctagactctctggaccagcagaactcagaagttttaatatgccttctttggataaaatggatgggtcaatgccttcagaaatggaatccagtagaaatgatnccaaagataatcttggtaatttaaaggtgcctgattcatctctccccgctgaaaatgaagcaactggccctggctttgttcctccacctcttgctccaatcagaggtttattgtttccggtagatacaaggggcccgttcataagaagaggacctcctttccccccacctcctccaggaaccgtgtttggagcttctccagattatttttctccaagggatgtcccaggtccaccacgtgctccatttgcaatgagaaatgtctatttaccgagaggttttcttccttaccgtcccccaagacctgcatttttcccccagcccccacattctgaaggtagaatgagtttccatcagggttgagnccgacttcaaatgagcctgctgctgaacatccagaacgacagcaagaaacctaacaacatgtttgccctcttcaaaagtaattttgactgatctcattttcagtttaagtaactgctgttacttaagtgattacacttttgttcagattgaaacttaatggaactataattcccaggatagtattttgtaaatgaggatgatttaaatatgaatcttatgagtaaattatttcattttattttattctagatagtataacttttaatttgattaatccactattatataaagaatggtgggagctttatatatgtaatcttgcaggtggggaggctttaaattgtctttatgtcaagaactgtatttactgtggttgtagacaaatgtgaaagtaactttatgcttaaataagttttagttgattaaaaaaatttaaaaaatttaaaaaaagaaatatataaatatgcacaggtgggaaggtagaatactatgtaactgttagaatatttcactttaaaccaagatgatcttggatctcctgtcttatagattttatatcctctttcagtactttgagagtgtaaaacatttatagcagaaagtattcgtgtttcctctgttttcctcaagaatggtttcttcgccctccctttccttcccttcgtcttccctaagctaatttcttcctatgtttgtcatcatatcattacataattgtgttgttatttcttttgttttatttttatttggtgggaacaactttatccagaacttttacttgccccagaattatatagatcagtttctcctgacttctttcccaacctttacctctgttggtgttctaatagttttagttttatgttctgcttttctcttgctgtggcaaggggaaggagtaaatctaagatagtgcttaattgcagttggtgaatttgatctctgattgagctctcttctctggaattctgttaaaagatgaaatgtatcgtgttccctgagagacgccctcaaattttggattagtccttcatgcaagctgggccaccaagccattgcttcttttggggacaacctgccctcacttttaaaaagcatcctagctcacatcatttccacagtcttgcatttctagatacttccaaagttatagcactgttcctaaatcatttttggctttatttattaatttattgttcacttcatttcattaggttcagtatgaaacaggtattgtcatctctttgtgtctactttgccacctttccccagaataggcctgaatgagattgaaaacgttacttcagttccttgtgtctgacattgcttgtttgtaactaagaaaaataatatttgcttttgttgaatgactactaatttttttccatgaacctaataaactaaaaagaaagttgaaataataaagagtgaataagtataaaaatc

SEQ ID NO: 57681 - DNA, 399 bp, Homo sapiens
aaaacccagggctttgctgctaacatagatgcaaaagagcatgcctcttgcgctcttggtgcttgtgctccaccatgacagcttagacaccaccagtgcggagatgtaagatgcacacacagaggccaggatctggttcctaatcctaactcatcctgtccgctgtgtgaccagagcaagtcctggcactactctgaacctcagtttctttatttgtaaaaatggggtaataggctgggcatggtggctcacacctgtaatcccagcagtttgggaggtggaggtgggcagatcacctgaggtcaggagttcaagaccagcctggctaacatgtcaaaaccctgtctctactaaaaatacaaaaatagccaggtgtggtggcatatatatatatatata

SEQ ID NO: 57682 - DNA, 492 bp, Homo sapiens
caaaacctttatatgaatctgtatagcagctttatttataatctcaaatgtctggaaacaaacattcttccattggtgaatgaataaacaaatcgtggaacatctttcaatgaaatattactcagcaataaaaaaggaatggagtatcgataggcacaacaaggaagaatttaaaatgcattgtgctaagagaaataagccagcctccaaggggtacatacaaattataaaattacattcatagaccttctaaaaatggcaaaactgtaggtctggagaacatcattggttgctagggaatggtgttggggaaaagaattgaccacaaagatatagcatgaggaaatttttgggagtgatgtatctgttttgtttcttagttgtggtgtgattacataactgtatgcatttatcaaaactcatataactgtacaccaaaagagtagattttactgtttataaattgaaaataaagtttttaaaagaaatata

SEQ ID NO: 57683 - DNA, 395 bp, Homo sapiens
agacgacaaagatgttaaatttattcctagaaaatgtaatgtaaataatccaattaaacatcagaggttgtcaaattggttaaaaatcaagtcccaactgtatgttgcttacatgaaactacaccttaactataaggacacagggaggttaaagcaaaagattgggaaatatatgccattctaacatgaatcaaatgaaagctggaagagctatttaatatgaaagtatatttcagagcagaaaatattacttgggataaagaggtcatttcataataattaaagagttggtttatcaaaagtaaataacaaccttaatatcttatatacctaataagaaaacttcaaattacatgaaccaaaagctaatataattgcaaggaaaaataatcaaa

SEQ ID NO: 57684 - DNA, 464 bp, Homo sapiens
acctatgcacctgctccactgtgtctgcttctcatagagacactcttcctgctgagtctctgacctctgctcctagatccaaatggcatctcctgccctatccctgtatggcttaacctagggaaactctttcccagaggagtcaggtaaaaagacagtggctgagcttcttacagatttaaaggagacatcctggaatttaggactccatccttcctttctgtcccctggcagctcctgctgcttctcaaagtttagctttgtctctcatccagctcagactgttgctggtcctgatggcctctgcttagctgtattagtatgttcttgcattgctataaagaaatacatgagaaatacctttagttggctcatggttccatagggtatacaggaagcatggtggtttctgcttgtggggaggcctcaggaaacttttactcaaggtgcagggcaaaaaaaaa

SEQ ID NO: 57685 - DNA, 1429 bp, Homo sapiens
ctgggaaatggggaagaggtagggtgcctgtagacacagcccctttcaggatctccatgcccagggttctggcacagagacacctcctttttggagagaaaggtcagagtaggctgtaggccttctctgcgtctgccctgtgacctcaaagaacttcctctagcaggaaattagctgctggagccctcacccccaaccagccccaggcggaagcagcacagggggctcctcccccacacacagaggtcactccatgccaccgccgtcagggcgccaaggtcctcatgttctcagaagacccactgccctgcattccatcatcccagggcggccggctgggggtggccaggacctcaacaggcctcctttgtcctggctctgccgtcacccggcacaactggaaccagagcagccttgtctggggccctgggctcggggcccgttcatctgtgagagtggagccaggactcagctcccagccaccagcgagtcctgccggcctctgccctggactcctcctgcgctcaccctcaggaactcagggctcaaagtcggccgggttgaagggcgctttcctcggacaggcaaagcccgggggcgccccgacagagcagctccttgcaggggtgccagtcacaggaccggacggcgccctccctcagtgtcctgggtgccatcttcgggcccaggccccacaccaccccctccctccagcaggagcaaagacgtgggaaaaccagcccagagctgggtccgaggcggccccacccagcctaacacgggacagctgccgaaagaggggctgaggacgccccacccagtccctagagctggaatcccttcctccagacaggcccttctaagctcagggaacccggggactcgggcacccagcgccccagcactccgccccgaggcccaggcaagtccaggggagtttccaggcgcaccattcctgagctaggtggggagaggctgggtggcgcccgtttccaggaacccccaccccagccggcagcgagcttcccgggagcagccgctacccagggagaaccgcaacctggccccagagcccagagcggctgcaactctggggccaccgaacccgtccagccggcctccctgtcccccgccccttcccatcccggccacaccccctcccctcccctccccgtgccccggcgctcggctgggggacctgggtgggggctgcggattttgctccccgcactgtcctccccgcccctgccgctcccagctctgtccgagccggagggtcaagccctgggagctccaggagcacccggggagggaactcggctgccaaatggccccagaggccgaaaggaattcaggggggattgccgctgtccccgcataggagaagcagctggggctggcgggacccgggaccgggatcgcggccgct

SEQ ID NO: 57686 - DNA, 582 bp, Homo sapiens
ggctttttaaatgaccccaggcctgtctataagcaaaaaactctactccatagcctctctatcctttcatcacctcttgggagagggatagataaatatgacatcataacaaaacacgtgtaatgtaaatgtattacaaagattgtgtaaatgaagcatttatgaatattctattaactattcgatttcccactgtagctagcacttataaagaatttgataagtaactagataaatgaatcagaaaataaatctattgttcaaatttcatcagaatgaattaatgagtgataagttctccttgaagaaagactgaggataaatcagcttaaacatgaataaaattttaacaggtaaagaaggcattccaagagaaggaacaacgtgaaaagaaacaaactcatgaaggcctgaggcatgagcatgtgttgagcatttgggaaagaacaaagtcatgttataagaccctataatgcttggcaaaagatagtggcaagaaagctggggaaaaaaagctgggatgacatgataaagaattttatatttcagtcaaaataaatgtcatttcattggagcttaata

SEQ ID NO: 57687 - DNA, 424 bp, Homo sapiens
cttcaaaatggcgagaagataatgagaaaaggaaagaatctatggataagaagtaaggagaaaatcgttgacaattgtcaaaatcttgcctcattacttctccaggaatgatgtctatccttttcttcaaacacgttctgtattctaggaattctgaattattttggattagccaaactcactataaactctactgtaaagaaggcattccaagagaaggaacaacgtgaaaagaaacaaactcatgaaggcctgaggcatgagcatgtgttgagcatttgggaaagaacaaagtcatgttataagaccctataatgcttggcaaaagatagtggcaagaaagctggggaaaaaaagctgggatgacatgataaagaattttatatttcagtcaaaataaatgtcatttcattggagcttaata

SEQ ID NO: 57688 - DNA, 327 bp, Homo sapiens
aatgagattatgtacatgagacacttagcatggtgcccctgcagcacatacagtattcttgtccttaacgaaagtttattattttaattgattatctgttacccttgacaacaaaggaaagtagtgataaatgccatatttagccttgagtttcaacatttttctcctgtagattggtttgtgtttctcacccttcttgtccccccttcactctttcttttctagcaccttctgcagcatttcttgttttacctttgggtgtcattagacgttgtttacatcattgtctggcggaccagtgctgtttgcaaaaagctcaggtgcttc

SEQ ID NO: 57689 - DNA, 567 bp, Homo sapiens
ggcacgctcatctgtttttctcccaggatacgcgggtctgtgtatgagcagctgctctgagcttgcgactgggagggcagagggtgtagactcccgcgtcccggggctcccttcctcgctcttccttcggacacccacagcagctgctcctggggaatctgcccccaagtttcgaggaactgccccccagcgcccaggaggaaaggggaatggggctgtaaacgtgtctaattcagacccgttatccagatcggaattagtttctcgcggacacctccgcgccgcgggccattctctgcctggggcctttcttggaccgatccatagggcctcgactggcttccacggcgcttgcaaattagagactctgatgcctcaaatttgtggggtcctgcctccagctcatccccctctcccgaggcttggcctaaaggcaccatccctgccactcctcaccccctgaattcagtcgggggcctgtgtggagggaaaggaaaacctggagagaccaagtggctgcactgccaccgcgcaggcatggatcctgcctggccgccgtctgggaac

SEQ ID NO: 57690 - DNA, 304 bp, Homo sapiens
tgattgcatcaagcctggaaattggcagaattttcacattgaccccttgtggagtgaggactatttaggaagactaagtggaagcccctgaaactgcccttcactaacaaaagacaaaactttaagcagtgctacatccctacaaacattgcacagagcagggctaccttcaaagacttcaatctcagtggagaatataacatctctttttgatttgctgattggatgaatggatcttggagatcaaatatggagtaacataatcctaatcagagagtgactcttagttgctttgctttccaaa

SEQ ID NO: 57691 - DNA, 585 bp, Homo sapiens
tacatgtgcttaaaagcattattgtagcttcatttgcctctgaatttcccgagtggttgtaacaaggttgtcttcctgaatctctgcaaatttaagtcagcttgcactaggaagccacagatgtccttagagttgagtttaatcttgactcaaatcagcttctcctccagagctttgacatatgacttagcaagagcttttccttcttctttctgccttcacttcccagttcccaaaagaccagttttcaggacagtgtgatcctagagatatgggaagagagggaggaagcaggctttgatctttgccattgtgtacccatagaactcactcccagattctttttcctttttctttctctctccctttcttctgtctagctgacttcattgtcttcctgctcatattctgtctatgacccttataagacagcaaacaaacccacaatcaaggctcttgcttcattgaagccctgagaattggctacatgaggcctttgctcaagggacttaatatttaatgtgttcatgattgggttaataaaacagggagcaggtgacaaatttagtctatggaagccccatt

SEQ ID NO: 57692 - DNA, 328 bp, Homo sapiens
tgtagttgcaatagcattccaagtagtcacctgattttttttccttgctcacctggcatctgttcttcccttatcagccaaagtgaccctcttaaaaagatcatgccaatcctccatccagtactccccaaaggctttctatctcactcccagtaaaaatcaaagatgttgcaatagctcctacatcatctgttcctacataccagcctgatttcatctcctacagctttcccgcactctctcttctttgcttcagccacccttgtccccttgctgtagctggaacacgccaactgtgctcagcctcagggcctctgcacctgctagt

SEQ ID NO: 57693 - DNA, 540 bp, Homo sapiens
ctgtaagttgcatttcttaacagaacatccaaagtgtatccaataaatggcagtttaactcatttttaggagctgcataatattccagattgtgttagcaagtttattcaaccatttgctcgctgacaaacattgtttccaacttgtcgctcgcagtgctgcaataaacagccttgactaagttctgtgtgctggcagccttcaccttcctattcgttgaagcagttttaatctgggaagaaaattgaatgtagcttattctcagataggactgtggcctaatttaaaaagaggtcctggccgggtgcgggcggatcacgaggtcaggagatcctagaccatcctggctaacacagtgaaaccccgtctctactaaaaaaatacaaaaaaattagccgagcgtgttggtggacgcctatagtcccagctactcggcaggctgaggcaggagaatggcgtgaacccgggcggcggagcttgcagtgagccgagatggcaccactgcactccagcctgggtgacagagcaagactccgtttc

SEQ ID NO: 57694 - DNA, 114 bp, Homo sapiens
gtgaaaataaaataaaatgacatggtttatgttacaaataacaaaagaacatttttccaattgcatgtgtgacattatatgtggaaaaataattagatgctacatgtgctatac

SEQ ID NO: 57695 - DNA, 1459 bp, Homo sapiens
agacgctatgctccagggcctgatgaaattattcgagccagtcaaccctaagtctgcttaccctgcctcattcattccttcccatggaaaccacaataggctgtggtccacatttcccctcaccccttctgcctcctgaccacccctggtgcttctctgtgtgccccctgtgacacagtatgccccctcctcttgcgctctgtgagaataaactgtcttttcaatgcctgttgtctcttgctctggtggcctcaccagacccaaatgataataaaacatacattttaaaacaggcatcaaacccagactgcgtgtgttctgtgttcctactgggccaattcatttgtatgtacatggtgtaacaggccctaaactaaatgttaggggtacaaactagaaaaaggcacgttcttgccctcagtgcgctcacagactgtggagaatgatggacactgaaataaggatgatgtgtaatatattacttagagagttttgagcatgatgctggctgcaagaaggtaaaagagagaggaatttcttctgcttggtattgggtcatcgtgggagatgagtcagggaagtctacaaaaaggaggagatatgcccttgtccctcagattgtccccaaaaagctgaaggttctttggtatctgtgtccgttagggttcagatggagaaatgtgcttgtgtcacatctccaatgataagcatatgctctgtgtacagtaggtgcgtcctgcaggtttgttatgggtatgatgaaaggcataccatcctgtgaatgaataaactgtagacaagtccatagagatagaaacttcaaactagaatggcccttatagttttacagattagcagccaactgttgtcctactggttgaatttgggctatagatattttgtctggcttacaccttgttaaaatacagaattagtagtcgttgcttaataactgagctattacatatgaaaacgtatatgtctagtatccctggaaaaaatcagatgcaacattgggtttttggtggatgctaaataacagccactgccttatgatggggcaggaactcttccattttgttccagtcctcacctggccacttcgttgtgtcacctgtttggttcggttcttgaaggcacttccggtttgcaatccttagaacaagctccctacttttctgcctcccttttgtgttaaataacagatatgaatattgaaacctgggatgggaagtgacttgtacacagtggcaaggcgggtactcaagtcaagactcctgactcccagttccccacaaggagttagtcagcctagagaaaataacgtctccactgcctgaaacacagtgtaatttacatcacacttataaattcaagggaaaattatctgatcactgcagaacattgagacactagaaactgaaaattgaatttcgagctcagaaataagggaaatgag

SEQ ID NO: 57696 - DNA, 283 bp, Homo sapiens
tttgcctgtgattagtggtttggcttgggaaaccttggaaagggctcagagaaccaagctgctgattaacgccacagctggtcaacacagcggacagctgaccgccgaggtccctgtggtctgtggttcctgcctttcaggctggtgtgggactggggtgttggtttggatcctagagctgaggtgtagccttacagctctgggtctctcctggtgttccagtggaactagcaccccagagcagggccctcaggggacttggcggctaacttcttgctgggaa

SEQ ID NO: 57697 - DNA, 431 bp, Homo sapiens
gatgtcgtgggaatgacaggcatgacttccatggctaggtcataaagagattgtggcttctaccttgctctctcttggaccccagttgctggaggaagccatctgccatgtcaaacagcctatggagatgcccatgtggggaagaatggaggtcccctgccaacaatcagctttgacatgccaagcctgtgagggagccatctggaaagggagtcttccagccccaatcaggccttcagatgactgcagccctggccagctccttgactgcaacctcatgacagaccttgagcaagaactgctcagctaagctgcttctgaattcttaacctacagaaatgtctaatgctttaagaagcaaagtatggggtaatttaccacatgcaatagataacaaaaccatgtgcaataaatactggttaaacaagtga

SEQ ID NO: 57698 - DNA, 406 bp, Homo sapiens
agcctggccaacatcgggaaaccccatctctactgaaaatacaaaaatcagctgggcattgtggtgcacacctgtaatcacagctactcaggaggttgagacaggaggattgcttggacctgggaagtggaggttggagtgagccaagatcatgccactggactccagcctgggcaacagagcaagactccatctcaacaaccacaacaaaaaagagatattaaaggaagtccttcacctagatggaaatgatactagatggaaatatggatctgtccaaggaattaagagctctggaagtggtaactacctgaataaatatatattattcatgtatatatatgttataatatattgttcttattcttattattcagattattttagaagataattaatgtttaac

SEQ ID NO: 57699 - DNA, 534 bp, Homo sapiens
cttataggaaggctaggcttggtgggtacaagtaagaaagccaagcagagagaagtctggactttgccttctccacctccttggaagacaggctgctcatcccattgtggtgtctcggctggtgtatgttttctgcctaggcttaatggacagcacgaggaggtagggactgacgttacccatgttttacagtggaagaacctgaggcttaaagagatcctgagctttaaaatagctagccaaacgaaaacaccaatggagactctttggaagggactgtgctcagtctgaggacccagagccaagtcacagacatgacctcaaaagccagtactgtgctcttccacatggcatccactggccacgtgtggtgatttaacatgtgaaatgaagtctcaaggctgagatgtgatgcgagtgtataatacacactagatctcaaaaacttagtagaaataaaaaatgtaaaatatcataaaaagattttaaaactacataaaaagaaaaaaaatttcaaaagaaataaagacaaca

SEQ ID NO: 57700 - DNA, 369 bp, Homo sapiens
attccttaagaacagagccatgatttctgtggtctgatttgggtttttagctggaagctttctaagttttaaatacccatgtccatcaggaagtccttaaagaagaaataatttatcaaaaaataaaaaggtgtggagttagataggatggtaatttcagccctcccaacccactggctagaggctcagggatcatacaaggcagtgttaacttaaaaaaaaagtcatacaatgtgtacatttggaaaggagactttatttcttacaaagggttccatcctgcaaggtggccatcccgcaggctgggaagtatagccaggcactttgagggggtaccgagcctcaattccttatccttgtcattgctat

SEQ ID NO: 57701 - DNA, 568 bp, Homo sapiens
attccttaagaacagagccatgatttctgtggtctgatttgggtttttagctggaagctttctaagttttaaatacccatgtccatcaggaagtccttaaagaagaaataatttatcaaaaaataaaaaggtgtggagttagataggatggtaatttcagccctcccaacccactggctagaggctcagggatcatacaaggcagtgttaacttaaaaaaaaagtcatacaatgtgtacatttggaaaggagactttatttcttacaaagggttccatcctgcaaggtggccatcccgcaggctgggaagtatagccaggcactttgagggaaggagaggtaagacaagaatttaagttgaatgggttgatcaaacatacatatttaacaggttataggaggagctgtgactgttcacaaaggaggtcctcacacatggataatgaactaatgtgcgtgtaacacatgacccatgttcaccttggggtggagacttatcctttaagtgtattacagttaggccctatgcgtcaaaagatcttttcgggacacagaagcactgaagtgg

SEQ ID NO: 57702 - DNA, 495 bp, Homo sapiens
tttattgacatatcactttttattttcagactcctaattcatattcattattaaatagttgtgtgattcatagcagaagcatttaattaaattttagtgaaatggtctttcttagagccaggaaaattctttattccagaaatcaaaagacgatttcctcaaacatcagaatgaatcactaagtaactttgaaccaagataaaatagtctaccattatgaatccttttgaaatacaggtgttccctctccccattttaacaaggcttatttaattaaaacttttggaaaattagtaaactgatagactataaattaataagctacaaataaatagctccaaatataaacaggtgtttgaaaattatatacagtcagtgtagtttcttgatataaatgctaacactgctttgattatataagatcataaaagctagagaaagacacgcttattaaggaaacaaataattctcctttatattattctctacattagc

SEQ ID NO: 57703 - DNA, 284 bp, Homo sapiens
tcggctcaccaagtggtggggaaataagatcgcagtcaaacatttgccatgtgtacattacagtgtgtaaaccatggtagtaatgcttagagtcataggctctttcttttgaaattgcacttatctgaaatgtaacaaaaatctttaggagaggaaaagacaaaccaaccactctgaacagtcagaatagaagttacacattccatttgctgaaactcatccattgtctctcatgagaacttccctctcaaagcctaatcacttctacttgacaccctggaata

SEQ ID NO: 57704 - DNA, 267 bp, Homo sapiens
ttgctcttcaactttcttttgaggctttaaattaggcaaatatatttttcttagaatttctgaaaactccttttcactggagcttattttaattatatggatgcattatcctcttaaacttctgtgaaaacaataattggagttttcatttgcattggctgtttcatgagaggtcaagctttttgcttatttattttgatgtttccttttcatgatatctgtgtcttgggatttggttgtatattcacatttttaattagctacttg

SEQ ID NO: 57705 - DNA, 1923 bp, Homo sapiens
ccttcatttcaaagactacctgaagtaaaatgcagttttcttctacctactcggtgtcttttgcagatcagagtatggacatttgaaatattgctgcttctttcccccttctgctgttaactggatccagagttctgtgggaaatagaagatcaagcattactgtcctttgattaaatgtgatatctaccactctgcaatattccagacaggtgtcttccttaccgttacatggtctttaacacttttactgattgcaatattttccccataaaatcttcattctattataatattgatcttgaatttgaatatgtgcaaggtcagatacatttctcaaacataacatttaataaataatgtgatataattatttaatagaaagaataattccgaccttcaagcaagtttctgaaggtattttatgatgtataacaactgaagttttacaataaaaactaatttaaatgttagctgaagatatgtggcatttaaattaaaatggaaattatataaaggaaagtgatttttaaggatatacataaagatatatttagaattttcatgatactgttctcctcatctactgcttatgttaagtgagaactttcttagtaatacataatgcatgatgttactgcattttctaaatgactagtaagtgattagttttttcacttatgcctattaatttgataccaatttaatcatgataaaacaataaccgttaacatatattttgttaaatggacatttaaaagaatgttgttcaggttttttttttaaatactgatatggggcatacaatctattcacatgttttctactgaagtactaagtaaaaaaattaaatcattatcagaataaaaatatgtgttctaaaattagcaacaatttctggggatacatgcagatgttgttaaacgtacctctgcatacagatatattataaaacacaagcaatgttatttatgaaactgtgatgcagtcttcaacatcaagaaaaaatgacaactataataaaatttacaacacagtttcacagtctaaatgctatgttcctttaagtattttcatatttttaatcatttattaagagaaaattgtgaaaagttaatttggccttatagagagattcaggatagatgtagcctatagatgtgtcattttaataagttgggatacatgtttagtttttccttatattcctgttcagtgaacagattttcataattctcacttgttaaagtgctgcaaaaattgcattttcagtactctaaattactacattagaagagagcatttctccattgtctttattttctgttatatatgtgttgtaaaagtacactacattagaagggagcttttccgttgtctttattttctgttatacatgtgttgttaaagtacatgcattcttagactaactctcagatgctttgctcttttggagctgaagaattgtttgatggtgatgtcatatatctgatagattagtttcagtggttctcatttcacttttatacgtaatttcttaactatattaagatagttgcaggcagtgtacctcaggttgactctgtacatctgaatagtgagtcactagtattttgcttcaagccttctgaaaatataaccatagttacctaagcacacagtgaatagtcacatggtagtacttgtgattagagcatgtaaaacaatgtaattgaaaagtcagcttccatattttgtaggggaaatagaacaccctactttttatctagtgtgaaatatttaatcgaatttttgttgatttatattatgttacctgtgctgaattaggtttggtacttgtgttttgtttgacatattagtaagttgcttttgcttctttctgtcaacttattttttaaataaaattgatctggaaaaattgtta

SEQ ID NO: 57706 - DNA, 1162 bp, Homo sapiens
ccttcatttcaaagactacctgaagtaaaatgcagttttcttctacctactcggtgtcttttgcagatcagagtatggacatttgaaatattgctgcttctttcccccttctgctgttaactggatccagagttctgtgggaaatagaagatcaagcattactgtcctttgattaaatgtgatatctaccactctgcaatattccagacaggtgtcttccttaccgttacatggtctttaacacttttactgattgcaatattttccccataaaatcttcattctattataatattgatcttgaatttgaatatgtgcaaggtcagatacatttctcaaacataacatttaataaataatgtgatataattatttaatagaaagaataattccgaccttcaagcaagtttctgaaggtattttatgatgtataacaactgaagttttacaataaaaactaatttaaatgttagctgaagatatgtggcatttaaattaaaatggaaattatataaaggaaagtgatttttaaggatatacataaagatatatttagaattttcatgatactgttctcctcatctactgcttatgttaagtgagaactttcttagtaatacataatgcatgatgttactgcattttctaaatgactagtaagtgattagttttttcacttatgcctattaatttgataccaatttaatcatgataaaacaataaccgttaacatatattttgttaaatggacatttaaaagaatgttgttcaggttttttttttaaatactgatatggggcgcaaaagaaaaaaaaaaaaaaaaaaaaaaaaaaaaaaaaaaaaaaagaaaaaaaaaaaaaaaaaaaaaggggggggggggaaataccaccagggggcgggcaacaagtggcagcaacccagtctctgtgcgaaaaaggacgacccaactaggaggagacgaataaataacagcacagcgcgagcggcgcaataacaacacggcgcggggggaacacaagcacacgatgcgacgtgtggagaagaaacccactagggggggggggaaacgggaacaaccaaccagaaagaaaggcgcagggaaacaaatgcaggtgtactgagtgcaacagcgatgtgcgggccagaatagcgagtatagaat

SEQ ID NO: 57707 - DNA, 1869 bp, Homo sapiens
ccttcatttcaaagactacctgaagtaaaatgcagttttcttctacctactcggtgtcttttgcagatcagagtatggacatttgaaatattgctgcttctttcccccttctgctgttaactggatccagagttctgtgggaaatagaagatcaagcattactgtcctttgattaaatgtgatatctaccactctgcaatattccagacaggtgtcttccttaccgttacatggtctttaacacttttactgattgcaatattttccccataaaatcttcattctattataatattgatcttgaatttgaatatgtgcaaggtcagatacatttctcaaacataacatttaataaataatgtgatataattatttaatagaaagaataattccgaccttcaagcaagtttctgaaggtattttatgatgtataacaactgaagttttacaataaaaactaatttaaatgttagctgaagatatgtggcatttaaattaaaatggaaattatataaaggaaagtgatttttaaggatatacataaagatatatttagaattttcatgatactgttctcctcatctactgcttatgttaagtgagaactttcttagtaatacataatgcatgatgttactgcattttctaaatgactagtaagtgattagttttttcacttatgcctattaatttgataccaatttaatcatgataaaacaataaccgttaacatatattttgttaaatggacatttaaaagaatgttgttcaggttttttttttaaatactgatatggggcatacaatctattcacatgttttctactgaagtactaagtaaaaaaattaaatcattatcagaataaaaatatgtgttctaaaattagcaacaatttctggggatacatgcagatgttgttaaacgtacctctgcatacagatatattataaaacacaagcaatgttatttatgaaactgtgatgcagtcttcaacatcaagaaaaaatgacaactataataaaatttacaacacagtttcacagtctaaatgctatgttcctttaagtattttcatatttttaatcatttattaagagaaaattgtgaaaagttaatttggccttatagagagattcaggatagatgtagcctatagatgtgtcattttaataagttgggatacatgtttagtttttccttatattcctgttcagtgaacagattttcataattctcacttgttaaagtgctgcaaaaattgcattttcagtactctaaattactacattagaagagagcatttctccattgtctttattttctgttatatatgtgttgtaatgtgttgttaaagtacatgcattcttagactaactctcagatgctttgctcttttggagctgaagaattgtttgatggtgatgtcatatatctgatagattagtttcagtggttctcatttcacttttatacgtaatttcttaactatattaagatagttgcaggcagtgtacctcaggttgactctgtacatctgaatagtgagtcactagtattttgcttcaagccttctgaaaatataaccatagttacctaagcacacagtgaatagtcacatggtagtacttgtgattagagcatgtaaaacaatgtaattgaaaagtcagcttccatattttgtaggggaaatagaacaccctactttttatctagtgtgaaatatttaatcgaatttttgttgatttatattatgttacctgtgctgaattaggtttggtacttgtgttttgtttgacatattagtaagttgcttttgcttctttctgtcaacttattttttaaataaaattgatctggaaaaattgtta

SEQ ID NO: 57708 - DNA, 2644 bp, Homo sapiens
  misc_feature (2363)..(2363): n is a, c, g, or t
  misc_feature (2412)..(2413): n is a, c, g, or t
  misc_feature (2422)..(2422): n is a, c, g, or t
  misc_feature (2447)..(2447): n is a, c, g, or t
  misc_feature (2450)..(2450): n is a, c, g, or t
  misc_feature (2457)..(2457): n is a, c, g, or t
  misc_feature (2501)..(2501): n is a, c, g, or t
  misc_feature (2506)..(2506): n is a, c, g, or t
  misc_feature (2509)..(2509): n is a, c, g, or t
  misc_feature (2514)..(2514): n is a, c, g, or t
  misc_feature (2516)..(2516): n is a, c, g, or t
ccttcatttcaaagactacctgaagtaaaatgcagttttcttctacctactcggtgtcttttgcagatcagagtatggacatttgaaatattgctgcttctttcccccttctgctgttaactggatccagagttctgtgggaaatagaagatcaagcattactgtcctttgattaaatgtgatatctaccactctgcaatattccagacaggtgtcttccttaccgttacatggtctttaacacttttactgattgcaatattttccccataaaatcttcattctattataatattgatcttgaatttgaatatgtgcaaggtcagatacatttctcaaacataacatttaataaataatgtgatataattatttaatagaaagaataattccgaccttcaagcaagtttctgaaggtattttatgatgtataacaactgaagttttacaataaaaactaatttaaatgttagctgaagatatgtggcatttaaattaaaatggaaattatataaaggaaagtgatttttaaggatatacataaagatatatttagaattttcatgatactgttctcctcatctactgcttatgttaagtgagaactttcttagtaatacataatgcatgatgttactgcattttctaaatgactagtaagtgattagttttttcacttatgcctattaatttgataccaatttaatcatgataaaacaataaccgttaacatatattttgttaaatggacatttaaaagaatgttgttcaggttttttttttaaatactgatatggggcatacaatctattcacatgttttctactgaagtactaagtaaaaaaattaaatcattatcagaataaaaatatgtgttctaaaattagcaacaatttctggggatacatgcagatgttgttaaacgtacctctgcatacagatatattataaaacacaagcaatgttatttatgaaactgtgatgcagtcttcaacatcaagaaaaaatgacaactataataaaatttacaacacagtttcacagtctaaatgctatgttcctttaagtattttcatatttttaatcatttattaagagaaaattgtgaaaagttaatttggccttatagagagattcaggatagatgtagcctatagatgtgtcattttaataagttgggatacatgtttagtttttccttatattcctgttcagtgaacagattttcataattctcacttgttaaagtgctgcaaaaattgcattttcagtactctaaattactacattagaagagagcatttctccattgtctttattttctgttatatatgtgttgtaaaagtacactacattagaagggagcttttccgttgtctttattttctgttatacatgtgttgttaaagtacatgcattcttagactaactctcagatgctttgctcttttggagctgaagaattgtttgatggtgatgtcatatatctgatagattagtttcagtggttctcatttcacttttatacgtaatttcttaactatattaagatagttgcaggcagtgtacctcaggttgactctgtacatctgaatagtgagtcactagtattttgcttcaagccttctgaaaatataaccatagttacctaagcacacagtgaatagtcacatggtagtacttgtgattagagcatgtaaaacaatgtaattgaaaagtcagcttccatattttgtaggggaaatagaacaccctactttttatctagtgtgaaatatttaatcgaatttttgttgatttatattatgttacctgtgctgaattaggtttggtacttgtgttttgtttgacatattagtaagttgcttttgcttctttctgtcaacttattttttaaataaaattgatctggaaaaattgttaatgggatgttttaaataatgaatttttcatccagcatcagttgaaaaggaaaagaaagcttcattatggaaatgacaatattgaatatgacagataagtttatttgcttctgttttaactgcagttaatagtactagacaactttaagtggaaagcatttagtttatttcttcacttatttgtagagtgaacaaatgattcacaattctacaagtaattccacttaggtaacttacagttgttaggtttgacaataaagatctactatgagaggagaagaatttatgggttttgggtggaaggaatttctcaaagaaataaaaaatgttctttgcccttgatactgcaaacccactgatacaagtgccttgaatttattattattattattttttatttttttgagatggagtttcactcttgtctcccaggcgagatcntgccgctgcactccagcctggcaacagagcaagactccatctcaaaaannaacaaaaanaagtagagatgggatctctagcctnctnaagttantttagcctcccaaatgcaagacaagaatctaacataaaatttancttgnatnagaantntgcatcatcgaatcttgcgctgctatgaattatcctggagtagggatctgcatctggggcacctgtagactggtgcgagtttaaacctaaggatatgcattgactcacgcaccattagtctcatacat

SEQ ID NO: 57709 - DNA, 2761 bp, Homo sapiens
  misc_feature (2480)..(2480): n is a, c, g, or t
  misc_feature (2529)..(2530): n is a, c, g, or t
  misc_feature (2539)..(2539): n is a, c, g, or t
  misc_feature (2564)..(2564): n is a, c, g, or t
  misc_feature (2567)..(2567): n is a, c, g, or t
  misc_feature (2574)..(2574): n is a, c, g, or t
  misc_feature (2618)..(2618): n is a, c, g, or t
  misc_feature (2623)..(2623): n is a, c, g, or t
  misc_feature (2626)..(2626): n is a, c, g, or t
  misc_feature (2631)..(2631): n is a, c, g, or t
  misc_feature (2633)..(2633): n is a, c, g, or t
ccttcatttcaaagactacctgaagtaaaatgcagttttcttctacctactcggtgtcttttgcagatcagagtatggacatttgaaatattgctgcttctttcccccttctgctgttaactggatccagagttctgtgggaaatagaagatcaagcattactgtcctttgattaaatgtgatatctaccactctgcaatattccagacaggtgtcttccttaccgttacatggtctttaacacttttactgattgcaatattttccccataaaatcttcattctattataatattgatcttgaatttgaatatgtgcaaggtcagatacatttctcaaacataacatttaataaataatgtgatataattatttaatagaaagaataattccgaccttcaagcaagtttctgaaggtattttatgatgtataacaactgaagttttacaataaaaactaatttaaatgttagctgaagatatgtggcatttaaattaaaatggaaattatataaaggaaagtgatttttaaggatatacataaagatatatttagaattttcatgatactgttctcctcatctactgcttatgttaagtgagaactttcttagtaatacataatgcatgatgttactgcattttctaaatgactagtaagtgattagttttttcacttatgcctattaatttgataccaatttaatcatgataaaacaataaccgttaacatatattttgttaaatggacatttaaaagaatgttgttcaggttttttttttaaatactgatatggggcatacaatctattcacatgttttctactgaagtactaagtaaaaaaattaaatcattatcagaataaaaatatgtgttctaaaattagcaacaatttctggggatacatgcagatgttgttaaacgtacctctgcatacagatatattataaaacacaagcaatgttatttatgaaactgtgatgcagtcttcaacatcaagaaaaaatgacaactataataaaatttacaacacagtttcacagtctaaatgctatgttcctttaagtattttcatatttttaatcatttattaagagaaaattgtgaaaagttaatttggccttatagagagattcaggatagatgtagcctatagatgtgtcattttaataagttgggatacatgtttagtttttccttatattcctgttcagtgaacagattttcataattctcacttgttaaagtgctgcaaaaattgcattttcagtactctaaattactacattagaagagagcatttctccattgtctttattttctgttatatatgtgttgtaaaagtacactacattagaagggagcttttccgttgtctttattttctgttatacatgtgttgttaaagtacatgcattcttagactaactctcagatgctttgctcttttggagctgaagaattgtttgatggtgatgtcatatatctgatagattagtttcagtggttctcatttcacttttatacgtaatttcttaactatattaagatagttgcaggcagtgtacctcaggttgactctgtacatctgaatagtgagtcactagtattttgcttcaagccttctgaaaatataaccatagttacctaagcacacagtgaatagtcacatggtagtacttgtgattagagcatgtaaaacaatgtaattgaaaagtcagcttccatattttgtaggggaaatagaacaccctactttttatctagtgtgaaatatttaatcgaatttttgttgatttatattatgttacctgtgctgaattaggtttggtacttgtgttttgtttgacatattagtaagttgcttttgcttctttctgtcaacttattttttaaataaaattgatctggaaaaattgttaatgggatgttttaaataatgaatttttcatccagcatcagttgaaaaggaaaagaaagcttcattatggaaatgacaatattgaatatgacagataagtttatttgcttctgttttaactgcagttaatagtactagacaactttaagtggaaagcatttagtttatttcttcacttatttgtagagtgaacaaatgattcacaattctacaagtaattccacttaggtaacttacagttgttaggtttgacaataaagatctactatgagaggagaagaatttatgggttttgggtggaaggaatttctcaaagaaataaaaaatgttctttgcccttgatactgcaaacccactgatacaagtgccttgaatttattattattattattttttatttttttgagatggagtttcactcttgtctcccaggctggagtgcaatggcgcgatcttggctcactgcaacctccgctcgctgcaacctccgcctcccaggttcaagtgattctcctgcctcagcaagcgggaggcggagcttgcggtgagccgagatcntgccgctgcactccagcctggcaacagagcaagactccatctcaaaaannaacaaaaanaagtagagatgggatctctagcctnctnaagttantttagcctcccaaatgcaagacaagaatctaacataaaatttancttgnatnagaantntgcatcatcgaatcttgcgctgctatgaattatcctggagtagggatctgcatctggggcacctgtagactggtgcgagtttaaacctaaggatatgcattgactcacgcaccattagtctcatacat

SEQ ID NO: 57710 - DNA, 2427 bp, Homo sapiens
ccttcatttcaaagactacctgaagtaaaatgcagttttcttctacctactcggtgtcttttgcagatcagagtatggacatttgaaatattgctgcttctttcccccttctgctgttaactggatccagagttctgtgggaaatagaagatcaagcattactgtcctttgattaaatgtgatatctaccactctgcaatattccagacaggtgtcttccttaccgttacatggtctttaacacttttactgattgcaatattttccccataaaatcttcattctattataatattgatcttgaatttgaatatgtgcaaggtcagatacatttctcaaacataacatttaataaataatgtgatataattatttaatagaaagaataattccgaccttcaagcaagtttctgaaggtattttatgatgtataacaactgaagttttacaataaaaactaatttaaatgttagctgaagatatgtggcatttaaattaaaatggaaattatataaaggaaagtgatttttaaggatatacataaagatatatttagaattttcatgatactgttctcctcatctactgcttatgttaagtgagaactttcttagtaatacataatgcatgatgttactgcattttctaaatgactagtaagtgattagttttttcacttatgcctattaatttgataccaatttaatcatgataaaacaataaccgttaacatatattttgttaaatggacatttaaaagaatgttgttcaggttttttttttaaatactgatatggggcatacaatctattcacatgttttctactgaagtactaagtaaaaaaattaaatcattatcagaataaaaatatgtgttctaaaattagcaacaatttctggggatacatgcagatgttgttaaacgtacctctgcatacagatatattataaaacacaagcaatgttatttatgaaactgtgatgcagtcttcaacatcaagaaaaaatgacaactataataaaatttacaacacagtttcacagtctaaatgctatgttcctttaagtattttcatatttttaatcatttattaagagaaaattgtgaaaagttaatttggccttatagagagattcaggatagatgtagcctatagatgtgtcattttaataagttgggatacatgtttagtttttccttatattcctgttcagtgaacagattttcataattctcacttgttaaagtgctgcaaaaattgcattttcagtactctaaattactacattagaagagagcatttctccattgtctttattttctgttatatatgtgttgtaaaagtacactacattagaagggagcttttccgttgtctttattttctgttatacatgtgttgttaaagtacatgcattcttagactaactctcagatgctttgctcttttggagctgaagaattgtttgatggtgatgtcatatatctgatagattagtttcagtggttctcatttcacttttatacgtaatttcttaactatattaagatagttgcaggcagtgtacctcaggttgactctgtacatctgaatagtgagtcactagtattttgcttcaagccttctgaaaatataaccatagttacctaagcacacagtgaatagtcacatggtagtacttgtgattagagcatgtaaaacaatgtaattgaaaagtcagcttccatattttgtaggggaaatagaacaccctactttttatctagtgtgaaatatttaatcgaatttttgttgatttatattatgttacctgtgctgaattaggtttggtacttgtgttttgtttgacatattagtaagttgcttttgcttctttctgtcaacttattttttaaataaaattgatctggaaaaattgttaatgggatgttttaaataatgaatttttcatccagcatcagttgaaaaggaaaagaaagcttcattatggaaagagttttttcccagattaatgacagaattaatggaactacaggaattctatgacccagatacagtggaacttatgacctggataaaaaggcaagctccagttgcagctgtgtttgcagggagtccacagttaatgggtgcgatagtgtcgggaataccaatgggtcaccctgcatcaaaacacatggagcagactgctgagccagctcaggggaagcggagagaccccaggagtgacggtgagaatgcaactcacttgtcattacacaggatatggcagatcggatttgaccaacaaaatggggaggaactgatccagatgtggaatgtgacagagaatcccttcccactgccatggaacatttataaaaataatcatacgttaatcaatgaagaaagggagccacacattaaaaaagcagaaatgacaggc

SEQ ID NO: 57711 - DNA, 1784 bp, Homo sapiens
ccttcatttcaaagactacctgaagtaaaatgcagttttcttctacctactcggtgtcttttgcagatcagagtatggacatttgaaatattgctgcttctttcccccttctgctgttaactggatccagagttctgtgggaaatagaagatcaagcattactgtcctttgattaaatgtgatatctaccactctgcaatattccagacaggtgtcttccttaccgttacatggtctttaacacttttactgattgcaatattttccccataaaatcttcattctattataatattgatcttgaatttgaatatgtgcaaggtcagatacatttctcaaacataacatttaataaataatgtgatataattatttaatagaaagaataattccgaccttcaagcaagtttctgaaggtattttatgatgtataacaactgaagttttacaataaaaactaatttaaatgttagctgaagatatgtggcatttaaattaaaatggaaattatataaaggaaagtgatttttaaggatatacataaagatatatttagaattttcatgatactgttctcctcatctactgcttatgttaagtgagaactttcttagtaatacataatgcatgatgttactgcattttctaaatgactagtaagtgattagttttttcacttatgcctattaatttgataccaatttaatcatgataaaacaataaccgttaacatatattttgttaaatggacatttaaaagaatgttgttcaggttttttttttaaatactgatatggggcatacaatctattcacatgttttctactgaagtactaagtaaaaaaattaaatcattatcagaataaaaatatgtgttctaaaattagcaacaatttctggggatacatgcagatgttgttaaacgtacctctgcatacagatatattataaaacacaagcaatgttatttatgaaactgtgatgcagtcttcaacatcaagaaaaaatgacaactataataaaatttacaacacagtttcacagtctaaatgctatgttcctttaagtattttcatatttttaatcatttattaagagaaaattgtgaaaagttaatttggccttatagagagattcaggatagatgtagcctatagatgtgtcattttaataagttgggatacatgtttagtttttccttatattcctgttcagtcaagaagcatcctgagttgacttcccgtcagatcccactggttgggactgagtcatctgttgtatcctagttataaaggagactagaaaagtgcataactggctttttgagcctctagagtggcaggcgaactctgatgttgaggaaaaaggatagggtaatggtgttgacacaggcactgttgaatacgtatgtacatattttaatagttttctcattaatcaaatggaaatgctatcgattttataggatcgttgtgagaggaagtgagaattgaaatgaaaggcatctagtcttccccggtccccatccacttgacccaccatacctcaagccacttctggctccatgctctttctttccttagggttttgaaacatgttcttcagcctagaatactcctcctccactcttaatttctacccatcctgcaaaactcaggatgcttcttgacgcatcctgagttttatacgtataatttaccagtttccagtacactacaaaatatggattggaatatgggccgcttagctcagaggaggaatgtaagaagcctaaatgacaagaa

SEQ ID NO: 57712 - DNA, 506 bp, Homo sapiens
gcggccgcctactactactaaatttgcggccggtacgactgaagaattgtttgatggtgatgtcatatatctgatagattagtttcagtggttctcatttcacttttatacgtaatttcttaactatattaagatagttgcaggcagtgtacctcaggttgactctgtacatctgaatagtgagtcactagtattttgcttcaagccttctgaaaatataaccatagttacctaagcacacagtgaatagtcacatggtagtacttgtgattagagcatgtaaaacaatgtaattgaaaagtcagcttccatattttgtaggggaaatagaacaccctactttttatctagtgtgaaatatttaatcgaatttttgttgatttatattatgttacctgtgctgaattaggtttggtacttgtgttttgtttgacatattagtaagttgcttttgcttctttctgtcaacttattttttaaataaaattgatctggaaaaattgtta

SEQ ID NO: 57713 - DNA, 2540 bp, Homo sapiens
gaacttgtttgagccgtaagcccgagcctagcgtcgcacgctgggcgactcccctcaggctctcaggccggcgccttcgggggaccacgtagcgccccagcggtggcggctgcgcccggctcagggcggtgccgcggccactggctcctcctcggggtggggcgggccgcgccgggcgagggcgggaggaggagcagcgcagcggcgtgaggagctgccgcgcgaggagcgcgtcgcgtccgcacttctcctgcccgagagactgagccgcgctggcagctcgcgtcgagtcggactgccctagccgcatcccgcggcgcccggtcgggtcccgggcaccaggcaacacctaggccgttcccttcagacagccccgggccagcggccccctcgggaaatgtccagcggccgcagaaggggcagcgccccctggcacagcttctcccggttcttcgctccccgaagtccttcccgggacaaggaagaggaagaggaggagaggccggggacgagcccgcctccagctccaggccggtccgctgccagccacgtactaaatgaactgatacagactgagagagtttatgttcgagaactgtatactgttttgttgggttatagagcggagatggataatccagagatgtttgatcttatgccacctctcctgagaaataaaaaggacattctctttggaaacatggcagaaatatatgaattccataacgacattttcttgagcagcctggaaaattgtgctcatgctccagaaagagtgggaccttgtttcctggaaaggaaggatgattttcagatgtatgcaaaatattgtcagaataagcccagatcagaaacaatttggaggaagtattcagaatgcgcatttttccaggaatgtcaaagaaagttaaaacacagacttagactggattcctatttactcaaaccagtgcaacgaatcactaaatatcagttattgttgaaggagctattaaaatatagcaaagactgtgaaggatctgctctgttgaagaaggcactcgatgcaatgctggatttactgaagtcagttaatgattctatgcatcagattgcaataaatggctatattggaaacttaaatgaactgggcaagatgataatgcaaggtggattcagcgtttggatagggcacaagaaaggtgctacaaaaatgaaggatttggctagattcaaaccaatgcagcgacaccttttcttgtatgaaaaagccattgttttttgcaaaaggcgtgttgaaagtggagaaggctctgacagatacccgtcatacagttttaaacactgttggaaaatggatgaagttggaatcactgaatatgtaaaaggtgataaccgcaagtttgaaatctggtatggtgaaaaggaagaagtttatattgtccaggcttctaatgtagatgtgaagatgacgtggctaaaagaaataagaaatattttgttgaagcagcaggaacttttgacagttaaaaaaagaaagcaacaggatcaattaacagaacgggataagtttcagatttctcttcagcagaatgatgaaaagcaacagggagcttttataagtactgaggaaactgaattggaacacaccagcactgtggtggaggtctgtgaggcaattgcgtcagttcaggcagaagcaaatacagtttggactgaggcatcacaatctgcagaaatctctgaagaacctgcggaatggtcaagcaactatttctaccctacttatgatgaaaatgaagaagaaaataggcccctcatgagacctgtgtcggagatggctctcctatattgatgaagctactatgtcaaatggcaagtagctctttcctgcctgcttctcagctcatttggaaaaatactgcgcaaaagacattgagctcaaatgatgcagatgttgttttcaggttaatggacacgcaaagaaaccacagcacatacttcttttctttcatttaataaagcttttaattatggtacgctgtctttttaaaatcatgtatttaatgtgtcagatattgtgcttgaaagattctcatctcagaatacttttggacttgaaaattatttcttctctactttgtaaccaaatgcaatcggtgtgccttggattatttagtttattaatgaattaagtcaaaattacggctgcaaaatggctaaggtcaagtaaagcacaacattatgatttaatatgcttttgttgaaaccacagcttttgtgcccattgttttaacttgtgtgaaacaatacaaagcccagaaattcttttcggggcatgagtaaattttgttcagggctactgtctgtatgtgcccagataaaattttcatgagagtagtttacaaaagccgtatttaaaagttaatattttcacactttttttctggatttctgcttataattaatgtaacttaaattagttgtgctctgctattttctgtatatttcatgttgtaattctttttttcaaataaaaattaattcttcaggttaaaaaa

SEQ ID NO: 57714 - DNA, 3660 bp, Homo sapiens
ttttttttttttcctccccagcattgctgccactgtgctaatggaagcagccacggcagctttgtttgatagagatttttggctgccgtttttaaatactacccaagaagcagctcgtatttcatcaatgttgcgttgacaattggaaaagaaaagtgtaattgcgtacaggcgaaatggcagaagcaaatccccggagaggcaagatgaggttcagaaggaatgcggcttccttccctgggaacttgcacttggttttggttttacgtcctaccagctttcttcaacgaacgttcacagacattggattttggtttagtcaggaggattttatgcttaaattaccagttgttatgctgagctcagttagtgatttgctgacatacattgatgacaagcaattaacccctgagttaggcggcaccttgcagtactgccacagtgaatggatcatcttcagaaatgctatagaaaattttgccctcacagtgaaagaaatggctcagatgttacagtcctttggaactgaactggctgagacagaactaccagatgatattccctcaatagaagaaattctggcaattcgtgctgaaaggtatcatctgttgaagaatgatattacagctgtaaccaaagaaggaaaaattctgctaacaaatctggaagtgcctgacactgaaggagctgtcagttcaagactagaatgtcatcggcaaataagtggtgactggcaaactattaataagttgctgactcaagtacatgatatggaaacagcttttgatggattttgggaaaaacatcaattaaaaatggagcagtatctgcaactatggaagtttgagcaggattttcaacagcttgtgactgaagttgaatttctattaaaccaacaagcagaactggctgatgtaacagggactatagctcaagtaaaacaaaaaataaaaaaattggaaaacttagatgaaaattctcaggagctattatcaaaggcccagtttgtgatattacatggacacaagcttgcagcaaatcaccattatgcacttgatttaatctgccagaggtgcaatgagctacgttacctttctgatattttggttaatgagataaaagcaaaacggatacaactcagcaggaccttcaaaatgcataaactcctacagcaggctcgtcaatgctgtgatgaaggggaatgtcttctagctaatcaggaaatagataagtttcagtctaaagaagatgctcagaaagctctccaagacattgaaaattttcttgaaatggctctaccctttataaattatgaacctgaaacactgcagtatgaatttgatgtaatattatctcctgagcttaaggttcaaatgaagactatacaactcaagcttgaaaacattcgaagtatatttgagaaccagcaggctggtttcaggaacctggcagataagcatgtgaggccaatccaatttgtggtacccacacctgaaaatttggtcacatctgggacaccatttttttcatctaaacaagggaagaagacttggagacaaaatcagagcaacttaaaaattgaagtggtgcctgattgtcaggagaagagaagttctggtccatcctccagtttggacaatggcaatagcttggatgttttaaagaaccacgtactaaatgaactgatacagactgagagagtttatgttcgagaactgtatactgttttgttgggttatagagcggagatggataatccagagatgtttgatcttatgccacctctcctgagaaataaaaaggacattctctttggaaacatggcagaaatatatgaattccataacgacattttcttgagcagcctggaaaattgtgctcatgctccagaaagagtgggaccttgtttcctggaaaggaaggatgattttcagatgtatgcaaaatattgtcagaataagcccagatcagaaacaatttggaggaagtattcagaatgcgcatttttccaggaatgtcaaagaaagttaaaacacagacttagactggattcctatttactcaaaccagtgcaacgaatcactaaatatcagttattgttgaaggagctattaaaatatagcaaagactgtgaaggatctgctctgttgaagaaggcactcgatgcaatgctggatttactgaagtcagttaatgattctatgcatcagattgcaataaatggctatattggaaacttaaatgaactgggcaagatgataatgcaaggtggattcagcgtttggatagggcacaagaaaggtgctacaaaaatgaaggatttggctagattcaaaccaatgcagcgacaccttttcttgtatgaaaaagccattgttttttgcaaaaggcgtgttgaaagtggagaaggctctgacagatacccgtcatacagttttaaacactgttggaaaatggatgaagttggaatcactgaatatgtaaaaggtgataaccgcaagtttgaaatctggtatggtgaaaaggaagaagtttatattgtccaggcttctaatgtagatgtgaagatgacgtggctaaaagaaataagaaatattttgttgaagcagcaggaacttttgacagttaaaaaaagaaagcaacaggatcaattaacagaacgggataagtttcagatttctcttcagcagaatgatgaaaagcaacagggagcttttataagtactgaggaaactgaattggaacacaccagcactgtggtggaggtctgtgaggcaattgcgtcagttcaggcagaagcaaatacagtttggactgaggcatcacaatctgcagaaatctctgaagaacctgcggaatggtcaagcaactatttctaccctacttatgatgaaaatgaagaagaaaataggcccctcatgagacctgtgtcggagatggctctcctatattgatgaagctactatgtcaaatggcaagtagctctttcctgcctgcttctcagctcatttggaaaaatactgcgcaaaagacattgagctcaaatgatgcagatgttgttttcaggttaatggacacgcaaagaaaccacagcacatacttcttttctttcatttaataaagcttttaattatggtacgctgtctttttaaaatcatgtatttaatgtgtcagatattgtgcttgaaagattctcatctcagaatacttttggacttgaaaattatttcttctctactttgtaaccaaatgcaatcggtgtgccttggattatttagtttattaatgaattaagtcaaaattacggctgcaaaatggctaaggtcaagtaaagcacaacattatgatttaatatgcttttgttgaaaccacagcttttgtgcccattgttttaacttgtgtgaaacaatacaaagcccagaaattcttttcggggcatgagtaaattttgttcagggctactgtctgtatgtgcccagataaaattttcatgagagtagtttacaaaagccgtatttaaaagttaatattttcacactttttttctggatttctgcttataattaatgtaacttaaattagttgtgctctgctattttctgtatatttcatgttgtaattctttttttcaaataaaaattaattcttcaggttaaaaaa

SEQ ID NO: 57715 - DNA, 2412 bp, Homo sapiens
cactctttgggaggccgacgcgggcggaccggcgggtgctgggaaccgagcctcggcttgcggccggcagtttccgtgggtctgtgaagaggtcggcggcccctgcgggcgccagtcaggttcaaatgaagactatacaactcaagcttgaaaacattcgaagtatatttgagaaccagcaggctggtttcaggaacctggcagataagcatgtgaggccaatccaatttgtggtacccacacctgaaaatttggtcacatctgggacaccatttttttcatctaaacaagggaagaagacttggagacaaaatcagagcaacttaaaaattgaagtggtgcctgattgtcaggagaagagaagttctggtccatcctccagtttggacaatggcaatagcttggatgttttaaagaaccacgtactaaatgaactgatacagactgagagagtttatgttcgagaactgtatactgttttgttgggttatagagcggagatggataatccagagatgtttgatcttatgccacctctcctgagaaataaaaaggacattctctttggaaacatggcagaaatatatgaattccataacgacattttcttgagcagcctggaaaattgtgctcatgctccagaaagagtgggaccttgtttcctggaaaggaaggatgattttcagatgtatgcaaaatattgtcagaataagcccagatcagaaacaatttggaggaagtattcagaatgcgcatttttccaggaatgtcaaagaaagttaaaacacagacttagactggattcctatttactcaaaccagtgcaacgaatcactaaatatcagttattgttgaaggagctattaaaatatagcaaagactgtgaaggatctgctctgttgaagaaggcactcgatgcaatgctggatttactgaagtcagttaatgattctatgcatcagattgcaataaatggctatattggaaacttaaatgaactgggcaagatgataatgcaaggtggattcagcgtttggatagggcacaagaaaggtgctacaaaaatgaaggatttggctagattcaaaccaatgcagcgacaccttttcttgtatgaaaaagccattgttttttgcaaaaggcgtgttgaaagtggagaaggctctgacagatacccgtcatacagttttaaacactgttggaaaatggatgaagttggaatcactgaatatgtaaaaggtgataaccgcaagtttgaaatctggtatggtgaaaaggaagaagtttatattgtccaggcttctaatgtagatgtgaagatgacgtggctaaaagaaataagaaatattttgttgaagcagcaggaacttttgacagttaaaaaaagaaagcaacaggatcaattaacagaacgggataagtttcagatttctcttcagcagaatgatgaaaagcaacagggagcttttataagtactgaggaaactgaattggaacacaccagcactgtggtggaggtctgtgaggcaattgcgtcagttcaggcagaagcaaatacagtttggactgaggcatcacaatctgcagaaatctctgaagaacctgcggaatggtcaagcaactatttctaccctacttatgatgaaaatgaagaagaaaataggcccctcatgagacctgtgtcggagatggctctcctatattgatgaagctactatgtcaaatggcaagtagctctttcctgcctgcttctcagctcatttggaaaaatactgcgcaaaagacattgagctcaaatgatgcagatgttgttttcaggttaatggacacgcaaagaaaccacagcacatacttcttttctttcatttaataaagcttttaattatggtacgctgtctttttaaaatcatgtatttaatgtgtcagatattgtgcttgaaagattctcatctcagaatacttttggacttgaaaattatttcttctctactttgtaaccaaatgcaatcggtgtgccttggattatttagtttattaatgaattaagtcaaaattacggctgcaaaatggctaaggtcaagtaaagcacaacattatgatttaatatgcttttgttgaaaccacagcttttgtgcccattgttttaacttgtgtgaaacaatacaaagcccagaaattcttttcggggcatgagtaaattttgttcagggctactgtctgtatgtgcccagataaaattttcatgagagtagtttacaaaagccgtatttaaaagttaatattttcacactttttttctggatttctgcttataattaatgtaacttaaattagttgtgctctgctattttctgtatatttcatgttgtaattctttttttcaaataaaaattaattcttcaggttaaaaaa

SEQ ID NO: 57716 - DNA, 3708 bp, Homo sapiens
aaaccgatctgctcctccgtataaaggacatcagtcatttcttaatgcaagacatcgccttcttgtctggtggccggggaaaggacaatgcttggatcattacgtttccagaaaactgtaattttagatgtataccagaggaagtaatagcaaaagtacttacttacctgacatctattgcaaggcaaaatggatcagactcccggtttaccattattctggatcgaagattggatacatggtcttctctcaaaatctctctccaaaaaatctcggcttccttccctgggaacttgcacttggttttggttttacgtcctaccagctttcttcaacgaacgttcacagacattggattttggtttagtcaggaggattttatgcttaaattaccagttgttatgctgagctcagttagtgatttgctgacatacattgatgacaagcaattaacccctgagttaggcggcaccttgcagtactgccacagtgaatggatcatcttcagaaatgctatagaaaattttgccctcacagtgaaagaaatggctcagatgttacagtcctttggaactgaactggctgagacagaactaccagatgatattccctcaatagaagaaattctggcaattcgtgctgaaaggtatcatctgttgaagaatgatattacagctgtaaccaaagaaggaaaaattctgctaacaaatctggaagtgcctgacactgaaggagctgtcagttcaagactagaatgtcatcggcaaataagtggtgactggcaaactattaataagttgctgactcaagtacatgatatggaaacagcttttgatggattttgggaaaaacatcaattaaaaatggagcagtatctgcaactatggaagtttgagcaggattttcaacagcttgtgactgaagttgaatttctattaaaccaacaagcagaactggctgatgtaacagggactatagctcaagtaaaacaaaaaataaaaaaattggaaaacttagatgaaaattctcaggagctattatcaaaggcccagtttgtgatattacatggacacaagcttgcagcaaatcaccattatgcacttgatttaatctgccagaggtgcaatgagctacgttacctttctgatattttggttaatgagataaaagcaaaacggatacaactcagcaggaccttcaaaatgcataaactcctacagcaggctcgtcaatgctgtgatgaaggggaatgtcttctagctaatcaggaaatagataagtttcagtctaaagaagatgctcagaaagctctccaagacattgaaaattttcttgaaatggctctaccctttataaattatgaacctgaaacactgcagtatgaatttgatgtaatattatctcctgagcttaaggttcaaatgaagactatacaactcaagcttgaaaacattcgaagtatatttgagaaccagcaggctggtttcaggaacctggcagataagcatgtgaggccaatccaatttgtggtacccacacctgaaaatttggtcacatctgggacaccatttttttcatctaaacaagggaagaagacttggagacaaaatcagagcaacttaaaaattgaagtggtgcctgattgtcaggagaagagaagttctggtccatcctccagtttggacaatggcaatagcttggatgttttaaagaaccacgtactaaatgaactgatacagactgagagagtttatgttcgagaactgtatactgttttgttgggttatagagcggagatggataatccagagatgtttgatcttatgccacctctcctgagaaataaaaaggacattctctttggaaacatggcagaaatatatgaattccataacgacattttcttgagcagcctggaaaattgtgctcatgctccagaaagagtgggaccttgtttcctggaaaggaaggatgattttcagatgtatgcaaaatattgtcagaataagcccagatcagaaacaatttggaggaagtattcagaatgcgcatttttccaggaatgtcaaagaaagttaaaacacagacttagactggattcctatttactcaaaccagtgcaacgaatcactaaatatcagttattgttgaaggagctattaaaatatagcaaagactgtgaaggatctgctctgttgaagaaggcactcgatgcaatgctggatttactgaagtcagttaatgattctatgcatcagattgcaataaatggctatattggaaacttaaatgaactgggcaagatgataatgcaaggtggattcagcgtttggatagggcacaagaaaggtgctacaaaaatgaaggatttggctagattcaaaccaatgcagcgacaccttttcttgtatgaaaaagccattgttttttgcaaaaggcgtgttgaaagtggagaaggctctgacagatacccgtcatacagttttaaacactgttggaaaatggatgaagttggaatcactgaatatgtaaaaggtgataaccgcaagtttgaaatctggtatggtgaaaaggaagaagtttatattgtccaggcttctaatgtagatgtgaagatgacgtggctaaaagaaataagaaatattttgttgaagcagcaggaacttttgacagttaaaaaaagaaagcaacaggatcaattaacagaacgggataagtttcagatttctcttcagcagaatgatgaaaagcaacagggagcttttataagtactgaggaaactgaattggaacacaccagcactgtggtggaggtctgtgaggcaattgcgtcagttcaggcagaagcaaatacagtttggactgaggcatcacaatctgcagaaatctctgaagaacctgcggaatggtcaagcaactatttctaccctacttatgatgaaaatgaagaagaaaataggcccctcatgagacctgtgtcggagatggctctcctatattgatgaagctactatgtcaaatggcaagtagctctttcctgcctgcttctcagctcatttggaaaaatactgcgcaaaagacattgagctcaaatgatgcagatgttgttttcaggttaatggacacgcaaagaaaccacagcacatacttcttttctttcatttaataaagcttttaattatggtacgctgtctttttaaaatcatgtatttaatgtgtcagatattgtgcttgaaagattctcatctcagaatacttttggacttgaaaattatttcttctctactttgtaaccaaatgcaatcggtgtgccttggattatttagtttattaatgaattaagtcaaaattacggctgcaaaatggctaaggtcaagtaaagcacaacattatgatttaatatgcttttgttgaaaccacagcttttgtgcccattgttttaacttgtgtgaaacaatacaaagcccagaaattcttttcggggcatgagtaaattttgttcagggctactgtctgtatgtgcccagataaaattttcatgagagtagtttacaaaagccgtatttaaaagttaatattttcacactttttttctggatttctgcttataattaatgtaacttaaattagttgtgctctgctattttctgtatatttcatgttgtaattctttttttcaaataaaaattaattcttcaggttaaaaaa

SEQ ID NO: 57717 - DNA, 3708 bp, Homo sapiens
ttttttttttttcctccccagcattgctgccactgtgctaatggaagcagccacggcagctttgtttgatagagatttttggctgccgtttttaaatactacccaagaagcagctcgtatttcatcaatgttgcgttgacaattggaaaagaaaagtgtaattgcgtacaggcgaaatggcagaagcaaatccccggagaggcaagatgaggttcagaaggaatgcggcttccttccctgggaacttgcacttggttttggttttacgtcctaccagctttcttcaacgaacgttcacagacattggattttggtttagtcaggaggattttatgcttaaattaccagttgttatgctgagctcagttagtgatttgctgacatacattgatgacaagcaattaacccctgagttaggcggcaccttgcagtactgccacagtgaatggatcatcttcagaaatgctatagaaaattttgccctcacagtgaaagaaatggctcagatgttacagtcctttggaactgaactggctgagacagaactaccagatgatattccctcaatagaagaaattctggcaattcgtgctgaaaggtatcatctgttgaagaatgatattacagctgtaaccaaagaaggaaaaattctgctaacaaatctggaagtgcctgacactgaaggagctgtcagttcaagactagaatgtcatcggcaaataagtggtgactggcaaactattaataagttgctgactcaagtacatgatatggaaacagcttttgatggattttgggaaaaacatcaattaaaaatggagcagtatctgcaactatggaagtttgagcaggattttcaacagcttgtgactgaagttgaatttctattaaaccaacaagcagaactggctgatgtaacagggactatagctcaagtaaaacaaaaaataaaaaaattggaaaacttagatgaaaattctcaggagctattatcaaaggcccagtttgtgatattacatggacacaagcttgcagcaaatcaccattatgcacttgatttaatctgccagaggtgcaatgagctacgttacctttctgatattttggttaatgagataaaagcaaaacggatacaactcagcaggaccttcaaaatgcataaactcctacagcaggctcgtcaatgctgtgatgaaggggaatgtcttctagctaatcaggaaatagataagtttcagtctaaagaagatgctcagaaagctctccaagacattgaaaattttcttgaaatggctctaccctttataaattatgaacctgaaacactgcagtatgaatttgatgtaatattatctcctgagcttaaggttcaaatgaagactatacaactcaagcttgaaaacattcgaagtatatttgagaaccagcaggctggtttcaggaacctggcagataagcatgtgaggccaatccaatttgtggtacccacacctgaaaatttggtcacatctgggacaccatttttttcatctaaacaagtgggagttggatactctttctttcaagcatgtaaacttttttcaaaagggaagaagacttggagacaaaatcagagcaacttaaaaattgaagtggtgcctgattgtcaggagaagagaagttctggtccatcctccagtttggacaatggcaatagcttggatgttttaaagaaccacgtactaaatgaactgatacagactgagagagtttatgttcgagaactgtatactgttttgttgggttatagagcggagatggataatccagagatgtttgatcttatgccacctctcctgagaaataaaaaggacattctctttggaaacatggcagaaatatatgaattccataacgacattttcttgagcagcctggaaaattgtgctcatgctccagaaagagtgggaccttgtttcctggaaaggaaggatgattttcagatgtatgcaaaatattgtcagaataagcccagatcagaaacaatttggaggaagtattcagaatgcgcatttttccaggaatgtcaaagaaagttaaaacacagacttagactggattcctatttactcaaaccagtgcaacgaatcactaaatatcagttattgttgaaggagctattaaaatatagcaaagactgtgaaggatctgctctgttgaagaaggcactcgatgcaatgctggatttactgaagtcagttaatgattctatgcatcagattgcaataaatggctatattggaaacttaaatgaactgggcaagatgataatgcaaggtggattcagcgtttggatagggcacaagaaaggtgctacaaaaatgaaggatttggctagattcaaaccaatgcagcgacaccttttcttgtatgaaaaagccattgttttttgcaaaaggcgtgttgaaagtggagaaggctctgacagatacccgtcatacagttttaaacactgttggaaaatggatgaagttggaatcactgaatatgtaaaaggtgataaccgcaagtttgaaatctggtatggtgaaaaggaagaagtttatattgtccaggcttctaatgtagatgtgaagatgacgtggctaaaagaaataagaaatattttgttgaagcagcaggaacttttgacagttaaaaaaagaaagcaacaggatcaattaacagaacgggataagtttcagatttctcttcagcagaatgatgaaaagcaacagggagcttttataagtactgaggaaactgaattggaacacaccagcactgtggtggaggtctgtgaggcaattgcgtcagttcaggcagaagcaaatacagtttggactgaggcatcacaatctgcagaaatctctgaagaacctgcggaatggtcaagcaactatttctaccctacttatgatgaaaatgaagaagaaaataggcccctcatgagacctgtgtcggagatggctctcctatattgatgaagctactatgtcaaatggcaagtagctctttcctgcctgcttctcagctcatttggaaaaatactgcgcaaaagacattgagctcaaatgatgcagatgttgttttcaggttaatggacacgcaaagaaaccacagcacatacttcttttctttcatttaataaagcttttaattatggtacgctgtctttttaaaatcatgtatttaatgtgtcagatattgtgcttgaaagattctcatctcagaatacttttggacttgaaaattatttcttctctactttgtaaccaaatgcaatcggtgtgccttggattatttagtttattaatgaattaagtcaaaattacggctgcaaaatggctaaggtcaagtaaagcacaacattatgatttaatatgcttttgttgaaaccacagcttttgtgcccattgttttaacttgtgtgaaacaatacaaagcccagaaattcttttcggggcatgagtaaattttgttcagggctactgtctgtatgtgcccagataaaattttcatgagagtagtttacaaaagccgtatttaaaagttaatattttcacactttttttctggatttctgcttataattaatgtaacttaaattagttgtgctctgctattttctgtatatttcatgttgtaattctttttttcaaataaaaattaattcttcaggttaaaaaa

SEQ ID NO: 57718 - DNA, 560 bp, Homo sapiens
  misc_feature (281)..(282): n is a, c, g, or t
  misc_feature (537)..(537): n is a, c, g, or t
gtactgtgtgtttgtgtctggggatactgggaaagggtaactggagggggattcaatgtgtctgtctcatccaataagcactcatgacctcagccccatactctttcttccctatgttcccagagacagaatagacctggccccttccttctaggggatcacaatattggaaggatgaggactccaaacagccagctcccatgccaaatagaacgatgagtgctgggatcaatttctatgggagcctggggagagggatcctttctagttgaagggtggtnnggtcaaggaagacttcctggaggaagtggttttgatccacactttgaaagatgcatagactttgggataaactggggcaataacagttggtaggggaatcagcaggatccagcgcccagaaataaaaaagcccagagtgattgtggggaggtggcgtttcccaaggtggctgttccacagagtggatatagggaggtggtaggaagtgagaggagatgaagtgcacacgacagtttctaatcccagtcttgggancctaggatttgtctttcctgcag

SEQ ID NO: 57719 - DNA, 4578 bp, Homo sapiens
agtccctctttgggtgacctgtgcctgcttcgtgcctggtgtgacgtctctcaggatgcctgagccggggaagaagccagtctcagcctttagcaagaagccacggtcagtggaagtggccgcaggcagccctgccgtgttcgaggccgagacagagcgggcaggagtgaaggtgcgctggcagcgcggaggcagtgacatcagcgccagcaacaagtacggcctggccacagagggcacacggcatacgctgacagtgcgggaagtgggccctgccgaccagggatcttacgcagtcattgctggctcctccaaggtcaagttcgacctcaaggtcatagaggcagagaaggcagagcccatgctggcccctgcccctgcccctgctgaggccactggagcccctggagaagccccggccccagccgctgagctgggagaaagtgccccaagtcccaaagggtcaagctcagcagctctcaatggtcctacccctggagcccccgatgaccccattggcctcttcgtgatgcggccacaggatggcgaggtgaccgtgggtggcagcatcaccttctcagcccgcgtggccggcgccagcctcctgaagccgcctgtggtcaagtggttcaagggcaaatgggtggacctgagcagcaaggtgggccagcacctgcagctgcacgacagctacgaccgcgccagcaaggtctatctgttcgagctgcacatcaccgatgcccagcctgccttcactggcagctaccgctgtgaggtgtccaccaaggacaaatttgaatgctccaacttcaatctcactgtccacgaggccatgggcaccggagacctggacctcctatcagccttccgccgcacgagcctggctggaggtggtcggcggatcagtgatagccatgaggacactgggattctggacttcagctcactgctgaaaaagagagacagtttccggaccccgagggactcgaagctggaggcaccagcagaggaggacgtgtgggagatcctacggcaggcacccccatctgagtacgagcgcatcgccttccagtacggcgtcactgacctgcgcggcatgctaaagaggctcaagggcatgaggcgcgatgagaagaagagcacagcctttcagaagaagctggagccggcctaccaggtgagcaaaggccacaagatccggctgaccgtggaactggctgaccatgacgctgaggtcaaatggctcaagaatggccaggagatccagatgagcggcagcaagtacatctttgagtccatcggtgccaagcgtaccctgaccatcagccagtgctcattggcggacgacgcagcctaccagtgcgtggtgggtggcgagaagtgtagcacggagctctttgtgaaagagccccctgtgctcatcacgcgccccttggaggaccagctggtgatggtggggcagcgggtggagtttgagtgtgaagtatcggaggagggggcgcaagtcaaatggctgaaggacggggtggagctgacccgggaggagaccttcaaataccggttcaagaaggacgggcagagacaccacctgatcatcaacgaggccatgctggaggacgcggggcactatgcactgtgcactagcgggggccaggcgctgcgtgagctcattgtgcaggaaaagaagctggaggtgtaccagagcatcgcagacctgatggtgggcgcaaaggaccaggcggtgttcaaatgtgaggtctcagatgagaatgttcggggtgtgtggctgaagaatgggaaggagctggtgcccgacagccgcataaaggtgtcccacatcgggcgggtccacaaactgaccattgacgacgtcacacctgccgacgaggctgactacagctttgtgcccgagggcttcgcctgcaacctgtcagccaagctccacttcatggaggtcaagattgacttcgtacccaggcaggaacctcccaagatccacctggactgcccaggccgcataccagacaccattgtggttgtagctggaaataagctacgtctggacgtccctatctctggggaccctgctcccactgtgatctggcagaaggctatcacgcaggggaataaggccccagccaggccagccccagatgccccagaggacacaggtgacagcgatgagtgggtgtttgacaagaagctgctgtgtgagaccgagggccgggtccgcgtggagaccaccaaggaccgcagcatcttcacggtcgagggggcagagaaggaagatgagggcgtctacacggtcacagtgaagaaccctgtgggcgaggaccaggtcaacctcacagtcaaggtcatcgacgtgccagacgcacctgcggcccccaagatcagcaacgtgggagaggactcctgcacagtacagtgggagccgcctgcctacgatggcgggcagcccatcctgggctacatcctggagcgcaagaagaagaagagctaccggtggatgcggctgaacttcgacctgattcaggagctgagtcatgaagcgcggcgcatgatcgagggcgtggtgtacgagatgcgcgtctacgcggtcaacgccatcggcatgtccaggcccagccctgcctcccagcccttcatgcctatcggtccccccagcgaacccacccacctggcagtagaggacgtctctgacaccacggtctccctcaagtggcggcccccagagcgcgtgggagcaggaggcctggatggctacagcgtggagtactgcccagagggctgctcagagtgggtggctgccctgcaggggctgacagagcacacatcgatactggtgaaggacctgcccacgggggcccggctgcttttccgagtgcgggcacacaatatggcagggcctggagcccctgttaccaccacggagccggtgacagtgcaggagatcctgcaacggccacggcttcagctgcccaggcacctgcgccagaccattcagaagaaggtcggggagcctgtgaaccttctcatccctttccagggcaagccccggcctcaggtgacctggaccaaagaggggcagcccctggcaggcgaggaggtgagcatccgcaacagccccacagacaccatcctgttcatccgggccgctcgccgcgtgcattcaggcacttaccaggtgacggtgcgcattgagaacatggaggacaaggccacgctggtgctgcaggttgttgacaagccaagtcctccccaggatctccgggtgactgacgcctggggtcttaatgtggctctggagtggaagccaccccaggatgtcggcaacacggagctctgggggtacacagtgcagaaagccgacaagaagaccatggagtggttcaccgtcttggagcattaccgccgcacccactgcgtggtgccagagctcatcattggcaatggctactacttccgcgtcttcagccagaatatggttggctttagtgacagagcggccaccaccaaggagcccgtctttatccccagaccaggcatcacctatgagccacccaactataaggccctggacttctccgaggccccaagcttcacccagcccctggtgaaccgctcggtcatcgcgggctacactgctatgctctgctgtgctgtccggggtagccccaagcccaagatttcctggttcaagaatggcctggacctgggagaagacgcccgcttccgcatgttcagcaagcagggagtgttgactctggagattagaaagccctgcccctttgacgggggcatctatgtctgcagggccaccaacttacagggcgaggcacggtgtgagtgccgcctggaggtgcgagtgcctcagtgaccaggctggctcctggggatggccaggtacaaccggatgccagccccgtgccaggagcctggagggaagttggggaaacccctccctactgttggatgtatgtgtgacaagtgtgtctcctgtgctgcgatgggggatcagcagggcagttgtcgggcagtcctgagtgggtgttgcacagactggtccacagggctcctgaaggaagcccctggatctttggggtaaaaggagggtggcctcaagaaacaatgtctggggacaggcctttctggcctgctatgtcttcccaatgtttattgggcaataaaagataagtgcagtcacagagaactcactcttcatcacctgagctcaccatagtctaatagaaaacaaccgaaaccaaataattcaagcactgcttattacaattttactgggtctctattttaccctcctacaagcctcagagtacttcgagtctcccttcaccatttccgacggcatctacggctcaacattttttgtagccacaggcttccacggacttcacgtcattattggctcaactttcctcactatctgcttcatccgccaactaatatttcactttacatccaaacatcactttggcttcgaagccgccgcctgatactggcattttgtagatgtggtttgactatttctgtatgtctccatctattgatgagggtctt

SEQ ID NO: 57720 - DNA, 502 bp, Homo sapiens
aggagggcccatccgttcgctcattcagccactcgacaaacatcacgggcatgctccctgagccgagcggcaacaggacaggtttttctgcccaaaaggagccccgctctgggggagatggaggcagatgcatccagcagatttcctgcgacactgctgtacatgagccatgtccagagtgccgtgggagcactgagcagagagccatccctgtgcctgggggtgatgcctttaggaggctgagaagatggtgaggaaaggcatcccaggcagaggaaactgtgtacaaaggggtggaggagggaaagggccttttgggtgtggagaatgaatgaaacatgtcaggagaggactgggtggggttgggaggatcagagccaggacaggggtgaatatgggcagtgagaagccttaaagggttgacggagggctggcgacatgatcagaaatgcatcctgttgagacccagcctggacaacacagtgagactccatatcactaa

SEQ ID NO: 57721 - DNA, 4323 bp, Homo sapiens
agtccctctttgggtgacctgtgcctgcttcgtgcctggtgtgacgtctctcaggatgcctgagccggggaagaagccagtctcagcctttagcaagaagccacggtcagtggaagtggccgcaggcagccctgccgtgttcgaggccgagacagagcgggcaggagtgaaggtgcgctggcagcgcggaggcagtgacatcagcgccagcaacaagtacggcctggccacagagggcacacggcatacgctgacagtgcgggaagtgggccctgccgaccagggatcttacgcagtcattgctggctcctccaaggtcaagttcgacctcaaggtcatagaggcagagaaggcagagcccatgctggcccctgcccctgcccctgctgaggccactggagcccctggagaagccccggccccagccgctgagctgggagaaagtgccccaagtcccaaagggtcaagctcagcagctctcaatggtcctacccctggagcccccgatgaccccattggcctcttcgtgatgcggccacaggatggcgaggtgaccgtgggtggcagcatcaccttctcagcccgcgtggccggcgccagcctcctgaagccgcctgtggtcaagtggttcaagggcaaatgggtggacctgagcagcaaggtgggccagcacctgcagctgcacgacagctacgaccgcgccagcaaggtctatctgttcgagctgcacatcaccgatgcccagcctgccttcactggcagctaccgctgtgaggtgtccaccaaggacaaatttgaatgctccaacttcaatctcactgtccacgaggccatgggcaccggagacctggacctcctatcagccttccgccgcacgagcctggctggaggtggtcggcggatcagtgatagccatgaggacactgggattctggacttcagctcactgctgaaaaagagagacagtttccggaccccgagggactcgaagctggaggcaccagcagaggaggacgtgtgggagatcctacggcaggcacccccatctgagtacgagcgcatcgccttccagtacggcgtcactgacctgcgcggcatgctaaagaggctcaagggcatgaggcgcgatgagaagaagagcacagcctttcagaagaagctggagccggcctaccaggtgagcaaaggccacaagatccggctgaccgtggaactggctgaccatgacgctgaggtcaaatggctcaagaatggccaggagatccagatgagcggcagcaagtacatctttgagtccatcggtgccaagcgtaccctgaccatcagccagtgctcattggcggacgacgcagcctaccagtgcgtggtgggtggcgagaagtgtagcacggagctctttgtgaaagagccccctgtgctcatcacgcgccccttggaggaccagctggtgatggtggggcagcgggtggagtttgagtgtgaagtatcggaggagggggcgcaagtcaaatggctgaaggacggggtggagctgacccgggaggagaccttcaaataccggttcaagaaggacgggcagagacaccacctgatcatcaacgaggccatgctggaggacgcggggcactatgcactgtgcactagcgggggccaggcgctgcgtgagctcattgtgcaggaaaagaagctggaggtgtaccagagcatcgcagacctgatggtgggcgcaaaggaccaggcggtgttcaaatgtgaggtctcagatgagaatgttcggggtgtgtggctgaagaatgggaaggagctggtgcccgacagccgcataaaggtgtcccacatcgggcgggtccacaaactgaccattgacgacgtcacacctgccgacgaggctgactacagctttgtgcccgagggcttcgcctgcaacctgtcagccaagctccacttcatggaggtcaagattgacttcgtacccaggcaggaacctcccaagatccacctggactgcccaggccgcataccagacaccattgtggttgtagctggaaataagctacgtctggacgtccctatctctggggaccctgctcccactgtgatctggcagaaggctatcacgcaggggaataaggccccagccaggccagccccagatgccccagaggacacaggtgacagcgatgagtgggtgtttgacaagaagctgctgtgtgagaccgagggccgggtccgcgtggagaccaccaaggaccgcagcatcttcacggtcgagggggcagagaaggaagatgagggcgtctacacggtcacagtgaagaaccctgtgggcgaggaccaggtcaacctcacagtcaaggtcatcgacgtgccagacgcacctgcggcccccaagatcagcaacgtgggagaggactcctgcacagtacagtgggagccgcctgcctacgatggcgggcagcccatcctgggctacatcctggagcgcaagaagaagaagagctaccggtggatgcggctgaacttcgacctgattcaggagctgagtcatgaagcgcggcgcatgatcgagggcgtggtgtacgagatgcgcgtctacgcggtcaacgccatcggcatgtccaggcccagccctgcctcccagcccttcatgcctatcggtccccccagcgaacccacccacctggcagtagaggacgtctctgacaccacggtctccctcaagtggcggcccccagagcgcgtgggagcaggaggcctggatggctacagcgtggagtactgcccagagggctgctcagagtgggtggctgccctgcaggggctgacagagcacacatcgatactggtgaaggacctgcccacgggggcccggctgcttttccgagtgcgggcacacaatatggcagggcctggagcccctgttaccaccacggagccggtgacagtgcaggagatcctgcaacggccacggcttcagctgcccaggcacctgcgccagaccattcagaagaaggtcggggagcctgtgaaccttctcatccctttccagggcaagccccggcctcaggtgacctggaccaaagaggggcagcccctggcaggcgaggaggtgagcatccgcaacagccccacagacaccatcctgttcatccgggccgctcgccgcgtgcattcaggcacttaccaggtgacggtgcgcattgagaacatggaggacaaggccacgctggtgctgcaggttgttgacaagccaagtcctccccaggatctccgggtgactgacgcctggggtcttaatgtggctctggagtggaagccaccccaggatgtcggcaacacggagctctgggggtacacagtgcagaaagccgacaagaagaccatggagtggttcaccgtcttggagcattaccgccgcacccactgcgtggtgccagagctcatcattggcaatggctactacttccgcgtcttcagccagaatatggttggctttagtgacagagcggccaccaccaaggagcccgtctttatccccagaccaggcatctatgtctgcagggccaccaacttacagggcgaggcacggtgtgagtgccgcctggaggtgcgagtgcctcagtgaccaggctggctcctggggatggccaggtacaaccggatgccagccccgtgccaggagcctggagggaagttggggaaacccctccctactgttggatgtatgtgtgacaagtgtgtctcctgtgctgcgatgggggatcagcagggcagttgtcgggcagtcctgagtgggtgttgcacagactggtccacagggctcctgaaggaagcccctggatctttggggtaaaaggagggtggcctcaagaaacaatgtctggggacaggcctttctggcctgctatgtcttcccaatgtttattgggcaataaaagataagtgcagtcacagagaactcactcttcatcacctgagctcaccatagtctaatagaaaacaaccgaaaccaaataattcaagcactgcttattacaattttactgggtctctattttaccctcctacaagcctcagagtacttcgagtctcccttcaccatttccgacggcatctacggctcaacattttttgtagccacaggcttccacggacttcacgtcattattggctcaactttcctcactatctgcttcatccgccaactaatatttcactttacatccaaacatcactttggcttcgaagccgccgcctgatactggcattttgtagatgtggtttgactatttctgtatgtctccatctattgatgagggtctt

SEQ ID NO: 57722 - DNA, 2981 bp, Homo sapiens
agtccctctttgggtgacctgtgcctgcttcgtgcctggtgtgacgtctctcaggatgcctgagccggggaagaagccagtctcagcctttagcaagaagccacggtcagtggaagtggccgcaggcagccctgccgtgttcgaggccgagacagagcgggcaggagtgaaggtgcgctggcagcgcggaggcagtgacatcagcgccagcaacaagtacggcctggccacagagggcacacggcatacgctgacagtgcgggaagtgggccctgccgaccagggatcttacgcagtcattgctggctcctccaaggtcaagttcgacctcaaggtcatagaggcagagaaggcagagcccatgctggcccctgcccctgcccctgctgaggccactggagcccctggagaagccccggccccagccgctgagctgggagaaagtgccccaagtcccaaagggtcaagctcagcagctctcaatggtcctacccctggagcccccgatgaccccattggcctcttcgtgatgcggccacaggatggcgaggtgaccgtgggtggcagcatcaccttctcagcccgcgtggccggcgccagcctcctgaagccgcctgtggtcaagtggttcaagggcaaatgggtggacctgagcagcaaggtgggccagcacctgcagctgcacgacagctacgaccgcgccagcaaggtctatctgttcgagctgcacatcaccgatgcccagcctgccttcactggcagctaccgctgtgaggtgtccaccaaggacaaatttgaatgctccaacttcaatctcactgtccacgaggccatgggcaccggagacctggacctcctatcagccttccgccgcacgagcctggctggaggtggtcggcggatcagtgatagccatgaggacactgggattctggacttcagctcactgctgaaaaagagagacagtttccggaccccgagggactcgaagctggaggcaccagcagaggaggacgtgtgggagatcctacggcaggcacccccatctgagtacgagcgcatcgccttccagtacggcgtcactgacctgcgcggcatgctaaagaggctcaagggcatgaggcgcgatgagaagaagagcacagcctttcagaagaagctggagccggcctaccaggtgagcaaaggccacaagatccggctgaccgtggaactggctgaccatgacgctgaggtcaaatggctcaagaatggccaggagatccagatgagcggcagcaagtacatctttgagtccatcggtgccaagcgtaccctgaccatcagccagtgctcattggcggacgacgcagcctaccagtgcgtggtgggtggcgagaagtgtagcacggagctctttgtgaaagagccccctgtgctcatcacgcgccccttggaggaccagctggtgatggtggggcagcgggtggagtttgagtgtgaagtatcggaggagggggcgcaagtcaaatggctgaaggacggggtggagctgacccgggaggagaccttcaaataccggttcaagaaggacgggcagagacaccacctgatcatcaacgaggccatgctggaggacgcggggcactatgcactgtgcactagcgggggccaggcgctgcgtgagctcattgtgcaggaaaagaagctggaggtgtaccagagcatcgcagacctgatggtgggcgcaaaggaccaggcggtgttcaaatgtgaggtctcagatgagaatgttcggggtgtgtggctgaagaatgggaaggagctggtgcccgacagccgcataaaggtgtcccacatcgggcgggtccacaaactgaccattgacgacgtcacacctgccgacgaggctgactacagctttgtgcccgagggcttcgcctgcaacctgtcagccaagctccacttcatggaggtcaagattgacttcgtacccaggcaggaacctcccaagatccacctggactgcccaggccgcataccagacaccattgtggttgtagctggaaataagctacgtctggacgtccctatctctggggaccctgctcccactgtgatctggcagaaggctatcacgcaggggaataaggccccagccaggccagccccagatgccccagaggacacaggtgacagcgatgagtgggtgtttgacaagaagctgctgtgtgagaccgagggccgggtccgcgtggagaccaccaaggaccgcagcatcttcacggtcgagggggcagagaaggaagatgagggcgtctacacggtcacagtgaagaaccctgtgggcgaggaccaggtcaacctcacagtcaaggtcatcgacgtgccagacgcacctgcggcccccaagatcagcaacgtgggagaggactcctgcacagtacagtgggagccgcctgcctacgatggcgggcagcccatcctgggctacatcctggagcgcaagaagaagaagagctaccggtggatgcggctgaacttcgacctgattcaggagctgagtcatgaagcgcggcgcatgatcgagggcgtggtgtacgagatgcgcgtctacgcggtcaacgccatcggcatgtccaggcccagccctgcctcccagcccttcatgcctatcggtccccccagcgaacccacccacctggcagtagaggacgtctctgacaccacggtctccctcaagtggcggcccccagagcgcgtgggagcaggaggcctggatggctacagcgtggagtactgcccagagggctgctcagagtgggtggctgccctgcaggggctgacagagcacacatcgatactggtgaaggacctgcccacgggggcccggctgcttttccgagtgcgggcacacaatatggcagggcctggagcccctgttaccaccacggagccggtgacagtgcaggagatcctgcgtgagtgcccctttgtgcagt

SEQ ID NO: 57723 - DNA, 341 bp, Homo sapiens
tccggaccccgagggactcgaagctggaggcaccagcagaggaggacgtgtgggagatcctacggcaggcacccccatctgagtacgagcgcatcgccttccagtacggcgtcactgacctgcgcggcatgctaaagaggctcaagggcatgaggcgcgatgagaagaagagcacaggttagcccttcctcagaggggagaggagagggcacaggctagcccttccctacacaggagaggagagggcataggttagcccttccccacaggggagaggagagggcacaggttagccccccacctcgtccacatacatggaaagagcggagtccggcttagca

SEQ ID NO: 57724 - DNA, 325 bp, Homo sapiens
ggggtctgacttggatctcaccccaactctgcacccccccagctgctgtgtgagaccgagggccgggtccgcgtggagaccaccaaggaccgcagcatcttcacggtcgagggggcagagaaggaagatgagggcgtctacacggtcacagtgaagaaccctgtgggcgaggaccaggtcaacctcacagtcaaggtcatcggtgaggccggccggggtccaagctggagaacacagaggggcagccccaaggagggcccatccgttcgctcattcagccactcgacaaacatcacgggcatgctccctgagccgagcggcaaca

SEQ ID NO: 57725 - DNA, 573 bp, Homo sapiens
tctccccaaacaatgctgggattggggactactggctttcttcccatttctgcagcaggcttgaggaagagctaggtgccagctcctttctctcctctggctctgcagattgacagttctaatttgtccaagtgagctcaggaaagagatgaaggactggtttgacactggtcaaacacaggggctcttgagtcaagtagctagctgcaggtcaaatttcagtgctaaaacttattctcaatgtcacttcaagaaagttatcagacctcatagtgcttcagtgttctcatctgtaaaatgggtctaatgacaatactaacttctatttcataacagttgctttgaggtcgaaatgagatgatatatgggtgctgagctaagtgtaagctaagcattcagtgaaagttagctatgatttttctcatgactgttttatgatgaagaaatccagagggaagctgggttagctgaggtccaaaggaaaagtagctttgttttcacgagcgtcctgtgcaggtggagcctctgcatattgttcttggtggggactcagggcaggggcaggcaggctga

SEQ ID NO: 57726 - DNA, 411 bp, Homo sapiens
catgagaattagaatcaccatacctaaacatctgagcaaaattcaaagaatattttaatttctccattttcttccctttcccttcatataacgagtaatataagaggtattaggaaaacccctcctccatggaaagatacttcagagcactctgtattctgggtttataatgcgttctcctcttctaataacagctttgagatacaatttcagtcctcacctaacacccctgacccaagggcatcaaaaacggtacaaagaatagagaagtagagaagtaatgagtgtgccatactgttatttgttgctaatctgggctttgtgattaagggaactaatatcaaaagcatggtaaaatagaggtatattccagtactgatgatggtggtgatggtgatgaatgacagttga

SEQ ID NO: 57727 - DNA, 224 bp, Homo sapiens
tgctgaggtgatctagaggatcttcaggtagaactaacacccctgacccaagggcatcaaaaacggtacaaagaatagagaagtagagaagtaatgagtgtgccatactgttatttgttgctaatctgggctttgtgattaagggaactaatatcaaaagcatggtaaaatagaggtatattccagtactgatgatggtggtgatggtgatgaatgacagttga

SEQ ID NO: 57728 - DNA, 1058 bp, Homo sapiens
attgaaagaactaacctgcagaaaaggctgctgcccttcaaactgtgtactgttgtctaagctagttcagaagaatacacgagcttccttcacatactccaatctgttggtttgacttctgaagaaccagcagagttggaaaggcctcgagatctctgtcctggtgctggcctggggctcccctaggtctcgcctgaaagtgtcccattcaccaccagtcttctacaatgttatccggaatggaacgaagtactacacccacaagtcctgaaggtactgaccaaaacaggagggagagacgggaccggggctgctgtgactggaggctgatggggctccaccgtgccccatcctctcatcccacagtcttccttcacatctgctctgcccaccacagccctgctctggagttctctgctctgccacttctgccatccccacctaggcagacaggtttcatccagcctccaggacggcccacccacttgctcctgcagcaggctgctcttcccaggtgcacagcccagagaattaagtgcatatatttaccagaagacatgaccaaagccattcctggggttgccttcatgtagccaacatctggaactaacaccaaagttcattaggcacaaaataaaagagttatctggaacagagtcctccatggaataacacgtcataaacaagaacaggctggtcacggtggctcacgcctataatcccagtattttgggaggccaaggcgggtggatcacctgaggtcaggtcaggagttcaacaccagcctgcccaacatggcgaaaccccatctctactaaaaatacaaaaattagccaggcatggtggtgcacgcctgtagtcccagctactctggaggccgaggtgggagaatcatgtgaaccctggaggcagaggctgcagtgaggtgagattgagccaccacactccagcctaggcaacagagaaagactctgtctcagaaatacataaataaataaataaataaataaataaataaataaataaggccaggcgcagtggctcacgcctgtaatccc

SEQ ID NO: 57729 - DNA, 729 bp, Homo sapiens
atcaacgagagtgcctgttacagacaggttccttgacaataccaggtgttggcaaggatgtccagcaagtggaactccctcacattttgctggtgggaacgtaaactggtaccacttgggaacactgttcagcagaacatgctaagagacacatcctctgacccagtcctttatttaacttctaggtgcacagcccagagaattaagtgcatatatttaccagaagacatgaccaaagccattcctggggttgccttcatgtagccaacatctggaactaacaccaaagttcattaggcacaaaataaaagagttatctggaacagagtcctccatggaataacacgtcataaacaagaacaggctggtcacggtggctcacgcctataatcccagtattttgggaggccaaggcgggtggatcacctgaggtcaggtcaggagttcaacaccagcctgcccaacatggcgaaaccccatctctactaaaaatacaaaaattagccaggcatggtggtgcacgcctgtagtcccagctactctggaggccgaggtgggagaatcatgtgaaccctggaggcagaggctgcagtgaggtgagattgagccaccacactccagcctaggcaacagagaaagactctgtctcagaaatacataaataaataaataaataaataaataaataaataaataaggccaggcgcagtggctcacgcctgtaatccc

SEQ ID NO: 57730 - DNA, 2219 bp, Homo sapiens
  misc_feature (175)..(175): n is a, c, g, or t
acttaaaatgaaggatgaattgacatctgggatgccagaagacttagaagttattttgtttgcttgttttgtttgggtatttggggatttttaaaaaataatcaaagtggaattttctggtactgctttaaaataattattgtggtctttcagcactttacacgttctaatttcntgtcctatggaagttctcgctgtctccatctctctcatttttgtgtcacctaatatgttggtacagataagagttagtcacatttttctgactgcatcaaacttttatttgaaatggtactggatcttagtttctgtgcagaatattctgtgattttgggaaatgtaagtgagtccacttgcttctggaccaattctgtttcatgtatgttagcatcctagaaacacctagcaatggacctagttcacagtaataggtgcaaagaaagaccaaatggactttgcagtattaaccctttgcagtcgtcatacttagctgctgcctgtaatgctaaaatgattttaatggttgtctggaggcaaagggctgttttttagtatattgccactaaaggacatttatttatatcaaacttttatttttagatattataagcatacagtacataattgatgaaattgatatttactagagatttatggtagagaatggacgacattcaataactggagcccgagattgtcactttatttaaaaagacaaataatcatctgacaagacagcactgttgccattataaggagaaatagattacaatccttatcatgtacacgttagctatgttccgtatggccacaggactttcctgaaaccgtatctgtctgcttgaagtagacttatgtttgttgagaatgaacaggcttatttgagcctccagggtggcagttcataaagacagctaagttctgaaggaaaaaaaaaatatatctttttaagtggctagagtcattattacaatcttatactgtgaaagtccaagaaatcaggcaacattgtttcctgggtcttttcagagatcttatagatttatgaagtgtttttaatccatgaagaaacactaaagtgcctttctttcttcaaagcaatattatttccaagtatattaatttgttagaaaactttcccataggaaatgttgtcaagttacctgtactgtaaagagttatttatgttcagtagtcaagattttctacatggacataaatcactctcacgtgctctcagcagaaggcattagataagcatatacaagaattgggtacttttatacaaatatgggataagaaatacttgcctgacacttttccatggctgagtctgaccattacagtaagaacaagaattgaagaggcattttgcacacagaaacattctcactttaaaaaatggtattggttaccttgaaggcatagataatgggcctgtcataaaattatcaattataactggcaccgagggactgccctttttaagctaaactaagccttatctgcttaaggatgttgaactgaatcactccctttactcatcctgtgcatatgtgtacaaatggtcatgtggatcatgtgatgatcatccatcttatttgattgtattaatgcatcatgctaaacatgtagtacaggttaacaataccagatttatgtcctgttcaacaactcagtactctaaatgttgttatgcttttaataagaccttcccagataataatcttggagctcttttcccagctgtctaccatgcatttgcaacaggaggaagatgtaatgaatatgcagtattaagttgatttatgaacagtgctttgatatgccaaagggaaaactgtcccacttaaattagattaagtagggtggctaaaaataaataaaaacactggaaattctttctctcactttctcttgatgcaatgaagggaatatgacactacagtatacagagttgttgttatatgatgcacaaaatattttgatgatttgaataaatgttaacttttaatctgcgccttaataatgactggttatctgtaaatatagaacagatacagattgtatttttctgtgggtttttgtccttttagtgatttttttccaaaaacgagagatggaattaacattgaaaatgggaaatttttctaactgaatcaattgttacatgaaaaataaatttatataacccctttgtattgctcttgctataaaaa

SEQ ID NO: 57731 - DNA, 704 bp, Homo sapiens
tctggttcgaatctagcaggatccccatctacgtcgcatatgtgtacaaatggtcatgtggatcatgtgatgatcatccatcttatttgattgtattaatgcatcatgctaaacatgtagtacaggttaacaataccagatttatgtcctgttcaacaactcagtactctaaatgttgttatgcttttaataagaccttcccagataataatcttggagctcttttcccagctgtctaccatgcatttgcaacaggaggaagatgtaatgaatatgcagtattaagttgatttatgaacagtgctttgatatgccaaagggaaaactgtcccacttaaattagattaagtagggtggctaaaaataaataaaaacactggaaattctttctctcactttctcttgatgcaatgaagggaatatgacactacagtatacagagttgttgttatatgatgcacaaaatattttgatgatttgaataaatgttaacttttaatctgcgccttaataatgactggttatctgtaaatatagaacagatacagattgtatttttctgtgggtttttgtccttttagtgatttttttccaaaaacgagagatggaattaacattgaaaatgggaaatttttctaactgaatcaattgttacatgaaaaataaatttatataacccctttgtattgctcttgctataaaaa

SEQ ID NO: 57732 - DNA, 626 bp, Homo sapiens
ccaggtgtgatatactgcacggggaccagcctctatacgattccaggtgttctatatgattccaggtgtgatatactgcacggggaccagcctctatacgattccaggtgttctatatgattccaggtgtgatatactgcacggggaccagcctctatacgattccaggtgttctatatgattccaggtgtgatatactgcaccgggaccagcctctatatgattccaggtgttctatatgattccaggtgtgatatactgcatggggaccagcctctatacaattccaggtgttctatatgattccaggtgtgatatactgcaccgggaccagcctctatatgattccaggtgttctatatgattccaggtgtgatatactgcaccgggaccagcctctatacgattccaggtgttctatatgattccaggtgtgatatactgcaccgggaccagcctctatatgattccaggtgtgagcaccgtgcctggcctatatatgattccagttgtgagctactgaatctggcccagcccatctgatcttgcatgttgtccacgttttccatcacagcctttaatgtgtcagtcatagttatttaaaatcccctttcaaatagttccaa

SEQ ID NO: 57733 - DNA, 926 bp, Homo sapiens
attgggccttcgggacagcagaggagcagtgtccggccatggccggagcccgcaggctggagctaggcgaggccctggcgctggggtcgggctggcgtcatgcgtgccacgctctcctctacgcgccggaccctgggatgctcttcggccgcatcccgctgcgctacgccatactgatgcagatgcgcttcgatggacgcctgggcttccccggcggattcgtggacacgcaggacagaagcctagaggacgggctgaaccgcgagctgcgcgaggagctgggcgaagcggctgccgctttccgcgtggagcgcactgactaccgcagctcccacgtcgggtcagggccacgcgttgtggcccacttctatgccaagcgtctgacgctcgaggagctgttggctgtggaggccggcgcaacacgcgccaaggaccacgggctggaggtgctgggcctggtgcgagtgcccctgtataccctgcgggatggtgtaggaggcctgcctaccttcctggagaattcctttattggctctgcgcgggagcagttacttgaagctctccaggacttgggactgctgcagtctggctctatttcaggccttaagattccagctcatcactagaggcagccctccatggacccatgaaaactgagatgaggaccttggtactagggagggagggaaggacgtgggaatgttttcttattggatctgagagatgatacatgataccagatgaaaagaaggagaagtgtgtaccatatgttttgagcagaggaccctccaacttatggcatcaggggcaaaaagtcacagcttatcccaggcaccctggcaggttctcagagcctgcctcctccctgtttatatgcgtacagcctggtaacccccaggcatgcaaatatacaatctgtaacaaca

SEQ ID NO: 57734 - DNA, 891 bp, Homo sapiens
tcatgtttaaaaaaagtgacattgcttttattactatttggcggggtggggggtgatacaagttcacactctgtgtttctcctcctgttagccattcccaccctgctgatgtttaaggaaagccagggatgatgacccacttaagctttccttggccttgttaagtccaatcatctggggcaggaagaagagaaatgctcattgcaatctttgacccccactaactgctgtggtgactttgacccaagcccttgacctccttttccttatctgaaatgttgctgtgattcctgtggtgagatcagatgaggcagcacttgggataagcttgcagagatgcattgagcggtatgaaagtacaggatgctatgtactttcctgcttcacagcacattttgtttcttgcaaggtgagtggcccagccgcctctccacaaacacgtgtttctgcctttctcagcataatcagcaagatgttcccacttctcagcattgcacttttctgctggtgcagaataaaaacactttgagccccaccctgtcctgagacaaagtcctctgtggtcacttggcatatggcaaagctgctgctgtgggctggaacatttgaggcaacagtgacttcctcctttcctagttaccggaacccttagagctgggagccggccagtgaaacagacaaggggaggggaagagaagagggaaggcatgtttcctatatgagtttcagtttgttgcacagaaatgtttttgaaacctttatctccaatagaatcacaaacgggtgtcagagagtcaaaactagaggaaaaagtttagtctgtaaacaaatcattagatggcatcagaatttgaaccaaagtaaaagatgctggaccttggcacttatcag

SEQ ID NO: 57735 - DNA, 4384 bp, Homo sapiens
attgggccttcgggacagcagaggagcagtgtccggccatggccggagcccgcaggctggagctaggcgaggccctggcgctggggtcgggctggcgtcatgcgtgccacgctctcctctacgcgccggaccctgggatgctcttcggccgcatcccgctgcgctacgccatactgatgcagatgcgcttcgatggacgcctgggcttccccggcggattcgtggacacgcaggacagaagcctagaggacgggctgaaccgcgagctgcgcgaggagctgggcgaagcggctgccgctttccgcgtggagcgcactgactaccgcagctcccacgtcgggtcagggccacgcgttgtggcccacttctatgccaagcgtctgacgctcgaggagctgttggctgtggaggccggcgcaacacgcgccaaggaccacgggctggaggtgctgggcctggtgcgagtgcccctgtataccctgcgggatggtgtaggaggcctgcctaccttcctggagaattcctttattggctctgcgcgggagcagttacttgaagctctccaggacttgggactgctgcagtctggctctatttcaggccttaagattccagctcatcactagaggcagccctccatggacccatgaaaactgagatgaggaccttggtactagggagggagggaaggacgtgggaatgttttcttattggatctgagagatgatacatgataccagatgaaaagaaggagaagtgtgtaccatatgttttgagcagaggaccctccaacttatggcatcaggggcaaaaagtcacagcttatcccaggcaccctggcaggttctcagagcctgcctcctccctgtttatatgcgtacagcctggtaacccccaggcatgcaaatatacaatctgtaacaacacacagcctgacaccttcccctggtcatgtccagtttaaccttgaagtggcatttgtcacactaccctggtccctgattgcaaggagcttctgaagcaagggtgaatccttcccacactcctccatggttgccctccagggtctagcccagcctatttgttagggaggatagagaaacagagcaccccctgtgctttctgaaaatagacttgctcttgtcttgagtggtgaccaaagcagttggctcttaaaaggtgggagagcagcccaaccaatccccaatccttttcttctgaaactgagcaggaagggtaaggaagtggctaggtctccttggactgagcatggacatgagtcctgtgaggactggtgtctctcctctagagctttcatctttgggatgcctgagactccgagactatcagaagggaattgacccaccccagtctagcaccaccctgccttcacttcatctacataaaggtggtataaaaacatagactggaggaggtaatccatggagagagaaaaagaagagggctcaggacaaggccctgaggaggcccaatcctaaaagtttgggcagagggaaccaggcacgttaaagaagacagaaagcggactatgcagagtgcttgtgagggtttcactaaaacagaggcaaaactgtccattgaattcagtaacatgaagtgtttgatgactatgatggcagcagtttcaggaagggcggtatggaaggcaggctgtactggttgagtgaatggaaagttggggagtagaacgtgtgagaagttggccttcaaggggctcaggttaataatagagagctatggagtcaaggcatgtttaagatgggaggtagagcatgccaatattgatggcaacagtcaagatggtgtgatgagagagatgggaggggcacaaagaggaggacccctgaaggagcagagtccatgagaaagaaggagggatgggacctttgtaggaagagacacagtcctgcagcctcatatggctcaataaaacagaaaggggcaagtatagaagattaggatgactaaattaatggggaaatgatgaaggagtttgaatctcttctttgtgaaatgaagtgagactatcagctagttgtgggtggagtgtgttctcagaaggtatgaagtagatgttttcctaggtgttggaaaacaggttgattaaggcaacagcagaagggcagggcaaggctgagctctgagatggtcagtttagagtaggatgctgggcactcaggtgtgtgtgtgttgagtggggctctgcacacacctgtcttcccctcatcaggattcaggagctgggatgggtacacttactgcagtgtggggttttgccagggaagtaaaaggagttgagagaaagatgggtcagttcagaagacatacacaggagaaattgtagtgatgaaatgtgcagtctaaggtttaatctgaccaagaaattggaattgaaaacaggaggtgactagggagggattaggaaattagaggtcttgacaagatagaaactccagcatggtgaggggttgggcagggaggtatatttgagccagacaggagtgctttggaaattgagaggtggagcaatctcaggtaaaggcaaaatagagggtatgacctggggttgctggccagagccagggaggagccttaagaagtgaaatctagggttggcgaggctggagggcagggtgagcctccacatgggtgctgaagcaagaaaccgacagatgttgaggagaatggtgtgacctaggagtcagcatccttggtgaacaagaggagtggccacaaggccagtggcacctgccagaggggaaagcaggcatgacaggatagcatctcccaggtgagagccttttgaggaagggagggtgggcagtggtctggaagcttgatgcagagcagtgtgggtcccactggcagcccttggtcttagaagaatgggagtacccagtgggggagcagctgtacaatgaggtagactcctagaggttaattatcatctcctaatcttaccctgacccttttgtcaaacgttatctagattaaacctcagtataggcaggctgcaggaaatggacattccagtggcccctggggttccagcctgtagcagcttcatctgtgctttgtgcacttggttctcagtcatctctgcaagggaccctgacgcctgggagatcagagccactgaccctttatggcactgctaacagaccccttccctcaggtaattctggatccagaactcattatgggatgtaatccaggtcaacactaataccacttggaaggttccgctctgtctcactctgcttgagtatcccactgatcagtctctcagtgcctgcctactgggcagctcatctgtccacttattcgtattaaatttgctttttatttaggtctctggagatggttgcgtggggaagagcccatgactttcctatatgatcccttgaacatactctccaagtcagtagattacctctcaggcagccttcataaaagtgtttcactgtactggggtttgtgttcatctcactcacatagacagtctctgggtaggcaggtggggggtgatacaagttcacactctgtgtttctcctcctgttagccattcccaccctgctgatgtttaaggaaagccagggatgatgacccacttaagctttccttggccttgttaagtccaatcatctggggcaggaagaagagaaatgctcattgcaatctttgacccccactaactgctgtggtgactttgacccaagcccttgacctccttttccttatctgaaatgttgctgtgattcctgtggtgagatcagatgaggcagcacttgggataagcttgcagagatgcattgagcggtatgaaagtacaggatgctatgtactttcctgcttcacagcacattttgtttcttgcaaggtgagtggcccagccgcctctccacaaacacgtgtttctgcctttctcagcataatcagcaagatgttcccacttctcagcattgcacttttctgctggtgcagaataaaaacactttgagccccaccctgtcctgagacaaagtcctctgtggtcacttggcatatggcaaagctgctgctgtgggctggaacatttgaggcaacagtgacttcctcctttcctagttaccggaacccttagagctgggagccggccagtgaaacagacaaggggaggggaagagaagagggaaggcatgtttcctatatgagtttcagtttgttgcacagaaatgtttttgaaacctttatctccaatagaatcacaaacgggtgtcagagagtcaaaactagaggaaaaagtttagtctgtaaacaaatcattagatggcatcagaatttgaaccaaagtaaaagatgctggaccttggcacttatcag

SEQ ID NO: 57736 - DNA, 5115 bp, Homo sapiens
ccgagctctctcctgatggtctctctggggcgcccctgcaatccgcttccccctcccgcagatgcagatgcgcttcgatggacgcctgggcttccccggcggattcgtggacacgcaggacagaagcctagaggacgggctgaaccgcgagctgcgcgaggagctgggcgaagcggctgccgctttccgcgtggagcgcactgactaccgcagctcccacgtcgggtcagggccacgcgttgtggcccacttctatgccaagcgtctgacgctcgaggagctgttggctgtggaggccggcgcaacacgcgccaaggaccacgggctggaggtgggaccagcctgggactctgtccctttcccaatttcctcttctcccaaagctttctctcccccaagaaagcatccctggagaaaagtctttgcccctctgaccttgccctctccccagctttcttggtggagttgggatcgtgatcatctatactctgaattagtactgccaacctgggctttctgtaaaggtctttcccaccctttaccaggagagatcctttctagaacacactcatccatgtctctctgctgttccctattgacagtgtgatagattatcacattatctaggtgtggcaacctaggttttattcttggggtttgcttttcttgtgtaggagatgtggccctgatatttcaggcagggctagtagatagattatgtatgaaggtggttctcaaaatttggcaggtagcagaatcatcggggcgtcttattaaaatagcgatttctctcagcattcctgcattggtggtggggcggggggagaggaaacctgagaatttgtagttttcaaaagttcccaaataatgctgatgcaaataatctgaggaccacattttgacaaccactggtgaaagggtatgaatacatctttgaggcagtagccactagaggtttagaagcagatgtgggaaagattaattgatagagctagataatatgttttgggtcattttcctgcagaaggttgggccactaggctttagtgaggtgtgagccttgggcctggttctgctggagtattaaggggtgaggcctgatctgctggagaaaggatggagttaagggaatgagccacctggggccctagtgtctcctgtctccttccttttacaggtgctgggcctggtgcgagtgcccctgtataccctgcgggatggtgtaggaggcctgcctaccttcctggagaattcctttattggctctgcgcgggagcagttacttgaagctctccaggacttgggactgctgcagtctggctctatttcaggccttaagattccagctcatcactagaggcagccctccatggacccatgaaaactgagatgaggaccttggtactagggagggagggaaggacgtgggaatgttttcttattggatctgagagatgatacatgataccagatgaaaagaaggagaagtgtgtaccatatgttttgagcagaggaccctccaacttatggcatcaggggcaaaaagtcacagcttatcccaggcaccctggcaggttctcagagcctgcctcctccctgtttatatgcgtacagcctggtaacccccaggcatgcaaatatacaatctgtaacaacacacagcctgacaccttcccctggtcatgtccagtttaaccttgaagtggcatttgtcacactaccctggtccctgattgcaaggagcttctgaagcaagggtgaatccttcccacactcctccatggttgccctccagggtctagcccagcctatttgttagggaggatagagaaacagagcaccccctgtgctttctgaaaatagacttgctcttgtcttgagtggtgaccaaagcagttggctcttaaaaggtgggagagcagcccaaccaatccccaatccttttcttctgaaactgagcaggaagggtaaggaagtggctaggtctccttggactgagcatggacatgagtcctgtgaggactggtgtctctcctctagagctttcatctttgggatgcctgagactccgagactatcagaagggaattgacccaccccagtctagcaccaccctgccttcacttcatctacataaaggtggtataaaaacatagactggaggaggtaatccatggagagagaaaaagaagagggctcaggacaaggccctgaggaggcccaatcctaaaagtttgggcagagggaaccaggcacgttaaagaagacagaaagcggactatgcagagtgcttgtgagggtttcactaaaacagaggcaaaactgtccattgaattcagtaacatgaagtgtttgatgactatgatggcagcagtttcaggaagggcggtatggaaggcaggctgtactggttgagtgaatggaaagttggggagtagaacgtgtgagaagttggccttcaaggggctcaggttaataatagagagctatggagtcaaggcatgtttaagatgggaggtagagcatgccaatattgatggcaacagtcaagatggtgtgatgagagagatgggaggggcacaaagaggaggacccctgaaggagcagagtccatgagaaagaaggagggatgggacctttgtaggaagagacacagtcctgcagcctcatatggctcaataaaacagaaaggggcaagtatagaagattaggatgactaaattaatggggaaatgatgaaggagtttgaatctcttctttgtgaaatgaagtgagactatcagctagttgtgggtggagtgtgttctcagaaggtatgaagtagatgttttcctaggtgttggaaaacaggttgattaaggcaacagcagaagggcagggcaaggctgagctctgagatggtcagtttagagtaggatgctgggcactcaggtgtgtgtgtgttgagtggggctctgcacacacctgtcttcccctcatcaggattcaggagctgggatgggtacacttactgcagtgtggggttttgccagggaagtaaaaggagttgagagaaagatgggtcagttcagaagacatacacaggagaaattgtagtgatgaaatgtgcagtctaaggtttaatctgaccaagaaattggaattgaaaacaggaggtgactagggagggattaggaaattagaggtcttgacaagatagaaactccagcatggtgaggggttgggcagggaggtatatttgagccagacaggagtgctttggaaattgagaggtggagcaatctcaggtaaaggcaaaatagagggtatgacctggggttgctggccagagccagggaggagccttaagaagtgaaatctagggttggcgaggctggagggcagggtgagcctccacatgggtgctgaagcaagaaaccgacagatgttgaggagaatggtgtgacctaggagtcagcatccttggtgaacaagaggagtggccacaaggccagtggcacctgccagaggggaaagcaggcatgacaggatagcatctcccaggtgagagccttttgaggaagggagggtgggcagtggtctggaagcttgatgcagagcagtgtgggtcccactggcagcccttggtcttagaagaatgggagtacccagtgggggagcagctgtacaatgaggtagactcctagaggttaattatcatctcctaatcttaccctgacccttttgtcaaacgttatctagattaaacctcagtataggcaggctgcaggaaatggacattccagtggcccctggggttccagcctgtagcagcttcatctgtgctttgtgcacttggttctcagtcatctctgcaagggaccctgacgcctgggagatcagagccactgaccctttatggcactgctaacagaccccttccctcaggtaattctggatccagaactcattatgggatgtaatccaggtcaacactaataccacttggaaggttccgctctgtctcactctgcttgagtatcccactgatcagtctctcagtgcctgcctactgggcagctcatctgtccacttattcgtattaaatttgctttttatttaggtctctggagatggttgcgtggggaagagcccatgactttcctatatgatcccttgaacatactctccaagtcagtagattacctctcaggcagccttcataaaagtgtttcactgtactggggtttgtgttcatctcactcacatagacagtctctgggtaggcaggtggggggtgatacaagttcacactctgtgtttctcctcctgttagccattcccaccctgctgatgtttaaggaaagccagggatgatgacccacttaagctttccttggccttgttaagtccaatcatctggggcaggaagaagagaaatgctcattgcaatctttgacccccactaactgctgtggtgactttgacccaagcccttgacctccttttccttatctgaaatgttgctgtgattcctgtggtgagatcagatgaggcagcacttgggataagcttgcagagatgcattgagcggtatgaaagtacaggatgctatgtactttcctgcttcacagcacattttgtttcttgcaaggtgagtggcccagccgcctctccacaaacacgtgtttctgcctttctcagcataatcagcaagatgttcccacttctcagcattgcacttttctgctggtgcagaataaaaacactttgagccccaccctgtcctgagacaaagtcctctgtggtcacttggcatatggcaaagctgctgctgtgggctggaacatttgaggcaacagtgacttcctcctttcctagttaccggaacccttagagctgggagccggccagtgaaacagacaaggggaggggaagagaagagggaaggcatgtttcctatatgagtttcagtttgttgcacagaaatgtttttgaaacctttatctccaatagaatcacaaacgggtgtcagagagtcaaaactagaggaaaaagtttagtctgtaaacaaatcattagatggcatcagaatttgaaccaaagtaaaagatgctggaccttggcacttatcag

SEQ ID NO: 57737 - DNA, 2870 bp, Homo sapiens
cgagaatctctactaaaccacatacgttatgactctcggaatcccattcagtaactgaaacatgttcgaagacttgatttcttacgaagatcctgagtgcattgaacctgagtgtcgttgagagtcctcattgcaactgaataagacgttccgtgggaaaccgaggcgttctagacagctaatgtacaaatgggagcttctgagggtccatctacgtgtgatctatcaacagcgaagtgccaatcgaggctctgattatcagaatgtacagcgtagagcatgccaatattgatggcaacagtcaagatggtgtgatgagagagatgggaggggcacaaagaggaggacccctgaaggagcagagtccatgagaaagaaggagggatgggacctttgtaggaagagacacagtcctgcagcctcatatggctcaataaaacagaaaggggcaagtatagaagattaggatgactaaattaatggggaaatgatgaaggagtttgaatctcttctttgtgaaatgaagtgagactatcagctagttgtgggtggagtgtgttctcagaaggtatgaagtagatgttttcctaggtgttggaaaacaggttgattaaggcaacagcagaagggcagggcaaggctgagctctgagatggtcagtttagagtaggatgctgggcactcaggtgtgtgtgtgttgagtggggctctgcacacacctgtcttcccctcatcaggattcaggagctgggatgggtacacttactgcagtgtggggttttgccagggaagtaaaaggagttgagagaaagatgggtcagttcagaagacatacacaggagaaattgtagtgatgaaatgtgcagtctaaggtttaatctgaccaagaaattggaattgaaaacaggaggtgactagggagggattaggaaattagaggtcttgacaagatagaaactccagcatggtgaggggttgggcagggaggtatatttgagccagacaggagtgctttggaaattgagaggtggagcaatctcaggtaaaggcaaaatagagggtatgacctggggttgctggccagagccagggaggagccttaagaagtgaaatctagggttggcgaggctggagggcagggtgagcctccacatgggtgctgaagcaagaaaccgacagatgttgaggagaatggtgtgacctaggagtcagcatccttggtgaacaagaggagtggccacaaggccagtggcacctgccagaggggaaagcaggcatgacaggatagcatctcccaggtgagagccttttgaggaagggagggtgggcagtggtctggaagcttgatgcagagcagtgtgggtcccactggcagcccttggtcttagaagaatgggagtacccagtgggggagcagctgtacaatgaggtagactcctagaggttaattatcatctcctaatcttaccctgacccttttgtcaaacgttatctagattaaacctcagtataggcaggctgcaggaaatggacattccagtggcccctggggttccagcctgtagcagcttcatctgtgctttgtgcacttggttctcagtcatctctgcaagggaccctgacgcctgggagatcagagccactgaccctttatggcactgctaacagaccccttccctcaggtaattctggatccagaactcattatgggatgtaatccaggtcaacactaataccacttggaaggttccgctctgtctcactctgcttgagtatcccactgatcagtctctcagtgcctgcctactgggcagctcatctgtccacttattcgtattaaatttgctttttatttaggtctctggagatggttgcgtggggaagagcccatgactttcctatatgatcccttgaacatactctccaagtcagtagattacctctcaggcagccttcataaaagtgtttcactgtactggggtttgtgttcatctcactcacatagacagtctctgggtaggcaggtggggggtgatacaagttcacactctgtgtttctcctcctgttagccattcccaccctgctgatgtttaaggaaagccagggatgatgacccacttaagctttccttggccttgttaagtccaatcatctggggcaggaagaagagaaatgctcattgcaatctttgacccccactaactgctgtggtgactttgacccaagcccttgacctccttttccttatctgaaatgttgctgtgattcctgtggtgagatcagatgaggcagcacttgggataagcttgcagagatgcattgagcggtatgaaagtacaggatgctatgtactttcctgcttcacagcacattttgtttcttgcaaggtgagtggcccagccgcctctccacaaacacgtgtttctgcctttctcagcataatcagcaagatgttcccacttctcagcattgcacttttctgctggtgcagaataaaaacactttgagccccaccctgtcctgagacaaagtcctctgtggtcacttggcatatggcaaagctgctgctgtgggctggaacatttgaggcaacagtgacttcctcctttcctagttaccggaacccttagagctgggagccggccagtgaaacagacaaggggaggggaagagaagagggaaggcatgtttcctatatgagtttcagtttgttgcacagaaatgtttttgaaacctttatctccaatagaatcacaaacgggtgtcagagagtcaaaactagaggaaaaagtttagtctgtaaacaaatcattagatggcatcagaatttgaaccaaagtaaaagatgctggaccttggcacttatcag

SEQ ID NO: 57738 - DNA, 2577 bp, Homo sapiens
ccaacctgggtgacagagtgagaccctgtctcaaaactactacaaagaggaggacccctgaaggagcagagtccatgagaaagaaggagggatgggacctttgtaggaagagacacagtcctgcagcctcatatggctcaataaaacagaaaggggcaagtatagaagattaggatgactaaattaatggggaaatgatgaaggagtttgaatctcttctttgtgaaatgaagtgagactatcagctagttgtgggtggagtgtgttctcagaaggtatgaagtagatgttttcctaggtgttggaaaacaggttgattaaggcaacagcagaagggcagggcaaggctgagctctgagatggtcagtttagagtaggatgctgggcactcaggtgtgtgtgtgttgagtggggctctgcacacacctgtcttcccctcatcaggattcaggagctgggatgggtacacttactgcagtgtggggttttgccagggaagtaaaaggagttgagagaaagatgggtcagttcagaagacatacacaggagaaattgtagtgatgaaatgtgcagtctaaggtttaatctgaccaagaaattggaattgaaaacaggaggtgactagggagggattaggaaattagaggtcttgacaagatagaaactccagcatggtgaggggttgggcagggaggtatatttgagccagacaggagtgctttggaaattgagaggtggagcaatctcaggtaaaggcaaaatagagggtatgacctggggttgctggccagagccagggaggagccttaagaagtgaaatctagggttggcgaggctggagggcagggtgagcctccacatgggtgctgaagcaagaaaccgacagatgttgaggagaatggtgtgacctaggagtcagcatccttggtgaacaagaggagtggccacaaggccagtggcacctgccagaggggaaagcaggcatgacaggatagcatctcccaggtgagagccttttgaggaagggagggtgggcagtggtctggaagcttgatgcagagcagtgtgggtcccactggcagcccttggtcttagaagaatgggagtacccagtgggggagcagctgtacaatgaggtagactcctagaggttaattatcatctcctaatcttaccctgacccttttgtcaaacgttatctagattaaacctcagtataggcaggctgcaggaaatggacattccagtggcccctggggttccagcctgtagcagcttcatctgtgctttgtgcacttggttctcagtcatctctgcaagggaccctgacgcctgggagatcagagccactgaccctttatggcactgctaacagaccccttccctcaggtaattctggatccagaactcattatgggatgtaatccaggtcaacactaataccacttggaaggttccgctctgtctcactctgcttgagtatcccactgatcagtctctcagtgcctgcctactgggcagctcatctgtccacttattcgtattaaatttgctttttatttaggtctctggagatggttgcgtggggaagagcccatgactttcctatatgatcccttgaacatactctccaagtcagtagattacctctcaggcagccttcataaaagtgtttcactgtactggggtttgtgttcatctcactcacatagacagtctctgggtaggcaggtggggggtgatacaagttcacactctgtgtttctcctcctgttagccattcccaccctgctgatgtttaaggaaagccagggatgatgacccacttaagctttccttggccttgttaagtccaatcatctggggcaggaagaagagaaatgctcattgcaatctttgacccccactaactgctgtggtgactttgacccaagcccttgacctccttttccttatctgaaatgttgctgtgattcctgtggtgagatcagatgaggcagcacttgggataagcttgcagagatgcattgagcggtatgaaagtacaggatgctatgtactttcctgcttcacagcacattttgtttcttgcaaggtgagtggcccagccgcctctccacaaacacgtgtttctgcctttctcagcataatcagcaagatgttcccacttctcagcattgcacttttctgctggtgcagaataaaaacactttgagccccaccctgtcctgagacaaagtcctctgtggtcacttggcatatggcaaagctgctgctgtgggctggaacatttgaggcaacagtgacttcctcctttcctagttaccggaacccttagagctgggagccggccagtgaaacagacaaggggaggggaagagaagagggaaggcatgtttcctatatgagtttcagtttgttgcacagaaatgtttttgaaacctttatctccaatagaatcacaaacgggtgtcagagagtcaaaactagaggaaaaagtttagtctgtaaacaaatcattagatggcatcagaatttgaaccaaagtaaaagatgctggaccttggcacttatcag

SEQ ID NO: 57739 - DNA, 1848 bp, Homo sapiens
  misc_feature (1815)..(1815): n is a, c, g, or t
attgggccttcgggacagcagaggagcagtgtccggccatggccggagcccgcaggctggagctaggcgaggccctggcgctggggtcgggctggcgtcatgcgtgccacgctctcctctacgcgccggaccctgggatgctcttcggccgcatcccgctgcgctacgccatactgatgcagatgcgcttcgatggacgcctgggcttccccggcggattcgtggacacgcaggacagaagcctagaggacgggctgaaccgcgagctgcgcgaggagctgggcgaagcggctgccgctttccgcgtggagcgcactgactaccgcagctcccacgtcgggtcagggccacgcgttgtggcccacttctatgccaagcgtctgacgctcgaggagctgttggctgtggaggccggcgcaacacgcgccaaggaccacgggctggaggtgctgggcctggtgcgagtgcccctgtataccctgcgggatggtgtaggaggcctgcctaccttcctggagaattcctttattggctctgcgcgggagcagttacttgaagctctccaggacttgggactgctgcagtctggctctatttcaggccttaagattccagctcatcactagaggcagccctccatggacccatgaaaactgagatgaggaccttggtactagggagggagggaaggacgtgggaatgttttcttattggatctgagagatgatacatgataccagatgaaaagaaggagaagtgtgtaccatatgttttgagcagaggaccctccaacttatggcatcaggggcaaaaagtcacagcttatcccaggcaccctggcaggttctcagagcctgcctcctccctgtttatatgcgtacagcctggtaacccccaggcatgcaaatatacaatctgtaacaacacacagcctgacaccttcccctggtcatgtccagtttaaccttgaagtggcatttgtcacactaccctggtccctgattgcaaggagcttctgaagcaagggtgaatccttcccacactcctccatggttgccctccagggtctagcccagcctatttgttagggaggatagagaaacagagcaccccctgtgctttctgaaaatagacttgctcttgtcttgagtggtgaccaaagcagttggctcttaaaaggtgggagagcagcccaaccaatccccaatccttttcttctgaaactgagcaggaagggtaaggaagtggctaggtctccttggactgagcatggacatgagtcctgtgaggactggtgtctctcctctagagctttcatctttgggatgcctgagactccgagactatcagaagggaattgacccaccccagtctagcaccaccctgccttcacttcatctacataaaggtggtataaaaacatagactggaggaggtaatccatggagagagaaaaagaagagggctcaggacaaggccctgaggaggcccaatcctaaaagtttgggcagagggaaccaggcacgttaaagaagacagaaagcggactatgcagagtgcttgtgagggtttcactaaaacagaggcaaaactgtccattgaattcagtaacatgaagtgtttgatgactatgatggcagcagtttcaggaagggcggtatggaaggcaggctgtactggttgagtgaatggaaaggaaaagttcttgaaggaagttaaaagtgctactccagtaaacacaaggccctaactcccttcaatgctataaaggctgagaggtgaggaagctgcagaagaaaagttggaagttacccnaggttggttcatgaggtttaagggaagaagctg

SEQ ID NO: 57740 - DNA, 5230 bp, Homo sapiens
attgggccttcgggacagcagaggagcagtgtccggccatggccggagcccgcaggctggagctaggcgaggccctggcgctggggtcgggctggcgtcatgcgtgccacgctctcctctacgcgccggaccctgggatgctcttcggccgcatcccgctgcgctacgccatactgatgcagatgcgcttcgatggacgcctgggcttccccggcggattcgtggacacgcaggacagaagcctagaggacgggctgaaccgcgagctgcgcgaggagctgggcgaagcggctgccgctttccgcgtggagcgcactgactaccgcagctcccacgtcgggtcagggccacgcgttgtggcccacttctatgccaagcgtctgacgctcgaggagctgttggctgtggaggccggcgcaacacgcgccaaggaccacgggctggaggtgggaccagcctgggactctgtccctttcccaatttcctcttctcccaaagctttctctcccccaagaaagcatccctggagaaaagtctttgcccctctgaccttgccctctccccagctttcttggtggagttgggatcgtgatcatctatactctgaattagtactgccaacctgggctttctgtaaaggtctttcccaccctttaccaggagagatcctttctagaacacactcatccatgtctctctgctgttccctattgacagtgtgatagattatcacattatctaggtgtggcaacctaggttttattcttggggtttgcttttcttgtgtaggagatgtggccctgatatttcaggcagggctagtagatagattatgtatgaaggtggttctcaaaatttggcaggtagcagaatcatcggggcgtcttattaaaatagcgatttctctcagcattcctgcattggtggtggggcggggggagaggaaacctgagaatttgtagttttcaaaagttcccaaataatgctgatgcaaataatctgaggaccacattttgacaaccactggtgaaagggtatgaatacatctttgaggcagtagccactagaggtttagaagcagatgtgggaaagattaattgatagagctagataatatgttttgggtcattttcctgcagaaggttgggccactaggctttagtgaggtgtgagccttgggcctggttctgctggagtattaaggggtgaggcctgatctgctggagaaaggatggagttaagggaatgagccacctggggccctagtgtctcctgtctccttccttttacaggtgctgggcctggtgcgagtgcccctgtataccctgcgggatggtgtaggaggcctgcctaccttcctggagaattcctttattggctctgcgcgggagcagttacttgaagctctccaggacttgggactgctgcagtctggctctatttcaggccttaagattccagctcatcactagaggcagccctccatggacccatgaaaactgagatgaggaccttggtactagggagggagggaaggacgtgggaatgttttcttattggatctgagagatgatacatgataccagatgaaaagaaggagaagtgtgtaccatatgttttgagcagaggaccctccaacttatggcatcaggggcaaaaagtcacagcttatcccaggcaccctggcaggttctcagagcctgcctcctccctgtttatatgcgtacagcctggtaacccccaggcatgcaaatatacaatctgtaacaacacacagcctgacaccttcccctggtcatgtccagtttaaccttgaagtggcatttgtcacactaccctggtccctgattgcaaggagcttctgaagcaagggtgaatccttcccacactcctccatggttgccctccagggtctagcccagcctatttgttagggaggatagagaaacagagcaccccctgtgctttctgaaaatagacttgctcttgtcttgagtggtgaccaaagcagttggctcttaaaaggtgggagagcagcccaaccaatccccaatccttttcttctgaaactgagcaggaagggtaaggaagtggctaggtctccttggactgagcatggacatgagtcctgtgaggactggtgtctctcctctagagctttcatctttgggatgcctgagactccgagactatcagaagggaattgacccaccccagtctagcaccaccctgccttcacttcatctacataaaggtggtataaaaacatagactggaggaggtaatccatggagagagaaaaagaagagggctcaggacaaggccctgaggaggcccaatcctaaaagtttgggcagagggaaccaggcacgttaaagaagacagaaagcggactatgcagagtgcttgtgagggtttcactaaaacagaggcaaaactgtccattgaattcagtaacatgaagtgtttgatgactatgatggcagcagtttcaggaagggcggtatggaaggcaggctgtactggttgagtgaatggaaagttggggagtagaacgtgtgagaagttggccttcaaggggctcaggttaataatagagagctatggagtcaaggcatgtttaagatgggaggtagagcatgccaatattgatggcaacagtcaagatggtgtgatgagagagatgggaggggcacaaagaggaggacccctgaaggagcagagtccatgagaaagaaggagggatgggacctttgtaggaagagacacagtcctgcagcctcatatggctcaataaaacagaaaggggcaagtatagaagattaggatgactaaattaatggggaaatgatgaaggagtttgaatctcttctttgtgaaatgaagtgagactatcagctagttgtgggtggagtgtgttctcagaaggtatgaagtagatgttttcctaggtgttggaaaacaggttgattaaggcaacagcagaagggcagggcaaggctgagctctgagatggtcagtttagagtaggatgctgggcactcaggtgtgtgtgtgttgagtggggctctgcacacacctgtcttcccctcatcaggattcaggagctgggatgggtacacttactgcagtgtggggttttgccagggaagtaaaaggagttgagagaaagatgggtcagttcagaagacatacacaggagaaattgtagtgatgaaatgtgcagtctaaggtttaatctgaccaagaaattggaattgaaaacaggaggtgactagggagggattaggaaattagaggtcttgacaagatagaaactccagcatggtgaggggttgggcagggaggtatatttgagccagacaggagtgctttggaaattgagaggtggagcaatctcaggtaaaggcaaaatagagggtatgacctggggttgctggccagagccagggaggagccttaagaagtgaaatctagggttggcgaggctggagggcagggtgagcctccacatgggtgctgaagcaagaaaccgacagatgttgaggagaatggtgtgacctaggagtcagcatccttggtgaacaagaggagtggccacaaggccagtggcacctgccagaggggaaagcaggcatgacaggatagcatctcccaggtgagagccttttgaggaagggagggtgggcagtggtctggaagcttgatgcagagcagtgtgggtcccactggcagcccttggtcttagaagaatgggagtacccagtgggggagcagctgtacaatgaggtagactcctagaggttaattatcatctcctaatcttaccctgacccttttgtcaaacgttatctagattaaacctcagtataggcaggctgcaggaaatggacattccagtggcccctggggttccagcctgtagcagcttcatctgtgctttgtgcacttggttctcagtcatctctgcaagggaccctgacgcctgggagatcagagccactgaccctttatggcactgctaacagaccccttccctcaggtaattctggatccagaactcattatgggatgtaatccaggtcaacactaataccacttggaaggttccgctctgtctcactctgcttgagtatcccactgatcagtctctcagtgcctgcctactgggcagctcatctgtccacttattcgtattaaatttgctttttatttaggtctctggagatggttgcgtggggaagagcccatgactttcctatatgatcccttgaacatactctccaagtcagtagattacctctcaggcagccttcataaaagtgtttcactgtactggggtttgtgttcatctcactcacatagacagtctctgggtaggcaggtggggggtgatacaagttcacactctgtgtttctcctcctgttagccattcccaccctgctgatgtttaaggaaagccagggatgatgacccacttaagctttccttggccttgttaagtccaatcatctggggcaggaagaagagaaatgctcattgcaatctttgacccccactaactgctgtggtgactttgacccaagcccttgacctccttttccttatctgaaatgttgctgtgattcctgtggtgagatcagatgaggcagcacttgggataagcttgcagagatgcattgagcggtatgaaagtacaggatgctatgtactttcctgcttcacagcacattttgtttcttgcaaggtgagtggcccagccgcctctccacaaacacgtgtttctgcctttctcagcataatcagcaagatgttcccacttctcagcattgcacttttctgctggtgcagaataaaaacactttgagccccaccctgtcctgagacaaagtcctctgtggtcacttggcatatggcaaagctgctgctgtgggctggaacatttgaggcaacagtgacttcctcctttcctagttaccggaacccttagagctgggagccggccagtgaaacagacaaggggaggggaagagaagagggaaggcatgtttcctatatgagtttcagtttgttgcacagaaatgtttttgaaacctttatctccaatagaatcacaaacgggtgtcagagagtcaaaactagaggaaaaagtttagtctgtaaacaaatcattagatggcatcagaatttgaaccaaagtaaaagatgctggaccttggcacttatcag

SEQ ID NO: 57741 - DNA, 2338 bp, Homo sapiens
  misc_feature (2153)..(2153): n is a, c, g, or t
  misc_feature (2160)..(2160): n is a, c, g, or t
  misc_feature (2285)..(2285): n is a, c, g, or t
attgggccttcgggacagcagaggagcagtgtccggccatggccggagcccgcaggctggagctaggcgaggccctggcgctggggtcgggctggcgtcatgcgtgccacgctctcctctacgcgccggaccctgggatgctcttcggccgcatcccgctgcgctacgccatactgatgcagatgcgcttcgatggacgcctgggcttccccggcggattcgtggacacgcaggacagaagcctagaggacgggctgaaccgcgagctgcgcgaggagctgggcgaagcggctgccgctttccgcgtggagcgcactgactaccgcagctcccacgtcgggtcagggccacgcgttgtggcccacttctatgccaagcgtctgacgctcgaggagctgttggctgtggaggccggcgcaacacgcgccaaggaccacgggctggaggtgctgggcctggtgcgagtgcccctgtataccctgcgggatggtgtaggaggcctgcctaccttcctggagaattcctttattggctctgcgcgggagcagttacttgaagctctccaggacttgggactgctgcagtctggctctatttcaggccttaagattccagctcatcactagaggcagccctccatggacccatgaaaactgagatgaggaccttggtactagggagggagggaaggacgtgggaatgttttcttattggatctgagagatgatacatgataccagatgaaaagaaggagaagtgtgtaccatatgttttgagcagaggaccctccaacttatggcatcaggggcaaaaagtcacagcttatcccaggcaccctggcaggttctcagagcctgcctcctccctgtttatatgcgtacagcctggtaacccccaggcatgcaaatatacaatctgtaacaacacacagcctgacaccttcccctggtcatgtccagtttaaccttgaagtggcatttgtcacactaccctggtccctgattgcaaggagcttctgaagcaagggtgaatccttcccacactcctccatggttgccctccagggtctagcccagcctatttgttagggaggatagagaaacagagcaccccctgtgctttctgaaaatagacttgctcttgtcttgagtggtgaccaaagcagttggctcttaaaaggtgggagagcagcccaaccaatccccaatccttttcttctgaaactgagcaggaagggtaaggaagtggctaggtctccttggactgagcatggacatgagtcctgtgaggactggtgtctctcctctagagctttcatctttgggatgcctgagactccgagactatcagaagggaattgacccaccccagtctagcaccaccctgccttcacttcatctacataaaggtggtataaaaacatagactggaggaggtaatccatggagagagaaaaagaagagggctcaggacaaggccctgaggaggcccaatcctaaaagtttgggcagagggaaccaggcacgttaaagaagacagaaagcggactatgcagagtgcttgtgagggtttcactaaaacagaggcaaaactgtccattgaattcagtaacatgaagtgtttgatgactatgatggcagcagtttcaggaagggcggtatggaaggcaggctgtactggttgagtgaatggaaagttggggagtagaacgtgtgagaagttggccttcaaggggctcaggttaataatagagagctatggagtcaaggcatgtttaagatgggaggtagagcatgccaatattgatggcaacagtcaagatggtgtgatgagagagatgggaggggcacaaagaggaggacccctgaaggagcagagtccatgagaaagaaggagggatgggacctttgtaggaagagacacagtcctgcagcctcatatggctcaataaaacagaaaggggcaagtatagaagattaggatgactaaattaatggggaaatgatgaaggagtttgaatctcttctttgtgaaatgaagtgagactatcagctagttgtgggtggagtgtgttctcagaaggtatgaagtagatgttttcctaggtgttggaaaacaggttgatggcaacagtcaagatggtgtgatgaganagatggnaggggcacaaagaggaggacccctgaaggagcagagtccatgagaaagaaggagggatgggacctttgtaggaagagacacagtcctgctgtccccgcatcattgggcctgagtgtgctctgtanacaacgtcatgtctgttacaccaattaaagaagcgggaaggcttcaaaaaaaa

SEQ ID NO: 57742 - DNA, 1674 bp, Homo sapiens
attgggccttcgggacagcagaggagcagtgtccggccatggccggagcccgcaggctggagctaggcgaggccctggcgctggggtcgggctggcgtcatgcgtgccacgctctcctctacgcgccggaccctgggatgctcttcggccgcatcccgctgcgctacgccatactgatgcagatgcgcttcgatggacgcctgggcttccccggcggattcgtggacacgcaggacagaagcctagaggacgggctgaaccgcgagctgcgcgaggagctgggcgaagcggctgccgctttccgcgtggagcgcactgactaccgcagctcccacgtcgggtcagggccacgcgttgtggcccacttctatgccaagcgtctgacgctcgaggagctgttggctgtggaggccggcgcaacacgcgccaaggaccacgggctggaggtgctgggcctggtgcgagtgcccctgtataccctgcgggatggtgtaggaggcctgcctaccttcctggagaattcctttattggctctgcgcgggagcagttacttgaagctctccaggacttgggactgctgcagtctggctctatttcaggccttaagattccagctcatcactagaggcagccctccatggacccatgaaaactgagatgaggaccttggtactagggagggagggaaggacgtgggaatgttttcttattggatctgagagatgatacatgataccagatgaaaagaaggagaagtgtgtaccatatgttttgagcagaggaccctccaacttatggcatcaggggcaaaaagtcacagcttatcccaggcaccctggcaggttctcagagcctgcctcctccctgtttatatgcgtacagcctggtaacccccaggcatgcaaatatacaatctgtaacaacacacagcctgacaccttcccctggtcatgtccagtttaaccttgaagtggcatttgtcacactaccctggtccctgattgcaaggagcttctgaagcaagggtgaatccttcccacactcctccatggttgccctccagggtctagcccagcctatttgttagggaggatagagaaacagagcaccccctgtgctttctgaaaatagacttgctcttgtcttgagtggtgaccaaagcagttggctcttaaaaggtgggagagcagcccaaccaatccccaatccttttcttctgaaactgagcaggaagggtaaggaagtggctaggtctccttggactgagcatggacatgagtcctgtgaggactggtgtctctcctctagagctttcatctttgggatgcctgagactccgagactatcagaagggaattgacccaccccagtctagcaccaccctgccttcacttcatctacataaaggtggtataaaaacatagactggaggaggtaatccatggagagagaaaaagaagagggctcaggacaaggccctgaggaggcccaatcctaaaagtttgggcagagggaaccaggcacgttaaagaagacagaaagcggactatgcagagtgcttgtgagggtttcactaaaacagaggcaaaactgtccattgaattcagtaacatgaagtgtttgatgactatgatggcagcagtttcaggcagatgcctgcttttgcttcccct

SEQ ID NO: 57743 - DNA, 413 bp, Homo sapiens
tgtgataaccacaatgtagaaagccattcccaactttttgaccattttaggccacttaaaatgttttatcccttcctaatttattgagtccttactttttaaagcacttcacatgtattatcttatttcctccttacaacagccttatgagatagacactcttgttgtccccactttacagatgaggaaacagaggctgagtagctggcctgaagccatcgactttatataaacggcagagacgggatacggatctgggcaataaccattcttgtgtctcagtatccattcctgtgtgtacttttttttttgaggcaggagaatggcgtgaacccgggaggcggagcttgcagtgagtcgagatcgcgccactgcactccagcctgggcgacagagcgaaactccgcctcaaa

SEQ ID NO: 57744 - DNA, 799 bp, Homo sapiens
ctttagtatttccagaactattgctgtagaggcctcccttaattttcagagttctcattttgaattaaagtagacttacgctacatagatgtagaaaattaggtttggcttaggtttctgaaaaaatattctaggagaaggtggtagcattgttctgaacttaccacacttggaaaaactaatcttcaaatgtaattttttgtcttattaatgagtaatctgtcaaagacatgaattctttgacttgtgctcattctttctgaacttattgaggcttatatatatcaaataaggttaatttacacaataattatttttaataattaataaactcattcatgtagtatattttaaaacattatttcctctcatttttccttctcttttttcttcctatatatttttaaggtttcaagagaaaacgggcttcagtttttaaaaaaatgtagacttgcatttttactgtgcttatttaaaataatggatataatttatattaaggtccaaattattttattcacaggataatcatggtctctgataaaagatgcccacatttctgtgtactcacagttgttgtatatttttcaatttcaattttgaaagtaaactcaacacattgttttcccattttacctccactacctactcgccagacaaaaatatagatttctctaaaaacacatacaaagaaaacgtctttccttaaaacatgatcttattgacctggaaggtagtttgagcaagggtatgtaataaaataaatggctctcaacctgcatcaatttttatactatag

SEQ ID NO: 57745 - DNA, 217 bp, Homo sapiens
tattcctacaaactgggtcccctgcaggaaaaaacgtgcccttcagagtgccagaaagctagcctgggggacgggcctggggctggggtgggcaggagtcctcgctgcacctgcagccttggggcccctgccgtgcctatgctgcagtcactgactccttagacctgtgcctagtctcctactgaagggctaccccatgcttctgatgctcattaca

SEQ ID NO: 57746 - DNA, 1607 bp, Homo sapiens
tacacacacgcaatgacccacgagaaagggaaaggggaaaacaccaactacccgggcgctgggctttttcgacttttcctttaaaaagaaaaaagtttttcaagctgcgcgggcttcctgtgcgcggccgagcccgggcccagcgccgcctgcagcctcgggaagggagcggatagcggagccccgagccgcccgcagagcaagcgcggggaaccaaggagacgctcctggcactgcagataacttgtctgcatttcaagaacaacctaccagagaccttacctgtcaccttggctctcccacccaatggagatggctctaatggtggcacaaaccaggaaggggaaatctgtggtttaaattctttatgcctcatcctctgagtgctgaaggcttgctgtaggctgtatgctgttaatgctaatcgtgataggggtttttgcctccaactgactcctacatattagcattaacagtgtatgatgcctgttactagcattcacatggaacaaattgctgccgtgggaggatgacaaagaagcatgagtcaccctgctggataaacttagacttcaggctttatcatttttcaatctgttaatcataatctggtcactgggatgttcaaccttaaactaagttttgaaagtaaggttatttaaaagatttatcagtagtatcctaaatgcaaacattttcatttaaatgtcaagcccatgtttgtttttatcattaacagaaaatatattcatgtcattcttaattgcaggttttggcttgttcattataatgttcataaacacctttgattcaactgttagaaatgtgggctaaacacaaatttctataatatttttgtagttaaaaattagaaggactactaacctccagttatatcatggattgtctggcaacgttttttaaaagatttagaaactggtactttcccccaggtaacgattttctgttcaggcaacttcagtttaaaattaatacttttatttgactcttaaagggaaactgaaaggctatgaagctgaatttttttaatgaaatatttttaacagttagcagggtaaataacatctgacagctaatgagatattttttccatacaagataaaaagatttaatcaaaaaatttcatatttgaaatgaagtcccaaatctaggttcaagttcaatagcttagccacataatacggttgtgcgagcagagaatctacctttccacttctaagcctgtttcttcctccataaaatggggataatactttacaaggttgttgtgaggcttagatgagatagagaattattccataagataatcaagtgctacattaatgttatagttagattaatccaagaactagtcaccctactttattagagaagagaaaagctaatgatttgatttgcagaatatttaaggtttggatttctatgcagtttttctaaataaccatcacttacaaatatgtaaccaaacgtaattgttagtatatttaatgtaaacttgttttaacaactcttctcaacattttgtccaggttattcactgtaaccaaataaatctcatgagtctttagttgatttaaaataaaatt

SEQ ID NO: 57747 - DNA, 1553 bp, Homo sapiens
tacacacacgcaatgacccacgagaaagggaaaggggaaaacaccaactacccgggcgctgggctttttcgacttttcctttaaaaagaaaaaagtttttcaagctgcgcgggcttcctgtgcgcggccgagcccgggcccagcgccgcctgcagcctcgggaagggagcggatagcggagccccgagccgcccgcagagcaagcgcggggaaccaaggagacgctcctggcactgcagataacttgtctgcatttcaagaacaacctaccagagaccttacctgtcaccttggctctcccacccaatggagatggctctaatggtggcacaaaccaggaaggggaaatctgtggtttaaattctttatgcctcatcctctgagtgctgaaggcttgctgtaggctgtatgctgttaatgctaatcgtgataggggtttttgcctccaactgactcctacatattagcattaacagtgtatgatgcctgttactagcattcacatggaacaaattgctgccgtgggaggatgacaaagaagcatgagtcaccctgctggataaacttagacttcaggctttatcatttttcaatctgttaatcataatctggtcactgggatgttcaaccttaaactaagttttgaaagtaaggttatttaaaagatttatcagtagtatcctaaatgcaaacattttcatttaaatgtcaagcccatgtttgtttttatcattaacagaaaatatattcatgtcattcttaattgcaggttttggcttgttcattataatgttcataaacacctttgattcaactgttagaaatgtgggctaaacacaaatttctataatatttttgtagttaaaaattagaaggactactaacctccagttatatcatggattgtctggcaacgttttttaaaagatttagaaactggtactttcccccaggtaacgattttctgttcaggcaacttcagtttaatttttttaatgaaatatttttaacagttagcagggtaaataacatctgacagctaatgagatattttttccatacaagataaaaagatttaatcaaaaaatttcatatttgaaatgaagtcccaaatctaggttcaagttcaatagcttagccacataatacggttgtgcgagcagagaatctacctttccacttctaagcctgtttcttcctccataaaatggggataatactttacaaggttgttgtgaggcttagatgagatagagaattattccataagataatcaagtgctacattaatgttatagttagattaatccaagaactagtcaccctactttattagagaagagaaaagctaatgatttgatttgcagaatatttaaggtttggatttctatgcagtttttctaaataaccatcacttacaaatatgtaaccaaacgtaattgttagtatatttaatgtaaacttgttttaacaactcttctcaacattttgtccaggttattcactgtaaccaaataaatctcatgagtctttagttgatttaaaataaaatt

SEQ ID NO: 57748 - DNA, 1553 bp, Homo sapiens
tacacacacgcaatgacccacgagaaagggaaaggggaaaacaccaactacccgggcgctgggctttttcgacttttcctttaaaaagaaaaaagtttttcaagctgcgcgggcttcctgtgcgcggccgagcccgggcccagcgccgcctgcagcctcgggaagggagcggatagcggagccccgagccgcccgcagagcaagcgcggggaaccaaggagacgctcctggcactgcagataacttgtctgcatttcaagaacaacctaccagagaccttacctgtcaccttggctctcccacccaatggagatggctctaatggtggcacaaaccaggaaggggaaatctgtggtttaaattctttatgcctcatcctctgagtgctgaaggcttgctgtaggctgtatgctgttaatgctaatcgtgataggggtttttgcctccaactgactcctacatattagcattaacagtgtatgatgcctgttactagcattcacatggaacaaattgctgccgtgggaggatgacaaagaagcatgagtcaccctgctggataaacttagacttcaggctttatcatttttcaatctgttaatcataatctggtcactgggatgttcaaccttaaactaagttttgaaagtaaggttatttaaaagatttatcagtagtatcctaaatgcaaacattttcatttaaatgtcaagcccatgtttgtttttatcattaacagaaaatatattcatgtcattcttaattgcaggttttggcttgttcattataatgttcataaacacctttgattcaactgttagaaatgtgggctaaacacaaatttctataatatttttgtagttaaaaattagaaggactactaacctccagttatatcatggattgtctggcaacgttttttaaaagatttagaaactggtactttcccccaggtaacgattttctgttcaggcaacttcagtttaaaattaatacttttatttgactcttaaagggaaactgaaaggctatgaagctgaatttttttaatgaaatatttttaacagttagcagggtaaataacatctgacagctaatgagatattttttccatacaagataaaaagatttaatcaaaccacataatacggttgtgcgagcagagaatctacctttccacttctaagcctgtttcttcctccataaaatggggataatactttacaaggttgttgtgaggcttagatgagatagagaattattccataagataatcaagtgctacattaatgttatagttagattaatccaagaactagtcaccctactttattagagaagagaaaagctaatgatttgatttgcagaatatttaaggtttggatttctatgcagtttttctaaataaccatcacttacaaatatgtaaccaaacgtaattgttagtatatttaatgtaaacttgttttaacaactcttctcaacattttgtccaggttattcactgtaaccaaataaatctcatgagtctttagttgatttaaaataaaatt

SEQ ID NO: 57749 - DNA, 555 bp, Homo sapiens
atttaatgagctccttcctttcaacagaaaatggactattttcctttcagatttactatatgctgtcactccagctttataaccgcatgtgcatacacaaacatttctttctctcttgcaggtggcacaaaccaggaaggggaaatctgtggtttaaattctttatgcctcatcctctgagtgctgaaggcttgctgtaggctgtatgctgttaatgctaatcgtgataggggtttttgcctccaactgactcctacatattagcattaacagtgtatgatgcctgttactagcattcacatggaacaaattgctgccgtgggaggatgacaaagaagcatgagtcaccctgctggataaacttagacttcaggctttatcatttttcaatctgttaatcataatctggtcactgggatgttcaaccttaaactaagttttgaaagtaaggttatttaaaagatttatcagtagtatcctaaatgcaaacattttcatttaaatgtcaagcccatgtttgtttttatcattaacagaaaatatattcatgtcatt

SEQ ID NO: 57750 - DNA, 276 bp, Homo sapiens
cccccttggcagtacctccccctcataatctggatctctccacttttgggggtctcctctttgaacctcatctctcttctgtctgtacttgttcctgtgatctcgtctcgtctcgtctcagggccttttaacttccacacatacaccaatgactcccacatttctgtctctagcccagacctctcccctaacttctagactcacatattcaactgcctacttatcatttctacttggatactgatatgatttggctctgtgtccccacccatatct

SEQ ID NO: 57751 - DNA, 208 bp, Homo sapiens
ggagactgttggacctctgtctttaaagaccatgctatgttgcaaactctccctcagtttttataactgaagtccaggttttagttgtgcagtttgaatatgaacataaaccttccagcatgctatatttatgcaaagtaagaaatattatataccagaataaccactactggattattttgaacatagaaattaaataagctaatga

SEQ ID NO: 57752 - DNA, 311 bp, Homo sapiens
gacagagttagaatctgtctcaaaaaaaaaaaaaattaaaaattagccaggcatggtggtgcacagttgtagtcccaactactgaggaggctgaggcaggaggatcacttgagcccaggagttcaagactgcagtgagctattattgcaccactgcactccagccctggtgacagagtgagacctcgtctcaacaacaaaactaattaaaatcaagaagtagcttgtgagccagggggtggggtgggaatggaagatcccgttatcagaagctatagcctataactaaccaacttttaagctattcagcag

SEQ ID NO: 57753 - DNA, 159 bp, Homo sapiens
gttctgttttcaaagttgttctccccttgaggtcccagatgaccggctgagctgtgcaagggccacggctccaaggaaggccggagctacttggaggttgtccccaggccctttgtccacagtgacagacacccagaccagaccatgctgcagtgactg

SEQ ID NO: 57754 - DNA, 338 bp, Homo sapiens
tcctgagttgaataggagggagagttaagccatcctgagttgaatagggtctggtgcccttccggagcccagagtgcctgcccggctgtggttggcatgtttcccagggctgctggtgcccttggcattgtccctgccctgtaaaggtgacctggcctcagattcgccactgccagggcagggtggctgccagggctcgcctcagaatctgggagcaaagccctgtaattactgtatttggtcggtgaagcaggtgttggaggagaaaagggtgatatgggggtttggaccagacatcggtagcaggtgggaagtaaatgagtttgccttcacagagc

SEQ ID NO: 57755 - DNA, 973 bp, Homo sapiens
attgaatgcagcaagggtctggaggctgaggaccaggcagacaaacattcagagttgctggaatgcgacagagacagggagtcagactggtcatgcaaggccagctctggggtctcggcaggtggtccgcgacatgacctccgagttcttctctgcccagctccgggcccagatctctgacgacaccactcacccgatctcctactacaagcccgagttctacatgccggatgacgggggcactgctcacctgtctgtggtcgcagaggacggcagtgctgtgtccgccaccagcaccatcaacctctactttggctccaaggtgcgctccccagtcagcgggatcctgctcaataatgaaatggatgacttcagctctaccagcatcaccaacgagtttggggtacccccctcacctgccaatttcatccagccagggaagcagccgctctcgtccatgtgcccgacgatcatggtgggccaggacggccaggtccggatggtggtgggagctgccgggggcacgcagatcaccatggccactgcactggccatcatctacaacctctggttcggctatgacgtgaagtgggccgtggaggagccccggctgcacaaccagcttctgcccaacgtcacgacagtggagagaaacattgaccaggaagtgactgcagccctggagacccggcaccatcacacccagatcacgtccaccttcattgctgtggtgcaagccatcgtccgcatggctggtggctgggcagctgcctcggactccaggaaaggtggggaacctgctggctactgattgctccaggcggacaaggctgacaagcaatccaggaacaaaatactcaccaggacgaggaagaggactttgggggacaggcttctcctgtgagcagcagagcagcacaataaatgaggccactgtgccaggctccaggtggcctccctggcctgtctcccc

SEQ ID NO: 57756 - DNA, 1103 bp, Homo sapiens
attgaatgcagcaagggtctggaggctgaggaccaggcagacaaacattcagagttgctggaatgcgacagagacagggagtcagactggtcatgcaaggtcctgggcctgccttgggtcctggggagccacggaaggttgtgggtgccagagggttgtggtcagagccacagtcaggggccttctgagacctgtgccccctccccaccctccctccccacctccctaggccagctctggggtctcggcaggtggtccgcgacatgacctccgagttcttctctgcccagctccgggcccagatctctgacgacaccactcacccgatctcctactacaagcccgagttctacatgccggatgacgggggcactgctcacctgtctgtggtcgcagaggacggcagtgctgtgtccgccaccagcaccatcaacctctactttggctccaaggtgcgctccccagtcagcgggatcctgctcaataatgaaatggatgacttcagctctaccagcatcaccaacgagtttggggtacccccctcacctgccaatttcatccagccagggaagcagccgctctcgtccatgtgcccgacgatcatggtgggccaggacggccaggtccggatggtggtgggagctgccgggggcacgcagatcaccatggccactgcactggccatcatctacaacctctggttcggctatgacgtgaagtgggccgtggaggagccccggctgcacaaccagcttctgcccaacgtcacgacagtggagagaaacattgaccaggaagtgactgcagccctggagacccggcaccatcacacccagatcacgtccaccttcattgctgtggtgcaagccatcgtccgcatggctggtggctgggcagctgcctcggactccaggaaaggtggggaacctgctggctactgattgctccaggcggacaaggctgacaagcaatccaggaacaaaatactcaccaggacgaggaagaggactttgggggacaggcttctcctgtgagcagcagagcagcacaataaatgaggccactgtgccaggctccaggtggcctccctggcctgtctcccc

SEQ ID NO: 57757 - DNA, 395 bp, Homo sapiens
atatgtgtgttgtgcactcatgtataggagagacaggtaagctgaacaaaaaatttaacagattgtcccaaggagtgggcaggggattataattcacttcatttttttctttatacttttctatattttcttaactttttatagagaatctatatttgttttacaatatgaaaaaaggcaacaaaaattctctaaagaaaaataggtgagaaagagaaagccaaaccaagcgtaaagacataaattgaagcccatgatgaggctaaaacaactgaatttctatggccaagccatgcatttggagctcaattttatagcagtcaatggatgaggaaaacctgatcagttacacgggtcacggggtccacaggacatacaaagcgattactcagaga

SEQ ID NO: 57758 - DNA, 468 bp, Homo sapiens
caaagtgctgggattacaggcgtgagccactgcgcctggcttctctttttcttaataataactagagcctctggaatctctgtgaaatctcgtatctttatcttctcaaatttttgaatgagcaatggtggtgagattgaggaaatcataataccagcattggaaaagattttgaagaagaatagaaggctcaccaataacatgttagtgcctaatgaagggtttattccatctgatttacagaatagaccagacaagacaatcatttcagagccttttacctgtgtcagggtatgacagccacagcccttgttttaaagatcacctttgtctaatccccattacctggacttacaaatttccccccttaatgttttacaggtttacctatgtataaatgtgagatatgtttaaataaaatgttaatacatgtttaaataaaaattcctgtttaaatgaaaatgcact

SEQ ID NO: 57759 - DNA, 364 bp, Homo sapiens
atgccaaaggaattcatcaccactagactggtcctacaagaaatgctcaagggatttctaaacatggaaatgaaaggttgacactcaccatcataaaaacacatgaaaggataaaactcacagatcttataaaacagttccacaactgagactacaaagcaactaggtaagttaacattatgataggaacaaaacctcacataccaatattaattctgaacataaatgggttaaatgctccacttaaaagatacagcttggcagaattgattaaaaagcaggatctaatcatatcttgcttacaagaaatccacctaactgctaaagacacgtaaagactcaaggtaaaggggtggaaaaagac

SEQ ID NO: 57760 - DNA, 1055 bp, Homo sapiens
  misc_feature (985)..(985): n is a, c, g, or t
  misc_feature (995)..(995): n is a, c, g, or t
  misc_feature (1017)..(1017): n is a, c, g, or t
  misc_feature (1028)..(1028): n is a, c, g, or t
cccactccctacaggccccagtgtgtgatgttcccctccctgtgtccatgtgttctcgttgttcaactctcacttatgagtgagaacatgcagtgtttggttttctgttcttgcgttagtttgctgagaataatggtttccagcttcatccatgtccccgcaaaggacatgaactcatccttttttatggctgcatagtattccatggtgtatatgtgccacattttctttatccagtctatcattgatggacatttgggttggttcagtttcctctcacaaaggaaattagggaagcaatgaagataataggaatttataagttaggaaacaaaaataatagaatcagtcaatacaagagctgtcgtttgaaagtcctattaaattgataagccattggccaaccaagaaaaaaagggggaagaaaagacatatatttaaaattagaaaccagaaggggaaaataatcacaaacatcagcaaaactgaaaggatctacaggagtaccttgcaaaatagatgtgaactaatgggatgaaatggttgattttccagaataatgtaaatcaccaaaatgatcccagaatagggaaaaatctaaacagggcaatataaacatagaagaaaatgagaattttagcaaatgagtatctttcaaaaatgtatcaggcccagacctttttacaagttaactctttcaagccttcatgggatataattctgacactactctaactttgtcaaagaatagagaaagaagaaataacttctgaactatctttacacaatcagtataatactgataggaaaacttgactgagttcagaaaaagaaaacgaagtagagatctcacttgcatcagaacaaaatgtcaatctattagcagataatattcatcagtattttttgaaaatacaataccacaagaaagaaacagtggacatttggagggctttgaggcctgtggtggaaaaggaattatctncccgtaaaanctagatagaagcattctcaganacttgtttgtnatgtgtgccctctactgacagagttga

SEQ ID NO: 57761 - DNA, 289 bp, Homo sapiens
atgattttaacgtagaaaaacatgccctgtttagtaaggttaaggacctgggtttatttagcttagaataaatgactaaattgaaactgaatacctatcttcaagcatttggtagtggccagctttcctttagctctgccgaagacacacaaaaaagaaattcaactgaagtgtgaagaatttaagttagagattgcaaactgacaatataaagctacgttggctctcagagacatattatttggaccacacaatatattttaaaagtttgaattgtttgcaaagttaa

SEQ ID NO: 57762 - DNA, 1654 bp, Homo sapiens
  misc_feature (668)..(668): n is a, c, g, or t
gtatctttgaaaatagatacgttcacaccctcctaacggcggcgccaagggtggtgggtcccaaaactgtttccccgtaaagagttcccccgcccggtcgcaggaagacgcctgagggggcgctcggagggatccccagcagccgccggagctggaccgtgcggtgcgcgggtgagaagccgggaggggccggacaaccccgaccgcgagccggacccctgctctgaccgcaggtgttctattactcaacaggaatcttcaaggatgcaggtgttcaacagcccatctatgccaccatcagcgcgggtgtggttaatactatcttcactttactttctctatttctggtggaaagggcaggaagaaggactctgcatatgataggccttggagggatggctttttgttccacgctcatgactgtttctttgttattaaagaatcactataatgggatgagctttgtctgtattggggctatcttggtctttgtggcctgttttgaaattggaccaggccccattccctggtttattgtggccgaactcttcagccagggcccccgcccagctgcgatggcagtggccggctgctccaactggacctccaacttcctagtcggattgctcttcccctctgctgcttactatttaggagcctacgttttnattatcttcaccggcttcctcattaccttcttggcctttaccttcttcaaagtccctgagacccgtggcaggacttttgaggatatcacacgggcctttgaagggcaggcacacggtgcagatagatctgggaaggacggcgtcatggggatgaacagcatcgagcctgctaaggagaccaccaccaatgtctaagtcatgcctccttccacctccctcccggcatgggaaagccacctctccctcaacaagggagagactttatcaggatgaacccaggactgcttctgaatgctgctacttgatttctttctcatcccacgcactccatgagcaccccaaggctgcagtttgttggatcttcaatggctttttaaattttatttcctggacatcctcttctgcttaggagagaccgagtgaacctaccttcatttcaggagggattggccgcttggcacatgacaactttgccagcttttcctcccttgggttctgatattgccgcactagaggatataggagaggaaaagtaaggtgcagttgccccaacctcagacttaccaggaagcagatacatatgagtgtggaagccggagggtgtttatgtaagagcaccttcctcacttccatacagctctacgcggcaaattaacttgagttttatttatcttatcctctggtttaattacataaatatttattttttaagtgtaattttgccaaataataaaaacagaaggaaattgagattagagggaggtgtttaaagagaggttatagagtaaaagatttgatgctggagaggttaaggtgcaataagaattcagggagaaatgttgttcattattggagggtaaatgatgtggtgcctgaggtctgtacattacctcttaacaatttctgtccttcagatggaaactctttgatttctcagaaaagttgtatgcctatttaataaagctactcatttcctttggaacttt

SEQ ID NO: 57763 - DNA, 357 bp, Homo sapiens
attagctgccattcagcttaagccgagcagtgaacttgtgacctcttatttcaggttcatgatgctttgaaactcagccacaggaagcaaagatatgggtggcaaggctgggcacaatagctcacgcttgtaatcccagcacttagtgaggtcgaggcaggtggattgtttaaggccaggagttcgagaccagcctgagcaacatagagagacccccgtctctacaaaacaaacaaaaatagaacaaagcaaaaaccagccagatgtggtggctcatgcccagctactccagagcctgaggtaggaggatcgcttgagcccaggaaattgaggctgcggtgagctgtgattgcacca

SEQ ID NO: 57764 - DNA, 171 bp, Homo sapiens
ctgacttgcccaaagtcacacacttagtaaatagcaggcctggcctttcaaaattggtttttctgactcctaaatctgcactctttctacctcactaaacttcctcttgaaaagatttctatgaaatttcccagatgcatacaaacgttataaataaaaatataggctggg

SEQ ID NO: 57765 - DNA, 987 bp, Homo sapiens
cccaaagtgctgggattacagggtgaaccactacacccggcctattagaattttcaacagcatgtaagatcaagttttctagaaagagttataaacttagtatttcttatctgtcagatatttgaagtaatctatgtagtagtcagccaaattatttctctgccaacaaaaggttaccccattttccctaagcaataatgtctaccgtctgttactatcattatggtacagctaatttgggatgctatcaatcagccaggttattagcaaccaggtcagtttggttttcttatattttctactttgtctatctagattagaatggctttaaatcaggatttttatttcttggtcagtgaatcaaatattgggttattggctttatgctactttaggaccaaaaatatctatatgagccaccgcgcctggccaaaagaatgttcttgagctttatattttgacccaaattaggcaatagttaccttaaagaaaaatgatacagtcaaaatcattttggctttattaaagctcctcaaaaaactctagaattagggctttcttaagttactttttagcagaaacatttacggtattttgtacatatgtgtgcaaagttgcttattaacatttatgtcatggtcataaagactaatttggtaacaatattcagtctccagtaaatatgtggttaattgatatgcaaattacttccaaagtacaaattaatagtctcatattacatttttgtgctttgctacctttacctcaaacaaaataatctgtaggattcttcatgcttgtttcagcaccttttgcccagctttgcttgcttcattggccagaggactgtcagcacctcatgaagccctttatatgcttctctgaggtcatttgcataatgttgtggcctatagtaggttctcaataaatacctgatggatgaatgaatgaataaggatgaggaaatgaacacggtaggtatgcctg

SEQ ID NO: 57766 - DNA, 724 bp, Homo sapiens
cactggatagaggagcgattgcagagaatcctcaaagttgcctttgaaattccctagctgaggaaattaaaagactgctctttctagtcttgaactcctgacctcaaatgatccacccgccttgcccttccaaattgttgggattccagtgagccaccgcgcctggccaaaagaatgttcttgagctttatattttgacccaaattaggcaatagttaccttaaagaaaaatgatacagtcaaaatcattttggctttattaaagctcctcaaaaaactctagaattagggctttcttaagttactttttagcagaaacatttacggtattttgtacatatgtgtgcaaagttgcttattaacatttatgtcatggtcataaagactaatttggtaacaatattcagtctccagtaaatatgtggttaattgatatgcaaattacttccaaagtacaaattaatagtctcatattacatttttgtgctttgctacctttacctcaaacaaaataatctgtaggattcttcatgcttgtttcagcaccttttgcccagctttgcttgcttcattggccagaggactgtcagcacctcatgaagccctttatatgcttctctgaggtcatttgcataatgttgtggcctatagtaggttctcaataaatacctgatggatgaatgaatgaataaggatgaggaaatgaacacggtaggtatgcctg

SEQ ID NO: 57767 - DNA, 353 bp, Homo sapiens
ttaccaaccagagagagtgggctgggatgcagaaactaattcttactcatgacactgatgagatttcctgagccccacctgtagtctctggaatagtaccttcatttccaaaaaggctagtctcaaggccttgagtacttctattcaacttgcagataagctaattcttctatctgatttgaaattactacatccttgccaggctaaaaccgttccttcactgcttaatttcattctcattttcttgaccatcttaagacagtgcattcatatcttttgtctggttttatacgtacatctatctgatccttcatactcaacctttaattcttttgtaagctcttttaccatta

SEQ ID NO: 57768 - DNA, 292 bp, Homo sapiens
taaaatctagagaacatgaaaaaagggaagaaaacaaacctattttaaagcttacgtgactactttttaatgagttcaggaaaaagatgatgaaagttattgggtattcccatggaaaagagaatagagatggtaaaacttcctttctaggaagttaccttctaggaagccacagagttgccatccttcttactgtccagagggaaaattctagagttttctgaatttgcactcttttgactttgaagcagaacaaattaagtttcaactgacccaagtcctaaggatacta

SEQ ID NO: 57769 - DNA, 283 bp, Homo sapiens
atcctatttttgttttacatacgtactgatttttctcatttctcttaaggtactttgtttgcctgttttattctttctttcaggctagagatttccacccttaactatatactcagatttgaaactagagcacataccaaaaaaaaaccattaagagcactgtgaatacaggtcaagctttcaaccaagccattttatcaagggaattgctgaaattagcatatttagaatttgcttttgtttttccccatctcttggacttttcagatttccctaagaagaa

SEQ ID NO: 57770 - DNA, 317 bp, Homo sapiens
attaagtcttcctgcatcttactgatggggaaaactgagggaacgctacaatggtgtattcagacccgtcacgagagctaaatagagtgggagcagagaaggaaaaggttggcctctgaaaaatatactcagtacagggcactgacggtcaggacctcggcaatgttggtaatgaaaccgccattgcaaaataatgactgagacagtgaaagagatctgacctgactccgccttgcttctaacctccaagctgtccttgtttattcctgggctgagctaactttgggagggacttagtttatagtttaaaacaaaga

SEQ ID NO: 57771 - DNA, 318 bp, Homo sapiens
cagaaaccccaacaaaggccatgccttacaacttaccttgctcctgtttctgcctcctgaccactctggtcttccccatgttgccatgtatggcatgcctcctgtctctaggacctatgcagcaaaagagaaaaacaatgaaagtctgtattagtaaccagaaaaacggtcagaagtctgaggtacctgagagaagacagcaaaatgagatctggaatttgaggagcacctgttaggagaagagccatctctactactccccaaaagattccctgttctagttggccttctatattggtggtttctgaatacataccc

SEQ ID NO: 57772 - DNA, 345 bp, Homo sapiens
agagtatctgactcacagtgacacaagtttccatggtaccctggaaactggatggttttataatgagacagacctaagttaaattccaactcctctgcctcttgttagctgtctgactctgggagagtcagttcacttctcaaagcctcagttgtttcttcatctgtaaactggggagaaccacatttatctcacaggattgccatcaggtttaaatgagttaacatgtgtaaagcaattagactaaagctgggcacacagaaggcatccagtaagtgttagctgccttctctcctgtgtttactaggtgaaagtcattttgaacagctgtttgctttttcctgc

SEQ ID NO: 57773 - DNA, 351 bp, Homo sapiens
ctgtatcacatacggaggtcttgtgtatctgtggcaacagggagtttccttattcactctttatttgctgctgtttaagttgccaacctcccctcccaataaaaattcacttacacctcctgcctttgtagttctggtattcactttactatgtgatagaagtagcatgttgctgccagaatacaagcattgcttttggcaaattaaagtgcatgtatttcttaatacactagaaaggggaaataaagtacacaagtccaagtctaaaactttagtacttttccacgcagatttgtgcacatgtgagagggtatccagtttgtctagtgattgttatttagagagttgaac

SEQ ID NO: 57774 - DNA, 351 bp, Homo sapiens
agaaatcccgtctctactaaaaatacaaaaaaacttagctgcgcgtggaggtgcatgcctgtaatcccagctactcgggaggctgaggcaggagaatcgcttgaacccaggaggcggaggttgctgtgagccaacgttgcaccattgcactccagcctgggcaacaagagctaaactctgtctcaaaaaaaaaaagaatagaatttgaagttggaagagaattttaaaatcatataatcaagccctttctgtctacagaggagcaaactacaacccgtagaggtgaagcaagcagcctaacatcctgcaatcaggtggttaacatcagcgtcaccactggaacttagatat

SEQ ID NO: 57775 - DNA, 306 bp, Homo sapiens
cccctaagccaggaatcgaactctgaacccaggctgtcattgtgatggtggagaccaagagaaagtactgccaggtcagggggatcacaaggtcaggagattgagaccatcctggctaacacggtgaaaccccatctctactaaaaatacaaaaaattaaccgggcgtcgtggcaggcgcctgtagtcccagctacttgggaggctgaggcaggagaatggcatgaacccgggaggcagagcttgcagtgagccgagattgcgccactgcactccagcctgggcgacagagcaagactccgtctca

SEQ ID NO: 57776 - DNA, 418 bp, Homo sapiens
atttacattacttataaaattacttttaggagtttctgttgattgttgtcctgagtatttgctgcattactttgattagttttctcttctcctttaaccctttgatactaccaaattctctcccactgcaaagtaggagcgagtggactcagtgggccacaaagtcttttgctcccctgaactgggctacagtccagagggcttggaaaccacaacttggagtaaatgtttcctaggaattcagctccacttcctccctcctgggtcacttcagcgaaagcctctcaagggtaggcacaaatactccacaggggggcacccctgcacccaccctctttgggcagctcccatccgagcagcatcatccctggtccagaattcagcagatgcctctgcaggcatcagctgggtgccacag

SEQ ID NO: 57777 - DNA, 685 bp, Homo sapiens
gaattcagtgactttttgcttgagaaaattcatagcgaatattctttgttggatgaaaaacagggcagtgatgccaactgagaacgtttttcttttcagttctgggactgactttgagagagaaggaacaccttgtgctctcatggtgcgctgctcacatcctaagcttagtatcttttctgagagagagaaacatgtggtttttccagtttgggcctattctgacaagactctgctgttgagtttataggctgattaaagggtacagagggaactctgtaattatgctcatacttgaacatggctatatatcatgtttgagaaatttcctgtattcaaagaaaataaccaagctggtcctatgttctgttttgcctgcgtgccactaagtgagaaaatgtatgttcctttcctgcttcagctgttgtttactttgtacagaattttctactcctttgaaaacgaccatttttctgactcttatggtttggtgagagtctgagaaaggctttggctttaagaactttcctggtggtttaagtcaagcttgagagagaaagtcattgttctccctgtcctcatacttcccttttcagcttccttataaagatgggtagttatgacctgcactctagctaagtttatcccaacagtcttgaactacttgtcaacatttatgttttcc

SEQ ID NO: 57778 - DNA, 370 bp, Homo sapiens
aacaaaaaaaactgttcttgaaaattgaagcattaccttgtataataaagtacatcaaatcagatttgtaaataaaatattgtttaattctaaagtattcaatattttgattagattatttttttaaggaaaaatatttaacgtgtatgtgccgaattttttttaaatagttttttataattgcaatggaaaggcaattgtctcattacaaagtggtacagaagccaatacttgggttaccatagatatataaacaagcaaaaactgtggaacacgttttaagctcattttggaaaattaaaacagttctgtagaaatgcatatttgtatttgtttctctaataaatctgcaaatagctttaaacacaaa

SEQ ID NO: 57779 - DNA, 452 bp, Homo sapiens
atattaaattattttccttttccgtcaatagtccaatctgccataatcactcttctcatttctattattatatatttatattgcctttcttgaacttcatatacatggaattatacagtatataatcttccttttgttttcagctttatattttaatgaataacatcacagtcatattttcagttaatccttactgtaatccatgaagaaattattcttggccctcttttttacagatgaggaaattcactcatcgtgatgaaatgacatgtcaagagtcacattaacacgtaataaaatcgaggctcaaaattcattcttccaagtctaagttaaatttatcctccatatttttttctagcttcccttttgttcgggtccacttcatttttttccccacaattacgtactgaggcatttatgatatgataaagtgacattcttgaactaaa

SEQ ID NO: 57780 - DNA, 434 bp, Homo sapiens
gttttcttcatttattttctccccataaaacagtatgtacaagggtttgattcaggggagagaaaggatatatgaagacacattcttccctcttctattctcttacctggttagaaataaataggcatatagtcctgtttattatgggcaggaaggtaggtaaagatcacctaagtgcttatggcgtgttggctttggcacatggagaatgagtttttgatcttgttttctcggcatgtctgtttcatgagatgagcctgtaggaagagttactaggctccctgactaagcagcccggagtcttgaccaacagcaggctgtcaacaatcctaaatagcatatttattacggactcaaaatgaaatcttgaaaaacaaaaacacaatatatatgtcactgcatggacatccatcactttttctgagcctgtattg

SEQ ID NO: 57781 - DNA, 299 bp, Homo sapiens
ctggtgaaggatagaggggcttcagggtgggagattgcctagaagacatggaaggcagtgtggagggggctagaggggcagctgaggggaaaggagggacccaaggaacacagaggaaaagagctgtcggtgtaaggtcttgggagaacctgtgacagggaacggggggccaggaaagaagaggacattagagtaggggattggggaaagggtagaagaaggagcgcccagacctcaaggaaggcgtcgggttctgaagtgcttgaggggtagatatctggaaagctgggaatagggga

SEQ ID NO: 57782 - DNA, 569 bp, Homo sapiens
ggagggggcctccaggctccaaatacagcaagagaagccaagtcgagtcaagggacgtgaatgcaaggtggggacagggggcagaatttgtggccattttcacagactaccacagaggatgatgataatcgtgcccacttcatagagctatgaggattgcagcagtgtttttctattcttctcctgttcccacgagctgtgatctgcctagtaacaggtcctcttacttggcatggggttctgccatggagagctgaaatcactggtgtccacttagttcgatttactatctcatccgaggggacagagccatcccccccgccaccatgtagaaacaagtgaggcgccctggctcatgcctgtcatcccagcactttgggaggtcgaggcaggcagatcacttgaggtcaggagttccagaccagcctagccaacatggtgaaaccttgtctctactaaaactacacaaagtagccaggcgtgatggtgggcacctgtaatcccagctactcagggagcctgaggcaggagaattgcttgaacacagaaggtaggcattgcagtgagct

SEQ ID NO: 57783 - DNA, 292 bp, Homo sapiens
tctagaatcatatttccattcaagagtggcacacatttttccactaacattttttttttaaacaaaagaaaggccaactgggcattcccctatccattgaaatgttcacccagcacatgaaagctgaccaattcatgcaatgtattttgtttccagagcaggaaattccaaagggaagggaaaaataatcaaacaagtgggttttgggtctttccacacattaaccctaatcatgattccagtggtttgtagggttgggctaattttcccttctatgaagtcaaaggtttgg

SEQ ID NO: 57784 - DNA, 449 bp, Homo sapiens
cagatatgatatatctgtataattttattgtatctacttatttacctttagcataattgttttcatgtaatatccagaacatgaaatgtgatcatgaaatctgggaagaaggaaagaagttaggagaccaacattctaccacttagtagccctatgactatagcaacccttctgaacctcagttttctgatctgcaaataagagcattggacttgatgaagtgttttcagttgatctcttgtgaaatcagatgcttttccaaggattccagaaacatttgatttcaaatgcttttttaaagtgtgatgaaaataactcatgcacttaaatgcattatgtaccaaaatttgcctcatcaggagagcctcgtttttcttgacccaaggttacaattacaccttataagtttggacaaaaggttacaaatttgatttagcagtataagcaaa

SEQ ID NO: 57785 - DNA, 478 bp, Homo sapiens
gcatatactggaaataataccttcaatattgaaaaaaatactatttaggaaagaggacagaagaaaatctgccaatattttgacagtggttgcctttgtattaagaatataattaagaatataaaaggattccctgccttttaacatttttctctgctttccaacatgaatattatacctagtaatcagaaaaaaaacagaggcaatcactcttatcctttacatttctctcctgttgggacctcagattcctcagtagaaaattaaactggatgccagcctgggcaatatgatgtcaccctgtctttacaaaaaatgcacagattagccaggtgtggtggtgtgcacctgtagtcccagctacttgggaggctgaggttggagggctgcttgaacccaagagatcaaggctgcagtgagctgtgatctcgccagtgcactccagcctgggtaacagagcaagaacctgtctcaaaaa

SEQ ID NO: 57786 - DNA, 355 bp, Homo sapiens
gctcttatgtaagtgagaaatgttctgaaaaaagaaaaaagagaaatattttaaaatgaaaaatttgagcttttccgtaaaaaaatttttaatgaattcccagcactttgggaggcctaggttggaggattgcttgaggctagttcaagaccagcctggaaaacatagcaagacctcatctctaattaaagtaaacaattaaaaaaaacttagcctggtatgatggtatatgcctgtaatctcagctactcaggaggctgaggtgggaggattgtggaagcccaggagtttgaggctgccgtgagctatgatcaggtctctgcactccagcctgggcaacaaagcaagaccccat

SEQ ID NO: 57787 - DNA, 271 bp, Homo sapiens
ctcacagggagtcccacggccgtccgattcctagaggcagaaagtcgaatggtgggggtgccaggggttggggaggggctggggagttggtttactggggacagagtttcagtttagggaatgggaagttctggagatggatgatggtgatggacaccaagcagctcttcatgccgtggaactaactgtgcacttaggaatggggaaaatggtacatttcctgttacatgtattttagcacaatacaaaattattaaaaaataaaaagatg

SEQ ID NO: 57788 - DNA, 537 bp, Homo sapiens
tgctgggattacaggcgtgagccactgcgcatggcctagaatctgtattttagatactcagtaaacaaaagatagcaaaattcaacaattcgttgtgtaatgacagatcttacacgaaattacagaattctttacaaccctaggacaagtttaattaaagggaagaaactaaaaagtaagaaacagctacagctgtttagcccggaaatatgcatttgtttttctagccgataaatagatcagaacttaagaaattcactgcctctcagtttacctcaaattttacaactaagggccacaggtattatttgttagtctgacaagtaaaaaatgatgttttcttttctcaaaaatgtgaaaaatttaccaccaccgtgcccggcctgtctctttcttttctctgtctctctctctccctcttccccctgctcctagtctctctctctgtctccctccctctcaatctctctctgcctatatccctctatgtctctgcctccctctctgcctctgtattcatctctgcctctgtctctc

SEQ ID NO: 57789 - DNA, 472 bp, Homo sapiens
ctctgatgtttcaaatattttggttagatttgttttatgggaatctaattacacattaggtatttggagtgtaatgtatacattttttgcataagtgaatgaagagatggcaggagggctaaagttgagaatccaggaaatggaaaaacaccagaagcctgcatgactggacaacatgagtatttttgttaactatgcttctgtatgtagatatctgaactaatgaactgagaatacatccttcaagcagaagtgaatgatacattttaatgaaattgatagtttttaagttagaggacaaaatgaagaacaggagaactattgtagtattatagtataaatggttcttgggtgatttcttcagggtacaccatagcgttctaccatgggctttgacatatatccttctggggtcctatttggtcctttcgtctgacatcacattttttggcttcagttaagaggatcacat

SEQ ID NO: 57790 - DNA, 123 bp, Homo sapiens
ttgcacggtagcttgcaaatcactgaggaaatccagaaaatgttagaaaccatagaaccagagggttcctcagcagtgggcggaaggctgaggctttgaggtatggatcatggaaatgagttg

SEQ ID NO: 57791 - DNA, 754 bp, Homo sapiens
tatataggcctctcaaagtgttgggattacaggcgttagccactcatccgcccacgtcggcctctcaaagtgttgggattacaggcgtgagccaccgcgcccggcctagtgaggtaaatgatgttattgtcagcactatagagtggcagggtggagtcttaccctgttgtgaaacacctccctccctctctaggtgttctccccaactgcctgctagggagggtactcccctcaggtagaattaagagggctgagggtcaggggccatgggccaaggaggtcagtcagatctccttggatctggaggccctggctttcagccagaggcagggggagaaagatgatgtctcatgatgccagcgcttcctcttcactggcgtctgacccaggagcagtccagaatcagcttctctgacctcactccaactcacgtgtctttgacactttaagggacttcctgttttagggtcttctggctgggtgtcattgaatgggcagtgattctctaactttagactgatgttccccagcctttgtttggggactcggaggcagagtagacagttacccttacccctgggttggggagggtcatattcctggtatccccaggaggtcaacaggggcttcatttttctgagggactagagggtcttgtggagctcctgggacagagatctagatccagagagaacattcgtccttccgatctcagctcagctctgagagccctcccagagagcagctcccgagg

SEQ ID NO: 57792 - DNA, 1105 bp, Homo sapiens
  misc_feature (686)..(686): n is a, c, g, or t
ggtctaccagtatgcaggttgggatactgaaaatttccagatgagctcttctttcctacaagttttcataattagggaatgccagggtttagggtaggggttaatctgttggggggtgatgtgtttagcaagaagctactcctagcttttgctaaaatatggttggcactgcctcttgtggcacaggccataattgttccatagacccctctctagccctgtgactgtagttagttactttgataattttctttggccattgtttgtttatatttcacaaactccacctactgccccccccccctcttttttttaagaatggcctgatcatggctatctcagccacattgttggcaatttaatttatttacttcctttttttttttaagaaaggaaaaaagaaaaaaaaatcaaacttgaaacttttcttttgatgttcctattgtgggggttctggatagggtgggacagggatgggggtgtgttttatattttttccttttcagcacaacctttggctttaatataggaagagccaagggagtcctcggctgaacttacgatatctgccccaaacctctgtaaccccaactgaaatgaggagcttcctctcttcctgtgaaggatatgacagtccagcatcgatgcctgtgccctctggaaaaatttcctcctagcccttccanggccttatcataaaactctggatttagagtattcatttgaaggcaactcccccttccccaagtttccttggagctgtataagctgggttctaagcttcaccatgcaatcagaaatttatctctaagtacaggcgtgtgccgtgtctcaccaagacccgctggggactctcaggtcccatttcaggtacctggggtataccttgaaccctaaaagtgatggacgaagtaaaaacgggccagcacacaggcgggactactaaaacgaggggaaggggcggaaacaaaaggctccccccaagatatgggtccccaaatatcaggacaactccacagctggaatggaagcgccgcatggggaaactaggagaagcctcggaatggtaaaaacagcaacgggagtacacccccacgaaaaagta

SEQ ID NO: 57793 - DNA, 625 bp, Homo sapiens
ccgaaaaatgagctatgggactttctgtcccttgccctgcccccacctgaagagagccatgtgtttctaggtcttccacgtgctgccctctcccctggatggagcccagagctatgtgtcctcctgtaggtgccatgaggggcagccgcagagacccggcctccagcagcctctcacctgaccacctggcacagctgcaaccaggggcgggtttcctcttttgctccgcccctgccctgagtgggtcctttccacccagacctcaccacagggtcacttggcaactgctggctcctggctttgccaccagttcaggcccacgcacaggcacctgctctgtgtggacccaggagaggggtagcttgggtgggcatcgcttgggaagattcaggaaagtctgtgggtgaagtagccagcgcgcacacacacacacacacacacacactcactcaggcctcctgcaatggctccatgctggaccagcaacagctccacgccggctggacttcctcttacttgttttgtccccatgtgcacaggttcaggaggaaatgggctcagccttcccggttcttccaggaggctccactggctggggggctttgcagatgtttgggaggaccac

SEQ ID NO: 57794 - DNA, 500 bp, Homo sapiens
attttccatcagcatctcacactatgaaaagtagaacttatatttttgctaaaaactcatgttcgtttactcaaaccagatgatgaggataggcctgggcttgttgctgtcacccatttcacttcccgcttttctgaccttcgcaccatccctgccgtcaggtcctttagaccaggagctcattgcttcatctttgcttggctcactacagtgtcactaaacttccttgcctctgccctggcgttatttacttcttttctcacacagtcacagggaggtttctataatctacatataatcttgtcattgttttgcttgcaatcctttcatgattttcagaataaatgacaggtgccccattgtggtgtttaagtttgtgttcatacaacccttgttgaaccctgcaggtgcacctcccggctttggtttcactctttacccacagctgaccacctcactggtgttctactgaccggtcttctccatcccttccctaactt

SEQ ID NO: 57795 - DNA, 441 bp, Homo sapiens
aaagaagacaagtctattcttgtcctacatttttgtataatccctcaccactcaaaatgaatagcccccaattatttagctcctcaaagtatcttagactcaaacttatttttaacacattttgctaaaggttcatgataattgtacagcaaattacttaaaattgtatattagacatccctgggcttaaaagagctcgactcattcttgtcaccagtgttaatctcccaccaatatccggggctgttctctctctgaatctttatccccctttgtgtagctcactcatcttcaacatcctggtaaatgtcttgggcaaagcatttttattacctatgagcattatccccgcagcctcatctttatgacctagtgctggtgttcctgtcacagacaccaagttctccctgagaggaattgtatgattggctcttaaggaaa

SEQ ID NO: 57796 - DNA, 272 bp, Homo sapiens
aatcctcctccaacccggttccatgacacctaatggccattccttgattttaaggccttgtctcccagagtgtgcaatagcaacatcagccatttctatcttcatattaacaacaaagctcagtctctcaatcactcactatatgccagctactcttccatgaattttacagctataagagccagcaccgtgtctgctgacttggccaacctactgaggagaattgccaccattgtgcctcgaagagaggccagcccttagcctggacaaag

SEQ ID NO: 57797 - DNA, 280 bp, Homo sapiens
  misc_feature (40)..(40): n is a, c, g, or t
  misc_feature (95)..(95): n is a, c, g, or t
  misc_feature (103)..(103): n is a, c, g, or t
ctcgtaatgccagcattttgggaggcttgaggcgggaggntcccttgagccgaggagttcgagatcagcctatgcaacacagtgagacccctatntctatttnatttaaaaaaaaaaaaaaaagggggtcacgtttactgccaccatcccaggcagaaagatgaagcctagagcctctcactgcttcctagtgggtcttgggttgtaatttgctgtcttgggtatattttttggcagaaagcatctggcatcaggcaccggttctcaaagtcgggccccc

SEQ ID NO: 57798 - DNA, 843 bp, Homo sapiens
tcggtacccgccactctgtgggccaggctcggtggctcatccctacaatcccagtactttggacagctaaggtgggaggactgcttgagcccaggagtttgagacctgccttggcctcccaaagtgttgggactacaggcgtgagccacagcacctggccttatgccaacaaaactcttatgagtaaaaccattattaaggtctgtagtatcagagacctcaaaatgtgaatatacagcatatgatttactacatcatttaataaatgtctgtttatttcagtaatgggagaatatcacttttactttgataatataagggtagatcaaaagtttcagatatgtatgagaaaagccagattatatttttaaatgctatatgtactctacatctctttcataatggaataggagaaagatgtcctgaaaaaactggcaacagtggatagcctcagagttctaaattaatcaaaatatctcaggtttctttcattcacataatctttcttctgtgcttatgatctcagtggggtttcttggattctgagataatgtgcccctttgctatctagaatgtgtatgccatagaaatactggatagaggtaggatcagcagctaatctatgagaaattttgtatgattagacacaaaaaattgaatgcttatcctaccgtccagtaaaaaatatttttcggtgtccccaaaaatagcaatttattaatggaaaaatataattttatcactaccactttttaatgctacaagtttctccaggagcaaaggataagaagaaaaagagaaattttaataagttattattattattatttttgagacagtctc

SEQ ID NO: 57799 - DNA, 664 bp, Homo sapiens
ggatgcttagtcaaagactgtaaattgtcttcaagctgagagagaccatgaagagagaggagtggccacctaactaaccttcccagtttttgggagccaaacctagaccagaatgtaggtctaagtgactcccaatccagagctgtctccattaggccaggctctcaccccagctccaaaccaacttctaaaaacttgtccaagagtcctcctcttctttagaattggtaatcttggcaattaaattcagcgtagaaacactctcctgaacataatcagcatgctggttcttccttttctgttgccttgctcttcctaacagctcctcctttcgtctttgcaggctgcttctctgtcacaggaactcagggctcagtgctgtacttcatctccaaagtgtccctaaagcgcccatctgatcccatggctaactactccccaaattttctcctggactgaccttactgaatttagatttgtacatccaatacctgcttaacatatccactttgatgctcagtgggcacctcacacttgatctgtcaaacactgaatttctgtctctgttatgcacatacccaaactttccccaccatgtatttccccatctcaataaactgcaatagctcaagccaaaagcctaagattcagacctgaattcttt

SEQ ID NO: 57800 - DNA, 263 bp, Homo sapiens
caaaaactggaaaaagtttgattctcctaaaccttaaaaaaaagccaaaaactagttttactttgtaatactgtttgacctaaaaatgaactgggtgaaaatacaaacatcagcctgagaccccagtaaccttatgcaggaaatcctcaaattagcctcttcagtcttttacaactgagagcagaataaagaggacagagggaaaaagaagaacaaacacaaagataagaggcaggctcaactattggctgctttataagctc

SEQ ID NO: 57801 - DNA, 328 bp, Homo sapiens
  misc_feature (272)..(272): n is a, c, g, or t
  misc_feature (302)..(302): n is a, c, g, or t
  misc_feature (318)..(318): n is a, c, g, or t
tggaaatgtggtcctggccccggtactgtgtcattcttctgaatgggatcacctgcacccatccctcctaggagaaaatttcaaacagagttagctccttaaaccttctaattaaaatgagaaatccccaggcttccatgactcagcctcagaaaaagattattaggaatttaatagggaaaatatagcagctcagaccatctgtgacccagtgctctgtgagaatttaaagaaaactggagggaggcagcccacactccaatgacacacgnactatggctgcggtcccaacttagcccttngctgcgctgttggaanccgacctttt

SEQ ID NO: 57802 - DNA, 5778 bp, Homo sapiens
cccgctctgcttcagcgcacgctgaagacggcactaggacccagggaagtccccgagcggggttcgcggaaaggcagccagactcctccttatctccagtgtcaaacttgacatcagcctgcgagcggagcatggtaacttctccagcaatcagagcgctccccctcacatcagtggcatgcttcatggagatatgctcctctcactgccctctgcaccagcaacatggattgtcagctctccatcctcctccttctcagctgctctgttctcgacagcttcggggaactgattccgcagccttccaatgaagtcaatctactggattcaaaaacaattcaaggggagctgggctggatctcttatccatcacatgggtgggaagagatcagtggtgtggatgaacattacacacccatcaggacttaccaggtgtgcaatgtcatggaccacagtcaaaacaattggctgagaacaaactgggtccccaggaactcagctcagaagatttatgtggagctcaagttcactctacgagactgcaatagcattccattggttttaggaacttgcaaggagacattcaacctgtactacatggagtctgatgatgatcatggggtgaaatttcgagagcatcagtttacaaagattgacaccattgcagctgatgaaagtttcactcaaatggatcttggggaccgtattctgaagctcaacactgagattagagaagtaggtcctgtcaacaagaagggattttatttggcatttcaagatgttggtgcttgtgttgccttggtgtctgtgagagtatacttcaaaaagtgcccatttacagtgaagaatctggctatgtttccagacacggtacccatggactcccagtccctggtggaggttagagggtcttgtgtcaacaattctaaggaggaagatcctccaaggatgtactgcagtacagaaggcgaatggcttgtacccattggcaagtgttcctgcaatgctggctatgaagaaagaggttttatgtgccaagcttgtcgaccaggtttctacaaggcattggatggtaatatgaagtgtgctaagtgcccgcctcacagttctactcaggaagatggttcaatgaactgcaggtgtgagaataattacttccgggcagacaaagaccctccatccatggcttgtacccgacctccatcttcaccaagaaatgttatctctaatataaacgagacctcagttatcctggactggagttggcccctggacacaggaggccggaaagatgttaccttcaacatcatatgtaaaaaatgtgggtggaatataaaacagtgtgagccatgcagcccaaatgtccgcttcctccctcgacagtttggactcaccaacaccacggtgacagtgacagaccttctggcacatactaactacacctttgagattgatgccgttaatggggtgtcagagctgagctccccaccaagacagtttgctgcggtcagcatcacaactaatcaggctgctccatcacctgtcctgacgattaagaaagatcggacctccagaaatagcatctctttgtcctggcaagaacctgaacatcctaatgggatcatattggactacgaggtcaaatactatgaaaagcaggaacaagaaacaagttataccattctgagggcaagaggcacaaatgttaccatcagtagcctcaagcctgacactatatacgtattccaaatccgagcccgaacagccgctggatatgggacgaacagccgcaagtttgagtttgaaactagtccagactctttctccatctctggtgaaagtagccaagtggtcatgatcgccatttcagcggcagtagcaattattctcctcactgttgtcatctatgttttgattgggaggttctgtggctataagtcaaaacatggggcagatgaaaaaagacttcattttggcaatgggcatttaaaacttccaggtctcaggacttatgttgacccacatacatatgaagaccctacccaagctgttcatgagtttgccaaggaattggatgccaccaacatatccattgataaagttgttggagcaggtgaatttggagaggtgtgcagtggtcgcttaaaacttccttcaaaaaaagagatttcagtggccattaagaccctgaaagttggctacacagaaaagcagaggagagacttcctgggagaagcaagcattatgggacagtttgaccaccccaatatcattcgactggaaggagttgttaccaaaagtaagccagttatgattgtcacagaatacatggagaatggttccttggatagtttcctacgtaaacacgatgcccagtttactgtcattcagctagtggggatgcttcgagggatagcatctggcatgaagtacctgtcagacatgggctatgttcaccgagacctcgctgctcggaacatcttgatcaacagtaacttggtgtgtaaggtttctgatttcggactttcgcgtgtcctggaggatgacccagaagctgcttatacaacaagaggagggaagatcccaatcaggtggacatcaccagaagctatagcctaccgcaagttcacgtcagccagcgatgtatggagttatgggattgttctctgggaggtgatgtcttatggagagagaccatactgggagatgtccaatcaggatgtaattaaagctgtagatgagggctatcgactgccaccccccatggactgcccagctgccttgtatcagctgatgctggactgctggcagaaagacaggaacaacagacccaagtttgagcagattgttagtattctggacaagcttatccggaatcccggcagcctgaagatcatcaccagtgcagccgcaaggccatcaaaccttcttctggaccaaagcaatgtggatatcactaccttccgcacaacaggtgactggcttaatggtgtctggacagcacactgcaaggaaatcttcacgggtgtggagtacagttcttgtgacacaatagccaagatttccacagatgacatgaaaaaggttggtgtcaccgtggttgggccacagaagaagatcatcagtagcattaaagctctagaaacgcaatcaaagaatggcccagttcccgtgtaaagcacgggacggaagtgcttctggacggaagtggtggctgtggaaggcgtagcatcatcctgcagacagacaataattctggagatactggtggaagttccaagtccaataagacactcaaatatgagtacaaatgccttaaaatggaattgaaaaactctttattttcccctatcatttattggatgggtgggtggggtatttttttgtaattgcttttttaaatattagttaatggattaaatttaattcttcagcgtaaaatggtgaagaactagcatatagccattgatcataaactgactatcataaaatcaaaacaagtgaaataacaaaatggacatggtggctttgtttaggtagagccacaaaagaaaagacttgtaatatttttatatacagaggaaatctgtaacaggtattttgtttcttttaaagcaagcaacacagaggaatttatacctcaaactatctggccatatttactaccttatcactgcattattctcttttatctgtttaaagcatatagagatgaagtttgtagttgttttaagtactacacatttttaaattgttagcttccttaagtatatcatgtaaagaaatgtcttaatttttgaaaaaagtacatatttattttcttttgaattgtttttattgttttctatttatgccttgatgatttaatatggatttgttacagccaagtgccaaatgctctctcaaattgtcagcaatttaactagacacagataataatgggtttctttcagattttttgaaccatccacttacatatatttttaaaaaatgaaatccttttcctgttcatacactaaccaaatctctcaaatctgttatcccaatcattgttgcctctccgtttattataaactgtatgctcacaacttagtgtaatataccagcttgtatgcaatggattttcaaccagataacatacctttcctgctctggtgcttagagactatcaactccctcctttagtgaaggagccgtgttagagcttccgagaatagctccactggagagaagtggaatcctatatagaatgctgcactaattgacaacacagcctataggccaatgcatgagtaaaaaaaaaaacaattactggctcactggctttgaaaagtcacttactattgttgctgaaacttgctgagctgtttatagagaatgatgataacagaacttttcctctgtatcactggtgtttaggtgaattaattaaacattgtgatcattagtaccaggtattattatctttaagagtcttccacttcaatgcacatggtgcagttttggtgtgtaacttagaaggattgaacttctttgaatttactggacataacattttcagaatagttggtcatctagcaaccgcctcaaaatgtgtaagcaggagagaaatttctcatcacagggatttagacttactattacataaaggctaactatgagcttgctcattaattttgaaaagatgtacctggtggatatctagctagtaatatattctgaagcaacattttagctctattgatactctttctaatgctgatatgatcttgagtataagaaatgcatatgtcactagaatggataaaataatgctgcaaacttaatgttcttatgcaaaatggaacgctaatgaaacacagcttacaatcgcaaatcaaaactcacaagtgctcatctgttgtagatttagtgtaataagacttagattgtgctccttcggatatgattgtttctcaaatcttggcaatattccttagtcaaatcaggctactagaattctgtattggatatataagagcatgaaatttttaaaaatacacttgtgattataaaattaatcacaaatttcacttatacctgctatcagcagctagaaaacattttttttttaaatcaagtattttgtgtttggaatgttagaatgagatctgaatgtggtttcaatctaattttttcccagactactattttcttttttaggtactattctgagcatactcaacaaaacccatgcatttcataaactaatagaagttgaggattgttgaatctatttcacttattttggctgtggtttccatctgaaagtagaggttgtatacaccatatactgttcttcattttattaatatttttctccttgacctctcataaatttactttacacaattcttaccctgtacatatgtaaacataagtgtacgattcttaaccatggagtagaggtactagaatgcttacggccatctctttgtacaggaactgcattgactttcagtaaacataaagccacaactcctacatgatgttatgtaccatatgatctgttttgtatcttaaatttgatttacatatattatttatttctggtaactcactcagtttatgctgtgctaaatatcaatcaagccatgtataaatgtgatatgattggcaatatgttttatgttgtacaatgtagatggcctcttactaatgtaaaatgatttgtagtggaaacatttatatttttataataaacataatgaaaatattttttacagattggaatacaga

SEQ ID NO: 57803 - DNA, 2683 bp, Homo sapiens
cccgctctgcttcagcgcacgctgaagacggcactaggacccagggaagtccccgagcggggttcgcggaaaggcagccagactcctccttatctccagtgtcaaacttgacatcagcctgcgagcggagcatggtaacttctccagcaatcagagcgctccccctcacatcagtggcatgcttcatggagatatgctcctctcactgccctctgcaccagcaacatggattgtcagctctccatcctcctccttctcagctgctctgttctcgacagcttcggggaactgattccgcagccttccaatgaagtcaatctactggattcaaaaacaattcaaggggagctgggctggatctcttatccatcacatgggtgggaagagatcagtggtgtggatgaacattacacacccatcaggacttaccaggtgtgcaatgtcatggaccacagtcaaaacaattggctgagaacaaactgggtccccaggaactcagctcagaagatttatgtggagctcaagttcactctacgagactgcaatagcattccattggttttaggaacttgcaaggagacattcaacctgtactacatggagtctgatgatgatcatggggtgaaatttcgagagcatcagtttacaaagattgacaccattgcagctgatgaaagtttcactcaaatggatcttggggaccgtattctgaagctcaacactgagattagagaagtaggtcctgtcaacaagaagggattttatttggcatttcaagatgttggtgcttgtgttgccttggtgtctgtgagagtatacttcaaaaagtgcccatttacagtgaagaatctggctatgtttccagacacggtacccatggactcccagtccctggtggaggttagagggtcttgtgtcaacaattctaaggaggaagatcctccaaggatgtactgcagtacagaaggcgaatggcttgtacccattggcaagtgttcctgcaatgctggctatgaagaaagaggttttatgtgccaagcttgtcgaccaggtttctacaaggcattggatggtaatatgaagtgtgctaagtgcccgcctcacagttctactcaggaagatggttcaatgaactgcaggtgtgagaataattacttccgggcagacaaagaccctccatccatggcttgtacccgacctccatcttcaccaagaaatgttatctctaatataaacgagacctcagttatcctggactggagttggcccctggacacaggaggccggaaagatgttaccttcaacatcatatgtaaaaaatgtgggtggaatataaaacagtgtgagccatgcagcccaaatgtccgcttcctccctcgacagtttggactcaccaacaccacggtgacagtgacagaccttctggcacatactaactacacctttgagattgatgccgttaatggggtgtcagagctgagctccccaccaagacagtttgctgcggtcagcatcacaactaatcaggctgctccatcacctgtcctgacgattaagaaagatcggacctccagaaatagcatctctttgtcctggcaagaacctgaacatcctaatgggatcatattggactacgaggtcaaatactatgaaaagcaggaacaagaaacaagttataccattctgagggcaagaggcacaaatgttaccatcagtagcctcaagcctgacactatatacgtattccaaatccgagcccgaacagccgctggatatgggacgaacagccgcaagtttgagtttgaaactagtccagactgtatgtattatttcaatgcagtctagaggagggggcagggatcttgcaaaagatgtctgatcgtttattctcactgtttctaagttttaaacaaatgtgatacatttaaggtatattgcttgggacattgcaatttgcagagccctgtgtctgtatacagtatttgtgtttgtgtgggtgtacattttgtgtttctttttttcttgtatgcaaatcaaacatattctaatgcctgaaatgcttctgttttttttttttagccataaattgcttttgaggaacattatttaatatagtaacacacttccagtgtctgtcatttcagatattccaggttcattgcgtgattcaatgaaccacaaaaaagaaacttgctgatccatgagaatcttaattttgttttaatccttaacacattcaatagcatatcacagagagaataaggattttctaaaatgtgttttatcacttcattcacattcagaagtaatttgaatagcctgttcctttaaccccaaatttggctaaaattggcctaaaactggcaaacatttttccagtaacttttctttttttcaaatgaattttcttcatacttaaaaaagccctttgctaaaatataattttcaaaaaggtaaaattatgtctatggcactaatataaaatgagtagaagttaatgattttacttaactcatttttttctttctttcttttttttttttttttttgagacggagtcttgctctgtcacccaggctggagtacagcagagcgatctcggctcactgcaagctcctgcaagctccgcctcctggcttcacgccattctccccctcagcctcccgagtagctgggactacag

SEQ ID NO: 57804 - DNA, 5815 bp, Homo sapiens
cccgctctgcttcagcgcacgctgaagacggcactaggacccagggaagtccccgagcggggttcgcggaaaggcagccagactcctccttatctccagtgtcaaacttgacatcagcctgcgagcggagcatggtaacttctccagcaatcagagcgctccccctcacatcagtggcatgcttcatggagatatgctcctctcactgccctctgcaccagcaacatggattgtcagctctccatcctcctccttctcagctgctctgttctcgacagcttcggggaactgattccgcagccttccaatgaagtcaatctactggattcaaaaacaattcaaggggagctgggctggatctcttatccatcacatgggtgggaagagatcagtggtgtggatgaacattacacacccatcaggacttaccaggtgtgcaatgtcatggaccacagtcaaaacaattggctgagaacaaactgggtccccaggaactcagctcagaagatttatgtggagctcaagttcactctacgagactgcaatagcattccattggttttaggaacttgcaaggagacattcaacctgtactacatggagtctgatgatgatcatggggtgaaatttcgagagcatcagtttacaaagattgacaccattgcagctgatgaaagtttcactcaaatggatcttggggaccgtattctgaagctcaacactgagattagagaagtaggtcctgtcaacaagaagggattttatttggcatttcaagatgttggtgcttgtgttgccttggtgtctgtgagagtatacttcaaaaagtgcccatttacagtgaagaatctggctatgtttccagacacggtacccatggactcccagtccctggtggaggttagagggtcttgtgtcaacaattctaaggaggaagatcctccaaggatgtactgcagtacagaaggcgaatggcttgtacccattggcaagtgttcctgcaatgctggctatgaagaaagaggttttatgtgccaagcttgtcgaccaggtttctacaaggcattggatggtaatatgaagtgtgctaagtgcccgcctcacagttctactcaggaagatggttcaatgaactgcaggtgtgagaataattacttccgggcagacaaagaccctccatccatggcttgtacccgacctccatcttcaccaagaaatgttatctctaatataaacgagacctcagttatcctggactggagttggcccctggacacaggaggccggaaagatgttaccttcaacatcatatgtaaaaaatgtgggtggaatataaaacagtgtgagccatgcagcccaaatgtccgcttcctccctcgacagtttggactcaccaacaccacggtgacagtgacagaccttctggcacatactaactacacctttgagattgatgccgttaatggggtgtcagagctgagctccccaccaagacagtttgctgcggtcagcatcacaactaatcaggctgctccatcacctgtcctgacgattaagaaagatcggacctccagaaatagcatctctttgtcctggcaagaacctgaacatcctaatgggatcatattggactacgaggtcaaatactatgaaaagcaggaacaagaaacaagttataccattctgagggcaagaggcacaaatgttaccatcagtagcctcaagcctgacactatatacgtattccaaatccgagcccgaacagccgctggatatgggacgaacagccgcaagtttgagtttgaaactagtccagactctttctccatctctggtgaaagtagccaagtggtcatgatcgccatttcagcggcagtagcaattattctcctcactgttgtcatctatgttttgattgggaggttctgtggctataagtcaaaacatggggcagatgaaaaaagacttcattttggcaatgggcatttaaaacttccaggtctcaggacttatgttgacccacatacatatgaagaccctacccaagctgttcatgagtttgccaaggaattggatgccaccaacatatccattgataaagttgttggagcaggtgaatttggagaggtgtgcagtggtcgcttaaaacttccttcaaaaaaagagatttcagtggccattaagaccctgaaagttggctacacagaaaagcagaggagagacttcctgggagaagcaagcattatgggacagtttgaccaccccaatatcattcgactggaaggagttgttaccaaaagtaagccagttatgattgtcacagaatacatggagaatggttccttggatagtttcctacgtaaacacgatgcccagtttactgtcattcagctagtggggatgcttcgagggatagcatctggcatgaagtacctgtcagacatgggctatgttcaccgagacctcgctgctcggaacatcttgatcaacagtaacttggtgtgtaaggtttctgatttcggactttcgcgtgtcctggaggatgacccagaagctgcttatacaacaagaggagggaagatcccaatcaggtggacatcaccagaagctatagcctaccgcaagttcacgtcagccagcgatgtatggagttatgggattgttctctgggaggtgatgtcttatggagagagaccatactgggagatgtccaatcaggatgtaattaaagctgtagatgagggctatcgactgccaccccccatggactgcccagctgccttgtatcagctgatgctggactgctggcagaaagacaggaacaacagacccaagtttgagcagattgttagtattctggacaagcttatccggaatcccggcagcctgaagatcatcaccagtgcagccgcaaggccatcaaaccttcttctggaccaaagcaatgtggatatcactaccttccgcacaacaggtgactggcttaatggtgtctggacagcacactgcaaggaaatcttcacgggtgtggagtacagttcttgtgacacaatagccaagatttccacagatgacatgaaaaaggttggtgtcaccgtggttgggccacagaagaagatcatcagtagcattaaagctctagaaacgcaatcaaagaatggcccagttcccgtgtaaagcacgggacggaagtgcttctggacggaagtggtggctgtggaaggcgtagcatcatcctgcagacagacaataattctggagatactggtggaagttccaagtccaataagacactcaaatatgagtacaaatgccttaaaatggaattgaaaaactctttattttcccctatcatttattggatgggtgggtggggtatttttttgtaattgcttttttaaatattagttaatggattaaatttaattcttcagcgtaaaatggtgaagaactagcatatagccattgatcataaactgactatcataaaatcaaaacaagtgaaataacaaaatggacatggtggctttgtttaggtagagccacaaaagaaaagacttgtaatatttttatatacagaggaaatctgtaacaggtattttgtttcttttaaagcaagcaacacagaggaatttatacctcaaactatctggccatatttactaccttatcactgcattattctcttttatctgtttaaagcatatagagatgaagtttgtagttgttttaagtactacacatttttaaattgttagcttccttaagtatatcatgtaaagaaatgtcttaatttttgaaaaaagtacatatttattttcttttgaattgtttttattgttttctatttatgccttgatgatttaatatggatttgttacagccaagtgccaaatgctctctcaaattgtcagcaatttaactagacacagataataatgggtttctttcagattttttgaaccatccacttacatatatttttaaaaaatgaaatccttttcctgttcatacactaaccaaatctctcaaatctgttatcccaatcattgttgcctctccgtttattataaactgtatgctcacaacttagtgtaatataccagcttgtatgcaatggattttcaaccagataacatacctttcctgctctggtgcttagagactatcaactccctcctttagtgaaggagccgtgttagagcttccgagaatagctccactggagagaagtggaatcctatatagaatgctgcactaattgacaacacagcctataggccaatgcatgagtaaaaaaaaaaacaattactggctcactggctttgaaaagtcacttactattgttgctgaaacttgctgagctgtttatagagaatgatgataacagaacttttcctctgtatcactggtgtttaggtgaattaattaaacattgtgatcattagtaccaggtattattatctttaagagtcttccacttcaatgcacatggtgcagttttggtgtgtaacttagaaggattgaacttctttgaatttactggacataacattttcagaatagttggtcatctagcaaccgcctcaaaatgtgtaagcaggagagaaatttctcatcacagggatttagacttactattacataaaggctaactatgagcttgctcattaattttgaaaagatgtacctggtggatatctagctagtaatatattctgaagcaacattttagctctattgatactctttctaatgctgatatgatcttgagtataagaaatgcatatgtcactagaatggataaaataatgctgcaaacttaatgttcttatgcaaaatggaacgctaatgaaacacagcttacaatcgcaaatcaaaactcacaagtgctcatctgttgtagatttagtgtaataagacttagattgtgctccttcggatatgattgtttctcaaatcttggcaatattccttagtcaaatcaggctactagaattctgtattggatatataagagcatgaaatttttaaaaatacacttgtgattataaaattaatcacaaatttcacttatacctgctatcagcagctagaaaacattttttttttaaatcaagtattttgtgtttggaatgttagaatgagatctgaatgtggtttcaatctaattttttcccagactactattttcttttttaggtactattctgagcatactcaacaaaacccatgcatttcataaactaatagaagttgaggattgttgaatctatttcacttattttggctgtggtttccatctgaaagtagaggttgtatacaccatatactgttcttcattttattaatatttttctccttgacctctcataaatttactttacacaattcttaccctgtacatatgtaaacataagtgtacgattcttaaccatggagtagaggtactagaatgcttacggccatctctttgtacaggaactgcattgactttcagtaaacataaagccacaactcctacatgatgttatgtaccatatgatctgttttgtatcttaaatttgatttacatatattatttatttctggtaactcactcagtttatgctgtgctaaatatcaatcaagccatgtataaatgtgatatgattggcaatatgtgtttactttaaacttgtcttttcaaaatattactcagtttatgttgtacaatgtagatggcctcttactaatgtaaaatgatttgtagtggaaacatttatatttttataataaacataatgaaaatattttttacagattggaatacaga

SEQ ID NO: 57805 - DNA, 3494 bp, Homo sapiens
cccgctctgcttcagcgcacgctgaagacggcactaggacccagggaagtccccgagcggggttcgcggaaaggcagccagactcctccttatctccagtgtcaaacttgacatcagcctgcgagcggagcatggtaacttctccagcaatcagagcgctccccctcacatcagtggcatgcttcatggagatatgctcctctcactgccctctgcaccagcaacatggattgtcagctctccatcctcctccttctcagctgctctgttctcgacagcttcggggaactgattccgcagccttccaatgaagtcaatctactggattcaaaaacaattcaaggggagctgggctggatctcttatccatcacatgggtgggaagagatcagtggtgtggatgaacattacacacccatcaggacttaccaggtgtgcaatgtcatggaccacagtcaaaacaattggctgagaacaaactgggtccccaggaactcagctcagaagatttatgtggagctcaagttcactctacgagactgcaatagcattccattggttttaggaacttgcaaggagacattcaacctgtactacatggagtctgatgatgatcatggggtgaaatttcgagagcatcagtttacaaagattgacaccattgcagctgatgaaagtttcactcaaatggatcttggggaccgtattctgaagctcaacactgagattagagaagtaggtcctgtcaacaagaagggattttatttggcatttcaagatgttggtgcttgtgttgccttggtgtctgtgagagtatacttcaaaaagtgcccatttacagtgaagaatctggctatgtttccagacacggtacccatggactcccagtccctggtggaggttagagggtcttgtgtcaacaattctaaggaggaagatcctccaaggatgtactgcagtacagaaggcgaatggcttgtacccattggcaagtgttcctgcaatgctggctatgaagaaagaggttttatgtgccaagcttgtcgaccaggtttctacaaggcattggatggtaatatgaagtgtgctaagtgcccgcctcacagttctactcaggaagatggttcaatgaactgcaggtgtgagaataattacttccgggcagacaaagaccctccatccatggcttgtacccgacctccatcttcaccaagaaatgttatctctaatataaacgagacctcagttatcctggactggagttggcccctggacacaggaggccggaaagatgttaccttcaacatcatatgtaaaaaatgtgggtggaatataaaacagtgtgagccatgcagcccaaatgtccgcttcctccctcgacagtttggactcaccaacaccacggtgacagtgacagaccttctggcacatactaactacacctttgagattgatgccgttaatggggtgtcagagctgagctccccaccaagacagtttgctgcggtcagcatcacaactaatcaggctgctccatcacctgtcctgacgattaagaaagatcggacctccagaaatagcatctctttgtcctggcaagaacctgaacatcctaatgggatcatattggactacgaggtcaaatactatgaaaagcaggaacaagaaacaagttataccattctgagggcaagaggcacaaatgttaccatcagtagcctcaagcctgacactatatacgtattccaaatccgagcccgaacagccgctggatatgggacgaacagccgcaagtttgagtttgaaactagtccagactctttctccatctctggtgaaagtagccaagtggtcatgatcgccatttcagcggcagtagcaattattctcctcactgttgtcatctatgttttgattgggaggttctgtggctataagtcaaaacatggggcagatgaaaaaagacttcattttggcaatgggcatttaaaacttccaggtctcaggacttatgttgacccacatacatatgaagaccctacccaagctgttcatgagtttgccaaggaattggatgccaccaacatatccattgataaagttgttggagcaggtgaatttggagaggtgtgcagtggtcgcttaaaacttccttcaaaaaaagagatttcagtggccattaagaccctgaaagttggctacacagaaaagcagaggagagacttcctgggagaagcaagcattatgggacagtttgaccaccccaatatcattcgactggaaggagttgttaccaaaagtaagccagttatgattgtcacagaatacatggagaatggttccttggatagtttcctacgtaaacacgatgcccagtttactgtcattcagctagtggggatgcttcgagggatagcatctggcatgaagtacctgtcagacatgggctatgttcaccgagacctcgctgctcggaacatcttgatcaacagtaacttggtgtgtaaggtttctgatttcggactttcgcgtgtcctggaggatgacccagaagctgcttatacaacaagaggagggaagatcccaatcaggtggacatcaccagaagctatagcctaccgcaagttcacgtcagccagcgatgtatggagttatgggattgttctctgggaggtgatgtcttatggagagagaccatactgggagatgtccaatcaggatgtaattaaagctgtagatgagggctatcgactgccaccccccatggactgcccagctgccttgtatcagctgatgctggactgctggcagaaagacaggaacaacagacccaagtttgagcagattgttagtattctggacaagcttatccggaatcccggcagcctgaagatcatcaccagtgcagccgcaaggccatcaaaccttcttctggaccaaagcaatgtggatatcactaccttccgcacaacaggtgactggcttaatggtgtctggacagcacactgcaaggaaatcttcacgggtgtggagtacagttcttgtgacacaatagccaagatttccacagatgacatgaaaaaggttggtgtcaccgtggttgggccacagaagaagatcatcagtagcattaaagctctagaaacgcaatcaaagaatggcccagttcccgtgtaaagcacgggacggaagtgcttctggacggaagtggtggctgtggaaggcgtagcatcatcctgcagacagacaataattctggagatactggtggaagttccaagtccaataagacactcaaatatgagtacaaatgccttaaaatggaattgaaaaactctttattttcccctatcatttattggatgggtgggtggggtatttttttgtaattgctttttttcttttttcttgtctttattccttcttttttgggtttccttggtttccccttttttatcgcttttgtctatgttcgcccttttggtcgcttctgt

SEQ ID NO: 57806 - DNA, 2223 bp, Homo sapiens
cccgctctgcttcagcgcacgctgaagacggcactaggacccagggaagtccccgagcggggttcgcggaaaggcagccagactcctccttatctccagtgtcaaacttgacatcagcctgcgagcggagcatggtaacttctccagcaatcagagcgctccccctcacatcagtggcatgcttcatggagatatgctcctctcactgccctctgcaccagcaacatggattgtcagctctccatcctcctccttctcagctgctctgttctcgacagcttcggggaactgattccgcagccttccaatgaagtcaatctactggattcaaaaacaattcaaggggagctgggctggatctcttatccatcacatgggtgggaagagatcagtggtgtggatgaacattacacacccatcaggacttaccaggtgtgcaatgtcatggaccacagtcaaaacaattggctgagaacaaactgggtccccaggaactcagctcagaagatttatgtggagctcaagttcactctacgagactgcaatagcattccattggttttaggaacttgcaaggagacattcaacctgtactacatggagtctgatgatgatcatggggtgaaatttcgagagcatcagtttacaaagattgacaccattgcagctgatgaaagtttcactcaaatggatcttggggaccgtattctgaagctcaacactgagattagagaagtaggtcctgtcaacaagaagggattttatttggcatttcaagatgttggtgcttgtgttgccttggtgtctgtgagagtatacttcaaaaagtgcccatttacagtgaagaatctggctatgtttccagacacggtacccatggactcccagtccctggtggaggttagagggtcttgtgtcaacaattctaaggaggaagatcctccaaggatgtactgcagtacagaaggcgaatggcttgtacccattggcaagtgttcctgcaatgctggctatgaagaaagaggttttatgtgccaagcttgtcgaccaggtttctacaaggcattggatggtaatatgaagtgtgctaagtgcccgcctcacagttctactcaggaagatggttcaatgaactgcaggtgtgagaataattacttccgggcagacaaagaccctccatccatggcttgtacccgacctccatcttcaccaagaaatgttatctctaatataaacgagacctcagttatcctggactggagttggcccctggacacaggaggccggaaagatgttaccttcaacatcatatgtaaaaaatgtgggtggaatataaaacagtgtgagccatgcagcccaaatgtccgcttcctccctcgacagtttggactcaccaacaccacggtgacagtgacagaccttctggcacatactaactacacctttgagattgatgccgttaatggggtgtcagagctgagctccccaccaagacagtttgctgcggtcagcatcacaactaatcaggctgctccatcacctgtcctgacgattaagaaagatcggacctccagaaatagcatctctttgtcctggcaagaacctgaacatcctaatgggatcatattggactacgaggtcaaatactatgaaaagcaggaacaagaaacaagttataccattctgagggcaagaggcacaaatgttaccatcagtagcctcaagcctgacactatatacgtattccaaatccgagcccgaacagccgctggatatgggacgaacagccgcaagtttgagtttgaaactagtccagactctttctccatctctggtgaaagtagccaagtggtcatgatcgccatttcagcggcagtagcaattattctcctcactgttgtcatctatgttttgattgggaggttctgtggctataagtcaaaacatggggcagatgaaaaaagacttcattttggcaatgggcatttaaaacttccaggtctcaggacttatgttgacccacatacatatgaagaccctacccaagctgttcatgagtttgccaaggaattggatgccaccaacatatccattgataaagttgttggagcagtcctgacttctgaacagctccatgatgcagaagggtttagtctggctggttttaatgtttcctcacaagagtgcacttttctccagcacggagcctgcggtagcaaatgc

SEQ ID NO: 57807 - DNA, 342 bp, Homo sapiens
tgggggggaataaaacaggaatgtatatttaggtcatgttaaataaaatggctggaggaaggagggaagaaattaggaactgcagtacatcatcaccccaggtgtaagagttatttctctcccagtgcagaaaggggagtgtggcccctggctgtacctgagcttcctcttctccatccctgagacatcacagaatcacccgggttctgacctctccacttctagctctcactgacatctggatatcttgatgcactgcctgtttgtaacaacatatacttctttgctgaatgctaataaacttctgggttcaagagggaacccctcagtcactaatgtgca

SEQ ID NO: 57808 - DNA, 288 bp, Homo sapiens
agaagaaaattcttaagcaaagtacttaagtacaaaattgagtgactgaaagatgcttaatctagggaaattaaatgagaaaaatacatggtgtgtgtgttggagggggagctggaattggaatgggctggagtgatgaaaaaaagccaacagatacagtcttctgttttgtaatataggctcaatactaaattatgtaggactagataatctaggtcctaatgtctcctttttgctggcaacctgggggccaattacactagagggttggtagaaaaaagagaatat

SEQ ID NO: 57809 - DNA, 227 bp, Homo sapiens
gataacttatgttactactcccatattatctctaaataactatgtaattagcttgtcactactatacagtgtgaagtttgatattactcatggataaagaacattggtaacttaagtgagtgagcaagggtggggtgagggatggaggcagcagggaaatcatagaattattacaatcaggaatgcaaatggttaattagatcattgcacccagtccttaaggatct

SEQ ID NO: 57810 - DNA, 164 bp, Homo sapiens
ctggatagacctatgtcataactgatttctgcacattgaaggtacctagattgcctttaaaaggtataaagaaagggttaagtttcttttttttttgtcttttttttcccaaaatgaatcaaaagatctcatttatttagctttagaaagtacaagtgtaagta

SEQ ID NO: 57811 - DNA, 6213 bp, Homo sapiens
gtcgggccgggcacggcgggccggggcctttgtgtgaagcggcggcggcgatggtgctcggggcgccgcagagccggattaactgtgctgataaggaggtaatttcataggagctgctaagatgggcatgaggatcaaactgcaaagcaccaaccaccccaacaacctgctgaaggaactcaacaagtgccggctctcagagaccatgtgcgacgtcaccattgtggtggggagccgctccttcccggcccacaaggctgtgctggcctgtgcagctggctacttccagaacctcttcctgaatactgggcttgatgctgccaggacctatgtggtggacttcatcacccctgccaactttgagaaggttctgagctttgtctacacttcagaactcttcacagacctgatcaatgttggggtcatctacgaggtagctgagcgtctgggtatggaggacctcctccaggcctgtcactctacctttcctgatctggagagcactgccagggccaagcccctgaccagcaccagtgagagccactctggtaccctgagttgtccttcggcagaacctgcccatccccttggagaactccgaggtggtggggactaccttggtgctgatagaaactatgtgttgcccagtgatgctggagggagctataaagaggaagagaagaatgttgccagtgacgctaaccatagcctgcatctgccgcaaccgcccccaccaccgccaaagacagaagaccatgacacccctgctcccttcacgtccattcctagcatgatgacccagccactcctaggcactgtcagcacgggcatccagaccagcacgagctcctgccagccatacaaagttcaaagcaatggagacttcagtaaaaacagcttcctcacccctgacaatgcagtagacattaccactgggaccaactcctgtctgagcaatagtgagcactccaaagatcctggctttgggcagatggatgagctccagctcgaggacctgggggatgatgacttgcagtttgaagaccctgctgaggatataggcacaactgaggaggtgattgagctgagtgatgacagtgaggatgagttggcttttggagagaatgacaatcgggagaataaggccatgccctgccaggtgtgcaagaaagttctagagcccaacattcaactgatccggcagcatgctcgggaccatgtggacctgctgacgggcaactgcaaggtctgcgagacccacttccaggaccgaaactcccgggtaactcatgtcctgtcccacattggtattttccttttctcctgcgacatgtgtgaaactaagttctttacccagtggcagctgacccttcaccgacgggatggaatatttgagaacaacatcattgtccaccccaacgatcccctgccagggaagctgggtctcttttcaggggcagcctccccagagctgaaatgcgctgcctgtgggaaagtattggccaaagatttccatgtggtccggggccacatccttgaccatctaaacttgaagggccaggcctgcagtgtctgcgaccagcgtcaccttaacctctgcagcctcatgtggcacacgctgtcccatctcggcatctcagtcttctcctgttctgtctgtgcgaacagctttgtggactggcatcttctagagaagcacatggctgtgcaccaaagtctggaagacgccctcttccactgccgcttgtgcagccagagcttcaagtcagaggctgcctatcgctaccacgtcagccagcacaaatgcaacagtggccttgatgcacggcctggttttgggctgcagcacccagctctccagaagcggaagctgccagcagaggagtttctgggtgaagagctggcgctgcagggccaacctgggaacagcaagtatagctgcaaggtctgtggcaaaagatttgcccacacaagcgaattcaactaccaccggcggatccacacgggggagaagccataccaatgtaaggtgtgccacaagttctttcgaggccgctcgaccatcaagtgccacctaaagacacactcgggggccctcatgtaccgctgcacagtctgtgggcactacagttccacccttaacctcatgagcaaacatgttggtgtgcacaaaggcagcctcccccctgacttcaccatcgagcagaccttcatgtacatcatccattccaaagaggcggataagaacccggacagttgactgggtcccggcagagccacggggagctcccaagcagcagccaggatgctgatatctaagaggtgttggtccctccccagctgaagttataattttgccttggtaggaattctgttctgtgttgtgtttaaagaagaaaagaagaagaaatagcacataagctgttactgttgttgagaagcaacagccctatcacatttacctccatacctgttcttgcccatgcagggctatgtttttcattcttttgaggctggttttgggatctagtcaagcagttggtgtccactagacccccttccccagcctctctagttttagtttactgataggttttatgctgctaagaatccaaccaacagcctcacttaacagaggaggtaaagggaggttttcactgtgggtgttactgcaggcctccaactgggatgaccagcaatgagaaagattttgggaatgtgatcattcagaaaagacaggtcagcagggcagtcccctcaggttccagccctcagcagggacaagacatcagggatgttggtgtctgcttatctacagccctaatctgctgattgaacagtgaaaatcttttggcagctagatccatactaggcacagagctttctatttaggtcagaaagctttgggatgaacccctgccagccagaaggggtgtcctgcagtgccaccagaagtggcagcctggatggacaggagaggtttctcttttctcctcatttccaaagaaacaggattttatggagtgatggcccgggacgtccggccttctgtggggcagagaggatagggaaccactttgatatagtcatctgttttggccacttctgttggccatgagtgtcttggtggagaggtggggatgtatctgacagcagcagccttgccttaatttatatctggtctcccgtccagaagtgtttggcccgtggtgtagatgagctgactccatgaagtggtggagtggcagaccgcgagcccttcaggattaaagggacctgagtaactggtggtgtgtagcagggtgtgcgttctgactgtctgtcctagtcgggtaacctgtttactttgtgctaacagtgccggagctttgtcagctcacctttgacctgctggaatttatcctgatctgtcgttgccatcacctccagggggcgctattggatggcagctggttcaggccctccgtgggtggctgcagagtgtgccggcacagcccacgcagctggttagctccactcttacttggttttctaaggggctttgcccaaagaagtcttgagggatagggccctcgatcttgcatacttgtgaggtgccacctcagtagctcatactacctcaccctgctcaggtgagctctgggagtccctggcctcagccctggcactgcccctggtgggattcagcaacaccccgggctgtttcacaagcaagtggttttcattaactcacaaagcctttttggacattaatatttatttatttttgtttttgtatacacattacccagcatctcttttgtataagagactttaggaaaatgagtttctccccagcaagtagccatattccagagaacagccttgaccagagatgtggagaaccaggggtataactaagggaagacatgtcaagcccttaagcaaattcttcttctccagattgtctctagcataataaacccagggaacactttaggccatgggtgtatgttctataaagttcgggacagttaaattccaggcctttcatcccccttccttcctgtgatggagtagattggggacagggttgaggggaacaagtgacatgaatgacctatttgcacagtttggaagcctcctgtctttatttatattgagatgtcagacaaaccaaagctccatccttgttggacctgctgcttctccccagccctgaactgataaagcctcagagttggagtgcctggctctctggtggggtgaccattagatgaagggacttgtacagtggccagtttaaaggtccacctttgaccatctaaacccaccttgttcagtgtcctctgaggacatcctcatcaggaaagcagtgttgagactcttcattgctgactggcttctccctttcttactcacactgaccattagaatttaagaaggaaatgtgtaacagactacagtcaagtgtctgctacattttcaagcatgagcaatccctcccagactgttggtgaggactgatttttgaaatgctggtgtgagagaggtggtaattacaggaaccagccgagtggctgagagcagataaatgtgctggagaaacctttttccttaacagagggcatcatggatgctgggtggtctgtgtacttaacctgaaactgtgaagttttccctttttgccagtaaaccaaaaagcagatccttgaaacttggcccttgaaacacgaaacagaaaactgcatcccctgatcccccgggggctgatcagattgatcagggtggctcagttggtcccagtcagatacgtcataggatcagtagctcatgagatttgttgaccaaaccctctccctgttggtgacccctgtattcacacctgaacttcccgtttccccccaccccaccaaagtcatgtctgcttcctctgcctccagctcaccctcttctgaatggttttgcttgaaacactatattgtggcagagggcaccctgggatacctggtagaaggtattcattttattttgcatttttaattgttttgactttctgttcatttgattttgttgctccctctctcctggaacctagtttactactctcttctgtgttactctgaagttctgtttaagccttgaacatcctcttctcccattttcttggtatgtactcaggaccagctacatcatttgtggagccctcttattcataaattattaaaaatttcaaggtggtggtcatagagcattaaaccaaatatgaggccattcccaacttgttttccgaggggaaaatggtaatacttgtgtggcacccggggttaaacagcagaggctccatgtggccagaggcagagattagtatcctggcactccagtgacccactgggtgactcactgatgccacagcacccgctaggaagctctgctgaaccttagtatttggtcctaaattttatgactccatggagttcccgtagtccatggctagttaggaagaaaggaggtgggataagggtcaggcccaggtgacccctaagaaccaggagatgggtaaaagtttttttttatattctgcttttctgatctgtgagtacctgtttgtctccaggccaaacctttgggcttaaatatctttttcctagacaggtttttgctagtgttgaattttcttcttcctctggcctccttctgtgcccctttccccaagcccaagactgcttaacttccaaagcaaattctagatagacactgtatttattggtatgggagtgggctctatggggtggtctgcacccatctgggactcttttccctaaatcctgcaccaaatgagtcaggaggcagggtgcacagcattagtttcaatgtggttatgcatcataagcttaacatcagaatgaaaatgaaactcgattttgatgtttctttaaaacccttcccctgtccaatccactcgccgcccccaccttgaatagctaaagtctcttatgaaacagagaagagttgttgacgtctaactccttccattaaattaataagtactgacctcctaatatttaagtgtttactatctattgctgtaaagttttgtatattttgtaaacttttttccccaaatagtagatgtctaaaatcattgtacatctgattcttttatattccattgttcagcacaaagtgtggtttttatttagaataaaaaaagaaatttgaaatgagaaatct

SEQ ID NO: 57812 - DNA, 2409 bp, Homo sapiens
gtcgggccgggcacggcgggccggggcctttgtgtgaagcggcggcggcgatggtgctcggggcgccgcagagccggattaactgtgctgataaggaggtaatttcataggagctgctaagatgggcatgaggatcaaactgcaaagcaccaaccaccccaacaacctgctgaaggaactcaacaagtgccggctctcagagaccatgtgcgacgtcaccattgtggtggggagccgctccttcccggcccacaaggctgtgctggcctgtgcagctggctacttccagaacctcttcctgaatactgggcttgatgctgccaggacctatgtggtggacttcatcacccctgccaactttgagaaggttctgagctttgtctacacttcagaactcttcacagacctgatcaatgttggggtcatctacgaggtagctgagcgtctgggtatggaggacctcctccaggcctgtcactctacctttcctgatctggagagcactgccagggccaagcccctgaccagcaccagtgagagccactctggtaccctgagttgtccttcggcagaacctgcccatccccttggagaactccgaggtggtggggactaccttggtgctgatagaaactatgtgttgcccagtgatgctggagggagctataaagaggaagagaagaatgttgccagtgacgctaaccatagcctgcatctgccgcaaccgcccccaccaccgccaaagacagaagaccatgacacccctgctcccttcacgtccattcctagcatgatgacccagccactcctaggcactgtcagcacgggcatccagaccagcacgagctcctgccagccatacaaagttcaaagcaatggagacttcagtaaaaacagcttcctcacccctgacaatgcagtagacattaccactgggaccaactcctgtctgagcaatagtgagcactccaaagatcctggctttgggcagatggatgagctccagctcgaggacctgggggatgatgacttgcagtttgaagaccctgctgaggatataggcacaactgaggaggtgattgagctgagtgatgacagtgaggatgagttggcttttggagagaatgacaatcgggagaataaggccatgccctgccaggtgtgcaagaaagttctagagcccaacattcaactgatccggcagcatgctcgggaccatgtggacctgctgacgggcaactgcaaggtctgcgagacccacttccaggaccgaaactcccgggtaactcatgtcctgtcccacattggtattttccttttctcctgcgacatgtgtgaaactaagttctttacccagtggcagctgacccttcaccgacgggatggaatatttgagaacaacatcattgtccaccccaacgatcccctgccagggaagctgggtctcttttcaggggcagcctccccagagctgaaatgcgctgcctgtgggaaagtattggccaaagatttccatgtggtccggggccacatccttgaccatctaaacttgaagggccaggcctgcagtgtctgcgaccagcgtcaccttaacctctgcagcctcatgtggcacacgctgtcccatctcggcatctcagtcttctcctgttctgtctgtgcgaacagctttgtggactggcatcttctagagaagcacatggctgtgcaccaaagtctggaagacgccctcttccactgccgcttgtgcagccagagcttcaagtcagaggctgcctatcgctaccacgtcagccagcacaaatgcaacagtggccttgatgcacggcctggttttgggctgcagcacccagctctccagaagcggaagctgccagcagaggagtttctgggtgaagagctggcgctgcagggccaacctgggaacagcaagtatagctgcaaggtctgtggcaaaagatttgcccacacaagcgaattcaactaccaccggcggatccacacgggggagaagccataccaatgtaaggtgtgccacaagttctttcgaggccgctcgaccatcaagtgccacctaaagacacactcgggggccctcatgtaccgctgcacagtctgtgggcactacagttccacccttaacctcatgagcaaacatgttggtgtgcacaaaggcagcctcccccctgacttcaccatcgagcagaccttcatgtacatcatccattccaaagaggcggataagaacccggacagttgactgggtcccggcagagccacggggagctcccaagcagcagccaggatgctgatatctaagaggcctcagaaaagcacctaggagcctttggtcaaaatgcaatacaaatctatcattggtgactgactgcatggagcatgtgctgaccg

SEQ ID NO: 57813 - DNA, 662 bp, Homo sapiens
  misc_feature (11)..(11): n is a, c, g, or t
cccgggctgcnggaattcggcacgaggaaaagaatgtacatttagacatttgggttcagttgcttgtagtctgtaaatttaaaacagcttaatttggtacaggttacacatatggccatttatgtaaagtccctctaagactacatactttttgtttaaaacaaaattggaatttgttttcccttcttggaagggaacattgatatttaacagagtttttagagattgtcatctcatatatataaaatggacacgtggctataaaacaccatataagagatgagtagtgcgttttattttatatgccaatctactttgtttaaaaaaggtctgaatcaggacttgtgaaaacctgtagtgaaataccttaagctgttaactaactgtaaggcgtggaataggagttgctcagtggattggttctatgttgtggactacttaagtctgcatttgttactgtgctaataaacaatattaaaaaccacctaataaaaaaaaaaaaaaaaaaaaaaaaaaaaaaatttgggggggggtgggccctcggaaaaaccttcaaaacaatcgacagggcccgcgggcccaaacgggtaagtgcaacaaggggccacaaccggtcccagagaaaacccgggccaacacaagcgcggggatctccaccaaaa

SEQ ID NO: 57814 - DNA, 474 bp, Homo sapiens
gcggaggagtggtgtgtgtgcgagcgtgtgtggctgggggaagccattgcctgtttaatagttgctgttgctgcacttccgcttctctcccagcgagagagagacacgagtggccaggcccagccgcagccgcagcagcagccgccgcggcggcacggaggagccagacacaaagagagcaaaccgagaaagaaacaaacacccccaagaagaaggagagtaaagtcagcatgagcaaaaactccaaactcctctccaccagcgccaagagaattcagaaggagctggcggacatcactttagaccctccacctaattgcagtgctggtcccaaaggcgataacatctatgaatggagatcaaccattctagggcctccaggatccgtgtatgagggtggtgtattctttctcgatatcacttttacaccagaatatcccttcaagcctccaaaggtaagaaatctccctgtat

SEQ ID NO: 57815 - DNA, 285 bp, Homo sapiens
ggtcattcagttgaatatttagtaacaagtttgtttgctgtttaaatattgtctgtcacttgttttttttaggttacatttcggacaagaatctatcattgtaatattaacagtcaaggtgttatttgcttggacatattgaaagataattggagtccagcactaaccatttctaaagtcctcctttctatctgctcacttcttacagactgtaatcctggtaaggttcataattctttaccttgttttattcttccttacctgaaaaatacttgtttccaaaag

SEQ ID NO: 57816 - DNA, 1671 bp, Homo sapiens
gcggaggagtggtgtgtgtgcgagcgtgtgtggctgggggaagccattgcctgtttaatagttgctgttgctgcacttccgcttctctcccagcgagagagagacacgagtggccaggcccagccgcagccgcagcagcagccgccgcggcggcacggaggagccagacacaaagagaggggctgtttgcggggtggggtggggggttcgctatgtcggatgacgattcgagggccagcaccagctcctcctcatcttcgtcttccaaccagcaaaccgagaaagaaacaaacacccccaagaagaaggagagtaaagtcagcatgagcaaaaactccaaactcctctccaccagcgccaagagaattcagaaggagctggcggacatcactttagaccctccacctaattgcagtgctggtcccaaaggcgataacatctatgaatggagatcaaccattctagggcctccaggatccgtgtatgagggtggtgtattctttctcgatatcacttttacaccagaatatcccttcaagcctccaaaggttacatttcggacaagaatctatcattgtaatattaacagtcaaggtgttatttgcttggacatattgaaagataattggagtccagcactaaccatttctaaagtcctcctttctatctgctcacttcttacagactgtaatcctgccgaccccttggtgggaagtattgccactcagtatatgaccaacagagcagaacatgacagaatggccagacagtggaccaagagatacgctacataaattggggtttcacaattcttacattatttgtctgtcacagaagagagctgcttatgattttgaaggggtcagggagggtgggagttggtaaagagtagggtatttctataacagatattattcagtcttatttcctaagattttgttgtaacttaaggtatcttgctacagtagacagaattggtaatagcaacttttaaaattgtcattagttctgcaatattagctgaaatgtagtacagaaaagaatgtacatttagacatttgggttcagttgcttgtagtctgtaaatttaaaacagcttaatttggtacaggttacacatatggccatttatgtaaagtccctctaagactacatactttttgtttaaaacaaaattggaatttgttttcccttcttggaagggaacattgatatttaacagagtttttagagattgtcatctcatatatataaaatggacacgtggctataaaacaccatataagagatgagtagtgcgttttattttatatgccaatctactttgtttaaaaaaggtctgaatcaggacttgtgaaaacctgtagtgaaataccttaagctgttaactaactgtaaggcgtggaataggagttgctcagtggattggttctatgttgtggactacttaagtctgcatttgttactgtgctaataaacaatattaaaaaccacctaataaaaaaaaaaaaaaaaaaaaaaaaaaaaaaatttgggggggggtgggccctcggaaaaaccttcaaaacaatcgacagggcccgcgggcccaaacgggtaagtgcaacaaggggccacaaccggtcccagagaaaacccgggccaacacaagcgcggggatctccaccaaaa

SEQ ID NO: 57817 - DNA, 1276 bp, Homo sapiens
cgccacggctggcaggtcactcgggcccgaggggcctcgtggggagcggccatgttggcttcgtcactgaggactccgggcgggtcgggtgttgagcgaggcctcggaccttcggcctgtcgggggcgccctgccgggaattcagaaggagctggcggacatcactttagaccctccacctaattgcagtgctggtcccaaaggcgataacatctatgaatggagatcaaccattctagggcctccaggatccgtgtatgagggtggtgtattctttctcgatatcacttttacaccagaatatcccttcaagcctccaaaggttacatttcggacaagaatctatcattgtaatattaacagtcaaggtgttatttgcttggacatattgaaagataattggagtccagcactaaccatttctaaagtcctcctttctatctgctcacttcttacagactgtaatcctgccgaccccttggtgggaagtattgccactcagtatatgaccaacagagcagaacatgacagaatggccagacagtggaccaagagatacgctacataaattggggtttcacaattcttacattatttgtctgtcacagaagagagctgcttatgattttgaaggggtcagggagggtgggagttggtaaagagtagggtatttctataacagatattattcagtcttatttcctaagattttgttgtaacttaaggtatcttgctacagtagacagaattggtaatagcaacttttaaaattgtcattagttctgcaatattagctgaaatgtagtacagaaaagaatgtacatttagacatttgggttcagttgcttgtagtctgtaaatttaaaacagcttaatttggtacaggttacacatatggccatttatgtaaagtccctctaagactacatactttttgtttaaaacaaaattggaatttgttttcccttcttggaagggaacattgatatttaacagagtttttagagattgtcatctcatatatataaaatggacacgtggctataaaacaccatataagagatgagtagtgcgttttattttatatgccaatctactttgtttaaaaaaggtctgaatcaggacttgtgaaaacctgtagtgaaataccttaagctgttaactaactgtaaggcgtggaataggagttgctcagtggattggttctatgttgtggactacttaagtctgcatttgttactgtgctaataaacaatattaaaaaccacctaataaa

SEQ ID NO: 57818 - DNA, 1230 bp, Homo sapiens
gagcggagtctatccccagtgtgagctagagagcggaccatgaaggaagtgggcagaccccgggaagttagaggacgcccggggaaaagcagaattcagaaggagctggcggacatcactttagaccctccacctaattgcagtgctggtcccaaaggcgataacatctatgaatggagatcaaccattctagggcctccaggatccgtgtatgagggtggtgtattctttctcgatatcacttttacaccagaatatcccttcaagcctccaaaggttacatttcggacaagaatctatcattgtaatattaacagtcaaggtgttatttgcttggacatattgaaagataattggagtccagcactaaccatttctaaagtcctcctttctatctgctcacttcttacagactgtaatcctgccgaccccttggtgggaagtattgccactcagtatatgaccaacagagcagaacatgacagaatggccagacagtggaccaagagatacgctacataaattggggtttcacaattcttacattatttgtctgtcacagaagagagctgcttatgattttgaaggggtcagggagggtgggagttggtaaagagtagggtatttctataacagatattattcagtcttatttcctaagattttgttgtaacttaaggtatcttgctacagtagacagaattggtaatagcaacttttaaaattgtcattagttctgcaatattagctgaaatgtagtacagaaaagaatgtacatttagacatttgggttcagttgcttgtagtctgtaaatttaaaacagcttaatttggtacaggttacacatatggccatttatgtaaagtccctctaagactacatactttttgtttaaaacaaaattggaatttgttttcccttcttggaagggaacattgatatttaacagagtttttagagattgtcatctcatatatataaaatggacacgtggctataaaacaccatataagagatgagtagtgcgttttattttatatgccaatctactttgtttaaaaaaggtctgaatcaggacttgtgaaaacctgtagtgaaataccttaagctgttaactaactgtaaggcgtggaataggagttgctcagtggattggttctatgttgtggactacttaagtctgcatttgttactgtgctaataaacaatattaaaaaccacctaataaa

SEQ ID NO: 57819 - DNA, 1448 bp, Homo sapiens
gcggaggagtggtgtgtgtgcgagcgtgtgtggctgggggaagccattgcctgtttaatagttgctgttgctgcacttccgcttctctcccagcgagagagagacacgagtggccaggcccagccgcagccgcagcagcagccgccgcggcggcacggaggagccagacacaaagagaggggctgtttgcggggtggggtggggggttcgctatgtcggatgacgattcgagggccagcaccagctcctcctcatcttcgtcttccaaccagcaaaccgagaaagaaacaaacacccccaagaagaaggagagtaaagtcagcatgagcaaaatcactttagaccctccacctaattgcagtgctggtcccaaaggcgataacatctatgaatggagatcaaccattctagggcctccaggatccgtgtatgagggtggtgtattctttctcgatatcacttttacaccagaatatcccttcaagcctccaaaggttacatttcggacaagaatctatcattgtaatattaacagtcaaggtgttatttgcttggacatattgaaagataattggagtccagcactaaccatttctaaagtcctcctttctatctgctcacttcttacagactgtaatcctgccgaccccttggtgggaagtattgccactcagtatatgaccaacagagcagaacatgacagaatggccagacagtggaccaagagatacgctacataaattggggtttcacaattcttacattatttgtctgtcacagaagagagctgcttatgattttgaaggggtcagggagggtgggagttggtaaagagtagggtatttctataacagatattattcagtcttatttcctaagattttgttgtaacttaaggtatcttgctacagtagacagaattggtaatagcaacttttaaaattgtcattagttctgcaatattagctgaaatgtagtacagaaaagaatgtacatttagacatttgggttcagttgcttgtagtctgtaaatttaaaacagcttaatttggtacaggttacacatatggccatttatgtaaagtccctctaagactacatactttttgtttaaaacaaaattggaatttgttttcccttcttggaagggaacattgatatttaacagagtttttagagattgtcatctcatatatataaaatggacacgtggctataaaacaccatataagagatgagtagtgcgttttattttatatgccaatctactttgtttaaaaaaggtctgaatcaggacttgtgaaaacctgtagtgaaataccttaagctgttaactaactgtaaggcgtggaataggagttgctcagtggattggttctatgttgtggactacttaagtctgcatttgttactgtgctaataaacaatattaaaaaccacctaataaa

SEQ ID NO: 57820 - DNA, 912 bp, Homo sapiens
  misc_feature (15)..(15): n is a, c, g, or t
  misc_feature (19)..(19): n is a, c, g, or t
  misc_feature (23)..(23): n is a, c, g, or t
gcaggctggtacccncggngtanggggatagataattggagtccagcactaaccatttctaaagtcctcctttctatctgctcacttcttacagactgtaatcctgccgaccccttggtgggaagtattgccactcagtatatgaccaacagagcagaacatgacagaatggccagacagtggaccaagagatacgctacataaattggggtttcacaattcttacattatttgtctgtcacagaagagagctgcttatgattttgaaggggtcagggagggtgggagttggtaaagagtagggtatttctataacagatattattcagtcttatttcctaagattttgttgtaacttaaggtatcttgctacagtagacagaattggtaatagcaacttttaaaattgtcattagttctgcaatattagctgaaatgtagtacagaaaagaatgtacatttagacatttgggttcagttgcttgtagtctgtaaatttaaaacagcttaatttggtacaggttacacatatggccatttatgtaaagtccctctaagactacatactttttgtttaaaacaaaattggaatttgttttcccttcttggaagggaacattgatatttaacagagtttttagagattgtcatctcatatatataaaatggacacgtggctataaaacaccatataagagatgagtagtgcgttttattttatatgccaatctactttgtttaaaaaaggtctgaatcaggacttgtgaaaacctgtagtgaaataccttaagctgttaactaactgtaaggcgtggaataggagttgctcagtggattggttctatgttgtggactacttaagtctgcatttgttactgtgctaataaacaatattaaaaaccacctaataaa

SEQ ID NO: 57821 - DNA, 493 bp, Homo sapiens
  misc_feature (11)..(11): n is a, c, g, or t
cccgggctgcnggaattcggcacgaggaaaagaatgtacatttagacatttgggttcagttgcttgtagtctgtaaatttaaaacagcttaatttggtacaggttacacatatggccatttatgtaaagtccctctaagactacatactttttgtttaaaacaaaattggaatttgttttcccttcttggaagggaacattgatatttaacagagtttttagagattgtcatctcatatatataaaatggacacgtggctataaaacaccatataagagatgagtagtgcgttttattttatatgccaatctactttgtttaaaaaaggtctgaatcaggacttgtgaaaacctgtagtgaaataccttaagctgttaactaactgtaaggcgtggaataggagttgctcagtggattggttctatgttgtggactacttaagtctgcatttgttactgtgctaataaacaatattaaaaaccacctaataaa

SEQ ID NO: 57822 - DNA, 1502 bp, Homo sapiens
gcggaggagtggtgtgtgtgcgagcgtgtgtggctgggggaagccattgcctgtttaatagttgctgttgctgcacttccgcttctctcccagcgagagagagacacgagtggccaggcccagccgcagccgcagcagcagccgccgcggcggcacggaggagccagacacaaagagaggggctgtttgcggggtggggtggggggttcgctatgtcggatgacgattcgagggccagcaccagctcctcctcatcttcgtcttccaaccagcaaaccgagaaagaaacaaacacccccaagaagaaggagagtaaagtcagcatgagcaaaaactccaaactcctctccaccagcgccaagagaattcagaaggagctggcggacatcactttagaccctccacctaattgcagtgctggtcccaaaggcgataacatctatgaatggagatcaaccattctagggcctccaggatccgtgtatgagggtggtgtattctttctcgatatcacttttacaccagaatatcccttcaagcctccaaaggttacatttcggacaagaatctatcattgtaatattaacagtcaaggtgttatttgcttggacatattgaaagataattggagtccagcactaaccatttctaaagtcctcctttctatctgctcacttcttacagactgtaatcctgccgaccccttggtgggaagtattgccactcagtatatgaccaacagagcagaacatgacagaatggccagacagtggaccaagagatacgctacataaattggggtttcacaattcttacattatttgtctgtcacagaagagagctgcttatgattttgaaggggtcagggagggtgggagttggtaaagagtagggtatttctataacagatattattcagtcttatttcctaagattttgttgtaacttaaggtatcttgctacagtagacagaattggtaatagcaacttttaaaattgtcattagttctgcaatattagctgaaatgtagtacagaaaagaatgtacatttagacatttgggttcagttgcttgtagtctgtaaatttaaaacagcttaatttggtacaggttacacatatggccatttatgtaaagtccctctaagactacatactttttgtttaaaacaaaattggaatttgttttcccttcttggaagggaacattgatatttaacagagtttttagagattgtcatctcatatatataaaatggacacgtggctataaaacaccatataagagatgagtagtgcgttttattttatatgccaatctactttgtttaaaaaaggtctgaatcaggacttgtgaaaacctgtagtgaaataccttaagctgttaactaactgtaaggcgtggaataggagttgctcagtggattggttctatgttgtggactacttaagtctgcatttgttactgtgctaataaacaatattaaaaaccacctaataaa

SEQ ID NO: 57823 - DNA, 1481 bp, Homo sapiens
caaaagccttaatgggcctgcagactttgaaaagcgagtggagggcggtgggcggccgcgtgcgcccctggtcaatgccctcctgacagcacccgagttccttatttacactggctgcatggtttgtgtgtttctgttttgtttctctccccctgcaggggctgtttgcggggtggggtggggggttcgctatgtcggatgacgattcgagggccagcaccagctcctcctcatcttcgtcttccaaccagcaaaccgagaaagaaacaaacacccccaagaagaaggagagtaaagtcagcatgagcaaaaactccaaactcctctccaccagcgccaagagaattcagaaggagctggcggacatcactttagaccctccacctaattgcagtgctggtcccaaaggcgataacatctatgaatggagatcaaccattctagggcctccaggatccgtgtatgagggtggtgtattctttctcgatatcacttttacaccagaatatcccttcaagcctccaaaggttacatttcggacaagaatctatcattgtaatattaacagtcaaggtgttatttgcttggacatattgaaagataattggagtccagcactaaccatttctaaagtcctcctttctatctgctcacttcttacagactgtaatcctgccgaccccttggtgggaagtattgccactcagtatatgaccaacagagcagaacatgacagaatggccagacagtggaccaagagatacgctacataaattggggtttcacaattcttacattatttgtctgtcacagaagagagctgcttatgattttgaaggggtcagggagggtgggagttggtaaagagtagggtatttctataacagatattattcagtcttatttcctaagattttgttgtaacttaaggtatcttgctacagtagacagaattggtaatagcaacttttaaaattgtcattagttctgcaatattagctgaaatgtagtacagaaaagaatgtacatttagacatttgggttcagttgcttgtagtctgtaaatttaaaacagcttaatttggtacaggttacacatatggccatttatgtaaagtccctctaagactacatactttttgtttaaaacaaaattggaatttgttttcccttcttggaagggaacattgatatttaacagagtttttagagattgtcatctcatatatataaaatggacacgtggctataaaacaccatataagagatgagtagtgcgttttattttatatgccaatctactttgtttaaaaaaggtctgaatcaggacttgtgaaaacctgtagtgaaataccttaagctgttaactaactgtaaggcgtggaataggagttgctcagtggattggttctatgttgtggactacttaagtctgcatttgttactgtgctaataaacaatattaaaaaccacctaataaa

SEQ ID NO: 57824 - DNA, 1409 bp, Homo sapiens
gcggaggagtggtgtgtgtgcgagcgtgtgtggctgggggaagccattgcctgtttaatagttgctgttgctgcacttccgcttctctcccagcgagagagagacacgagtggccaggcccagccgcagccgcagcagcagccgccgcggcggcacggaggagccagacacaaagagagcaaaccgagaaagaaacaaacacccccaagaagaaggagagtaaagtcagcatgagcaaaaactccaaactcctctccaccagcgccaagagaattcagaaggagctggcggacatcactttagaccctccacctaattgcagtgctggtcccaaaggcgataacatctatgaatggagatcaaccattctagggcctccaggatccgtgtatgagggtggtgtattctttctcgatatcacttttacaccagaatatcccttcaagcctccaaaggttacatttcggacaagaatctatcattgtaatattaacagtcaaggtgttatttgcttggacatattgaaagataattggagtccagcactaaccatttctaaagtcctcctttctatctgctcacttcttacagactgtaatcctgccgaccccttggtgggaagtattgccactcagtatatgaccaacagagcagaacatgacagaatggccagacagtggaccaagagatacgctacataaattggggtttcacaattcttacattatttgtctgtcacagaagagagctgcttatgattttgaaggggtcagggagggtgggagttggtaaagagtagggtatttctataacagatattattcagtcttatttcctaagattttgttgtaacttaaggtatcttgctacagtagacagaattggtaatagcaacttttaaaattgtcattagttctgcaatattagctgaaatgtagtacagaaaagaatgtacatttagacatttgggttcagttgcttgtagtctgtaaatttaaaacagcttaatttggtacaggttacacatatggccatttatgtaaagtccctctaagactacatactttttgtttaaaacaaaattggaatttgttttcccttcttggaagggaacattgatatttaacagagtttttagagattgtcatctcatatatataaaatggacacgtggctataaaacaccatataagagatgagtagtgcgttttattttatatgccaatctactttgtttaaaaaaggtctgaatcaggacttgtgaaaacctgtagtgaaataccttaagctgttaactaactgtaaggcgtggaataggagttgctcagtggattggttctatgttgtggactacttaagtctgcatttgttactgtgctaataaacaatattaaaaaccacctaataaa

SEQ ID NO: 57825 - DNA, 1828 bp, Homo sapiens
gcggaggagtggtgtgtgtgcgagcgtgtgtggctgggggaagccattgcctgtttaatagttgctgttgctgcacttccgcttctctcccagcgagagagagacacgagtggccaggcccagccgcagccgcagcagcagccgccgcggcggcacggaggagccagacacaaagagaggggctgtttgcggggtggggtggggggttcgctatgtcggatgacgattcgagggccagcaccagctcctcctcatcttcgtcttccaaccagcaaaccgagaaagaaacaaacacccccaagaagaaggagagtaaagtcagcatgagcaaaaactccaaactcctctccaccagcgccaagagaattcagaaggagctggcggacatcactttagaccctccacctaattgcagtgctggtcccaaaggcgataacatctatgaatggagatcaaccattctagggcctccaggatccgtgtatgagggtggtgtattctttctcgatatcacttttacaccagaatatcccttcaagcctccaaaggttacatttcggacaagaatctatcattgtaatattaacagtcaaggtgttatttgcttggacatattgaaagataattggagtccagcactaaccatttctaaagtcctcctttctatctgctcacttcttacagactgtaatcctgccgaccccttggtgggaagtattgccactcagtatatgaccaacagagcagaacatgacagaatggccagacagtggaccaagagatacgctacataaattggggtttcacaattcttacattatttgtctgtcacagaagagagctgcttatgattttgaaggggtcagggagggtgggagttggtaaagagtagggtatttctataacagatattattcagtcttatttcctaagattttgttgtaacttaaggtatcttgctacagtagacagaattggtaatagcaacttttaaaattgtcattagttctgcaatattagctgaaatgtagtacagaaaagaatgtacatttagacatttgggttcagttgcttgtagtctgtaaatttaaaacagcttaatttggtacaggttacacatatggccatttatgtaaagtccctctaagactacatactttttgtttaaaacaaaattggaatttgttttcccttcttggaagggaacattgatatttaacagagtttttagagattgtcatctcatatatataaaatggacacgtggctataaaacaccatataagagatgagtagtgcgttttattttatatgccaatctactttgtttaaaaaaggtctgaatcaggacttgtgaaaacctgtagtgaaataccttaagctgttaactaactgtaaggcgtggaataggagttgctcagtggattggttctatgttgtggactacttaagtctgcatttgttactgtgctaataaacaatattaaaaaccacctaataaacactgctgtgttcatttacttttcttttgccttttggttgccattcgcagattcttctgaaatcgataggtatctgcttctaaaacaagctaaaaataatgcatatttagtaggtattagttagttacctatattaggatctgtactttacacagctgtagatgaggtatcctagaaaaggttaaataatctaccccatttaggcttcaaagacgaaccctactgcatctttttaaaagcattttctgacttgcagatgctgtagtagcaagtacatgagaaatgggttccgtcatggataaattggtaccctgccttagggggca

SEQ ID NO: 57826 - DNA, 1351 bp, Homo sapiens
gcggaggagtggtgtgtgtgcgagcgtgtgtggctgggggaagccattgcctgtttaatagttgctgttgctgcacttccgcttctctcccagcgagagagagacacgagtggccaggcccagccgcagccgcagcagcagccgccgcggcggcacggaggagccagacacaaagagaggggctgtttgcggggtggggtggggggttcgctatgtcggatgacgattcgagggccagcaccagctcctcctcatcttcgtcttccaaccagcaaaccgagaaagaaacaaacacccccaagaagaaggagagtaaagtcagcatgagcaaaaactccaaactcctctccaccagcgccaagagaattcagaaggagctggcggacatcactttagaccctccacctaattgcagtgctggtcccaaaggcgataacatctatgaatggagatcaaccattctagggcctccaggatccgtgtatgagggtggtgtattctttctcgatatcacttttacaccagaatatcccttcaagcctccaaaggttacatttcggacaagaatctatcattgtaatattaacagtcaaggtgttatttgcttggacatattgaaagataattggagtccagcactaaccatttctaaagtcctcctttctatctgctcacttcttacagactgtaatcctgccgaccccttggtgggaagtattgccactcagtatatgaccaacagagcagaacatgacagatattattcagtcttatttcctaagattttgttgtaacttaaggtatcttgctacagtagacagaattggtaatagcaacttttaaaattgtcattagttctgcaatattagctgaaatgtagtacagaaaagaatgtacatttagacatttgggttcagttgcttgtagtctgtaaatttaaaacagcttaatttggtacaggttacacatatggccatttatgtaaagtccctctaagactacatactttttgtttaaaacaaaattggaatttgttttcccttcttggaagggaacattgatatttaacagagtttttagagattgtcatctcatatatataaaatggacacgtggctataaaacaccatataagagatgagtagtgcgttttattttatatgccaatctactttgtttaaaaaaggtctgaatcaggacttgtgaaaacctgtagtgaaataccttaagctgttaactaactgtaaggcgtggaataggagttgctcagtggattggttctatgttgtggactacttaagtctgcatttgttactgtgctaataaacaatattaaaaaccacctaataaa

SEQ ID NO: 57827 - DNA, 1205 bp, Homo sapiens
cgcgcggccggtcggaacttcggagggcccgggcggtcgctgcgcggtggcggagcgtctagtggccgccgcaaccggtggctccgggccgccgttgtgaagtgagcgggcctctcccgcgccgcggcccgccgggcaccgccgctggaccccgcgccgacccggcagcgccccgacctgccgctcgggaggtccgcgaccgtttcgatttctgttcctaaagtccgattttggacgctgaaaaggaggctgtggaggggcgagcggcgtcctgggaagcaaggcctgctctgtgcggagcagaaacgccttgtgcgaacagaaataaattcccgcggaaaggatgaaggtggacttttaaatattctccactgaagcaaatgctgcaacaatttgcatttccttcaccaatgtcgtcttgtgccttttcttgttcctactgtaaaggagatgggttagatgttcactttcatttggacccgtggatacccattgaacagatgcttgaaacctgcaagtaatcttcagatcctagcagaaccataggcctttcctttgttttgggaggatatagcctgcctatatgctgtggaaatgaacggggagcagcagcttgatgcagatgccggctctggtatggaagaggtagaattaagctgggaagattatctagaagaaacagggtccacagcagttccctatgggtcttttaaacatgtggacacacgtgtggcaaaatgggagttcgcgtcctggcgaattgaagctgggacgggtgggttgtgaagaacacgaattctttggggaaccttattggggttgacccaccgggttttcactttactggttcacagattgggcactttttaccgaaatgaagggatggggggaggcatagagaaaagagaattggagtgctgggcccccaacaagaaacggcggtggagctaacacacacaaatggtgtgtggggttcgccagaaaactgaggacgacccgatggacgccgaaggggcacgaggacgaacagaacaagcacaggcaggaagtaagcgagggagcaccaccgtgagacgacggagctgcacacaggtcgcgcggcgcaagacgaggcaggcacaggagagcagaaaaacaatcaggtctccgagcaccggcaggaacagtgagcaacgctagacgagcgagagacaacaaagagaaag

SEQ ID NO: 57828 - DNA, 3533 bp, Homo sapiens
gcacagggggaaaccccgagccatcctcggggggtgatgagaggcgccgccgccggcctccgccggagcgcgggtggaggggggcggggagagctgccggccgccccgctccgccgaacccagcaggaaggagggcgcgagcgggcgagcgcgggcagcacgggaggaaaaagcttccgcgcgggggagcgaaaagacggaaagaaagaaagaaaacgagcgcgagagggggaaaagcgagcgatcgagcgagcgcgcgcgcgaaaactccgggcagcactttcatttggacccgtggatacccattgaacagatgcttgaaacctgcaagtaatcttcagatcctagcagaaccataggcctttcctttgttttgggaggatatagcctgcctatatgctgtggaaatgaacggggagcagcagcttgatgcagatgccggctctggtatggaagaggtagaattaagctgggaagattatctagaagaaacagggtccacagcagttccctatgggtcttttaaacatgtggacacacgtttgcaaaatggatttgctcctgggatgaagctggaggtggctgtgagaacagatcctgagacctactgggttgccaccgttatcactacctgtgagcagttgctccttctccgctatgatggctatggggaggatcggagagcagatttctggtgtgacatcaggaaggctgatctctaccccattgggtggtgtgagcagaataagaagacccttgaagccccagaaggcatcagagataaagtatctgactgggatgagtttctgcggcagaccctgataggagcatgtagtcctcctgttccgctgctagagggcctccgtaatgggaggaatcctttagatctcattgctccaggatccagactagaatgtcaagctttccaggactctttaagcacttggattgttactgtagtagaaaacattggaggaaggctgaagctacgttatgaaggacttgaaagttctgacaattatgaacattggttgtattacttggatccatttcttcatcacgttggttgggctgctcaacagggatatgagcttcagcccccttcagccattagacatctaaaaaatgaagctgagtggcaagagattttggccaaagtgaaagaggaagaggaagagccattaccatcttacttatttaaggacaaacaagttattggcattcatacattctctgtaaacatgaaattggaagctgtagacccctggtctccttttgggatctctcctgctacagttgttaaggtttttgatgagaagtactttctggtggaaatggatgacttgcgtcctgagaaccacgcacggcgatcctttgtgtgccacgccgacagtcctggcatcttccctgtgcagtggagtctgaagaatggcctacacatcagcccccctccaggctacccaagccaggactttgactgggctgactacctcaaacagtgtggtgctgaagctgctccccagaggtgcttccctccgttaatttctgaacatgaatttaaggagaacatgaagctcgaggcggtgaaccccattctccctgaagaagtgtgtgttgctaccatcactgcagtgagaggctcctacctgtggctccagctggagggttctaagaagcctatacctgaatgtattgtgagtgtggaatccatggatatatttcctttgggctggtgtgaaaccaacggccaccccctcagcactcctcgccgagcacgagtatataaacagaggaaaattgcagtggttcagccagaaaaacaagtaccatcctcgaggactgtccacgagggcctgaggaatcaggagctgaactccacagagtcagttatgattaatggaaaatattgctgtccaaagatatacttcaaccaccgttgcttctcagggccatatcttaacaaaggaagaattgctgagctgcctcaatgtgtaggacctgggaactgtgttctggtccttagagaggtcctcactttacttatcaatgcagcctacaaacccagccgtgtccttcgggagctccagctggacaaagactctgtgtggcacggatgtggggaagtcctaaaagccaaatataaaggaaagagttatcgggctactgttgagatagtgaaaacagcagatcgggtgactgaattctgccggcaaacctgtatcaaactggaatgctgtcctaacctcttcggtccacggatggttctggataagtgttctgagaactgttctgtacttacaaagaccaaatacacacactattacggaaagaagaaaaataaaagaattgggaggccacctggtgggcatagtaacttagcttgtgccctgaaaaaagccagtaagaggagaaagaggcggaaaaatgtttttgttcataagaagaaacgctcctctgcatctgttgataataccccagcgggctctccccagggaagtgggggtgaagatgaggatgacccagatgaaggggatgatgattccctaagtgaaggcagtacatccgagcagcaggatgagctacaggaagaatcagaaatgtcagaaaaaaagtcatgctcctcttctcccacccaaagtgagatatccacatcgctgcctccagatagacaaaggagaaaaagggagcttcgcaccttttcattttctgacgatgaaaataaacctccttcaccaaaggaaataaggatcgaagttgctgaaaggcttcacctggacagtaaccccttgaagtggagtgtggcagacgttgtgcggttcatcagatccactgactgtgctccattagcaagaatattcctagaccaggaaattgatgggcaggccctgttgctccttacccttcccactgttcaagaatgcatggacttaaaattgggccctgccatcaaactttgccatcacatagagaggatcaagtttgctttttatgagcagtttgccaactgagaaggacaaccaaagtgagctggatctttgaagcacaaatgcagcaaatccttcaccctgctttataagtggagctggaatagtcctggggctctggggcctgcaggtatcagcttgctctctttgcactttcggggaaggaggactcacagtgaggaagcaaaaactgtgcacagaagtggatcacctgctggtggaaatgtggacatctcttgttcagcagatggcagtttttaaaaaataaaggttgtgaggaaaagacttatataagaagaaaagcatttccagtggtgtggcctgaaaacaaagaataacctaggctgctggaaagcacccttttggttgttttcattctgttccctcccattgtagattgaactttgttctctgctttctttttcttggaaagagaggacttagctttaagtcagcactgatttgggactgttcctaaggcatatcagtgcttcattgtcattgtgtttttaaactttttaaaattaaaacagttcattttggggatga

SEQ ID NO: 57829 - DNA, 3407 bp, Homo sapiens
gcacagggggaaaccccgagccatcctcggggggtgatgagaggcgccgccgccggcctccgccggagcgcgggtggaggggggcggggagagctgccggccgccccgctccgccgaacccagcaggaaggagggcgcgagcgggcgagcgcgggcagcacgggaggaaaaagcttccgcgcgggggagcgaaaagacggaaagaaagaaagaaaacgagcgcgagagggggaaaagcgagcgatcgagcgagcgcgcgcgcgaaaactccgggcagcactttcatttggacccgtggatacccattgaacagatgcttgaaacctgcaagtaatcttcagatcctagcagaaccataggcctttcctttgttttgggaggatatagcctgcctatatgctgtggaaatgaacggggagcagcagcttgatgcagatgccggctctggtatggaagaggtagaattaagctgggaagattatctagaagaaacagggtccacagcagttccctatgggtcttttaaacatgtggacacacgtttgcaaaatggatttgctcctgggatgaagctggaggtggctgtgagaacagatcctgagacctactgggttgccaccgttatcactacctgtgagcagttgctccttctccgctatgatggctatggggaggatcggagagcagatttctggtgtgacatcaggaaggctgatctctaccccattgggtggtgtgagcagaataagaagacccttgaagccccagaaggcatcagagataaagtatctgactgggatgagtttctgcggcagaccctgataggagcatgtagtcctcctgttccgctgctagagggcctccgtaatgggaggaatcctttagatctcattgctccaggatccagactagaatgtcaagctttccaggactctttaagcacttggattgttactgtagtagaaaacattggaggaaggctgaagctacgttatgaaggacttgaaagttctgacaattatgaacattggttgtattacttggatccatttcttcatcacgttggttgggctgctcaacagggatatgagcttcagcccccttcagccattagacatctaaaaaatgaagctgagtggcaagagattttggccaaagtgaaagaggaagaggaagagccattaccatcttacttatttaaggacaaacaagttattggcattcatacattctctgtaaacatgaaattggaagctgtagacccctggtctccttttgggatctctcctgctacagttgttaaggtttttgatgagaagtactttctggtggaaatggatgacttgcgtcctgagaaccacgcacggcgatcctttgtgtgccacgccgacagtcctggcatcttccctgtgcagtggagtctgaagaatggcctacacatcagcccccctccaggctacccaagccaggactttgactgggctgactacctcaaacagtgtggtgctgaagctgctccccagaggtgcttccctccgttaatttctgaacatgaatttaaggagaacatgaagctcgaggcggtgaaccccattctccctgaagaagtgtgtgttgctaccatcactgcagtgagaggctcctacctgtggctccagctggagggttctaagaagcctatacctgaatgtattgtgagtgtggaatccatggatatatttcctttgggctggtgtgaaaccaacggccaccccctcagcactcctcgccgagcacgagtatataaacagaggaaaattgcagtggttcagccagaaaaacaagtaccatcctcgaggactgtccacgagggcctgaggaatcaggagctgaactccacagagtcagttatgattaatggaaaatattgctgtccaaagatatacttcaaccaccgttgcttctcagggccatatcttaacaaaggaagaattgctgagctgcctcaatgtgtaggacctgggaactgtgttctggtccttagagaggtcctcactttacttatcaatgcagcctacaaacccagccgtgtccttcgggagctccagctggacaaagactctgtgtggcacggatgtggggaagtcctaaaagccaaatataaaggaaagagttatcgggctactgttgagatagtgaaaacagcagatcgggtgactgaattctgccggcaaacctgtatcaaactggaatgctgtcctaacctcttcggtccacggatggttctggataagtgttctgagaactgttctgtacttacaaagaccaaatacacacactattacggaaagaagaaaaataaaagaattgggaggccacctggtgggcatagtaacttagcttgtgccctgaaaaaagccagtaagaggagaaagaggcggaaaaatgtttttgttcataagaagaaacgctcctctgcatctgttgataataccccagcgggctctccccagggaagtgggggtgaagatgaggatgacccagatgaaggggatgatgattccctaagtgaaggcagtacatccgagcagcaggatgagctacaggaagaatcagaaatgtcagaaaaaaagtcatgctcctcttctcccacccaaagtgagatatccacatcgctgcctccagatagacaaaggagaaaaagggagcttcgcaccttttcattttctgacgatgaaaataaacctccttcaccaaagcaggaaattgatgggcaggccctgttgctccttacccttcccactgttcaagaatgcatggacttaaaattgggccctgccatcaaactttgccatcacatagagaggatcaagtttgctttttatgagcagtttgccaactgagaaggacaaccaaagtgagctggatctttgaagcacaaatgcagcaaatccttcaccctgctttataagtggagctggaatagtcctggggctctggggcctgcaggtatcagcttgctctctttgcactttcggggaaggaggactcacagtgaggaagcaaaaactgtgcacagaagtggatcacctgctggtggaaatgtggacatctcttgttcagcagatggcagtttttaaaaaataaaggttgtgaggaaaagacttatataagaagaaaagcatttccagtggtgtggcctgaaaacaaagaataacctaggctgctggaaagcacccttttggttgttttcattctgttccctcccattgtagattgaactttgttctctgctttctttttcttggaaagagaggacttagctttaagtcagcactgatttgggactgttcctaaggcatatcagtgcttcattgtcattgtgtttttaaactttttaaaattaaaacagttcattttggggatga

SEQ ID NO: 57830 - DNA, 3293 bp, Homo sapiens
ggcggcggcacgcgcgcatctgggatccggccgcttctccgctcatgccatcttgtccgagccagtcacgtgcgggcgacagccgcgcgcttcgccgggccggtactccaggtccgacccgcgaacccctctgggatccccgccgctctgtctacaacccgagcactttcatttggacccgtggatacccattgaacagatgcttgaaacctgcaagtaatcttcagatcctagcagaaccataggcctttcctttgttttgggaggatatagcctgcctatatgctgtggaaatgaacggggagcagcagcttgatgcagatgccggctctggtatggaagaggtagaattaagctgggaagattatctagaagaaacagggtccacagcagttccctatgggtcttttaaacatgtggacacacgtttgcaaaatggatttgctcctgggatgaagctggaggtggctgtgagaacagatcctgagacctactgggttgccaccgttatcactacctgtgagcagttgctccttctccgctatgatggctatggggaggatcggagagcagatttctggtgtgacatcaggaaggctgatctctaccccattgggtggtgtgagcagaataagaagacccttgaagccccagaaggcatcagagataaagtatctgactgggatgagtttctgcggcagaccctgataggagcatgtagtcctcctgttccgctgctagagggcctccgtaatgggaggaatcctttagatctcattgctccaggatccagactagaatgtcaagctttccaggactctttaagcacttggattgttactgtagtagaaaacattggaggaaggctgaagctacgttatgaaggacttgaaagttctgacaattatgaacattggttgtattacttggatccatttcttcatcacgttggttgggctgctcaacagggatatgagcttcagcccccttcagccattagacatctaaaaaatgaagctgagtggcaagagattttggccaaagtgaaagaggaagaggaagagccattaccatcttacttatttaaggacaaacaagttattggcattcatacattctctgtaaacatgaaattggaagctgtagacccctggtctccttttgggatctctcctgctacagttgttaaggtttttgatgagaagtactttctggtggaaatggatgacttgcgtcctgagaaccacgcacggcgatcctttgtgtgccacgccgacagtcctggcatcttccctgtgcagtggagtctgaagaatggcctacacatcagcccccctccaggctacccaagccaggactttgactgggctgactacctcaaacagtgtggtgctgaagctgctccccagaggtgcttccctccgttaatttctgaacatgaatttaaggagaacatgaagctcgaggcggtgaaccccattctccctgaagaagtgtgtgttgctaccatcactgcagtgagaggctcctacctgtggctccagctggagggttctaagaagcctatacctgaatgtattgtgagtgtggaatccatggatatatttcctttgggctggtgtgaaaccaacggccaccccctcagcactcctcgccgagcacgagtatataaacagaggaaaattgcagtggttcagccagaaaaacaagtaccatcctcgaggactgtccacgagggcctgaggaatcaggagctgaactccacagagtcagttatgattaatggaaaatattgctgtccaaagatatacttcaaccaccgttgcttctcagggccatatcttaacaaaggaagaattgctgagctgcctcaatgtgtaggacctgggaactgtgttctggtccttagagaggtcctcactttacttatcaatgcagcctacaaacccagccgtgtccttcgggagctccagctggacaaagactctgtgtggcacggatgtggggaagtcctaaaagccaaatataaaggaaagagttatcgggctactgttgagatagtgaaaacagcagatcgggtgactgaattctgccggcaaacctgtatcaaactggaatgctgtcctaacctcttcggtccacggatggttctggataagtgttctgagaactgttctgtacttacaaagaccaaatacacacactattacggaaagaagaaaaataaaagaattgggaggccacctggtgggcatagtaacttagcttgtgccctgaaaaaagccagtaagaggagaaagaggcggaaaaatgtttttgttcataagaagaaacgctcctctgcatctgttgataataccccagcgggctctccccagggaagtgggggtgaagatgaggatgacccagatgaaggggatgatgattccctaagtgaaggcagtacatccgagcagcaggatgagctacaggaagaatcagaaatgtcagaaaaaaagtcatgctcctcttctcccacccaaagtgagatatccacatcgctgcctccagatagacaaaggagaaaaagggagcttcgcaccttttcattttctgacgatgaaaataaacctccttcaccaaagcaggaaattgatgggcaggccctgttgctccttacccttcccactgttcaagaatgcatggacttaaaattgggccctgccatcaaactttgccatcacatagagaggatcaagtttgctttttatgagcagtttgccaactgagaaggacaaccaaagtgagctggatctttgaagcacaaatgcagcaaatccttcaccctgctttataagtggagctggaatagtcctggggctctggggcctgcaggtatcagcttgctctctttgcactttcggggaaggaggactcacagtgaggaagcaaaaactgtgcacagaagtggatcacctgctggtggaaatgtggacatctcttgttcagcagatggcagtttttaaaaaataaaggttgtgaggaaaagacttatataagaagaaaagcatttccagtggtgtggcctgaaaacaaagaataacctaggctgctggaaagcacccttttggttgttttcattctgttccctcccattgtagattgaactttgttctctgctttctttttcttggaaagagaggacttagctttaagtcagcactgatttgggactgttcctaaggcatatcagtgcttcattgtcattgtgtttttaaactttttaaaattaaaacagttcattttggggatga

SEQ ID NO: 57831 - DNA, 3830 bp, Homo sapiens
cgcgcggccggtcggaacttcggagggcccgggcggtcgctgcgcggtggcggagcgtctagtggccgccgcaaccggtggctccgggccgccgttgtgaagtgagcgggcctctcccgcgccgcggcccgccgggcaccgccgctggaccccgcgccgacccggcagcgccccgacctgccgctcgggaggtccgcgaccgtttcgatttctgttcctaaagtccgattttggacgctgaaaaggaggctgtggaggggcgagcggcgtcctgggaagcaaggcctgctctgtgcggagcagaaacgccttgtgcgaacagaaataaattcccgcggaaaggatgaaggtggacttttaaatattctccactgaagcaaatgctgcaacaatttgcatttccttcaccaatgtcgtcttgtgccttttcttgttcctactgtaaaggagatgggttagatgttaaacgaagtctcactgtgttgtccaggctggtctcaagctcctgggctcaagcaatacttccacctcagcctcccaaaatgctgggattacagatggagtcttgctcttgttgcccaggctggagtgcaatggcacgatcatggctcactgcaacctctgcctcctgggttcaagcaattctcctgcctcagcctcccaagtagctgggattatgggcatgcaccaccattcctggcactttcatttggacccgtggatacccattgaacagatgcttgaaacctgcaagtaatcttcagatcctagcagaaccataggcctttcctttgttttgggaggatatagcctgcctatatgctgtggaaatgaacggggagcagcagcttgatgcagatgccggctctggtatggaagaggtagaattaagctgggaagattatctagaagaaacagggtccacagcagttccctatgggtcttttaaacatgtggacacacgtttgcaaaatggatttgctcctgggatgaagctggaggtggctgtgagaacagatcctgagacctactgggttgccaccgttatcactacctgtgagcagttgctccttctccgctatgatggctatggggaggatcggagagcagatttctggtgtgacatcaggaaggctgatctctaccccattgggtggtgtgagcagaataagaagacccttgaagccccagaaggcatcagagataaagtatctgactgggatgagtttctgcggcagaccctgataggagcatgtagtcctcctgttccgctgctagagggcctccgtaatgggaggaatcctttagatctcattgctccaggatccagactagaatgtcaagctttccaggactctttaagcacttggattgttactgtagtagaaaacattggaggaaggctgaagctacgttatgaaggacttgaaagttctgacaattatgaacattggttgtattacttggatccatttcttcatcacgttggttgggctgctcaacagggatatgagcttcagcccccttcagccattagacatctaaaaaatgaagctgagtggcaagagattttggccaaagtgaaagaggaagaggaagagccattaccatcttacttatttaaggacaaacaagttattggcattcatacattctctgtaaacatgaaattggaagctgtagacccctggtctccttttgggatctctcctgctacagttgttaaggtttttgatgagaagtactttctggtggaaatggatgacttgcgtcctgagaaccacgcacggcgatcctttgtgtgccacgccgacagtcctggcatcttccctgtgcagtggagtctgaagaatggcctacacatcagcccccctccaggctacccaagccaggactttgactgggctgactacctcaaacagtgtggtgctgaagctgctccccagaggtgcttccctccgttaatttctgaacatgaatttaaggagaacatgaagctcgaggcggtgaaccccattctccctgaagaagtgtgtgttgctaccatcactgcagtgagaggctcctacctgtggctccagctggagggttctaagaagcctatacctgaatgtattgtgagtgtggaatccatggatatatttcctttgggctggtgtgaaaccaacggccaccccctcagcactcctcgccgagcacgagtatataaacagaggaaaattgcagtggttcagccagaaaaacaagtaccatcctcgaggactgtccacgagggcctgaggaatcaggagctgaactccacagagtcagttatgattaatggaaaatattgctgtccaaagatatacttcaaccaccgttgcttctcagggccatatcttaacaaaggaagaattgctgagctgcctcaatgtgtaggacctgggaactgtgttctggtccttagagaggtcctcactttacttatcaatgcagcctacaaacccagccgtgtccttcgggagctccagctggacaaagactctgtgtggcacggatgtggggaagtcctaaaagccaaatataaaggaaagagttatcgggctactgttgagatagtgaaaacagcagatcgggtgactgaattctgccggcaaacctgtatcaaactggaatgctgtcctaacctcttcggtccacggatggttctggataagtgttctgagaactgttctgtacttacaaagaccaaatacacacactattacggaaagaagaaaaataaaagaattgggaggccacctggtgggcatagtaacttagcttgtgccctgaaaaaagccagtaagaggagaaagaggcggaaaaatgtttttgttcataagaagaaacgctcctctgcatctgttgataataccccagcgggctctccccagggaagtgggggtgaagatgaggatgacccagatgaaggggatgatgattccctaagtgaaggcagtacatccgagcagcaggatgagctacaggaagaatcagaaatgtcagaaaaaaagtcatgctcctcttctcccacccaaagtgagatatccacatcgctgcctccagatagacaaaggagaaaaagggagcttcgcaccttttcattttctgacgatgaaaataaacctccttcaccaaagcaggaaattgatgggcaggccctgttgctccttacccttcccactgttcaagaatgcatggacttaaaattgggccctgccatcaaactttgccatcacatagagaggatcaagtttgctttttatgagcagtttgccaactgagaaggacaaccaaagtgagctggatctttgaagcacaaatgcagcaaatccttcaccctgctttataagtggagctggaatagtcctggggctctggggcctgcaggtatcagcttgctctctttgcactttcggggaaggaggactcacagtgaggaagcaaaaactgtgcacagaagtggatcacctgctggtggaaatgtggacatctcttgttcagcagatggcagtttttaaaaaataaaggttgtgaggaaaagacttatataagaagaaaagcatttccagtggtgtggcctgaaaacaaagaataacctaggctgctggaaagcacccttttggttgttttcattctgttccctcccattgtagattgaactttgttctctgctttctttttcttggaaagagaggacttagctttaagtcagcactgatttgggactgttcctaaggcatatcagtgcttcattgtcattgtgtttttaaactttttaaaattaaaacagttcattttggggatga

SEQ ID NO: 57832 - DNA, 4572 bp, Homo sapiens
gcacagggggaaaccccgagccatcctcggggggtgatgagaggcgccgccgccggcctccgccggagcgcgggtggaggggggcggggagagctgccggccgccccgctccgccgaacccagcaggaaggagggcgcgagcgggcgagcgcgggcagcacgggaggaaaaagcttccgcgcgggggagcgaaaagacggaaagaaagaaagaaaacgagcgcgagagggggaaaagcgagcgatcgagcgagcgcgcgcgcgaaaactccgggcagcactttcatttggacccgtggatacccattgaacagatgcttgaaacctgcaagtaatcttcagatcctagcagaaccataggcctttcctttgttttgggaggatatagcctgcctatatgctgtggaaatgaacggggagcagcagcttgatgcagatgccggctctggtatggaagaggtagaattaagctgggaagattatctagaagaaacagggtccacagcagttccctatgggtcttttaaacatgtggacacacgtttgcaaaatggatttgctcctgggatgaagctggaggtggctgtgagaacagatcctgagacctactgggttgccaccgttatcactacctgtgagcagttgctccttctccgctatgatggctatggggaggatcggagagcagatttctggtgtgacatcaggaaggctgatctctaccccattgggtggtgtgagcagaataagaagacccttgaagccccagaaggcatcagagataaagtatctgactgggatgagtttctgcggcagaccctgataggagcatgtagtcctcctgttccgctgctagagggcctccgtaatgggaggaatcctttagatctcattgctccaggatccagactagaatgtcaagctttccaggactctttaagcacttggattgttactgtagtagaaaacattggaggaaggctgaagctacgttatgaaggacttgaaagttctgacaattatgaacattggttgtattacttggatccatttcttcatcacgttggttgggctgctcaacagggatatgagcttcagcccccttcagccattagacatctaaaaaatgaagctgagtggcaagagattttggccaaagtgaaagaggaagaggaagagccattaccatcttacttatttaaggacaaacaagttattggcattcatacattctctgtaaacatgaaattggaagctgtagacccctggtctccttttgggatctctcctgctacagttgttaaggtttttgatgagaagtactttctggtggaaatggatgacttgcgtcctgagaaccacgcacggcgatcctttgtgtgccacgccgacagtcctggcatcttccctgtgcagtggagtctgaagaatggcctacacatcagcccccctccaggctacccaagccaggactttgactgggctgactacctcaaacagtgtggtgctgaagctgctccccagaggtgcttccctccgttaatttctgaacatgaatttaaggagaacatgaagctcgaggcggtgaaccccattctccctgaagaagtgtgtgttgctaccatcactgcagtgagaggctcctacctgtggctccagctggagggttctaagaagcctatacctgaatgtattgtgagtgtggaatccatggatatatttcctttgggctggtgtgaaaccaacggccaccccctcagcactcctcgccgagcacgagtatataaacagaggaaaattgcagtggttcagccagaaaaacaagtaccatcctcgaggactgtccacgagggcctgaggaatcaggagctgaactccacagagtcagttatgattaatggaaaatattgctgtccaaagatatacttcaaccaccgttgcttctcagggccatatcttaacaaaggaagaattgctgagctgcctcaatgtgtaggacctgggaactgtgttctggtccttagagaggtcctcactttacttatcaatgcagcctacaaacccagccgtgtccttcgggagctccagctggacaaagactctgtgtggcacggatgtggggaagtcctaaaagccaaatataaaggaaagagttatcgggctactgttgagatagtgaaaacagcagatcgggtgactgaattctgccggcaaacctgtatcaaactggaatgctgtcctaacctcttcggtccacggatggttctggataagtgttctgagaactgttctgtacttacaaagaccaaatacacacactattacggaaagaagaaaaataaaagaattgggaggccacctggtgggcatagtaacttagcttgtgccctgaaaaaagccagtaagaggagaaagaggcggaaaaatgtttttgttcataagaagaaacgctcctctgcatctgttgataataccccagcgggctctccccagggaagtgggggtgaagatgaggatgacccagatgaaggggatgatgattccctaagtgaaggcagtacatccgagcagcaggatgagctacaggaagaatcagaaatgtcagaaaaaaagtcatgctcctcttctcccacccaaagtgagatatccacatcgctgcctccagatagacaaaggagaaaaagggagcttcgcaccttttcattttctgacgatgaaaataaacctccttcaccaaaggaaataaggatcgaagttgctgaaaggcttcacctggacagtaaccccttgaagtggagtgtggcagacgttgtgcggttcatcagatccactgactgtgctccattagcaagaatattcctagaccaggaaattgatgggcaggccctgttgctccttacccttcccactgttcaagaatgcatggacttaaaattgggccctgccatcaaactttgccatcacatagagaggatcaagtttgctttttatgagcagtttgccaactgagaaggacaaccaaagtgagctggatctttgaagcacaaatgcagcaaatccttcaccctgctttataagtggagctggaatagtcctggggctctggggcctgcaggtatcagcttgctctctttgcactttcggggaaggaggactcacagtgaggaagcaaaaactgtgcacagaagtggatcacctgctggtggaaatgtggacatctcttgttcagcagatggcagtttttaaaaaataaaggttgtgaggaaaagacttatataagaagaaaagcatttccagtggtgtggcctgaaaacaaagaataacctaggctgctggaaagcacccttttggttgttttcattctgttccctcccattgtagattgaactttgttctctgctttctttttcttggaaagagaggacttagctttaagtcagcactgatttgggactgttcctaaggcatatcagtgcttcattgtcattgtgtttttaaactttttaaaattaaaacagttcattttggggatgattatgtggctctagggttttgaatgtatagtcacactttgatcattttaaaatcgattcttaggagttcctttgtttactacctctgttgataattgagcttacagccatgtatgaggttttttgtatgatgccatttttaagctacataaacactaaaattatgacagaatttggagggggggaaactgtttgctttcttaaaaacattatatggggcacttacaccagttccttaactgacctgatctgagaactctactgttactgttctccatcttgacccagccgaggctgcctgtgttaagtaacatcaccaagactgttagtatttctgtttaattgccctcttcctattcattctcagagggacttcagtgacttttattttgtgtttacttttctctagagttgtttgtctacctctgtttcatttctaaggtctttactttgggtgaaaatcagtaagtgttccatggacccacagcgaagcccatttgtccttctttccaggtgtctccagtgtagaagcacaccacagaaaacatgttttggagggtaacgcagagcatggagtttctgttagcagtgtcctcagtggcaggataaatactgagatgtggttaaggattctggaaacctctttgcctagccacacttagacttttttcagctaatcctttaaattgaatataatctttagtccgaggattcccatttaaacaactcagtattcttttaagtgtgtcttttagcccagctcaagttaacatgaaactccaggtgaattttcacttactattccattgctagctattatagaataatagcgtttgctgcactattctagtcatgaggagtgaggaaaaacatacataggttgtctcccttaaatggtttgctttgctgaattttttttatcctaatcacctgcaaatttataacccaatcattcttcctcaagatttgaaaatgttttaatcctgcaaactgggtgaattctaaacagctctacaaatataaggaaatattacagcaaa

SEQ ID NO: 57833 - DNA, 2412 bp, Homo sapiens
cgcgcggccggtcggaacttcggagggcccgggcggtcgctgcgcggtggcggagcgtctagtggccgccgcaaccggtggctccgggccgccgttgtgaagtgagcgggcctctcccgcgccgcggcccgccgggcaccgccgctggaccccgcgccgacccggcagcgccccgacctgccgctcgggaggtccgcgaccgtttcgatttctgttcctaaagtccgattttggacgctgaaaaggaggctgtggaggggcgagcggcgtcctgggaagcaaggcctgctctgtgcggagcagaaacgccttgtgcgaacagaaataaattcccgcggaaaggatgaaggtggacttttaaatattctccactgaagcaaatgctgcaacaatttgcatttccttcaccaatgtcgtcttgtgccttttcttgttcctactgtaaaggagatgggttagatgttaaacgaagtctcactgtgttgtccaggctggtctcaagctcctgggctcaagcaatacttccacctcagcctcccaaaatgctgggattacagatggagtcttgctcttgttgcccaggctggagtgcaatggcacgatcatggctcactgcaacctctgcctcctgggttcaagcaattctcctgcctcagcctcccaagtagctgggattatgggcatgcaccaccattcctggcactttcatttggacccgtggatacccattgaacagatgcttgaaacctgcaagtaatcttcagatcctagcagaaccataggcctttcctttgttttgggaggatatagcctgcctatatgctgtggaaatgaacggggagcagcagcttgatgcagctgcctcaatgtgtaggacctgggaactgtgttctggtccttagagaggtcctcactttacttatcaatgcagcctacaaacccagccgtgtccttcgggagctccagctggacaaagactctgtgtggcacggatgtggggaagtcctaaaagccaaatataaaggaaagagttatcgggctactgttgagatagtgaaaacagcagatcgggtgactgaattctgccggcaaacctgtatcaaactggaatgctgtcctaacctcttcggtccacggatggttctggataagtgttctgagaactgttctgtacttacaaagaccaaatacacacactattacggaaagaagaaaaataaaagaattgggaggccacctggtgggcatagtaacttagcttgtgccctgaaaaaagccagtaagaggagaaagaggcggaaaaatgtttttgttcataagaagaaacgctcctctgcatctgttgataataccccagcgggctctccccagggaagtgggggtgaagatgaggatgacccagatgaaggggatgatgattccctaagtgaaggcagtacatccgagcagcaggatgagctacaggaagaatcagaaatgtcagaaaaaaagtcatgctcctcttctcccacccaaagtgagatatccacatcgctgcctccagatagacaaaggagaaaaagggagcttcgcaccttttcattttctgacgatgaaaataaacctccttcaccaaaggaaataaggatcgaagttgctgaaaggcttcacctggacagtaaccccttgaagtggagtgtggcagacgttgtgcggttcatcagatccactgactgtgctccattagcaagaatattcctagaccaggaaattgatgggcaggccctgttgctccttacccttcccactgttcaagaatgcatggacttaaaattgggccctgccatcaaactttgccatcacatagagaggatcaagtttgctttttatgagcagtttgccaactgagaaggacaaccaaagtgagctggatctttgaagcacaaatgcagcaaatccttcaccctgctttataagtggagctggaatagtcctggggctctggggcctgcaggtatcagcttgctctctttgcactttcggggaaggaggactcacagtgaggaagcaaaaactgtgcacagaagtggatcacctgctggtggaaatgtggacatctcttgttcagcagatggcagtttttaaaaaataaaggttgtgaggaaaagacttatataagaagaaaagcatttccagtggtgtggcctgaaaacaaagaataacctaggctgctggaaagcacccttttggttgttttcattctgttccctcccattgtagattgaactttgttctctgctttctttttcttggaaagagaggacttagctttaagtcagcactgatttgggactgttcctaaggcatatcagtgcttcattgtcattgtgtttttaaactttttaaaattaaaacagttcattttggggatga

SEQ ID NO: 57834 - DNA, 4215 bp, Homo sapiens
gcacagggggaaaccccgagccatcctcggggggtgatgagaggcgccgccgccggcctccgccggagcgcgggtggaggggggcggggagagctgccggccgccccgctccgccgaacccagcaggaaggagggcgcgagcgggcgagcgcgggcagcacgggaggaaaaagcttccgcgcgggggagcgaaaagacggaaagaaagaaagaaaacgagcgcgagagggggaaaagcgagcgatcgagcgagcgcgcgcgcgaaaactccgggcagcactttcatttggacccgtggatacccattgaacagatgcttgaaacctgcaagtaatcttcagatcctagcagaaccataggcctttcctttgttttgggaggatatagcctgcctatatgctgtggaaatgaacggggagcagcagcttgatgcagatgccggctctggtatggaagaggtagaattaagctgggaagattatctagaagaaacagggtccacagcagttccctatgggtcttttaaacatgtggacacacgtttgcaaaatggatttgctcctgggatgaagctggaggtggctgtgagaacagatcctgagacctactgggttgccaccgttatcactacctgtgagcagttgctccttctccgctatgatggctatggggaggatcggagagcagatttctggtgtgacatcaggaaggctgatctctaccccattgggtggtgtgagcagaataagaagacccttgaagccccagaaggcatcagagataaagtatctgactgggatgagtttctgcggcagaccctgataggagcatgtagtcctcctgttccgctgctagagggcctccgtaatgggaggaatcctttagatctcattgctccaggatccagactagaatgtcaagctttccaggactctttaagcacttggattgttactgtagtagaaaacattggaggaaggctgaagctacgttatgaaggacttgaaagttctgacaattatgaacattggttgtattacttggatccatttcttcatcacgttggttgggctgctcaacagggatatgagcttcagcccccttcagccattagacatctaaaaaatgaagctgagtggcaagagattttggccaaagtgaaagaggaagaggaagagccattaccatcttacttatttaaggacaaacaagttattggcattcatacattctctgtaaacatgaaattggaagctgtagacccctggtctccttttgggatctctcctgctacagttgttaaggtttttgatgagaagtactttctggtggaaatggatgacttgcgtcctgagaaccacgcacggcgatcctttgtgtgccacgccgacagtcctggcatcttccctgtgcagtggagtctgaagaatggcctacacatcagcccccctccaggctacccaagccaggactttgactgggctgactacctcaaacagtgtggtgctgaagctgctccccagaggtgcttccctccgttaatttctgaacatgaatttaaggagaacatgaagctcgaggcggtgaaccccattctccctgaagaagtgtgtgttgctaccatcactgcagtgagaggctcctacctgtggctccagctggagggttctaagaagcctatacctgaatgtattgtgagtgtggaatccatggatatatttcctttgggctggtgtgaaaccaacggccaccccctcagcactcctcgccgagcacgagtatataaacagaggaaaattgcagtggttcagccagaaaaacaagtaccatcctcgaggactgtccacgagggcctgaggaatcaggagctgaactccacagagtcagttatgattaatggaaaatattgctgtccaaagatatacttcaaccaccgttgcttctcagggccatatcttaacaaaggaagaattgctgagctgcctcaatgtgtaggacctgggaactgtgttctggtccttagagaggtcctcactttacttatcaatgcagcctacaaacccagccgtgtccttcgggagctccagctggacaaagactctgtgtggcacggatgtggggaagtcctaaaagccaaatataaaggaaagagttatcgggctactgttgagatagtgaaaacagcagatcgggtgactgaattctgccggcaaacctgtatcaaactggaatgctgtcctaacctcttcggtccacggatggttctggataagtgttctgagaactgttctgtacttacaaagaccaaatacacacactattacggaaagaagaaaaataaaagaattgggaggccacctggtgggcatagtaacttagcttgtgccctgaaaaaagccagtaagaggagaaagaggcggaaaaatgtttttgttcataagaagaaacgctcctctgcatctgttgataataccccagcgggctctccccagggaagtgggggtgaagatgaggatgacccagatgaaggggatgatgattccctaagtgaaggcagtacatccgagcagcaggatgagctacaggaagaatcagaaatgtcagaaaaaaagtcatgctcctcttctcccacccaaagtgagatatccacatcgctgcctccagatagacaaaggagaaaaagggagcttcgcaccttttcattttctgacgatgaaaataaacctccttcaccaaaggaaataaggatcgaagttgctgaaaggcttcacctggacagtaaccccttgaagtggagtgtggcagacgttgtgcggttcatcagatccactgactgtgctccattagcaagaatattcctagaccaggaaattgatgggcaggccctgttgctccttacccttcccactgttcaagaatgcatggacttaaaattgggccctgccatcaaactttgccatcacatagagaggatcaagtttgctttttatgagcagtttgccaactgagaaggacaaccaaagtgagctggatctttgaagcacaaatgcagcaaatccttcaccctgctttataagtggagctggaatagtcctggggctctggggcctgcaggtatcagcttgctctctttgcactttcggggaaggaggactcacagtgaggaagcaaaaactgtgcacagaagtggatcacctgctggtggaaatgtggacatctcttgttcagcagatggcagtttttaaaaaataaaggttgtgaggaaaagacttatataagaagaaaagcatttccagtggtgtggcctgaaaacaaagaataacctaggctgctggaaagcacccttttggttgttttcattctgttccctcccattgtagattgaactttgttctctgctttctttttcttggaaagagaggacttagctttaagtcagcactgatttgggactgttcctaaggcatatcagtgcttcattgtcattgtgtttttaaactttttaaaattaaaacagttcattttggggatgattatgtggctctagggttttgaatgtatagtcacactttgatcattttaaaatcgattcttaggagttcctttgtttactacctctgttgataattgagcttacagccatgtatgaggttttttgtatgatgccatttttaagctacataaacactaaaattatgacagaatttggagggggggaaactgtttgctttcttaaaaacattatatggggcacttacaccagttccttaactgacctgatctgagaactctactgttactgttctccatcttgacccagccgaggctgcctgtgttaagtaacatcaccaagactgttagtatttctgtttaattgccctcttcctattcattctcagagggacttcagtgacttttattttgtgtttacttttctctagagttgtttgtctacctctgtttcatttctaaggtctttactttgggtgaaaatcagtaagtgttccatggacccacagcgaagcccatttgtccttctacctacgcctaatctactccacgtcaatcacactactccccattttttaccacggtaaaattaaatggccggtttgaccttccaaacccccccccattcttccccacactcatcgcctttcccacgttactcttacttatctccccttttatactaatattcttataaaaaaaaaa

SEQ ID NO: 57835 - DNA, 548 bp, Homo sapiens
ggaactgtgttctggtccttagagaggttaaggttctggcctagagcaaaataacttggaaatttcacagcattctcctatggtcatttctacagggagccacatgccatagatgtgacagttctaggttttatcaaaagttactaacttttctcatgttttggacagtgaagagggtatgtaattatttctcctccctaggaaacattcacgtaaacaactcttcacacagcaggttcacctctgtcagggtagaaaggtcttctgtcagagaccagaagagaactatacaaaagtgaactgtgaggttactctatgactgaaaggccgtggctatgtggcattaacctagcgaccgtgataaagctacacatctgctgggctttctgttcttcccagccagtgtgatatgctgcaagtaacagataagagacctttcagccctcagggtggcaagtcaggatctggggaagccagagcgtctggaccagactcctccagccacaagaaggctcagctgtctacacagtggtccaaacaaatataat

SEQ ID NO: 57836 - DNA, 3594 bp, Homo sapiens
cgcgcggccggtcggaacttcggagggcccgggcggtcgctgcgcggtggcggagcgtctagtggccgccgcaaccggtggctccgggccgccgttgtgaagtgagcgggcctctcccgcgccgcggcccgccgggcaccgccgctggaccccgcgccgacccggcagcgccccgacctgccgctcgggaggtccgcgaccgtttcgatttctgttcctaaagtccgattttggacgctgaaaaggaggctgtggaggggcgagcggcgtcctgggaagcaaggcctgctctgtgcggagcagaaacgccttgtgcgaacagaaataaattcccgcggaaaggatgaaggtggacttttaaatattctccactgaagcaaatgctgcaacaatttgcatttccttcaccaatgtcgtcttgtgccttttcttgttcctactgtaaaggagatgggttagatgttcactttcatttggacccgtggatacccattgaacagatgcttgaaacctgcaagtaatcttcagatcctagcagaaccataggcctttcctttgttttgggaggatatagcctgcctatatgctgtggaaatgaacggggagcagcagcttgatgcagatgccggctctggtatggaagaggtagaattaagctgggaagattatctagaagaaacagggtccacagcagttccctatgggtcttttaaacatgtggacacacgtttgcaaaatggatttgctcctgggatgaagctggaggtggctgtgagaacagatcctgagacctactgggttgccaccgttatcactacctgtgagcagttgctccttctccgctatgatggctatggggaggatcggagagcagatttctggtgtgacatcaggaaggctgatctctaccccattgggtggtgtgagcagaataagaagacccttgaagccccagaaggcatcagagataaagtatctgactgggatgagtttctgcggcagaccctgataggagcatgtagtcctcctgttccgctgctagagggcctccgtaatgggaggaatcctttagatctcattgctccaggatccagactagaatgtcaagctttccaggactctttaagcacttggattgttactgtagtagaaaacattggaggaaggctgaagctacgttatgaaggacttgaaagttctgacaattatgaacattggttgtattacttggatccatttcttcatcacgttggttgggctgctcaacagggatatgagcttcagcccccttcagccattagacatctaaaaaatgaagctgagtggcaagagattttggccaaagtgaaagaggaagaggaagagccattaccatcttacttatttaaggacaaacaagttattggcattcatacattctctgtaaacatgaaattggaagctgtagacccctggtctccttttgggatctctcctgctacagttgttaaggtttttgatgagaagtactttctggtggaaatggatgacttgcgtcctgagaaccacgcacggcgatcctttgtgtgccacgccgacagtcctggcatcttccctgtgcagtggagtctgaagaatggcctacacatcagcccccctccaggctacccaagccaggactttgactgggctgactacctcaaacagtgtggtgctgaagctgctccccagaggtgcttccctccgttaatttctgaacatgaatttaaggagaacatgaagctcgaggcggtgaaccccattctccctgaagaagtgtgtgttgctaccatcactgcagtgagaggctcctacctgtggctccagctggagggttctaagaagcctatacctgaatgtattgtgagtgtggaatccatggatatatttcctttgggctggtgtgaaaccaacggccaccccctcagcactcctcgccgagcacgagtatataaacagaggaaaattgcagtggttcagccagaaaaacaagtaccatcctcgaggactgtccacgagggcctgaggaatcaggagctgaactccacagagtcagttatgattaatggaaaatattgctgtccaaagatatacttcaaccaccgttgcttctcagggccatatcttaacaaaggaagaattgctgagctgcctcaatgtgtaggacctgggaactgtgttctggtccttagagaggtcctcactttacttatcaatgcagcctacaaacccagccgtgtccttcgggagctccagctggacaaagactctgtgtggcacggatgtggggaagtcctaaaagccaaatataaaggaaagagttatcgggctactgttgagatagtgaaaacagcagatcgggtgactgaattctgccggcaaacctgtatcaaactggaatgctgtcctaacctcttcggtccacggatggttctggataagtgttctgagaactgttctgtacttacaaagaccaaatacacacactattacggaaagaagaaaaataaaagaattgggaggccacctggtgggcatagtaacttagcttgtgccctgaaaaaagccagtaagaggagaaagaggcggaaaaatgtttttgttcataagaagaaacgctcctctgcatctgttgataataccccagcgggctctccccagggaagtgggggtgaagatgaggatgacccagatgaaggggatgatgattccctaagtgaaggcagtacatccgagcagcaggatgagctacaggaagaatcagaaatgtcagaaaaaaagtcatgctcctcttctcccacccaaagtgagatatccacatcgctgcctccagatagacaaaggagaaaaagggagcttcgcaccttttcattttctgacgatgaaaataaacctccttcaccaaagcaggaaattgatgggcaggccctgttgctccttacccttcccactgttcaagaatgcatggacttaaaattgggccctgccatcaaactttgccatcacatagagaggatcaagtttgctttttatgagcagtttgccaactgagaaggacaaccaaagtgagctggatctttgaagcacaaatgcagcaaatccttcaccctgctttataagtggagctggaatagtcctggggctctggggcctgcaggtatcagcttgctctctttgcactttcggggaaggaggactcacagtgaggaagcaaaaactgtgcacagaagtggatcacctgctggtggaaatgtggacatctcttgttcagcagatggcagtttttaaaaaataaaggttgtgaggaaaagacttatataagaagaaaagcatttccagtggtgtggcctgaaaacaaagaataacctaggctgctggaaagcacccttttggttgttttcattctgttccctcccattgtagattgaactttgttctctgctttctttttcttggaaagagaggacttagctttaagtcagcactgatttgggactgttcctaaggcatatcagtgcttcattgtcattgtgtttttaaactttttaaaattaaaacagttcattttggggatga

SEQ ID NO: 57837 - DNA, 3510 bp, Homo sapiens
gcacagggggaaaccccgagccatcctcggggggtgatgagaggcgccgccgccggcctccgccggagcgcgggtggaggggggcggggagagctgccggccgccccgctccgccgaacccagcaggaaggagggcgcgagcgggcgagcgcgggcagcacgggaggaaaaagcttccgcgcgggggagcgaaaagacggaaagaaagaaagaaaacgagcgcgagagggggaaaagcgagcgatcgagcgagcgcgcgcgcgaaaactccgggcagcactttcatttggacccgtggatacccattgaacagatgcttgaaacctgcaagtaatcttcagatcctagcagaaccataggcctttcctttgttttgggaggatatagcctgcctatatgctgtggaaatgaacggggagcagcagcttgatgcagatgccggctctggtatggaagaggtagaattaagctgggaagattatctagaagaaacagggtccacagcagttccctatgggtcttttaaacatgtggacacacgtttgcaaaatggatttgctcctgggatgaagctggaggtggctgtgagaacagatcctgagacctactgggttgccaccgttatcactacctgtgagcagttgctccttctccgctatgatggctatggggaggatcggagagcagatttctggtgtgacatcaggaaggctgatctctaccccattgggtggtgtgagcagaataagaagacccttgaagccccagaaggcatcagagataaagtatctgactgggatgagtttctgcggcagaccctgataggagcatgtagtcctcctgttccgctgctagagggcctccgtaatgggaggaatcctttagatctcattgctccaggatccagactagaatgtcaagctttccaggactctttaagcacttggattgttactgtagtagaaaacattggaggaaggctgaagctacgttatgaaggacttgaaagttctgacaattatgaacattggttgtattacttggatccatttcttcatcacgttggttgggctgctcaacagggatatgagcttcagcccccttcagccattagacatctaaaaaatgaagctgagtggcaagagattttggccaaagtgaaagaggaagaggaagagccattaccatcttacttatttaaggacaaacaagttattggcattcatacattctctgtaaacatgaaattggaagctgtagacccctggtctccttttgggatctctcctgctacagttgttaaggtttttgatgagaagtactttctggtggaaatggatgacttgcgtcctgagaaccacgcacggcgatcctttgtgtgccacgccgacagtcctggcatcttccctgtgcagtggagtctgaagaatggcctacacatcagcccccctccaggctacccaagccaggactttgactgggctgactacctcaaacagtgtggtgctgaagctgctccccagaggtgcttccctccgttaatttctgaacatgaatttaaggagaacatgaagctcgaggcggtgaaccccattctccctgaagaagtgtgtgttgctaccatcactgcagtgagaggctcctacctgtggctccagctggagggttctaagaagcctatacctgaatgtattgtgagtgtggaatccatggatatatttcctttgggctggtgtgaaaccaacggccaccccctcagcactcctcgccgagcacgagtatataaacagaggaaaattgcagtggttcagccagaaaaacaagtaccatcctcgaggactgtccacgagggcctgaggaatcaggagctgaactccacagagtcagttatgattaatggaaaatattgctgtccaaagatatacttcaaccaccgttgcttctcagggccatatcttaacaaaggaagaattgctgagctgcctcaatgtgtaggacctgggaactgtgttctggtccttagagaggtcctacaaacccagccgtgtccttcgggagctccagctggacaaagactctgtgtggcacggatgtggggaagtcctaaaagccaaatataaaggaaagagttatcgggctactgttgagatagtgaaaacagcagatcgggtgactgaattctgccggcaaacctgtatcaaactggaatgctgtcctaacctcttcggtccacggatggttctggataagtgttctgagaactgttctgtacttacaaagaccaaatacacacactattacggaaagaagaaaaataaaagaattgggaggccacctggtgggcatagtaacttagcttgtgccctgaaaaaagccagtaagaggagaaagaggcggaaaaatgtttttgttcataagaagaaacgctcctctgcatctgttgataataccccagcgggctctccccagggaagtgggggtgaagatgaggatgacccagatgaaggggatgatgattccctaagtgaaggcagtacatccgagcagcaggatgagctacaggaagaatcagaaatgtcagaaaaaaagtcatgctcctcttctcccacccaaagtgagatatccacatcgctgcctccagatagacaaaggagaaaaagggagcttcgcaccttttcattttctgacgatgaaaataaacctccttcaccaaaggaaataaggatcgaagttgctgaaaggcttcacctggacagtaaccccttgaagtggagtgtggcagacgttgtgcggttcatcagatccactgactgtgctccattagcaagaatattcctagaccaggaaattgatgggcaggccctgttgctccttacccttcccactgttcaagaatgcatggacttaaaattgggccctgccatcaaactttgccatcacatagagaggatcaagtttgctttttatgagcagtttgccaactgagaaggacaaccaaagtgagctggatctttgaagcacaaatgcagcaaatccttcaccctgctttataagtggagctggaatagtcctggggctctggggcctgcaggtatcagcttgctctctttgcactttcggggaaggaggactcacagtgaggaagcaaaaactgtgcacagaagtggatcacctgctggtggaaatgtggacatctcttgttcagcagatggcagtttttaaaaaataaaggttgtgaggaaaagacttatataagaagaaaagcatttccagtggtgtggcctgaaaacaaagaataacctaggctgctggaaagcacccttttggttgttttcattctgttccctcccattgtagattgaactttgttctctgctttctttttcttggaaagagaggacttagctttaagtcagcactgatttgggactgttcctaaggcatatcagtgcttcattgtcattgtgtttttaaactttttaaaattaaaacagttcattttggggatga

SEQ ID NO: 57838 - DNA, 2816 bp, Homo sapiens
gcacagggggaaaccccgagccatcctcggggggtgatgagaggcgccgccgccggcctccgccggagcgcgggtggaggggggcggggagagctgccggccgccccgctccgccgaacccagcaggaaggagggcgcgagcgggcgagcgcgggcagcacgggaggaaaaagcttccgcgcgggggagcgaaaagacggaaagaaagaaagaaaacgagcgcgagagggggaaaagcgagcgatcgagcgagcgcgcgcgcgaaaactccgggcagcactttcatttggacccgtggatacccattgaacagatgcttgaaacctgcaagtaatcttcagatcctagcagaaccataggcctttcctttgttttgggaggatatagcctgcctatatgctgtggaaatgaacgctgagtggcaagagattttggccaaagtgaaagaggaagaggaagagccattaccatcttacttatttaaggacaaacaagttattggcattcatacattctctgtaaacatgaaattggaagctgtagacccctggtctccttttgggatctctcctgctacagttgttaaggtttttgatgagaagtactttctggtggaaatggatgacttgcgtcctgagaaccacgcacggcgatcctttgtgtgccacgccgacagtcctggcatcttccctgtgcagtggagtctgaagaatggcctacacatcagcccccctccaggctacccaagccaggactttgactgggctgactacctcaaacagtgtggtgctgaagctgctccccagaggtgcttccctccgttaatttctgaacatgaatttaaggagaacatgaagctcgaggcggtgaaccccattctccctgaagaagtgtgtgttgctaccatcactgcagtgagaggctcctacctgtggctccagctggagggttctaagaagcctatacctgaatgtattgtgagtgtggaatccatggatatatttcctttgggctggtgtgaaaccaacggccaccccctcagcactcctcgccgagcacgagtatataaacagaggaaaattgcagtggttcagccagaaaaacaagtaccatcctcgaggactgtccacgagggcctgaggaatcaggagctgaactccacagagtcagttatgattaatggaaaatattgctgtccaaagatatacttcaaccaccgttgcttctcagggccatatcttaacaaaggaagaattgctgagctgcctcaatgtgtaggacctgggaactgtgttctggtccttagagaggtcctcactttacttatcaatgcagcctacaaacccagccgtgtccttcgggagctccagctggacaaagactctgtgtggcacggatgtggggaagtcctaaaagccaaatataaaggaaagagttatcgggctactgttgagatagtgaaaacagcagatcgggtgactgaattctgccggcaaacctgtatcaaactggaatgctgtcctaacctcttcggtccacggatggttctggataagtgttctgagaactgttctgtacttacaaagaccaaatacacacactattacggaaagaagaaaaataaaagaattgggaggccacctggtgggcatagtaacttagcttgtgccctgaaaaaagccagtaagaggagaaagaggcggaaaaatgtttttgttcataagaagaaacgctcctctgcatctgttgataataccccagcgggctctccccagggaagtgggggtgaagatgaggatgacccagatgaaggggatgatgattccctaagtgaaggcagtacatccgagcagcaggatgagctacaggaagaatcagaaatgtcagaaaaaaagtcatgctcctcttctcccacccaaagtgagatatccacatcgctgcctccagatagacaaaggagaaaaagggagcttcgcaccttttcattttctgacgatgaaaataaacctccttcaccaaaggaaataaggatcgaagttgctgaaaggcttcacctggacagtaaccccttgaagtggagtgtggcagacgttgtgcggttcatcagatccactgactgtgctccattagcaagaatattcctagaccaggaaattgatgggcaggccctgttgctccttacccttcccactgttcaagaatgcatggacttaaaattgggccctgccatcaaactttgccatcacatagagaggatcaagtttgctttttatgagcagtttgccaactgagaaggacaaccaaagtgagctggatctttgaagcacaaatgcagcaaatccttcaccctgctttataagtggagctggaatagtcctggggctctggggcctgcaggtatcagcttgctctctttgcactttcggggaaggaggactcacagtgaggaagcaaaaactgtgcacagaagtggatcacctgctggtggaaatgtggacatctcttgttcagcagatggcagtttttaaaaaataaaggttgtgaggaaaagacttatataagaagaaaagcatttccagtggtgtggcctgaaaacaaagaataacctaggctgctggaaagcacccttttggttgttttcattctgttccctcccattgtagattgaactttgttctctgctttctttttcttggaaagagaggacttagctttaagtcagcactgatttgggactgttcctaaggcatatcagtgcttcattgtcattgtgtttttaaactttttaaaattaaaacagttcattttggggatga

SEQ ID NO: 57839 - DNA, 4447 bp, Homo sapiens
gcacagggggaaaccccgagccatcctcggggggtgatgagaggcgccgccgccggcctccgccggagcgcgggtggaggggggcggggagagctgccggccgccccgctccgccgaacccagcaggaaggagggcgcgagcgggcgagcgcgggcagcacgggaggaaaaagcttccgcgcgggggagcgaaaagacggaaagaaagaaagaaaacgagcgcgagagggggaaaagcgagcgatcgagcgagcgcgcgcgcgaaaactccgggcagcactttcatttggacccgtggatacccattgaacagatgcttgaaacctgcaagtaatcttcagatcctagcagaaccataggcctttcctttgttttgggaggatatagcctgcctatatgctgtggaaatgaacggggagcagcagcttgatgcagatgccggctctggtatggaagaggtagaattaagctgggaagattatctagaagaaacagggtccacagcagttccctatgggtcttttaaacatgtggacacacgtttgcaaaatggatttgctcctgggatgaagctggaggtggctgtgagaacagatcctgagacctactgggttgccaccgttatcactacctgtgagcagttgctccttctccgctatgatggctatggggaggatcggagagcagatttctggtgtgacatcaggaaggctgatctctaccccattgggtggtgtgagcagaataagaagacccttgaagccccagaaggcatcagagataaagtatctgactgggatgagtttctgcggcagaccctgataggagcatgtagtcctcctgttccgctgctagagggcctccgtaatgggaggaatcctttagatctcattgctccaggatccagactagaatgtcaagctttccaggactctttaagcacttggattgttactgtagtagaaaacattggaggaaggctgaagctacgttatgaaggacttgaaagttctgacaattatgaacattggttgtattacttggatccatttcttcatcacgttggttgggctgctcaacagggatatgagcttcagcccccttcagccattagacatctaaaaaatgaagctgagtggcaagagattttggccaaagtgaaagaggaagaggaagagccattaccatcttacttatttaaggacaaacaagttattggcattcatacattctctgtaaacatgaaattggaagctgtagacccctggtctccttttgggatctctcctgctacagttgttaaggtttttgatgagaagtactttctggtggaaatggatgacttgcgtcctgagaaccacgcacggcgatcctttgtgtgccacgccgacagtcctggcatcttccctgtgcagtggagtctgaagaatggcctacacatcagcccccctccaggctacccaagccaggactttgactgggctgactacctcaaacagtgtggtgctgaagctgctccccagaggtgcttccctccgttaatttctgaacatgaatttaaggagaacatgaagctcgaggcggtgaaccccattctccctgaagaagtgtgtgttgctaccatcactgcagtgagaggctcctacctgtggctccagctggagggttctaagaagcctatacctgaatgtattgtgagtgtggaatccatggatatatttcctttgggctggtgtgaaaccaacggccaccccctcagcactcctcgccgagcacgagtatataaacagaggaaaattgcagtggttcagccagaaaaacaagtaccatcctcgaggactgtccacgagggcctgaggaatcaggagctgaactccacagagtcagttatgattaatggaaaatattgctgtccaaagatatacttcaaccaccgttgcttctcagggccatatcttaacaaaggaagaattgctgagctgcctcaatgtgtaggacctgggaactgtgttctggtccttagagaggtcctcactttacttatcaatgcagcctacaaacccagccgtgtccttcgggagctccagctggacaaagactctgtgtggcacggatgtggggaagtcctaaaagccaaatataaaggaaagagttatcgggctactgttgagatagtgaaaacagcagatcgggtgactgaattctgccggcaaacctgtatcaaactggaatgctgtcctaacctcttcggtccacggatggttctggataagtgttctgagaactgttctgtacttacaaagaccaaatacacacactattacggaaagaagaaaaataaaagaattgggaggccacctggtgggcatagtaacttagcttgtgccctgaaaaaagccagtaagaggagaaagaggcggaaaaatgtttttgttcataagaagaaacgctcctctgcatctgttgataataccccagcgggctctccccagggaagtgggggtgaagatgaggatgacccagatgaaggggatgatgattccctaagtgaaggcagtacatccgagcagcaggatgagctacaggaagaatcagaaatgtcagaaaaaaagtcatgctcctcttctcccacccaaagtgagatatccacatcgctgcctccagatagacaaaggagaaaaagggagcttcgcaccttttcattttctgacgatgaaaataaacctccttcaccaaaggaaataaggatcgaagttgctgaaaggcttcacctggacagtaaccccttgaagtggagtgtggcagacgttgtgcggttcatcagatccactgactgtgctccattagcaagaatattcctagaccaggaaattgatgggcaggccctgttgctccttacccttcccactgttcaagaatgcatggacttaaaattgggccctgccatcaaactttgccatcacatagagaggatcaagtttgctttttatgagcagtttgccaactgagaaggacaaccaaagtgagctggatctttgaagcacaaatgcagcaaatccttcaccctgctttataagtggaaatgtggacatctcttgttcagcagatggcagtttttaaaaaataaaggttgtgaggaaaagacttatataagaagaaaagcatttccagtggtgtggcctgaaaacaaagaataacctaggctgctggaaagcacccttttggttgttttcattctgttccctcccattgtagattgaactttgttctctgctttctttttcttggaaagagaggacttagctttaagtcagcactgatttgggactgttcctaaggcatatcagtgcttcattgtcattgtgtttttaaactttttaaaattaaaacagttcattttggggatgattatgtggctctagggttttgaatgtatagtcacactttgatcattttaaaatcgattcttaggagttcctttgtttactacctctgttgataattgagcttacagccatgtatgaggttttttgtatgatgccatttttaagctacataaacactaaaattatgacagaatttggagggggggaaactgtttgctttcttaaaaacattatatggggcacttacaccagttccttaactgacctgatctgagaactctactgttactgttctccatcttgacccagccgaggctgcctgtgttaagtaacatcaccaagactgttagtatttctgtttaattgccctcttcctattcattctcagagggacttcagtgacttttattttgtgtttacttttctctagagttgtttgtctacctctgtttcatttctaaggtctttactttgggtgaaaatcagtaagtgttccatggacccacagcgaagcccatttgtccttctttccaggtgtctccagtgtagaagcacaccacagaaaacatgttttggagggtaacgcagagcatggagtttctgttagcagtgtcctcagtggcaggataaatactgagatgtggttaaggattctggaaacctctttgcctagccacacttagacttttttcagctaatcctttaaattgaatataatctttagtccgaggattcccatttaaacaactcagtattcttttaagtgtgtcttttagcccagctcaagttaacatgaaactccaggtgaattttcacttactattccattgctagctattatagaataatagcgtttgctgcactattctagtcatgaggagtgaggaaaaacatacataggttgtctcccttaaatggtttgctttgctgaattttttttatcctaatcacctgcaaatttataacccaatcattcttcctcaagatttgaaaatgttttaatcctgcaaactgggtgaattctaaacagctctacaaatataaggaaatattacagcaaa

SEQ ID NO: 57840 - DNA, 496 bp, Homo sapiens
gatccccgacgaggggcaggcaaacgggcgcagtgcccgcggcggcggcacgcgcgcatctgggatccggccgcttctccgctcatgccatcttgtccgagccagtcacgtgcgggcgacagccgcgcgcttcgccgggccggtactccaggtccgacccgcgaacccctctgggatccccgccgctctgtctacaacccgaggtgaggcgcaggctggatcggggctgggccagggcgggcactgggttcccggggacgcgtctcctcttccgggccgttccgctcggggccacagcgccgtcgggggcccgaggcgccgccgcgtgtcctgcgccacggcctcggggccgtccgcgccgagttgctggctgggggcgtgggtggcccgcggcgccggacccccggcacaccagcccgcggagtccttgcctcccgcgcggccccagccaggagggatggcgctggggcgggagcggggcagccgggcccgggag

SEQ ID NO: 57841 - DNA, 1245 bp, Homo sapiens
taggctgcgttgaggcccaaccagggggaggcggggccaaggccaggcctgactaaacctggagactcgggtggccgaggggcttcataccagctgaagagcgacaagccgctggcagccgcggatctcaccgccgctcagggtttttagaacttcagccataaaaatgggcagaattttccttgatcatatcggtggtacccgtctgttttcttgtgcaaactgtgatacgatcctgaccaaccgctcagaactcatctccactcgtttcacaggcgccactggcagagcatttctttttaacaaggtagttaacctgcagtacagcgaagttcaagatcgggtcatgctcactggccgccacatggttcgagatgtgagctgcaaaaactgcaatagcaaactgggatggatctatgagtttgccactgaagacagccagcgatataaggaaggccgcgtgatcctggaacgtgctctagttcgagagagtgagggctttgaggagcatgtaccatctgataactcttgaagatacagagagaaatccatcttttcccaggtctccttcactgaaaacaaaaatctacttacatacactgtcaccttagcatcagagtcggattaatgaactgcggaacaagaggttgtgagaatctaagatggaacctttctttctttctttctttttttttaaattttgtattttccatccaacagcagtgtgtagagagaatattatgcagatgccgttaattttttaccctatgtttacatcttgaggcagcagagtctgtctgcagctatgtggtgagctatgtaaggaaaaaaatctgggctgttagagtgaaaaagtgtgttttatgtcaattgtgaaaggaaaatgttaggagtatggtttttaaacttgggcttcattttaaacttttttttttaaacccagttatttcacttgatttgctagcttcagagaagagatccgaatctgtgcccagcgctaaaggctcagtgttagcatggcttgtgctggccggtgtgccatattcttgttggagatgaaccgtagcaccagagcccattcttccttgtcagtcttggcccaaagatgtcaccattcctagttatttgtcaccacataattggtgttgattggaaactttttctgagatgggacagaactgctgggttgtctttttccatgtaacttaagcatagtaatataaataaagtaatagttggatgctt

SEQ ID NO: 57842 - DNA, 2552 bp, Homo sapiens
taggctgcgttgaggcccaaccagggggaggcggggccaaggccaggcctgactaaacctggagactcgggtggccgaggggcttcataccagctgaagagcgacaagccgctggcagccgcggatctcaccgccgctcagggtttttagaacttcagccataaaaatgggcagaattttccttgatcatatcggtggtacccgtctgttttcttgtgcaaactgtgatacgatcctgaccaaccgctcagaactcatctccactcgtttcacaggcgccactggcagagcatttctttttaacaaggtagttaacctgcagtacagcgaagttcaagatcgggtcatgctcactggccgccacatggttcgagatgtgagctgcaaaaactgcaatagcaaactgggatggatctatgagtttgccactgaagacagccagcgatataaggaaggccgcgtgatcctggaacgtgctctagttcgagagagtgagggctttgaggagcatgtaccatctgataactcttgaagatacagagagaaatccatcttttcccaggtctccttcactgaaaacaaaaatctacttacatacactgtcaccttagcatcagagtcggattaatgaactgcggaacaagaggttgtgagaatctaagatggaacctttctttctttctttctttttttttaaattttgtattttccatccaacagcagtgtgtagagagaatattatgcagatgccgttaattttttaccctatgtttacatcttgaggcagcagagtctgtctgcagctatgtggtgagctatgtaaggaaaaaaatctgggctgttagagtgaaaaagtgtgttttatgtcaattgtgaaaggaaaatgttaggagtatggtttttaaacttgggcttcattttaaacttttttttttaaacccagttatttcacttgatttgctagcttcagagaagagatccgaatctgtgcccagcgctaaaggctcagtgttagcatggcttgtgctggccggtgtgccatattcttgttggagatgaaccgtagcaccagagcccattcttccttgtcagtcttggcccaaagatgtcaccattcctagttatttgtcaccacataattggtgttgattggaaactttttctgagatgggacagaactgctgggttgtctttttccatgtaacttaagcatagtaatataaataaagtaatagttggatgcttttggtcctgtgttgcttttaaaaacaccttataaaagaggagagtatttgataagcaattttcatagtagtaaagttttttttcatctcttaaactaaattgaccatgcatataatattctttgtttaaatgaaagcatactgttgaaacccgcagtgttgcatttagaaaacagttgaacagaatgtcaatgtgcattcatgcaaaaaaacatttaatctgcatctgttttagaaaagggggaaatgaagcaacttgtctaaaaatactgctttacaaagcatttcagcctttccccctcagttttgcattgattttttgacaagtctgtagagcctaatagtttccatcaaaggcctagatctcttatttagcatttttttcagctcttctctcagaagttcagctgttgaaacgaaaactgtactttgtaccctcacatacaaagggatcaaatttgacctggtgttattttagccccaaatttatgacattacacaatattaaaatgtaaatgtttctttacccaaactacttctagatattctagtatttgcttctggtggaattaaatgacggtaaaattggctaattatttgaatgaatgaatggatggatgttttgcatgctcaatttctaggtcctttgtctagaaaggaaatttgcctcagttgaattagtgaaatatttctgtcgttgatattaaaagtgacttctgagtacagttaagttcctcctatttgccactgggctgttggttagaagcataggtaactgattaagtaggtatgatactgcatttgaaataagtggacacaaactatcctttctccaccatggactcaatctgagaacaacagcattcatttccattcatttccatactggcttttgattatatgcagattcctagtagcatgccttacctacagcactatgtgcatttgctgtcacaataaagtatattttgtcttgcaaaaaaaaaaaactgctgcttattttccactgatcttgtctagtgatcatcttaatttttatctctgaacacatacttggtatctttgagtacctgtagctttcttcatttggcaatgatagtgatgtctgacttgattaactgcctaattcacacatgaagacattgactttgccagtattaacttctctgagatcattttgccttagatactgataactatagttcagtatatataaacaaaaaaatttcatattactaggttaacttttaggtaactggcaggtaccagcagcaagctcctctgtgccttttaaaaacttccatttgc

SEQ ID NO: 57843 - DNA, 2283 bp, Homo sapiens
taggctgcgttgaggcccaaccagggggaggcggggccaaggccaggcctgactaaacctggagactcgggtggccgaggggcttcataccagctgaagagcgacaagccgctggcagccgcggatctcaccgccgctcaggagatctgttggtaatctgaggatttttattctacgtcgtcttgacagatggaaaacctgaagtttttagaacttcagccataaaaatgggcagaattttccttgatcatatcggtggtacccgtctgttttcttgtgcaaactgtgatacgatcctgaccaaccgctcagaactcatctccactcgtttcacaggcgccactggcagagcatttctttttaacaaggtagttaacctgcagtacagcgaagttcaagatcgggtcatgctcactggccgccacatggttcgagatgtgagctgcaaaaactgcaatagcaaactgggatggatctatgagtttgccactgaagacagccagcgatataaggaaggccgcgtgatcctggaacgtgctctagttcgagagagtgagggctttgaggagcatgtaccatctgataactcttgaagatacagagagaaatccatcttttcccaggtctccttcactgaaaacaaaaatctacttacatacactgtcaccttagcatcagagtcggattaatgaactgcggaacaagaggttgtgagaatctaagatggaacctttctttctttctttctttttttttaaattttgtattttccatccaacagcagtgtgtagagagaatattatgcagatgccgttaattttttaccctatgtttacatcttgaggcagcagagtctgtctgcagctatgtggtgagctatgtaaggaaaaaaatctgggctgttagagtgaaaaagtgtgttttatgtcaattgtgaaaggaaaatgttaggagtatggtttttaaacttgggcttcattttaaacttttttttttaaacccagttatttcacttgatttgctagcttcagagaagagatccgaatctgtgcccagcgctaaaggctcagtgttagcatggcttgtgctggccggtgtgccatattcttgttggagatgaaccgtagcaccagagcccattcttccttgtcagtcttggcccaaagatgtcaccattcctagttatttgtcaccacataattggtgttgattggaaactttttctgagatgggacagaactgctgggttgtctttttccatgtaacttaagcatagtaatataaataaagtaatagttggatgcttttggtcctgtgttgcttttaaaaacaccttataaaagaggagagtatttgataagcaattttcatagtagtaaagttttttttcatctcttaaactaaattgaccatgcatataatattctttgtttaaatgaaagcatactgttgaaacccgcagtgttgcatttagaaaacagttgaacagaatgtcaatgtgcattcatgcaaaaaaacatttaatctgcatctgttttagaaaagggggaaatgaagcaacttgtctaaaaatactgctttacaaagcatttcagcctttccccctcagttttgcattgattttttgacaagtctgtagagcctaatagtttccatcaaaggcctagatctcttatttagcatttttttcagctcttctctcagaagttcagctgttgaaacgaaaactgtactttgtaccctcacatacaaagggatcaaatttgacctggtgttattttagccccaaatttatgacattacacaatattaaaatgtaaatgtttctttacccaaactacttctagatattctagtatttgcttctggtggaattaaatgacggtaaaattggctaattatttgaatgaatgaatggatggatgttttgcatgctcaatttctaggtcctttgtctagaaaggaaatttgcctcagttgaattagtgaaatatttctgtcgttgatattaaaagtgacttctgagtacagttaagttcctcctatttgccactgggctgttggttagaagcataggtaactgattaagtaggtatgatactgcatttgaaataagtggacacaaactatcctttctccaccatggactcaatctgagaacaacagcattcatttccattcatttccatactggcttttgattatatgcagattcctagtagcatgccttacctacagcactatgtgcatttgctgtcacaataaagtatattttgtcttgca

SEQ ID NO: 57844 - DNA, 691 bp, Homo sapiens
taggctgcgttgaggcccaaccagggggaggcggggccaaggccaggcctgactaaacctggagactcgggtggccgaggggcttcataccagctgaagagcgacaagccgctggcagccgcggatctcaccgccgctcaggagatctgttggtaatctgaggatttttattctacgtcgtcttgacagatggaaaacctgaagtaacttcgggctaaccttgtgtttttggaaaattagtagacttggtggtgaagaaactgggaggagtaggatattagctaactttgcatagccacatatagagcgtcgcagctgcattccaccaaagaggaaccaaaaggcctgtggtgttcccagggtacatattcatgccagaagtgaagtgccttggtgaattcgtttcctgaaagtttatcgcatacttgtactgggttagcttatctttcccttattctgttctcattgctttagccttatgccagcctggaccatcttggaggcagtgtaggatcatggaagaactttgaattagtcttgtgcaaactgtgatacgatcctgaccaaccgctcagaactcatctccactcgtttcacaggcgccactggcagagcatttctttttaacaagagtaaccctgagtacaacgaagtcaagatcggtcatgttactggccgcacatggttcagg

SEQ ID NO: 57845 - DNA, 2222 bp, Homo sapiens
taggctgcgttgaggcccaaccagggggaggcggggccaaggccaggcctgactaaacctggagactcgggtggccgaggggcttcataccagctgaagagcgacaagccgctggcagccgcggatctcaccgccgctcagggtttttagaacttcagccataaaaatgggcagaattttccttgatcatatcggtggtacccgtctgttttcttgtgcaaactgtgatacgatcctgaccaaccgctcagaactcatctccactcgtttcacaggcgccactggcagagcatttctttttaacaaggtagttaacctgcagtacagcgaagttcaagatcgggtcatgctcactggccgccacatggttcgagatgtgagctgcaaaaactgcaatagcaaactgggatggatctatgagtttgccactgaagacagccagcgatataaggaaggccgcgtgatcctggaacgtgctctagttcgagagagtgagggctttgaggagcatgtaccatctgataactcttgaagatacagagagaaatccatcttttcccaggtctccttcactgaaaacaaaaatctacttacatacactgtcaccttagcatcagagtcggattaatgaactgcggaacaagaggttgtgagaatctaagatggaacctttctttctttctttctttttttttaaattttgtattttccatccaacagcagtgtgtagagagaatattatgcagatgccgttaattttttaccctatgtttacatcttgaggcagcagagtctgtctgcagctatgtggtgagctatgtaaggaaaaaaatctgggctgttagagtgaaaaagtgtgttttatgtcaattgtgaaaggaaaatgttaggagtatggtttttaaacttgggcttcattttaaacttttttttttaaacccagttatttcacttgatttgctagcttcagagaagagatccgaatctgtgcccagcgctaaaggctcagtgttagcatggcttgtgctggccggtgtgccatattcttgttggagatgaaccgtagcaccagagcccattcttccttgtcagtcttggcccaaagatgtcaccattcctagttatttgtcaccacataattggtgttgattggaaactttttctgagatgggacagaactgctgggttgtctttttccatgtaacttaagcatagtaatataaataaagtaatagttggatgcttttggtcctgtgttgcttttaaaaacaccttataaaagaggagagtatttgataagcaattttcatagtagtaaagttttttttcatctcttaaactaaattgaccatgcatataatattctttgtttaaatgaaagcatactgttgaaacccgcagtgttgcatttagaaaacagttgaacagaatgtcaatgtgcattcatgcaaaaaaacatttaatctgcatctgttttagaaaagggggaaatgaagcaacttgtctaaaaatactgctttacaaagcatttcagcctttccccctcagttttgcattgattttttgacaagtctgtagagcctaatagtttccatcaaaggcctagatctcttatttagcatttttttcagctcttctctcagaagttcagctgttgaaacgaaaactgtactttgtaccctcacatacaaagggatcaaatttgacctggtgttattttagccccaaatttatgacattacacaatattaaaatgtaaatgtttctttacccaaactacttctagatattctagtatttgcttctggtggaattaaatgacggtaaaattggctaattatttgaatgaatgaatggatggatgttttgcatgctcaatttctaggtcctttgtctagaaaggaaatttgcctcagttgaattagtgaaatatttctgtcgttgatattaaaagtgacttctgagtacagttaagttcctcctatttgccactgggctgttggttagaagcataggtaactgattaagtaggtatgatactgcatttgaaataagtggacacaaactatcctttctccaccatggactcaatctgagaacaacagcattcatttccattcatttccatactggcttttgattatatgcagattcctagtagcatgccttacctacagcactatgtgcatttgctgtcacaataaagtatattttgtcttgca

SEQ ID NO: 57846 - DNA, 2168 bp, Homo sapiens
taggctgcgttgaggcccaaccagggggaggcggggccaaggccaggcctgactaaacctggagactcgggtggccgaggggcttcataccagctgaagagcgacaagccgctggcagccgcggatctcaccgccgctcagggtttttagaacttcagccataaaaatgggcagaattttccttgatcatatcggtggtacccgtctgttttcttgtgcaaactgtgatacgatcctgaccaaccgctcagaactcatctccactcgtttcacaggcgccactggcagagcatttctttttaacaaggtagttaacctgcagtacagcgaagttcaagatcgggtcatgctcactggccgccacatggttcgagatgtgagctgcaaaaactgcaatagcaaactgggatggatctatgagtttgccactgaagacagccagcgatataaggaaggccgcgtgatcctggaacgtgctctagttcgagagagtgagggctttgaggagcatgtaccatctgataactcttgaagatacagagagaaatccatcttttcccaggtctccttcactgaaaacaaaaatctacttacatacactgtcaccttagcatcagagtcggattaatgaactgcggaacaagaggttgtgagaatctaagatggaacctttctttctttctttctttttttttaaattttgtattttccatccaacagcagtgtgtagagagaatattatgcagatgccgttaattttttaccctatgtttacatcttgaggcagcagagtctgtctgcagctatgtggtgagctatgtaaggaaaaaaatctgggctgttagagtgaaaaagtgtgttttatgtcaattgtgaaaggaaaatgttaggagtatggtttttaaacttgggcttcattttaaacttttttttttaaacccagttatttcacttgatttgctagcttcagagaagagatccgaatctgtgcccagcgctaaaggctcagtgttagcatggcttgtgctggccggtgtgccatattcttgttggagatgaaccgtagcaccagagcccattcttccttgtcagtcttggcccaaagatgtcaccattcctagttatttgtcaccacataattggtgttgattggaaactttttctgagatgggacagaactgctgggttgtctttttccatgtaacttaagcatagtaatataaataaagtaatagttggatgcttttggtcctgtgttgcttttaaaaacaccttataaaagaggagagtatttgataagcaattttcatagtagtaaagttttttttcatctcttaaactaaattgaccatgcatataatattctttgtttaaatgaaagcatactgttgaaacccgcagtgttgcatttagaaaacagttgaacagaatgtcaatgtgcattcatgcaaaaaaacatttaatctgcatctgttttagaaaagggggaaatgaagcaacttgtctattttgacaagtctgtagagcctaatagtttccatcaaaggcctagatctcttatttagcatttttttcagctcttctctcagaagttcagctgttgaaacgaaaactgtactttgtaccctcacatacaaagggatcaaatttgacctggtgttattttagccccaaatttatgacattacacaatattaaaatgtaaatgtttctttacccaaactacttctagatattctagtatttgcttctggtggaattaaatgacggtaaaattggctaattatttgaatgaatgaatggatggatgttttgcatgctcaatttctaggtcctttgtctagaaaggaaatttgcctcagttgaattagtgaaatatttctgtcgttgatattaaaagtgacttctgagtacagttaagttcctcctatttgccactgggctgttggttagaagcataggtaactgattaagtaggtatgatactgcatttgaaataagtggacacaaactatcctttctccaccatggactcaatctgagaacaacagcattcatttccattcatttccatactggcttttgattatatgcagattcctagtagcatgccttacctacagcactatgtgcatttgctgtcacaataaagtatattttgtcttgca

SEQ ID NO: 57847 - DNA, 2168 bp, Homo sapiens
taggctgcgttgaggcccaaccagggggaggcggggccaaggccaggcctgactaaacctggagactcgggtggccgaggggcttcataccagctgaagagcgacaagccgctggcagccgcggatctcaccgccgctcagggtttttagaacttcagccataaaaatgggcagaattttccttgatcatatcggtggtacccgtctgttttcttgtgcaaactgtgatacgatcctgaccaaccgctcagaactcatctccactcgtttcacaggcgccactggcagagcatttctttttaacaaggtagttaacctgcagtacagcgaagttcaagatcgggtcatgctcactggccgccacatggttcgagatgtgagctgcaaaaactgcaatagcaaactgggatggatctatgagtttgccactgaagacagccagcgatataaggaaggccgcgtgatcctggaacgtgctctagttcgagagagtgagggctttgaggagcatgtaccatctgataactcttgaagatacagagagaaatccatcttttcccaggtctccttcactgaaaacaaaaatctacttacatacactgtcaccttagcatcagagtcggattaatgaactgcggaacaagaggttgtgagaatctaagatggaacctttctttctttctttctttttttttaaattttgtattttccatccaacagcagtgtgtagagagaatattatgcagatgccgttaattttttaccctatgtttacatcttgaggcagcagagtctgtctgcagctatgtggtgagctatgtaaggaaaaaaatctgggctgttagagtgaaaaagtgtgttttatgtcaattgtgaaaggaaaatccagttatttcacttgatttgctagcttcagagaagagatccgaatctgtgcccagcgctaaaggctcagtgttagcatggcttgtgctggccggtgtgccatattcttgttggagatgaaccgtagcaccagagcccattcttccttgtcagtcttggcccaaagatgtcaccattcctagttatttgtcaccacataattggtgttgattggaaactttttctgagatgggacagaactgctgggttgtctttttccatgtaacttaagcatagtaatataaataaagtaatagttggatgcttttggtcctgtgttgcttttaaaaacaccttataaaagaggagagtatttgataagcaattttcatagtagtaaagttttttttcatctcttaaactaaattgaccatgcatataatattctttgtttaaatgaaagcatactgttgaaacccgcagtgttgcatttagaaaacagttgaacagaatgtcaatgtgcattcatgcaaaaaaacatttaatctgcatctgttttagaaaagggggaaatgaagcaacttgtctaaaaatactgctttacaaagcatttcagcctttccccctcagttttgcattgattttttgacaagtctgtagagcctaatagtttccatcaaaggcctagatctcttatttagcatttttttcagctcttctctcagaagttcagctgttgaaacgaaaactgtactttgtaccctcacatacaaagggatcaaatttgacctggtgttattttagccccaaatttatgacattacacaatattaaaatgtaaatgtttctttacccaaactacttctagatattctagtatttgcttctggtggaattaaatgacggtaaaattggctaattatttgaatgaatgaatggatggatgttttgcatgctcaatttctaggtcctttgtctagaaaggaaatttgcctcagttgaattagtgaaatatttctgtcgttgatattaaaagtgacttctgagtacagttaagttcctcctatttgccactgggctgttggttagaagcataggtaactgattaagtaggtatgatactgcatttgaaataagtggacacaaactatcctttctccaccatggactcaatctgagaacaacagcattcatttccattcatttccatactggcttttgattatatgcagattcctagtagcatgccttacctacagcactatgtgcatttgctgtcacaataaagtatattttgtcttgca

SEQ ID NO: 57848 - DNA, 2176 bp, Homo sapiens
taggctgcgttgaggcccaaccagggggaggcggggccaaggccaggcctgactaaacctggagactcgggtggccgaggggcttcataccagctgaagagcgacaagccgctggcagccgcggatctcaccgccgctcagggtttttagaacttcagccataaaaatgggcagaattttccttgatcatatcggtggtacccgtctgttttcttgtgcaaactgtgatacgatcctgaccaaccgctcagaactcatctccactcgtttcacaggcgccactggcagagcatttctttttaacaaggtagttaacctgcagtacagcgaagttcaagatcgggtcatgctcactggccgccacatggttcgagatgtgagctgcaaaaactgcaatagcaaactgggatggatctatgagtttgccactgaagacagccagcgatataaggaaggccgcgtgatcctggaacgtgctctagttcgagagagtgagggctttgaggagcatgtaccatctgataactcttgaagatacagagagaaatccatcttttcccaggtctccttcactgaaaacaaaaatctacttacatacactgtcaccttagcatcagagtcggattaatgaactgcggaacaagaggttgtgagaatctaagatggaacctttctttctttctttctttttttttaaattttgtattttccatccaacagcagtgtgtagagagaatattatgcagatgccgttaattttttaccctatgtttacatcttgaggcagcagagtctgtctgcagctatgtggtgagctatgtaaggaaaaaaatctgggctgttagagtgaaaaagtgtgttttatgtcaattgtgaaaggaaaatgttaggagtatggtttttaaacttgggcttcattttaaacttttttttttaaacccagttatttcacttgatttgctagcttcagagaagagatccgaatctgtgcccagcgctaaaggctcagtgttagcatggcttgtgctggccggtgtgccatattcttgttggagatgaaccgtagcaccagagcccattcttccttgtcagtcttggcccaaagatgtcaccattcctagttatttgtcaccacataattggtgttgattggaaactttttctgagatgggacagaactgctgggttgtctttttccatgtaacttaagcatagtaatataaataaagtaatagttggatgcttttggtcctgtgttgcttttaaaaacaccttataaaagaggagagtatttgataagcaattttcatagtagtaaagttttttttcatctcttaaactaaattgaccatgcatataatattctttgtttaaatgaaagcatactgttgaaacccgcagtgttgcatttagaaaacagttgaacagaatgtcaatgtgcattcatgcaaaaaaacatttaatctgcatctgttttagaaaagggggaaatgaagcaacttgtctaaaaatactgctttacaaagcatttcagcctttccccctcagttttgcattgattttttgacaagtctgtagagcctaatagtttccatcaaaggcctagatctcttatttagcatttttttcagctcttctctcagaagttcagctgttgaaacgaaaactgtactttgtaccctcacatacaaagggatcaaatttgacctggtgttattttagccccaaatttatgacattacacaatattaaaatgtaaatgtttctttacccaaactacttctagatattctagtatttgcttctggtggaattaaatgacggtaaaattggctaattatttgaatgaatgaatggatggatgttttgcatgctcaatttctaggtcctttgtctagaaaggaaatttgcctcagttgaattagtgaaatatttctgtcgttgatattaaaagtgacttcaagcataggtaactgattaagtaggtatgatactgcatttgaaataagtggacacaaactatcctttctccaccatggactcaatctgagaacaacagcattcatttccattcatttccatactggcttttgattatatgcagattcctagtagcatgccttacctacagcactatgtgcatttgctgtcacaataaagtatattttgtcttgca

SEQ ID NO: 57849 - DNA, 2165 bp, Homo sapiens
taggctgcgttgaggcccaaccagggggaggcggggccaaggccaggcctgactaaacctggagactcgggtggccgaggggcttcataccagctgaagagcgacaagccgctggcagccgcggatctcaccgccgctcagggtttttagaacttcagccataaaaatgggcagaattttccttgatcatatcggtggtacccgtctgttttcttgtgcaaactgtgatacgatcctgaccaaccgctcagaactcatctccactcgtttcacaggcgccactggcagagcatttctttttaacaaggtagttaacctgcagtacagcgaagttcaagatcgggtcatgctcactggccgccacatggttcgagatgtgagctgcaaaaactgcaatagcaaactgggatggatctatgagtttgccactgaagacagccagcgatataaggaaggccgcgtgatcctggaacgtgctctagttcgagagagtgagggctttgaggagcatgtaccatctgataactcttgaagatacagagagaaatccatcttttcccaggtctccttcactgaaaacaaaaatctacttacatacactgtcaccttagcatcagagtcggattaatgaactgcggaacaagaggttgtgagaatctaagatggaacctttctttctttctttctttttttttaaattttgtattttccatccaacagcagtgtgtagagagaatattatgcagatgccgttaattttttaccctatgtttacatcttgaggcagcagagtctgtctgcagctatgtggtgagctatgtaaggaaaaaaatctgggctgttagagtgaaaaagtgtgttttatgtcaattgtgaaaggaaaatgttaggagtatggtttttaaacttgggcttcattttaaacttttttttttaaacccagttatttcacttgatttgctagcttcagagaagagatccgaatctgtgcccagcgctaaaggctcagtgttagcatggcttgtgctggccggtgtgccatattcttgttggagatgaaccgtagcaccagagcccattcttccttgtcagtcttggcccaaagatgtcaccattcctagttatttgtcaccacataattggtgttgattggaaactttttctgagatgggacagaactgctgggttgtctttttccatgtaacttaagcatagtaatataaataaagtaatagttggatgcttttggtcctgtgttgcttttaaaaacaccttataaaagaggagagtatttgataagcaattttcatagtagtaaagttttttttcatctcttaaactaaattgaccatgcatataatattctttgtttaaatgaaagcatactgttgaaacccgcagtgttgcatttagaaaacagttgaacagaatgtcaatgtgcattcatgcaaaaaaacatttaatctgcatctgttttagaaaagggggaaatgaagcaacttgtctaaaaatactgctttacaaagcatttcagcctttccccctcagttttgcattgattttttgacaagtctgtagagcctaatagtttccatcaaaggcctagatctcttatttagcatttttttcagctcttctctcagaagttcagctgttgaaacgaaaactgtactttgtaccctcacatacaaagggatcaaatttgacctggtgttattttagcccctagatattctagtatttgcttctggtggaattaaatgacggtaaaattggctaattatttgaatgaatgaatggatggatgttttgcatgctcaatttctaggtcctttgtctagaaaggaaatttgcctcagttgaattagtgaaatatttctgtcgttgatattaaaagtgacttctgagtacagttaagttcctcctatttgccactgggctgttggttagaagcataggtaactgattaagtaggtatgatactgcatttgaaataagtggacacaaactatcctttctccaccatggactcaatctgagaacaacagcattcatttccattcatttccatactggcttttgattatatgcagattcctagtagcatgccttacctacagcactatgtgcatttgctgtcacaataaagtatattttgtcttgca

SEQ ID NO: 57850 - DNA, 1782 bp, Homo sapiens
taggctgcgttgaggcccaaccagggggaggcggggccaaggccaggcctgactaaacctggagactcgggtggccgaggggcttcataccagctgaagagcgacaagccgctggcagccgcggatctcaccgccgctcagggtttttagaacttcagccataaaaatgggcagaattttccttgatcatatcggtggtacccgtctgttttcttgtgcaaactgtgatacgatcctgaccaaccgctcagaactcatctccactcgtttcacaggcgccactggcagagcatttctttttaacaaggtagttaacctgcagtacagcgaagttcaagatcgggtcatgctcactggccgccacatggttcgagatgtgagctgcaaaaactgcaatagcaaactgggatggatctatgagtttgccactgaagacagccagcgatataaggaaggccgcgtgatcctggaacgtgctctagttcgagagagtgagggctttgaggagcatgtaccatctgataactcttgaagatacagagagaaatccatcttttcccaggtctccttcactgaaaacaaaaatctacttacatacactgtcaccttagcatcagagtcggattaatgaactgcggaacaagaggttgtgagaatctaagatggaacctttctttctttctttctttttttttaaattttgtattttccatccaacagcagtgtgtagagagaatattatgcagatgccgttaattttttaccctatgtttacatcttgaggcagcagagtctgtctgcagctatgtggtgagctatgtaaggaaaaaaatctgggctgttagagtgaaaaagtgtgttttatgtcaattgtgaaaggaaaatgttaggagtatggtttttaaacttgggcttcattttaaacttttttttttaaacccagttatttcacttgatttgctagcttcagagaagagatccgaatctgtgcccagcgctaaaggctcagtgttagcatggcttgtgctggccggtgtgccatattcttgttggagatgaaccgtagcaccagagcccattcttccttgtcagtcttggcccaaagatgtcaccattcctagttatttgtcaccacataattggtgttgattggaaactttttctgagatgggacagaactgctgggttgtctttttccatgtaacttaagcatagtaatataaataaagtaatagttggatgcttttggtcctgtgttgcttttaaaaacaccttataaaagaggagagtatttgataagcaattttcatagtagtaaagttttttttcatctcttaaactaaattgaccatgcatataatattctttgtttaaatgaaagcatactgttgaaacccgcagtgttgcatttagaaaacagttgaacagaatgtcaatgtgcattcatgcaaaaaaacatttaatctgcatctgttttagaaaagggggaaatgaagcaacttgtctaaaaatactgctttacaaagcatttcagcctttccccctcagttttgcattgattttttgacaagtctgtagagcctaatagtttccatcaaaggcctagatctcttatttagcatttttttcagctcttctctcagaagttcagctgttgaaacgaaaactgtactttgtaccctcacatacaaagggatcaaatttgacctggtgttattttagccccaaatttatgacattacacaatattaaaatgtaaatgtttctttacccaaactactt

SEQ ID NO: 57851 - DNA, 2519 bp, Homo sapiens
taggctgcgttgaggcccaaccagggggaggcggggccaaggccaggcctgactaaacctggagactcgggtggccgaggggcttcataccagctgaagagcgacaagccgctggcagccgcggatctcaccgccgctcaggagatctgttggtaatctgaggatttttattctacgtcgtcttgacagatggaaaacctgaagtaacttcgggctaaccttgtgtttttggaaaattagtagacttggtggtgaagaaactgggaggagtaggatattagctaactttgcatagccacatatagagcgtcgcagctgcattccaccaaagaggaaccaaaaggcctgtggtgttcccagggtacatattcatgccagaagtgaagtgccttggtgaattcgtttcctgaaagtttatcgcatacttgtactgggttaggtttttagaacttcagccataaaaatgggcagaattttccttgatcatatcggtggtacccgtctgttttcttgtgcaaactgtgatacgatcctgaccaaccgctcagaactcatctccactcgtttcacaggcgccactggcagagcatttctttttaacaaggtagttaacctgcagtacagcgaagttcaagatcgggtcatgctcactggccgccacatggttcgagatgtgagctgcaaaaactgcaatagcaaactgggatggatctatgagtttgccactgaagacagccagcgatataaggaaggccgcgtgatcctggaacgtgctctagttcgagagagtgagggctttgaggagcatgtaccatctgataactcttgaagatacagagagaaatccatcttttcccaggtctccttcactgaaaacaaaaatctacttacatacactgtcaccttagcatcagagtcggattaatgaactgcggaacaagaggttgtgagaatctaagatggaacctttctttctttctttctttttttttaaattttgtattttccatccaacagcagtgtgtagagagaatattatgcagatgccgttaattttttaccctatgtttacatcttgaggcagcagagtctgtctgcagctatgtggtgagctatgtaaggaaaaaaatctgggctgttagagtgaaaaagtgtgttttatgtcaattgtgaaaggaaaatgttaggagtatggtttttaaacttgggcttcattttaaacttttttttttaaacccagttatttcacttgatttgctagcttcagagaagagatccgaatctgtgcccagcgctaaaggctcagtgttagcatggcttgtgctggccggtgtgccatattcttgttggagatgaaccgtagcaccagagcccattcttccttgtcagtcttggcccaaagatgtcaccattcctagttatttgtcaccacataattggtgttgattggaaactttttctgagatgggacagaactgctgggttgtctttttccatgtaacttaagcatagtaatataaataaagtaatagttggatgcttttggtcctgtgttgcttttaaaaacaccttataaaagaggagagtatttgataagcaattttcatagtagtaaagttttttttcatctcttaaactaaattgaccatgcatataatattctttgtttaaatgaaagcatactgttgaaacccgcagtgttgcatttagaaaacagttgaacagaatgtcaatgtgcattcatgcaaaaaaacatttaatctgcatctgttttagaaaagggggaaatgaagcaacttgtctaaaaatactgctttacaaagcatttcagcctttccccctcagttttgcattgattttttgacaagtctgtagagcctaatagtttccatcaaaggcctagatctcttatttagcatttttttcagctcttctctcagaagttcagctgttgaaacgaaaactgtactttgtaccctcacatacaaagggatcaaatttgacctggtgttattttagccccaaatttatgacattacacaatattaaaatgtaaatgtttctttacccaaactacttctagatattctagtatttgcttctggtggaattaaatgacggtaaaattggctaattatttgaatgaatgaatggatggatgttttgcatgctcaatttctaggtcctttgtctagaaaggaaatttgcctcagttgaattagtgaaatatttctgtcgttgatattaaaagtgacttctgagtacagttaagttcctcctatttgccactgggctgttggttagaagcataggtaactgattaagtaggtatgatactgcatttgaaataagtggacacaaactatcctttctccaccatggactcaatctgagaacaacagcattcatttccattcatttccatactggcttttgattatatgcagattcctagtagcatgccttacctacagcactatgtgcatttgctgtcacaataaagtatattttgtcttgca

SEQ ID NO: 57852 - DNA, 1797 bp, Homo sapiens
taggctgcgttgaggcccaaccagggggaggcggggccaaggccaggcctgactaaacctggagactcgggtggccgaggggcttcataccagctgaagagcgacaagccgctggcagccgcggatctcaccgccgctcagggtttttagaacttcagccataaaaatgggcagaattttccttgatcatatcggtggtacccgtctgttttcttgtgcaaactgtgatacgatcctgaccaaccgctcagaactcatctccactcgtttcacaggcgccactggcagagcatttctttttaacaaggtagttaacctgcagtacagcgaagttcaagatcgggtcatgctcactggccgccacatggttcgagatgtgagctgcaaaaactgcaatagcaaactgggatggatctatgagtttgccactgaagacagccagcgatataaggaaggccgcgtgatcctggaacgtgctctagttcgagagagtgagggctttgaggagcatgtaccatctgataactcttgaagatacagagagaaatccatcttttcccaggtctccttcactgaaaacaaaaatctacttacatacactgtcaccttagcatcagagtcggattaatgaactgcggaacaagaggttgtgagaatctaagatggaacctttctttctttctttctttttttttaaattttgtattttccatccaacagcagtgtgtagagagaatattatgcagatgccgttaattttttaccctatgtttacatcttgaggcagcagagtctgtctgcagctatgtggtgagctatgtaaggaaaaaaatctgggctgttagagtgaaaaagtgtgttttatgtcaattgtgaaaggaaaatgttaggagtatggtttttaaacttgggcttcattttaaacttttttttttaaacccagttatttcacttgatttgctagcttcagagaagagatccgaatctgtgcccagcgctaaaggctcagtgttagcatggcttgtgctggccggtgtgccatattcttgttggagatgaaccgtagcaccagagcccattcttccttgtcagtcttggcccaaagatgtcaccattcctagttatttgtcaccacataattggtgttgattggaaactttttctgagatgggacagaactgctgggttgtctttttccatgtaacttaagcatagtaatataaataaagtaatagttggatgcttttggtcctgtgttgcttttaaaaacaccttataaaagaggagagtatttgataagcaattttcatagtagtaaagttttttttcatctcttaaactaaattgaccatgcatataatattctttgtttaaatgaaagcatactgttgaaacccgcagtgttgcatttagaaaacagttgaacagaatgtcaatgtgcattcatgcaaaaaaacatttaatctgcatctgttttagaaaagggggaaatgaagcaacttgtctaaaaatactgctttacaaagcatttcagcctttccccctcagttttgcattgattttttgacaagtctgtagagcctaatagtttccatcaaaggcctagatctcttatttagcatttttttcagctcttctctcagaagttcagctgttgaaacgttcagcccaatttatgcctttcccaccattaaatcgatctgttgtttaccaaactattctacatatttacgcctccttatcgatcactatatgaccgagactggctttcaactcgatgatcaaggccgaacgctt

SEQ ID NO: 57853 - DNA, 2580 bp, Homo sapiens
taggctgcgttgaggcccaaccagggggaggcggggccaaggccaggcctgactaaacctggagactcgggtggccgaggggcttcataccagctgaagagcgacaagccgctggcagccgcggatctcaccgccgctcaggagatctgttggtaatctgaggatttttattctacgtcgtcttgacagatggaaaacctgaagtaacttcgggctaaccttgtgtttttggaaaattagtagacttggtggtgaagaaactgggaggagtaggatattagctaactttgcatagccacatatagagcgtcgcagctgcattccaccaaagaggaaccaaaaggcctgtggtgttcccagggtacatattcatgccagaagtgaagtgccttggtgaattcgtttcctgaaagtttatcgcatacttgtactgggttagccttatgccagcctggaccatcttggaggcagtgtaggatcatggaagaactttgaattaggtttttagaacttcagccataaaaatgggcagaattttccttgatcatatcggtggtacccgtctgttttcttgtgcaaactgtgatacgatcctgaccaaccgctcagaactcatctccactcgtttcacaggcgccactggcagagcatttctttttaacaaggtagttaacctgcagtacagcgaagttcaagatcgggtcatgctcactggccgccacatggttcgagatgtgagctgcaaaaactgcaatagcaaactgggatggatctatgagtttgccactgaagacagccagcgatataaggaaggccgcgtgatcctggaacgtgctctagttcgagagagtgagggctttgaggagcatgtaccatctgataactcttgaagatacagagagaaatccatcttttcccaggtctccttcactgaaaacaaaaatctacttacatacactgtcaccttagcatcagagtcggattaatgaactgcggaacaagaggttgtgagaatctaagatggaacctttctttctttctttctttttttttaaattttgtattttccatccaacagcagtgtgtagagagaatattatgcagatgccgttaattttttaccctatgtttacatcttgaggcagcagagtctgtctgcagctatgtggtgagctatgtaaggaaaaaaatctgggctgttagagtgaaaaagtgtgttttatgtcaattgtgaaaggaaaatgttaggagtatggtttttaaacttgggcttcattttaaacttttttttttaaacccagttatttcacttgatttgctagcttcagagaagagatccgaatctgtgcccagcgctaaaggctcagtgttagcatggcttgtgctggccggtgtgccatattcttgttggagatgaaccgtagcaccagagcccattcttccttgtcagtcttggcccaaagatgtcaccattcctagttatttgtcaccacataattggtgttgattggaaactttttctgagatgggacagaactgctgggttgtctttttccatgtaacttaagcatagtaatataaataaagtaatagttggatgcttttggtcctgtgttgcttttaaaaacaccttataaaagaggagagtatttgataagcaattttcatagtagtaaagttttttttcatctcttaaactaaattgaccatgcatataatattctttgtttaaatgaaagcatactgttgaaacccgcagtgttgcatttagaaaacagttgaacagaatgtcaatgtgcattcatgcaaaaaaacatttaatctgcatctgttttagaaaagggggaaatgaagcaacttgtctaaaaatactgctttacaaagcatttcagcctttccccctcagttttgcattgattttttgacaagtctgtagagcctaatagtttccatcaaaggcctagatctcttatttagcatttttttcagctcttctctcagaagttcagctgttgaaacgaaaactgtactttgtaccctcacatacaaagggatcaaatttgacctggtgttattttagccccaaatttatgacattacacaatattaaaatgtaaatgtttctttacccaaactacttctagatattctagtatttgcttctggtggaattaaatgacggtaaaattggctaattatttgaatgaatgaatggatggatgttttgcatgctcaatttctaggtcctttgtctagaaaggaaatttgcctcagttgaattagtgaaatatttctgtcgttgatattaaaagtgacttctgagtacagttaagttcctcctatttgccactgggctgttggttagaagcataggtaactgattaagtaggtatgatactgcatttgaaataagtggacacaaactatcctttctccaccatggactcaatctgagaacaacagcattcatttccattcatttccatactggcttttgattatatgcagattcctagtagcatgccttacctacagcactatgtgcatttgctgtcacaataaagtatattttgtcttgca

SEQ ID NO: 57854 - DNA, 2225 bp, Homo sapiens
ggccccactgggctgccgggtgagcccacccgggggtcgcccgggccggcccagctccgccagcttcgggctgcggccttccctccgcttgcagtcgggagggtgggcgtgcccttgcaacccctttcctgtaccttctctgcaggtttttagaacttcagccataaaaatgggcagaattttccttgatcatatcggtggtacccgtctgttttcttgtgcaaactgtgatacgatcctgaccaaccgctcagaactcatctccactcgtttcacaggcgccactggcagagcatttctttttaacaaggtagttaacctgcagtacagcgaagttcaagatcgggtcatgctcactggccgccacatggttcgagatgtgagctgcaaaaactgcaatagcaaactgggatggatctatgagtttgccactgaagacagccagcgatataaggaaggccgcgtgatcctggaacgtgctctagttcgagagagtgagggctttgaggagcatgtaccatctgataactcttgaagatacagagagaaatccatcttttcccaggtctccttcactgaaaacaaaaatctacttacatacactgtcaccttagcatcagagtcggattaatgaactgcggaacaagaggttgtgagaatctaagatggaacctttctttctttctttctttttttttaaattttgtattttccatccaacagcagtgtgtagagagaatattatgcagatgccgttaattttttaccctatgtttacatcttgaggcagcagagtctgtctgcagctatgtggtgagctatgtaaggaaaaaaatctgggctgttagagtgaaaaagtgtgttttatgtcaattgtgaaaggaaaatgttaggagtatggtttttaaacttgggcttcattttaaacttttttttttaaacccagttatttcacttgatttgctagcttcagagaagagatccgaatctgtgcccagcgctaaaggctcagtgttagcatggcttgtgctggccggtgtgccatattcttgttggagatgaaccgtagcaccagagcccattcttccttgtcagtcttggcccaaagatgtcaccattcctagttatttgtcaccacataattggtgttgattggaaactttttctgagatgggacagaactgctgggttgtctttttccatgtaacttaagcatagtaatataaataaagtaatagttggatgcttttggtcctgtgttgcttttaaaaacaccttataaaagaggagagtatttgataagcaattttcatagtagtaaagttttttttcatctcttaaactaaattgaccatgcatataatattctttgtttaaatgaaagcatactgttgaaacccgcagtgttgcatttagaaaacagttgaacagaatgtcaatgtgcattcatgcaaaaaaacatttaatctgcatctgttttagaaaagggggaaatgaagcaacttgtctaaaaatactgctttacaaagcatttcagcctttccccctcagttttgcattgattttttgacaagtctgtagagcctaatagtttccatcaaaggcctagatctcttatttagcatttttttcagctcttctctcagaagttcagctgttgaaacgaaaactgtactttgtaccctcacatacaaagggatcaaatttgacctggtgttattttagccccaaatttatgacattacacaatattaaaatgtaaatgtttctttacccaaactacttctagatattctagtatttgcttctggtggaattaaatgacggtaaaattggctaattatttgaatgaatgaatggatggatgttttgcatgctcaatttctaggtcctttgtctagaaaggaaatttgcctcagttgaattagtgaaatatttctgtcgttgatattaaaagtgacttctgagtacagttaagttcctcctatttgccactgggctgttggttagaagcataggtaactgattaagtaggtatgatactgcatttgaaataagtggacacaaactatcctttctccaccatggactcaatctgagaacaacagcattcatttccattcatttccatactggcttttgattatatgcagattcctagtagcatgccttacctacagcactatgtgcatttgctgtcacaataaagtatattttgtcttgca

SEQ ID NO: 57855 - DNA, 3293 bp, Homo sapiens
taggctgcgttgaggcccaaccagggggaggcggggccaaggccaggcctgactaaacctggagactcgggtggccgaggggcttcataccagctgaagagcgacaagccgctggcagccgcggatctcaccgccgctcaggagatctgttggtaatctgaggatttttattctacgtcgtcttgacagatggaaaacctgaagtaacttcgggctaaccttgtgtttttggaaaattagtagacttggtggtgaagaaactgggaggagtaggatattagctaactttgcatagccacatatagagcgtcgcagctgcattccaccaaagaggaaccaaaaggcctgtggtgttcccagggtacatattcatgccagaagtgaagtgccttggtgaattcgtttcctgaaagtttatcgcatacttgtactgggttagccttatgccagcctggaccatcttggaggcagtgtaggatcatggaagaactttgaattagattgcattctgtacttttctgtagttaacagctttgtaacctttgaccagttaataacctttttagccttgacttggatgatctgtgaagtgatggtaacaacctcacagagctgtgacaattttgaaataagtacctagtaacagtgctccctagacattgacttaaagttagtcatcacctctatagttgtagatgcacctggtgatcacagacctactcactctgtgttctcaaaccagactactctcttcttgttttctaattgcccctttatctacttgtatcccactgaaacctcacaattcttttctgaaattatacatgctcagaacgtatacttaacatttatgctaaaccttttttctcacctctctgccagtgctttacatcattcattttctgaaattccactttccattttctttttccacaccagccataagagaagtgacactattctttggccttggctaataggtttacttccttggctcactgctttaaaatcttcttagcttaggcatgcctgtttatttgttcagtgtgtgaactttggatctttttgttcaggatcagctatttcacacatcgagtactacaaagcagagattacataaatacgtatacaaattgttctctatgacaccccccaagtaggtgctaacatgattattataatgcatttgttatccttttctatttgctcctaggtttttagaacttcagccataaaaatgggcagaattttccttgatcatatcggtggtacccgtctgttttcttgtgcaaactgtgatacgatcctgaccaaccgctcagaactcatctccactcgtttcacaggcgccactggcagagcatttctttttaacaaggtagttaacctgcagtacagcgaagttcaagatcgggtcatgctcactggccgccacatggttcgagatgtgagctgcaaaaactgcaatagcaaactgggatggatctatgagtttgccactgaagacagccagcgatataaggaaggccgcgtgatcctggaacgtgctctagttcgagagagtgagggctttgaggagcatgtaccatctgataactcttgaagatacagagagaaatccatcttttcccaggtctccttcactgaaaacaaaaatctacttacatacactgtcaccttagcatcagagtcggattaatgaactgcggaacaagaggttgtgagaatctaagatggaacctttctttctttctttctttttttttaaattttgtattttccatccaacagcagtgtgtagagagaatattatgcagatgccgttaattttttaccctatgtttacatcttgaggcagcagagtctgtctgcagctatgtggtgagctatgtaaggaaaaaaatctgggctgttagagtgaaaaagtgtgttttatgtcaattgtgaaaggaaaatgttaggagtatggtttttaaacttgggcttcattttaaacttttttttttaaacccagttatttcacttgatttgctagcttcagagaagagatccgaatctgtgcccagcgctaaaggctcagtgttagcatggcttgtgctggccggtgtgccatattcttgttggagatgaaccgtagcaccagagcccattcttccttgtcagtcttggcccaaagatgtcaccattcctagttatttgtcaccacataattggtgttgattggaaactttttctgagatgggacagaactgctgggttgtctttttccatgtaacttaagcatagtaatataaataaagtaatagttggatgcttttggtcctgtgttgcttttaaaaacaccttataaaagaggagagtatttgataagcaattttcatagtagtaaagttttttttcatctcttaaactaaattgaccatgcatataatattctttgtttaaatgaaagcatactgttgaaacccgcagtgttgcatttagaaaacagttgaacagaatgtcaatgtgcattcatgcaaaaaaacatttaatctgcatctgttttagaaaagggggaaatgaagcaacttgtctaaaaatactgctttacaaagcatttcagcctttccccctcagttttgcattgattttttgacaagtctgtagagcctaatagtttccatcaaaggcctagatctcttatttagcatttttttcagctcttctctcagaagttcagctgttgaaacgaaaactgtactttgtaccctcacatacaaagggatcaaatttgacctggtgttattttagccccaaatttatgacattacacaatattaaaatgtaaatgtttctttacccaaactacttctagatattctagtatttgcttctggtggaattaaatgacggtaaaattggctaattatttgaatgaatgaatggatggatgttttgcatgctcaatttctaggtcctttgtctagaaaggaaatttgcctcagttgaattagtgaaatatttctgtcgttgatattaaaagtgacttctgagtacagttaagttcctcctatttgccactgggctgttggttagaagcataggtaactgattaagtaggtatgatactgcatttgaaataagtggacacaaactatcctttctccaccatggactcaatctgagaacaacagcattcatttccattcatttccatactggcttttgattatatgcagattcctagtagcatgccttacctacagcactatgtgcatttgctgtcacaataaagtatattttgtcttgca

SEQ ID NO: 57856 - DNA, 2283 bp, Homo sapiens
taggctgcgttgaggcccaaccagggggaggcggggccaaggccaggcctgactaaacctggagactcgggtggccgaggggcttcataccagctgaagagcgacaagccgctggcagccgcggatctcaccgccgctcaggccttatgccagcctggaccatcttggaggcagtgtaggatcatggaagaactttgaattaggtttttagaacttcagccataaaaatgggcagaattttccttgatcatatcggtggtacccgtctgttttcttgtgcaaactgtgatacgatcctgaccaaccgctcagaactcatctccactcgtttcacaggcgccactggcagagcatttctttttaacaaggtagttaacctgcagtacagcgaagttcaagatcgggtcatgctcactggccgccacatggttcgagatgtgagctgcaaaaactgcaatagcaaactgggatggatctatgagtttgccactgaagacagccagcgatataaggaaggccgcgtgatcctggaacgtgctctagttcgagagagtgagggctttgaggagcatgtaccatctgataactcttgaagatacagagagaaatccatcttttcccaggtctccttcactgaaaacaaaaatctacttacatacactgtcaccttagcatcagagtcggattaatgaactgcggaacaagaggttgtgagaatctaagatggaacctttctttctttctttctttttttttaaattttgtattttccatccaacagcagtgtgtagagagaatattatgcagatgccgttaattttttaccctatgtttacatcttgaggcagcagagtctgtctgcagctatgtggtgagctatgtaaggaaaaaaatctgggctgttagagtgaaaaagtgtgttttatgtcaattgtgaaaggaaaatgttaggagtatggtttttaaacttgggcttcattttaaacttttttttttaaacccagttatttcacttgatttgctagcttcagagaagagatccgaatctgtgcccagcgctaaaggctcagtgttagcatggcttgtgctggccggtgtgccatattcttgttggagatgaaccgtagcaccagagcccattcttccttgtcagtcttggcccaaagatgtcaccattcctagttatttgtcaccacataattggtgttgattggaaactttttctgagatgggacagaactgctgggttgtctttttccatgtaacttaagcatagtaatataaataaagtaatagttggatgcttttggtcctgtgttgcttttaaaaacaccttataaaagaggagagtatttgataagcaattttcatagtagtaaagttttttttcatctcttaaactaaattgaccatgcatataatattctttgtttaaatgaaagcatactgttgaaacccgcagtgttgcatttagaaaacagttgaacagaatgtcaatgtgcattcatgcaaaaaaacatttaatctgcatctgttttagaaaagggggaaatgaagcaacttgtctaaaaatactgctttacaaagcatttcagcctttccccctcagttttgcattgattttttgacaagtctgtagagcctaatagtttccatcaaaggcctagatctcttatttagcatttttttcagctcttctctcagaagttcagctgttgaaacgaaaactgtactttgtaccctcacatacaaagggatcaaatttgacctggtgttattttagccccaaatttatgacattacacaatattaaaatgtaaatgtttctttacccaaactacttctagatattctagtatttgcttctggtggaattaaatgacggtaaaattggctaattatttgaatgaatgaatggatggatgttttgcatgctcaatttctaggtcctttgtctagaaaggaaatttgcctcagttgaattagtgaaatatttctgtcgttgatattaaaagtgacttctgagtacagttaagttcctcctatttgccactgggctgttggttagaagcataggtaactgattaagtaggtatgatactgcatttgaaataagtggacacaaactatcctttctccaccatggactcaatctgagaacaacagcattcatttccattcatttccatactggcttttgattatatgcagattcctagtagcatgccttacctacagcactatgtgcatttgctgtcacaataaagtatattttgtcttgca

SEQ ID NO: 57857 - DNA, 1442 bp, Homo sapiens
taggctgcgttgaggcccaaccagggggaggcggggccaaggccaggcctgactaaacctggagactcgggtggccgaggggcttcataccagctgaagagcgacaagccgctggcagccgcggatctcaccgccgctcagggtttttagaacttcagccataaaaatgggcagaattttccttgatcatatcggtggtacccgtctgttttcttgtgcaaactgtgatacgatcctgaccaaccgctcagaactcatctccactcgtttcacaggcgccactggcagagcatttctttttaacaaggtagttaacctgcagtacagcgaagttcaagatcgggtcatgctcactggccgccacatggttcgagatgtgagctgcaaaaactgcaatagcaaactgggatggatctatgagtttgccactgaagacagccagcgatataaggaaggccgcgtgatcctggaacgtgctctagttcgagagagtgagggctttgaggagcatgtaccatctgataactcttgaagatacagagagaaatccatcttttcccaggtctccttcactgaaaacaaaaatctacttacatacactgtcaccttagcatcagagtcggattaatgaactgcggaacaagaggttgtgagaatctaagatggaacctttctttctttctttctttttttttaaattttgtattttccatccaacagcagtgtgtagagagaatattatgcagatgccgttaattttttaccctatgtttacatcttgaggcagcagagtctgtctgcagctatgtggtgagctatgtaaggaaaaaaatctgggctgttagagtgaaaaagtgtgttttatgtcaattgtgaaaggaaaatgttaggagtatggtttttaaacttgggcttcattttaaacttttttttttaaacccagttatttcacttgatttgctagcttcagagaagagatccgaatctgtgcccagcgctaaaggctcagtgttagcatggcttgtgctggccggtgtgccatattcttgttggagatgaaccgtagcaccagagcccattcttccttgtcagtcttggcccaaagatgtcaccattcctagttatttgtcaccacataattggtgttgattggaaactttttctgagatgggacagaactgctgggttgtctttttccatgtaacttaagcatagtaatataaataaagtaatagttggatgcttttggtcctgtgttgcttttaaaaacaccttataaaagaggagagtatttgataagcaattttcatagtagtaaagttttttttcatctcttaaactaaattgaccatgcatataatattctttgtttaaagtgcaacaatgcggggttcaacagtaagctttcattaaccagatattatggtaccggctcgatgtat

SEQ ID NO: 57858 - DNA, 1337 bp, Homo sapiens
taggctgcgttgaggcccaaccagggggaggcggggccaaggccaggcctgactaaacctggagactcgggtggccgaggggcttcataccagctgaagagcgacaagccgctggcagccgcggatctcaccgccgctcagggtttttagaacttcagccataaaaatgggcagaattttccttgatcatatcggtggtacccgtctgttttcttgtgcaaactgtgatacgatcctgaccaaccgctcagaactcatctccactcgtttcacaggcgccactggcagagcatttctttttaacaaggtagttaacctgcagtacagcgaagttcaagatcgggtcatgctcactggccgccacatggttcgagatgtgagctgcaaaaactgcaatagcaaactgggatggatctatgagtttgccactgaagacagccagcgatataaggaaggccgcgtgatcctggaacgtgctctagttcgagagagtgagggctttgaggagcatgtaccatctgataactcttgaagatacagagagaaatccatcttttcccaggtctccttcactgaaaacaaaaatctacttacatacactgtcaccttagcatcagagtcggattaatgaactgcggaacaagaggttgtgagaatctaagatggaacctttctttctttctttctttttttttaaattttgtattttccatccaacagcagtgtgtagagagaatattatgcagatgccgttaattttttaccctatgtttacatcttgaggcagcagagtctgtctgcagctatgtggtgagctatgtaaggaaaaaaatctgggctgttagagtgaaaaagtgtgttttatgtcaattgtgaaaggaaaatgttaggagtatggtttttaaacttgggcttcattttaaacttttttttttaaacccagttatttcacttgatttgctagcttcagagaagagatccgaatctgtgcccagcgctaaaggctcagtgttagcatggcttgtgctggccggtgtgccatattcttgttggagatgaaccgtagcaccagagcccattcttccttgtcagtcttggcccaaagatgtcaccattcctagttatttgtcaccacataattggtgttgattggaaactttttctgagatgggacagaactgctgggttgtctttttccatgtaacttaagcatagtaatataaataaagtaatagttggatgcttttggtcctgtgttgcttttaaaaacaccttataaaagaggagagtatttgataagcaattttcatagtagtaaagttttttttcatctctta

SEQ ID NO: 57859 - DNA, 2583 bp, Homo sapiens
ggccccactgggctgccgggtgagcccacccgggggtcgcccgggccggcccagctccgccagcttcgggctgcggccttccctccgcttgcagtcgggagggtgggcgtgcccttgcaacccctttcctgtaccttctctgcagagatctgttggtaatctgaggatttttattctacgtcgtcttgacagatggaaaacctgaagtaacttcgggctaaccttgtgtttttggaaaattagtagacttggtggtgaagaaactgggaggagtaggatattagctaactttgcatagccacatatagagcgtcgcagctgcattccaccaaagaggaaccaaaaggcctgtggtgttcccagggtacatattcatgccagaagtgaagtgccttggtgaattcgtttcctgaaagtttatcgcatacttgtactgggttagccttatgccagcctggaccatcttggaggcagtgtaggatcatggaagaactttgaattaggtttttagaacttcagccataaaaatgggcagaattttccttgatcatatcggtggtacccgtctgttttcttgtgcaaactgtgatacgatcctgaccaaccgctcagaactcatctccactcgtttcacaggcgccactggcagagcatttctttttaacaaggtagttaacctgcagtacagcgaagttcaagatcgggtcatgctcactggccgccacatggttcgagatgtgagctgcaaaaactgcaatagcaaactgggatggatctatgagtttgccactgaagacagccagcgatataaggaaggccgcgtgatcctggaacgtgctctagttcgagagagtgagggctttgaggagcatgtaccatctgataactcttgaagatacagagagaaatccatcttttcccaggtctccttcactgaaaacaaaaatctacttacatacactgtcaccttagcatcagagtcggattaatgaactgcggaacaagaggttgtgagaatctaagatggaacctttctttctttctttctttttttttaaattttgtattttccatccaacagcagtgtgtagagagaatattatgcagatgccgttaattttttaccctatgtttacatcttgaggcagcagagtctgtctgcagctatgtggtgagctatgtaaggaaaaaaatctgggctgttagagtgaaaaagtgtgttttatgtcaattgtgaaaggaaaatgttaggagtatggtttttaaacttgggcttcattttaaacttttttttttaaacccagttatttcacttgatttgctagcttcagagaagagatccgaatctgtgcccagcgctaaaggctcagtgttagcatggcttgtgctggccggtgtgccatattcttgttggagatgaaccgtagcaccagagcccattcttccttgtcagtcttggcccaaagatgtcaccattcctagttatttgtcaccacataattggtgttgattggaaactttttctgagatgggacagaactgctgggttgtctttttccatgtaacttaagcatagtaatataaataaagtaatagttggatgcttttggtcctgtgttgcttttaaaaacaccttataaaagaggagagtatttgataagcaattttcatagtagtaaagttttttttcatctcttaaactaaattgaccatgcatataatattctttgtttaaatgaaagcatactgttgaaacccgcagtgttgcatttagaaaacagttgaacagaatgtcaatgtgcattcatgcaaaaaaacatttaatctgcatctgttttagaaaagggggaaatgaagcaacttgtctaaaaatactgctttacaaagcatttcagcctttccccctcagttttgcattgattttttgacaagtctgtagagcctaatagtttccatcaaaggcctagatctcttatttagcatttttttcagctcttctctcagaagttcagctgttgaaacgaaaactgtactttgtaccctcacatacaaagggatcaaatttgacctggtgttattttagccccaaatttatgacattacacaatattaaaatgtaaatgtttctttacccaaactacttctagatattctagtatttgcttctggtggaattaaatgacggtaaaattggctaattatttgaatgaatgaatggatggatgttttgcatgctcaatttctaggtcctttgtctagaaaggaaatttgcctcagttgaattagtgaaatatttctgtcgttgatattaaaagtgacttctgagtacagttaagttcctcctatttgccactgggctgttggttagaagcataggtaactgattaagtaggtatgatactgcatttgaaataagtggacacaaactatcctttctccaccatggactcaatctgagaacaacagcattcatttccattcatttccatactggcttttgattatatgcagattcctagtagcatgccttacctacagcactatgtgcatttgctgtcacaataaagtatattttgtcttgca

SEQ ID NO: 57860 - DNA, 2113 bp, Homo sapiens
ggcggatctcaccgccgctcaggagatctgttggtttttagaacttcagccataaaaatgggcagaattttccttgatcatatcggtggtacccgtctgttttcttgtgcaaactgtgatacgatcctgaccaaccgctcagaactcatctccactcgtttcacaggcgccactggcagagcatttctttttaacaaggtagttaacctgcagtacagcgaagttcaagatcgggtcatgctcactggccgccacatggttcgagatgtgagctgcaaaaactgcaatagcaaactgggatggatctatgagtttgccactgaagacagccagcgatataaggaaggccgcgtgatcctggaacgtgctctagttcgagagagtgagggctttgaggagcatgtaccatctgataactcttgaagatacagagagaaatccatcttttcccaggtctccttcactgaaaacaaaaatctacttacatacactgtcaccttagcatcagagtcggattaatgaactgcggaacaagaggttgtgagaatctaagatggaacctttctttctttctttctttttttttaaattttgtattttccatccaacagcagtgtgtagagagaatattatgcagatgccgttaattttttaccctatgtttacatcttgaggcagcagagtctgtctgcagctatgtggtgagctatgtaaggaaaaaaatctgggctgttagagtgaaaaagtgtgttttatgtcaattgtgaaaggaaaatgttaggagtatggtttttaaacttgggcttcattttaaacttttttttttaaacccagttatttcacttgatttgctagcttcagagaagagatccgaatctgtgcccagcgctaaaggctcagtgttagcatggcttgtgctggccggtgtgccatattcttgttggagatgaaccgtagcaccagagcccattcttccttgtcagtcttggcccaaagatgtcaccattcctagttatttgtcaccacataattggtgttgattggaaactttttctgagatgggacagaactgctgggttgtctttttccatgtaacttaagcatagtaatataaataaagtaatagttggatgcttttggtcctgtgttgcttttaaaaacaccttataaaagaggagagtatttgataagcaattttcatagtagtaaagttttttttcatctcttaaactaaattgaccatgcatataatattctttgtttaaatgaaagcatactgttgaaacccgcagtgttgcatttagaaaacagttgaacagaatgtcaatgtgcattcatgcaaaaaaacatttaatctgcatctgttttagaaaagggggaaatgaagcaacttgtctaaaaatactgctttacaaagcatttcagcctttccccctcagttttgcattgattttttgacaagtctgtagagcctaatagtttccatcaaaggcctagatctcttatttagcatttttttcagctcttctctcagaagttcagctgttgaaacgaaaactgtactttgtaccctcacatacaaagggatcaaatttgacctggtgttattttagccccaaatttatgacattacacaatattaaaatgtaaatgtttctttacccaaactacttctagatattctagtatttgcttctggtggaattaaatgacggtaaaattggctaattatttgaatgaatgaatggatggatgttttgcatgctcaatttctaggtcctttgtctagaaaggaaatttgcctcagttgaattagtgaaatatttctgtcgttgatattaaaagtgacttctgagtacagttaagttcctcctatttgccactgggctgttggttagaagcataggtaactgattaagtaggtatgatactgcatttgaaataagtggacacaaactatcctttctccaccatggactcaatctgagaacaacagcattcatttccattcatttccatactggcttttgattatatgcagattcctagtagcatgccttacctacagcactatgtgcatttgctgtcacaataaagtatattttgtcttgca

SEQ ID NO: 57861 - DNA, 2175 bp, Homo sapiens
caggctgtactggtctgggcgttatgggcatcttcataccatctgaagagtgagaagccgctggcagcctgcggatctcatcgccgctcaggctttagatgaaacttcaactatgcctatggtcactatactttctaacgaaattcggtggtacccgtctgttttcttgtgcaaactgtgatacgatcctgaccaaccgctcagaactcatctccactcgtttcacaggcgccactggcagagcatttctttttaacaaggtagttaacctgcagtacagcgaagttcaagatcgggtcatgctcactggccgccacatggttcgagatgtgagctgcaaaaactgcaatagcaaactgggatggatctatgagtttgccactgaagacagccagcgatataaggaaggccgcgtgatcctggaacgtgctctagttcgagagagtgagggctttgaggagcatgtaccatctgataactcttgaagatacagagagaaatccatcttttcccaggtctccttcactgaaaacaaaaatctacttacatacactgtcaccttagcatcagagtcggattaatgaactgcggaacaagaggttgtgagaatctaagatggaacctttctttctttctttctttttttttaaattttgtattttccatccaacagcagtgtgtagagagaatattatgcagatgccgttaattttttaccctatgtttacatcttgaggcagcagagtctgtctgcagctatgtggtgagctatgtaaggaaaaaaatctgggctgttagagtgaaaaagtgtgttttatgtcaattgtgaaaggaaaatgttaggagtatggtttttaaacttgggcttcattttaaacttttttttttaaacccagttatttcacttgatttgctagcttcagagaagagatccgaatctgtgcccagcgctaaaggctcagtgttagcatggcttgtgctggccggtgtgccatattcttgttggagatgaaccgtagcaccagagcccattcttccttgtcagtcttggcccaaagatgtcaccattcctagttatttgtcaccacataattggtgttgattggaaactttttctgagatgggacagaactgctgggttgtctttttccatgtaacttaagcatagtaatataaataaagtaatagttggatgcttttggtcctgtgttgcttttaaaaacaccttataaaagaggagagtatttgataagcaattttcatagtagtaaagttttttttcatctcttaaactaaattgaccatgcatataatattctttgtttaaatgaaagcatactgttgaaacccgcagtgttgcatttagaaaacagttgaacagaatgtcaatgtgcattcatgcaaaaaaacatttaatctgcatctgttttagaaaagggggaaatgaagcaacttgtctaaaaatactgctttacaaagcatttcagcctttccccctcagttttgcattgattttttgacaagtctgtagagcctaatagtttccatcaaaggcctagatctcttatttagcatttttttcagctcttctctcagaagttcagctgttgaaacgaaaactgtactttgtaccctcacatacaaagggatcaaatttgacctggtgttattttagccccaaatttatgacattacacaatattaaaatgtaaatgtttctttacccaaactacttctagatattctagtatttgcttctggtggaattaaatgacggtaaaattggctaattatttgaatgaatgaatggatggatgttttgcatgctcaatttctaggtcctttgtctagaaaggaaatttgcctcagttgaattagtgaaatatttctgtcgttgatattaaaagtgacttctgagtacagttaagttcctcctatttgccactgggctgttggttagaagcataggtaactgattaagtaggtatgatactgcatttgaaataagtggacacaaactatcctttctccaccatggactcaatctgagaacaacagcattcatttccattcatttccatactggcttttgattatatgcagattcctagtagcatgccttacctacagcactatgtgcatttgctgtcacaataaagtatattttgtcttgca

SEQ ID NO: 57862 - DNA, 2168 bp, Homo sapiens
taggctgcgttgaggcccaaccagggggaggcggggccaaggccaggcctgactaaacctggagactcgggtggccgaggggcttcataccagctgaagagcgacaagccgctggcagccgcggatctcaccgccgctcagggtttttagaacttcagccataaaaatgggcagaattttccttgatcatatcggtggtacccgtctgttttcttgtgcaaactgtgatacgatcctgaccaaccgctcagaactcatctccactcgtttcacaggcgccactggcagagcatttctttttaacaaggtagttaacctgcagtacagcgaagttcaagatcgggtcatgctcactggccgccacatggttcgagatgtgagctgcaaaaactgcaatagcaaactgggatggatctatgagtttgccactgaagacagccagcgatataaggaaggccgcgtgatcctggaacgtgctctagttcgagagagtgagggctttgaggagcatgtaccatctgataactcttgaagatacagagagaaatccatcttttcccaggtctccttcactgaaaacacggaacaagaggttgtgagaatctaagatggaacctttctttctttctttctttttttttaaattttgtattttccatccaacagcagtgtgtagagagaatattatgcagatgccgttaattttttaccctatgtttacatcttgaggcagcagagtctgtctgcagctatgtggtgagctatgtaaggaaaaaaatctgggctgttagagtgaaaaagtgtgttttatgtcaattgtgaaaggaaaatgttaggagtatggtttttaaacttgggcttcattttaaacttttttttttaaacccagttatttcacttgatttgctagcttcagagaagagatccgaatctgtgcccagcgctaaaggctcagtgttagcatggcttgtgctggccggtgtgccatattcttgttggagatgaaccgtagcaccagagcccattcttccttgtcagtcttggcccaaagatgtcaccattcctagttatttgtcaccacataattggtgttgattggaaactttttctgagatgggacagaactgctgggttgtctttttccatgtaacttaagcatagtaatataaataaagtaatagttggatgcttttggtcctgtgttgcttttaaaaacaccttataaaagaggagagtatttgataagcaattttcatagtagtaaagttttttttcatctcttaaactaaattgaccatgcatataatattctttgtttaaatgaaagcatactgttgaaacccgcagtgttgcatttagaaaacagttgaacagaatgtcaatgtgcattcatgcaaaaaaacatttaatctgcatctgttttagaaaagggggaaatgaagcaacttgtctaaaaatactgctttacaaagcatttcagcctttccccctcagttttgcattgattttttgacaagtctgtagagcctaatagtttccatcaaaggcctagatctcttatttagcatttttttcagctcttctctcagaagttcagctgttgaaacgaaaactgtactttgtaccctcacatacaaagggatcaaatttgacctggtgttattttagccccaaatttatgacattacacaatattaaaatgtaaatgtttctttacccaaactacttctagatattctagtatttgcttctggtggaattaaatgacggtaaaattggctaattatttgaatgaatgaatggatggatgttttgcatgctcaatttctaggtcctttgtctagaaaggaaatttgcctcagttgaattagtgaaatatttctgtcgttgatattaaaagtgacttctgagtacagttaagttcctcctatttgccactgggctgttggttagaagcataggtaactgattaagtaggtatgatactgcatttgaaataagtggacacaaactatcctttctccaccatggactcaatctgagaacaacagcattcatttccattcatttccatactggcttttgattatatgcagattcctagtagcatgccttacctacagcactatgtgcatttgctgtcacaataaagtatattttgtcttgca

SEQ ID NO: 57863 - DNA, 1945 bp, Homo sapiens
  misc_feature (47)..(47): n is a, c, g, or t
  misc_feature (52)..(52): n is a, c, g, or t
ccccgcccccaatatgggttagaaaaggtctttgttatcacctgcgncctgngggttcaagatcgggtcatgctcactggccgccacatggttcgagatgtgagctgcaaaaactgcaatagcaaactgggatggatctatgagtttgccactgaagacagccagcgatataaggaaggccgcgtgatcctggaacgtgctctagttcgagagagtgagggctttgaggagcatgtaccatctgataactcttgaagatacagagagaaatccatcttttcccaggtctccttcactgaaaacaaaaatctacttacatacactgtcaccttagcatcagagtcggattaatgaactgcggaacaagaggttgtgagaatctaagatggaacctttctttctttctttctttttttttaaattttgtattttccatccaacagcagtgtgtagagagaatattatgcagatgccgttaattttttaccctatgtttacatcttgaggcagcagagtctgtctgcagctatgtggtgagctatgtaaggaaaaaaatctgggctgttagagtgaaaaagtgtgttttatgtcaattgtgaaaggaaaatgttaggagtatggtttttaaacttgggcttcattttaaacttttttttttaaacccagttatttcacttgatttgctagcttcagagaagagatccgaatctgtgcccagcgctaaaggctcagtgttagcatggcttgtgctggccggtgtgccatattcttgttggagatgaaccgtagcaccagagcccattcttccttgtcagtcttggcccaaagatgtcaccattcctagttatttgtcaccacataattggtgttgattggaaactttttctgagatgggacagaactgctgggttgtctttttccatgtaacttaagcatagtaatataaataaagtaatagttggatgcttttggtcctgtgttgcttttaaaaacaccttataaaagaggagagtatttgataagcaattttcatagtagtaaagttttttttcatctcttaaactaaattgaccatgcatataatattctttgtttaaatgaaagcatactgttgaaacccgcagtgttgcatttagaaaacagttgaacagaatgtcaatgtgcattcatgcaaaaaaacatttaatctgcatctgttttagaaaagggggaaatgaagcaacttgtctaaaaatactgctttacaaagcatttcagcctttccccctcagttttgcattgattttttgacaagtctgtagagcctaatagtttccatcaaaggcctagatctcttatttagcatttttttcagctcttctctcagaagttcagctgttgaaacgaaaactgtactttgtaccctcacatacaaagggatcaaatttgacctggtgttattttagccccaaatttatgacattacacaatattaaaatgtaaatgtttctttacccaaactacttctagatattctagtatttgcttctggtggaattaaatgacggtaaaattggctaattatttgaatgaatgaatggatggatgttttgcatgctcaatttctaggtcctttgtctagaaaggaaatttgcctcagttgaattagtgaaatatttctgtcgttgatattaaaagtgacttctgagtacagttaagttcctcctatttgccactgggctgttggttagaagcataggtaactgattaagtaggtatgatactgcatttgaaataagtggacacaaactatcctttctccaccatggactcaatctgagaacaacagcattcatttccattcatttccatactggcttttgattatatgcagattcctagtagcatgccttacctacagcactatgtgcatttgctgtcacaataaagtatattttgtcttgca

SEQ ID NO: 57864 - DNA, 2409 bp, Homo sapiens
taggctgcgttgaggcccaaccagggggaggcggggccaaggccaggcctgactaaacctggagactcgggtggccgaggggcttcataccagctgaagagcgacaagccgctggcagccgcggatctcaccgccgctcaggagatctgttggtaatctgaggatttttattctacgtcgtcttgacagatggaaaacctgaagtaacttcgggctaaccttgtgtttttggaaaattagtagacttggtggtgaagaaactgggaggagtaggatattagctaactttgcatagccacatatagagcgtcgcagctgcattccaccaaagaggaaccaaaaggcctgtggtgttcccagggtacatattcatgccagaagtgaagtgccttggtgaattcgtttcctgaaagtttatcgcatacttgtactgggttaggtttttagaacttcagccataaaaatgggcagaattttccttgatcatatcggtggtacccgtctgttttcttgtgcaaactgtgatacgatcctgaccaaccgctcagaactcatctccactcgtttcacaggcgccactggcagagcatttctttttaacaaggtagttaacctgcagtacagcgaagttcaagatcgggtcatgctcactggccgccacatggttcgagatgtgaagtgagggctttgaggagcatgtaccatctgataactcttgaagatacagagagaaatccatcttttcccaggtctccttcactgaaaacaaaaatctacttacatacactgtcaccttagcatcagagtcggattaatgaactgcggaacaagaggttgtgagaatctaagatggaacctttctttctttctttctttttttttaaattttgtattttccatccaacagcagtgtgtagagagaatattatgcagatgccgttaattttttaccctatgtttacatcttgaggcagcagagtctgtctgcagctatgtggtgagctatgtaaggaaaaaaatctgggctgttagagtgaaaaagtgtgttttatgtcaattgtgaaaggaaaatgttaggagtatggtttttaaacttgggcttcattttaaacttttttttttaaacccagttatttcacttgatttgctagcttcagagaagagatccgaatctgtgcccagcgctaaaggctcagtgttagcatggcttgtgctggccggtgtgccatattcttgttggagatgaaccgtagcaccagagcccattcttccttgtcagtcttggcccaaagatgtcaccattcctagttatttgtcaccacataattggtgttgattggaaactttttctgagatgggacagaactgctgggttgtctttttccatgtaacttaagcatagtaatataaataaagtaatagttggatgcttttggtcctgtgttgcttttaaaaacaccttataaaagaggagagtatttgataagcaattttcatagtagtaaagttttttttcatctcttaaactaaattgaccatgcatataatattctttgtttaaatgaaagcatactgttgaaacccgcagtgttgcatttagaaaacagttgaacagaatgtcaatgtgcattcatgcaaaaaaacatttaatctgcatctgttttagaaaagggggaaatgaagcaacttgtctaaaaatactgctttacaaagcatttcagcctttccccctcagttttgcattgattttttgacaagtctgtagagcctaatagtttccatcaaaggcctagatctcttatttagcatttttttcagctcttctctcagaagttcagctgttgaaacgaaaactgtactttgtaccctcacatacaaagggatcaaatttgacctggtgttattttagccccaaatttatgacattacacaatattaaaatgtaaatgtttctttacccaaactacttctagatattctagtatttgcttctggtggaattaaatgacggtaaaattggctaattatttgaatgaatgaatggatggatgttttgcatgctcaatttctaggtcctttgtctagaaaggaaatttgcctcagttgaattagtgaaatatttctgtcgttgatattaaaagtgacttctgagtacagttaagttcctcctatttgccactgggctgttggttagaagcataggtaactgattaagtaggtatgatactgcatttgaaataagtggacacaaactatcctttctccaccatggactcaatctgagaacaacagcattcatttccattcatttccatactggcttttgattatatgcagattcctagtagcatgccttacctacagcactatgtgcatttgctgtcacaataaagtatattttgtcttgca

SEQ ID NO: 57865 - DNA, 2164 bp, Homo sapiens
taggctgcgttgaggcccaaccagggggaggcggggccaaggccaggcctgactaaacctggagactcgggtggccgaggggcttcataccagctgaagagcgacaagccgctggcagccgcggatctcaccgccgctcagggtttttagaacttcagccataaaaatgggcagaattttccttgatcatatcggtggtacccgtctgttttcttgtgcaaactgtgatacgatcctgaccaaccgctcagaactcatctccactcgtttcacaggcgccactggcagagcatttctttttaacaaggtagttaacctgcagtacagcgaagttcaagatcgggtcatgctcactggccgccacatggttcgagatgtgaccagcgatataaggaaggccgcgtgatcctggaacgtgctctagttcgagagagtgagggctttgaggagcatgtaccatctgataactcttgaagatacagagagaaatccatcttttcccaggtctccttcactgaaaacaaaaatctacttacatacactgtcaccttagcatcagagtcggattaatgaactgcggaacaagaggttgtgagaatctaagatggaacctttctttctttctttctttttttttaaattttgtattttccatccaacagcagtgtgtagagagaatattatgcagatgccgttaattttttaccctatgtttacatcttgaggcagcagagtctgtctgcagctatgtggtgagctatgtaaggaaaaaaatctgggctgttagagtgaaaaagtgtgttttatgtcaattgtgaaaggaaaatgttaggagtatggtttttaaacttgggcttcattttaaacttttttttttaaacccagttatttcacttgatttgctagcttcagagaagagatccgaatctgtgcccagcgctaaaggctcagtgttagcatggcttgtgctggccggtgtgccatattcttgttggagatgaaccgtagcaccagagcccattcttccttgtcagtcttggcccaaagatgtcaccattcctagttatttgtcaccacataattggtgttgattggaaactttttctgagatgggacagaactgctgggttgtctttttccatgtaacttaagcatagtaatataaataaagtaatagttggatgcttttggtcctgtgttgcttttaaaaacaccttataaaagaggagagtatttgataagcaattttcatagtagtaaagttttttttcatctcttaaactaaattgaccatgcatataatattctttgtttaaatgaaagcatactgttgaaacccgcagtgttgcatttagaaaacagttgaacagaatgtcaatgtgcattcatgcaaaaaaacatttaatctgcatctgttttagaaaagggggaaatgaagcaacttgtctaaaaatactgctttacaaagcatttcagcctttccccctcagttttgcattgattttttgacaagtctgtagagcctaatagtttccatcaaaggcctagatctcttatttagcatttttttcagctcttctctcagaagttcagctgttgaaacgaaaactgtactttgtaccctcacatacaaagggatcaaatttgacctggtgttattttagccccaaatttatgacattacacaatattaaaatgtaaatgtttctttacccaaactacttctagatattctagtatttgcttctggtggaattaaatgacggtaaaattggctaattatttgaatgaatgaatggatggatgttttgcatgctcaatttctaggtcctttgtctagaaaggaaatttgcctcagttgaattagtgaaatatttctgtcgttgatattaaaagtgacttctgagtacagttaagttcctcctatttgccactgggctgttggttagaagcataggtaactgattaagtaggtatgatactgcatttgaaataagtggacacaaactatcctttctccaccatggactcaatctgagaacaacagcattcatttccattcatttccatactggcttttgattatatgcagattcctagtagcatgccttacctacagcactatgtgcatttgctgtcacaataaagtatattttgtcttgca

SEQ ID NO: 57866 - DNA, 1114 bp, Homo sapiens
taggctgcgttgaggcccaaccagggggaggcggggccaaggccaggcctgactaaacctggagactcgggtggccgaggggcttcataccagctgaagagcgacaagccgctggcagccgcggatctcaccgccgctcagggtttttagaacttcagccataaaaatgggcagaattttccttgatcatatcggtggtacccgtctgttttcttgtgcaaactgtgatacgatcctgaccaaccgctcagaactcatctccactcgtttcacaggcgccactggcagagcatttctttttaacaaggtagttaacctgcagtacagcgaagttcaagatcgggtcatgctcactggccgccacatggttcgagatgtgagctgcaaaaactgcaatagcaaactgggatggatctatgagtttgccactgaagacagccagcgatataaggaaggccgcgtgatcctggaacgtgctctagttcgagagagtgagggctttgaggagcatgtaccatctgataactcttgaagatacagagagaaatccatcttttcccaggtctccttcactgaaaacaaaaatctacttacatacactgtcaccttagcatcagagtcggattaatgaactgcggaacaagaggttgtgagaatctaagatggaacctttctttctttctttctttttttttaaattttgtattttccatccaacagcagtgtgtagagagaatattatgcagatgccgttaattttttaccctatgtttacatcttgaggcagcagagtctgtctgcagctatgtggtgagctatgtaaggaaaaaaatctgggctgttagagtgaaaatgagtacagttaagttcctcctatttgccactgggctgttggttagaagcataggtaactgattaagtaggtatgatactgcatttgaaataagtggacacaaactatcctttctccaccatggactcaatctgagaacaacagcattcatttccattcatttccatactggcttttgattatatgcagattcctagtagcatgccttacctacagcactatgtgcatttgctgtcacaataaagtatattttgtcttgca

SEQ ID NO: 57867 - DNA, 1130 bp, Homo sapiens
tgtagcgttccgactctagtcttcgtcaccacgtcacttatcgtcaccagttaactatgtccgaaatagcgcgacgcatgcgggacggtcttgactctgtgcctgagtgacctgaggcatcgagctctagttcgtgttcttggtcgttgcttgtgcccctgtgtgattttgttctcccacaaaatgcccgaggagagtatttgataagcaattttcatagtagtaaagttttttttcatctcttaaactaaattgaccatgcatataatattctttgtttaaatgaaagcatactgttgaaacccgcagtgttgcatttagaaaacagttgaacagaatgtcaatgtgcattcatgcaaaaaaacatttaatctgcatctgttttagaaaagggggaaatgaagcaacttgtctaaaaatactgctttacaaagcatttcagcctttccccctcagttttgcattgattttttgacaagtctgtagagcctaatagtttccatcaaaggcctagatctcttatttagcatttttttcagctcttctctcagaagttcagctgttgaaacgaaaactgtactttgtaccctcacatacaaagggatcaaatttgacctggtgttattttagccccaaatttatgacattacacaatattaaaatgtaaatgtttctttacccaaactacttctagatattctagtatttgcttctggtggaattaaatgacggtaaaattggctaattatttgaatgaatgaatggatggatgttttgcatgctcaatttctaggtcctttgtctagaaaggaaatttgcctcagttgaattagtgaaatatttctgtcgttgatattaaaagtgacttctgagtacagttaagttcctcctatttgccactgggctgttggttagaagcataggtaactgattaagtaggtatgatactgcatttgaaataagtggacacaaactatcctttctccaccatggactcaatctgagaacaacagcattcatttccattcatttccatactggcttttgattatatgcagattcctagtagcatgccttacctacagcactatgtgcatttgctgtcacaataaagtatattttgtcttgca

SEQ ID NO: 57868 - DNA, 2364 bp, Homo sapiens
taggctgcgttgaggcccaaccagggggaggcggggccaaggccaggcctgactaaacctggagactcgggtggccgaggggcttcataccagctgaagagcgacaagccgctggcagccgcggatctcaccgccgctcaggagatctgttggctcaactctgaggcatttttattctcacggtcgctcttggacgaagatgcgagaagagcctgcacagttgtgtctaggatacgtctcagtccagtcatagagatattgggcgagcaattcttccctgtgactctatatcgggtgagttacccgtgcgtcgttttgctctggtggcaacagctggtagatgacgatctctgatcctaactcgtctcgagaatctcatcgtccatcgtccgttggcacacggtcgcctacatgtggcagtacgcatgttgcctttgtgtacagctaaggtagttaacctgcagtacagcgaagttcaagatcgggtcatgctcactggccgccacatggttcgagatgtgagctgcaaaaactgcaatagcaaactgggatggatctatgagtttgccactgaagacagccagcgatataaggaaggccgcgtgatcctggaacgtgctctagttcgagagagtgagggctttgaggagcatgtaccatctgataactcttgaagatacagagagaaatccatcttttcccaggtctccttcactgaaaacaaaaatctacttacatacactgtcaccttagcatcagagtcggattaatgaactgcggaacaagaggttgtgagaatctaagatggaacctttctttctttctttctttttttttaaattttgtattttccatccaacagcagtgtgtagagagaatattatgcagatgccgttaattttttaccctatgtttacatcttgaggcagcagagtctgtctgcagctatgtggtgagctatgtaaggaaaaaaatctgggctgttagagtgaaaaagtgtgttttatgtcaattgtgaaaggaaaatgttaggagtatggtttttaaacttgggcttcattttaaacttttttttttaaacccagttatttcacttgatttgctagcttcagagaagagatccgaatctgtgcccagcgctaaaggctcagtgttagcatggcttgtgctggccggtgtgccatattcttgttggagatgaaccgtagcaccagagcccattcttccttgtcagtcttggcccaaagatgtcaccattcctagttatttgtcaccacataattggtgttgattggaaactttttctgagatgggacagaactgctgggttgtctttttccatgtaacttaagcatagtaatataaataaagtaatagttggatgcttttggtcctgtgttgcttttaaaaacaccttataaaagaggagagtatttgataagcaattttcatagtagtaaagttttttttcatctcttaaactaaattgaccatgcatataatattctttgtttaaatgaaagcatactgttgaaacccgcagtgttgcatttagaaaacagttgaacagaatgtcaatgtgcattcatgcaaaaaaacatttaatctgcatctgttttagaaaagggggaaatgaagcaacttgtctaaaaatactgctttacaaagcatttcagcctttccccctcagttttgcattgattttttgacaagtctgtagagcctaatagtttccatcaaaggcctagatctcttatttagcatttttttcagctcttctctcagaagttcagctgttgaaacgaaaactgtactttgtaccctcacatacaaagggatcaaatttgacctggtgttattttagccccaaatttatgacattacacaatattaaaatgtaaatgtttctttacccaaactacttctagatattctagtatttgcttctggtggaattaaatgacggtaaaattggctaattatttgaatgaatgaatggatggatgttttgcatgctcaatttctaggtcctttgtctagaaaggaaatttgcctcagttgaattagtgaaatatttctgtcgttgatattaaaagtgacttctgagtacagttaagttcctcctatttgccactgggctgttggttagaagcataggtaactgattaagtaggtatgatactgcatttgaaataagtggacacaaactatcctttctccaccatggactcaatctgagaacaacagcattcatttccattcatttccatactggcttttgattatatgcagattcctagtagcatgccttacctacagcactatgtgcatttgctgtcacaataaagtatattttgtcttgca

SEQ ID NO: 57869 - DNA, 863 bp, Homo sapiens
agcagattggatattaagtataaatcagctctctgtgtatgtccttgtgtggtggtataactgacaacaggtagggttcctgatgggattgggttccaccaatcagagccacttgcatgagacctcaactgagagccaggatgtcatctccaccagaacaaggactacgttttgtatgttgctgttccgttagtgccagaacatgcccacccctgctcagtaaataagcgttaagtgaatgaattaataagtgaaaggctgtgtttgaagaggaggggctcactctaaatcttgaagatgttcagcctcgaaaaagtagaagtcattgtgaccaaagatgatgccaccatgcctttgaaaaagaaaggtgatgagcctcaaatggaaaaatacattcaagaaaggtcaatgctaccaccattcccctctgcccctccactcctgaggccatcatgatgaagccagtgggaactccagtggaaggacccagacaggaataagatcacctgggccttcaccttccttcaccgaccgagagctcttctcttcctgcgcttttattttaatctaggacatcccctcacttggctcctagaggccctgtttcatttaatttggcctccttgcccaagcagaatcctgggcaagcctgggaacctaataccctgaattcaaatgaagttgcctggaggaaactgaatgaatcaggtagctaagatttggcctaacgttgatctatttttggccaaagccaacctccactaataggtctctactaatagacttgcaaagatggagctctgaatcaatgctaaacaagagttataaatcatgaagacgtttgctgtctttttacctcccag

SEQ ID NO: 57870 - DNA, 523 bp, Homo sapiens
agcagattggatattaagtataaatcagctctctgtgtatgtccttgtgtggtggtataactgacaacaggtagggttcctgatgggattgggttccaccaatcagagccacttgcatgagacctcaactgagagccaggtgtttgaagaggaggggctcactctaaatcttgaagatgttcagcctcgaaaaagtagaagtcattgtgaccaaagatgatgccaccatgcctttgaaaaagaaaggtgatgagcctcaaatggaaaaatacattcaagaaaggtcaatgctagtgagtatgaatgaacacatagcaaaaatttcaggtagaacagccatgccaagggctggtgggacaggtgaggccgagtgaataaaaagaagtagccccagagacactcaaggtggttccagctgcttttgaaggaggtttctttctaagaggtggctgggcttggtttcagcgtattccaatttgggactcatgaactgcaactaataaagatcaaaaaactgatacag

SEQ ID NO: 57871 - DNA, 157 bp, Homo sapiens
agaaaatgtgaatttttcgtaataattgcattttagtgaattgtacagtgggtggaaagggcatttggagctcattagaatgagacatagtacaccccaatggccctgtttattaaatgtagtggattaagtgtctgtcaacaaatacaccaaaacc

SEQ ID NO: 57872 - DNA, 480 bp, Homo sapiens
gatatatggcctgctgtcccgttcagtctagaaaacgcctcctcagggtccctgcagatggtcacctccctctgcaggaggacgtccagtgggaggagagccacttccccaggtctccctgacactaatgtcagaaggtgctttcttaggttgaatcaaaatctctctccctgtgtcttctctttgcttcctgttcttttctctggagcaacatgatgtaaataagtttattttcttttgtgcacatcagaatttcatattcaaaggacatcatcagctctcttgttagaaggggtccaggctgaacaccctcttttctctcaatgatcccagctatgacacagttttctgatcttcaacatcctggaggcccaagactattcaaatatgtcacaaatatctctaatcacatcttgtgattatgacttggatagaagataaacattatttccataatgatgaacataagacatttgagat

SEQ ID NO: 57873 - DNA, 442 bp, Homo sapiens
tcctgacttttttcagccacagtgagtctctgagacctagttttggcagaaggaagtaccagagggagctgagctgttgaacattatgtgcgatcatgtaataactgcaatcggaagggaaacactcagagtcctggagaaagagaaattcgcatttgtggacgcctgctgggagctaggcactttcgaatagttcctgtcacctaacttaaaatttcatattcaaaggacatcatcagctctcttgttagaaggggtccaggctgaacaccctcttttctctcaatgatcccagctatgacacagttttctgatcttcaacatcctggaggcccaagactattcaaatatgtcacaaatatctctaatcacatcttgtgattatgacttggatagaagataaacattatttccataatgatgaacataagacatttgagat

SEQ ID NO: 57874 - DNA, 432 bp, Homo sapiens
cactctctattcagaaatgcagaagcgcagccagttgcgaaatcacagcgacttgctcaatttgcagtgtgcgatcttctcctgcagggctccaacctgaatatgccaacagagagggcagaaaattccctggccaggctgtggaaggggaaatcatttggatctgtttaaaaggggaaagaattaagagagctgacatttccggaagaaacaacgttcaggcatgcaactggaatttaaatgagtatctgctttcgatgctgacagcaggagccttccctcccatatgcccgcaactgcacactcaaacctcaggtagcacagaaaagaccagcgctccgactcctggggccagtggtgctggattttatttgcacttttctgggtttaaatattttgagaatttttttaaaaagcatttctctcttctct

SEQ ID NO: 57875 - DNA, 411 bp, Homo sapiens
cactctctattcagaaatgcagaagcgcagccagttgcgaaatcacagcgacttgctcaatttgcagtgtgcgatcttctcctgcagggctccaacctgaatatgccaacagagagggcagaaaattccctggccaggctgtggaaggtgcggactggaggctgcgctgtcttgaacctctgccatctcagataaaatagcccaaggcacagtcccatctccctgccggtctccccttccctctccctcactgccagctttaaccttagcaatcatttttaggcgactgatgctcaactacggagaccctttgtcactgctaatgacttctccctgtccatcttctcccgactcgggatatctatggctctgttgccacatttgtcatctctggccagggaggaggcatct

SEQ ID NO: 57876 - DNA, 2412 bp, Homo sapiens
cgggcctggctgaggcggaggttgttgcggatgcttctctctccaggcgcaccgcagattcctgcccgggggttggacccgaggaaccgccgtctctactggttccgacggccagaggctgggccctaggctgagcggagagtgggactggagcctgaaacgggcgcctaaaagaagcccgtgcatcccataggcctgcgcctcaggcttggagacgggcgggcggagaccgcgctgagtctttttttttttttcctagcagctggcgttcttatctcacccgggaggctgtaaaaatctccgtccttaacagtaacaccatcaggtcctatcagttaagagctgcttgttatttgcatgcattcttataattaaatctcctaacaaccctgtaagcaaaattctgtggcatctctggaatactacctgagaatttttgtgtgccatgtcgaagaaacgcaaatgggatgatgactatgttcgctactggttcacctgtacaacggaagtagatggaactcagcgtccacagtgtgtgttgtgtaactcagtattttcaaatgctgacctcagaccatcaaaactgtcagaccattttaacagacagcatggtggtgtagctgggcatgatctcaatagcctgaagcatatgccagcaccatctgatcagagtgaaaccttgaaagcatttggagttgcatctcatgaggatactttattacaagcatcgtatcaatttgcgtatttatgtgccaaggagaagaatcctcatacagtagctgaaaagttagtgaaaccttgtgcactggaaatagcacaaatagttttgggaccagatgcacaaaaaaagcttcagcaggtacccttatcagatgatgtgatccattctagaattgatgaaatgagccaggatatcttacagcaagttctagaagatatcaaagccagtcctcttaaagtgggtattcagcttgctgagacaactgacatggatgactgcagtcagctaatggcatttgtgcgctatataaaagaaagagagatcgtagaagaatttctcttctgtgaaccattgcagctatccatgaaaggaatagatgtgttcaatctcttcagagacttctttctgaagcataagatagcacttgatgtatgtggctctgtttgtactgatggtgcctcctctatgctaggagaaaattccgagtttgttgcctacgtgaaaaaagagatacctcatatcgtagttacacattgtttattgaatcctcatgcacttgtcataaagacattgcctacaaaactgagggatgctctgtttactgtggtgagggtaataaatttcatcaaagggagagctccaaatcatcgcctatttcaggctttctttgaagaaattggcatagaatatagtgtcctccttttccatactgaaatgaggtggctttcccgaggccaaatacttactcacatttttgaaatgtatgaagaaataaatcagtttcttcaccacaagagcagtaatttagttgatggctttgaaaataaagagtttaaaattcacctagcataccttgcagatttattcaaacacttaaatgaactcagtgcatctatgcagaggactgggatgaacacagtatcagctagagagaagttatctgcttttgttaggaagtttccattttggcaaaaacgaattgagaaaagaaattttaccaattttccttttcttgaagaaataattgtttcagataatgaaggcatattcattgcagctgaaataacactgcatctgcaacaattgagcaacttcttccatggatatttttccattggagatcttaatgaggcaagtaaatggatattggatccatttctttttaatatcgattttgttgatgatagttatttaatgaaaaatgatcttgctgaattacgagctagtggccaaatcctaatggaatttgagacaatgaagcttgaggatttctggtgtgcccaattcacagcatttccaaacctggcaaagacagctctagaaatccttatgccatttgcaactacatacctttgtgagttgggattttcatcacttttacatttcaaaacaaagtccagaagctgctttaatctgagtgatgatatccgtgtggctatttcaaaaaaagttcctcgtttctcggacatcattgaacaaaagctacagctacagcagaagtcactgtaagctgatatacttttttaatgaataatttcaatcttaatatcattgtaaaattaagctgtaattctgtctctttcatatttatgatatactgaattctatgtctaaaaaacttaagaactttaattttgaatgaggcatgtgaaaatatgttttgagaataaaaacacagcagaaaagattaa

SEQ ID NO: 57877 - DNA, 2789 bp, Homo sapiens
cgggcctggctgaggcggaggttgttgcggatgcttctctctccaggcgcaccgcagattcctgcccgggggttggacccgaggaaccgccgtctctactggttccgacggccagaggctgggccctaggctgagcggagagtgggactggagcctgaaacgggcgcctaaaagaagcccgtgcatcccataggcctgcgcctcaggcttggagacgggcgggcggagaccgcgctgagtctttttttttttttcctagcagctggcgttcttatctcacccgggaggctgtaaaaatctccgtccttaacagtaacaccatcaggtcctatcagttaagagctgcttgttatttgcatgcattcttataattaaatctcctaacaaccctgtaagcaaaattctgtggcatctctggaatactacctgagaatttttgtgtgccatgtcgaagaaacgcaaatgggatgatgactatgttcgctactggttcacctgtacaacggaagtagatggaactcagcgtccacagtgtgtgttgtgtaactcagtattttcaaatgctgacctcagaccatcaaaactgtcagaccattttaacagacagcatggtggtgtagctgggcatgatctcaatagcctgaagcatatgccagcaccatctgatcagagtgaaaccttgaaagcatttggagttgcatctcatgaggatactttattacaagcatcgtatcaatttgcgtatttatgtgccaaggagaagaatcctcatacagtagctgaaaagttagtgaaaccttgtgcactggaaatagcacaaatagttttgggaccagatgcacaaaaaaagcttcagcaggtacccttatcagatgatgtgatccattctagaattgatgaaatgagccaggatatcttacagcaagttctagaagatatcaaagccagtcctcttaaagtgggtattcagcttgctgagacaactgacatggatgactgcagtcagctaatggcatttgtgcgctatataaaagaaagagagatcgtagaagaatttctcttctgtgaaccattgcagctatccatgaaaggaatagatgtgttcaatctcttcagagacttctttctgaagcataagatagcacttgatgtatgtggctctgtttgtactgatggtgcctcctctatgctaggagaaaattccgagtttgttgcctacgtgaaaaaagagatacctcatatcgtagttacacattgtttattgaatcctcatgcacttgtcataaagacattgcctacaaaactgagggatgctctgtttactgtggtgagggtaataaatttcatcaaagggagagctccaaatcatcgcctatttcaggctttctttgaagaaattggcatagaatatagtgtcctccttttccatactgaaatgaggtggctttcccgaggccaaatacttactcacatttttgaaatgtatgaagaaataaatcagtttcttcaccacaagagcagtaatttagttgatggctttgaaaataaagagtttaaaattcacctagcataccttgcagatttattcaaacacttaaatgaactcagtgcatctatgcagaggactgggatgaacacagtatcagctagagagaagttatctgcttttgttaggaagtttccattttggcaaaaacgaattgagaaaagaaattttaccaattttccttttcttgaagaaataattgtttcagataatgaaggcatattcattgcagctgaaataacactgcatctgcaacaattgagcaacttcttccatggatatttttccattggagatcttaatgaggcaagtaaatggatattggatccatttctttttaatatcgattttgttgatgatagttatttaatgaaaaatgatcttgctgaattacgagctagtggccaaatcctaatggaatttgagacaatgaagcttgaggatttctggtgtgcccaattcacagcatttccaaacctggcaaagacagctctagaaatccttatgccatttgcaactacatacctttgtgagttgggattttcatcacttttacatttcaaaacaaagtccagaagctgctttaatctgagtgatgatatccgtgtggctatttcaaaaaaagttcctcgtttctcggacatcattgaacaaaagctacagctacagcagaagtcactgtaagctgatatacttttttaatgaataatttcaatcttaatatcattgtaaaattaagctgtaattctgtctctttcatatttatgatatactgaattctatgtctaaaaaacttaagaactttaattttgaatgaggcatgtgaaaatatgttttgagaataaaaacacagcagaaaagattaagtactactgcctagttgctatcatgagattttcccaattctaagtatctgtttaacctgttcgtgtggtatatgaaaaagatacctaagcactagaatatccagctaaatggtgcaataggctaggaattgagccaggagaaaagagaagatatcccagaagtcaaaaaggcaaaatgaaagattgagttcgcccgtctttgttatggagaggttaatgaaatcagaagaggattatgaaatataatgggaaaaggaatgatctggcttatgtaagacttacttttaaatatactctttggagttagtctcacaatgtccattcccctagctcctgtgctatgaatatcatattaataaatagcctaatatattaat

SEQ ID NO: 57878 - DNA, 2282 bp, Homo sapiens
ataattcaccaataaaggacttacaggtgttcataacttgtctaagctcaaatctcccatatataacttgctggcaaatcatttattccagggcattagctatgagttgctagctttaagttgaactatatcctgtcatggcttacttcgaattgacatgctgcaggctgtatcttgacatgatacaagatagcatgtgatgtggctttgttttaattcagttagccactggtttttaatgtgtgggttatattctactcccaaagcaaaattctgtggcatctctggaatactacctgagaatttttgtgtgccatgtcgaagaaacgcaaatgggatgatgactatgttcgctactggttcacctgtacaacggaagtagatggaactcagcgtccacagtgtgtgttgtgtaactcagtattttcaaatgctgacctcagaccatcaaaactgtcagaccattttaacagacagcatggtggtgtagctgggcatgatctcaatagcctgaagcatatgccagcaccatctgatcagagtgaaaccttgaaagcatttggagttgcatctcatgaggatactttattacaagcatcgtatcaatttgcgtatttatgtgccaaggagaagaatcctcatacagtagctgaaaagttagtgaaaccttgtgcactggaaatagcacaaatagttttgggaccagatgcacaaaaaaagcttcagcaggtacccttatcagatgatgtgatccattctagaattgatgaaatgagccaggatatcttacagcaagttctagaagatatcaaagccagtcctcttaaagtgggtattcagcttgctgagacaactgacatggatgactgcagtcagctaatggcatttgtgcgctatataaaagaaagagagatcgtagaagaatttctcttctgtgaaccattgcagctatccatgaaaggaatagatgtgttcaatctcttcagagacttctttctgaagcataagatagcacttgatgtatgtggctctgtttgtactgatggtgcctcctctatgctaggagaaaattccgagtttgttgcctacgtgaaaaaagagatacctcatatcgtagttacacattgtttattgaatcctcatgcacttgtcataaagacattgcctacaaaactgagggatgctctgtttactgtggtgagggtaataaatttcatcaaagggagagctccaaatcatcgcctatttcaggctttctttgaagaaattggcatagaatatagtgtcctccttttccatactgaaatgaggtggctttcccgaggccaaatacttactcacatttttgaaatgtatgaagaaataaatcagtttcttcaccacaagagcagtaatttagttgatggctttgaaaataaagagtttaaaattcacctagcataccttgcagatttattcaaacacttaaatgaactcagtgcatctatgcagaggactgggatgaacacagtatcagctagagagaagttatctgcttttgttaggaagtttccattttggcaaaaacgaattgagaaaagaaattttaccaattttccttttcttgaagaaataattgtttcagataatgaaggcatattcattgcagctgaaataacactgcatctgcaacaattgagcaacttcttccatggatatttttccattggagatcttaatgaggcaagtaaatggatattggatccatttctttttaatatcgattttgttgatgatagttatttaatgaaaaatgatcttgctgaattacgagctagtggccaaatcctaatggaatttgagacaatgaagcttgaggatttctggtgtgcccaattcacagcatttccaaacctggcaaagacagctctagaaatccttatgccatttgcaactacatacctttgtgagttgggattttcatcacttttacatttcaaaacaaagtccagaagctgctttaatctgagtgatgatatccgtgtggctatttcaaaaaaagttcctcgtttctcggacatcattgaacaaaagctacagctacagcagaagtcactgtaagctgatatacttttttaatgaataatttcaatcttaatatcattgtaaaattaagctgtaattctgtctctttcatatttatgatatactgaattctatgtctaaaaaacttaagaactttaattttgaatgaggcatgtgaaaatatgttttgagaataaaaacacagcagaaaagattaa

SEQ ID NO: 57879 - DNA, 2486 bp, Homo sapiens
cgggcctggctgaggcggaggttgttgcggatgcttctctctccaggcgcaccgcagattcctgcccgggggttggacccgaggaaccgccgtctctactggttccgacggccagaggctgggccctaggctgagcggagagtgggactggagcctgaaacgggcgcctaaaagaagcccgtgcatcccataggcctgcgcctcaggcttggagacgggcgggcggagaccgcgctgagtctttttttttttttcctagcagctggcgttcttatctcacccgggaggctgtaaaaatctccgtccttaacagtaacaccatcaggtcctatcagttaagagctgcttgttatttgcatgcattcttataattaaatctcctaacaaccctgtaagccacattctctggcacagaactttggaaactttggggatcacttacttatcttggagatagaatgttttctaagcaaaattctgtggcatctctggaatactacctgagaatttttgtgtgccatgtcgaagaaacgcaaatgggatgatgactatgttcgctactggttcacctgtacaacggaagtagatggaactcagcgtccacagtgtgtgttgtgtaactcagtattttcaaatgctgacctcagaccatcaaaactgtcagaccattttaacagacagcatggtggtgtagctgggcatgatctcaatagcctgaagcatatgccagcaccatctgatcagagtgaaaccttgaaagcatttggagttgcatctcatgaggatactttattacaagcatcgtatcaatttgcgtatttatgtgccaaggagaagaatcctcatacagtagctgaaaagttagtgaaaccttgtgcactggaaatagcacaaatagttttgggaccagatgcacaaaaaaagcttcagcaggtacccttatcagatgatgtgatccattctagaattgatgaaatgagccaggatatcttacagcaagttctagaagatatcaaagccagtcctcttaaagtgggtattcagcttgctgagacaactgacatggatgactgcagtcagctaatggcatttgtgcgctatataaaagaaagagagatcgtagaagaatttctcttctgtgaaccattgcagctatccatgaaaggaatagatgtgttcaatctcttcagagacttctttctgaagcataagatagcacttgatgtatgtggctctgtttgtactgatggtgcctcctctatgctaggagaaaattccgagtttgttgcctacgtgaaaaaagagatacctcatatcgtagttacacattgtttattgaatcctcatgcacttgtcataaagacattgcctacaaaactgagggatgctctgtttactgtggtgagggtaataaatttcatcaaagggagagctccaaatcatcgcctatttcaggctttctttgaagaaattggcatagaatatagtgtcctccttttccatactgaaatgaggtggctttcccgaggccaaatacttactcacatttttgaaatgtatgaagaaataaatcagtttcttcaccacaagagcagtaatttagttgatggctttgaaaataaagagtttaaaattcacctagcataccttgcagatttattcaaacacttaaatgaactcagtgcatctatgcagaggactgggatgaacacagtatcagctagagagaagttatctgcttttgttaggaagtttccattttggcaaaaacgaattgagaaaagaaattttaccaattttccttttcttgaagaaataattgtttcagataatgaaggcatattcattgcagctgaaataacactgcatctgcaacaattgagcaacttcttccatggatatttttccattggagatcttaatgaggcaagtaaatggatattggatccatttctttttaatatcgattttgttgatgatagttatttaatgaaaaatgatcttgctgaattacgagctagtggccaaatcctaatggaatttgagacaatgaagcttgaggatttctggtgtgcccaattcacagcatttccaaacctggcaaagacagctctagaaatccttatgccatttgcaactacatacctttgtgagttgggattttcatcacttttacatttcaaaacaaagtccagaagctgctttaatctgagtgatgatatccgtgtggctatttcaaaaaaagttcctcgtttctcggacatcattgaacaaaagctacagctacagcagaagtcactgtaagctgatatacttttttaatgaataatttcaatcttaatatcattgtaaaattaagctgtaattctgtctctttcatatttatgatatactgaattctatgtctaaaaaacttaagaactttaattttgaatgaggcatgtgaaaatatgttttgagaataaaaacacagcagaaaagattaa

SEQ ID NO: 57880 - DNA, 8050 bp, Homo sapiens
gggagggacgaaccgcgcgaccgagccctacaaaacccgccccggccgagtggcgaggcgagctttccagccgggctcccagagcgcgctgcgcaggagacgcggtggcctgagagcctgagggtccccggactcgcccaggctctgagctctctcccaccatgagcgcccggaccgcccccaggccgcaggtgctcctgctgccgctcctgctggtgctcctggcggcggcgcccgcagccagcaagggttgtgtctgtaaagacaaaggccagtgcttctgtgacggggccaaaggggagaagggggagaagggctttcctggaccccccggttctcctggccagaaaggattcacaggtcctgaaggcttgcctggaccgcagggacccaagggctttccaggacttccaggactcacgggttccaaaggtgtaaggggaataagtggattgccaggattttctggttctcctggacttccaggcaccccaggcaataccgggccttacggacttgtcggtgtaccaggatgcagtggttctaagggtgagcaggggtttccaggactcccagggacaccgggctacccagggatcccgggtgctgctggtttgaaaggacaaaagggtgctcctgctaaaggagaagatatagaacttgatgcaaaaggcgaccccgggttgccaggggctccaggaccccagggtttgccaggccctccaggttttcctgggcctgttggcccacctggtcctccgggattctttggctttccaggagccatgggacctagaggacctaagggtcacatgggtgaaagagtgataggacataaaggagagcggggtgtgaaagggttaacaggacccccgggaccaccaggaacagttattgtgaccctaactggcccagataacagaacggacctcaagggggaaaagggagacaagggagcaatgggcgagcctggacctcctggaccctcaggactgcctggagaatcatatggatctgaaaagggtgctcctggagaccctggcctgcagggaaaacccggaaaagatggtgttcctggcttccctggaagtgagggagtcaagggcaacaggggtttccctgggttaatgggtgaagatggcattaagggacagaaaggggacattggccctccaggatttcgtggtccaacagaatattatgacacataccaggaaaagggagatgaaggcactccaggcccaccagggcccagaggagctcgtggcccacaaggtcccagtggtccccccggagttcctggaagtcctggatcatcaaggcctggcctcagaggagcccctggatggccaggcttgaaaggaagtaaaggggaacgaggccgcccaggaaaggatgccatggggactcctgggtccccaggttgtgctggttcaccaggtcttccaggatcaccgggacctccaggaccgccaggtgacatcgtttttcgcaagggtccacctggagatcacggactgccaggctatctagggtctccaggaatcccaggagttgatgggcccaaaggagaaccaggcctcctgtgtacacagtgcccttatatcccagggcctcccggtctcccaggattgccagggttacatggtgtaaaaggaatcccaggaagacaaggcgcagctggcttgaaaggaagcccagggtccccaggaaatacaggtcttccaggatttccaggtttcccaggtgcccagggtgacccaggacttaaaggagaaaaaggtgaaacacttcagcctgaggggcaagtgggtgtcccaggtgacccggggctcagaggccaacctgggagaaagggcttggatggaattcctggaactctgggagtgaaaggattaccaggacctaaaggcgaactggctctgagtggtgagaaaggggaccaaggtcctccaggggatcctggctcccctgggtccccaggacctgcaggaccagctggaccacctggctacggaccccaaggagaacctggtctccagggcacgcaaggagttcctggggcccccggaccacccggagaagccggccctaggggagagctcagtgtttcaacaccagttccaggccctccaggacctccagggccccctggccatcctggcccccaaggtccacctggtatccctggatccctggggaaatgtggagatcctggtcttccagggcctgatggtgaaccaggaattccaggaattggatttcctgggccacctggacctaagggagaccaaggttttccaggtacaaaaggatcactgggttgtcctggaaaaatgggagagcctgggttacctggaaagccaggcctcccaggagccaagggagaaccagcagtagccatgcctggaggaccaggaacaccaggttttccaggagaaagaggcaattctggggaacatggagaaattggactccctggacttccaggtctccctggaactccaggaaatgaagggcttgatggaccacgaggagatccagggcagcctggaccacctggagaacaaggacccccaggaaggtgcatagagggtcccaggggagcccaaggacttccaggcttaaatggattgaaagggcaacaaggcagaagaggtaaaacggggccaaagggagacccaggaattccaggcttggatagatcaggatttcctggagaaactggatcaccaggaattccaggtcatcaaggtgaaatgggaccactgggtcaaagaggatatccaggaaatccgggaattttagggccaccaggtgaagatggagtgattgggatgatgggatttcctggagccattggccctccagggccccctgggaacccaggcacaccagggcagagggggagccctggaattccaggagtaaagggccagagaggaaccccaggagccaagggggaacaaggagataaaggaaatcccgggccttcagagatatcccacgtaataggggacaaaggagaaccaggtctcaaaggattcgcaggaaatccaggtgagaaaggaaacagaggcgttccagggatgccaggtttaaagggcctcaaaggactacccggaccagcaggaccaccaggccccagaggagatttgggcagcactgggaatcctggagaaccaggactccgtggtataccaggaagcatggggaacatgggcatgccaggttctaaaggaaaaaggggaactttgggattcccaggtcgagcaggaagaccaggcctcccaggtattcatggtctccagggagataagggagagccaggttattcagaaggtacaaggccaggaccaccgggaccaacgggggatccaggactgccgggtgatatgggaaagaaaggagaaatggggcaacctggcccacctggacatttggggcctgctggacctgagggagcccctggaagtcctggaagtcctggcctcccaggaaagccaggtcctcatggtgatttgggttttaaaggaatcaaaggcctcctgggccctccaggaatcagaggccctccaggtcttccaggatttccaggatctcctggaccaatgggtataagaggtgaccaaggacgtgatggaattcctggtccagccggagaaaagggagaaacgggtttattgagggcccctccaggcccaagagggaaccctggtgctcaaggagccaaaggagacaggggagccccaggttttcctggcctcccgggcagaaaaggggccatgggagatgctggacctcgaggacccacaggcatagaaggattcccagggccaccaggtctgcccggtgcaattatccctggccagacaggaaatcgtggtccaccaggctcaagaggaagcccaggtgcgcctggtccccctggacctccagggagtcatgtaataggcataaaaggagacaaagggtctatgggccaccctggcccaaaaggtccacctggaactgcaggagacatgggaccaccaggtcgtctgggagcaccaggtactccaggtcttccaggacccagaggtgatcctggattccaggggtttccaggcgtgaaaggagaaaagggtaatcctggatttctaggatccattggacctccaggaccaattgggccaaaaggaccacctggtgtacgtggagaccctggcacacttaagattatctcccttccaggaagcccagggccacctggcacacctggagaaccagggatgcagggagaacctgggccaccagggccacctggaaacctaggaccctgtgggccaagaggtaagccaggcaaggatggaaaaccaggaactcctggaccagctggagaaaaaggcaacaaaggttctaaaggagagccaggaccagctggatcagatggattgccaggtttgaaaggaaaacgtggagacagtggatcacctgcaacctggacaacgagaggctttgtcttcacccgacacagtcaaaccacagcaattccttcatgtccagaggggacagtgccactctacagtgggttttcttttctttttgtacaaggaaatcaacgagcccacggacaagaccttggaactcttggcagctgcctgcagcgatttaccacaatgccattcttattctgcaatgtcaatgatgtatgtaattttgcatctcgaaatgattattcatactggctgtcaacaccagctctgatgccaatgaacatggctcccattactggcagagcccttgagccttatataagcagatgcactgtttgtgaaggtcctgcgatcgccatagccgttcacagccaaaccactgacattcctccatgtcctcacggctggatttctctctggaaaggattttcattcatcatgttcacaagtgcaggttctgagggcaccgggcaagcactggcctcccctggctcctgcctggaagaattccgagccagcccatttctagaatgtcatggaagaggaacgtgcaactactattcaaattcctacagtttctggctggcttcattaaacccagaaagaatgttcagaaagcctattccatcaactgtgaaagctggggaattagaaaaaataataagtcgctgtcaggtgtgcatgaagaaaagacactgaagctaaaaaagacatgcagaactgctatttttcatcctaaagaacaaagtaatgacagaacatgctgttatttaggtatttttctttaaccaaacaatattgctccatgatgacttagtacaaagtttcaatttgtttccccacaaaacaaagcaattctttcaagtgcagttctgtgatctgggtctctaatctgtgctgtttcaaagttctctgtggcaaagcagcaactattcacaaaatatcaccaaaaacctattccacttacatccaaggcactgtcactacggtgattgtatgaagtttgaatgctgcacgttatgaaatatttggcccgctggattcccacatttgtcttctttctgtctttaagactcagggaggctaaatcagtgtttgattgccccgccaacccttcctgaaacttcagaccctgggtagggaagagaaggggcatgtggtatctggagcattgtgtatagaactggattttcagacctgctgaggaccgtaaggcctgatggaacacagaactgaactgaggttcatggattttccaggactgtttcaaacatgcccattactaacggcaaaagggggattccctgatggaaccataatacccttggaaatactgtatggttttgttttgttttgttggtttttaaagatttttgtttgtttattgaattcattcactgtagctctaaaatctgcttgtatccaagcatataaaattttcccccttagtgaattagttttaaaatgatattgttatatacatactatgaaatatgtataactttaacttctgttttaccagcatacgcacacaaataacaagaatactacttatgaaatgtgcactttatcctcattccataaatgttggtgcataccttatgtaagggagcagttcaataatccatgaaagaacttaaggcatttgttggtttatcagactcggaatctatttttctcattgctctgaatatgtcatcactctaggttttacagatttattcctttgttacttctctaattcttcctttgtaaaaaaaaaaaaagcaacacttttttttatgttatatgttgtcttacaaaccatactgaaagagtcattgtttaaaatcttaatgtatcaaactgtataacttggccgctgtatgtcttaaaacctgcttttcaatgtgttgatacattcccaaggttacttaattcaacttaactatcatgttattcagcaccaagcatgtccaggcactgtactaacctacagagatgctaagagaaaaaaaagacttgtttctgatctaatatccagaaaaagtaactcattgctctgtaataatctcacatatacagtagcttcctccctctagttttttcttccttgtcactgctgttatatttcatcatgataattcagcaggccagtaaggtaaaaataaggtctatgcctagggaaactcaggcttctagtttctcttagaaaagctaagagaagataaggtctgaataatagcagaaaaaccaacatctacaaaacattaaactagtgttataccttgatgataacactattgatgagtcttagagtccagacacaaagagacaaagctttgaagatgcttttgatctacctaggtggagttggtggtgctgatatttaaattcaggctactgcttcaatctcaattgctttgtaagtgaaaacatgacccagagacagacagactatggccatggctcacatggtttacatccttcactgctcacgtgtttgctgtcaagccatttttacagtctgaaactaagatgtgcagcatttcacttatttagattcacttaacaaacaaatttttctgctttaaaaatgtcttattgtcccaaggtactatagcggatatagagctagctaatctctacaaaccctctgtaggccagtagttctcaaagtgtggtctctggaagagcagtatcagcatcatctgggaacttgtcacagatgcagattctagggaccactccagacctacagaatcagaaactcttgggggagggcccgaaatatctatgttttaccaagcccaccacatgattctgatgtactctaaatactgagaaaacctgttctatcaatccaagcacactccgcaggcagttaccagtacggctggctacaactgctccatccgtgcctctttttaaagttcaaactcacaggtgactctaaggttatctacttttactcataagtaaaagccctagactggtgctaatgtcaaaccactggcctccactcaggcctccatcttctcatgccctcttaccagtatttaacttctgaggaagacaagtgatgctaaaacctgaattccaatgaagccatatgaaccagctgtcagttgcacttctaagactttacttagcagtaaattatagctcatgtgcattatttcagatacttagcttatgagtagcttatacaattagtgaagattaatattacagattaaatgtaactgttcttaaattgggctcacttgattcacagcgtgcatacacagattgtgagaagtcttcagcaagataaacattattaactaacttatttatgaagtattaaaatgcttacatttgaacttgatggctaacttactaagattctctatgtatcaaatgtaacttactgcgactaaacttaatttaatatttactctataaccaaatgaaatatatttaaaatatattgaatattttatattgttatatcctgacaagattgttaatattttaatgtactaatatttctgtcaattatatctaaatattattttattatattgcctaagaataaacatttgttaaattgg

SEQ ID NO: 57881 - DNA, 7872 bp, Homo sapiens
gggagggacgaaccgcgcgaccgagccctacaaaacccgccccggccgagtggcgaggcgagctttccagccgggctcccagagcgcgctgcgcaggagacgcggtggcctgagagcctgagggtccccggactcgcccaggctctgagctctctcccaccatgagcgcccggaccgcccccaggccgcaggtgctcctgctgccgctcctgctggtgctcctggcggcggcgcccgcagccagcaagggttgtgtctgtaaagacaaaggccagtgcttctgtgacggggccaaaggggagaagggggagaagggctttcctggaccccccggttctcctggccagaaaggattcacaggtcctgaaggcttgcctggaccgcagggacccaagggctttccaggacttccaggactcacgggttccaaaggtgtaaggggaataagtggattgccaggattttctggttctcctggacttccaggcaccccaggcaataccgggccttacggacttgtcggtgtaccaggatgcagtggttctaagggtgagcaggggtttccaggactcccagggacaccgggctacccagggatcccgggtgctgctggtttgaaaggacaaaagggtgctcctgctaaaggagaagatatagaacttgatgcaaaaggcgaccccgggttgccaggggctccaggaccccagggtttgccaggccctccaggttttcctgggcctgttggcccacctggtcctccgggattctttggctttccaggagccatgggacctagaggacctaagggtcacatgggtgaaagagtgataggacataaaggagagcggggtgtgaaagggttaacaggacccccgggaccaccaggaacagttattgtgaccctaactggcccagataacagaacggacctcaagggggaaaagggagacaagggagcaatgggcgagcctggacctcctggaccctcaggactgcctggagaatcatatggatctgaaaagggtgctcctggagaccctggcctgcagggaaaacccggaaaagatggtgttcctggcttccctggaagtgagggagtcaagggcaacaggggtttccctgggttaatgggtgaagatggcattaagggacagaaaggggacattggccctccaggatttcgtggtccaacagaatattatgacacataccaggaaaagggagatgaaggcactccaggcccaccagggcccagaggagctcgtggcccacaaggtcccagtggtccccccggagttcctggaagtcctggatcatcaaggcctggcctcagaggagcccctggatggccaggcttgaaaggaagtaaaggggaacgaggccgcccaggaaaggatgccatggggactcctgggtccccaggttgtgctggttcaccaggtcttccaggatcaccgggacctccaggaccgccaggtgacatcgtttttcgcaagggtccacctggagatcacggactgccaggctatctagggtctccaggaatcccaggagttgatgggcccaaaggagaaccaggcctcctgtgtacacagtgcccttatatcccagggcctcccggtctcccaggattgccagggttacatggtgtaaaaggaatcccaggaagacaaggcgcagctggcttgaaaggaagcccagggtccccaggaaatacaggtcttccaggatttccaggtttcccaggtgcccagggtgacccaggacttaaaggagaaaaaggtgaaacacttcagcctgaggggcaagtgggtgtcccaggtgacccggggctcagaggccaacctgggagaaagggcttggatggaattcctggaactctgggagtgaaaggattaccaggacctaaaggcgaactggctctgagtggtgagaaaggggaccaaggtcctccaggggatcctggctcccctgggtccccaggacctgcaggaccagctggaccacctggctacggaccccaaggagaacctggtctccagggcacgcaaggagttcctggggcccccggaccacccggagaagccggccctaggggagagctcagtgtttcaacaccagttccaggccctccaggacctccagggccccctggccatcctggcccccaaggtccacctggtatccctggatccctggggaaatgtggagatcctggtcttccagggcctgatggtgaaccaggaattccaggaattggatttcctgggccacctggacctaagggagaccaaggttttccaggtacaaaaggatcactgggttgtcctggaaaaatgggagagcctgggttacctggaaagccaggcctcccaggagccaagggagaaccagcagtagccatgcctggaggaccaggaacaccaggttttccaggagaaagaggcaattctggggaacatggagaaattggactccctggacttccaggtctccctggaactccaggaaatgaagggcttgatggaccacgaggagatccagggcagcctggaccacctggagaacaaggacccccaggaaggtgcatagagggtcccaggggagcccaaggacttccaggcttaaatggattgaaagggcaacaaggcagaagaggtaaaacggggccaaagggagacccaggaattccaggcttggatagatcaggatttcctggagaaactggatcaccaggaattccaggtcatcaaggtgaaatgggaccactgggtcaaagaggatatccaggaaatccgggaattttagggccaccaggtgaagatggagtgattgggatgatgggatttcctggagccattggccctccagggccccctgggaacccaggcacaccagggcagagggggagccctggaattccaggagtaaagggccagagaggaaccccaggagccaagggggaacaaggagataaaggaaatcccgggccttcagagatatcccacgtaataggggacaaaggagaaccaggtctcaaaggattcgcaggaaatccaggtgagaaaggaaacagaggcgttccagggatgccaggtttaaagggcctcaaaggactacccggaccagcaggaccaccaggccccagaggagatttgggcagcactgggaatcctggagaaccaggactccgtggtataccaggaagcatggggaacatgggcatgccaggttctaaaggaaaaaggggaactttgggattcccaggtcgagcaggaagaccaggcctcccaggtattcatggtctccagggagataagggagagccaggttattcagaaggtacaaggccaggaccaccgggaccaacgggggatccaggactgccgggtgatatgggaaagaaaggagaaatggggcaacctggcccacctggacatttggggcctgctggacctgagggagcccctggaagtcctggaagtcctggcctcccaggaaagccaggtcctcatggtgatttgggttttaaaggaatcaaaggcctcctgggccctccaggaatcagaggccctccaggtcttccaggatttccaggatctcctggaccaatgggtataagaggtgaccaaggacgtgatggaattcctggtccagccggagaaaagggagaaacgggtttattgagggcccctccaggcccaagagggaaccctggtgctcaaggagccaaaggagacaggggagccccaggttttcctggcctcccgggcagaaaaggggccatgggagatgctggacctcgaggacccacaggcatagaaggattcccagggccaccaggtctgcccggtgcaattatccctggccagacaggaaatcgtggtccaccaggctcaagaggaagcccaggtgcgcctggtccccctggacctccagggagtcatgtaataggcataaaaggagacaaagggtctatgggccaccctggcccaaaaggtccacctggaactgcaggagacatgggaccaccaggtcgtctgggagcaccaggtactccaggtcttccaggacccagaggtgatcctggattccaggggtttccaggcgtgaaaggagaaaagggtaatcctggatttctaggatccattggacctccaggaccaattgggccaaaaggaccacctggtgtacgtggagaccctggcacacttaagattatctcccttccaggaagcccagggccacctggcacacctggagaaccagggatgcagggagaacctgggccaccagggccacctggaaacctaggaccctgtgggccaagaggtaagccaggcaaggatggaaaaccaggaactcctggaccagctggagaaaaaggcaacaaaggttctaaaggagagccaggaccagctggatcagatggattgccaggtttgaaaggaaaacgtggagacagtggatcacctgcaacctggacaacgagaggctttgtcttcacccgacacagtcaaaccacagcaattccttcatgtccagaggggacagtgccactctacagtgggttttcttttctttttgtacaaggaaatcaacgagcccacggacaagaccttgatgcactgtttgtgaaggtcctgcgatcgccatagccgttcacagccaaaccactgacattcctccatgtcctcacggctggatttctctctggaaaggattttcattcatcatgttcacaagtgcaggttctgagggcaccgggcaagcactggcctcccctggctcctgcctggaagaattccgagccagcccatttctagaatgtcatggaagaggaacgtgcaactactattcaaattcctacagtttctggctggcttcattaaacccagaaagaatgttcagaaagcctattccatcaactgtgaaagctggggaattagaaaaaataataagtcgctgtcaggtgtgcatgaagaaaagacactgaagctaaaaaagacatgcagaactgctatttttcatcctaaagaacaaagtaatgacagaacatgctgttatttaggtatttttctttaaccaaacaatattgctccatgatgacttagtacaaagtttcaatttgtttccccacaaaacaaagcaattctttcaagtgcagttctgtgatctgggtctctaatctgtgctgtttcaaagttctctgtggcaaagcagcaactattcacaaaatatcaccaaaaacctattccacttacatccaaggcactgtcactacggtgattgtatgaagtttgaatgctgcacgttatgaaatatttggcccgctggattcccacatttgtcttctttctgtctttaagactcagggaggctaaatcagtgtttgattgccccgccaacccttcctgaaacttcagaccctgggtagggaagagaaggggcatgtggtatctggagcattgtgtatagaactggattttcagacctgctgaggaccgtaaggcctgatggaacacagaactgaactgaggttcatggattttccaggactgtttcaaacatgcccattactaacggcaaaagggggattccctgatggaaccataatacccttggaaatactgtatggttttgttttgttttgttggtttttaaagatttttgtttgtttattgaattcattcactgtagctctaaaatctgcttgtatccaagcatataaaattttcccccttagtgaattagttttaaaatgatattgttatatacatactatgaaatatgtataactttaacttctgttttaccagcatacgcacacaaataacaagaatactacttatgaaatgtgcactttatcctcattccataaatgttggtgcataccttatgtaagggagcagttcaataatccatgaaagaacttaaggcatttgttggtttatcagactcggaatctatttttctcattgctctgaatatgtcatcactctaggttttacagatttattcctttgttacttctctaattcttcctttgtaaaaaaaaaaaaagcaacacttttttttatgttatatgttgtcttacaaaccatactgaaagagtcattgtttaaaatcttaatgtatcaaactgtataacttggccgctgtatgtcttaaaacctgcttttcaatgtgttgatacattcccaaggttacttaattcaacttaactatcatgttattcagcaccaagcatgtccaggcactgtactaacctacagagatgctaagagaaaaaaaagacttgtttctgatctaatatccagaaaaagtaactcattgctctgtaataatctcacatatacagtagcttcctccctctagttttttcttccttgtcactgctgttatatttcatcatgataattcagcaggccagtaaggtaaaaataaggtctatgcctagggaaactcaggcttctagtttctcttagaaaagctaagagaagataaggtctgaataatagcagaaaaaccaacatctacaaaacattaaactagtgttataccttgatgataacactattgatgagtcttagagtccagacacaaagagacaaagctttgaagatgcttttgatctacctaggtggagttggtggtgctgatatttaaattcaggctactgcttcaatctcaattgctttgtaagtgaaaacatgacccagagacagacagactatggccatggctcacatggtttacatccttcactgctcacgtgtttgctgtcaagccatttttacagtctgaaactaagatgtgcagcatttcacttatttagattcacttaacaaacaaatttttctgctttaaaaatgtcttattgtcccaaggtactatagcggatatagagctagctaatctctacaaaccctctgtaggccagtagttctcaaagtgtggtctctggaagagcagtatcagcatcatctgggaacttgtcacagatgcagattctagggaccactccagacctacagaatcagaaactcttgggggagggcccgaaatatctatgttttaccaagcccaccacatgattctgatgtactctaaatactgagaaaacctgttctatcaatccaagcacactccgcaggcagttaccagtacggctggctacaactgctccatccgtgcctctttttaaagttcaaactcacaggtgactctaaggttatctacttttactcataagtaaaagccctagactggtgctaatgtcaaaccactggcctccactcaggcctccatcttctcatgccctcttaccagtatttaacttctgaggaagacaagtgatgctaaaacctgaattccaatgaagccatatgaaccagctgtcagttgcacttctaagactttacttagcagtaaattatagctcatgtgcattatttcagatacttagcttatgagtagcttatacaattagtgaagattaatattacagattaaatgtaactgttcttaaattgggctcacttgattcacagcgtgcatacacagattgtgagaagtcttcagcaagataaacattattaactaacttatttatgaagtattaaaatgcttacatttgaacttgatggctaacttactaagattctctatgtatcaaatgtaacttactgcgactaaacttaatttaatatttactctataaccaaatgaaatatatttaaaatatattgaatattttatattgttatatcctgacaagattgttaatattttaatgtactaatatttctgtcaattatatctaaatattattttattatattgcctaagaataaacatttgttaaattgg

SEQ ID NO: 57882 - DNA, 7699 bp, Homo sapiens
gggagggacgaaccgcgcgaccgagccctacaaaacccgccccggccgagtggcgaggcgagctttccagccgggctcccagagcgcgctgcgcaggagacgcggtggcctgagagcctgagggtccccggactcgcccaggctctgagctctctcccaccatgagcgcccggaccgcccccaggccgcaggtgctcctgctgccgctcctgctggtgctcctggcggcggcgcccgcagccagcaagggttgtgtctgtaaagacaaaggccagtgcttctgtgacggggccaaaggggagaagggggagaagggctttcctggaccccccggttctcctggccagaaaggattcacaggtcctgaaggcttgcctggaccgcagggacccaagggctttccaggacttccaggactcacgggttccaaaggtgtaaggggaataagtggattgccaggattttctggttctcctggacttccaggcaccccaggcaataccgggccttacggacttgtcggtgtaccaggatgcagtggttctaagggtgagcaggggtttccaggactcccagggacaccgggctacccagggatcccgggtgctgctggtttgaaaggacaaaagggtgctcctgctaaaggagaagatatagaacttgatgcaaaaggcgaccccgggttgccaggggctccaggaccccagggtttgccaggccctccaggttttcctgggcctgttggcccacctggtcctccgggattctttggctttccaggagccatgggacctagaggacctaagggtcacatgggtgaaagagtgataggacataaaggagagcggggtgtgaaagggttaacaggacccccgggaccaccaggaacagttattgtgaccctaactggcccagataacagaacggacctcaagggggaaaagggagacaagggagcaatgggcgagcctggacctcctggaccctcaggactgcctggagaatcatatggatctgaaaagggtgctcctggagaccctggcctgcagggaaaacccggaaaagatggtgttcctggcttccctggaagtgagggagtcaagggcaacaggggtttccctgggttaatgggtgaagatggcattaagggacagaaaggggacattggccctccaggatttcgtggtccaacagaatattatgacacataccaggaaaagggagatgaaggcactccaggcccaccagggcccagaggagctcgtggcccacaaggtcccagtggtccccccggagttcctggaagtcctggatcatcaaggcctggcctcagaggagcccctggatggccaggcttgaaaggaagtaaaggggaacgaggccgcccaggaaaggatgccatggggactcctgggtccccaggttgtgctggttcaccaggtcttccaggatcaccgggacctccaggaccgccaggtgacatcgtttttcgcaagggtccacctggagatcacggactgccaggctatctagggtctccaggaatcccaggagttgatgggcccaaaggagaaccaggcctcctgtgtacacagtgcccttatatcccagggcctcccggtctcccaggattgccagggttacatggtgtaaaaggaatcccaggaagacaaggcgcagctggcttgaaaggaagcccagggtccccaggaaatacaggtcttccaggatttccaggtttcccaggtgcccagggtgacccaggacttaaaggagaaaaaggtgaaacacttcagcctgaggggcaagtgggtgtcccaggtgacccggggctcagaggccaacctgggagaaagggcttggatggaattcctggaactctgggagtgaaaggattaccaggacctaaaggcgaactggctctgagtggtgagaaaggggaccaaggtcctccaggggatcctggctcccctgggtccccaggacctgcaggaccagctggaccacctggctacggaccccaaggagaacctggtctccagggcacgcaaggagttcctggggcccccggaccacccggagaagccggccctaggggagagctcagtgtttcaacaccagttccaggccctccaggacctccagggccccctggccatcctggcccccaaggtccacctggtatccctggatccctggggaaatgtggagatcctggtcttccagggcctgatggtgaaccaggaattccaggaattggatttcctgggccacctggacctaagggagaccaaggttttccaggtacaaaaggatcactgggttgtcctggaaaaatgggagagcctgggttacctggaaagccaggcctcccaggagccaagggagaaccagcagtagccatgcctggaggaccaggaacaccaggttttccaggagaaagaggcaattctggggaacatggagaaattggactccctggacttccaggtctccctggaactccaggaaatgaagggcttgatggaccacgaggagatccagggcagcctggaccacctggagaacaaggacccccaggaaggtgcatagagggtcccaggggagcccaaggacttccaggcttaaatggattgaaagggcaacaaggcagaagaggtaaaacggggccaaagggagacccaggaattccaggcttggatagatcaggatttcctggagaaactggatcaccaggaattccaggtcatcaaggtgaaatgggaccactgggtcaaagaggatatccaggaaatccgggaattttagggccaccaggtgaagatggagtgattgggatgatgggatttcctggagccattggccctccagggccccctgggaacccaggcacaccagggcagagggggagccctggaattccaggagtaaagggccagagaggaaccccaggagccaagggggaacaaggagataaaggaaatcccgggccttcagagatatcccacgtaataggggacaaaggagaaccaggtctcaaaggattcgcaggaaatccaggtgagaaaggaaacagaggcgttccagggatgccaggtttaaagggcctcaaaggactacccggaccagcaggaccaccaggccccagaggagatttgggcagcactgggaatcctggagaaccaggactccgtggtataccaggaagcatggggaacatgggcatgccaggttctaaaggaaaaaggggaactttgggattcccaggtcgagcaggaagaccaggcctcccaggtattcatggtctccagggagataagggagagccaggttattcagaaggtacaaggccaggaccaccgggaccaacgggggatccaggactgccgggtgatatgggaaagaaaggagaaatggggcaacctggcccacctggacatttggggcctgctggacctgagggagcccctggaagtcctggaagtcctggcctcccaggaaagccaggtcctcatggtgatttgggttttaaaggaatcaaaggcctcctgggccctccaggaatcagaggccctccaggtcttccaggatttccaggatctcctggaccaatgggtataagaggtgaccaaggacgtgatggaattcctggtccagccggagaaaagggagaaacgggtttattgagggcccctccaggcccaagagggaaccctggtgctcaaggagccaaaggagacaggggagccccaggttttcctggcctcccgggcagaaaaggggccatgggagatgctggacctcgaggacccacaggcatagaaggattcccagggccaccaggtctgcccggtgcaattatccctggccagacaggaaatcgtggtccaccaggctcaagaggaagcccaggtgcgcctggtccccctggacctccagggagtcatgtaataggcataaaaggagacaaagggtctatgggccaccctggcccaaaaggtccacctggaactgcaggagacatgggaccaccaggtcgtctgggagcaccaggtactccaggtcttccaggacccagaggtgatcctggattccaggggtttccaggcgtgaaaggagaaaagggtaatcctggatttctaggatccattggacctccaggaccaattgggccaaaaggaccacctggtgtacgtggagaccctggcacacttaagattatctcccttccaggaagcccagggccacctggcacacctggagaaccagggatgcagggagaacctgggccaccagggccacctggaaacctaggaccctgtgggccaagaggtaagccaggcaaggatggaaaaccaggaactcctggaccagctggagaaaaaggcaacaaaggttctaaaggagagccaggaccagctggatcagatggattgccaggtttgaaaggaaaacgtggagacagtggatcacctgcaacctggacaacgagaggctttgtcttcacccgacacagtcaaaccacagcaattccttcatgtccagaggggacagtgccactctacagtgggttttcttttctttttgtacaaggaaatcaacgagcccacggacaagaccttgatgcactgtttgtgaaggtcctgcgatcgccatagccgttcacagccaaaccactgacattcctccatgtcctcacggctggatttctctctggaaaggattttcattcatcatgaaagcctattccatcaactgtgaaagctggggaattagaaaaaataataagtcgctgtcaggtgtgcatgaagaaaagacactgaagctaaaaaagacatgcagaactgctatttttcatcctaaagaacaaagtaatgacagaacatgctgttatttaggtatttttctttaaccaaacaatattgctccatgatgacttagtacaaagtttcaatttgtttccccacaaaacaaagcaattctttcaagtgcagttctgtgatctgggtctctaatctgtgctgtttcaaagttctctgtggcaaagcagcaactattcacaaaatatcaccaaaaacctattccacttacatccaaggcactgtcactacggtgattgtatgaagtttgaatgctgcacgttatgaaatatttggcccgctggattcccacatttgtcttctttctgtctttaagactcagggaggctaaatcagtgtttgattgccccgccaacccttcctgaaacttcagaccctgggtagggaagagaaggggcatgtggtatctggagcattgtgtatagaactggattttcagacctgctgaggaccgtaaggcctgatggaacacagaactgaactgaggttcatggattttccaggactgtttcaaacatgcccattactaacggcaaaagggggattccctgatggaaccataatacccttggaaatactgtatggttttgttttgttttgttggtttttaaagatttttgtttgtttattgaattcattcactgtagctctaaaatctgcttgtatccaagcatataaaattttcccccttagtgaattagttttaaaatgatattgttatatacatactatgaaatatgtataactttaacttctgttttaccagcatacgcacacaaataacaagaatactacttatgaaatgtgcactttatcctcattccataaatgttggtgcataccttatgtaagggagcagttcaataatccatgaaagaacttaaggcatttgttggtttatcagactcggaatctatttttctcattgctctgaatatgtcatcactctaggttttacagatttattcctttgttacttctctaattcttcctttgtaaaaaaaaaaaaagcaacacttttttttatgttatatgttgtcttacaaaccatactgaaagagtcattgtttaaaatcttaatgtatcaaactgtataacttggccgctgtatgtcttaaaacctgcttttcaatgtgttgatacattcccaaggttacttaattcaacttaactatcatgttattcagcaccaagcatgtccaggcactgtactaacctacagagatgctaagagaaaaaaaagacttgtttctgatctaatatccagaaaaagtaactcattgctctgtaataatctcacatatacagtagcttcctccctctagttttttcttccttgtcactgctgttatatttcatcatgataattcagcaggccagtaaggtaaaaataaggtctatgcctagggaaactcaggcttctagtttctcttagaaaagctaagagaagataaggtctgaataatagcagaaaaaccaacatctacaaaacattaaactagtgttataccttgatgataacactattgatgagtcttagagtccagacacaaagagacaaagctttgaagatgcttttgatctacctaggtggagttggtggtgctgatatttaaattcaggctactgcttcaatctcaattgctttgtaagtgaaaacatgacccagagacagacagactatggccatggctcacatggtttacatccttcactgctcacgtgtttgctgtcaagccatttttacagtctgaaactaagatgtgcagcatttcacttatttagattcacttaacaaacaaatttttctgctttaaaaatgtcttattgtcccaaggtactatagcggatatagagctagctaatctctacaaaccctctgtaggccagtagttctcaaagtgtggtctctggaagagcagtatcagcatcatctgggaacttgtcacagatgcagattctagggaccactccagacctacagaatcagaaactcttgggggagggcccgaaatatctatgttttaccaagcccaccacatgattctgatgtactctaaatactgagaaaacctgttctatcaatccaagcacactccgcaggcagttaccagtacggctggctacaactgctccatccgtgcctctttttaaagttcaaactcacaggtgactctaaggttatctacttttactcataagtaaaagccctagactggtgctaatgtcaaaccactggcctccactcaggcctccatcttctcatgccctcttaccagtatttaacttctgaggaagacaagtgatgctaaaacctgaattccaatgaagccatatgaaccagctgtcagttgcacttctaagactttacttagcagtaaattatagctcatgtgcattatttcagatacttagcttatgagtagcttatacaattagtgaagattaatattacagattaaatgtaactgttcttaaattgggctcacttgattcacagcgtgcatacacagattgtgagaagtcttcagcaagataaacattattaactaacttatttatgaagtattaaaatgcttacatttgaacttgatggctaacttactaagattctctatgtatcaaatgtaacttactgcgactaaacttaatttaatatttactctataaccaaatgaaatatatttaaaatatattgaatattttatattgttatatcctgacaagattgttaatattttaatgtactaatatttctgtcaattatatctaaatattattttattatattgcctaagaataaacatttgttaaattgg

SEQ ID NO: 57883 - DNA, 7375 bp, Homo sapiens
gggagggacgaaccgcgcgaccgagccctacaaaacccgccccggccgagtggcgaggcgagctttccagccgggctcccagagcgcgctgcgcaggagacgcggtggcctgagagcctgagggtccccggactcgcccaggctctgagctctctcccaccatgagcgcccggaccgcccccaggccgcaggtgctcctgctgccgctcctgctggtgctcctggcggcggcgcccgcagccagcaagggttgtgtctgtaaagacaaaggccagtgcttctgtgacggggccaaaggggagaagggggagaagggctttcctggaccccccggttctcctggccagaaaggattcacaggtcctgaaggcttgcctggaccgcagggacccaagggctttccaggacttccaggactcacgggttccaaaggtgtaaggggaataagtggattgccaggattttctggttctcctggacttccaggcaccccaggcaataccgggccttacggacttgtcggtgtaccaggatgcagtggttctaagggtgagcaggggtttccaggactcccagggacaccgggctacccagggatcccgggtgctgctggtttgaaaggacaaaagggtgctcctgctaaaggagaagatatagaacttgatgcaaaaggcgaccccgggttgccaggggctccaggaccccagggtttgccaggccctccaggttttcctgggcctgttggcccacctggtcctccgggattctttggctttccaggagccatgggacctagaggacctaagggtcacatgggtgaaagagtgataggacataaaggagagcggggtgtgaaagggttaacaggacccccgggaccaccaggaacagttattgtgaccctaactggcccagataacagaacggacctcaagggggaaaagggagacaagggagcaatgggcgagcctggacctcctggaccctcaggactgcctggagaatcatatggatctgaaaagggtgctcctggagaccctggcctgcagggaaaacccggaaaagatggtgttcctggcttccctggaagtgagggagtcaagggcaacaggggtttccctgggttaatgggtgaagatggcattaagggacagaaaggggacattggccctccaggatttcgtggtccaacagaatattatgacacataccaggaaaagggagatgaaggcactccaggcccaccagggcccagaggagctcgtggcccacaaggtcccagtggtccccccggagttcctggaagtcctggatcatcaaggcctggcctcagaggagcccctggatggccaggcttgaaaggaagtaaaggggaacgaggccgcccaggaaaggatgccatggggactcctgggtccccaggttgtgctggttcaccaggtcttccaggatcaccgggacctccaggaccgccaggtgacatcgtttttcgcaagggtccacctggagatcacggactgccaggctatctagggtctccaggaatcccaggagttgatgggcccaaaggagaaccaggcctcctgtgtacacagtgcccttatatcccagggcctcccggtctcccaggattgccagggttacatggtgtaaaaggaatcccaggaagacaaggcgcagctggcttgaaaggaagcccagggtccccaggaaatacaggtcttccaggatttccaggtttcccaggtgcccagggtgacccaggacttaaaggagaaaaaggtgaaacacttcagcctgaggggcaagtgggtgtcccaggtgacccggggctcagaggccaacctgggagaaagggcttggatggaattcctggaactctgggagtgaaaggattaccaggacctaaaggcgaactggctctgagtggtgagaaaggggaccaaggtcctccaggggatcctggctcccctgggtccccaggacctgcaggaccagctggaccacctggctacggaccccaaggagaacctggtctccagggcacgcaaggagttcctggggcccccggaccacccggagaagccggccctaggggagagctcagtgtttcaacaccagttccaggccctccaggacctccagggccccctggccatcctggcccccaaggtccacctggtatccctggatccctggggaaatgtggagatcctggtcttccagggcctgatggtgaaccaggaattccaggaattggatttcctgggccacctggacctaagggagaccaaggttttccaggtacaaaaggatcactgggttgtcctggaaaaatgggagagcctgggttacctggaaagccaggcctcccaggagccaagggagaaccagcagtagccatgcctggaggaccaggaacaccaggttttccaggagaaagaggcaattctggggaacatggagaaattggactccctggacttccaggtctccctggaactccaggaaatgaagggcttgatggaccacgaggagatccagggcagcctggaccacctggagaacaaggacccccaggaaggtgcatagagggtcccaggggagcccaaggacttccaggcttaaatggattgaaagggcaacaaggcagaagaggtaaaacggggccaaagggagacccaggaattccaggcttggatagatcaggatttcctggagaaactggatcaccaggaattccaggtcatcaaggtgaaatgggaccactgggtcaaagaggatatccaggaaatccgggaattttagggccaccaggtgaagatggagtgattgggatgatgggatttcctggagccattggccctccagggccccctgggaacccaggcacaccagggcagagggggagccctggaattccaggagtaaagggccagagaggaaccccaggagccaagggggaacaaggagataaaggaaatcccgggccttcagagatatcccacgtaataggggacaaaggagaaccaggtctcaaaggattcgcaggaaatccaggtgagaaaggaaacagaggcgttccagggatgccaggtttaaagggcctcaaaggactacccggaccagcaggaccaccaggccccagaggagatttgggcagcactgggaatcctggagaaccaggactccgtggtataccaggaagcatggggaacatgggcatgccaggttctaaaggaaaaaggggaactttgggattcccaggtcgagcaggaagaccaggcctcccaggtattcatggtctccagggagataagggagagccaggttattcagaaggtacaaggccaggaccaccgggaccaacgggggatccaggactgccgggtgatatgggaaagaaaggagaaatggggcaacctggcccacctggacatttggggcctgctggacctgagggagcccctggaagtcctggaagtcctggcctcccaggaaagccaggtcctcatggtgatttgggttttaaaggaatcaaaggcctcctgggccctccaggaatcagaggccctccaggtcttccaggatttccaggatctcctggaccaatgggtataagaggtgaccaaggacgtgatggaattcctggtccagccggagaaaagggagaaacgggtttattgagggcccctccaggcccaagagggaaccctggtgctcaaggagccaaaggagacaggggagccccaggttttcctggcctcccgggcagaaaaggggccatgggagatgctggacctcgaggacccacaggcatagaaggattcccagggccaccaggtctgcccggtgcaattatccctggccagacaggaaatcgtggtccaccaggctcaagaggaagcccaggtgcgcctggtccccctggacctccagggagtcatgtaataggcataaaaggagacaaagggtctatgggccaccctggcccaaaaggtccacctggaactgcaggagacatgggaccaccaggtcgtctgggagcaccaggtactccaggtcttccaggacccagaggtgatcctggattccaggggtttccaggcgtgaaaggagaaaagggtaatcctggatttctaggatccattggacctccaggaccaattgggccaaaaggaccacctggtgtacgtggagaccctggcacacttaagattatctcccttccaggaagcccagggccacctggcacacctggagaaccagggatgcagggagaacctgggccaccagggccacctggaaacctaggaccctgtgggccaagaggtaagccaggcaaggatggaaaaccaggaactcctggaccagctggagaaaaaggcaacaaaggttctaaaggagagccaggaaagcctattccatcaactgtgaaagctggggaattagaaaaaataataagtcgctgtcaggtgtgcatgaagaaaagacactgaagctaaaaaagacatgcagaactgctatttttcatcctaaagaacaaagtaatgacagaacatgctgttatttaggtatttttctttaaccaaacaatattgctccatgatgacttagtacaaagtttcaatttgtttccccacaaaacaaagcaattctttcaagtgcagttctgtgatctgggtctctaatctgtgctgtttcaaagttctctgtggcaaagcagcaactattcacaaaatatcaccaaaaacctattccacttacatccaaggcactgtcactacggtgattgtatgaagtttgaatgctgcacgttatgaaatatttggcccgctggattcccacatttgtcttctttctgtctttaagactcagggaggctaaatcagtgtttgattgccccgccaacccttcctgaaacttcagaccctgggtagggaagagaaggggcatgtggtatctggagcattgtgtatagaactggattttcagacctgctgaggaccgtaaggcctgatggaacacagaactgaactgaggttcatggattttccaggactgtttcaaacatgcccattactaacggcaaaagggggattccctgatggaaccataatacccttggaaatactgtatggttttgttttgttttgttggtttttaaagatttttgtttgtttattgaattcattcactgtagctctaaaatctgcttgtatccaagcatataaaattttcccccttagtgaattagttttaaaatgatattgttatatacatactatgaaatatgtataactttaacttctgttttaccagcatacgcacacaaataacaagaatactacttatgaaatgtgcactttatcctcattccataaatgttggtgcataccttatgtaagggagcagttcaataatccatgaaagaacttaaggcatttgttggtttatcagactcggaatctatttttctcattgctctgaatatgtcatcactctaggttttacagatttattcctttgttacttctctaattcttcctttgtaaaaaaaaaaaaagcaacacttttttttatgttatatgttgtcttacaaaccatactgaaagagtcattgtttaaaatcttaatgtatcaaactgtataacttggccgctgtatgtcttaaaacctgcttttcaatgtgttgatacattcccaaggttacttaattcaacttaactatcatgttattcagcaccaagcatgtccaggcactgtactaacctacagagatgctaagagaaaaaaaagacttgtttctgatctaatatccagaaaaagtaactcattgctctgtaataatctcacatatacagtagcttcctccctctagttttttcttccttgtcactgctgttatatttcatcatgataattcagcaggccagtaaggtaaaaataaggtctatgcctagggaaactcaggcttctagtttctcttagaaaagctaagagaagataaggtctgaataatagcagaaaaaccaacatctacaaaacattaaactagtgttataccttgatgataacactattgatgagtcttagagtccagacacaaagagacaaagctttgaagatgcttttgatctacctaggtggagttggtggtgctgatatttaaattcaggctactgcttcaatctcaattgctttgtaagtgaaaacatgacccagagacagacagactatggccatggctcacatggtttacatccttcactgctcacgtgtttgctgtcaagccatttttacagtctgaaactaagatgtgcagcatttcacttatttagattcacttaacaaacaaatttttctgctttaaaaatgtcttattgtcccaaggtactatagcggatatagagctagctaatctctacaaaccctctgtaggccagtagttctcaaagtgtggtctctggaagagcagtatcagcatcatctgggaacttgtcacagatgcagattctagggaccactccagacctacagaatcagaaactcttgggggagggcccgaaatatctatgttttaccaagcccaccacatgattctgatgtactctaaatactgagaaaacctgttctatcaatccaagcacactccgcaggcagttaccagtacggctggctacaactgctccatccgtgcctctttttaaagttcaaactcacaggtgactctaaggttatctacttttactcataagtaaaagccctagactggtgctaatgtcaaaccactggcctccactcaggcctccatcttctcatgccctcttaccagtatttaacttctgaggaagacaagtgatgctaaaacctgaattccaatgaagccatatgaaccagctgtcagttgcacttctaagactttacttagcagtaaattatagctcatgtgcattatttcagatacttagcttatgagtagcttatacaattagtgaagattaatattacagattaaatgtaactgttcttaaattgggctcacttgattcacagcgtgcatacacagattgtgagaagtcttcagcaagataaacattattaactaacttatttatgaagtattaaaatgcttacatttgaacttgatggctaacttactaagattctctatgtatcaaatgtaacttactgcgactaaacttaatttaatatttactctataaccaaatgaaatatatttaaaatatattgaatattttatattgttatatcctgacaagattgttaatattttaatgtactaatatttctgtcaattatatctaaatattattttattatattgcctaagaataaacatttgttaaattgg

SEQ ID NO: 57884 - DNA, 441 bp, Homo sapiens
ccggccgagtggcgaggcgagctttccagccgggctcccagagcgcgctgcgcaggagacgcggtggcctgagagcctgagggtccccggactcgcccaggctctgagctctctcccaccatgagcgcccggaccgcccccaggccgcaggtgctcctgctgccgctcctgctggtgctcctggcggcggcgcccgcagccagcaaggtgagtgggggctgcgcgacccccacccccgcacttccatccctcctccacgcgtccgggggacgcgctggccccacccgcagcggcgcggtagtggagcggctgccgggctagtggcgaggctgagggcttcacgcaggtcccgggacaggcagcgagcggaagggagcaagcggggatgccccggaacaggtggaatgcgcggggctgggggaagaggcgaggagggggctt

SEQ ID NO: 57885 - DNA, 7877 bp, Homo sapiens
gggagggacgaaccgcgcgaccgagccctacaaaacccgccccggccgagtggcgaggcgagctttccagccgggctcccagagcgcgctgcgcaggagacgcggtggcctgagagcctgagggtccccggactcgcccaggctctgagctctctcccaccatgagcgcccggaccgcccccaggccgcaggtgctcctgctgccgctcctgctggtgctcctggcggcggcgcccgcagccagcaagggttgtgtctgtaaagacaaaggccagtgcttctgtgacggggccaaaggggagaagggggagaagggctttcctggaccccccggttctcctggccagaaaggattcacaggtcctgaaggcttgcctggaccgcagggacccaagggctttccaggacttccaggactcacgggttccaaaggtgtaaggggaataagtggattgccaggattttctggttctcctggacttccaggcaccccaggcaataccgggccttacggacttgtcggtgtaccaggatgcagtggttctaagggtgagcaggggtttccaggactcccagggacaccgggctacccagggatcccgggtgctgctggtttgaaaggacaaaagggtgctcctgctaaaggagaagatatagaacttgatgcaaaaggcgaccccgggttgccaggggctccaggaccccagggtttgccaggccctccaggttttcctgggcctgttggcccacctggtcctccgggattctttggctttccaggagccatgggacctagaggacctaagggtcacatgggtgaaagagtgataggacataaaggagagcggggtgtgaaagggttaacaggacccccgggaccaccaggaacagttattgtgaccctaactggcccagataacagaacggacctcaagggggaaaagggagacaagggagcaatgggcgagcctggacctcctggaccctcaggactgcctggagaatcatatggatctgaaaagggtgctcctggagaccctggcctgcagggaaaacccggaaaagatggtgttcctggcttccctggaagtgagggagtcaagggcaacaggggtttccctgggttaatgggtgaagatggcattaagggacagaaaggggacattggccctccaggatttcgtggtccaacagaatattatgacacataccaggaaaagggagatgaaggcactccaggcccaccagggcccagaggagctcgtggcccacaaggtcccagtggtccccccggagttcctggaagtcctggatcatcaaggcctggcctcagaggagcccctggatggccaggcttgaaaggaagtaaaggggaacgaggccgcccaggaaaggatgccatggggactcctgggtccccaggttgtgctggttcaccaggtcttccaggatcaccgggacctccaggaccgccaggtgacatcgtttttcgcaagggtccacctggagatcacggactgccaggctatctagggtctccaggaatcccaggagttgatgggcccaaaggagaaccaggcctcctgtgtacacagtgcccttatatcccagggcctcccggtctcccaggattgccagggttacatggtgtaaaaggaatcccaggaagacaaggcgcagctggcttgaaaggaagcccagggtccccaggaaatacaggtcttccaggatttccaggtttcccaggtgcccagggtgacccaggacttaaaggagaaaaaggtgaaacacttcagcctgaggggcaagtgggtgtcccaggtgacccggggctcagaggccaacctgggagaaagggcttggatggaattcctggaactctgggagtgaaaggattaccaggacctaaaggcgaactggctctgagtggtgagaaaggggaccaaggtcctccaggggatcctggctcccctgggtccccaggacctgcaggaccagctggaccacctggctacggaccccaaggagaacctggtctccagggcacgcaaggagttcctggggcccccggaccacccggagaagccggccctaggggagagctcagtgtttcaacaccagttccaggccctccaggacctccagggccccctggccatcctggcccccaaggtccacctggtatccctggatccctggggaaatgtggagatcctggtcttccagggcctgatggtgaaccaggaattccaggaattggatttcctgggccacctggacctaagggagaccaaggttttccaggtacaaaaggatcactgggttgtcctggaaaaatgggagagcctgggttacctggaaagccaggcctcccaggagccaagggagaaccagcagtagccatgcctggaggaccaggaacaccaggttttccaggagaaagaggcaattctggggaacatggagaaattggactccctggacttccaggtctccctggaactccaggaaatgaagggcttgatggaccacgaggagatccagggcagcctggaccacctggagaacaaggacccccaggaaggtgcatagagggtcccaggggagcccaaggacttccaggcttaaatggattgaaagggcaacaaggcagaagaggtaaaacggggccaaagggagacccaggaattccaggcttggatagatcaggatttcctggagaaactggatcaccaggaattccaggtcatcaaggtgaaatgggaccactgggtcaaagaggatatccaggaaatccgggaattttagggccaccaggtgaagatggagtgattgggatgatgggatttcctggagccattggccctccagggccccctgggaacccaggcacaccagggcagagggggagccctggaattccaggagtaaagggccagagaggaaccccaggagccaagggggaacaaggagataaaggaaatcccgggccttcagagatatcccacgtaataggggacaaaggagaaccaggtctcaaaggattcgcaggaaatccaggtgagaaaggaaacagaggcgttccagggatgccaggtttaaagggcctcaaaggactacccggaccagcaggaccaccaggccccagaggagatttgggcagcactgggaatcctggagaaccaggactccgtggtataccaggaagcatggggaacatgggcatgccaggttctaaaggaaaaaggggaactttgggattcccaggtcgagcaggaagaccaggcctcccaggtattcatggtctccagggagataagggagagccaggttattcagaaggtacaaggccaggaccaccgggaccaacgggggatccaggactgccgggtgatatgggaaagaaaggagaaatggggcaacctggcccacctggacatttggggcctgctggacctgagggagcccctggaagtcctggaagtcctggcctcccaggaaagccaggtcctcatggtgatttgggttttaaaggaatcaaaggcctcctgggccctccaggaatcagaggccctccaggtcttccaggatttccaggatctcctggaccaatgggtataagaggtgaccaaggacgtgatggaattcctggtccagccggagaaaagggagaaacgggtttattgagggcccctccaggcccaagagggaaccctggtgctcaaggagccaaaggagacaggggagccccaggttttcctggcctcccgggcagaaaaggggccatgggagatgctggacctcgaggacccacaggcatagaaggattcccagggccaccaggtctgcccggtgcaattatccctggccagacaggaaatcgtggtccaccaggctcaagaggaagcccaggtgcgcctggtccccctggacctccagggagtcatgtaataggcataaaaggagacaaagggtctatgggccaccctggcccaaaaggtccacctggaactgcaggagacatgggaccaccaggtcgtctgggagcaccaggtactccaggtcttccaggacccagaggtgatcctggattccaggggtttccaggcgtgaaaggagaaaagggtaatcctggatttctaggatccattggacctccaggaccaattgggccaaaaggaccacctggtgtacgtggagaccctggcacacttaagattatctcccttccaggaagcccagggccacctggcacacctggagaaccagggatgcagggagaacctgggccaccagggccacctggaaacctaggaccctgtgggccaagaggtaagccaggcaaggatggaaaaccaggaactcctggaccagctggagaaaaaggcaacaaaggttctaaaggagagccaggaccagctggatcagatggattgccaggtttgaaaggaaaacgtggagacagtggatcacctgcaacctggacaacgagaggctttgtcttcacccgacacagtcaaaccacagcaattccttcatgtccagaggggacagtgccactctacagtgggttttcttttctttttgtacaaggaaatcaacgagcccacggacaagaccttggaactcttggcagctgcctgcagcgatttaccacaatgccattcttattctgcaatgtcaatgatgtatgtaattttgcatctcgaaatgattattcatactggctgtcaacaccagctctgatgccaatgaacatggctcccattactggcagagcccttgagccttatataagcagatgcactgtttgtgaaggtcctgcgatcgccatagccgttcacagccaaaccactgacattcctccatgtcctcacggctggatttctctctggaaaggattttcattcatcatgaaagcctattccatcaactgtgaaagctggggaattagaaaaaataataagtcgctgtcaggtgtgcatgaagaaaagacactgaagctaaaaaagacatgcagaactgctatttttcatcctaaagaacaaagtaatgacagaacatgctgttatttaggtatttttctttaaccaaacaatattgctccatgatgacttagtacaaagtttcaatttgtttccccacaaaacaaagcaattctttcaagtgcagttctgtgatctgggtctctaatctgtgctgtttcaaagttctctgtggcaaagcagcaactattcacaaaatatcaccaaaaacctattccacttacatccaaggcactgtcactacggtgattgtatgaagtttgaatgctgcacgttatgaaatatttggcccgctggattcccacatttgtcttctttctgtctttaagactcagggaggctaaatcagtgtttgattgccccgccaacccttcctgaaacttcagaccctgggtagggaagagaaggggcatgtggtatctggagcattgtgtatagaactggattttcagacctgctgaggaccgtaaggcctgatggaacacagaactgaactgaggttcatggattttccaggactgtttcaaacatgcccattactaacggcaaaagggggattccctgatggaaccataatacccttggaaatactgtatggttttgttttgttttgttggtttttaaagatttttgtttgtttattgaattcattcactgtagctctaaaatctgcttgtatccaagcatataaaattttcccccttagtgaattagttttaaaatgatattgttatatacatactatgaaatatgtataactttaacttctgttttaccagcatacgcacacaaataacaagaatactacttatgaaatgtgcactttatcctcattccataaatgttggtgcataccttatgtaagggagcagttcaataatccatgaaagaacttaaggcatttgttggtttatcagactcggaatctatttttctcattgctctgaatatgtcatcactctaggttttacagatttattcctttgttacttctctaattcttcctttgtaaaaaaaaaaaaagcaacacttttttttatgttatatgttgtcttacaaaccatactgaaagagtcattgtttaaaatcttaatgtatcaaactgtataacttggccgctgtatgtcttaaaacctgcttttcaatgtgttgatacattcccaaggttacttaattcaacttaactatcatgttattcagcaccaagcatgtccaggcactgtactaacctacagagatgctaagagaaaaaaaagacttgtttctgatctaatatccagaaaaagtaactcattgctctgtaataatctcacatatacagtagcttcctccctctagttttttcttccttgtcactgctgttatatttcatcatgataattcagcaggccagtaaggtaaaaataaggtctatgcctagggaaactcaggcttctagtttctcttagaaaagctaagagaagataaggtctgaataatagcagaaaaaccaacatctacaaaacattaaactagtgttataccttgatgataacactattgatgagtcttagagtccagacacaaagagacaaagctttgaagatgcttttgatctacctaggtggagttggtggtgctgatatttaaattcaggctactgcttcaatctcaattgctttgtaagtgaaaacatgacccagagacagacagactatggccatggctcacatggtttacatccttcactgctcacgtgtttgctgtcaagccatttttacagtctgaaactaagatgtgcagcatttcacttatttagattcacttaacaaacaaatttttctgctttaaaaatgtcttattgtcccaaggtactatagcggatatagagctagctaatctctacaaaccctctgtaggccagtagttctcaaagtgtggtctctggaagagcagtatcagcatcatctgggaacttgtcacagatgcagattctagggaccactccagacctacagaatcagaaactcttgggggagggcccgaaatatctatgttttaccaagcccaccacatgattctgatgtactctaaatactgagaaaacctgttctatcaatccaagcacactccgcaggcagttaccagtacggctggctacaactgctccatccgtgcctctttttaaagttcaaactcacaggtgactctaaggttatctacttttactcataagtaaaagccctagactggtgctaatgtcaaaccactggcctccactcaggcctccatcttctcatgccctcttaccagtatttaacttctgaggaagacaagtgatgctaaaacctgaattccaatgaagccatatgaaccagctgtcagttgcacttctaagactttacttagcagtaaattatagctcatgtgcattatttcagatacttagcttatgagtagcttatacaattagtgaagattaatattacagattaaatgtaactgttcttaaattgggctcacttgattcacagcgtgcatacacagattgtgagaagtcttcagcaagataaacattattaactaacttatttatgaagtattaaaatgcttacatttgaacttgatggctaacttactaagattctctatgtatcaaatgtaacttactgcgactaaacttaatttaatatttactctataaccaaatgaaatatatttaaaatatattgaatattttatattgttatatcctgacaagattgttaatattttaatgtactaatatttctgtcaattatatctaaatattattttattatattgcctaagaataaacatttgttaaattgg

SEQ ID NO: 57886 - DNA, 7584 bp, Homo sapiens
gggagggacgaaccgcgcgaccgagccctacaaaacccgccccggccgagtggcgaggcgagctttccagccgggctcccagagcgcgctgcgcaggagacgcggtggcctgagagcctgagggtccccggactcgcccaggctctgagctctctcccaccatgagcgcccggaccgcccccaggccgcaggtgctcctgctgccgctcctgctggtgctcctggcggcggcgcccgcagccagcaagggttgtgtctgtaaagacaaaggccagtgcttctgtgacggggccaaaggggagaagggggagaagggctttcctggaccccccggttctcctggccagaaaggattcacaggtcctgaaggcttgcctggaccgcagggacccaagggctttccaggacttccaggactcacgggttccaaaggtgtaaggggaataagtggattgccaggattttctggttctcctggacttccaggcaccccaggcaataccgggccttacggacttgtcggtgtaccaggatgcagtggttctaagggtgagcaggggtttccaggactcccagggacaccgggctacccagggatcccgggtgctgctggtttgaaaggacaaaagggtgctcctgctaaaggagaagatatagaacttgatgcaaaaggcgaccccgggttgccaggggctccaggaccccagggtttgccaggccctccaggttttcctgggcctgttggcccacctggtcctccgggattctttggctttccaggagccatgggacctagaggacctaagggtcacatgggtgaaagagtgataggacataaaggagagcggggtgtgaaagggttaacaggacccccgggaccaccaggaacagttattgtgaccctaactggcccagataacagaacggacctcaagggggaaaagggagacaagggagcaatgggcgagcctggacctcctggaccctcaggactgcctggagaatcatatggatctgaaaagggtgctcctggagaccctggcctgcagggaaaacccggaaaagatggtgttcctggcttccctggaagtgagggagtcaagggcaacaggggtttccctgggttaatgggtgaagatggcattaagggacagaaaggggacattggccctccaggatttcgtggtccaacagaatattatgacacataccaggaaaagggagatgaaggcactccaggcccaccagggcccagaggagctcgtggcccacaaggtcccagtggtccccccggagttcctggaagtcctggatcatcaaggcctggcctcagaggagcccctggatggccaggcttgaaaggaagtaaaggggaacgaggccgcccaggaaaggatgccatggggactcctgggtccccaggttgtgctggttcaccaggtcttccaggatcaccgggacctccaggaccgccaggtgacatcgtttttcgcaagggtccacctggagatcacggactgccaggctatctagggtctccaggaatcccaggagttgatgggcccaaaggagaaccaggcctcctgtgtacacagtgcccttatatcccagggcctcccggtctcccaggattgccagggttacatggtgtaaaaggaatcccaggaagacaaggcgcagctggcttgaaaggaagcccagggtccccaggaaatacaggtcttccaggatttccaggtttcccaggtgcccagggtgacccaggacttaaaggagaaaaaggtgaaacacttcagcctgaggggcaagtgggtgtcccaggtgacccggggctcagaggccaacctgggagaaagggcttggatggaattcctggaactctgggagtgaaaggattaccaggacctaaaggcgaactggctctgagtggtgagaaaggggaccaaggtcctccaggggatcctggctcccctgggtccccaggacctgcaggaccagctggaccacctggctacggaccccaaggagaacctggtctccagggcacgcaaggagttcctggggcccccggaccacccggagaagccggccctaggggagagctcagtgtttcaacaccagttccaggccctccaggacctccagggccccctggccatcctggcccccaaggtccacctggtatccctggatccctggggaaatgtggagatcctggtcttccagggcctgatggtgaaccaggaattccaggaattggatttcctgggccacctggacctaagggagaccaaggttttccaggtacaaaaggatcactgggttgtcctggaaaaatgggagagcctgggttacctggaaagccaggcctcccaggagccaagggagaaccagcagtagccatgcctggaggaccaggaacaccaggttttccaggagaaagaggcaattctggggaacatggagaaattggactccctggacttccaggtctccctggaactccaggaaatgaagggcttgatggaccacgaggagatccagggcagcctggaccacctggagaacaaggacccccaggaaggtgcatagagggtcccaggggagcccaaggacttccaggcttaaatggattgaaagggcaacaaggcagaagaggtaaaacggggccaaagggagacccaggaattccaggcttggatagatcaggatttcctggagaaactggatcaccaggaattccaggtcatcaaggtgaaatgggaccactgggtcaaagaggatatccaggaaatccgggaattttagggccaccaggtgaagatggagtgattgggatgatgggatttcctggagccattggccctccagggccccctgggaacccaggcacaccagggcagagggggagccctggaattccaggagtaaagggccagagaggaaccccaggagccaagggggaacaaggagataaaggaaatcccgggccttcagagatatcccacgtaataggggacaaaggagaaccaggtctcaaaggattcgcaggaaatccaggtgagaaaggaaacagaggcgttccagggatgccaggtttaaagggcctcaaaggactacccggaccagcaggaccaccaggccccagaggagatttgggcagcactgggaatcctggagaaccaggactccgtggtataccaggaagcatggggaacatgggcatgccaggttctaaaggaaaaaggggaactttgggattcccaggtcgagcaggaagaccaggcctcccaggtattcatggtctccagggagataagggagagccaggttattcagaaggtacaaggccaggaccaccgggaccaacgggggatccaggactgccgggtgatatgggaaagaaaggagaaatggggcaacctggcccacctggacatttggggcctgctggacctgagggagcccctggaagtcctggaagtcctggcctcccaggaaagccaggtcctcatggtgatttgggttttaaaggaatcaaaggcctcctgggccctccaggaatcagaggccctccaggtcttccaggatttccaggatctcctggaccaatgggtataagaggtgaccaaggacgtgatggaattcctggtccagccggagaaaagggagaaacgggtttattgagggcccctccaggcccaagagggaaccctggtgctcaaggagccaaaggagacaggggagccccaggttttcctggcctcccgggcagaaaaggggccatgggagatgctggacctcgaggacccacaggcatagaaggattcccagggccaccaggtctgcccggtgcaattatccctggccagacaggaaatcgtggtccaccaggctcaagaggaagcccaggtgcgcctggtccccctggacctccagggagtcatgtaataggcataaaaggagacaaagggtctatgggccaccctggcccaaaaggtccacctggaactgcaggagacatgggaccaccaggtcgtctgggagcaccaggtactccaggtcttccaggacccagaggtgatcctggattccaggggtttccaggcgtgaaaggagaaaagggtaatcctggatttctaggatccattggacctccaggaccaattgggccaaaaggaccacctggtgtacgtggagaccctggcacacttaagattatctcccttccaggaagcccagggccacctggcacacctggagaaccagggatgcagggagaacctgggccaccagggccacctggaaacctaggaccctgtgggccaagaggtaagccaggcaaggatggaaaaccaggaactcctggaccagctggagaaaaaggcaacaaaggttctaaaggagagccaggaccagctggatcagatggattgccaggtttgaaaggaaaacgtggagacagtggatcacctgcaacctggacaacgagaggctttgtcttcacccgacacagtcaaaccacagcaattccttcatgtccagaggggacagtgccactctacagtgggttttcttttctttttgtacaaggaaatcaacgagcccacggacaagaccttgaaagcctattccatcaactgtgaaagctggggaattagaaaaaataataagtcgctgtcaggtgtgcatgaagaaaagacactgaagctaaaaaagacatgcagaactgctatttttcatcctaaagaacaaagtaatgacagaacatgctgttatttaggtatttttctttaaccaaacaatattgctccatgatgacttagtacaaagtttcaatttgtttccccacaaaacaaagcaattctttcaagtgcagttctgtgatctgggtctctaatctgtgctgtttcaaagttctctgtggcaaagcagcaactattcacaaaatatcaccaaaaacctattccacttacatccaaggcactgtcactacggtgattgtatgaagtttgaatgctgcacgttatgaaatatttggcccgctggattcccacatttgtcttctttctgtctttaagactcagggaggctaaatcagtgtttgattgccccgccaacccttcctgaaacttcagaccctgggtagggaagagaaggggcatgtggtatctggagcattgtgtatagaactggattttcagacctgctgaggaccgtaaggcctgatggaacacagaactgaactgaggttcatggattttccaggactgtttcaaacatgcccattactaacggcaaaagggggattccctgatggaaccataatacccttggaaatactgtatggttttgttttgttttgttggtttttaaagatttttgtttgtttattgaattcattcactgtagctctaaaatctgcttgtatccaagcatataaaattttcccccttagtgaattagttttaaaatgatattgttatatacatactatgaaatatgtataactttaacttctgttttaccagcatacgcacacaaataacaagaatactacttatgaaatgtgcactttatcctcattccataaatgttggtgcataccttatgtaagggagcagttcaataatccatgaaagaacttaaggcatttgttggtttatcagactcggaatctatttttctcattgctctgaatatgtcatcactctaggttttacagatttattcctttgttacttctctaattcttcctttgtaaaaaaaaaaaaagcaacacttttttttatgttatatgttgtcttacaaaccatactgaaagagtcattgtttaaaatcttaatgtatcaaactgtataacttggccgctgtatgtcttaaaacctgcttttcaatgtgttgatacattcccaaggttacttaattcaacttaactatcatgttattcagcaccaagcatgtccaggcactgtactaacctacagagatgctaagagaaaaaaaagacttgtttctgatctaatatccagaaaaagtaactcattgctctgtaataatctcacatatacagtagcttcctccctctagttttttcttccttgtcactgctgttatatttcatcatgataattcagcaggccagtaaggtaaaaataaggtctatgcctagggaaactcaggcttctagtttctcttagaaaagctaagagaagataaggtctgaataatagcagaaaaaccaacatctacaaaacattaaactagtgttataccttgatgataacactattgatgagtcttagagtccagacacaaagagacaaagctttgaagatgcttttgatctacctaggtggagttggtggtgctgatatttaaattcaggctactgcttcaatctcaattgctttgtaagtgaaaacatgacccagagacagacagactatggccatggctcacatggtttacatccttcactgctcacgtgtttgctgtcaagccatttttacagtctgaaactaagatgtgcagcatttcacttatttagattcacttaacaaacaaatttttctgctttaaaaatgtcttattgtcccaaggtactatagcggatatagagctagctaatctctacaaaccctctgtaggccagtagttctcaaagtgtggtctctggaagagcagtatcagcatcatctgggaacttgtcacagatgcagattctagggaccactccagacctacagaatcagaaactcttgggggagggcccgaaatatctatgttttaccaagcccaccacatgattctgatgtactctaaatactgagaaaacctgttctatcaatccaagcacactccgcaggcagttaccagtacggctggctacaactgctccatccgtgcctctttttaaagttcaaactcacaggtgactctaaggttatctacttttactcataagtaaaagccctagactggtgctaatgtcaaaccactggcctccactcaggcctccatcttctcatgccctcttaccagtatttaacttctgaggaagacaagtgatgctaaaacctgaattccaatgaagccatatgaaccagctgtcagttgcacttctaagactttacttagcagtaaattatagctcatgtgcattatttcagatacttagcttatgagtagcttatacaattagtgaagattaatattacagattaaatgtaactgttcttaaattgggctcacttgattcacagcgtgcatacacagattgtgagaagtcttcagcaagataaacattattaactaacttatttatgaagtattaaaatgcttacatttgaacttgatggctaacttactaagattctctatgtatcaaatgtaacttactgcgactaaacttaatttaatatttactctataaccaaatgaaatatatttaaaatatattgaatattttatattgttatatcctgacaagattgttaatattttaatgtactaatatttctgtcaattatatctaaatattattttattatattgcctaagaataaacatttgttaaattgg

SEQ ID NO: 57887 - DNA, 327 bp, Homo sapiens
tgccatgtcaggaataaaacacacttctgattgactgcaaaattgatggccaataagaggtcaagctggttacgatctggtatctagaaatgattagctaggttacctagagtaatacacttaactttctgagcctcagcttattgaaacagaacaaaacaaaatctaacaacagcaacacatatttacctatatgttcagtagcactttcatttgtgatcttctaattttgctttaagtcccaaagtttaagacaacatcttcaagtaagaaagggagattctttttaaaaagtacttgagcaattagaaattggagtaagggtta

SEQ ID NO: 57888 - DNA, 302 bp, Homo sapiens
aaatgcttcccttgaccaaaaacagggtccacgcaactcccccaggacaaaggaggagccccctgtacagcactgggctcagagtcctctctgagacaggctcagtttcagacaacaacccgctggaatgcacagtctcagcaggagagccaggccagagccagcaagaggagactcggtgacaccagtctcctgtagggacaggaggattttgtgggggttcgtgtcactgtgagcatattgtggtggtgactgctattcgtgtctactggggccagggaaccctggtcaccgtctcctca

SEQ ID NO: 57889 - DNA, 350 bp, Homo sapiens
agagttggtatgaaaaagaaatgagaaaactataacaatgatcacaatggctggtgtttggaaggtgcttaaaactcaatgtgaacggctttctgagattcttctctaacttcggttttcaatacccgcaataagggaaagaaaatatggtatcagtaggtctccagaggatgctaaagtgttggagaggtgaggaaggggaaatattaggtcctgctaataaacttgatcagcttttaagtatcgtcaggtttagataactggagcacatttgccttatcaataagtaccatattttaaaatagatatgaattttattctgtgtatttttacctggtggaatatgtata

SEQ ID NO: 57890 - DNA, 342 bp, Homo sapiens
cagactttaaagatatccagttccctatttgctactcctgtgcttttgattcagtagttctgggaagagagctcagtgtccacatattacagtgctctttaaagattcagaaggaggcagtcagtggaggaatttgtgaaatattttcctaagtccatctgtaatgtcttctttcctacagaaacatagggctggggatctagaaaacttccaacatgtcatgtttcctactttttataagcaggagtctctttctaacctgttggagcaaggcaaagagccctggactgtgtagcatgaagtgaaaataagatgggtgggaattttttttttttttttttt

SEQ ID NO: 57891 - DNA, 380 bp, Homo sapiens
agtcatctaacctgcttggttttccagaaaatgtattatggtcacaccagtatattgtggcttatagcattgctcaaaaaaagacagactcaacttttagatgagatcagggaaacaagtgagtcaaaacctgttgaacactagcaaagcctttccttttcatttgatgtattgtgtgtattaagacaccttttttaggctgggcacagtgtaatcccagcactttgggaggcggagacagaaggattgcttgagctcaggagttcaagaccagcctgggcaacgtagtgagacccccatctttacaaaaaatttttacaaattagctgggcctggtggcacacacctgtagtcccagctattcaggaggctgaggcagg

SEQ ID NO: 57892 - DNA, 1651 bp, Homo sapiens
cacctcttcgactttgctcctgcttcaccagtgatgtcctccctggggtcagtttaccctgcgtgggaggtgaattccctgggggaaacttaggctcccttctgctgctcttgtgcagtgcacggggctgtcctcattttctccgttccccattgcttctttaatgtctcagtgcacttccttcattccattgccaaaatgcaagccccttgagggcagggaccatgcttgactcgtttttgtatgcctaatgcctagcacagagttgaacacattactgccaattcatttttttcaatgacaattccataaacatcattaggcattaggtgttcagctctgcatataaggtcttcatcagcaagacggttacaagtataaaccatttcctatttcagaatattttaatattcaacatatttgtatacccacattctcttgttacaattattgccagaaagccaattgataagctttcaaaatgggcttatcacacccctccaaaaatagatttttgttttttctataaacagaaatttcagaaatgagatttgagagatccgactgagaagacccttcagtaaaatgtgacatgacttaccttatgctgtaatctgtattccctcaggatttaagagcttcctagcataaaatctttgctaaacgtttgtgtacatgttattggtgctccgaaaaatagtcaatggaatggtgcactacaattgggctttatcatcttattttgaacctcgtgtagattacagtaaagcaaaccattcagtgtgttccaggaaattatattagatctgtgtttctatcagctcactggaataatctgataattgttacttttacttggtatggctgcaagaatagtggaaagaagaggacttgagagttggtcgaacccaggtttgaaatctggcttagtcatttttcagctgttatcctgggtgagttttgccaactttcttagcttcatttccctcattaatacggtgggacataacagctactcttgcattgaaaattaagttagattacctgtctagcatacccatcatcatacacttactatggtcacattttgtatttaaaataaactaatacgaaaaatatttctttttttttacacagaattatgattctcacagggtatataaattactgattagaattatttatatgtggccaattcttaatgtcattgggaatgctgtttcatttcaatcctcaaagttactgtagcacagaaaatatcacaatttcctgcagggacattatcagtaagttctgcagggaacaaacaattgacattaaaaatcagtactctgcaattgtcactgttatcatctgctagaaactctgcataatgcattttaaaccaccaaggctggctgccacatccatgtgaaatgcttgaattttatggtgcttaaatatttaatgattcatgggaaaaatgtgaaatgtgtctaataaattgcatccctttctctaacctctggttgtaaagttaaagactttcagcatgtaacttttgcaagatgcctggtctgccattggcacttaaatatttgttgtattacgatttataatatggttcattatatataaaattctgtgatgacttccaaaaacaactgtgttt

SEQ ID NO: 57893 - DNA, 1634 bp, Homo sapiens
  misc_feature (1400)..(1400): n is a, c, g, or t
  misc_feature (1406)..(1406): n is a, c, g, or t
  misc_feature (1412)..(1412): n is a, c, g, or t
  misc_feature (1427)..(1427): n is a, c, g, or t
  misc_feature (1432)..(1433): n is a, c, g, or t
  misc_feature (1457)..(1457): n is a, c, g, or t
  misc_feature (1463)..(1463): n is a, c, g, or t
  misc_feature (1478)..(1478): n is a, c, g, or t
  misc_feature (1480)..(1480): n is a, c, g, or t
  misc_feature (1490)..(1490): n is a, c, g, or t
  misc_feature (1492)..(1492): n is a, c, g, or t
  misc_feature (1497)..(1497): n is a, c, g, or t
  misc_feature (1503)..(1503): n is a, c, g, or t
  misc_feature (1526)..(1526): n is a, c, g, or t
  misc_feature (1528)..(1528): n is a, c, g, or t
  misc_feature (1530)..(1531): n is a, c, g, or t
  misc_feature (1554)..(1555): n is a, c, g, or t
  misc_feature (1560)..(1561): n is a, c, g, or t
  misc_feature (1564)..(1564): n is a, c, g, or t
  misc_feature (1566)..(1566): n is a, c, g, or t
  misc_feature (1568)..(1568): n is a, c, g, or t
  misc_feature (1588)..(1588): n is a, c, g, or t
  misc_feature (1601)..(1601): n is a, c, g, or t
  misc_feature (1605)..(1605): n is a, c, g, or t
  misc_feature (1610)..(1610): n is a, c, g, or t
cacctcttcgactttgctcctgcttcaccagtgatgtcctccctggggtcagtttaccctgcgtgggaggtgaattccctgggggaaacttaggctcccttctgctgctcttgtgcagtgcacggggctgtcctcattttctccgttccccattgcttctttaatgtctcagtgcacttccttcattccattgccaaaatgcaagccccttgagggcagggaccatgcttgactcgtttttgtatgcctaatgcctagcacagagttgaacacattactgccaattcatttttttcaatgacaattccataaacatcattaggcattaggtgttcagctctgcatataaggtcttcatcagcaagacggttacaagtataaaccatttcctatttcagaatattttaatattcaacatatttgtatacccacattctcttgttacaattattgccagaaagccaattgataagctttcaaaatgggcttatcacacccctccaaaaatagatttttgttttttctataaacagaaatttcagaaatgagatttgagagatccgactgagaagacccttcagtaaaatgtgacatgacttaccttatgctgtaatctgtattccctcaggatttaagagcttcctagcataaaatctttgctaaacgtttgtgtacatgttattggtgctccgaaaaatagtcaatggaatggtgcactacaattgggctttatcatcttattttgaacctcgtgtagattacagtaaagcaaaccattcagtgtgttccaggaaattatattagatctgtgtttctatcagctcactggaataatctgataattgttacttttacttggtatggctgcaagaatagtggaaagaagaggacttgagagttggtcgaacccaggtttgaaatctggcttagtcatttttcagctgttatcctgggtgagttttgccaactttcttagcttcatttccctcattaatacggtgggacataacagctactcttgcattgaaaattaagttagattacctgtctagcatacccatcatcatacacttactatggtcacattttgtatttaaaataaactaatacgaaaaatatttctttttttttacacagaattatgattctcacagggtatataaattactgattagaattatttatatgtggccaattcttaatgtcattgggaatgctgtttcatttcaatcctcaaagttactgtagcacagaaaatatcacaatttcctgcagggacattatcagtaagttctgcagggaacaaacaattgacattaaaaatcagtactctgcaattgtcactgttatcatctgctagaaactctgcataatgcattttaaaccaccaaggctggccncccccncctctntgcaatgctttattnagatnncctcacaaggttcaatgttcactntgatanggtgttttgcctctnangaaaggcttncngttcnttttcnttagccgggtaaggggttcacanangnncagtcttttgttctttatgcctnntatgnnttngntnaataatgtttgttgtcaatngtttattaatacngttntttanagttcaaattatgtaatgacttcc

SEQ ID NO: 57894 - DNA, 474 bp, Homo sapiens
gtctggatctcagtccctgactcagaccctggatgctcgctgccttgtacagaaacaacctgctcaaccaaacagggtgaccctgctgaagccgcaaatgtccaacagtcctgccaaccgtggatgcttctgtagcttccctttagctctccctcctggcatgaaaccagacacagactacccagaagatgaactgagcactctgcaatgggcccagcacgctgctgcatctgagaccatcttctcggccctaacaaccctggcaggctcttctctctggtggggaaattgggcttagggaaaggacatctttaggacagtcatcccaccaagtagaatgactctatgcagcctgaatactgtttccctgggaggaaaaaaatccaaagcataaacttttataagctgttttaattaaaacactctttgtaaagtgatgtatttgaagcaagggaggagaaaggttttctggca

SEQ ID NO: 57895 - DNA, 314 bp, Homo sapiens
ttcaagtaaaaagagttagtcctggagaatatcggcagagagatagcatagccagcagaactcggtctaggtctcagaggccaaacaacactatcacctatgaaagtgagcgaggaggtttcaggcgtacgttttcacgttctgagtgggcaggtgtgagaacctatgtcagtagcaccagaatccccatttgtagaatcttaaatactggtttatgtgagactacatctgttgcaattcagacgatgttaaggcagataatgacaggttttggtgagttaagctattttatgtacagtgatagcgactcagag

SEQ ID NO: 57896 - DNA, 733 bp, Homo sapiens
cggtagcgacacggagccggctcccccttttccagccttcctccccatctcccattctccgtcccccacgacctataccagaggtccttaggcctccacgtctctccttttgccgagtagcccaaggtttccacccatctgccagggggatggcgtccactccgatggggaatgagggggagaagaagagcagctggccatctcaagctgcaccctccttgagaggaggtccggcttcgttatctcgttctgaggaatacctgtcccagatcagtgcagaactcatggaggaggctttgtgcactgcttgctgccacttgaaccctgtgcccatcaaaaaaaagcagtcacaagaccaagcgactcagatatccaaacgcgcattcttcaccaagacctgaggcacagacacctggtgagtgaggcttcaagggagatgctctttgtcctgggagagagaaaccgtacctgcagcaaggcatacctcctgccaactcctggtgaaaagaacatgcctcaaaactactcttttgccactcgttaaccacttccgtttgtggggacctcctggtcatgagcagcatcatcccgaagccttcaaagtgttctggattcatcacaggaccctccagcctcagccagcaaggataccaccaggaatgaaagtgctttaataaagagacagggtgtgcaaaaaaaaaccgctccacccaccccccggccctcccccccg

SEQ ID NO: 57897 - DNA, 771 bp, Homo sapiens
cggtagcgacacggagccggctcccccttttccagccttcctccccatctcccattctccgtcccccacgacctataccagaggtccttaggcctccacgtctctccttttgccgagtagcccaaggtttccacccatctgccagggggatggcgtccactccgatggggaatgagggggagaagaagagcagctggccatctcaagctgcaccctccttgagaggaggtccggcttcgttatctcgttctgaggaatacctgtcccagatcagtgcagaactcatggaggaggctttgtgcactgcttgctgccacttgaaccctgtgcccatcaaaaaaaagcagtcacaagaccaagcgactcagatatccaaacgcgcattcttcaccaagacctgaggcacagacacctggtgagtgaggcttcaagggagatgctctttgtcctgggagagagccctctcccctctcttccaccatctcctgctcggacagaaaccgtacctgcagcaaggcatacctcctgccaactcctggtgaaaagaacatgcctcaaaactactcttttgccactcgttaaccacttccgtttgtggggacctcctggtcatgagcagcatcatcccgaagccttcaaagtgttctggattcatcacaggaccctccagcctcagccagcaaggataccaccaggaatgaaagtgctttaataaagagacagggtgtgcaaaaaaaaaccgctccacccaccccccggccctcccccccg

SEQ ID NO: 57898 - DNA, 356 bp, Homo sapiens
attttgaattaattttgctttataattatgtatggttccaaaatctaacctacaacacaaaacacatttagaagtcttaactttttctcttatcctctctacctagtccctgctttaatctgtaaattcatttttggtttacccgttgtgactactagaggttaggctaaaacctgggtttcttaaaactgggaaagatacagataagccattcatgcagaggtacatgcaattctggtgttagataaaaactaatgccacaattgtaactacagcctgcaattccagaaaaagaagttaacaccgtgtgtgaggaaaacaacaaaaaaacccccactgtttaaaattcaggattg

SEQ ID NO: 57899 - DNA, 1324 bp, Homo sapiens
agcgggagggtggcagagcccagccaccagggtctgctccatgcctggtccctggagaggccctcaccctctctgctttcacccaacccgactgacacggagtaggaggtgggaatcatgcaggcagggagcttaggaagcctggttcaagattgctttgaatggcaggccccctgctgtgctcctggggagagagcctgaaacctggatgctcgggagcccctcagatccgtcatctgtccccgacacccctgtggtgagccttgccactgggccctgagaagctcagagcagtcgagtcagggcagtgggacatgacccaggtcagatgtggcttttccgtaattgtacaccaatgatcaagagaaaatgaaggattttaatatccaggaagatcctccgcctcagtgccaggccactgcccaccacatgggagcaggaaccagggcatgggcaggcagaagagcaggcggagcggctgagctcctgtcccggctccctaaggtgttcccagtttgcggaggattacgtgccctctcagcccagtagcacactttccaaataagccatcagactcctcccaagatcctgaaactgaggctcagagagcagaagcagcttggccaaagtcatacaactggtagttggtaaaggagctggccttgaactcagggatatcttgaaagccactgttgcttctatggactctagccattcaaaagacccctcaccttctataagaccccaggagatcctcagggtccaactgctcccttgaaaaccaggtcccagatatatctgccaaaggtatgattaggtgccttaaacacataccatgagaaagggattccatgtcttccaatcctgcccagagatgcagagacaccaccacccagggagagatagccagaaactaaaataagatgttagagacagggtggttgatagtgacagatacagccacaccaagacaggctcaaagggaggaagactgaggggaagccagagacagagagggacacattaggccaaagaatgagagagatagctggaaaaggagacaataggagtagaggagggtacaggctgacatgaaaaaacaccgacagatacactccagtatgcagacagacacatatagacccatctgaccttcacaagaaacagactgtgaaagcaagcaaggctcaggctgtgtgtggtgtgcgtatgtgtgtgtgcgtattgtggggggagcatgcagagtctgtatagctacgcacattacaccagctgcttccagcaatttcatctgattaataataaatgccccataattacagcc

SEQ ID NO: 57900 - DNA, 995 bp, Homo sapiens
agcgggagggtggcagagcccagccaccagggtctgctccatgcctggtccctggagaggccctcaccctctctgctttcacccaacccgactgacacggagtaggaggtgggaatcatgcaggcagggagcttaggaagcctggttcaagattgctttgaatggcaggccccctgctgtgctcctggggagagagcctgaaacctggatgctcgggagcccctcagatccgtcatctgtccccgacacccctgtgatcctgaaactgaggctcagagagcagaagcagcttggccaaagtcatacaactggtagttggtaaaggagctggccttgaactcagggatatcttgaaagccactgttgcttctatggactctagccattcaaaagacccctcaccttctataagaccccaggagatcctcagggtccaactgctcccttgaaaaccaggtcccagatatatctgccaaaggtatgattaggtgccttaaacacataccatgagaaagggattccatgtcttccaatcctgcccagagatgcagagacaccaccacccagggagagatagccagaaactaaaataagatgttagagacagggtggttgatagtgacagatacagccacaccaagacaggctcaaagggaggaagactgaggggaagccagagacagagagggacacattaggccaaagaatgagagagatagctggaaaaggagacaataggagtagaggagggtacaggctgacatgaaaaaacaccgacagatacactccagtatgcagacagacacatatagacccatctgaccttcacaagaaacagactgtgaaagcaagcaaggctcaggctgtgtgtggtgtgcgtatgtgtgtgtgcgtattgtggggggagcatgcagagtctgtatagctacgcacattacaccagctgcttccagcaatttcatctgattaataataaatgccccataattacagcc

SEQ ID NO: 57901 - DNA, 890 bp, Homo sapiens
agcgggagggtggcagagcccagccaccagggtctgctccatgcctggtccctggagaggccctcaccctctctgctttcacccaacccgactgacacggagtaggaggtgggaatcatgcaggcagggagcttaggaagcctggttcaagatcctgaaactgaggctcagagagcagaagcagcttggccaaagtcatacaactggtagttggtaaaggagctggccttgaactcagggatatcttgaaagccactgttgcttctatggactctagccattcaaaagacccctcaccttctataagaccccaggagatcctcagggtccaactgctcccttgaaaaccaggtcccagatatatctgccaaaggtatgattaggtgccttaaacacataccatgagaaagggattccatgtcttccaatcctgcccagagatgcagagacaccaccacccagggagagatagccagaaactaaaataagatgttagagacagggtggttgatagtgacagatacagccacaccaagacaggctcaaagggaggaagactgaggggaagccagagacagagagggacacattaggccaaagaatgagagagatagctggaaaaggagacaataggagtagaggagggtacaggctgacatgaaaaaacaccgacagatacactccagtatgcagacagacacatatagacccatctgaccttcacaagaaacagactgtgaaagcaagcaaggctcaggctgtgtgtggtgtgcgtatgtgtgtgtgcgtattgtggggggagcatgcagagtctgtatagctacgcacattacaccagctgcttccagcaatttcatctgattaataataaatgccccataattacagcc

SEQ ID NO: 57902 - DNA, 496 bp, Homo sapiens
agcgggagggtggcagagcccagccaccagggtctgctccatgcctggtccctggagaggccctcaccctctctgctttcacccaacccgactgacacggagtaggaggtgggaatcatgcaggcagggagcttaggaagcctggttcaagattgctttgaatggcaggccccctgctgtgctcctggggagagagcctgaaacctggatgctcgggagcccctcagatccgtcatctgtccccgacacccctgtggtgagccttgccactgggccctgagaagctcagagcagtcgagtcagggcagtgggacatgacccaggtcagatgtggcttttccgtaattgtacaccaatgatcaagagaaaatgaaggattttaatataatgggctgcaaatgtaacaaaccccctgaccttcagtctgaagagagagaactatcaaccacacagaagcaaagatccagagaaatactgagggatgctaccagacact

SEQ ID NO: 57903 - DNA, 421 bp, Homo sapiens
tgaggtgggagggtcacttgagcgtgggaggcgaaggttgcactgagccaagattgagccactgcactctccagcctgggtgaccaagtgaaaccctatggcaaaaaaaaaaaaaaaaaaaaacacaagctttggaggtaatcctgtttctgttttacagatcctgaaactgaggctcagagagcagaagcagcttggccaaagtcatacaactggtagttggtaaaggagctggccttgaactcagggatatcttgaaagccactgttgcttctatggactctagccattcaaaagacccctcaccttctataagaccccaggagatcctcagggtccaactgctcccttgaaaaccaggtcccagatatatctgccaaaggtatgattaggtgccttaaacacataccatgagaaaggg

SEQ ID NO: 57904 - DNA, 786 bp, Homo sapiens
gaatcgcctgaacctaagaggcagaggttgcagtgagccaagattgtgccactgcactccaacctgggcaacagagctagactcaaaaaaaaaaaaaaaaaagaacaaaactattctgactttctcgttgcagagtttaagttctatacagttccctctatgcatgcataaagttttgtgacaatatctgaacttgaccaagatcaaaacataacttctttaaaaaaatcatttaaattcagtttgaaccaaaatcagaaatgatgaagttagcagttactaagattacacatcattcaacaaatatacactgagggcttactatgaactaagtacatatatcaacaaaatttaagacttgaaaataacctgaaaaactgtaaaaacaaaaaggttacatgaaaagggaaccaaaaacagctacctatgattaattatgtagattaagaaaggaattcaggagcctctgaggctcctgatctgaagaaatctcaacacgggagcgcatccctttgccaacaataataaacttcatcagctattttactaatggagacctctgttcatcttcccaaaatagacagcaaaaaacgctgaagatagagaatggcaggcaagttaaatacactgatagcataaattatcttgattaaaagaaggaggtagtggctcatgcctgtaatcccagcactccaacaaaagtgaagtctcccaacagtttgaataggaaacaacaaataaagcaccaaaaaagagactggaaaagctttatagtcactatattga

SEQ ID NO: 57905 - DNA, 369 bp, Homo sapiens
tcgatattgttgtgtttcagagaatagggaggcccaaggataggggaagagatgggggaatgactggttggtccatgggataagaacacacacaacatttattaagtttgctgtcttatgtgggaatggttcatgatgccccaaaacaattacaatagtagtatcaaaggttacttatgacagatcaccatgacagatatgataataatgagaatgtttgaaatattgaattactaaaatgtgacacaaagtgagcatatgctgttggaaaatggcaccaagagacttgcttgatgcagagttgctacaaaccttgaattttagaaaagcacaatatctgcgaagtgtaataaagtaaagtaaaatgaa

SEQ ID NO: 57906 - DNA, 602 bp, Homo sapiens
agccaggattccagccaggatctgcctgactttaagtaatatgtgtttcccactaaacccatgtcatggctttccccagctctcgaagctttgatggccccactgcctactgaattcagtcttagctgccaatccaggggccaagccctccgtgccctgccctgccctactcttcagccttgcccagcttttcccctccatgaacatcctcaagtcccccccacactcaagactccccaggagtgtccctttgctcatctgcaatgtccttactaccagcccatctgccctttccaagtcctgctcactcatcaatacttctgtgaccccctgccgtgagaacacattctctgctaaacccctgctcttccagcgcactttcctcagagttatgtacagagagggtctccccctgctagactgagccacctcggaggaagagcctgtgcctggattttcacatctttgtatgtccttccatccttagcaaaggcacctggaatgtaatcaaaatcaccaaatatgtgttggatagatgaataggtggatggattataaataaataaagtatttatctaggttgttacctctcaggatgcaag

SEQ ID NO: 57907 - DNA, 298 bp, Homo sapiens
aatcatggtggaaggcaaaggaggaacaaagtcatgtcttacatggcagcaggcaaaaggatgactagttcaaccattgtggaagacagtgtggcgattcctcagggatctagaactagaaataccatttgacccagccatcccattactgggtatatgcccaaaggaatataaatcatgctccttctctgattttagaaaaaggtgctacctagttgctaacagtctggaaggagtcatttgacaattccccatctcatctgctatatcgaatctatcaccaaattttgactgtagt

SEQ ID NO: 57908 - DNA, 438 bp, Homo sapiens
aagggggaactccttgaagatttacaaggctctctctctctagctccctcctctctgacactctggcttacaaaatccagctgcatctgcctcccaagtctggatccacgtctcctccactcatccagaccactctgcagtctgcgtggctccccctccacacgtgggctgtgcctccagacacagggcgttcttaggactcaactcatttgcctcttttctctcagaaacgagcaatacgctacccactgtctagtgttggaaacggctgctccagatattttgcccagttttctggttcttcatggtgggtgcaaactctgaagccagtgactcccttgtggcctaaggcagaagtctcctgactccatacatttcaaacctcatttctcctccacccagtgcttccagtgccagtgcctgcagctcctgttcata

SEQ ID NO: 57909 - DNA, 153 bp, Homo sapiens
caaatgcatggttactgcaaccagcgtctgggaaagccagcgcacaaaaactctctttaaggaactcctacagagtcttccccactaaaagcattaagaatcaaattaggctataataaatgataaacattaaagtcagatccttaagaggga

SEQ ID NO: 57910 - DNA, 2550 bp, Homo sapiens
ggaaatgttttcatatttttcaaaataggtttttattgttgaatgtacatctaccccagcccctcaaaagaaaaactgtttacatagaaattcctacacatacgtttgcgtatatgttattttaaacatctttgtggtgagaattttttccccgatattctccttctgtcaaagtcagaacaaattcagggaatttattttctggcagttgtgctccagtccttttaaaattgtacatgaacatgttttagaaacaatatggaggatgatgcatacatgtcggtcaagttcagcgctcgacattttatggaaagatttttttaaccttaccacgaaatacttaactactgtttaagtgaattgacttatttcactttagtttttgaactgtgattattggtatactgttatatcctcaacttggatttatggtaaccccttttagttcatggagaccaaaatttggggtatttataatagtcagcgcaggaatgcacatggaatatctacttgtccttttgaacctcacgagtcatccagaatgtatagacaggaaaagcatgtcttatttaaaactgtaatttatgggctcaggatctgaccgcagtcccgggagtaagcatttcaaagggggaaggcagtgtggtccctaccctgtgtgaatgtgaggatgtagacatccatcagtgcaactcgagctccatccttcctccgatttctaagggtccagtttttctggagggacagtcatcatgttttgatttatctgggagaaaactgtggtgcacagcttgtgaggagggcaaggttgtgacgttcgagcttagttctggtgttattctgtctcctcttctttgtcatcagccaaaacgtggtttttaaagagagtcatgcaggttagaaataatgtcaaaaatatttaggaatttaataacctttaagtcagaaactaaaacaaatactgaaatattagctcttcctacacttcgtgttcccctttagctgcctgaaaatcaagattgctcctactcagatcttctgagtggctaaaacttatggatatgaaaaatgagattgaatgatgactatgctttgctatcattgttacctttcctcaatactatttggcaactactgggactcttcagcacaaaaggaatagatctatgattgaccctgattttaattgtgaaattatatgattcatatattttatgaatcagaataaccttcaaataaaataaatctaagtcggttaaaatggatttcatgattttccctcagaaaatgagtaacggagtccacggcgtgcaatggtaattataaattggtgatgcttgtttgcaaattgcccactcgtgataagtcaacagccaatatttaaaactttgttcgttactggctttaccctaactttctctagtctactgtcaatatcattttaatgtaattgattgtatatagtctcaagaatggttggtgggcatgagttcctagagaactgtccaagggttgggaaaatccaaattctcttcctggctccagcactgattttgtacataaacattaggcaggttgcttaacctttttatttcaaactctctcaactctaaagtgctaataataatctcagttaccttatctttgtcacagggtgttcttttttatgaagaaaaatttgaaaatgataaaagctaagatgccttctaacttcataagcaaacctttaactaattatgtatctgaaagtcacccccacataccaactcaacttttttcctgtgaacacataaatatatttttatagaaaaacaaatctacataaaataaatctactgtttagtgagcagtatgacttgtacatgccattgaaaattattaatcagaagaaaattaagcagggtctttgctatacaaaagtgttttccactaattttgcatgcgtatttataagaaaaatgtgaatttggtggttttattctatcggtataaaggcatcgatattttagatgcacccgtgtttgtaaaaatgtagagcacaatggaattatgctggaagtctcaaataatatttttttcctattttatactcatggaagagataagctaaagaggggacaataatgagaaatgttggtgtgcttttctaagcatttaaaacataattgccaattgaaaccctaaatatgtttacataccattaagatatgattcatgtaacaatgttaaattaattataatgggattgggtttgttatctgtggtagtatatatcctagtgttcctatagtgaaataagtagggttcagccaaagctttctttgttttgtaccttaaattgttcgattacgtcatcaaaagagatgaaaggtatgtagaacaggttcacgtgattacctttttctttgggcttggattaatattcatagtagaactttataaaacgtgtttgtattgtaggtggtgtttgtattatgcttatgactatgtatggtttgaaaatattttcattatacatgaaattcaactttccaaataaaagttctactt

SEQ ID NO: 57911 - DNA, 2497 bp, Homo sapiens
ggaaatgttttcatatttttcaaaataggtttttattgttgaatgtacatctaccccagcccctcaaaagaaaaactgtttacatagaaattcctacacatacgtttgcgtatatgttattttaaacatctttgtggtgagaattttttccccgatattctccttctgtcaaagtcagaacaaattcagggaatttattttctggcagttgtgctccagtccttttaaaattgtacatgaacatgttttagaaacaatatggaggatgatgcatacatgtcggtcaagttcagcgctcgacattttatggaaagatttttttaaccttaccacgaaatacttaactactgtttaagtgaattgacttatttcactttagtttttgaactgtgattattggtatactgttatatcctcaacttggatttatggtaaccccttttagttcatggagaccaaaatttggggtatttataatagtcagcgcaggaatgcacatggaatatctacttgtccttttgaacctcacgagtcatccagaatgtatagacaggaaaagcatgtcttatttaaaactgtaatttatgggctcaggatctgaccgcagtcccgggagtaagcatttcaaagggggaaggcagtgtggtccctaccctgtgtgaatgtgaggatgtagacatccatcagtgcaactcgagctccatccttcctccgatttctaagggtccagtttttctggagggacagtcatcatgttttgatttatctgggagaaaactgtggtgcacagcttgtgaggagggcaaggttgtgacgttcgagcttagttctggtgttattctgtctcctcttctttgtcatcagccaaaacgtggtttttaaagagagtcatgcaggttagaaataatgtcaaaaatatttaggaatttaataacctttaagtcagaaactaaaacaaatactgaaatattagctcttcctacacttcgtgttcccctttagctgcctgaaaatcaagattgctcctactcagatcttctgagtggctaaaacttatggatatgaaaaatgagattgaatgatgactatgctttgctatcattgttacctttcctcaatactatttggcaactactgggactcttcagcacaaaaggaatagatctatgattgaccctgattttaattgtgaaattatatgattcatatattttatgaatcagaataaccttcaaataaaataaatctaagtcggttaaaatggatttcatgattttccctcagaaaatgagtaacggagtccacggcgtgcaatggtaattataaattggtgatgcttgtttgcaaattgcccactcgtgataagtcaacagccaatatttatcattttaatgtaattgattgtatatagtctcaagaatggttggtgggcatgagttcctagagaactgtccaagggttgggaaaatccaaattctcttcctggctccagcactgattttgtacataaacattaggcaggttgcttaacctttttatttcaaactctctcaactctaaagtgctaataataatctcagttaccttatctttgtcacagggtgttcttttttatgaagaaaaatttgaaaatgataaaagctaagatgccttctaacttcataagcaaacctttaactaattatgtatctgaaagtcacccccacataccaactcaacttttttcctgtgaacacataaatatatttttatagaaaaacaaatctacataaaataaatctactgtttagtgagcagtatgacttgtacatgccattgaaaattattaatcagaagaaaattaagcagggtctttgctatacaaaagtgttttccactaattttgcatgcgtatttataagaaaaatgtgaatttggtggttttattctatcggtataaaggcatcgatattttagatgcacccgtgtttgtaaaaatgtagagcacaatggaattatgctggaagtctcaaataatatttttttcctattttatactcatggaagagataagctaaagaggggacaataatgagaaatgttggtgtgcttttctaagcatttaaaacataattgccaattgaaaccctaaatatgtttacataccattaagatatgattcatgtaacaatgttaaattaattataatgggattgggtttgttatctgtggtagtatatatcctagtgttcctatagtgaaataagtagggttcagccaaagctttctttgttttgtaccttaaattgttcgattacgtcatcaaaagagatgaaaggtatgtagaacaggttcacgtgattacctttttctttgggcttggattaatattcatagtagaactttataaaacgtgtttgtattgtaggtggtgtttgtattatgcttatgactatgtatggtttgaaaatattttcattatacatgaaattcaactttccaaataaaagttctactt

SEQ ID NO: 57912 - DNA, 407 bp, Homo sapiens
aaaaaattagccgggcatggtagcaggcgcctgtaatcccagctactccggaggctgaggcacaagaatcacttgaatctgggaggccagagctgcagtgagccaagaccgccccattgtactccagcctgggcaacaagagcgaaactctgttaaaaaaaaaacaaaaaaagttggggggggggcggttctcagatgaaataaacttgggaaatgacagattaaacaaagtttaacaggtttatttgttgcagggcctctctgagcctttaaaaatgctgacagcgtggccaggcacggtggctcaggcctataatcccagcacttcgggaggccgaggtgggatgattatcggaggtcaggagttcgagaccatcttggccaatatggtgaaatcccatctctac

SEQ ID NO: 57913 - DNA, 230 bp, Homo sapiens
atcaacgaatggacaacaccaacaccgacacactaaaagggcacacactaccaaatcgtggcggtgatggttctataactgtatatggttgtcagaactcatcaaactgtaaactttaaaggagtgaatttaatatggtatatataagttatttctcggtaaatttgacttttaaaaacatctcttgtgttcatctcttatcccagtggcacagaaatatttctacatta

SEQ ID NO: 57914 - DNA, 459 bp, Homo sapiens
atgcttgcagtttcaagtaacaacagaatgctaagctgtgtcatgaacaatgagtaaaatttatcatctcacatgagaagaggtatttctaggataggctaagtcagtagcacagttgcctcatgtgtttcccatctttctgttctggagtggaattttgtagtgatgcagagatttattcttcctgccaaatctctagcctactagtgtgggtgtaagatttttctgggcctcatttaaagcctgcatatattccccaagtgctttaccagccagggtcagccttgccactatgccatgtttttttgggcgccagaattggcttgttatgttgaaagtattattttctctcatgatatttttctcctttagtacgcttcactattgaaatgcctgtaggcccagcttcccaggagtttgaggccagcctgtgcaatatagtaagaccctgtctccaaa

SEQ ID NO: 57915 - DNA, 338 bp, Homo sapiens
ctctcttgtgtctttatccggtattagcgtctgaaagaagaggtgatgaaccggaggacgtaagaagtacttcagtctatgcaggcatggtctgttgtacaacccaccttgtggtgttcgtgattgtacgtgggcagacccaggtttggcaggctctgacagtgatatttcttttctggctggggtttccatgacagagagccaaggaactttctctaagggagtttcagactgtgggctgggagagcagcttggagaggacagagctgagatatccataggcatgtcacggttctgtacatcattctgggtaaagtcaggcctgtctcctggtaagt

SEQ ID NO: 57916 - DNA, 252 bp, Homo sapiens
tgtggacacagctattacatttaggcctggagaagtgcagggaagaagttgggtttattaaaacatccaaagcttagatgaagacctcatgtagattaactcagaatatctgatcaggaggccttttcaactgccaagaattacagtgaaggggagaatagcgcagttctggagtgctcaaggcagatagagactgcaacaaaccactgctgctatgggcattattgtatgaacagtgtgaaaacaggaaag

SEQ ID NO: 57917 - DNA, 550 bp, Homo sapiens
  misc_feature (358)..(358): n is a, c, g, or t
  misc_feature (452)..(452): n is a, c, g, or t
  misc_feature (469)..(469): n is a, c, g, or t
  misc_feature (500)..(500): n is a, c, g, or t
tcttgcctcggcttcgtgagtagctgggattataggcgcccgccaccacgcctggctaattttttgtatttttagttgggacggcgtttcaccgtgttggccaggctggtctcaaattcctgatcccccgtgatgtgccccgctcggcctcccaaagtgctgggatgacaagcatgagccacctcgcccgaccacgtgtcatttttcttcttgcattcacaagagatgggctctgtggtctgtggaatgaaatggttaaagatggagaaattgtatacactggaacagaatcaacccagaacggatagctccctcctggaaaagtagagacgaggtttcaccgtgttaagccagggtngtgttcgatattcctgacctcctgattccacccgccatgggtttcccaaagttgttggggatttacaggcatggagccaccaaggcccggccantatatttggtttctttnttgaaaaattattattgggtctgtttacagntgattagttttcggaaccaagtggggacaaaggaaagttttgaattgaca

SEQ ID NO: 57918 - DNA, 453 bp, Homo sapiens
tgggtggatcacctgaggtcaggagttcgagaccagtttgaccaacatggtgagattccatctctactaaaaatacaaaaattagctgggcatggtggtgcacgcctgtaattccagctactcgggaggctgaggcacgagaatcacttgaacccaggaggtggaggttgcagtgagccaagatcgtgccacccgcattcagcctgggtgacacgtcaagactgtctcaaaaataaataaataaaaaaaaataaaatggctaattttttatgtgcatatcacctcaaaaaaaagacaaaaaggaaaaaaatagcctttagtggggaaaaaaaccatcagaacaatagctgcctggaagagcgtaggggattgactgggaagggacacaggggaactttttggactgatggcagtgtcctagagaaatataacataggccacatatgtgatttg

SEQ ID NO: 57919 - DNA, 433 bp, Homo sapiens
tttctaccaaatgttaaagctagtaactgataaattgttttacctctggttattgtgatgttagcaaagaataaccagatgttatgatatgtagcagacatgtcctttattcattgattctgttaattatttgataagattgatgtgaaagctttttttgatggcttcaaaacaggaccagtgaaaaaaagactctagttttagtttgagttttctgggtttttaactagtggggctgagtttattaaatgcttccccaccccccccaatagtacttttatttataaagcagaattgtcttctggcaagtgttggaagcataattcatatgcatataagtttgatagccttagaaaggtagttttgttgttaaactaagtaggatatgcaagttagaatttttttccactccctacttaggttgatgagtctg

SEQ ID NO: 57920 - DNA, 436 bp, Homo sapiens
tcaatctagaccttgagactaactgggagacagctggtgctgcagagtcacacactggctctgtgcctccagcaagccgtgtgctctgtctcccctgcttcccgccacatggagtgcagaagggaactcattcattattttaaatacaaaaaaagtaatacatgcttattgtaatagattcatgcaattcagaaaatgtaagaagtgaataacccctagaggtaatagtaacagtttggtgtgtatcctttcagacacagtgatattaatatatgtttgtgtacacatcaatatatacccacctttttaaaaagtaaggaatatatttacctattctgctctgtcttttaggttacttaatgtcttttcatgtcagtacataggggatctccttccttgttttcagtggtgtgcacgatttctttgtatttagcca

SEQ ID NO: 57921 - DNA, 502 bp, Homo sapiens
ttcctgaaccattccttacaggtagaagatactggaagatcaactctaatttgtggctgccttcccagcagtctctacttcagcatatctgggagccagaagcactcaagtttgataactcaaaagacagaacaatcagtcaagggtgggttggtttatttttgttcacgggtgttcatgtgcattcccaaacaaaatgagggtgaagagagaggaagtgtggaaaagataatggctttcagatttccacagcaccttttgcctggaccacttttcagcatttagtggtggggtttcagtttctaatacacagagcaatcacccaggcttttcccacagctaaggctttgagagatgaagtgacgtccaagcacagtatataatcaagtggtcaaggctgacacatggagtaaagctgtgattcagtctttccacctaaaattgtatgacccaactctccaacttaaatagacctttgaatatatctccagagaataagtga

SEQ ID NO: 57922 - DNA, 357 bp, Homo sapiens
ttcctgaaccattccttacaggtagaagatactggaagatcaactctaatttgtggctgccttcccagcagtctctacttcagcatatctgggagccagaagcactcaagtttgataactcaaaagacagaacaatcagtcaaggggtagaggctaccttccattctgctcatcttacacttcttggaaaggagacattcggtgaagatcactactattctccaaacttcattcgggaccctattccttccctgttgatgtcagtgtgtgaaattctaaattatgtcatgggtgtatacgttcaaaagcaatatattttcaaataaacaaaaaatataattggccatcacatatacc

SEQ ID NO: 57923 - DNA, 361 bp, Homo sapiens
ccccgctctactcatcactgatcatgtttcttacggactcaaacttgaaaagctgactctactccctgaatattatccatctgttaagcagcatcaaattagagacaaaccccatcttctcacttttgggggctgaactgtaccgtccctcacaattattatgtcgaagtcttaaccccagtacctcataaagtgactgtatttggaggcaatttaagttaaaattaggtcatgagggtggccctaatccaatctgactcatgtcaagccaagagaagcctgagaacaaaccaaccctgccaacaccttgatctcagactttgggcctccagagctgtgagaaaataaatgtctgctgttt

SEQ ID NO: 57924 - DNA, 327 bp, Homo sapiens
agtctattaggtacacaaatagaaatgttgaaaagatagtttggaatgcatgttttgagtttggaagggtatttaggctagaatatctagatttgagagctgttggcatggctctgtcttagtcaaatttgtcttagtatgttttatgctgctataacaaaacccttgagactgggtaatttataaagaacagaaatttatttcctcacagtctgttggctgggaagtttaagatcacagtgccaggaggtctggttgtctggtgcaggctgctctctgcttccaagatggcaccttgttgctgtgtcctccagaagggaggatccc

SEQ ID NO: 57925 - DNA, 404 bp, Homo sapiens
cattaatattctcagtgttggaaatatttttatattgccaagaccataatgtgaggagtgcagctgcataaatccctgagagaagattagtggggctagcaccttacaaggaaagacaagcttgttggctgggcccaaggacagtcaaatgtctgcctgacaatctccacacagaagggttgctcagatcacttaggacacccagaaagagctcacaaagggcaaacaacctaaggctgatattctccattagcggtacttacctgggaactgagtggcagtggacaggaagcagggcctgggctagggagaccctcaggaggaaggggacccaagaagttagaagtccattcattcatatactcattcattcagcaaacatgcgctgacaccttctgtatgct

SEQ ID NO: 57926 - DNA, 440 bp, Homo sapiens
acatgaatcagcttcacccacagtgtctgcatgtctctgtccatagcaaacgtttttattaccttaaaatatagatttttaccttaactagccaagacctaggaccctttttccaagctcttttagatgaagtaataaatgcaaatattagagatgtgtatatgtgtataaatatatggagaaaagatgttgcctagttgtacaaattagctttaataaaactcctgatttaaattatttaattgtgagaagggagattctaactcaacacgccaacgaaataaaagccttatccctctgctccgccaaaatatcccatttagagcctgcgtgtgtgtgtacacacacgtgtgcactcatccccacctgaccatatcaaattattatttaaactagatatttttactttgttgcatagtagtaatggtttctggaatgaa

SEQ ID NO: 57927 - DNA, 1039 bp, Homo sapiens
ctgcatgaaaattacaattttcctgtctatcccctcctggatccagaagtgttttttccagagtgcgacacttcccagaatccactggagagccagcccaaagggcatatcaggatgggacaaattacattctggaaaagctgccttggtgattccaatagtcctcccacccaggtgagacccactgcccagaagtggggttcctgggttagcatgatatctcatctgtcaccacatctcagcatccagcagaggccgagtgctggaaaaagggtgtgggaagagattgagttcacacggctcacctgctcattgcattaagagtatttcagaacagagtttttcagtgggggcagagagcatgcccctgcctcaggtgaaagtcttgggcatgagcctgtcacctaccaaatcaccatgagacagcatgtgaccttgcggatggccggggttcggaagaggtccaagattgagttggaggtgcagacacttgcaaactcgctttggatgtaggagctcatcacctaggtaagaagactctgctcagggaaagcgagggagctcggaccccacatccctgctgggaaccccttcgtctgtgtggaggagagctggggttgaggtctttggtgaggtggctggcccttgtctccgctccgtccaaggactgatggcacttgaggggtgttgagaagtgccaacacactgtttccagggtgttgagaagctccaacacgaactccaacactactgaggttctgcggttctggagggcctcccaccccattcctggtatagactcggagattgagtcagataagagcaggggttccaagtggttctgccacttcctactgtgtgttctcaggcaagttacccgtcctgtccccacttcaatttcctctttgtcaaaaatgagacatgaaatgagattacatacataaagctctcagcctagtgcccggcatggggcttgagaaatgatgcttattgataataaatggtaactatcttataataaatggtatttataatggtg

SEQ ID NO: 57928 - DNA, 2140 bp, Homo sapiens
ccctttttccgtccgggccaatcgttagtcagagtgggcggagccgcccgcgggcacctgcgcgttaagagtgggccgcgtcgctgaggggtagcgatgcgggctccggggatgaggtcgcggccggcgggtcccgcgctgttgctgctgctgctcttcctcggagcggccgagtcggtgcgtcgggcccagcctccgcgccgctacaccccagactggccgagcctggattctcggccgctgccggcctggttcgacgaagccaagttcggggtgttcatccactggggcgtgttctcggtgcccgcctggggcagcgagtggttctggtggcactggcagggcgaggggcggccgcagtaccagcgcttcatgcgcgacaactacccgcccggcttcagctacgccgacttcggaccgcagttcactgcgcgcttcttccacccggaggagtgggccgacctcttccaggccgcgggcgccaagtatgtagttttgacgacaaagcatcacgaaggcttcacaaactggccgagtcctgtgtcttggaactggaactccaaagacgtggggcctcatcgggatttggttggtgaattgggaacagctctccggaagaggaacatccgctatggactataccactcactcttagagtggttccatccactctatctacttgataagaaaaatggcttcaaaacacagcattttgtcagtgcaaaaacaatgccagagctgtacgaccttgttaacagctataaacctgatctgatctggtctgatggggagtgggaatgtcctgatacttactggaactccacaaattttctttcatggctctacaatgacagccctgtcaaggatgaggtggtagtaaatgaccgatggggtcagaactgttcctgtcaccatggaggatactataactgtgaagataaattcaagccacagagcttgccagatcacaagtgggagatgtgcaccagcattgacaagttttcctggggctatcgtcgtgacatggcattgtctgatgttacagaagaatctgaaatcatttcggaactggttcagacagtaagtttgggaggcaactatcttctgaacattggaccaactaaagatggactgattgttcccatcttccaagaaaggcttcttgctgttgggaaatggctgagcatcaatggggaggctatctatgcctccaaaccatggcgggtgcaatgggaaaagaacacaacatctgtatggtatacctcaaagggatcggctgtttatgccatttttctgcactggccagaaaatggagtcttaaaccttgaatcccccataactacctcaactacaaagataacaatgctgggaattcaaggagatctgaagtggtccacagatccagataaaggtctcttcatctctctaccccagttgccaccctctgctgtccccgcagagtttgcttggactataaagctgacaggagtgaagtaatcatttgagtgcaagaagaaagaggcgctgctcactgttttcctgcttcagtttttctcttatagtaccatcactataatcaacgaacttctcttctccacccagagatggcttttccaacacattttaattaaaggaactgagtacattaccctgatgtctaaatggaccaaagatctgagatccattgtgattatatctgtatcaggtcagcagaagaaggaactgagcagttgaactctgagttcatcaattgtaatatttggaaattatctacaatggaatcttccctctgttctctgataacctacttgcttactcaatgcctttaagccaagtcaccctgttgcctatgggaggaggtggaaggatttggcaagctcaaccacatgctatttagttagcatcagttgtcaccaacagtctttctgcaaagggcaggagagctttgggggaaaggaaaaggcttaccaggctgctatggtcaactcttcagaaattttcagagcaatctaaaagcgccaaaattcgctatgtttacagtgatactattaagaaaatgaatgtgattctgctctgtctttttaagtatgatcaaataaaaaatttgtacatcacaatcatttctaccaaaaaaaaaagg

SEQ ID NO: 57929 - DNA, 397 bp, Homo sapiens
gcctactactactaaattcgcggccgcgtcgaatggaatcttccctctgttctctgataacctacttgcttactcaatgcctttaagccaagtcaccctgttgcctatgggaggaggtggaaggatttggcaagctcaaccacatgctatttagttagcatcagttgtcaccaacagtctttctgcaaagggcaggagagctttgggggaaaggaaaaggcttaccaggctgctatggtcaactcttcagaaattttcagagcaatctaaaagcgccaaaattcgctatgtttacagtgatactattaagaaaatgaatgtgattctgctctgtctttttaagtatgatcaaataaaaaatttgtacatcacaatcatttctaccaaaaaaaaaagg

SEQ ID NO: 57930 - DNA, 2084 bp, Homo sapiens
ccctttttccgtccgggccaatcgttagtcagagtgggcggagccgcccgcgggcacctgcgcgttaagagtgggccgcgtcgctgaggggtagcgatgcgggctccggggatgaggtcgcggccggcgggtcccgcgctgttgctgctgctgctcttcctcggagcggccgagtcggtgcgtcgggcccagcctccgcgccgctacaccccagactggccgagcctggattctcggccgctgccggcctggttcgacgaagccaagttcggggtgttcatccactggggcgtgttctcggtgcccgcctggggcagcgagtggttctggtggcactggcagggcgaggggcggccgcagtaccagcgcttcatgcgcgacaactacccgcccggcttcagctacgccgacttcggaccgcagttcactgcgcgcttcttccacccggaggagtgggccgacctcttccaggccgcgggcgccaagtatgtagttttgacgacaaagcatcacgaaggcttcacaaactggccgagtcctgtgtcttggaactggaactccaaagacgtggggcctcatcgggatttggttggtgaattgggaacagctctccggaagaggaacatccgctatggactataccactcactcttagagtggttccatccactctatctacttgataagaaaaatggcttcaaactataaacctgatctgatctggtctgatggggagtgggaatgtcctgatacttactggaactccacaaattttctttcatggctctacaatgacagccctgtcaaggatgaggtggtagtaaatgaccgatggggtcagaactgttcctgtcaccatggaggatactataactgtgaagataaattcaagccacagagcttgccagatcacaagtgggagatgtgcaccagcattgacaagttttcctggggctatcgtcgtgacatggcattgtctgatgttacagaagaatctgaaatcatttcggaactggttcagacagtaagtttgggaggcaactatcttctgaacattggaccaactaaagatggactgattgttcccatcttccaagaaaggcttcttgctgttgggaaatggctgagcatcaatggggaggctatctatgcctccaaaccatggcgggtgcaatgggaaaagaacacaacatctgtatggtatacctcaaagggatcggctgtttatgccatttttctgcactggccagaaaatggagtcttaaaccttgaatcccccataactacctcaactacaaagataacaatgctgggaattcaaggagatctgaagtggtccacagatccagataaaggtctcttcatctctctaccccagttgccaccctctgctgtccccgcagagtttgcttggactataaagctgacaggagtgaagtaatcatttgagtgcaagaagaaagaggcgctgctcactgttttcctgcttcagtttttctcttatagtaccatcactataatcaacgaacttctcttctccacccagagatggcttttccaacacattttaattaaaggaactgagtacattaccctgatgtctaaatggaccaaagatctgagatccattgtgattatatctgtatcaggtcagcagaagaaggaactgagcagttgaactctgagttcatcaattgtaatatttggaaattatctacaatggaatcttccctctgttctctgataacctacttgcttactcaatgcctttaagccaagtcaccctgttgcctatgggaggaggtggaaggatttggcaagctcaaccacatgctatttagttagcatcagttgtcaccaacagtctttctgcaaagggcaggagagctttgggggaaaggaaaaggcttaccaggctgctatggtcaactcttcagaaattttcagagcaatctaaaagcgccaaaattcgctatgtttacagtgatactattaagaaaatgaatgtgattctgctctgtctttttaagtatgatcaaataaaaaatttgtacatcacaatcatttctaccaaaaaaaaaagg

SEQ ID NO: 57931 - DNA, 2121 bp, Homo sapiens
ccctttttccgtccgggccaatcgttagtcagagtgggcggagccgcccgcgggcacctgcgcgttaagagtgggccgcgtcgctgaggggtagcgatgcgggctccggggatgaggtcgcggccggcgggtcccgcgctgttgctgctgctgctcttcctcggagcggccgagtcggtgcgtcgggcccagcctccgcgccgctacaccccagactggccgagcctggattctcggccgctgccggcctggttcgacgaagccaagttcggggtgttcatccactggggcgtgttctcggtgcccgcctggggcagcgagtggttctggtggcactggcagggcgaggggcggccgcagtaccagcgcttcatgcgcgacaactacccgcccggcttcagctacgccgacttcggaccgcagttcactgcgcgcttcttccacccggaggagtgggccgacctcttccaggccgcgggcgccaagtatgtagttttgacgacaaagcatcacgaaggcttcacaaactggccgagtcctgtgtcttggaactggaactccaaagacgtggggcctcatcgggatttggttggtgaattgggaacatccgctatggactataccactcactcttagagtggttccatccactctatctacttgataagaaaaatggcttcaaaacacagcattttgtcagtgcaaaaacaatgccagagctgtacgaccttgttaacagctataaacctgatctgatctggtctgatggggagtgggaatgtcctgatacttactggaactccacaaattttctttcatggctctacaatgacagccctgtcaaggatgaggtggtagtaaatgaccgatggggtcagaactgttcctgtcaccatggaggatactataactgtgaagataaattcaagccacagagcttgccagatcacaagtgggagatgtgcaccagcattgacaagttttcctggggctatcgtcgtgacatggcattgtctgatgttacagaagaatctgaaatcatttcggaactggttcagacagtaagtttgggaggcaactatcttctgaacattggaccaactaaagatggactgattgttcccatcttccaagaaaggcttcttgctgttgggaaatggctgagcatcaatggggaggctatctatgcctccaaaccatggcgggtgcaatgggaaaagaacacaacatctgtatggtatacctcaaagggatcggctgtttatgccatttttctgcactggccagaaaatggagtcttaaaccttgaatcccccataactacctcaactacaaagataacaatgctgggaattcaaggagatctgaagtggtccacagatccagataaaggtctcttcatctctctaccccagttgccaccctctgctgtccccgcagagtttgcttggactataaagctgacaggagtgaagtaatcatttgagtgcaagaagaaagaggcgctgctcactgttttcctgcttcagtttttctcttatagtaccatcactataatcaacgaacttctcttctccacccagagatggcttttccaacacattttaattaaaggaactgagtacattaccctgatgtctaaatggaccaaagatctgagatccattgtgattatatctgtatcaggtcagcagaagaaggaactgagcagttgaactctgagttcatcaattgtaatatttggaaattatctacaatggaatcttccctctgttctctgataacctacttgcttactcaatgcctttaagccaagtcaccctgttgcctatgggaggaggtggaaggatttggcaagctcaaccacatgctatttagttagcatcagttgtcaccaacagtctttctgcaaagggcaggagagctttgggggaaaggaaaaggcttaccaggctgctatggtcaactcttcagaaattttcagagcaatctaaaagcgccaaaattcgctatgtttacagtgatactattaagaaaatgaatgtgattctgctctgtctttttaagtatgatcaaataaaaaatttgtacatcacaatcatttctaccaaaaaaaaaagg

SEQ ID NO: 57932 - DNA, 1791 bp, Homo sapiens
ccctttttccgtccgggccaatcgttagtcagagtgggcggagccgcccgcgggcacctgcgcgttaagagtgggccgcgtcgctgaggggtagcgatgcgggctccggggatgaggtcgcggccggcgggtcccgcgctgttgctgctgctgctcttcctcggagcggccgagtcggtgcgtcgggcccagcctccgcgccgctacaccccagactggccgagcctggattctcggccgctgccggcctggttcgacgaagccaagttcggggtgttcatccactggggcgtgttctcggtgcccgcctggggcagcgagtggttctggtggcactggcagggcgaggggcggccgcagtaccagcgcttcatgcgcgacaactacccgcccggcttcagctacgccgacttcggaccgcagttcactgcgcgcttcttccacccggaggagtgggccgacctcttccaggccgcgggcgccaagtatgtagttttgacgacaaagcatcacgaaggcttcacaaactggccgagtcctgtgtcttggaatgttcctgtcaccatggaggatactataactgtgaagataaattcaagccacagagcttgccagatcacaagtgggagatgtgcaccagcattgacaagttttcctggggctatcgtcgtgacatggcattgtctgatgttacagaagaatctgaaatcatttcggaactggttcagacagtaagtttgggaggcaactatcttctgaacattggaccaactaaagatggactgattgttcccatcttccaagaaaggcttcttgctgttgggaaatggctgagcatcaatggggaggctatctatgcctccaaaccatggcgggtgcaatgggaaaagaacacaacatctgtatggtatacctcaaagggatcggctgtttatgccatttttctgcactggccagaaaatggagtcttaaaccttgaatcccccataactacctcaactacaaagataacaatgctgggaattcaaggagatctgaagtggtccacagatccagataaaggtctcttcatctctctaccccagttgccaccctctgctgtccccgcagagtttgcttggactataaagctgacaggagtgaagtaatcatttgagtgcaagaagaaagaggcgctgctcactgttttcctgcttcagtttttctcttatagtaccatcactataatcaacgaacttctcttctccacccagagatggcttttccaacacattttaattaaaggaactgagtacattaccctgatgtctaaatggaccaaagatctgagatccattgtgattatatctgtatcaggtcagcagaagaaggaactgagcagttgaactctgagttcatcaattgtaatatttggaaattatctacaatggaatcttccctctgttctctgataacctacttgcttactcaatgcctttaagccaagtcaccctgttgcctatgggaggaggtggaaggatttggcaagctcaaccacatgctatttagttagcatcagttgtcaccaacagtctttctgcaaagggcaggagagctttgggggaaaggaaaaggcttaccaggctgctatggtcaactcttcagaaattttcagagcaatctaaaagcgccaaaattcgctatgtttacagtgatactattaagaaaatgaatgtgattctgctctgtctttttaagtatgatcaaataaaaaatttgtacatcacaatcatttctaccaaaaaaaaaagg

SEQ ID NO: 57933 - DNA, 1415 bp, Homo sapiens
ccctttttccgtccgggccaatcgttagtcagagtgggcggagccgcccgcgggcacctgcgcgttaagagtgggccgcgtcgctgaggggtagcgatgcgggctccggggatgaggtcgcggccggcgggtcccgcgctgttgctgctgctgctcttcctcggagcggccgagtcggtgcgtcgggcccagcctccgcgccgctacaccccagactggccgagcctggattctcggccgctgccggcctggttcgacgaagccaagttcggggtgttcatccactggggcgtgttctcggtgcccgcctggggcagcgagtggttctggtggcactggcagggcgaggggcggccgcagtaccagcgcttcatgcgcgacaactacccgcccggcttcagctacgccgacttcggaccgcagttcactgcgcgcttcttccacccggaggagtgggccgacctcttccaggccgcgggcgccaagtatgtagttttgacgacaaagcatcacgaaggcttcacaaactggccgagtcctgtgtcttggaactggaactccaaagacgtggggcctcatcgggatttggttggtgaattgggaacagctctccggaagaggaacatccgctatggactataccactcactcttagagtggttccatccactctatctacttgataagaaaaatggcttcaaaacacagcattttgtcagtgcaaaaacaatgccagagctgtacgaccttgttaacagctataaacctgatctgatctggtctgatggggagtgggaatgtcctgatacttactggaactccacaaattttctttcatggctctacaatgacagccctgtcaaggatgaggtggtagtaaatgaccgatggggtcagaactgttcctgtcaccatggaggatactataactgtgaagataaattcaagccacagagcttgccagatcacaagtgggagatgtgcaccagcattgacaagttttcctggggctatcgtcgtgacatggcattgtctgatgttacagaagaatctgaaatcatttcggaactggttcagacagtaagtttgggaggcaactatcttctgaacattggaccaactaaagatggactgattgttcccatcttccaagaaaggcttatgctatttagttagcatcagttgtcaccaacagtctttctgcaaagggcaggagagctttgggggaaaggaaaaggcttaccaggctgctatggtcaactcttcagaaattttcagagcaatctaaaagcgccaaaattcgctatgtttacagtgatactattaagaaaatgaatgtgattctgctctgtctttttaagtatgatcaaataaaaaatttgtacatcacaatcatttctaccaaaaaaaaaagg

SEQ ID NO: 57934 - DNA, 2314 bp, Homo sapiens
ccctttttccgtccgggccaatcgttagtcagagtgggcggagccgcccgcgggcacctgcgcgttaagagtgggccgcgtcgctgaggggtagcgatgcgggctccggggatgaggtcgcggccggcgggtcccgcgctgttgctgctgctgctcttcctcggagcggccgagtcggtgcgtcgggcccagcctccgcgccgctacaccccagactggccgagcctggattctcggccgctgccggcctggttcgacgaagccaagttcggggtgttcatccactggggcgtgttctcggtgcccgcctggggcagcgagtggttctggtggcactggcagggcgaggggcggccgcagtaccagcgcttcatgcgcgacaactacccgcccggcttcagctacgccgacttcggaccgcagttcactgcgcgcttcttccacccggaggagtgggccgacctcttccaggccgcgggcgccaagtgagtgtggtcccggggagcggcgccccttcccggctcgggcggcaaacaggaggtggggctgggcggccagctggggcgcgcagctgccggtcgcccccatgaccccggggcccgcgtgtggcctcctgcggccacaggagtgagcctggcacacctgatgaggaggaggaggtatgtagttttgacgacaaagcatcacgaaggcttcacaaactggccgagtcctgtgtcttggaactggaactccaaagacgtggggcctcatcgggatttggttggtgaattgggaacagctctccggaagaggaacatccgctatggactataccactcactcttagagtggttccatccactctatctacttgataagaaaaatggcttcaaaacacagcattttgtcagtgcaaaaacaatgccagagctgtacgaccttgttaacagctataaacctgatctgatctggtctgatggggagtgggaatgtcctgatacttactggaactccacaaattttctttcatggctctacaatgacagccctgtcaaggatgaggtggtagtaaatgaccgatggggtcagaactgttcctgtcaccatggaggatactataactgtgaagataaattcaagccacagagcttgccagatcacaagtgggagatgtgcaccagcattgacaagttttcctggggctatcgtcgtgacatggcattgtctgatgttacagaagaatctgaaatcatttcggaactggttcagacagtaagtttgggaggcaactatcttctgaacattggaccaactaaagatggactgattgttcccatcttccaagaaaggcttcttgctgttgggaaatggctgagcatcaatggggaggctatctatgcctccaaaccatggcgggtgcaatgggaaaagaacacaacatctgtatggtatacctcaaagggatcggctgtttatgccatttttctgcactggccagaaaatggagtcttaaaccttgaatcccccataactacctcaactacaaagataacaatgctgggaattcaaggagatctgaagtggtccacagatccagataaaggtctcttcatctctctaccccagttgccaccctctgctgtccccgcagagtttgcttggactataaagctgacaggagtgaagtaatcatttgagtgcaagaagaaagaggcgctgctcactgttttcctgcttcagtttttctcttatagtaccatcactataatcaacgaacttctcttctccacccagagatggcttttccaacacattttaattaaaggaactgagtacattaccctgatgtctaaatggaccaaagatctgagatccattgtgattatatctgtatcaggtcagcagaagaaggaactgagcagttgaactctgagttcatcaattgtaatatttggaaattatctacaatggaatcttccctctgttctctgataacctacttgcttactcaatgcctttaagccaagtcaccctgttgcctatgggaggaggtggaaggatttggcaagctcaaccacatgctatttagttagcatcagttgtcaccaacagtctttctgcaaagggcaggagagctttgggggaaaggaaaaggcttaccaggctgctatggtcaactcttcagaaattttcagagcaatctaaaagcgccaaaattcgctatgtttacagtgatactattaagaaaatgaatgtgattctgctctgtctttttaagtatgatcaaataaaaaatttgtacatcacaatcatttctaccaaaaaaaaaagg

SEQ ID NO: 57935 - DNA, 1832 bp, Homo sapiens
ccctttttccgtccgggccaatcgttagtcagagtgggcggagccgcccgcgggcacctgcgcgttaagagtgggccgcgtcgctgaggggtagcgatgcgggctccggggatgaggtcgcggccggcgggtcccgcgctgttgctgctgctgctcttcctcggagcggccgagtcggtatgtagttttgacgacaaagcatcacgaaggcttcacaaactggccgagtcctgtgtcttggaactggaactccaaagacgtggggcctcatcgggatttggttggtgaattgggaacagctctccggaagaggaacatccgctatggactataccactcactcttagagtggttccatccactctatctacttgataagaaaaatggcttcaaaacacagcattttgtcagtgcaaaaacaatgccagagctgtacgaccttgttaacagctataaacctgatctgatctggtctgatggggagtgggaatgtcctgatacttactggaactccacaaattttctttcatggctctacaatgacagccctgtcaaggatgaggtggtagtaaatgaccgatggggtcagaactgttcctgtcaccatggaggatactataactgtgaagataaattcaagccacagagcttgccagatcacaagtgggagatgtgcaccagcattgacaagttttcctggggctatcgtcgtgacatggcattgtctgatgttacagaagaatctgaaatcatttcggaactggttcagacagtaagtttgggaggcaactatcttctgaacattggaccaactaaagatggactgattgttcccatcttccaagaaaggcttcttgctgttgggaaatggctgagcatcaatggggaggctatctatgcctccaaaccatggcgggtgcaatgggaaaagaacacaacatctgtatggtatacctcaaagggatcggctgtttatgccatttttctgcactggccagaaaatggagtcttaaaccttgaatcccccataactacctcaactacaaagataacaatgctgggaattcaaggagatctgaagtggtccacagatccagataaaggtctcttcatctctctaccccagttgccaccctctgctgtccccgcagagtttgcttggactataaagctgacaggagtgaagtaatcatttgagtgcaagaagaaagaggcgctgctcactgttttcctgcttcagtttttctcttatagtaccatcactataatcaacgaacttctcttctccacccagagatggcttttccaacacattttaattaaaggaactgagtacattaccctgatgtctaaatggaccaaagatctgagatccattgtgattatatctgtatcaggtcagcagaagaaggaactgagcagttgaactctgagttcatcaattgtaatatttggaaattatctacaatggaatcttccctctgttctctgataacctacttgcttactcaatgcctttaagccaagtcaccctgttgcctatgggaggaggtggaaggatttggcaagctcaaccacatgctatttagttagcatcagttgtcaccaacagtctttctgcaaagggcaggagagctttgggggaaaggaaaaggcttaccaggctgctatggtcaactcttcagaaattttcagagcaatctaaaagcgccaaaattcgctatgtttacagtgatactattaagaaaatgaatgtgattctgctctgtctttttaagtatgatcaaataaaaaatttgtacatcacaatcatttctaccaaaaaaaaaagg

SEQ ID NO: 57936 - DNA, 1436 bp, Homo sapiens
ccctttttccgtccgggccaatcgttagtcagagtgggcggagccgcccgcgggcacctgcgcgttaagagtgggccgcgtcgctgaggggtagcgatgcgggctccggggatgaggtcgcggccggcgggtcccgcgctgttgctgctgctgctcttcctcggagcggccgagtcggtgcgtcgggcccagcctccgcgccgctacaccccagactggccgagcctggattctcggccgctgccggcctggttcgacgaagccaagttcggggtgttcatccactggggcgtgttctcggtgcccgcctggggcagcgagtggttctggtggcactggcagggcgaggggcggccgcagtaccagcgcttcatgcgcgacaactacccgcccggcttcagctacgccgacttcggaccgcagttcactgcgcgcttcttccacccggaggagtgggccgacctcttccaggccgcgggcgccaagtatgtagttttgacgacaaagcatcacgaaggcttcacaaactggccgagtcctgtgtcttggaactggaactccaaagacgtggggcctcatcgggatttggttggtgaattgggaacagctctccggaagaggaacatccgctatggactataccactcactcttagagtggttccatccactctatctacttgataagaaaaatggcttcaaaacacagcattttgtcagtgcaaaaacaatgccagagctgtacgaccttgttaacagctataaacctgatctgatctggtctgatggggagtgggaatgtcctgatacttactggaactccacaaattttctttcatggctctacaatgacagccctgtcaaggatgaggtggtagtaaatgaccgatggggtcagaactgttcctgtcaccatggaggatactataactgtgaagataaattcaagccacagagcttgccagatcacaagtgggagatgtgcaccagcattgacaagttttcctggggctatcgtcgtgacatggcattgtctgatgttacagaagaatctgaaatcatttcggaactggttcagacagtaagtttgggaggcaactatcttctgaacattggaccaactaaagatggactgattgttcccatcttccaagaaaggcttcttgctgttgggaaatggctgagcatcaatggggaggctatctatgcctccaaaccatggcgggtgcaatgggaaaagaacacaacatctgtatggtatacctcaaagggatcggctgtttatgccatttttctgcactggccagaaaatggagtcttaaaccttgaatcccccataactacctcaactacaaagatacaatgtggaattcaaggagatctgaagtggtccacagatctccttgaattcccagcattgttatctttgtagttgag

SEQ ID NO: 57937 - DNA, 845 bp, Homo sapiens
ccctttttccgtccgggccaatcgttagtcagagtgggcggagccgcccgcgggcacctgcgcgttaagagtgggccgcgtcgctgaggggtagcgatgcgggctccggggatgaggtcgcggccggcgggtcccgcgctgttgctgctgctgctcttcctcggagcggccgagtcggtgcgtcgggcccagcctccgcgccgctacaccccagactggccgagcctggattctcggccgctgccggcctggttcgacgaagccaagttcggggtgttcatccactggggcgtgttctcggtgcccgcctggggcagcgagtggttctggtggcactggcagggcgaggggcggccgcagtaccagcgcttcatgcgcgacaactacccgcccggcttcagctacgccgacttcggaccgcagttcactgcgcgcttcttccacccggaggagtgggccgacctcttccaggccgcgggcgccaagtatgtagttttgacgacaaagcatcacgaaggcttcacaaactggccgagtcctgtgtcttggaactggaactccaaagacgtggggcctcatcgggatttggttggtgaattgggaacagctctccggaagaggaacatccgctatggactataccactcactcttagagtggttccatccactctatctacttgataagaaaaatggcttcaaaacacagcattttgtcagtgcaaaaacaatgccagagctgtacgaccttgttaacagaaaatgaatgtgattctgctctgtctttttaagtatgatcaaataaaaaatttgtacatcacaatcatttctaccaaaaaaaaaagg

SEQ ID NO: 57938 - DNA, 264 bp, Homo sapiens
agtatcggcggaattccggctgtgtagagggaaggttaatggttgaaaagcagggtacctcacaattgaccctcaggagacaagcatggactgtggagttaggccaatccgggttcaaacccaggctccagctcatacttactctgtgacttcccttggctgaagttcagtcccaataatagtacaggttgagcatccctaatccgaaaatgcatgatctactccaacactggaaactttttgaccaccaacattacaatccaa

SEQ ID NO: 57939 - DNA, 328 bp, Homo sapiens
tctgctgattcctcatggaatcccctgcctccaatcatctcctcctctacctaattctagatgtcactgcctgagtgagtaatcttcgaaaatgtagatttaataataggggatggggaagcctctcattgtttaaattaaaaaaacattaatattcaatactctctataacttttctttctggcttcagcttccactctatctcttcactccaaccaaattaaatatgttgtttgtagtaggaagaatgaaacctttccctcccctgaccccctgaccgatgatgtccacatcctatttcccagaacctgtgactctgttacttaca

SEQ ID NO: 57940 - DNA, 338 bp, Homo sapiens
ggctgtcatgagaatcacttgaacccgggaggcggaggttgcagtgagctgagatcatggcactgcaccctagcctaggtgacacagcacaaaaaaaaacaatgttccacaagtcaaaaattgtgttcagggagtagaaaagtagtaggctaggtatcaaagggtatgaatgactaagttccttctataatatattgactataggtaggagatacactttcagttctgttttggtagatctccaatgatctgtcatttaagagtacacacgatgagtggaaaatttataatcaaagatttcacagttgctatgcagttcaaagattcatcctttgaat

SEQ ID NO: 57941 - DNA, 568 bp, Homo sapiens
ttcccatatcactcattctttaaccactggaaatttggtataactagcagaacatctgcctccctcaggtgagagacttgtttcataacttttctttatttacttctacattgtcttcaatggtaatggaagatacaaggttaatttgtttgttcatccatgcaaccatttgttcattcaattaaacctgtatcattatataattagcctgttccaggcattatactgagctctgggaatacaaagggaaagccaattatattttattacagtgggatgaactgttacatattttgcattgtagtgaagtgggaacaatgtgaataattacagttcaaagcccatgattgtgagattgatgttgatgaatgaactaaacatttcaagattttttcccaagaattttcatgtcagcaatgtgcaaattgggtgaactttaacaaaaagagctttaatactggcaaatggaaattttggattttaaatatctaaaatgcacatggaattttagagctggaaggatccttagaggtcagctaattcaactcattttacagatgaagaaacc

SEQ ID NO: 57942 - DNA, 273 bp, Homo sapiens
aggccataattcctcagccttctctttttggccaatctgggcatcctttactggggtgctttggtcttacctctgtgtctagggatcctttagcacccactcagcagcagagattcctacctggcccaggtctcttgagaccccttctgtggtagaaagctaagtagcatttattagtcccagctgcctccctctaggaactaaatggttaagcaccagccccaaactatatggttcagatgtgtgcatttggagagctgggatacaaaagaa

SEQ ID NO: 57943 - DNA, 804 bp, Homo sapiens
actcacctaaggatgcgagctagcaggtcttgcagcggctatcacgcccctcacgccgctatctctgtgcagccgactgaggatccctagtcgcataaggctgtgcctggcctgttggcgtccctggcagttgttgggttctggcggttgttgggtccctggcagttgttggcggttgttgggttccttcattgaaactgcactaactgggcttccagtcagcgtcagtcagcggatccttgggccgtggggcagccgcaggtcggttaggccaccagggcggctctcgtgccagtgaggcccctgagagccctttggtcagacagaggctaaatctgaacagtcaggcggtgagattaagcatagtcagggagttcgccaggagccagcgttcctcagcctccaccacgtcagtcacctggtcagccagagggcagctggggcgacatccatctaccaagaaggtgaacaggccttcacgatgaccagagacagaagcccctgacttggctaaagatacttctgctctccccatccccacatcctctttcagttacgcatcacctcactccttctgaaccatatggttctgatgtcagagccagtgtagtaaagagcttctgctgttcctgagaactgttgctgctggaagtgatgcttccactgctacagctgggtaagtaaggaaagagttctttggctgcccaggccttcgtgaaagggctgatccagggtgctatctatgcgggaattgtaattgcgctgctcttcctctgcctcctccctctcatgtgagtactaggg

SEQ ID NO: 57944 - DNA, 316 bp, Homo sapiens
atccagaacagctgttggggaaacagggtaagttcagattgttgtcgggagggagggcacaaggaacttaccaactccttgtcatcgcattcctggtcacctcgctaagagaataaaggattgtaaagggtagagtgtaggggagagagacactgttagttctagatcaagatgggcactggcagatgctaacttacgtacatttttaaaaacgcaagcctaactctcaatgcactgtgaatccaggtgagatccgaaggcaaaccatccctgttttaatgttagccaggttttggattggctgccctctcccttc

SEQ ID NO: 57945 - DNA, 1894 bp, Homo sapiens
ggcaaaatgaaaaaaaaaaaaaaaaaagcaagggctgatttttattcttctattcaaaatacaaggacagatgcttctctgttccaagagggtttccttgaggaagctactgaagcagaaagacatgatggagacgagatcgcctcccctcttgtcaaagtgttaaaaaaatgttctgtcttactctgcgcctagcattggaaatgaaagtgacatttacgccacaacccacgtgtgcgcctcctctctttttgtttaaggatgatcaggtctatccaggaaacagctctggcatcccaaactgaaataattaggacgtatatagacctgacaaaaatggaaagggggtggggaatctgagggtctgtcttgcctaattgattccgctaaacggaatgcaggagatgtgaacggcaggacgctccgattcccacgctcgggggcaagtgataaagcggggccgggcagcctatgacagacagccctgttggggggtgggggtatgaaaaaaacatcaagtgcacacaccatactcatctccatcgcttaagaaagtaaaggcatttcccacccacagccatctgcagcttcccaaatggcagcaccaactggtctgtagctgctacatagtctgcttctgttaattttttaaccactgtttaatctggccataattaagtttggctttcttcgttgtttgagattttcagaattcaaggcaagctagtagaaagcaattccaagaaagtcccatgactgcctgcccctaatgtcaaaatctcagtccatgagattatggccttgtgaccacatttttgcttttgttttgggtgggcaaatgtgtatagagataaaatacatatctctatataacagtcgttattataatttcatgaggctttttacctcttaacatgatacatctaggaacttggtctaattgtgctagtagatatacactagaagtaaaactataaagtcattagcctgtagaaagttgattatgataacaatatgataaaaagtttgttttggaatagtctcagctagatgggtctaaatagccattttaatgtaatctaaaaataacactatgcctagcagaaactttggcgctttggaggtccccattgtcgccttttcataaaagtccttaagttttccatatgtcaccaagcaaacatttgtataggcatttacacagaaatataaccattgcaattagaaaatatccaaaatagcctgttatcttccacgtggcctagattattgacaatcccaaatatacaatttttctttaaaagtagtacaatttcctttgtagcttcaattccttatatgacttcagactggagaagcctgttaaaccactgttagtttcagttagaaagtctgagagactttatacataaattctcaatttggctgctgtacacgtgccagagttttactactgtagtgaccgttgagaagacccttgtttatttacatttgaagcactgtttgtgcaaacaacctttcattgttaagtgcctgtattcctttcatttacttcatgtccaggggtgctatttacctagaaccattgtctactacaattaacatttacattacaaagtgtgtggttttctttttcaaggaggttcaattaaggcaataagatgtttgctggagaaacctattgtttactgaaagcactcaatgaagtcaaattactgaagcttttgcctacatcttggtcttttatgtaaatatgttaaatataacatctaaggaaaataaacaatattataattatgtgtttgccattgtcatatcaaacttgctttgtatcatactaatgttacataacttatcgatcaataaaaatacatttcaatgttaaaattttcat

SEQ ID NO: 57946 - DNA, 568 bp, Homo sapiens
ggcaaaatgaaaaaaaaaaaaaaaaaagcaagggctgatttttattcttctattcaaaatacaaggacagatgcttctctgttccaagagggtttccttgaggaagctactgaagcagaaagacatgatggagacgagatcgcctcccctcttgtcaaagtgttaaaaaaatgttctgtcttactctgcgcctagcattggaaatgaaagtgacatttacgccacaacccacgtgtgcgcctcctctctttttgtttaaggatgatcaggtctatccaggaaacagctctggcatcccaaactgaaataattaggacgtatatagacctgacaaaaatggaaagggggtggggaatctgagggtctgtcttgcctaattgattccgctaaacggaatgcaggagatgtgaacggcaggacgctccgattcccacgctcgggggcaagtgataaagcggggccgggcagcctatgacagacagccctgttgggttggctggggttcacattcgacttggggctaaatctacagtaggttccatctcaaactggacctaatggataattg

SEQ ID NO: 57947 - DNA, 687 bp, Homo sapiens
caggtttgtgtcttcaacaaaatcccttcataattgtttcttttgcttcagacgagagaaaaagtcgacacctgctttccttctgccatcgtcgctgggaagtgtcctcttgtccatctcctgtccagaggcgccttcctgctgtgccccccggaatatggctctttctgattttaccagcccttttcacatcactgcacccaggggaaacgtcctctccccagcctcctaaagtgtggccatgctatctccttcctgagacactttcctctggagattgccctgctgtgatagcctagtcattgccatcccggacactcatggtaccctgtacccgaaccaaatcagagcactttgacacaaggcagcctccaggcaggggtcaccctgggattgtaagatccatgtcactccaacagagcctcttccttccctctcactggtttctgccaacagagggcggccaggcaccacgcccatatgccttgaatctgagctaaccaccatgtaggatctaagaaaaatatgcttaccagatgatgttggccaggcgcagtggctcacgcctgtagtcccagcattttgggaggccaaagccggcgatcacttgaggtcaggagttggagaccagcctggccaacatggtgaaaccctccgtctactaaaaaaaaaaagtgccgcttcaaa

SEQ ID NO: 57948 - DNA, 738 bp, Homo sapiens
acaatcatttcctttattcaataaaatattgtgtgccgggctcagtgctagttttccatatcgtaaacacagaggctccaaatggcaggccccatcaccttatgagagttgattgggcaagttctgcagtctgtcttgcagggcctcataataatttttcaccctctgcttataggctctttttcctgacttttggggaagacttttcaggctccttccagagctacttcagttttgggggattctagctgctagaagacatcaaaacttttggggatgtccaggccaaggcagctcctgcactggctgctgtaggcatcactgctcaggccctctgccaaagaccagataagaggaataagcgacgcccattgtcctagagtcaggccttcctctggtggggggtggggaggccgtttcagccctctaattcccattttccatctgttgcttcaagaggatcttcttctgaggttgtaggtcaggatgaagcatttggagtgtgagctctgagggtaaaggtggcagagtaggagaggcccatttgtgtcttcacagtgcagccacattcattcttaacgcaccactttccaggaattggttctctgctttaaatggctagaaactgaattttttaaagaatattttaacatcttttaagatgtagttcgtctagtccaggtcagacctggcacaggcccaagtccctcaaaagacatttctcttttgataggctcc

SEQ ID NO: 57949 - DNA, 406 bp, Homo sapiens
gtaagtccaccttactaaagctcaaagaaatatcctataaaatctgctttttaaaataaatcgtcctttctctgccatcgtggtgtgtgcttgactgcgcttctcgccatgtcttctcacaagacttttagggttaaaagacttttaggattcctggccaagaaacaaaagcaaaatcatcccattccccagtggatttagacgaaaactggtaataaagtcaggtgaaactccaaaaggagacattggaaaagaaccaagctgggtctatgaggaattgcacatgagatggcacacatatttatgctgtctgaaggtcacaatcatgttaccatatcaagctgaaaatgtcaccactatctggagagttggacatgttttgttgggaatatatatttttttctct

SEQ ID NO: 57950 - DNA, 202 bp, Homo sapiens
ttctggcaccacattcaatactgattcacagggatctaaaacattctagttattcagtcactctgtcctgtgtggcagataggacttatgtatcttcagaatatttgaggagtcattctcagagtctctcatgagtgctcaacttaactgttccacaagtctgtcttcatagctgcatgttgcatcttccagtctctgttct

SEQ ID NO: 57951 - DNA, 544 bp, Homo sapiens
atggactgatgggtcaaatggtagctctggtttaagtttttccatctttctttttgcagatgagggatttgagactaagaggttcagttacattcctgagatcctgtagaacgtgtaccttcaacagggctagaactcaggtctcctggcccttgccccaggacctctcctttctcccatgcagaccttccctatttcaatgaagggaagggacccatttggataaaagccactgaaacagccttgaggagggcaggtttttagatgcatatattcatgcagtaggtgaaagtgtgacatcatatatctgagaaataataatgaagtgcattcatgaactgagtcatttagatagctaatccattgaggcctcttctctcaaatcagatgatataccactcaaaatcatttcttttgttgaatgtcatttcccataacttcttgtcctgtttgcatattgataaatgtattcttaggtctcacaacattgtaattcttttggcactctctcaatctttaaaacttacatatgggtgagtaaaat

SEQ ID NO: 57952 - DNA, 398 bp, Homo sapiens
ctacactcaatatcttactttaaataaaaaatggtaaagaaaaatagtaggcaatcacaaaagaagtttgagagtgggagtatgtgtgggtaggtggtagagattaatgagcatggaaggccgcgaaggttcactcagaaaatactttatgcagcaaagtgggagtcatgctcagggtcacagaaataaaaacattttctgtgaactggcctcacaagaatgagagctcggaatgtgtgtggtagtggctgagaaagtgggtgtccagttttgatccatttgtcatagtctccaagacagcatgaggccgtttaccatcatcttcctgcaaatgtccttcataggctgtgggttttttttccttcccttcttccttctcttcttccttccttcctctc

SEQ ID NO: 57953 - DNA, 400 bp, Homo sapiens
gtactagccatcagtattaccttaggaccacaccacgaatgtcaatgaataaatgcactgtcttttctccagggagattttacctgacccttccagatctggggtaggtgtcccagctgggtttggtaatagatgctctcacacactcttgcgttcctttcataattctcatcagatttgtaactatttaatatctagatttcctccaaaaactataatttccatggaggtaaaaactaagtcagtcttgtttgtggatttagctttagggcctacacataaatatttgtttgaatgaataaatgaatgagcaggggccaatactatttttaaaggagtttgaactttgtcttgtaggcaaccagaacccaaagcaaaacaacttgaagaaagttgtgtc

SEQ ID NO: 57954 - DNA, 325 bp, Homo sapiens
gtagtcattcataaacagataatgctaggaccatatcgcagggttgttatgagaatcagcctataaaatgcttagcacagtgcctggtacataagaagtgctcaataaatgttagccaagccaatgccactgcagtgccattgaagttgtgtgagtcagatgaccatctgcctttattgtctgggaagtgaatttaatttcttctgtgaagtgggacacagtaccatagtagctctgtgagtagctgtgattcaaacctgagtttagagggaaacacttatttcacccacagccacctcttttgcttattcccatgctaacccat

SEQ ID NO: 57955 - DNA, 571 bp, Homo sapiens
ctttagattatgaatggagagctacatcccatggggtggcagatgaagatgtgcaagaagaagacactaacaactgaattgcagattgaggagatgagattatggtgacagaatccatcttcggtgtatgtgcatgaagaaataagccaaatctacatctataaaaccgcgggaaggaatgagataataatcagttgcaggtctgcttagattttaatcgtttagtgtagttcgtggcagggtctgataccctatttcaatagtggagagaattagaaagcattttcttttttcatatctactattattggttatataaaagaagtatcaaatggtttctgctttcatggaatatactgtccagtcgcaaaggaaagaagatggagagatgattaaaaaaaaaaaaaagaacaaacagcttccattattctagcaatgcccacacacccctattgtttgagcagagaaaacgctgacaggggactggccaggtaaggaggaacagaccacgtggccattatgctcttgccttcccacctgaaacttctgtctccttatggctctccctgag

SEQ ID NO: 57956 - DNA, 990 bp, Homo sapiens
ggagaatgtatttgagaacaactcttccagcttcttacatatgtacaggtatctctcaggggctgacctaggaagggtcctttcctgtggccatgatcgatccagtcccacatctggaaagcttacaagaatgggttcaaagcggggattacacttgataattacagaaggaccacctacttcttagaggaaagacgctgggaggttgcttaggatgtgggccaagagggtcagagaggaccacctactttttagaggaaagacgctgggaggttgcttaggatgtgggccaagagggtcagagattttgcttcacctgaactcactggggcttctccagggatattaacctggactttaagagtcagagtgagtccctgggactagttcagcccatccaggattcagacgggaagaaggtggggctgatttttcacctggagaaagagaggcatgtcccacacagacctaactcggcattgtcccctcccaaactcccacccctccacatagcttaaaagtgttgggggcttctccagtttagatgggggaacaaagagaaccaacagctggaaaaaactagagatgaggccgttggcctagtcatcatccaggccgatttctcagaaccaccactttctcttcggctactttgcccatcccataaaagaaccccaaatccttcctgttcattcctcagcagttcccacgtttccttccagaaactcagaaggcaccaggaactgaattgcaaagttcgttagagcacagactctgaattaaagagctgggttaaactccaggctattcccttaaaaaaaaacaagaacaaaaaaggggggcgccaaaaacccgaggggcaatgcggccccttttggacaaggggcataggggagaaaacgagcacgggcgaaacgcggggaagctcggatgaaaccactgggggcaggcccccgaaaccggagaagggagggccgacgggagcgataa

SEQ ID NO: 57957 - DNA, 204 bp, Homo sapiens
gggactaaagaaaggtctgtcttgcctgatgccaccactgctagtgcccgaggatcagcccacctaatgttcctgtccccagcaaagccttacaacagcatccattaaaaaccacagtctaagacacttcagaacttaacaacacaactgatgctgattacagctgaagaaattgtacagagagtacactgctttactcaccca

SEQ ID NO: 57958 - DNA, 502 bp, Homo sapiens
cctcaaaaaataaataaataaataataaaaataaagccagattgtaaatatgcagtttaagccctgagccaggacaggctatggtgttctcatccgccaaagctatgctatgtagacctacaccctgtctctcccctcttccaggaaccctctcagcttttccagtaattttctgggggaaatgagaatattctttttattctaatgttttaacataaagtggtaataaacaggctacgcaacgaaaacaagaaactaccacccaatagtagccttctgcaaagaatcacttccattgttctggaaacccccatttctcggaagcaggcagtttttcacatcatgtgctgtgttatgacatctacatctggtttgcatgcagacatcactgccgtcagccattagcatgtattaagtatctgttgggtgcagggcactgtgctcagtggcatggggaaggaattgggaggctttagatgacttttcaaacattaaaattaaa

SEQ ID NO: 57959 - DNA, 446 bp, Homo sapiens
ttaagcctgaaacacagctctctctatagaatttatctatatgtggtgtgtcatagtctattatgggtttgtgtggggctggatcagattaataccctggatccaagtcatctttccaaatgaatccaaatgaaaatattggcttggagaagatttcttggtaatgaatataatgcagaataatgaacagtagccaaaaagagagaggatgtagaaccaatcaaaggaagggcagatgtttaaaatgtcttttgctgtttgagactgtgagccaacaaaggtaattatgtctgtgctttctcaatttccacacaggagagaggcactttgaggttttccaagctctcgtcctatctatgctttgggcgctgaacagggaggggaccgtgatgccatgcatggccaacagcaacggatgccaagcaaggctcatggcataagacaga

SEQ ID NO: 57960 - DNA, 321 bp, Homo sapiens
agagatcacaatttccaactgggtaaacagcttgaaaaaagaaacagaagcctgggcacaaatgaaaattccatattaattggaagttaagattcatatagagacaatgaaaggttaggttagaacaataaactgagaagtacgaatgtggacttcaggaggctaggggaaattacgaagtcataaaaagttcacagagatacttgagtacaaaagatacattattaaaatttctgcagaagtttcatcttatttgtgtgtgatggtttggaatataacaagccagttaggcgtataagcttatagtggctaatatgagga

SEQ ID NO: 57961 - DNA, 346 bp, Homo sapiens
cagagtgccactggtgtctagcagacagaggccagagactctgctaaacatcctacaatgcaaagaacagtccccctgacaaaggattatcccaccccaaatatcaagaatgctgacacggaggttgagaagcctggcatttccccattgctgcctctgggaggctgcctctcgggatagattgaattgttctgcaaagacatggtcggcagacacagagggttccctcaccaggggtctgggagttgctggaaatggataagaaaatcctagttctacctcgcagacagggaggaagtgaagaggtgaggcagtaaaaattcataacatatctatcacaaatgca

SEQ ID NO: 57962 - DNA, 307 bp, Homo sapiens
  misc_feature (242)..(242): n is a, c, g, or t
atcagcattaggttttcaccaaagtgatacaagtctgaaggtcttcatcagcagtctccctcatagtcagcgccataccgaagaggcctgtccctctcatagggccttccagccactccttccccacaggcctgattcttctgtggctgggagtgtggactgatttgttatgatgtgagagatccctaggggtgtgagctaccgcacctggctgaactttcaaggagaagtttgtgcatcanttttcaaaaaattatgatatcaaaagatagctgtgccctacatttgggaaagatacaaaaacttg

SEQ ID NO: 57963 - DNA, 254 bp, Homo sapiens
gatgcctctgggggagggaaattgggtagctgggactgaaaataaagataaacaggagacttatgtttcagtctatatcttttgaatttccctcccccagaggcatcctttgtgtgtgcaaccttatgtatgtgcagatgtacatttcatttttctcataattgtcatacactatataattatctatatattgcatttatcactttattataaacattggagataactattaaaataccaaacatgcctcaaac

SEQ ID NO: 57964 - DNA, 443 bp, Homo sapiens
cctcaacctcgttcagtttccacataatacctggggcagggatgtaaataccctgattttatgtgtcaggccttcaaggactcagggtgtataagtgacatggctcctcgcacagcagggatggagaggcaaacccaggttggcctctctgccactcatatagaactcctttatcaccaagattcctttcttcttcagtgccacctgccttattttactcacccagaaggaagccgggtccctctttgcccctttgggtgtttgtgaaaagcaagttgtaaacactgaattctataaactgttggagacagattctggagagacactcaggcttagctctagaaagaaacgggtaagacagaggaggttcagggcaactgtgttgccttccttgactggtgcatgggaattccccagcagagagaaaaaaaaaaaagaaagga

SEQ ID NO: 57965 - DNA, 1047 bp, Homo sapiens
tcaaggaaagaaagcataaaatgttctcaggcagatgaaaattaagaaaataatgattagaacatggtcaccaataattttgaaagtatactttgagtagggtaataaagaagggggaattaaatcaatggagtgcttttccttcttgtttttgaaataagaattatccgtgcaatcttttacaaggaaaagagaagattcagacttcctagtgtagattcaaactcaaggaggtggtacaacagagactcataaaaactgtcaaatgacagtgcacattgtaagccccctacatgtccatagactaagactcatcatcagaatccttatattggtcaagatgtatggtacatttaaggctaagcttctttttgctctcagattcctacacaaccatgttgaccttgttaatttagtcatatgaagtaggtggaatattgtttgaatagactgtttcttttttcttcagtttacagactattttttaaatgatattggcgtatgtatatctttggcatagagtaggagtcaaatatttgaattttgtgtaaacctagagagccaagtgtcttactgctgcctcagaaatacttagagtaatgctatttcacaaacatatgggttttggtactgttgacttcttatttgtgtcccattaaaaactcatttaatattaccttgtttagctgactaatagcaaattaagaaagctattgtatacaagtgatatttggaaaaaaataattaaacttcttaattgagaatgatgagaaaatcatttcatatttagtgtagagttgcagtgctgtgataccttccaattctgaaagatgtcattaccatttgaagtagtctaaaacagtttagcaagcttatttgtactttatttttgctctttcttttcaagggatgtctctggtatcctcatgctttttatggattatagctgcaatctttcttaccagtatttttgaccgtgattcttaatagagttgtgtgcagccagcaagtttatgcagtctttcaaaaaaaaaaaaaaaactaaaa

SEQ ID NO: 57966 - DNA, 574 bp, Homo sapiens
actggctgctgaatttatctcaaagcctcaaaaccttgaaatacttgaaggagaaaaggctgaatttgtctgctctatatcaaaagaaagctttccagtccagtggaagagggatgataagacacttgaatctggagataaatatgacgttattgctgatggtaaaaagagggtcctagttgtgaaagatgccacattacaagatatgggcacttacgttgtcatggtaggggccgccagagcagcagctcacttgacagtcattgaaaaactcaggatcgtagttcctcttaaggacacccgggtgaaggaacaacaggaagttgtcttcaactgtgaagtcaatactgaaggtgccaaagccaaatggttcagaaatgaagaagctatatttgatagttcaaaatacatcattctccaaaaagacctagtctacaccctcagaattagagatgcacacttagatgaccaagccaactataatgtgtctttgaccaatcacagaggtgaaaatgttaaaagtgcagccaatctaatagtagaagaggaagaccttaggattgttgagcctctt

SEQ ID NO: 57967 - DNA, 405 bp, Homo sapiens
gagctaggcaccaggcattctgtgaggccccaggagtttaagaaatgaattaaatattctcccctgccctctttgaactgactctaacgaggagacttaagaattattttgtaatctctagttatattttctgaatttcagagcttaaatattatacttcaacatgagtcacacctttatttatatgttggtttgtctcagctgtgttgtgggttggtggaaggagaccacacatacatacacacagagtacatacatgctgttgatgttacacacatactcacaccccacaaagtgaagctccatgctcattttgtttaacaaagactagagaggccttgcagacaacagctacctggagcaggaacaagtgaagcatgtttctgaaccatttctcaagtcaca

SEQ ID NO: 57968 - DNA, 712 bp, Homo sapiens
cctttcccctattgtaccattttgccattcagacattgcctctctacaggttcacatatgggaagcaaagttgcctgactccccttgcttcatttgaacatctggattaaagttactgtagcaaacacaagtcaatcaaacataagaagaaagctcagcatctcctttaagagggccagcatatatgaatttatttaaaacctttaagtgaccacattggtgcctcagttttcaggcattcattgagacttttctcctccttcctgacactggaatattttagtcatacatgtagttttaaagaccaaacctatacccactccttttcagtgctaaaaaaaagtaccaccaaaatgtaaacaaatggcactaaccaagcaagtcttgggagtaggggtgaggatgagtatagcagcatgaaagaaatgggtggaaaccagtgtttgtcaatgtcagcacgtactcttgattcctccccatctcagcaaatatagactttcacaattaatactgactttcagagataatagaagagcctccataagccaggtttgacctttattttctgtatgagtcatatgtactatgttgataataccaatacgttttatacatttttttgaagtttaactttctcttaatgactccattatcccaaaaatctgataaggatgtcatgccaccactccataaataaatttcacaaagataa

SEQ ID NO: 57969 - DNA, 252 bp, Homo sapiens
ggactataaaaagttgacaccagttgatttttgtgttgatggaagttttttatcttgatgttggtgatggttatagaaatttatatatgtgattaaatggcataaaattatacacacacagtaccaatgcctatttcctgcttttgatattgtactttttatacaagataaaaccactgggggaaactaggtgaagaacacctgacacattccaacagggcaatttcctgtaaatcaataatatttgaaaat

SEQ ID NO: 57970 - DNA, 292 bp, Homo sapiens
caagccaggaagtggctataccttgatcttggacttcccatcctccagaacagtgagcatatagatttatgttgcttaaggcactagactatggtgttttgctatagcagtccaattgactaatacaatagagaagacatctcttctcaattcaaaataaatgcctctacctgtgctttagatagattattctgcttcctcagaagccttgctcctccagacttgcccttcctttgcttaggattccaattttcaaaagtaggaaattatagaactgaagtcttttttatac

SEQ ID NO: 57971 - DNA, 336 bp, Homo sapiens
cggctcaaactcaagaggctcagggtgccccctcctaggtgctgcctggggtcggcctcctctcccaccctctggcagaggaggagcagcccccgtccacccagccatgtccagagcaggcaggaacggtgggggcctgtgcttgcacgtagaggtcaccggtctggggccagtgtgctcccgggagtgggggagactggggctgggccctccttacctgcatggggactgggctgggccctccttatctgcatgggccggaagcacatgttggtgagcacctccttccaggccagtgagtacttgtcatctccaaatgtttgggtcaggcttttc

SEQ ID NO: 57972 - DNA, 611 bp, Homo sapiens
ctgagcacctgctctgtgccaggcactgtgctaggtattggcaaataaatgcatacaaggcagactcagtccccatcttcatggagtttctattgagctgaagcatcaggagatgagatataagaataaacctgggaagccgtggactggaggaagtgggcctccccaagcccaaggcctgggcatgacttgagtatgtgggagtgtgaatcctgtgaaccaaagtgcaaggctgaggtgcccatggcagtcacaatgccacctctgccaactcgcccttctccagcatgaaaatgtcctcctgcttaagacagtttaccagtgttaaagtcctttggggaattcccctggacccagccattcctggggcttcccctcatcaaggcctttcccagggtttgcatcccatttgcctaaggacacctttgtcagccattcctgatcctctaatttgcatcactttccttaggatggaaaaattagcaaaggggaggaaactgctatgttgtctagttgggaacatttccaggcttttctaacccatctgcttataggcaatgtctgctcacagttcccatttctaataaatatttaccaaatttacatactgc

SEQ ID NO: 57973 - DNA, 240 bp, Homo sapiens
cttaaatgtcaccacctctacaaacttcctaaagaaatgtgaccttttccataaccctaatttattcaatatacgtgtaccattttgtgtctattttcattcatccaacaaataatcactgagttactactacatctcggaaactgtgtttggtttggggatacaaattatcatggctttccttatgtaacttacagtccattggggtattgacagaaaaatcatcaacaaattaattaa

SEQ ID NO: 57974 - DNA, 339 bp, Homo sapiens
attttcccgacaaagaaaactgggattcagagattttacagtttaaataactggcctggagtggatctgctattaggacatgggctggctgactccagcatctattttttagctgcttcctatggcttctactatgctctttactgataatcagattggaatctttttagttaatgagaatgatactttcaacatgtgaattttttcttcattgaatctttaagaatgaataaatcacttcttgatataatgaagaaaacatgtaatatacttctgatattttgataactggatattaaatatctctaccattgtgtagaaaggtagataatttgacat

SEQ ID NO: 57975 - DNA, 625 bp, Homo sapiens
agctacatattcccttaattttgtattgaaccaaaacaatggcaccagactagtgaaatgaggaccagcttcggagttagtttgagaggtttcagtcccagccttgctgttgactagctctgggacctgggccttaacatataagccttagttccctcatctctaaaatggagataataatacctacatgcagatacattgtgaggtctcagtgaaatagaatcatccagtgtggtgcctaaagagggttttgtttggtttgttcactgctgtatccccagcacctaggatggtacctggcacagagcaggtgcccactaagtgctaaaatgaatactgaatgaatgaatgactgtggtcagtaaatgatagctattgctaaaggcatggcagagctgtcagacacaagaagtgtttgtaaagcaagaggctgattattcagaggcttgaaggataatgctttgtcataagctaaattaatttttccccaccatacagcatggctttaggattcttcaaaaactaactacgttggtctgatggtagtgggttaccagaacttattaacattagtgtcactaaagttggcatataatccccctgtgctaaatttgactgccttaac

SEQ ID NO: 57976 - DNA, 151 bp, Homo sapiens
ataaactgtgctaactaaagtttttattttatcaatatcaaagctgtaaaaaaactgaggagaaagcagttgccaaaaagatgaaagaaaaacaacatgaaaacctttaaaattagcaaaagtcagtttataataaagtcacttatctcac

SEQ ID NO: 57977 - DNA, 785 bp, Homo sapiens
atcgcggaggcttggggcagccgggtagctcggaggtcgtggcgctgggggctagcaccagcgctctgtcgggaggcgcagcggttaggtggaccggtcagcggactcaccggccagggcgctcggtgctggaatttgatattcattgatccgggttttatccctcttcttttttcttaaacatttttttttaaaactgtattgtttctcgttttaatttatttttgcttgccattccccacttgaatcgggccgacggcttggggagattgctctacttccccaaatcactgtggattttggaaaccagcagaaagaggaaagaggtagcaagagctccagagagaagtcgaggaagagagagacggggtcagagagagcgcgcgggcgtgcgagcagcgaaagcgacaggggcaaagtgagtgacctgcttttgggggtgaccgccggagcgcggcgtgagccctcccccttgggatcccgcagctgaccagtcgcgctgacggacagacagacagacaccgcccccagccccagctaccacctcctccccggccggcggcggacagtggacgcggcggcgagccgcgggcaggggccggagcccgcgcccggaggcggggtggagggggtcggggctcgcggcgtcgcactgaaacttttcgtccaacttctgggctgttctcgcttcggaggagccgtggtccgcgcgggggaagccgagccgagcggagccgcgagaagtgctagctcgggccgggaggagccgcagccggaggaggggg

SEQ ID NO: 57978 - DNA, 391 bp, Homo sapiens
gaaatttacaactattattgaagaaaagaacagtaagaaaccagaaagtagtattttgggggcagctcacgtggagtcaggctcagtgtaggacttgagtgaaagactttcccaagaagccccagggctaatctgggcagccctggatgcttaggtctggaacccagggccagaatctttgacagccagatccagtaaaggccaaaaccaagaatctcctcccacaccagtggattctcaaaacacagtgcacttgatcaggctgtcagaattacctagagcagtgcatattctgatggagagaattctctgaacaatcctgaattgcatttaaaagtgtgcgaaatatttgtgtaataaatccttcgtttgtgttcatttgttagaagcc

SEQ ID NO: 57979 - DNA, 532 bp, Homo sapiens
ggattgcctgaagtcctggaacactgcatcccacaggcttcctgctaaacgggaaagccacccaggatgactccatgggccccagtccttttctctgctcccctcctacagttcacatcacctcctcggcttctctttggggtcctcgccccacctctgcctagggtaaactcatggccatggggcacaggccagacatgaacctgcacagccctccctaagcctctgttacctgggagaagaagccccaagcagcccagaggagtttcacagaaagagctggagcgccgcatctgaagatgcaccacctcccacccagaaagaacgtgcaccccgagcctggacctccatggcggccctgcctcccacccagaaagaacgtgcaccccgagcctggacccccacagtagcccactcccagtgaccaggtcaggtttcagggcctgtgatctgaggtctggggtgggggtcatctggagggaaatccagccccgggagaggcactggtgagccaggaggaggcccagggtgc

SEQ ID NO: 57980 - DNA, 390 bp, Homo sapiens
tgactaaagtgcccagcacagagcctggtgcccagtcagcatccaagtagggtttgttgttgccttacttgttttttatactttattatacatcgtgagcattttctcaagttgctaaccattattcaaaaccatgatgtctcatggatatgtaacaacccacttttctcttaagatttaaataatgtcattttggtcagttttgcaatttccagattggcaataacataaattccactgaactaaacattcttatgcagaagtctttgtgaccaagtaagatacatttctaaaatagaatgattggtcaaaatgtatacatattttaaaggctttcattttcattcatatgtccaaattccatccctgaaagattgtagccatttgaaa

SEQ ID NO: 57981 - DNA, 2780 bp, Homo sapiens
agccattcctgaggaggactgccggtcgttcggacgtcttgcctgtcgctggaggagaggtccgggctctccaggaaggtggctgcggcgacaaaatgaagatattcgtgggcaacgtcgacggggcggatacgactccggaggagctggcagccctctttgcgccctacggcacggtcatgagctgcgccgtcatgaaacagttcgccttcgtgcacatgcgcgagaacgcgggcgcgctgcgcgccatcgaagccctgcacggccacgagctgcggccggggcgcgcgctcgtggtggagatgtcgcgcccaaggcctcttaatacttggaagattttcgtgggcaatgtgtcggctgcatgcacgagccaggaactgcgcagcctcttcgagcgccgcggacgcgtcatcgagtgtgacgtggtgaaagactacgcgtttgttcacatggagaaggaagcagatgccaaagccgcaatcgcgcagctcaacggcaaagaagtgaagggcaagcgcatcaacgtggaactctccaccaagggtcagaagaaggggcctggcctggctgtccagtctggggacaagaccaagaaaccaggggctggggatacggccttccctggaactggtggcttctctgccaccttcgactaccagcaggcttttggcaacagcactggtggctttgatgggcaagcccgtcagcccacaccacccttctttggtcgcgaccgcagccctctgcgccgttcacctccccgagcctcttatgtggctcctctgacggcccagccagctacctaccgggcccagccgtccgtgtcactgggagctgcctacagggcccagccttctgcctctttgggtgttggctatcggactcagcccatgacagcccaggcagcctcttaccgcgctcagccctctgtctcccttggggcaccatacaggggccagctggctagtcctagctcccagtctgctgcagcttcttcactcggcccatatggtggagcccagccctcagcctcggccctttcctcctatgggggtcaggcagctgcagcttcttcgctcaactcctatggggctcagggttcctcccttgcctcctatggtaaccagccatcctcttacggcgcccaggctgcctcttcctatggggttcgtgcagctgcttcttcctacaacacccagggagcagcttcctccttaggctcctacggggctcaggcagcctcctatggggcccagtctgcagcctcctcactagcttatggagcccaggcagcttcatataatgcccagccctcggcctcttacaatgcccagtctgccccatatgctgcacagcaggctgcttcctactcttcccaacctgctgcctatgtggcacagccagccacagctgctgcctatgccagccagccagcagcctacgccgcacaagccactaccccaatggctggctcctatggggcccagccggttgtgcagacccagctgaatagttacggggcccaagcatcaatgggcctttcaggctcctatggggctcagtcggctgctgcggccactggctcctatggtgccgcagcagcctacggggcccaaccttctgccaccctggcagctccttaccgcactcagtcatcagcctcattggctgcttcctatgctgcccagcagcatccccaggctgctgcctcctaccgcggccagccaggcaatgcctacgatggggcaggtcagccgtctgcagcctacctgtccatgtcccagggggccgttgccaacgccaacagcaccccgccgccctatgagcgtacccgcctctccccaccccgggccagctacgacgatccctacaaaaaggctgtcgccatgtcgaaaaggtatggttccgaccggcgtttagccgagctctctgattaccgccgtttatcagagtcgcagctttcgttccgccgctcgccgacaaagtcctcgctggattaccgtcgcctgcccgatgcccattccgattacgcacgctattcgggctcctataatgattacctgcgggcggctcagatgcactctggctaccagcgccgcatgtagggccatcctgggatggggcaccacagggagggagggagaaaagaggtgggtagggttacagatccaggttataactactctggcccatacctttcctggttgtggtttttcatgccctctaccatgtgggccttccccaggagatgatcctgttaagtgttcggcagtaacctactttgttccttcgcctcagcagcaaatcttgctactggctctagatctgcggtttcccctctaccctgcctcccgtctccccagaatgggaatttcttttatgtttttatttttttcctggctcccttttatttttgtgcgcgatatttaaggtcgtctggatggggaagcaacctgcagctgaggtcgccggcgcctttttctttttagatgggaaggaggccaggaaagggtcagcttaaccatttcctatgtgccaagctgtgccagcagtccagggtaccctgactgtccctctgtagactgttgagactgagttcctgttgggacagtcagttggtatgtatccaagtccctgctgaccactaatgttctagctgatggtgagcggcacagtcccacttccccatctccccaagtaggtggtgttagaaaaccttaattttttttcccttttgtatggactacaaataaaacttggggcaatttgcagtttggaaa

SEQ ID NO: 57982 - DNA, 2850 bp, Homo sapiens
agccattcctgaggaggactgccggtcgttcggacgtcttgcctgtcgctggaggagaggtccgggctctccaggaaggtggctgcggcgacaaaatgaagatattcgtgggcaacgtcgacggggcggatacgactccggaggagctggcagccctctttgcgccctacggcacggtcatgagctgcgccgtcatgaaacagttcgccttcgtgcacatgcgcgagaacgcgggcgcgctgcgcgccatcgaagccctgcacggccacgagctgcggccggggcgcgcgctcgtggtggagatgtcgcgcccaaggcctcttaatacttggaagattttcgtgggcaatgtgtcggctgcatgcacgagccaggaactgcgcagcctcttcgagcgccgcggacgcgtcatcgagtgtgacgtggtgaaagaggagatgtgaagatttttatcctgtgttgcagttcatctttgctccttcttctctcaccaggaagttggactacgcgtttgttcacatggagaaggaagcagatgccaaagccgcaatcgcgcagctcaacggcaaagaagtgaagggcaagcgcatcaacgtggaactctccaccaagggtcagaagaaggggcctggcctggctgtccagtctggggacaagaccaagaaaccaggggctggggatacggccttccctggaactggtggcttctctgccaccttcgactaccagcaggcttttggcaacagcactggtggctttgatgggcaagcccgtcagcccacaccacccttctttggtcgcgaccgcagccctctgcgccgttcacctccccgagcctcttatgtggctcctctgacggcccagccagctacctaccgggcccagccgtccgtgtcactgggagctgcctacagggcccagccttctgcctctttgggtgttggctatcggactcagcccatgacagcccaggcagcctcttaccgcgctcagccctctgtctcccttggggcaccatacaggggccagctggctagtcctagctcccagtctgctgcagcttcttcactcggcccatatggtggagcccagccctcagcctcggccctttcctcctatgggggtcaggcagctgcagcttcttcgctcaactcctatggggctcagggttcctcccttgcctcctatggtaaccagccatcctcttacggcgcccaggctgcctcttcctatggggttcgtgcagctgcttcttcctacaacacccagggagcagcttcctccttaggctcctacggggctcaggcagcctcctatggggcccagtctgcagcctcctcactagcttatggagcccaggcagcttcatataatgcccagccctcggcctcttacaatgcccagtctgccccatatgctgcacagcaggctgcttcctactcttcccaacctgctgcctatgtggcacagccagccacagctgctgcctatgccagccagccagcagcctacgccgcacaagccactaccccaatggctggctcctatggggcccagccggttgtgcagacccagctgaatagttacggggcccaagcatcaatgggcctttcaggctcctatggggctcagtcggctgctgcggccactggctcctatggtgccgcagcagcctacggggcccaaccttctgccaccctggcagctccttaccgcactcagtcatcagcctcattggctgcttcctatgctgcccagcagcatccccaggctgctgcctcctaccgcggccagccaggcaatgcctacgatggggcaggtcagccgtctgcagcctacctgtccatgtcccagggggccgttgccaacgccaacagcaccccgccgccctatgagcgtacccgcctctccccaccccgggccagctacgacgatccctacaaaaaggctgtcgccatgtcgaaaaggtatggttccgaccggcgtttagccgagctctctgattaccgccgtttatcagagtcgcagctttcgttccgccgctcgccgacaaagtcctcgctggattaccgtcgcctgcccgatgcccattccgattacgcacgctattcgggctcctataatgattacctgcgggcggctcagatgcactctggctaccagcgccgcatgtagggccatcctgggatggggcaccacagggagggagggagaaaagaggtgggtagggttacagatccaggttataactactctggcccatacctttcctggttgtggtttttcatgccctctaccatgtgggccttccccaggagatgatcctgttaagtgttcggcagtaacctactttgttccttcgcctcagcagcaaatcttgctactggctctagatctgcggtttcccctctaccctgcctcccgtctccccagaatgggaatttcttttatgtttttatttttttcctggctcccttttatttttgtgcgcgatatttaaggtcgtctggatggggaagcaacctgcagctgaggtcgccggcgcctttttctttttagatgggaaggaggccaggaaagggtcagcttaaccatttcctatgtgccaagctgtgccagcagtccagggtaccctgactgtccctctgtagactgttgagactgagttcctgttgggacagtcagttggtatgtatccaagtccctgctgaccactaatgttctagctgatggtgagcggcacagtcccacttccccatctccccaagtaggtggtgttagaaaaccttaattttttttcccttttgtatggactacaaataaaacttggggcaatttgcagtttggaaa

SEQ ID NO: 57983 - DNA, 1802 bp, Homo sapiens
cggggtggggagaggcgggtacgctcatagggcggcggggtgctgttggcgttggcaacggccccctgggacatggtcaggcagctgcagcttcttcgctcaactcctatggggctcagggttcctcccttgcctcctatggtaaccagccatcctcttacggcgcccaggctgcctcttcctatggggttcgtgcagctgcttcttcctacaacacccagggagcagcttcctccttaggctcctacggggctcaggcagcctcctatggggcccagtctgcagcctcctcactagcttatggagcccaggcagcttcatataatgcccagccctcggcctcttacaatgcccagtctgccccatatgctgcacagcaggctgcttcctactcttcccaacctgctgcctatgtggcacagccagccacagctgctgcctatgccagccagccagcagcctacgccgcacaagccactaccccaatggctggctcctatggggcccagccggttgtgcagacccagctgaatagttacggggcccaagcatcaatgggcctttcaggctcctatggggctcagtcggctgctgcggccactggctcctatggtgccgcagcagcctacggggcccaaccttctgccaccctggcagctccttaccgcactcagtcatcagcctcattggctgcttcctatgctgcccagcagcatccccaggctgctgcctcctaccgcggccagccaggcaatgcctacgatggggcaggtcagccgtctgcagcctacctgtccatgtcccagggggccgttgccaacgccaacagcaccccgccgccctatgagcgtacccgcctctccccaccccgggccagctacgacgatccctacaaaaaggctgtcgccatgtcgaaaaggtatggttccgaccggcgtttagccgagctctctgattaccgccgtttatcagagtcgcagctttcgttccgccgctcgccgacaaagtcctcgctggattaccgtcgcctgcccgatgcccattccgattacgcacgctattcgggctcctataatgattacctgcgggcggctcagatgcactctggctaccagcgccgcatgtagggccatcctgggatggggcaccacagggagggagggagaaaagaggtgggtagggttacagatccaggttataactactctggcccatacctttcctggttgtggtttttcatgccctctaccatgtgggccttccccaggagatgatcctgttaagtgttcggcagtaacctactttgttccttcgcctcagcagcaaatcttgctactggctctagatctgcggtttcccctctaccctgcctcccgtctccccagaatgggaatttcttttatgtttttatttttttcctggctcccttttatttttgtgcgcgatatttaaggtcgtctggatggggaagcaacctgcagctgaggtcgccggcgcctttttctttttagatgggaaggaggccaggaaagggtcagcttaaccatttcctatgtgccaagctgtgccagcagtccagggtaccctgactgtccctctgtagactgttgagactgagttcctgttgggacagtcagttggtatgtatccaagtccctgctgaccactaatgttctagctgatggtgagcggcacagtcccacttccccatctccccaagtaggtggtgttagaaaaccttaattttttttcccttttgtatggactacaaataaaacttggggcaatttgcagtttggaaa

SEQ ID NO: 57984 - DNA, 1426 bp, Homo sapiens
agccattcctgaggaggactgccggtcgttcggacgtcttgcctgtcgctggaggagaggtccgggctctccaggaaggtggctgcggcgacaaaatgaagatattcgtgggcaacgtcgacggggcggatacgactccggaggagctggcagccctctttgcgccctacggcacggtcatgagctgcgccgtcatgaaacagttcgccttcgtgcacatgcgcgagaacgcgggcgcgctgcgcgccatcgaagccctgcacggccacgagctgcggccggggcgcgcgctcgtggtggagatgtcgcgcccaaggcctcttaatacttggaagattttcgtgggcaatgtgtcggctgcatgcacgagccaggaactgcgcagcctcttcgagcgccgcggacgcgtcatcgagtgtgacgtggtgaaagactacgcgtttgttcacatggagaaggaagcagatgccaaagccgcaatcgcgcagctcaacggcaaagaagtgaagggcaagcgcatcaacgtggaactctccaccaagggtatggttccgaccggcgtttagccgagctctctgattaccgccgtttatcagagtcgcagctttcgttccgccgctcgccgacaaagtcctcgctggattaccgtcgcctgcccgatgcccattccgattacgcacgctattcgggctcctataatgattacctgcgggcggctcagatgcactctggctaccagcgccgcatgtagggccatcctgggatggggcaccacagggagggagggagaaaagaggtgggtagggttacagatccaggttataactactctggcccatacctttcctggttgtggtttttcatgccctctaccatgtgggccttccccaggagatgatcctgttaagtgttcggcagtaacctactttgttccttcgcctcagcagcaaatcttgctactggctctagatctgcggtttcccctctaccctgcctcccgtctccccagaatgggaatttcttttatgtttttatttttttcctggctcccttttatttttgtgcgcgatatttaaggtcgtctggatggggaagcaacctgcagctgaggtcgccggcgcctttttctttttagatgggaaggaggccaggaaagggtcagcttaaccatttcctatgtgccaagctgtgccagcagtccagggtaccctgactgtccctctgtagactgttgagactgagttcctgttgggacagtcagttggtatgtatccaagtccctgctgaccactaatgttctagctgatggtgagcggcacagtcccacttccccatctccccaagtaggtggtgttagaaaaccttaattttttttcccttttgtatggactacaaataaaacttggggcaatttgcagtttggaaa

SEQ ID NO: 57985 - DNA, 1180 bp, Homo sapiens
ctctgcagggcccaggggcggagatagtttgctgtggtgtgggaatgtagaccaaaatccaccttggctagttcagaggggaggacttcagtggagggtttgatttcccactgagttgaagccaggcttgatttttttggcctggatagggtgatgagccttctgacaaaaggagaccaatctcttggagaccactgtgatcacaccctccctgtccccattggcatctccccaatgcccacctggagtcctcccctcaattgtctcattcaccaactgtcttcttctctcgactaggtatggttccgaccggcgtttagccgagctctctgattaccgccgtttatcagagtcgcagctttcgttccgccgctcgccgacaaagtcctcgctggattaccgtcgcctgcccgatgcccattccgattacgcacgctattcgggctcctataatgattacctgcgggcggctcagatgcactctggctaccagcgccgcatgtagggccatcctgggatggggcaccacagggagggagggagaaaagaggtgggtagggttacagatccaggttataactactctggcccatacctttcctggttgtggtttttcatgccctctaccatgtgggccttccccaggagatgatcctgttaagtgttcggcagtaacctactttgttccttcgcctcagcagcaaatcttgctactggctctagatctgcggtttcccctctaccctgcctcccgtctccccagaatgggaatttcttttatgtttttatttttttcctggctcccttttatttttgtgcgcgatatttaaggtcgtctggatggggaagcaacctgcagctgaggtcgccggcgcctttttctttttagatgggaaggaggccaggaaagggtcagcttaaccatttcctatgtgccaagctgtgccagcagtccagggtaccctgactgtccctctgtagactgttgagactgagttcctgttgggacagtcagttggtatgtatccaagtccctgctgaccactaatgttctagctgatggtgagcggcacagtcccacttccccatctccccaagtaggtggtgttagaaaaccttaattttttttcccttttgtatggactacaaataaaacttggggcaatttgcagtttggaaa

SEQ ID NO: 57986 - DNA, 928 bp, Homo sapiens
acccacgcgtcgcccacgcgtcgaggctgtcgccatgtcgaaaaggtatggttccgaccggcgtttagccgagctctctgattaccgccgtttatcagagtcgcagctttcgttccgccgctcgccgacaaagtcctcgctggattaccgtcgcctgcccgatgcccattccgattacgcacgctattcgggctcctataatgattacctgcgggcggctcagatgcactctggctaccagcgccgcatgtagggccatcctgggatggggcaccacagggagggagggagaaaagaggtgggtagggttacagatccaggttataactactctggcccatacctttcctggttgtggtttttcatgccctctaccatgtgggccttccccaggagatgatcctgttaagtgttcggcagtaacctactttgttccttcgcctcagcagcaaatcttgctactggctctagatctgcggtttcccctctaccctgcctcccgtctccccagaatgggaatttcttttatgtttttatttttttcctggctcccttttatttttgtgcgcgatatttaaggtcgtctggatggggaagcaacctgcagctgaggtcgccggcgcctttttctttttagatgggaaggaggccaggaaagggtcagcttaaccatttcctatgtgccaagctgtgccagcagtccagggtaccctgactgtccctctgtagactgttgagactgagttcctgttgggacagtcagttggtatgtatccaagtccctgctgaccactaatgttctagctgatggtgagcggcacagtcccacttccccatctccccaagtaggtggtgttagaaaaccttaattttttttcccttttgtatggactacaaataaaacttggggcaatttgcagtttggaaa

SEQ ID NO: 57987 - DNA, 686 bp, Homo sapiens
tttttttcaaaggaaagagcccaaaacagatttatttttctttaaataaagttcatacagaataggttacagatccaggttataactactctggcccatacctttcctggttgtggtttttcatgccctctaccatgtgggccttccccaggagatgatcctgttaagtgttcggcagtaacctactttgttccttcgcctcagcagcaaatcttgctactggctctagatctgcggtttcccctctaccctgcctcccgtctccccagaatgggaatttcttttatgtttttatttttttcctggctcccttttatttttgtgcgcgatatttaaggtcgtctggatggggaagcaacctgcagctgaggtcgccggcgcctttttctttttagatgggaaggaggccaggaaagggtcagcttaaccatttcctatgtgccaagctgtgccagcagtccagggtaccctgactgtccctctgtagactgttgagactgagttcctgttgggacagtcagttggtatgtatccaagtccctgctgaccactaatgttctagctgatggtgagcggcacagtcccacttccccatctccccaagtaggtggtgttagaaaaccttaattttttttcccttttgtatggactacaaataaaacttggggcaatttgcagtttggaaa

SEQ ID NO: 57988 - DNA, 2573 bp, Homo sapiens
agccattcctgaggaggactgccggtcgttcggacgtcttgcctgtcgctggaggagaggtccgggctctccaggaaggtggctgcggcgacaaaatgaagatattcgtgggcaacgtcgacggggcggatacgactccggaggagctggcagccctctttgcgccctacggcacggtcatgagctgcgccgtcatgaaacagttcgccttcgtgcacatgcgcgagaacgcgggcgcgctgcgcgccatcgaagccctgcacggccacgagctgcggccggggcgcgcgctcgtggtggagatgtcgcgcccaaggcctcttaatacttggaagattttcgtgggcaatgtgtcggctgcatgcacgagccaggaactgcgcagcctcttcgagcgccgcggacgcgtcatcgagtgtgacgtggtgaaagaggagatgtgaagatttttatcctgtgttgcagttcatctttgctccttcttctctcaccaggaagttggactacgcgtttgttcacatggagaaggaagcagatgccaaagccgcaatcgcgcagctcaacggcaaagaagtgaagggcaagcgcatcaacgtggaactctccaccaagggtcagaagaaggggcctggcctggctgtccagtctggggacaagaccaagaaaccaggggctggggatacggccttccctggaactggtggcttctctgccaccttcgactaccagcaggcttttggcaacagcactggtggctttgatgggcaagcccgtcagcccacaccacccttctttggtcgcgaccgcagccctctgcgccgttcacctccccgagcctcttatgtggctcctctgacggcccagccagctacctaccgggcccagccgtccgtgtcactgggagctgcctacagggcccagccttctgcctctttgggtgttggctatcggactcagcccatgacagcccaggcagcctcttaccgcgctcagccctctgtctcccttggggcaccatacaggggccagctggctagtcctagctcccagtctgctgcagcttcttcactcggcccatatggtggagcccagccctcagcctcggccctttcctcctatgggggtcaggcagctgcagcttcttcgctcaactcctatggggctcagggttcctcccttgcctcctatggtaaccagccatcctcttacggcgcccaggctgcctcttcctatggggttcgtgcagctgcttcttcctacaacacccagggagcagcttcctccttaggctcctacggggctcaggcagcctcctatggggcccagtctgcagcctcctcactagcttatggagcccaggcagcttcatataatgcccagccctcggcctcttacaatgcccagtctgccccatatgctgcacagcaggctgcttcctactcttcccaacctgctgcctatgtggcacagccagccacagctgctgcctatgccagccagccagcagcctacgccgcacaagccactaccccaatggctggctcctatggggcccagccggttgtgcagacccagctgaatagttacggggcccaagcatcaatgggcctttcaggctcctatggggctcagtcggctgctgcggccactggctcctatggtgccgcagcagcctacggggcccaaccttctgccaccctggcagctccttaccgcactcagtcatcagcctcattggctgcttcctatgctgcccagcagcatccccaggctgctgcctcctaccgcggccagccaggcaatgcctacgatggggcaggtcagccgtctgcagcctacctgtccatgtcccagggggccgttgccaacgccaacagcaccccgccgccctatgagcgtacccgcctctccccaccccgggccagctacgacgatccctacaaaaaggctgtcgccatgtcgaaaaggtatggttccgaccggcgtttagccgagctctctgattaccgccgtttatcagagtcgcagctttcgttccgccgctcgccgacaaagtcctcgctggattaccgtcgcctgcccgatgcccattccgattacgcacgctattcgggctcctataatgattacctgcgggcggctcagatgcactctggctaccagcgccgcatgtagggccatcctgggatggggcaccacagggagggagggagaaaagaggtgggtagggttacagatccaggttataactactctggcccatacctttcctggttgtggtttttcatgccctctaccatgtgggccttccccaggagatgatcctgttaagtgttcggcagtaacctactttgttccttcgcctcagcagcaaatcttgctactggctctagatctgcggtttcccctctaccctgcctcccgtctccccagaatgggaatttcttttatgtttttatttttttcctggctcccttttatttttgtgcgcgatatttaaggtcgtctggatggggaagcaacctgcagtagaggcacggcagtagggatactctaggaatcagctatcacgc

SEQ ID NO: 57989 - DNA, 2343 bp, Homo sapiens
agccattcctgaggaggactgccggtcgttcggacgtcttgcctgtcgctggaggagaggtccgggctctccaggaaggtggctgcggcgacaaaatgaagatattcgtgggcaacgtcgacggggcggatacgactccggaggagctggcagccctctttgcgccctacggcacggtcatgagctgcgccgtcatgaaacagttcgccttcgtgcacatgcgcgagaacgcgggcgcgctgcgcgccatcgaagccctgcacggccacgagctgcggccggggcgcgcgctcgtggtggagatgtcgcgcccaaggcctcttaatacttggaagattttcgtgggcaatgtgtcggctgcatgcacgagccaggaactgcgcagcctcttcgagcgccgcggacgcgtcatcgagtgtgacgtggtgaaagaggagatgtgaagatttttatcctgtgttgcagttcatctttgctccttcttctctcaccaggaagttggactacgcgtttgttcacatggagaaggaagcagatgccaaagccgcaatcgcgcagctcaacggcaaagaagtgaagggcaagcgcatcaacgtggaactctccaccaagggtcagaagaaggggcctggcctggctgtccagtctggggacaagaccaagaaaccaggggctggggatacggccttccctggaactggtggcttctctgccaccttcgactaccagcaggcttttggcaacagcactggtggctttgatgggcaagcccgtcagcccacaccacccttctttggtcgcgaccgcagccctctgcgccgttcacctccccgagcctcttatgtggctcctctgacggcccagccagctacctaccgggcccagccgtccgtgtcactgggagctgcctacagggcccagccttctgcctctttgggtgttggctatcggactcagcccatgacagcccaggcagcctcttaccgcgctcagccctctgtctcccttggggcaccatacaggggccagctggctagtcctagctcccagtctgctgcagcttcttcactcggcccatatggtggagcccagccctcagcctcggccctttcctcctatgggggtcaggcagctgcagcttcttcgctcaactcctatggggctcagggttcctcccttgcctcctatggtaaccagccatcctcttacggcgcccaggctgcctcttcctatggggttcgtgcagctgcttcttcctacaacacccagggagcagcttcctccttaggctcctacggggctcaggcagcctcctatggggcccagtctgcagcctcctcactagcttatggagcccaggcagcttcatataatgcccagccctcggcctcttacaatgcccagtctgccccatatgctgcacagcaggctgcttcctactcttcccaacctgctgcctatgtggcacagccagccacagctgctgcctatgccagccagccagcagcctacgccgcacaagccactaccccaatggctggctcctatggggcccagccggttgtgcagacccagctgaatagttacggggcccaagcatcaatgggcctttcaggctcctatggggctcagtcggctgctgcggccactggctcctatggtgccgcagcagcctacggggcccaaccttctgccaccctggcagctccttaccgcactcagtcatcagcctcattggctgcttcctatgctgcccagcagcatccccaggctgctgcctcctaccgcggccagccaggcaatgcctacgatggggcaggtcagccgtctgcagcctacctgtccatgtcccagggggccgttgccaacgccaacagcaccccgccgccctatgagcgtacccgcctctccccaccccgggccagctacgacgatccctacaaaaaggctgtcgccatgtcgaaaaggtactgtatgcccccccgcctctgcccccagctggggcttagggcaaggggctgaggttggcatgggagggaaactggaggcatcggcccctccctcggtcttctcttctctatttttgtgggatgtccagaggccgaggggagcagtgtctatgaactttcctggtcaccagggttcaggtggagcatagtgctcagcctggggtggtacctgctagtcaggccaggcacagtgtcacctgtctaggctagcccaagtgtcattggagctactgcctgcaggactgtggcccatatcctttcccactgtctcaaggatccttaagcctattacgtggttgtcctggctttggcagggatgtgggttaaagagtag

SEQ ID NO: 57990 - DNA, 1539 bp, Homo sapiens
gcggccgctcccacttcagattggtaaccactagcttatggagcccaggcagcttcatataatgcccagccctcggcctcttacaatgcccagtctgccccatatgctgcacagcaggctgcttcctactcttcccaacctgctgcctatgtggcacagccagccacagctgctgcctatgccagccagccagcagcctacgccgcacaagccactaccccaatggctggctcctatggggcccagccggttgtgcagacccagctgaatagttacggggcccaagcatcaatgggcctttcaggctcctatggggctcagtcggctgctgcggccactggctcctatggtgccgcagcagcctacggggcccaaccttctgccaccctggcagctccttaccgcactcagtcatcagcctcattggctgcttcctatgctgcccagcagcatccccaggctgctgcctcctaccgcggccagccaggcaatgcctacgatggggcaggtcagccgtctgcagcctacctgtccatgtcccagggggccgttgccaacgccaacagcaccccgccgccctatgagcgtacccgcctctccccaccccgggccagctacgacgatccctacaaaaaggctgtcgccatgtcgaaaaggtatggttccgaccggcgtttagccgagctctctgattaccgccgtttatcagagtcgcagctttcgttccgccgctcgccgacaaagtcctcgctggattaccgtcgcctgcccgatgcccattccgattacgcacgctattcgggctcctataatgattacctgcgggcggctcagatgcactctggctaccagcgccgcatgtagggccatcctgggatggggcaccacagggagggagggagaaaagaggtgggtagggttacagatccaggttataactactctggcccatacctttcctggttgtggtttttcatgccctctaccatgtgggccttccccaggagatgatcctgttaagtgttcggcagtaacctactttgttccttcgcctcagcagcaaatcttgctactggctctagatctgcggtttcccctctaccctgcctcccgtctccccagaatgggaatttcttttatgtttttatttttttcctggctcccttttatttttgtgcgcgatatttaaggtcgtctggatggggaagcaacctgcagctgaggtcgccggcgcctttttctttttagatgggaaggaggccaggaaagggtcagcttaaccatttcctatgtgccaagctgtgccagcagtccagggtaccctgactgtccctctgtagactgttgagactgagttcctgttgggacagtcagttggtatgtatccaagtccctgctgaccactaatgttctagctgatggtgagcggcacagtcccacttccccatctccccaagtaggtggtgttagaaaaccttaattttttttcccttttgtatggactacaaataaaacttggggcaatttgcagtttggaaa

SEQ ID NO: 57991 - DNA, 2902 bp, Homo sapiens
agccattcctgaggaggactgccggtcgttcggacgtcttgcctgtcgctggaggagaggtccgggctctccaggaaggtggctgcggcgacaaaatgaagatattcgtgggcaacgtcgacggggcggatacgactccggaggagctggcagccctctttgcgccctacggcacggtcatgagctgcgccgtcatgaaacagttcgccttcgtgcacatgcgcgagaacgcgggcgcgctgcgcgccatcgaagccctgcacggccacgagctgcggccggggcgcgcgctcgtggtggagatgtcgcgcccaaggcctcttaatacttggaagattttcgtgggcaatgtgtcggctgcatgcacgagccaggaactgcgcagcctcttcgagcgccgcggacgcgtcatcgagtgtgacgtggtgaaagaggagatgtgaagatttttatcctgtgttgcagttcatctttgctccttcttctctcaccaggaagttggactacgcgtttgttcacatggagaaggaagcagatgccaaagccgcaatcgcgcagctcaacggcaaagaagtgaagggcaagcgcatcaacgtggaactctccaccaagggtcagaagaaggggcctggcctggctgtccagtctggggacaagaccaagaaaccaggggctggggatacggccttccctggaactggtggcttctctgccaccttcgactaccagcaggcttttggcaacagcactggtggctttgatgggcaagcccgtcagcccacaccacccttctttggtcgcgaccgcagccctctgcgccgttcacctccccgagcctcttatgtggctcctctgacggcccagccagctacctaccgggcccagccgtccgtgtcactgggagctgcctacagggcccagccttctgcctctttgggtgttggctatcggactcagcccatgacagcccaggcagcctcttaccgcgctcagccctctgtctcccttggggcaccatacaggggccagctggctagtcctagctcccagtctgctgcagcttcttcactcggcccatatggtggagcccagccctcagcctcggccctttcctcctatgggggtcaggcagctgcagcttcttcgctcaactcctatggggctcagggttcctcccttgcctcctatggtaaccagccatcctcttacggcgcccaggctgcctcttcctatggggttcgtgcagctgcttcttcctacaacacccagggagcagcttcctccttaggctcctacggggctcaggcagcctcctatggggcccagtctgcagcctcctcactagcttatggagcccaggcagcttcatataatgcccagccctcggcctcttacaatgcccagtctgccccatatgctgcacagcaggctgcttcctactcttcccaacctgctgcctatgtggcacagccagccacagctgctgcctatgccagccagccagcagcctacgccgcacaagccactaccccaatggctggctcctatggggcccagccggttgtgcagacccagctgaatagttacggggcccaagcatcaatgggcctttcaggctcctatggggctcagtcggctgctgcggccactggctcctatggtgccgcagcagcctacggggcccaaccttctgccaccctggcagctccttaccgcactcagtcatcagcctcattggctgcttcctatgctgcccagcagcatccccaggctgctgcctcctaccgcggccagccaggcaatgcctacgatggggcaggtcagccgtctgcagcctacctgtccatgtcccagggggccgttgccaacgccaacagcaccccgccgccctatgagcgtacccgcctctccccaccccgggccagctacgacgatccctacaaaaaggctgtcgccatgtcgaaaaggtatggttccgaccggcgtttagccgagctctctgattaccgccgtttatcagagtcgcagctttcgttccgccgctcgccgacaaagtcctcgctggattaccgtcgcctgcccgatgcccattccgattacgcacgctattcgggctcctataatgattacctgcgggcggctcagatgcactctggctaccagcgccgcatgtagggccatcctgggatggggcaccacagggagggagggagaaaagaggtgggtagggttacagatccaggttataactactctggcccatacctttcctggttgtggtttttcatgccctctaccatgtgggccttccccaggagatgatcctgttaagtgttcggcagtaacctactttgttccttcgcctcagcagcaaatcttgctactggctctagatctgcggtttcccctctaccctgcctcccgtctccccagaatgggaatttcttttatgtttttatttttttcctggctcccttttatttttgtgcgcgatatttaaggtcgtctggatggggaagcaacctgcagctgaggtcgccggcgcctttttctttttagatgggaaggaggccaggaaagggtcagcttaaccatttcctatgtgccaagctgtgccagcagtccagggtaccctgactgtccctctgtagactgttgagactgagttcctgttgggacagtcagttggtatgtatccaagtccctgctgaccactaatgttctagctgatggtgagcggcacagtcccacttccccatctccccaagtaggtggtgttagaaaaccttaattttttttcccttttgtatggactacaaataaaacttggggcaatttgcagtttggaaaaaaatggtgttttaaaatgtcggccgcctggcccagcggattttagattgga

SEQ ID NO: 57992 - DNA, 2801 bp, Homo sapiens
agccattcctgaggaggactgccggtcgttcggacgtcttgcctgtcgctggaggagaggtccgggctctccaggaaggtggctgcggcgacaaaatgaagatattcgtgggcaacgtcgacggggcggatacgactccggaggagctggcagccctctttgcgccctacggcacggtcatgagctgcgccgtcatgaaacagttcgccttcgtgcacatgcgcgagaacgcgggcgcgctgcgcgccatcgaagccctgcacggccacgagctgcggccggggcgcgcgctcgtggtggagatgtcgcgcccaaggcctcttaatacttggaagattttcgtgggcaatgtgtcggctgcatgcacgagccaggaactgcgcagcctcttcgagcgccgcggacgcgtcatcgagtgtgacgtggtgaaagaggagatgtgaagatttttatcctgtgttgcagttcatctttgctccttcttctctcaccaggaagttggactacgcgtttgttcacatggagaaggaagcagatgccaaagccgcaatcgcgcagctcaacggcaaagaagtgaagggcaagcgcatcaacgtggaactctccaccaagggtcagaagaaggggcctggcctggctgtccagtctggggacaagaccaagaaaccaggggctggggatacggccttccctggaactggtggcttctctgccaccttcgactaccagcaggcttttggcaacagcactggtggctttgatgggcaagcccgtcagcccacaccacccttctttggtcgcgaccgcagccctctgcgccgttcacctccccgagcctcttatgtggctcctctgacggcccagccagctacctaccgggcccagccgtccgtgtcactgggagctgcctacagggcccagccttctgcctctttgggtgttggctatcggactcagcccatgacagcccaggcagcctcttaccgcgctcagccctctgtctcccttggggcaccatacaggggccagctggctagtcctagctcccagtctgctgcagcttcttcactcggcccatatggtggagcccagccctcagcctcggccctttcctcctatgggggtcaggcagctgcagcttcttcgctcaactcctatggggctcagggttcctcccttgcctcctatggtaaccagccatcctcttacggcgcccaggctgcctcttcctatggggttcgtgcagctgcttcttcctacaacacccagggagcagcttcctccttaggctcctacggggctcaggcagcctcctatggggcccagtctgcagcctcctcactagcttatggagcccaggcagcttcatataatgcccagccctcggcctcttacaatgcccagtctgccccatatgctgcacagcaggctgcttcctactcttcccaacctgctgcctatgtggcacagccagccacagctgctgcctatgccagccagccagcagcctacgccgcacaagccactaccccaatggctggctcctatggggcccagccggttgtgcagacccagctgaatagttacggggcccaagcatcaatgggcctttcaggctcctatggggctcagtcggctgctgcggccactggctcctatggtgccgcagcagcctacggggcccaaccttctgccaccctggcagctccttaccgcactcagtcatcagcctcattggctgcttcctatgctgcccagcagcatccccaggctgctgcctcctaccgcggccagccaggcaatgcctacgatggggcaggtcagccgtctgcagcctacctgtccatgtcccagggggccgttgccaacgccaacagcaccccgccgccctatgagcgtacccgcctctccccaccccgggccagctacgacgatccctacaaaaaggctgtcgccatgtcgaaaaggtatggttccgaccggcgtttagccgagctctctgattaccgccgtttatcagagtcgcagctttcgttccgccgctcgccgacaaagtcctcgctggattaccgtcgcctgcccgatgcccattccgattacgcacgctattcgggctcctataatgattacctgcgggcggctcagatgcactctggctaccagcgccgcatgtagggccatcctgggatggggcaccacagggagggagggagaaaagaggtgggtagggttacagatccaggttataactactctggcccatacctttcctggttgtggtttttcatgccctctaccatgtgggccttccccaggagatgatcctgttaagtgttcggcagtaacctactttgttccttcgcctcagcagcaaatcttgctactggctctagatctgcggtttcccctctaccctgcctcccgtctccccagaatgggaatttcttttatgtttttatttttttcctggctcccttttatttttgtgcgcgatatttaaggtcgtctggatggggaagcaacctgcagctgaggtcgccggcgcctttttctttttagatgggaaggaggccaggaaagggtcagcttaaccatttcctatgtgccaagctgtgccagcagtccagggtaccctgactgtccctctgtagactgttgagactgagttcctgttgggacagtcagttggtatgtatccaagtccctgctgaccactaatgttctagctgatggtgagcggcacagtcccacttccccatctccccaagtaggtggtgttagtcacactggggagccggcca

SEQ ID NO: 57993 - DNA, 867 bp, Homo sapiens
atctcactctgttacccagactggagtgcagtgccgtgatcaaagctcactgcagcctgacctcttgggctcaagcaatcctcccacttcagcctccccaatagctgggaccactgacaaacgccaccatgtctggcctttttactttttgtagagatggggtttcaccatgtatagctgtcctttttatgtgtttgtgcaactatattagaaaatccagaataatggaatcataaaaatagcccacgttcagatatgctttataataatctgattaggataaatattatgtttatcaacacaattgtttatttgttaagaatgaaacactgtgctaaggctctgcagaaacatataacatgataaataccttgtattggggagacaaatgaagcgaatacaagtgagtctgaaaaacatggtactgtggaaacaatggtaagtaaacataccaggcaaactgtgtgggaataaaagtatctatttttaaagaaaaaaaaattagaggcccagcaaatttcaaatactatttagcatggggcagtttttttggatttataaattggattgaatctcaaaaattcattgaaatgatgtgtgatttatggaacaaactaaacatatggagcgtttgtagagtaaaggagtttcattttcagcagttgtagaagtcttgctgaggaggcgacttgtcgagcagcttgagattattatggatttttacagtaagagaaaattgtaggtaatagcctaatatggtctaatctcaactttaccagtccctgcctccataagagtataatagtttatgtgatggcttgaatgccagatgaccaggtccagtgtgtgtgagggtgtggtgagtga

SEQ ID NO: 57994 - DNA, 433 bp, Homo sapiens
ctggctttgcttccaccttcctgtgacctccaccccaccatgctcttgcactcccacagatggcctgaaatcccaggtggaagtggagggtgttacgtgatccccaactcccttgagtggaaacaccaagtttcctagaggacctaggagatgttctttccagccaccctatctgaatggtggggctgggaggggcatatggaggagaaaggggtggctaggaaaatgttagaaataccagatacactggctctggggacccctgaggaacgacccccttcagctgccaacactttccaattggcgctaagagtgaacagctatttccactaaagatcagaaaaggactgaagtttccatacattgaagactgagccttgagattcttggctggactgcaattgcctctccctccttcccccaacgcttgctt

SEQ ID NO: 57995 - DNA, 410 bp, Homo sapiens
ttcatttttattttaggttttaaaggataagtctattttctttattgttaatttttgcagttctttattgttctcatgaaaagtaccttacatatgttgggtacactgtaaaactgattatccacatatggacatgcatacatacatcttctctctatgcaattgttaccattacttccagcattctcatccaaaatggcaaagataagggaatcaaattaggtcgctgtgggcactgtggtacaccagggactactttatggtgctcctgaaagtcttgtagtggtttggcaccagttagctgggtagtatgatcttgtcataggcttagtaaatagagtgcaatccactggctcctagcccagctgaaatctttgggcagttactgtagacttccagttagctgtgat

SEQ ID NO: 57996 - DNA, 958 bp, Homo sapiens
  misc_feature (31)..(31): n is a, c, g, or t
  misc_feature (57)..(58): n is a, c, g, or t
aggccagctctggggtccggcaggtggtccncaacatgacctctgagttcttcgctnnccagctccgggcccagatctctgacgacaccactcacccgatctcctactacaagcccgagttctacacgccggttgatgggggcactgctcacctgtctgtcgtcgcagaggacggcagtgctgtgtccgccaccagcaccatcaacctctactttggctccaaggtccgctccccggtcagcgagatcctgttcaatgatgaaatggatgacttcagctctcccaacatcaccaacgagtttggggtgcccccctcacctgccaatttcatccagccagggaagcagccgctctcgtcaatgtgcccgacgatcatggtgggccaggacggccaggtccggatggtggtgggagctgctgggggcacacagatcaccacagccactgcactgatatgtgtcaccccttttctccctggccgtgcccaccctgcacagcccccaagccatgctgatcacactcccatgccccaggccatcatctacaacctctggttcggctatgacgtgaagcgggccgtggaggagccccggctgcacaaccagcttctgcccaacgtcacgacagtggagagaaacattgaccaggcagtgactgcagccctggagacccggcaccatcacacccagatcgcgtccaccttcatcgctgtggtgcaagccatcgtccgcacggctggtggctgggcagctgcctcggactccaggaaaggcggggagcctgccggctactgagtgctccaggaggacaaggctgacaagcaatccagggacaagatactcaccaggaccaggaaggggactctgggggactggcttcccctgtgagcagcagagcagcacaataaatgaggccactgtgccaggctccaggtggcctccctgccctgtcaaaccac

SEQ ID NO: 57997 - DNA, 800 bp, Homo sapiens
  misc_feature (31)..(31): n is a, c, g, or t
  misc_feature (57)..(58): n is a, c, g, or t
aggccagctctggggtccggcaggtggtccncaacatgacctctgagttcttcgctnnccagctccgggcccagatctctgacgacaccactcacccgatctcctactacaagcccgagttctacacgccggttgatgggggcactgctcacctgtctgtcgtcgcagaggacggcagtgctgtgtccgccaccagcaccatcaacctctactttggctccaaggtccgctccccggtcagcgagatcctgttcaatgatgaaatggatgacttcagctctcccaacatcaccaacgagtttggggtgcccccctcacctgccaatttcatccagccagcccccaagccatgctgatcacactcccatgccccaggccatcatctacaacctctggttcggctatgacgtgaagcgggccgtggaggagccccggctgcacaaccagcttctgcccaacgtcacgacagtggagagaaacattgaccaggcagtgactgcagccctggagacccggcaccatcacacccagatcgcgtccaccttcatcgctgtggtgcaagccatcgtccgcacggctggtggctgggcagctgcctcggactccaggaaaggcggggagcctgccggctactgagtgctccaggaggacaaggctgacaagcaatccagggacaagatactcaccaggaccaggaaggggactctgggggactggcttcccctgtgagcagcagagcagcacaataaatgaggccactgtgccaggctccaggtggcctccctgccctgtcaaaccac

SEQ ID NO: 57998 - DNA, 366 bp, Homo sapiens
aaagtttagatagaatgatttctatgtaagcttttactgtgtagtctgagtccatgaatattgattacaaaaaacacatctgtaggtgagttacaatacctcacttataattcaaaattcatgttgtgttagctcaatatttttcaaataatttttgcatgcaattttcaccttctttctgagtagtttcaggtattttgtatggttccagcagtcagttaggttgccattgtttggaagcacacatccacgtatctgcaccatgatgatatgacacgcccataccccccatttcacattttgtcagaagtgcatagttatcactaactttgccagtagaaatgtactcccaatttcccacagact

SEQ ID NO: 57999 - DNA, 778 bp, Homo sapiens
gagttgatgtatcagaaagacataacaatgacagatgtgtatacgcctaataagaaagcttcaaaacgaagcaaaacaaaaattgatagaattaaagagagagataaacaaattgacaatcatgcttggaaaattgaatacttctgtcttagcagtttgcagaataactagacaaaaaacttagtaaagatgtagaacaaaattaactatcgacaaccttgacctaaatgatatgtatagaactctgcatacaacaactgaagaacataaattcctttcaggggcacacattacactaacaggctggaatcatacgctggtccataaaactagtgtcagtaaattggaaaggtttgaaaccatacagagtatgttctctggacacaaaagacttaaataaaaactctgatgagaactcagggacacaaagaaggcacctgtagacacgggggcctccttgaaggtagagggtgggaggagggagaggatcagaaaaaatagctattgggtgctaggcttacttcttgggtgatgaaataacgtgtacaaacctccccgacacgagtttacctatataacaaagctgaacatgtgcctctgaatctaaaatacaagtttagtaaaaagcaaagttgtattagaagtcagtaagactaggtgtggtgactcatgcctgtaaccccagccctttggaaggccgattcaggaggatcacttgagcccaggagttcaagaccagactgagcagcatagttagactctgtctctattaaaatta

SEQ ID NO: 58000 - DNA, 376 bp, Homo sapiens
ttatagttgatcaggagctattacatgcatcagcttacttgttctcagagttaaccttggaagatagacattatttctattctctggctaaagaataagtgacaagccttctgcaggttgggcgactcagctaaagtcattcgggtcagtgttgacagagccagaacaagagtctttcaactgcaggtctgctctttccactataaaaacagaggaaagtacaagtgaaaaagaaggggcttccaaagcagctaagtttagtccaccttctacttcacaacctaatacctaagccacccacaccaggttatctattgctttccatgttatttttttattacctaagtaatacatgaacataaacctcctttttttt

SEQ ID NO: 58001 - DNA, 257 bp, Homo sapiens
atatatacctgtacttcgaacagaaggttattttaatcgctatatctgcaggtgttttaaaaacaaccaaataacaaatgacagacttttgcaccctggactgcccttgatttactgaggagctaacctaacctaacgctttgtaagagtattgcttagcttccatgtttgactgcaacatttcgtgaggcttcgtggactgcttggactcgtactcagacctcagtttgcagagtcagtatttcagcacttgagcc

SEQ ID NO: 58002 - DNA, 375 bp, Homo sapiens
acaattatccaaggaaatctgaaatgaatattactaaatacaaccttctggatttggttttacttacctagtatgttgactatgtctgcttatggttttcttacttatgcctacctacaccatcttttaatcaaatgtgccgataaaatttctaagtgcagaatttcctttgcttgacacaaacactttgttctactgtgaatcaacttctggggctttctattgtatggatgtctacaaagggatgtgctgtaactcaagtataagcagatggttctttcattgttgtaaatcaaattggtataacctgtgactgggttcgatgtggccccagtttcctgaggcctgtgaaaattgctaggttgctcattttca

SEQ ID NO: 58003 - DNA, 651 bp, Homo sapiens
cctagtctctaaaaaaataataattagctgggtgtggcggtgcacaccggtgatcccagctacttgggaggctgaggagttcaaggtttcagtaagttatgatcatgccactgtattccagcctggctgacagagcaagaccctgtctctaaaaaacgaaaaaaactcagcaggttattctgtggatattagcaaactgattgtaatgtttataaggagaggtaaaagacccagaatagtcaactcaatattgaaagagaagagcaaggttggaggacccatagtacccaatttcagtacttttactataaagccacagtaatcaaggcagtgtggtattggtcaaaaaacagaaaaaatagatcaatgaaacagaacagagagcccagataaaaacctgcataaacatatgcaactgatctttgacaagggaacaaacacacctcaatgtagaaaggatgatcttttcaagaaatggtgctggaataactgaacatccacgtgccaaaaaaaaaaaaaaaaaaagaatctagacacccatcacaaaaaattaacttaaaatgtgtcttattctgctcagacttaaaaccacaagctgagtgcttaaaacagtaactttcctccgctccccttcccctcccgctccccgtc

SEQ ID NO: 58004 - DNA, 295 bp, Homo sapiens
gaaaactcagtattatcatgatgtcagtcctctgcttgatttacagattcaacacaatctcaatcacagtctcaggggctaagtgtggtggtttatgcctataatccagcactttgggaggctaaggcaggaggatcgcttaagcccaggagtttaagaccagcctaggcaacatagtgagaccccatatctacaaaaaaattttttttgttagctaggcctggtggcatgtgcctatattcccagctatttgggaggctgaggtgggaggactgcttgagcctaggagtctgag

SEQ ID NO: 58005 - DNA, 360 bp, Homo sapiens
taaaaaacgaaaaaaactcagcaggttattctgtggatattagcaaactgattgtaatgtttataaggagaggtaaaagacccagaatagtcaactcaatattgaaagagaagagcaaggttggaggacccatagtacccaatttcagtacttttactataaagccacagtaatcaaggcagtgtggtattggtcaaaaaacagaaaaaatagatcaatgaaacagaacagagagcccagataaaaacctgcataaacatatgcaactgatctttgacaagggaacaaacacacctcaatgtagaaaggatgatcttttcaagaaatggtgctggaataactgaacatccacgtgccaaa

SEQ ID NO: 58006 - DNA, 206 bp, Homo sapiens
ctcaaataaaataaaataaaaatcttacaaaacaataaaggacaaaaggtaacatcgcaatacagtaatttgtagaagactttacacagttcatgcaagagaaaattctcatggttaactgttatgtgaaaaagtagtccatctcaatagtactcaaagaaatataaattaaaaccacaatctgatatttgtaatcctactcaaca

SEQ ID NO: 58007 - DNA, 1165 bp, Homo sapiens
atcacagattgtgcttgtgagtcctttaataatttggagaaaatgacctgtttgaaagaagaaaactgtcatattacacagtcactccgaatgggatttctggtgtgtttttccatccttagctggcctgcagcccctgcccaggccctgctcactggtgtctttctgttgcagtcagtaccccagcctgtggtctgtgagcaacggcgccgtcaccccgggctcccaggcagcagccgtgtccaacgggctgggggcccagttcttccggggctcccccgcgcactacacacccctcacccatccggtctcggcgccctcttcctcgggatccccactgtacgaaggggcggccgcggccacagacatcgtggacagccagtacgacgccgcagcccaaggccgcctcatagcctcatggacacctgtgtcgccaccttccatgtgaagcagcaaggcccaggtcccgaaagatgcagtgactttttgtcgtggcagccagtggtgactggattgacctactaggtacccagtggcagtctcaggttaagaaggaaatgcagcctcagtaacttccttttcaaagcagtggaggagcacacggcacctttccccagagccccagcatcccttgctcacacctgcagtagtggtgctgtcccaggtggcttccagatgaacccaactgtggagatgatgcagttggcccaacctcactgacggtggaaaaatgtttgccagggtccagaaactttttttggtttatttctcatacagtgtattggcaactttggcacaccagaatttataaactccaccagtcctactttagtgagataaaaagcacactcttaatcttcttccttgttgctttcaagtagttagagttgagctgttaaggacagaataaaatcatagttgaggacagcaggttttagttgaattgaaaatttgactgctctgccccctagaatgtgtgtattttaagcatatgtagctaatctcttgtgttgttaaactataactgtttcatatttttcttttgacaaagtagccaaagacaatcagcagaaagcattttctgcacaataaatgcaatatgcaaaatgtgattcgtccagttattagtgaagcccctccttttgtgagtatttactgtttattg

SEQ ID NO: 58008 - DNA, 2579 bp, Homo sapiens
cggcaacaagtcctgtttttataagagagcgaggaggacacttctcagaaggggttgttttgcttttgcttatttccgtccatttccctctctgcgcgcggaccttccttttccagatggtgagagccgcggggacacccgacgccggggcaggctgatccacgatcctgggtgtgcgtaacgccgcctggggctccgtgggcgagggacgtgtggggacaggtgcaccggaaactgccagactggagagttgaggcatcggaggcgcgagaacagcactactactgcggcgagacgagcgcggcgcatcccaaagcccggccaaatgcgctcgtccctgggaggggagggaggcgcgcctggagcggggacagtcttggtccgcgccctcctcccgggtctgtgccgggacccgggacccgggagccgtcgcaggtctcggtccaaggggccccttttctcggaagggcggcggccaagagcggggaaggtggatctcaggtagcgagtctgggcttcggggacggcggggaggggagccggacgggaggatgagctcccctggcaccgagagcgcgggaaagagcctgcagtaccgagtggaccacctgctgagcgccgtggagaatgagctgcaggcgggcagcgagaagggcgaccccacagagcgcgaactgcgcgtgggcctggaggagagcgagctgtggctgcgcttcaaggagctcaccaatgagatgatcgtgaccaagaacggcaggaggatgtttccggtgctgaaggtgaacgtgtctggcctggaccccaacgccatgtactccttcctgctggacttcgtggcggcggacaaccaccgctggaagtacgtgaacggggaatgggtgccggggggcaagccggagccgcaggcgcccagctgcgtctacatccaccccgactcgcccaacttcggggcccactggatgaaggctcccgtctccttcagcaaagtcaagctcaccaacaagctcaacggagggggccagatcatgctgaactccttgcataagtatgagcctcgaatccacatagtgagagttggggatccacagcgcatgatcaccagccactgcttccctgagacccagttcatagcggtgactgcttatcagaacgaggagatcacagctcttaaaattaagtacaatccatttgcaaaagctttccttgatgcaaaggaaagaagtgatcacaaagagatgatggaggaacccggagacagccagcaacctgggtactcccaatcaggggggtggcttcttcctggaaccagcaccctgtgtccacctgcaaatcctcatcctcagtttggaggtgccctctccctcccctccacgcacagctgtgacaggtacccaaccctgaggagccaccggtcctcaccctaccccagcccctatgctcatcggaacaattctccaacctattctgacaactcacctgcatgtttatccatgctgcaatcccatgacaattggtccagccttggaatgcctgcccatcccagcatgctccccgtgagccacaatgccagcccacctaccagctccagtcagtaccccagcctgtggtctgtgagcaacggcgccgtcaccccgggctcccaggcagcagccgtgtccaacgggctgggggcccagttcttccggggctcccccgcgcactacacacccctcacccatccggtctcggcgccctcttcctcgggatccccactgtacgaaggggcggccgcggccacagacatcgtggacagccagtacgacgccgcagcccaaggccgcctcatagcctcatggacacctgtgtcgccaccttccatgtgaagcagcaaggcccaggtcccgaaagatgcagtgactttttgtcgtggcagccagtggtgactggattgacctactaggtacccagtggcagtctcaggttaagaaggaaatgcagcctcagtaacttccttttcaaagcagtggaggagcacacggcacctttccccagagccccagcatcccttgctcacacctgcagtagtggtgctgtcccaggtggcttccagatgaacccaactgtggagatgatgcagttggcccaacctcactgacggtggaaaaatgtttgccagggtccagaaactttttttggtttatttctcatacagtgtattggcaactttggcacaccagaatttataaactccaccagtcctactttagtgagataaaaagcacactcttaatcttcttccttgttgctttcaagtagttagagttgagctgttaaggacagaataaaatcatagttgaggacagcaggttttagttgaattgaaaatttgactgctctgccccctagaatgtgtgtattttaagcatatgtagctaatctcttgtgttgttaaactataactgtttcatatttttcttttgacaaagtagccaaagacaatcagcagaaagcattttctgcacaataaatgcaatatgcaaaatgtgattcgtccagttattagtgaagcccctccttttgtgagtatttactgtttattg

SEQ ID NO: 58009 - DNA, 2486 bp, Homo sapiens
cggcaacaagtcctgtttttataagagagcgaggaggacacttctcagaaggggttgttttgcttttgcttatttccgtccatttccctctctgcgcgcggaccttccttttccagatggtgagagccgcggggacacccgacgccggggcaggctgatccacgatcctgggtgtgcgtaacgccgcctggggctccgtgggcgagggacgtgtggggacaggtgcaccggaaactgccagactggagagttgaggcatcggaggcgcgagaacagcactactactgcggcgagacgagcgcggcgcatcccaaagcccggccaaatgcgctcgtccctgggaggggagggaggcgcgcctggagcggggacagggcggcggccaagagcggggaaggtggatctcaggtagcgagtctgggcttcggggacggcggggaggggagccggacgggaggatgagctcccctggcaccgagagcgcgggaaagagcctgcagtaccgagtggaccacctgctgagcgccgtggagaatgagctgcaggcgggcagcgagaagggcgaccccacagagcgcgaactgcgcgtgggcctggaggagagcgagctgtggctgcgcttcaaggagctcaccaatgagatgatcgtgaccaagaacggcaggaggatgtttccggtgctgaaggtgaacgtgtctggcctggaccccaacgccatgtactccttcctgctggacttcgtggcggcggacaaccaccgctggaagtacgtgaacggggaatgggtgccggggggcaagccggagccgcaggcgcccagctgcgtctacatccaccccgactcgcccaacttcggggcccactggatgaaggctcccgtctccttcagcaaagtcaagctcaccaacaagctcaacggagggggccagatcatgctgaactccttgcataagtatgagcctcgaatccacatagtgagagttggggatccacagcgcatgatcaccagccactgcttccctgagacccagttcatagcggtgactgcttatcagaacgaggagatcacagctcttaaaattaagtacaatccatttgcaaaagctttccttgatgcaaaggaaagaagtgatcacaaagagatgatggaggaacccggagacagccagcaacctgggtactcccaatcaggggggtggcttcttcctggaaccagcaccctgtgtccacctgcaaatcctcatcctcagtttggaggtgccctctccctcccctccacgcacagctgtgacaggtacccaaccctgaggagccaccggtcctcaccctaccccagcccctatgctcatcggaacaattctccaacctattctgacaactcacctgcatgtttatccatgctgcaatcccatgacaattggtccagccttggaatgcctgcccatcccagcatgctccccgtgagccacaatgccagcccacctaccagctccagtcagtaccccagcctgtggtctgtgagcaacggcgccgtcaccccgggctcccaggcagcagccgtgtccaacgggctgggggcccagttcttccggggctcccccgcgcactacacacccctcacccatccggtctcggcgccctcttcctcgggatccccactgtacgaaggggcggccgcggccacagacatcgtggacagccagtacgacgccgcagcccaaggccgcctcatagcctcatggacacctgtgtcgccaccttccatgtgaagcagcaaggcccaggtcccgaaagatgcagtgactttttgtcgtggcagccagtggtgactggattgacctactaggtacccagtggcagtctcaggttaagaaggaaatgcagcctcagtaacttccttttcaaagcagtggaggagcacacggcacctttccccagagccccagcatcccttgctcacacctgcagtagtggtgctgtcccaggtggcttccagatgaacccaactgtggagatgatgcagttggcccaacctcactgacggtggaaaaatgtttgccagggtccagaaactttttttggtttatttctcatacagtgtattggcaactttggcacaccagaatttataaactccaccagtcctactttagtgagataaaaagcacactcttaatcttcttccttgttgctttcaagtagttagagttgagctgttaaggacagaataaaatcatagttgaggacagcaggttttagttgaattgaaaatttgactgctctgccccctagaatgtgtgtattttaagcatatgtagctaatctcttgtgttgttaaactataactgtttcatatttttcttttgacaaagtagccaaagacaatcagcagaaagcattttctgcacaataaatgcaatatgcaaaatgtgattcgtccagttattagtgaagcccctccttttgtgagtatttactgtttattg

SEQ ID NO: 58010 - DNA, 2386 bp, Homo sapiens
cggcaacaagtcctgtttttataagagagcgaggaggacacttctcagaaggggttgttttgcttttgcttatttccgtccatttccctctctgcgcgcggaccttccttttccagatggtgagagccgcggggacacccgacgccggggcaggctgatccacgatcctgggtgtgcgtaacgccgcctggggctccgtgggcgagggacgtgtggggacaggtgcaccggaaactgccagactggagagttgaggcatcggaggcgcgagaacagcactactactgcggcgagacgagcgcggcgcatcccaaagcccggccaaatgcgctcgtccctgggaggggagggaggcgcgcctggagcggggacagtcttggtccgcgccctcctcccgggtctgtgccgggacccgggacccgggagccgtcgcaggtctcggtccaaggggccccttttctcggaagggcggcggccaagagcggggaaggtggatctcaggtagcgagtctgggcttcggggacggcggggaggggagccggacgggaggatgagctcccctggcaccgagagcgcgggaaagagcctgcagtaccgagtggaccacctgctgagcgccgtggagaatgagctgcaggcgggcagcgagaagggcgaccccacagagcgcgaactgcgcgtgggcctggaggagagcgaccggagccgcaggcgcccagttgcgtctacatccaccccgactcgcccaacttcggggcccactggatgaaggctcccgtctccttcagcaaagtcaagctccccaacaagctcaacggaggggcccagatcatgctgaactccttgcataagtatgagcctcgaatccacatagtgagagttggggatccacagcgcatgatcaccagccactgcttccctgagacccagttcatagcggtgactgcttatcagaacgaggagatcacagctcttaaaattaagtacaatccatttgcaaaagctttccttgatgcaaaggaaagaagtgatcacaaagagatgatggaggaacccggagacagccagcaacctgggtactcccaatcaggggggtggcttcttcctggaaccagcaccctgtgtccacctgcaaatcctcatcctcagtttggaggtgccctctccctcccctccacgcacagctgtgacaggtacccaaccctgaggagccaccggtcctcaccctaccccagcccctatgctcatcggaacaattctccaacctattctgacaactcacctgcatgtttatccatgctgcaatcccatgacaattggtccagccttggaatgcctgcccatcccagcatgctccccgtgagccacaatgccagcccacctaccagctccagtcagtaccccagcctgtggtctgtgagcaacggcgccgtcaccccgggctcccaggcagcagccgtgtccaacgggctgggggcccagttcttccggggctcccccgcgcactacacacccctcacccatccggtctcggcgccctcttcctcgggatccccactgtacgaaggggcggccgcggccacagacatcgtggacagccagtacgacgccgcagcccaaggccgcctcatagcctcatggacacctgtgtcgccaccttccatgtgaagcagcaaggcccaggtcccgaaagatgcagtgactttttgtcgtggcagccagtggtgactggattgacctactaggtacccagtggcagtctcaggttaagaaggaaatgcagcctcagtaacttccttttcaaagcagtggaggagcacacggcacctttccccagagccccagcatcccttgctcacacctgcagtagtggtgctgtcccaggtggcttccagatgaacccaactgtggagatgatgcagttggcccaacctcactgacggtggaaaaatgtttgccagggtccagaaactttttttggtttatttctcatacagtgtattggcaactttggcacaccagaatttataaactccaccagtcctactttagtgagataaaaagcacactcttaatcttcttccttgttgctttcaagtagttagagttgagctgttaaggacagaataaaatcatagttgaggacagcaggttttagttgaattgaaaatttgactgctctgccccctagaatgtgtgtattttaagcatatgtagctaatctcttgtgttgttaaactataactgtttcatatttttcttttgacaaagtagccaaagacaatcagcagaaagcattttctgcacaataaatgcaatatgcaaaatgtgattcgtccagttattagtgaagcccctccttttgtgagtatttactgtttattg

SEQ ID NO: 58011 - DNA, 1672 bp, Homo sapiens
cggcaacaagtcctgtttttataagagagcgaggaggacacttctcagaaggggttgttttgcttttgcttatttccgtccatttccctctctgcgcgcggaccttccttttccagatggtgagagccgcggggacacccgacgccggggcaggctgatccacgatcctgggtgtgcgtaacgccgcctggggctccgtgggcgagggacgtgtggggacaggtgcaccggaaactgccagactggagagttgaggcatcggaggcgcgagaacagcactactactgcggcgagacgagcgcggcgcatcccaaagcccggccaaatgcgctcgtccctgggaggggagggaggcgcgcctggagcggggacagtcttggtccgcgccctcctcccgggtctgtgccgggacccgggacccgggagccgtcgcaggtctcggtccaaggggccccttttctcggaagggcggcggccaagagcggggaaggtggatctcaggtagcgagtctgggcttcggggacggcggggaggggagccggacgggaggatgagctcccctggcaccgagagcgcgggaaagagcctgcagtaccgagtggaccacctgctgagcgccgtggagaatgagctgcaggcgggcagcgagaagggcgaccccacagagcgcgaactgcgcgtgggcctggaggagagcgagctgtggctgcgcttcaaggagctcaccaatgagatgatcgtgaccaagaacggcaggaggatgtttccggtgctgaaggtgaacgtgtctggcctacacccctcacccatccggtctcggcgccctcttcctcgggatccccactgtacgaaggggcggccgcggccacagacatcgtggacagccagtacgacgccgcagcccaaggccgcctcatagcctcatggacacctgtgtcgccaccttccatgtgaagcagcaaggcccaggtcccgaaagatgcagtgactttttgtcgtggcagccagtggtgactggattgacctactaggtacccagtggcagtctcaggttaagaaggaaatgcagcctcagtaacttccttttcaaagcagtggaggagcacacggcacctttccccagagccccagcatcccttgctcacacctgcagtagtggtgctgtcccaggtggcttccagatgaacccaactgtggagatgatgcagttggcccaacctcactgacggtggaaaaatgtttgccagggtccagaaactttttttggtttatttctcatacagtgtattggcaactttggcacaccagaatttataaactccaccagtcctactttagtgagataaaaagcacactcttaatcttcttccttgttgctttcaagtagttagagttgagctgttaaggacagaataaaatcatagttgaggacagcaggttttagttgaattgaaaatttgactgctctgccccctagaatgtgtgtattttaagcatatgtagctaatctcttgtgttgttaaactataactgtttcatatttttcttttgacaaagtagccaaagacaatcagcagaaagcattttctgcacaataaatgcaatatgcaaaatgtgattcgtccagttattagtgaagcccctccttttgtgagtatttactgtttattg

SEQ ID NO: 58012 - DNA, 359 bp, Homo sapiens
gaagaaaaaatatttgtgcatttggttaaaatatcaaggactggatttaccctctttccagaaacaagtaaaaactgtatacagcatttgaagcaatggcactcgacattggcatgaggcagtggatggaagtgattgctagaagatggataatgaaagaggtgactggtaagagtgccccagtgcactgcctgctacaaattgcaagctgggtttagggaggggcaatataggcagagcaagacttctcccagcattgagaaggagctgggagtttgggaaagcccaaaagtcacaagagtttacattcatttttattgctaagctacttcaatttgggtttcagtcatttttaatga

SEQ ID NO: 58013 - DNA, 1087 bp, Homo sapiens
cagagaagagtgtccagctcctccagaggctgcccgcccgccgctccttccctgcccacctactatgaggagcagctcctcccacctgcccataaaagccaagtgcatgttaccagcagcggatcacagcccttccccgatcctctccgtgggagccagcgagcctctctccctgatcttacgtgctcaagtttctgcatgatcttagaaatttgccaaacataaacgtgtcaacgtgaagttaagaagtgagactcacccgtccctgcacagtctatactatgccctttcgcaataggatccagtttcacctatggaatgagaaagttggggaagaagtcatctagcgtcttgctactcaaagtgtggtccatggaccagcagcatcagcatcacctgggatcttcttggaagaaatgtagaaactcaggcctcaccccagaatctgcctttttataagacccccagatgacaaaactgaaacggagaagtcacacagacggtgaattgcagagccaggagaacagccctggcagccggctctggaggtcatgctattaacctttacactctacccctcctgaagaaagatgttaaatgcagaggcaaggaaaattggtgcaaatatcattggaatgagatcactaggggttgtcctaatagggagaagaaacatcatttttcctcattctattgtcattatttcacagaccatgttgcactttgtagaaaataagtcagaaatacttgactgtgtcacattgttcaaaaggagaaagtctattacaaggcagcaatatcggagttattagtagaatttcatattgactttgtttcggttaccagaactgtcaactgcaatactggaagagggccttgcacatttctttgccaggcctgcccaacacaaagttaagaggcatgtggaaagagccaaagtttgctttcagtgatctctctgttgatattacccattcaagattttcaaccctcactccctagacaacctgtggtttctctaattatttaaaacttataaagaaattctccacaggtggatatattttttactcacttctcatctatg

SEQ ID NO: 58014 - DNA, 5650 bp, Homo sapiens
  misc_feature (1348)..(1349): n is a, c, g, or t
  misc_feature (1463)..(1463): n is a, c, g, or t
  misc_feature (1481)..(1481): n is a, c, g, or t
  misc_feature (1681)..(1681): n is a, c, g, or t
  misc_feature (1696)..(1696): n is a, c, g, or t
  misc_feature (1709)..(1710): n is a, c, g, or t
cagagaagagtgtccagctcctccagaggctgcccgcccgccgctccttccctgcccacctactatgaggagcagctcctcccacctgcccataaaagccaagtgcatgttaccagcagcggatcacagcccttccccgatcctctccgtgggagccagcgagcctctctccctgatcttacgtgctcaagaagctgttgtgaaggcagagcagcatctgctgaagagacagaaaccagccccagaggtgtcacaggaaggcaccagcaaggacattggtctttgatttgattcagcagtcctgtcaagtataaatgtgatggctgtgctgcctggccctctgcagctgctgggagtgctgcttaccatttccctgagttccatcaggctcattcaggctggtgcctactatgggatcaagccgctgccacctcaaattcctcctcagatgccaccacaaattccacaataccagcccctgggtcagcaagtacctcacatgcctttggccaaagatggccttgccatgggcaaggagatgccccacttgcagtatggcaaagagtatccacacctaccccaatatatgaaggaaattcaaccggcgccaagaatgggcaaggaagccgtacccaagaaaggcaaagaaataccattagccagtttacgaggggaacaaggtccccgtggagagcctggcccaagaggaccacctgggccccctggtttgccaggtcatgggatacctggaattaaaggaaaaccagggccacagggatatccaggagttggaaagccaggtatgcctggaatgccagggaagccaggagccatgggcatgcctggggcaaaaggagaaattggacagaaaggggaaattgggcctatggggatcccaggaccacaaggacctccagggcctcatggacttcctggcattgggaagccaggtgggccagggttaccagggcaaccaggaccaaagggtgatcgaggacccaaaggactaccaggacctcaaggccttcggggtcctaaaggagacaagggcttcgggatgccaggtgcgccaggtgtaaaggggcctccagggatgcacggccctcccggccctgttggactgccaggagtgggcaaaccaggagtgacaggcttccctgggccccagggccccctgggaaagccaggggctccaggagaacctgggccacaaggccctattggggtaccgggggttcaaggacctcctgggatacccggaattggaaagccaggccaggatgggatcccaggccagccaggatttccaggtggcaaaggggagcaaggactgccagggctaccaggnnccccaggccttccagggattgggaaaccaggcttcccaggacccaaaggtgaccggggcatgggaggtgttcctggggctcttggaccaagaggggagaaaggaccaataggtnccccaggaatagggggtnctccaggagagccaggcctgcctggaatcccaggtcctatgggccctccaggtgctattggttttcctggacccaaaggagaaggtgggattgtagggccacaggggccaccaggtcccaagggtgagccagggcttcaaggcttcccaggaaagccaggtttccttggtgaagtagggcctcctggcatgaggggtttnccaggtcccataggncccaagggggaanntgggcaaaaaggtgtaccaggactccctggtgttccagggcttctcggacctaagggagagccaggaatcccaggggatcagggtttacagggccccccaggtatcccagggattgggggccctagtggccccattggaccacctgggattccaggccccaaaggggagccgggcctcccagggccccctgggttccctggtatagggaaacccggagtggcaggacttcatggccccccagggaagcctggtgcccttggtcctcaaggccagcctggccttccaggacccccaggccctccaggacctccaggacccccagctgtgatgccccctacaccaccaccccagggagagtatctgccagatatggggctgggaattgatggcgtgaaacccccccatgcctacggggctaagaaaggcaagaatggagggccagcctatgagatgcctgcatttaccgccgagctaaccgcacctttcccaccggtgggggccccagtgaagtttaacaaactgctgtataacggcagacagaactacaacccgcagacaggcatcttcacctgtgaggtccctggtgtctactactttgcataccacgttcactgcaaggggggcaacgtgtgggttgctctattcaagaacaacgagcccgtgatgtacacgtacgacgagtacaaaaagggcttcctggaccaggcatctgggagtgcagtgctgctgctcaggcccggagaccgggtgttcctccagatgccctcagaacaggctgcaggactgtatgccgggcagtatgtccactcctccttttcaggatatttattgtatcccatgtaaaaacaaaaaaacaaaaaacaaagaaaagaaagagattttatagaagaaaatgacacaccaaaaaatccaaatgaaaaacataattgcttcaaaacacttacacagttggaaagttatatgtaagtgaaaatttggaccattgtgtacaaataaaaactaagatgcatgtttaatactccacacagcagcctgtaattgcgaatgatgggatagagttatgtatcaagtactgacacttggttgtacccactggaatcatattagctgttttatgttatatgcttccacagtaacctgcttattcagatcagtcaaaatatatcagtatgaaagatcatagctaatgaaaggcactcactcatattgtttactttaaaatatttataaatatgccttaaagaaatacaaatgataacaattacataccgtatttacttgcttaatttcctctgtatttgtgtagatactttgacatggaatatatggtggggagacccgtagtgttaccgccccagtgggagggggccctggggaccctggtaatgctttagtcaaagggatatctctcttgtatcagaggctgtgtcttttagtaacaggagtcctcgtcagaattgcgtgtctgttgtctctaaaagaatgggtgaaccaatcggcctttgtgaatttattcagtgccttctctgtaccaagcactgggtaaggcacttttgtggagcattagacagtaaccctcaaggagctagagaaccggatgggagacatgagcggtaattaactcacttgttccccagagtttctatttgttttgattttctttttctgtgacttattttcctattttctttcctccatgtaattttcactatggcccaactaatataaacacctggaaattacaaggaaaaaaaattcttcctctaataactttccaaatttgtggaatatttatttgtaatagcagttatcagttatgcttatatagcattaaaaattctcctcctttgactacacacacaaccacagtgtggttctaatcatggagatatcagtaatttttagtaactgaattttgaggacatttctctgtttagcatgtatgcaaactgatatgtaatctgaggttccaaagtcaattttttcttttttttttgagatggagtcttactctgtcacccaggctggagtgcagtagcacgatcttggcttactgcaacctctacctcctaggttcaagcaattgtcctgtctcagcctcccgagtactgggactactgtcttgcgccaccatgcctggctaatttttgtatatttagtaaagatgggttttcgccatgttggccaggctggtctcaaactcctggcctcaagtgatgcacctgcctcagccttccaaagtgctgggattacaggcatgagccaccgtgcccggccaaagtcagctttcaaaatccaagccataattggtgaggggggagtttcagaattacatagaaaaattaatatttgaaaaaataattctgaaatttcgaatttaaaaacagatgtgctgcttctgggtgtaggtagtaaaagtataggaaaagaactgtttccttagaagcggactgtggaagggctatgtagaatgtcaaagggcaacaagagcctgtgtttttaatgtcatcctgtactcggcacaaatcaaaggccaatacaagtctgaaaagcagaaataaatatttttccaggtttttgcttgggcacatactaactgctttgggcattctaatctggtctccaaacaccaaagacccatttcgagcctgctattagcctgctgctgactctatcacttggagcaataatgtggggttatggtggtggaatcttgtatatttttgtcaaaaataaaaccttgagttaaggggatagatatagatggaaaaatacacaaataaatacggtatgaaaacacatggaaatgtgtctttgtcaaatatgaatcattattaccatcacaaaaattcttctcttggccaatatctcatttccctatatagtatacaagcaccatttcttctcaatttttaagaagagaaattagtccattaccacaggggttcttgtcactactaattatacaacaatcttttcccaacaaaaagatgtcctccacaacctttgttttcaaagcagacagcatctatgtggccaaatatactttgggttgttcttgaggatactggttttgggctgatgactatggtgggcagcatggatccattgggctccttctgctaaacagccacattgaaatggtttaaaagcaagtcagatcaggtgatttgtaaaattgtatttatctgtacatgtatgggcttttaattcccaccaagaaagagagaaattatctttttagttaaaaccaaatttcacttttcaaaatatcttccaacttatttattggttgtcactcaattgcctatatatatatatatatgtgtgtgtgtgtgtgtgcgcgtgagcgcacgtgtgtgtatgcgtgcgcatgtgtgtgtatgtgtattatcagacataggtttctaacttttagatagaagaggagcaacatctatgccaaatactgtgcattctacaatggtgctaatctcagacctaaatgatactccatttaatttaaaaaagagttttaaataattatctatgtgcctgtatttcccttttgagtgctgcacaacatgttaacatattagtgtaaaagcagatgaaacaaccacgtgttctaaagtctagggattgtgctataatccctatttagttcaaaattaaccagaattcttccatgtgaaatggaccaaactcatattattgttatgtaaatacagagttttaatgcagtatgacatcccacaggggaaaagaatgtctgtagtgggtgactgttatcaaatattttatagaatacaatgaacggtgaacagactggtaacttgtttgagttcccatgacagatttgagacttgtcaatagcaaatcatttttgtatttaaatttttgtactgatttgaaaaacatcattaaatatctttaaaagtaaatttctcatcttgttcg

SEQ ID NO: 58015 - DNA, 5836 bp, Homo sapiens
  misc_feature (1410)..(1411): n is a, c, g, or t
  misc_feature (1525)..(1525): n is a, c, g, or t
  misc_feature (1543)..(1543): n is a, c, g, or t
  misc_feature (1743)..(1743): n is a, c, g, or t
  misc_feature (1758)..(1758): n is a, c, g, or t
  misc_feature (1771)..(1772): n is a, c, g, or t
  misc_feature (5836)..(5836): n is a, c, g, or t
cagagaagagtgtccagctcctccagaggctgcccgcccgccgctccttccctgcccacctactatgaggagcagctcctcccacctgcccataaaagccaagtgcatgttaccagcagcggatcacagcccttccccgatcctctccgtgggagccagcgagcctctctccctgatcttacgtgctcaagggagctcacacgttcaccaactcacccttgaagtcatctcaagaacaaaagacaactgaaagaagctgttgtgaaggcagagcagcatctgctgaagagacagaaaccagccccagaggtgtcacaggaaggcaccagcaaggacattggtctttgatttgattcagcagtcctgtcaagtataaatgtgatggctgtgctgcctggccctctgcagctgctgggagtgctgcttaccatttccctgagttccatcaggctcattcaggctggtgcctactatgggatcaagccgctgccacctcaaattcctcctcagatgccaccacaaattccacaataccagcccctgggtcagcaagtacctcacatgcctttggccaaagatggccttgccatgggcaaggagatgccccacttgcagtatggcaaagagtatccacacctaccccaatatatgaaggaaattcaaccggcgccaagaatgggcaaggaagccgtacccaagaaaggcaaagaaataccattagccagtttacgaggggaacaaggtccccgtggagagcctggcccaagaggaccacctgggccccctggtttgccaggtcatgggatacctggaattaaaggaaaaccagggccacagggatatccaggagttggaaagccaggtatgcctggaatgccagggaagccaggagccatgggcatgcctggggcaaaaggagaaattggacagaaaggggaaattgggcctatggggatcccaggaccacaaggacctccagggcctcatggacttcctggcattgggaagccaggtgggccagggttaccagggcaaccaggaccaaagggtgatcgaggacccaaaggactaccaggacctcaaggccttcggggtcctaaaggagacaagggcttcgggatgccaggtgcgccaggtgtaaaggggcctccagggatgcacggccctcccggccctgttggactgccaggagtgggcaaaccaggagtgacaggcttccctgggccccagggccccctgggaaagccaggggctccaggagaacctgggccacaaggccctattggggtaccgggggttcaaggacctcctgggatacccggaattggaaagccaggccaggatgggatcccaggccagccaggatttccaggtggcaaaggggagcaaggactgccagggctaccaggnnccccaggccttccagggattgggaaaccaggcttcccaggacccaaaggtgaccggggcatgggaggtgttcctggggctcttggaccaagaggggagaaaggaccaataggtnccccaggaatagggggtnctccaggagagccaggcctgcctggaatcccaggtcctatgggccctccaggtgctattggttttcctggacccaaaggagaaggtgggattgtagggccacaggggccaccaggtcccaagggtgagccagggcttcaaggcttcccaggaaagccaggtttccttggtgaagtagggcctcctggcatgaggggtttnccaggtcccataggncccaagggggaanntgggcaaaaaggtgtaccaggactccctggtgttccagggcttctcggacctaagggagagccaggaatcccaggggatcagggtttacagggccccccaggtatcccagggattgggggccctagtggccccattggaccacctgggattccaggccccaaaggggagccgggcctcccagggccccctgggttccctggtatagggaaacccggagtggcaggacttcatggccccccagggaagcctggtgcccttggtcctcaaggccagcctggccttccaggacccccaggccctccaggacctccaggacccccagctgtgatgccccctacaccaccaccccagggagagtatctgccagatatggggctgggaattgatggcgtgaaacccccccatgcctacggggctaagaaaggcaagaatggagggccagcctatgagatgcctgcatttaccgccgagctaaccgcacctttcccaccggtgggggccccagtgaagtttaacaaactgctgtataacggcagacagaactacaacccgcagacaggcatcttcacctgtgaggtccctggtgtctactactttgcataccacgttcactgcaaggggggcaacgtgtgggttgctctattcaagaacaacgagcccgtgatgtacacgtacgacgagtacaaaaagggcttcctggaccaggcatctgggagtgcagtgctgctgctcaggcccggagaccgggtgttcctccagatgccctcagaacaggctgcaggactgtatgccgggcagtatgtccactcctccttttcaggatatttattgtatcccatgtaaaaacaaaaaaacaaaaaacaaagaaaagaaagagattttatagaagaaaatgacacaccaaaaaatccaaatgaaaaacataattgcttcaaaacacttacacagttggaaagttatatgtaagtgaaaatttggaccattgtgtacaaataaaaactaagatgcatgtttaatactccacacagcagcctgtaattgcgaatgatgggatagagttatgtatcaagtactgacacttggttgtacccactggaatcatattagctgttttatgttatatgcttccacagtaacctgcttattcagatcagtcaaaatatatcagtatgaaagatcatagctaatgaaaggcactcactcatattgtttactttaaaatatttataaatatgccttaaagaaatacaaatgataacaattacataccgtatttacttgcttaatttcctctgtatttgtgtagatactttgacatggaatatatggtggggagacccgtagtgttaccgccccagtgggagggggccctggggaccctggtaatgctttagtcaaagggatatctctcttgtatcagaggctgtgtcttttagtaacaggagtcctcgtcagaattgcgtgtctgttgtctctaaaagaatgggtgaaccaatcggcctttgtgaatttattcagtgccttctctgtaccaagcactgggtaaggcacttttgtggagcattagacagtaaccctcaaggagctagagaaccggatgggagacatgagcggtaattaactcacttgttccccagagtttctatttgttttgattttctttttctgtgacttattttcctattttctttcctccatgtaattttcactatggcccaactaatataaacacctggaaattacaaggaaaaaaaattcttcctctaataactttccaaatttgtggaatatttatttgtaatagcagttatcagttatgcttatatagcattaaaaattctcctcctttgactacacacacaaccacagtgtggttctaatcatggagatatcagtaatttttagtaactgaattttgaggacatttctctgtttagcatgtatgcaaactgatatgtaatctgaggttccaaagtcaattttttcttttttttttgagatggagtcttactctgtcacccaggctggagtgcagtagcacgatcttggcttactgcaacctctacctcctaggttcaagcaattgtcctgtctcagcctcccgagtactgggactactgtcttgcgccaccatgcctggctaatttttgtatatttagtaaagatgggttttcgccatgttggccaggctggtctcaaactcctggcctcaagtgatgcacctgcctcagccttccaaagtgctgggattacaggcatgagccaccgtgcccggccaaagtcagctttcaaaatccaagccataattggtgaggggggagtttcagaattacatagaaaaattaatatttgaaaaaataattctgaaatttcgaatttaaaaacagatgtgctgcttctgggtgtaggtagtaaaagtataggaaaagaactgtttccttagaagcggactgtggaagggctatgtagaatgtcaaagggcaacaagagcctgtgtttttaatgtcatcctgtactcggcacaaatcaaaggccaatacaagtctgaaaagcagaaataaatatttttccaggtttttgcttgggcacatactaactgctttgggcattctaatctggtctccaaacaccaaagacccatttcgagcctgctattagcctgctgctgactctatcacttggagcaataatgtggggttatggtggtggaatcttgtatatttttgtcaaaaataaaaccttgagttaaggggatagatatagatggaaaaatacacaaataaatacggtatgaaaacacatggaaatgtgtctttgtcaaatatgaatcattattaccatcacaaaaattcttctcttggccaatatctcatttccctatatagtatacaagcaccatttcttctcaatttttaagaagagaaattagtccattaccacaggggttcttgtcactactaattatacaacaatcttttcccaacaaaaagatgtcctccacaacctttgttttcaaagcagacagcatctatgtggccaaatatactttgggttgttcttgaggatactggttttgggctgatgactatggtgggcagcatggatccattgggctccttctgctaaacagccacattgaaatggtttaaaagcaagtcagatcaggtgatttgtaaaattgtatttatctgtacatgtatgggcttttaattcccaccaagaaagagagaaattatctttttagttaaaaccaaatttcacttttcaaaatatcttccaacttatttattggttgtcactcaattgcctatatatatatatatatgtgtgtgtgtgtgtgtgcgcgtgagcgcacgtgtgtgtatgcgtgcgcatgtgtgtgtatgtgtattatcagacataggtttctaacttttagatagaagaggagcaacatctatgccaaatactgtgcattctacaatggtgctaatctcagacctaaatgatactccatttaatttaaaaaagagttttaaataattatctatgtgcctgtatttcccttttgagtgctgcacaacatgttaacatattagtgtaaaagcagatgaaacaaccacgtgttctaaagtctagggattgtgctataatccctatttagttcaaaattaaccagaattcttccatgtgaaatggaccaaactcatattattgttatgtaaatacagagttttaatgcagtatgacatcccacaggggaaaagaatgtctgtagtgggtgactgttatcaaatattttatagaatacaatgaacggtgaacagactggtaacttgtttgagttcccatgacagatttgagacttgtcaatagcaaattatctgttttcaattttgtctggttgaaactcttattttcaattacaaaaaaaggggggttaaattccggggcaattcgttcagtttgtaggggcatagaggataaaagagggggtaactgtggaagtcgttgaaacttctgggtatgacacaaggatattgtggccttggttattttataggagtgtgtatatttatattcn

SEQ ID NO: 58016 - DNA, 2965 bp, Homo sapiens
cagagaagagtgtccagctcctccagaggctgcccgcccgccgctccttccctgcccacctactatgaggagcagctcctcccacctgcccataaaagccaagtgcatgttaccagcagcggatcacagcccttccccgatcctctccgtgggagccagcgagcctctctccctgatcttacgtgctcaagggagctcacacgttcaccaactcacccttgaagtcatctcaagaacaaaagacaactgaaagacgtttccatacagttcctcgctcagaacagcttcagctgtctatgggaaggcttcacaagacaaagagctaggacttggccatttacacaaaaccaaaagtgaattacccagagtgtgctggcagagagacttgaatgtaaggacatgggaaaatctacacaggttgccaatggtttgtgactgtgagaaaagaaaagaaaaattaaagaaaatcttactagcataattcacattggacaacatgagcacattccagtcaatccactttatagacatgatctcactggtctccccaacatccctacaaggaaatgagggggaccagtatggctccacccttaggtcaaaagcccatccttcactcccacttgtggctgtgagtgggtggaacacatttaaacaggggaacaaattaccatcttccttgcttttgaccctttaacatgcgggtgagcaagtctgccttttccctgcttgaggccatacaattcccaaaacaacttgtctgaaatgttgggggctgagtcattggccagtgatagttttcaaacaactgctggtttgtttctcaaccactgcttggccatgctgacttggacacaatacagcatgtaataaaagtgcctgggatattttcctccttggcccagagaagacttttagaaggaaagacaatggtgaatacggaaggggagatgaatgcactagaaagatatgttgccagcattgtgctcagccgaagagaagctttgagaccaagaaatgtgagcatattgggcatctagaagttctcccagatagtagcgtagatctccatttttctgggttgtttattgttgttgtttgttgttgtcattttctgcactatgctgcctctcaagactcccttatgtgtgctataaaaaaaaatccatgacagaatggtctattctccacaaaaatagttactattgttgttgaggtgttactaatagttactagtagttacaaaaatagttactaatgttgttgaggtgaagtcaatgggaaagatagtagtaaaatagcaaaaatgtattagatagtatttttcacattgggaatataagacaattcattcaaaaaccaactccttaggattcattttattatcttacacttaaaaatatgtttagatttttctttcttgcactagaaattaaattgtcctatatattgagggatgaaaagcacagatgattatccgtataaatattgacacacatactcactctatccacatagctatctgttatggataaagaactcggcaacttctagcagtcatctgagatgagcaccatatgtgcattatttcactaaagctttcagagcttgagaaaaatagcctgaagaataagattgtttctttctgagccaaggttgcaatcttccaagtccaagatgtgcttgaaaatactcattaggtaattgtcaaagcctaggaagaccagtttaagaatatgaaataatattactactgacttctctttttgtgttcaatccagatggaagctggacacatgagaagtgacgtttgtataatagcaaagaaaagaacagagaacaagaaagcaaaacccttcacacctatgttctctttataggatctcattactgtttgctctctataatccccagaaaatagaaaaagtatatctatccaataagttgtggaaagtctccctctgtccttctataatagagtttccagtcattgttagacaactgcatttcattcaccaatagtggcctattgaaatcatcaacaggagaaacagttgttaatatcaaataaagagtcttgcaatggaagtcaaaatactttactctttcactaacttggtgtatgatcttgagcaagtcatttaacctctctaagtttgcttgcctcatctgtcaaacaagagagatgagataaattatctccacaggcattttcagaactattctagtctttttggaaattggtttatatttgtagaaaaggttcaatctgtttctggcatggcagtgaccaagtcagaatttctatttgggagatgagaaaaacacattaacaagattaattactgtagctgaaagatacataaatatggattggggtgtatttttaataccacaaaaacttccattcctgagttacttcattagcaactgttacttcaaccatctaggttgaggttttccagtaattctaggtcagcaattatggaccctacttattttcttttttttattatactttaagttctagggtacatgtgcacaatgtgcaggtctgttacatatgtatacatgtgccatgttggtgtgctgcacccattaactcatcatttacattaggtatatctcctaatgctatccctcccacctcccccaaccccatgacaggccccggtgtgtgacgttccccttcctgtgtccaagtgttctcattgttcaattcccacctatgagtgagaacaggcggtgtttggttttctgtctttgcgatagtttgctcagaatgatggtttccagcttcatctatgtccctacaaaggacatgaactcattcttttttatggctgcatagtattccatggtgtatatgtgccacattttcttaatccagtctaccattgatggacatttgggttggttccaagtctttgctattgtgaatagtgccgcaataaacatacatgtg

SEQ ID NO: 58017 - DNA, 5712 bp, Homo sapiens
  misc_feature (1410)..(1411): n is a, c, g, or t
  misc_feature (1525)..(1525): n is a, c, g, or t
  misc_feature (1543)..(1543): n is a, c, g, or t
  misc_feature (1743)..(1743): n is a, c, g, or t
  misc_feature (1758)..(1758): n is a, c, g, or t
  misc_feature (1771)..(1772): n is a, c, g, or t
cagagaagagtgtccagctcctccagaggctgcccgcccgccgctccttccctgcccacctactatgaggagcagctcctcccacctgcccataaaagccaagtgcatgttaccagcagcggatcacagcccttccccgatcctctccgtgggagccagcgagcctctctccctgatcttacgtgctcaagggagctcacacgttcaccaactcacccttgaagtcatctcaagaacaaaagacaactgaaagaagctgttgtgaaggcagagcagcatctgctgaagagacagaaaccagccccagaggtgtcacaggaaggcaccagcaaggacattggtctttgatttgattcagcagtcctgtcaagtataaatgtgatggctgtgctgcctggccctctgcagctgctgggagtgctgcttaccatttccctgagttccatcaggctcattcaggctggtgcctactatgggatcaagccgctgccacctcaaattcctcctcagatgccaccacaaattccacaataccagcccctgggtcagcaagtacctcacatgcctttggccaaagatggccttgccatgggcaaggagatgccccacttgcagtatggcaaagagtatccacacctaccccaatatatgaaggaaattcaaccggcgccaagaatgggcaaggaagccgtacccaagaaaggcaaagaaataccattagccagtttacgaggggaacaaggtccccgtggagagcctggcccaagaggaccacctgggccccctggtttgccaggtcatgggatacctggaattaaaggaaaaccagggccacagggatatccaggagttggaaagccaggtatgcctggaatgccagggaagccaggagccatgggcatgcctggggcaaaaggagaaattggacagaaaggggaaattgggcctatggggatcccaggaccacaaggacctccagggcctcatggacttcctggcattgggaagccaggtgggccagggttaccagggcaaccaggaccaaagggtgatcgaggacccaaaggactaccaggacctcaaggccttcggggtcctaaaggagacaagggcttcgggatgccaggtgcgccaggtgtaaaggggcctccagggatgcacggccctcccggccctgttggactgccaggagtgggcaaaccaggagtgacaggcttccctgggccccagggccccctgggaaagccaggggctccaggagaacctgggccacaaggccctattggggtaccgggggttcaaggacctcctgggatacccggaattggaaagccaggccaggatgggatcccaggccagccaggatttccaggtggcaaaggggagcaaggactgccagggctaccaggnnccccaggccttccagggattgggaaaccaggcttcccaggacccaaaggtgaccggggcatgggaggtgttcctggggctcttggaccaagaggggagaaaggaccaataggtnccccaggaatagggggtnctccaggagagccaggcctgcctggaatcccaggtcctatgggccctccaggtgctattggttttcctggacccaaaggagaaggtgggattgtagggccacaggggccaccaggtcccaagggtgagccagggcttcaaggcttcccaggaaagccaggtttccttggtgaagtagggcctcctggcatgaggggtttnccaggtcccataggncccaagggggaanntgggcaaaaaggtgtaccaggactccctggtgttccagggcttctcggacctaagggagagccaggaatcccaggggatcagggtttacagggccccccaggtatcccagggattgggggccctagtggccccattggaccacctgggattccaggccccaaaggggagccgggcctcccagggccccctgggttccctggtatagggaaacccggagtggcaggacttcatggccccccagggaagcctggtgcccttggtcctcaaggccagcctggccttccaggacccccaggccctccaggacctccaggacccccagctgtgatgccccctacaccaccaccccagggagagtatctgccagatatggggctgggaattgatggcgtgaaacccccccatgcctacggggctaagaaaggcaagaatggagggccagcctatgagatgcctgcatttaccgccgagctaaccgcacctttcccaccggtgggggccccagtgaagtttaacaaactgctgtataacggcagacagaactacaacccgcagacaggcatcttcacctgtgaggtccctggtgtctactactttgcataccacgttcactgcaaggggggcaacgtgtgggttgctctattcaagaacaacgagcccgtgatgtacacgtacgacgagtacaaaaagggcttcctggaccaggcatctgggagtgcagtgctgctgctcaggcccggagaccgggtgttcctccagatgccctcagaacaggctgcaggactgtatgccgggcagtatgtccactcctccttttcaggatatttattgtatcccatgtaaaaacaaaaaaacaaaaaacaaagaaaagaaagagattttatagaagaaaatgacacaccaaaaaatccaaatgaaaaacataattgcttcaaaacacttacacagttggaaagttatatgtaagtgaaaatttggaccattgtgtacaaataaaaactaagatgcatgtttaatactccacacagcagcctgtaattgcgaatgatgggatagagttatgtatcaagtactgacacttggttgtacccactggaatcatattagctgttttatgttatatgcttccacagtaacctgcttattcagatcagtcaaaatatatcagtatgaaagatcatagctaatgaaaggcactcactcatattgtttactttaaaatatttataaatatgccttaaagaaatacaaatgataacaattacataccgtatttacttgcttaatttcctctgtatttgtgtagatactttgacatggaatatatggtggggagacccgtagtgttaccgccccagtgggagggggccctggggaccctggtaatgctttagtcaaagggatatctctcttgtatcagaggctgtgtcttttagtaacaggagtcctcgtcagaattgcgtgtctgttgtctctaaaagaatgggtgaaccaatcggcctttgtgaatttattcagtgccttctctgtaccaagcactgggtaaggcacttttgtggagcattagacagtaaccctcaaggagctagagaaccggatgggagacatgagcggtaattaactcacttgttccccagagtttctatttgttttgattttctttttctgtgacttattttcctattttctttcctccatgtaattttcactatggcccaactaatataaacacctggaaattacaaggaaaaaaaattcttcctctaataactttccaaatttgtggaatatttatttgtaatagcagttatcagttatgcttatatagcattaaaaattctcctcctttgactacacacacaaccacagtgtggttctaatcatggagatatcagtaatttttagtaactgaattttgaggacatttctctgtttagcatgtatgcaaactgatatgtaatctgaggttccaaagtcaattttttcttttttttttgagatggagtcttactctgtcacccaggctggagtgcagtagcacgatcttggcttactgcaacctctacctcctaggttcaagcaattgtcctgtctcagcctcccgagtactgggactactgtcttgcgccaccatgcctggctaatttttgtatatttagtaaagatgggttttcgccatgttggccaggctggtctcaaactcctggcctcaagtgatgcacctgcctcagccttccaaagtgctgggattacaggcatgagccaccgtgcccggccaaagtcagctttcaaaatccaagccataattggtgaggggggagtttcagaattacatagaaaaattaatatttgaaaaaataattctgaaatttcgaatttaaaaacagatgtgctgcttctgggtgtaggtagtaaaagtataggaaaagaactgtttccttagaagcggactgtggaagggctatgtagaatgtcaaagggcaacaagagcctgtgtttttaatgtcatcctgtactcggcacaaatcaaaggccaatacaagtctgaaaagcagaaataaatatttttccaggtttttgcttgggcacatactaactgctttgggcattctaatctggtctccaaacaccaaagacccatttcgagcctgctattagcctgctgctgactctatcacttggagcaataatgtggggttatggtggtggaatcttgtatatttttgtcaaaaataaaaccttgagttaaggggatagatatagatggaaaaatacacaaataaatacggtatgaaaacacatggaaatgtgtctttgtcaaatatgaatcattattaccatcacaaaaattcttctcttggccaatatctcatttccctatatagtatacaagcaccatttcttctcaatttttaagaagagaaattagtccattaccacaggggttcttgtcactactaattatacaacaatcttttcccaacaaaaagatgtcctccacaacctttgttttcaaagcagacagcatctatgtggccaaatatactttgggttgttcttgaggatactggttttgggctgatgactatggtgggcagcatggatccattgggctccttctgctaaacagccacattgaaatggtttaaaagcaagtcagatcaggtgatttgtaaaattgtatttatctgtacatgtatgggcttttaattcccaccaagaaagagagaaattatctttttagttaaaaccaaatttcacttttcaaaatatcttccaacttatttattggttgtcactcaattgcctatatatatatatatatgtgtgtgtgtgtgtgtgcgcgtgagcgcacgtgtgtgtatgcgtgcgcatgtgtgtgtatgtgtattatcagacataggtttctaacttttagatagaagaggagcaacatctatgccaaatactgtgcattctacaatggtgctaatctcagacctaaatgatactccatttaatttaaaaaagagttttaaataattatctatgtgcctgtatttcccttttgagtgctgcacaacatgttaacatattagtgtaaaagcagatgaaacaaccacgtgttctaaagtctagggattgtgctataatccctatttagttcaaaattaaccagaattcttccatgtgaaatggaccaaactcatattattgttatgtaaatacagagttttaatgcagtatgacatcccacaggggaaaagaatgtctgtagtgggtgactgttatcaaatattttatagaatacaatgaacggtgaacagactggtaacttgtttgagttcccatgacagatttgagacttgtcaatagcaaatcatttttgtatttaaatttttgtactgatttgaaaaacatcattaaatatctttaaaagtaaatttctcatcttgttcg

SEQ ID NO: 58018 - DNA, 5563 bp, Homo sapiens
  misc_feature (1261)..(1262): n is a, c, g, or t
  misc_feature (1376)..(1376): n is a, c, g, or t
  misc_feature (1394)..(1394): n is a, c, g, or t
  misc_feature (1594)..(1594): n is a, c, g, or t
  misc_feature (1609)..(1609): n is a, c, g, or t
  misc_feature (1622)..(1623): n is a, c, g, or t
ggaactaaggacagaaaagtgaaatgcagtatggtgaagaggataccctgaatatgtatgaagacatgctgttgtgagacggagttgtgaaacagaggccacagaagctgttgtgaaggcagagcagcatctgctgaagagacagaaaccagccccagaggtgtcacaggaaggcaccagcaaggacattggtctttgatttgattcagcagtcctgtcaagtataaatgtgatggctgtgctgcctggccctctgcagctgctgggagtgctgcttaccatttccctgagttccatcaggctcattcaggctggtgcctactatgggatcaagccgctgccacctcaaattcctcctcagatgccaccacaaattccacaataccagcccctgggtcagcaagtacctcacatgcctttggccaaagatggccttgccatgggcaaggagatgccccacttgcagtatggcaaagagtatccacacctaccccaatatatgaaggaaattcaaccggcgccaagaatgggcaaggaagccgtacccaagaaaggcaaagaaataccattagccagtttacgaggggaacaaggtccccgtggagagcctggcccaagaggaccacctgggccccctggtttgccaggtcatgggatacctggaattaaaggaaaaccagggccacagggatatccaggagttggaaagccaggtatgcctggaatgccagggaagccaggagccatgggcatgcctggggcaaaaggagaaattggacagaaaggggaaattgggcctatggggatcccaggaccacaaggacctccagggcctcatggacttcctggcattgggaagccaggtgggccagggttaccagggcaaccaggaccaaagggtgatcgaggacccaaaggactaccaggacctcaaggccttcggggtcctaaaggagacaagggcttcgggatgccaggtgcgccaggtgtaaaggggcctccagggatgcacggccctcccggccctgttggactgccaggagtgggcaaaccaggagtgacaggcttccctgggccccagggccccctgggaaagccaggggctccaggagaacctgggccacaaggccctattggggtaccgggggttcaaggacctcctgggatacccggaattggaaagccaggccaggatgggatcccaggccagccaggatttccaggtggcaaaggggagcaaggactgccagggctaccaggnnccccaggccttccagggattgggaaaccaggcttcccaggacccaaaggtgaccggggcatgggaggtgttcctggggctcttggaccaagaggggagaaaggaccaataggtnccccaggaatagggggtnctccaggagagccaggcctgcctggaatcccaggtcctatgggccctccaggtgctattggttttcctggacccaaaggagaaggtgggattgtagggccacaggggccaccaggtcccaagggtgagccagggcttcaaggcttcccaggaaagccaggtttccttggtgaagtagggcctcctggcatgaggggtttnccaggtcccataggncccaagggggaanntgggcaaaaaggtgtaccaggactccctggtgttccagggcttctcggacctaagggagagccaggaatcccaggggatcagggtttacagggccccccaggtatcccagggattgggggccctagtggccccattggaccacctgggattccaggccccaaaggggagccgggcctcccagggccccctgggttccctggtatagggaaacccggagtggcaggacttcatggccccccagggaagcctggtgcccttggtcctcaaggccagcctggccttccaggacccccaggccctccaggacctccaggacccccagctgtgatgccccctacaccaccaccccagggagagtatctgccagatatggggctgggaattgatggcgtgaaacccccccatgcctacggggctaagaaaggcaagaatggagggccagcctatgagatgcctgcatttaccgccgagctaaccgcacctttcccaccggtgggggccccagtgaagtttaacaaactgctgtataacggcagacagaactacaacccgcagacaggcatcttcacctgtgaggtccctggtgtctactactttgcataccacgttcactgcaaggggggcaacgtgtgggttgctctattcaagaacaacgagcccgtgatgtacacgtacgacgagtacaaaaagggcttcctggaccaggcatctgggagtgcagtgctgctgctcaggcccggagaccgggtgttcctccagatgccctcagaacaggctgcaggactgtatgccgggcagtatgtccactcctccttttcaggatatttattgtatcccatgtaaaaacaaaaaaacaaaaaacaaagaaaagaaagagattttatagaagaaaatgacacaccaaaaaatccaaatgaaaaacataattgcttcaaaacacttacacagttggaaagttatatgtaagtgaaaatttggaccattgtgtacaaataaaaactaagatgcatgtttaatactccacacagcagcctgtaattgcgaatgatgggatagagttatgtatcaagtactgacacttggttgtacccactggaatcatattagctgttttatgttatatgcttccacagtaacctgcttattcagatcagtcaaaatatatcagtatgaaagatcatagctaatgaaaggcactcactcatattgtttactttaaaatatttataaatatgccttaaagaaatacaaatgataacaattacataccgtatttacttgcttaatttcctctgtatttgtgtagatactttgacatggaatatatggtggggagacccgtagtgttaccgccccagtgggagggggccctggggaccctggtaatgctttagtcaaagggatatctctcttgtatcagaggctgtgtcttttagtaacaggagtcctcgtcagaattgcgtgtctgttgtctctaaaagaatgggtgaaccaatcggcctttgtgaatttattcagtgccttctctgtaccaagcactgggtaaggcacttttgtggagcattagacagtaaccctcaaggagctagagaaccggatgggagacatgagcggtaattaactcacttgttccccagagtttctatttgttttgattttctttttctgtgacttattttcctattttctttcctccatgtaattttcactatggcccaactaatataaacacctggaaattacaaggaaaaaaaattcttcctctaataactttccaaatttgtggaatatttatttgtaatagcagttatcagttatgcttatatagcattaaaaattctcctcctttgactacacacacaaccacagtgtggttctaatcatggagatatcagtaatttttagtaactgaattttgaggacatttctctgtttagcatgtatgcaaactgatatgtaatctgaggttccaaagtcaattttttcttttttttttgagatggagtcttactctgtcacccaggctggagtgcagtagcacgatcttggcttactgcaacctctacctcctaggttcaagcaattgtcctgtctcagcctcccgagtactgggactactgtcttgcgccaccatgcctggctaatttttgtatatttagtaaagatgggttttcgccatgttggccaggctggtctcaaactcctggcctcaagtgatgcacctgcctcagccttccaaagtgctgggattacaggcatgagccaccgtgcccggccaaagtcagctttcaaaatccaagccataattggtgaggggggagtttcagaattacatagaaaaattaatatttgaaaaaataattctgaaatttcgaatttaaaaacagatgtgctgcttctgggtgtaggtagtaaaagtataggaaaagaactgtttccttagaagcggactgtggaagggctatgtagaatgtcaaagggcaacaagagcctgtgtttttaatgtcatcctgtactcggcacaaatcaaaggccaatacaagtctgaaaagcagaaataaatatttttccaggtttttgcttgggcacatactaactgctttgggcattctaatctggtctccaaacaccaaagacccatttcgagcctgctattagcctgctgctgactctatcacttggagcaataatgtggggttatggtggtggaatcttgtatatttttgtcaaaaataaaaccttgagttaaggggatagatatagatggaaaaatacacaaataaatacggtatgaaaacacatggaaatgtgtctttgtcaaatatgaatcattattaccatcacaaaaattcttctcttggccaatatctcatttccctatatagtatacaagcaccatttcttctcaatttttaagaagagaaattagtccattaccacaggggttcttgtcactactaattatacaacaatcttttcccaacaaaaagatgtcctccacaacctttgttttcaaagcagacagcatctatgtggccaaatatactttgggttgttcttgaggatactggttttgggctgatgactatggtgggcagcatggatccattgggctccttctgctaaacagccacattgaaatggtttaaaagcaagtcagatcaggtgatttgtaaaattgtatttatctgtacatgtatgggcttttaattcccaccaagaaagagagaaattatctttttagttaaaaccaaatttcacttttcaaaatatcttccaacttatttattggttgtcactcaattgcctatatatatatatatatgtgtgtgtgtgtgtgtgcgcgtgagcgcacgtgtgtgtatgcgtgcgcatgtgtgtgtatgtgtattatcagacataggtttctaacttttagatagaagaggagcaacatctatgccaaatactgtgcattctacaatggtgctaatctcagacctaaatgatactccatttaatttaaaaaagagttttaaataattatctatgtgcctgtatttcccttttgagtgctgcacaacatgttaacatattagtgtaaaagcagatgaaacaaccacgtgttctaaagtctagggattgtgctataatccctatttagttcaaaattaaccagaattcttccatgtgaaatggaccaaactcatattattgttatgtaaatacagagttttaatgcagtatgacatcccacaggggaaaagaatgtctgtagtgggtgactgttatcaaatattttatagaatacaatgaacggtgaacagactggtaacttgtttgagttcccatgacagatttgagacttgtcaatagcaaatcatttttgtatttaaatttttgtactgatttgaaaaacatcattaaatatctttaaaagtaaatttctcatcttgttcg

SEQ ID NO: 58019 - DNA, 3402 bp, Homo sapiens
ggcacgagctccaggtgaagatgcctgtctgcgggttgtagttctgtctgccgttatacagcagtttgttaaacttcactggggggcaacgtgtgggttgctctattcaagaacaacgagcccgtgatgtacacgtacgacgagtacaaaaagggcttcctggaccaggcatctgggagtgcagtgctgctgctcaggcccggagaccgggtgttcctccagatgccctcagaacaggctgcaggactgtatgccgggcagtatgtccactcctccttttcaggatatttattgtatcccatgtaaaaacaaaaaaacaaaaaacaaagaaaagaaagagattttatagaagaaaatgacacaccaaaaaatccaaatgaaaaacataattgcttcaaaacacttacacagttggaaagttatatgtaagtgaaaatttggaccattgtgtacaaataaaaactaagatgcatgtttaatactccacacagcagcctgtaattgcgaatgatgggatagagttatgtatcaagtactgacacttggttgtacccactggaatcatattagctgttttatgttatatgcttccacagtaacctgcttattcagatcagtcaaaatatatcagtatgaaagatcatagctaatgaaaggcactcactcatattgtttactttaaaatatttataaatatgccttaaagaaatacaaatgataacaattacataccgtatttacttgcttaatttcctctgtatttgtgtagatactttgacatggaatatatggtggggagacccgtagtgttaccgccccagtgggagggggccctggggaccctggtaatgctttagtcaaagggatatctctcttgtatcagaggctgtgtcttttagtaacaggagtcctcgtcagaattgcgtgtctgttgtctctaaaagaatgggtgaaccaatcggcctttgtgaatttattcagtgccttctctgtaccaagcactgggtaaggcacttttgtggagcattagacagtaaccctcaaggagctagagaaccggatgggagacatgagcggtaattaactcacttgttccccagagtttctatttgttttgattttctttttctgtgacttattttcctattttctttcctccatgtaattttcactatggcccaactaatataaacacctggaaattacaaggaaaaaaaattcttcctctaataactttccaaatttgtggaatatttatttgtaatagcagttatcagttatgcttatatagcattaaaaattctcctcctttgactacacacacaaccacagtgtggttctaatcatggagatatcagtaatttttagtaactgaattttgaggacatttctctgtttagcatgtatgcaaactgatatgtaatctgaggttccaaagtcaattttttcttttttttttgagatggagtcttactctgtcacccaggctggagtgcagtagcacgatcttggcttactgcaacctctacctcctaggttcaagcaattgtcctgtctcagcctcccgagtactgggactactgtcttgcgccaccatgcctggctaatttttgtatatttagtaaagatgggttttcgccatgttggccaggctggtctcaaactcctggcctcaagtgatgcacctgcctcagccttccaaagtgctgggattacaggcatgagccaccgtgcccggccaaagtcagctttcaaaatccaagccataattggtgaggggggagtttcagaattacatagaaaaattaatatttgaaaaaataattctgaaatttcgaatttaaaaacagatgtgctgcttctgggtgtaggtagtaaaagtataggaaaagaactgtttccttagaagcggactgtggaagggctatgtagaatgtcaaagggcaacaagagcctgtgtttttaatgtcatcctgtactcggcacaaatcaaaggccaatacaagtctgaaaagcagaaataaatatttttccaggtttttgcttgggcacatactaactgctttgggcattctaatctggtctccaaacaccaaagacccatttcgagcctgctattagcctgctgctgactctatcacttggagcaataatgtggggttatggtggtggaatcttgtatatttttgtcaaaaataaaaccttgagttaaggggatagatatagatggaaaaatacacaaataaatacggtatgaaaacacatggaaatgtgtctttgtcaaatatgaatcattattaccatcacaaaaattcttctcttggccaatatctcatttccctatatagtatacaagcaccatttcttctcaatttttaagaagagaaattagtccattaccacaggggttcttgtcactactaattatacaacaatcttttcccaacaaaaagatgtcctccacaacctttgttttcaaagcagacagcatctatgtggccaaatatactttgggttgttcttgaggatactggttttgggctgatgactatggtgggcagcatggatccattgggctccttctgctaaacagccacattgaaatggtttaaaagcaagtcagatcaggtgatttgtaaaattgtatttatctgtacatgtatgggcttttaattcccaccaagaaagagagaaattatctttttagttaaaaccaaatttcacttttcaaaatatcttccaacttatttattggttgtcactcaattgcctatatatatatatatatgtgtgtgtgtgtgtgtgcgcgtgagcgcacgtgtgtgtatgcgtgcgcatgtgtgtgtatgtgtattatcagacataggtttctaacttttagatagaagaggagcaacatctatgccaaatactgtgcattctacaatggtgctaatctcagacctaaatgatactccatttaatttaaaaaagagttttaaataattatctatgtgcctgtatttcccttttgagtgctgcacaacatgttaacatattagtgtaaaagcagatgaaacaaccacgtgttctaaagtctagggattgtgctataatccctatttagttcaaaattaaccagaattcttccatgtgaaatggaccaaactcatattattgttatgtaaatacagagttttaatgcagtatgacatcccacaggggaaaagaatgtctgtagtgggtgactgttatcaaatattttatagaatacaatgaacggtgaacagactggtaacttgtttgagttcccatgacagatttgagacttgtcaatagcaaatcatttttgtatttaaatttttgtactgatttgaaaaacatcattaaatatctttaaaagtaaatttctcatcttgttcg

SEQ ID NO: 58020 - DNA, 308 bp, Homo sapiens
tagaaagaactttgaaggagagttttgaaaattctgtatataattggtataggaatgtaataagaaaaaaatagaagatgctagaaactaatctgagaatgagagttgaaatatcatccagttattacttttattctgagattacattttcccttttactcctcctttcttgaattttctcctgcccttccttcaatctacctaccttccttccttccttctttccttatcctcctcctccttcctccctcttctctctcctcctcttccttagcctcctcctactactccttcctcctccttcctct

SEQ ID NO: 58021 - DNA, 237 bp, Homo sapiens
  misc_feature (2)..(3): n is a, c, g, or t
  misc_feature (226)..(226): n is a, c, g, or t
  misc_feature (230)..(231): n is a, c, g, or t
  misc_feature (233)..(233): n is a, c, g, or t
  misc_feature (235)..(237): n is a, c, g, or t
cnngtcaagcccagcagaagagataaaggtattagactggtctgtaaatttcaatgcctaaaaatatccaccaagctgtagatcttcccaagatatttttcaggaacgaagcatgtaaacttacatgagtgaaagacagtggtaaaaaaaaaaacagtctattttgggctttggctcctacctaaatctagcttgttcaataaacctgttcattaagttttatgtnaaannanannn

SEQ ID NO: 58022 - DNA, 122 bp, Homo sapiens
gaacactgccttataaaccatcagatctcctgagaactcgctttcactggaacggcttggggaaactgctcccatgatccagtcacctcccacaaggtccctccctcaacatgggggattat

SEQ ID NO: 58023 - DNA, 322 bp, Homo sapiens
tagggaaaaccactacagtgtttttagctagttatcatggagaaattgatgccttcagtctcttatctgtctactctccaatatttctactcgtggacgttccaaatagttcacttgaaagcaatatgaatgtccggagatgagggagtttatgtaaattatggggttgaaaatatacaggaaaatgtttttaataaattaaggaattgcttgttagggcacaaaactgcagaactggatatgcagctataaaattaagagcttatttacgttaaatgttcagagaaaaagactgtaaggaaatacagcaaaatgttaagaa

SEQ ID NO: 58024 - DNA, 471 bp, Homo sapiens
tttttggggatcatactaatattgaaataaatttgcatttctaagcttatattacctgatggtggggagagtacactgatgatgaagaacagtcattcttgcattaaagatttggccttagaaatccgtaaaatgaataatccatttgtagataattaagactagactacactgaatatgttgatagaccaatttcttttcaaaatctgtatggatccaatgtggcctcctaggctgtctgtcttatgtctgagaatgactggcaggtgatgcttgtgttccagccagaatgagccttcattcacagtatctggacgaatgccactacattatgttgtgttgttgaagattaagccggctttctcaaaggacttgtgctttgtagaggctcttccagatatcagcttcattgaaaatctgtcagacttttcctcctgtaggaaagttgtttgaaagtatgtccaattaaaa

SEQ ID NO: 58025 - DNA, 386 bp, Homo sapiens
tgacttgtaggctataggggctataatatatcaagacaatctttatcctcatgaagcttacagttaagtaagagatagagattaaataattataacaacagagtgaagaacagtgaagaaaaagtacagagttataatatatataatagggccaggactgcatgaggaaggtaggaaagacatttcggcaagaggttgtcagggaaaagacttgcttgagaaagagccaagttgtggggtctggctgcttagcaatgaccataatacctaacttttgctatttttacatgaagtaactaatttaaccctatgaggaaagtactactaccatctagattttacaggtaagtaagcagagatacagagaagttaaactcttcacacgg

SEQ ID NO: 58026 - DNA, 731 bp, Homo sapiens
ctaggaaataagctggatataaacatagttgtatctcctttagtgctacccagcactaaaaacttagacacgtatagggctgagcagctggtataatagagtgggctccgtctcattttctaagcctgtgagtcctagctgcctactgcagctcgatttgagtgggagttgatataatgtctttttttttttctcacttcagcagtaagtatctggtttgctcatagtcttttgattaataggtagtttgaatatttttcaaagaatcagccaacatgtgattattttaaagatttaaataccagatagatattaaaatgcaaggttattgctactagatattacatctagctaaatcaaccattgtgaaataattgagaagtagagataataaagacataaaccaataaatctttgcttgaaaatcacaggtatgggaacagattgtgaggacagaaaaataaaaagtaaaaagaaaaatcataggtaataagtgtctaaagggtttcttcataggaacagtggttgttgaccccaaataggacaaataggactcccatgttcaagaacacatcaccgttgttaaaaaggtctgccattattaaatagtgcaatgaagaaccatttagactttattagagtccacgttattggcaaaagatgttggatattcatagaaaatcaaacttgacaaattccaaaagtgtctttcagctctggaacaaaagatg

SEQ ID NO: 58027 - DNA, 377 bp, Homo sapiens
atcatcttcttgacatcataggaacctgttgatcagaggctgtaccagacacttcatcaacatcccacttaatactctgcatgcggctctccaggacagattccctcccactctgcagaggacacaggcttagagagggtgggtgaggaattaaggagctgagctgggttttgaccttgtctgactccaaagcacttgttcttcagactgcgtcttgctggcctctacagctttatgattctgggaaaagtacttacggccacgtttctttggtaagaaacaggtaattgaagaacaaaaatgaattctatatctgctttaggagaactgaaagaggctggaataactgcctttcttactgtaagatttaattatta

SEQ ID NO: 58028 - DNA, 384 bp, Homo sapiens
ccaccaagctccacagaaaattttcttaataaaacaatgggataagtgtgtacatttttaaaaggagcttcaaattaaacatttaacgaagttagaattactgctttccttgaaatgaaaatcacctggcacttgatccgcattcacctggctctatcaggcgctttcagggaagtttccagacgatggaagctcaattatgtgcttcccttgtgaggatatcacattccctctggccaatcccgggagggcctactaatgcctttggggcccagcctacaggtcccccagctaatgagctcccagggctctggaggttctcctgtgtccagcatggctggtacctgtgtcctcccagcagcccctcccttttgctgagcagct

SEQ ID NO: 58029 - DNA, 325 bp, Homo sapiens
gttttcagcatctaagtctttcacctccttggttagatttattcctaagtacttaattatcttagatgctatcgcatgcagatggagttgttttcttaattttcttttctttcctggattattttttatcttagtacctgccactacctaacattttaaatatatttatttgtctctttctgtctcatttactgaataaatcttccataaggtctaaagatttttatttgcttattgccttagtctaggatctgaaaacagtgtcaggcacatggtctagtatgtatttgttgagtgcactaatgatgaaggaacaatttactaa

SEQ ID NO: 58030 - DNA, 273 bp, Homo sapiens
ccgcggggccgattcggtttgccctttgctggcatgtcagtgaattaactgctgtccttgggatgacctgccctatgatttggcctctggagcatcccgggtgtgtatttcagaactcctcccatcttatccacctgctgaaggcctggccccctgatatggtttggctctgtttccccacccaaatctcaccttgaattttaataatccccacgtgtcatgggcgggaccaggtggaggtaattgaatcatggaggtggtttcctgaacgct

SEQ ID NO: 58031 - DNA, 297 bp, Homo sapiens
ccttgggaattgtttcttggaaattaaagcatgtgtctcacacaaacagtagaaggcattgagcattcattagtctttcctcaagaagatatcaaaatgagactagaaactctctggtgaacacagaatgctctgagggggcccaaggtacattatgaccttaaaacgaactccttctccactggccctattactcactgtggaaagcaccatgccaggcacagcaagagacttaagaacacctacaaaggaagatctctgccatccacttgtgtaattatctttaaaaagtaatcc

SEQ ID NO: 58032 - DNA, 3255 bp, Homo sapiens
gaattcggggtgcagtccccgactcgtcccggcccgttcggagccgcccgagagcgcacaaaggccgacggtttgggcgcgtgcgcgggacacgggggacgggcggtgtcacgtgatcgcgaggccgcgggcgcgcgggcgcgactcggcggcttcaacttctttttccacagatcctggtccctacaaataagcctgctcatgtgagataagaaaggagttcctggaaccaggaattcattctcagtgtagaagacctagctgagacctcactccacagttttggggcagaagcagaagagacgcacagtagaaccgatctcagccttgctgatcatctcgtacagcagcagaaaatgaccatgttacaggagtcattctcatttgacgatttatctgtggacttcacccaaaaggagtggcagctactggatccctctcagaagaatttatacaaggatgtgatgttggagaactatagcagcctagtgtcactggggtatgaagttatgaaaccagatgtcatcttcaaattggagcaaggagaagagccgtgggtaggagatggagaaattccaagttcagattctccagaagtctggaaagtagatggtaacatgatgtggcaccaggataaccaagacaagcttaaaattataaaaagaggtcatgaatgtgatgcatttggaaaaaatttcaatctgaacatgaactttgttcctttaaggaaatcaaacagtgaaggtgacttagatggattgattttaaaacatcatttagatttgcttattccaaaaggagattatggaaaagcagaatcagatgactttaatgtgtttgataatttttttctccattccaagcctgaggatactgatacctggttaaaatactatgactgtgataaatataaagagagctataaaaagtcacagattatcatatatcatagaaatcgtttaggggagaaactctatgaatgcagtgaatgtaggaagcgcttcagtaagaaaccaagtctcattaaacatcagagcagacatataagagacatagcctttggctgtggtaattgtggcaaaacctttccccagaagtctcagtttattacacatcacagaactcatacaggagaaaaaccttataattgtagccagtgtgggaaagccttctcccaaaagtcacagctcacatcccatcagcggacacatacaggagagaaaccttatgagtgtggtgaatgtgggaaagccttctcccggaagtcacatctcatatcgcattggagaacacacacaggagagaaaccctatggatgcaatgaatgtgggagggcctttagtgaaaagtccaatctcattaaccatcagagaattcataccggtgagaagccttttgaatgcagggaatgtgggaaagccttcagcaggaagtcacaactcgttacacatcacagaactcacacaggaacaaaaccctttggatgtagtgattgtagaaaagccttctttgagaagtcagagcttattagacatcagacaattcatactggagagaaaccctatgaatgcagcgagtgtaggaaagcatttagagagaggtcgagtctcattaatcatcagagaacacatacaggagagaaacctcatggatgcattcagtgtgggaaggccttctcccagaagtcacatctcatatcacatcagatgacacacacaggagaaaaaccctttatatgcagtaaatgtgggaaagccttcagcaggaaatcacagctcgttagacatcagagaactcatacgggagaaaaaccgtatgaatgcagtgagtgtgggaaagctttcagtgaaaaattaagtctcactaatcatcaaagaattcatacaggagaaaaaccatatgtatgcagtgaatgtgggaaagccttttgtcagaagtcacatctcatatcacatcagaggacacatacaggggagaaaccctatgaatgcagtgaatgtgggaaggcctttggtgagaagtcaagtcttgcaactcatcagagaactcatactggagaaaaaccgtatgaatgcagggactgtgaaaaagctttctcccagaaatcacagctaaatacccatcagagaattcacactggagagaaaccctatgaatgcagtctttgtaggaaagctttttttgagaagtcggagctaattagacatctgagaactcatacaggagaaaaaccttatgaatgcaatgaatgtagaaaagccttcagggagaagtcaagtctcatcaatcatcagagaatacatacaggagagaagccttttgaatgcagtgagtgtggcaaagctttctctcggaagtcacaccttataccacatcaaaggacacatacgggtgagaaaccctatggatgcagtgaatgtaggaaggccttctctcagaagtcacagctggttaatcatcagagaattcatacaggagagaagccttatcgatgcattgaatgtgggaaagctttctcacagaagtcacagctcatcaatcatcagagaactcatacagtaaaaaaatcctaggaatacagttaatagtagtctttgacagatcatcttggacttcaggaaatgcaattatgataacgtttgtagacagtcacgtcatgttaggtgtctgtactccatgaggatgagaactctaaatgaggtggtgtatggaaagccgatcataattcatagagtagagtgaacctatgactgcagtggatctcaaaaacttttaaaaccatagacaagccttatagagtagaacattcacagcaaagaagaatcctgtgaatgtccaaaagccttccagaagtcaagtctcttaagctattagaaatattcccactggggatgagggaaaaccccatgaatgcgggaaatgaggcaatatttttaagaaatgacagttcattgtacataagaaaatgctcttaggaatgaagttctatgaaagtactaaatatgggacagtgcaacaagtaaccagactattttgtattttggagaattcatattatggagaacctaacaatttaaagacactgggaacacttgcccctcagtatagtactgtcaagggaagccatacactttttgtagacatgggtaccaaaaatacccaattctaagtggttgacagatgttcactttgaagtgtgaagttttaaaaatacgtgaataaattggttattgaaacatcaaaaaaagtcgacgt

SEQ ID NO: 58033 - DNA, 773 bp, Homo sapiens
gaattcggggtgcagtccccgactcgtcccggcccgttcggagccgcccgagagcgcacaaaggccgacggtttgggcgcgtgcgcgggacacgggggacgggcggtgtcacgtgatcgcgaggccgcgggcgcgcgggcgcgactcggcggcttcaacttctttttccacagatcctggtccctacaaataagcctgctcatgtgagataagaaaggagttcctggaaccaggaattcattctcagtgtagaagacctagctgagacctcactccacagttttggggcagaagcagaagagacgcacagtagaaccgatctcagccttgctgatcatctcgtacagcagcagaaaatgaccatgttacaggagtcattctcatttgacgatttatctgtggacttcacccaaaaggagtggcagctactggatccctctcagaagaatttatacaaggatgtgatgttggagaactatagcagcctagtgtcactgggtaataaaagctttcttgaggaccttggactatgcccaatgcattgccttttatttttagttgctgggaagtttcagaagcctatagctaggcttctgaaatttttaatgattttagacctgaaacttagatcacagttgcttggactatgacaccaagaaagtatttgggtctcacctttcaataatgaagttgtaagtttgtcatgcagcctctgaaacttaagtagtaatagtttgagcagtagtgatagcacctaatgcatataacttact

SEQ ID NO: 58034 - DNA, 3201 bp, Homo sapiens
gaattcggggtgcagtccccgactcgtcccggcccgttcggagccgcccgagagcgcacaaaggccgacggtttgggcgcgtgcgcgggacacgggggacgggcggtgtcacgtgatcgcgaggccgcgggcgcgcgggcgcgactcggcggcttcaacttctttttccacagatcctggtccctacaaataagcctgctcatgtgagataagaaaggagttcctggaaccaggaattcattctcagtgtagaagacctagctgagacctcactccacagttttggggcagaagcagaagagacgcacagtagaaccgatctcagccttgctgatcatctcgtacagcagcagaaaatgaccatgttacaggagtcattctcatttgacgatttatctgtggacttcacccaaaaggagtggcagctactggatccctctcagaagaatttatacaaggatgtgatgttggagaactatagcagcctagtgtcactggggtatgaagttatgaaaccagatgtcatcttcaaattggagcaaggagaagagccgtgggtaggagatggagaaattccaagttcagattctccagaagtctggaaagtagatggtaacatgatgtggcaccaggataaccaagacaagcttaaaattataaaaagaggtcatgaatgtgatgcatttggaaaaaatttcaatctgaacatgaactttgttcctttaaggaaatcaaacagtgaaggtgacttagatggattgattttaaaacatcatttagatttgcttattccaaaaggagattatggaaaagcagaatcagatgactttaatgtgtttgataatttttttctccattccaagcctgaggatactgatacctggttaaaatactatgactgtgataaatataaagagagctataaaaagtcacagattatcatatatcatagaaatcgtttaggggagaaactctatgaatgcagtgaatgtaggaagcgcttcagtaagaaaccaagtctcattaaacatcagagcagacatataagagacatagcctttggctgtggtaattgtggcaaaacctttccccagaagtctcagtttattacacatcacagaactcatacaggagaaaaaccttataattgtagccagtgtgggaaagccttctcccaaaagtcacagctcacatcccatcagcggacacatacaggagagaaaccttatgagtgtggtgaatgtgggaaagccttctcccggaagtcacatctcatatcgcattggagaacacacacaggagagaaaccctatggatgcaatgaatgtgggagggcctttagtgaaaagtccaatctcattaaccatcagagaattcataccggtgagaagccttttgaatgcagggaatgtgggaaagccttcagcaggaagtcacaactcgttacacatcacagaactcacacaggaacaaaaccctttggatgtagtgattgtagaaaagccttctttgagaagtcagagcttattagacatcagacaattcatactggagagaaaccctatgaatgcagcgagtgtaggaaagcatttagagagaggtcgagtctcattaatcatcagagaacacatacaggagagaaacctcatggatgcattcagtgtgggaaggccttctcccagaagtcacatctcatatcacatcagatgacacacacaggagaaaaaccctttatatgcagtaaatgtgggaaagccttcagcaggaaatcacagctcgttagacatcagagaactcatacgggagaaaaaccgtatgaatgcagtgagtgtgggaaagctttcagtgaaaaattaagtctcactaatcatcaaagaattcatacaggagaaaaaccatatgtatgcagtgaatgtgggaaagccttttgtcagaagtcacatctcatatcacatcagaggacacatacaggggagaaaccctatgaatgcagtgaatgtgggaaggcctttggtgagaagtcaagtcttgcaactcatcagagaactcatactggagaaaaaccgtatgaatgcagggactgtgaaaaagctttctcccagaaatcacagctaaatacccatcagagaattcacactggagagaaaccctatgaatgcagtctttgtaggaaagctttttttgagaagtcggagctaattagacatctgagaactcatacaggagaaaaaccttatgaatgcaatgaatgtagaaaagccttcagggagaagtcaagtctcatcaatcatcagagaatacatacaggagagaagccttttgaatgcagtgagtgtggcaaagctttctctcggaagtcacaccttataccacatcaaaggacacatacgggtgagaaaccctatggatgcagtgaatgtaggaaggccttctctcagaagtcacagctggttaatcatcagagaattcatacaggagagaagccttatcgatgcattgaatgtgggaaagctttctcacagaagtcacagctcatcaatcatcagagaactcatacagtaaaaaaatcctaggaatacagttaatagtagtctttgacagatcatcttggacttcaggaaatgcaattatgataacgtttgtagacagtcacgtcatgttaggtgtctgtactccatgaggatgagaactctaaatgaggtggtgtatggaaagccgatcataattcatagagtagagtgaacctatgactgcagtggatctcaaaaacttttaaaaccatagacaagccttatagagtagaacattcacagcaaagaagaatcctgtgaatgtccaaaagccttccagaagtcaagtctcttaagctattagaaatattcccactggggatgagggaaaaccccatgaatgcgggaaatgaggcaatatttttaagaaatgacagttcattgtacataagaaagtaaccagactattttgtattttggagaattcatattatggagaacctaacaatttaaagacactgggaacacttgcccctcagtatagtactgtcaagggaagccatacactttttgtagacatgggtaccaaaaatacccaattctaagtggttgacagatgttcactttgaagtgtgaagttttaaaaatacgtgaataaattggttattgaaacatcaaaaaaagtcgacgt

SEQ ID NO: 58035 - DNA, 240 bp, Homo sapiens
gcagcctgggcaacaaagcgaaaccctgactcaaaaaaaaaaaaaaaaaaagtctcttaatcacaacagcaaagctccaaaagttcaagcatcacaggtagctagtggctactatataggacagcacagacacagaacgtttccaacatcacacacagttctaatgggtagcaatgacctatactgctgaccatgctgaccaacatgtctgcagcagtccctcatccctctgtcgtcccc

SEQ ID NO: 58036 - DNA, 521 bp, Homo sapiens
caatctagaccttgagactaactgggagacagctggtgctgcagagtcacacactggctctgtgcctccagcaagccgtgtgctctgtctcccctgcttcccgccacatggagtgcagaagggaactcattcattattttaaatacaaaaaaagtaatacatgcttattgtaatagattcatgcaattcagaaaatgtaagaagtgaataacccctagaggtaatagtaacagtttggtgtgtatcctttcagacacagtgatattaatatatgtttgtgtacacatcaatatatacccacctttttaaaaagtaagaatatatttacctattctgctctgtcttttagttacttaatgtcttttcatgtcagtacatagagatctccttccttgttttcagtggtgtgcacgatttctttgtatttagccattagcctgttgatggcaatctcagttgtttctgttttctttattacaaataatgctgtggtctttaccatttgtgtacacctaacttta

SEQ ID NO: 58037 - DNA, 604 bp, Homo sapiens
tatttttcagttcagtttaacaagtttccactatcactgtggatttatgaatttctccttgcaattatgtcagtttttactttatacaaatagaggttgttattaagtgtctacaagtattgctatttttctcagttaatttttttcttattatttagttaccttttatcccaaataatgctttttgccttaaatcaattttatgtgtaaaattgactatagttacatcagctttattttggtatttgcctgctataatttttccatccttttgttttcaacattttggtatctttttaatagtatacagttggattttttttattttatacaggttgataatttctgcttctttttaaaaactagtttagtccattagtatttattgtaattaaaaatagatttagaagagaaaagatttgaacagatttgggacaccaaggaagatatatggatggaataaaagcacttggaaagacgctcaacatcctaagtcattagagaaatacacactaaaaccacaatgagataccactgtgtacctattggaatagcaacaacaaacctgttaatgccaagtgctggtgaagatatgaagacaatg

SEQ ID NO: 58038 - DNA, 448 bp, Homo sapiens
ggctatctgtagaatctagaaagagacatatattcaaattagctatgtcacatcaaaatttggagaagaagtaaaaataaagaaatttaagagatttactccaccaatctcttggtaatttttgtgttcattatcaataagctgtgtgcatccttttagagtgctactgtttgagaaaagcaacattgaagttgctgctgatcttggtcatgcattttcagagcgtgcttatcagcagacttggatgctgttggggttctctttctcatttgcaatttttccaagacaggctttctgttgcccaggctggagtgtgtagctgctgtttctcaatagacaagtcctagaagtagaaataattcaattttcattcactcttagctcttctgccactggtgttcctctttgaccctgacagggctgcacctgtcttccaggcctgatgtag

SEQ ID NO: 58039 - DNA, 1824 bp, Homo sapiens
caagaggcaggaaactgctagaggaagctgccttggagaggattctttcctcccctcccgaaaggagctgaactcaaaatctctccatttcacaatagacattggagaacattttcaacagtggatttgcaccggtgttttgtgtcctagaaaaacgttcccttcaggttcacttgaaccatctggagattggggaacaagggcaatgagttgaacatgtaggaagtttcatggcccagcccctcctgagagccctgaactgccaaccagactgagcccatcagagaataacacctcattttctgaggattctgataccttttcaatcagaaacagaagcaaagattctgcagctcccacagaaactcccagaaaccttgcggtgcttcacccttctgagatccttgagtccgaatgtgggagctaaccaggcacatcttcacaatgaaatcttcacaagctcagaaccatcaacttgctacactgtgttcctccagtgcccagttcacaggaagcactcaagagtaggatcaattgttatcaacctctagcagattattgaatagacggtcgttacatgaaactgacactcagttcttcatggtccacgatagttcttatatccagaaaacgtacttacgttatcaactctgactccataagacaactttgcaaagtcttggctcataactatgtaagcaatgagataacttagttttcatttctcacttgttacttacaagtaaacagccctgcagctcagctgagctacagattaactacaggtaatcacttcagcgattctgctttacccatgcccaagattttaaaaaagaacctgacagatcattaaattttgagatttgctttttaaaatgcaggttccataaagttacgctgttttgcttatatatacagcaacaaatgccttcttagatatttactttaaaattctagtttccttaccatgtattagccagataatctgtcattttttaaattctgaaattgtacatatataaattaatgtacatctctatgcctgaaaggtacatttggaattacaacgtgtgtcaaggtagagcaaaatcccccagtccactccttccaaccccctagaaatttactctgtttggtttcctcttgattgtctttaattaacaataagtatgtcacataggtatcaaataaaataagaaaaaaaatagataaaagagaagtgattcaaaattcaagtgtttaaacactttatgaatcttcccgttgttcttgacacatttttaaaatttcattttaattcagatcattagggatgaaattctcctgaattgtagcattttatttcctttgggaagaaggggctgaatttggcataattatacttgactatactgtaaaagaaaccagatctaatataaggacatcaatacttagttattaattcatttgcttatatttatatgtcatttgaaaatgtgtattaacatacacaattaaagggatataaaaatgaacatgccctctccatttctttaaaagaaatcaaggctgaatcaaacaggactactgttctgaaagaatactcagactatgaggtaccttattttccttcttttacacctgtctttcagttggcttcaaaaaatcatggcttttactgtgtttcttttttcctttatgtcttccttttgagggaaatgaaaaattgagaaaggaaattattattttataagtgggtgggtttgaatacatctttcacagtcaaatatttttctatgccttatgagcttaaaaaataaatttagaaagtttgataaacacaga

SEQ ID NO: 58040 - DNA, 1947 bp, Homo sapiens
ttaaattatactttaggttttatggtacatgtgcacattgtgcaggttagttacatatgtatacatgtgccatgctggtgcgctgcacccactaactcgtcatctagcattaggtatatctcccaacgctatccctcccccctccccccaccccagaacagtccccagagtgtgatattccccttcctgtgcccgtgtgatctcattgttcaattcccacctatgagtgagaatatgcggtttcttaatatgtgtttcttaattgtgcatcctgctggggttgagaacagaaattgaaaaacacaattgttttatctctccttccccgaggagttgaacatgtaggaagtttcatggcccagcccctcctgagagccctgaactgccaaccagactgagcccatcagagaataacacctcattttctgaggattctgataccttttcaatcagaaacagaagcaaagattctgcagctcccacagaaactcccagaaaccttgcggtgcttcacccttctgagatccttgagtccgaatgtgggagctaaccaggcacatcttcacaatgaaatcttcacaagctcagaaccatcaacttgctacactgtgttcctccagtgcccagttcacaggaagcactcaagagtaggatcaattgttatcaacctctagcagattattgaatagacggtcgttacatgaaactgacactcagttcttcatggtccacgatagttcttatatccagaaaacgtacttacgttatcaactctgactccataagacaactttgcaaagtcttggctcataactatgtaagcaatgagataacttagttttcatttctcacttgttacttacaagtaaacagccctgcagctcagctgagctacagattaactacaggtaatcacttcagcgattctgctttacccatgcccaagattttaaaaaagaacctgacagatcattaaattttgagatttgctttttaaaatgcaggttccataaagttacgctgttttgcttatatatacagcaacaaatgccttcttagatatttactttaaaattctagtttccttaccatgtattagccagataatctgtcattttttaaattctgaaattgtacatatataaattaatgtacatctctatgcctgaaaggtacatttggaattacaacgtgtgtcaaggtagagcaaaatcccccagtccactccttccaaccccctagaaatttactctgtttggtttcctcttgattgtctttaattaacaataagtatgtcacataggtatcaaataaaataagaaaaaaaatagataaaagagaagtgattcaaaattcaagtgtttaaacactttatgaatcttcccgttgttcttgacacatttttaaaatttcattttaattcagatcattagggatgaaattctcctgaattgtagcattttatttcctttgggaagaaggggctgaatttggcataattatacttgactatactgtaaaagaaaccagatctaatataaggacatcaatacttagttattaattcatttgcttatatttatatgtcatttgaaaatgtgtattaacatacacaattaaagggatataaaaatgaacatgccctctccatttctttaaaagaaatcaaggctgaatcaaacaggactactgttctgaaagaatactcagactatgaggtaccttattttccttcttttacacctgtctttcagttggcttcaaaaaatcatggcttttactgtgtttcttttttcctttatgtcttccttttgagggaaatgaaaaattgagaaaggaaattattattttataagtgggtgggtttgaatacatctttcacagtcaaatatttttctatgccttatgagcttaaaaaataaatttagaaagtttgataaacacaga

SEQ ID NO: 58041 - DNA, 496 bp, Homo sapiens
gaggcaggaaactgctagaggaagctgccttggagaggattctttcctcccctcccgaaaggagctgaactcaaaatctctccatttcacaatagacattggagaacattttcaacagtggatttgcaccggtgttttgtgtcctagaaaaacgttcccttcaggtaggttctaataagccccactgggacattttggacacccttgtctgctctctgcctctctaaccttagagggtcccttggaatcaactaatatttcaggtcctttcttcccattactgttgccacacaaggaacccagattacatcagggagaggctgagctccagaggttcacaccaggagcttattcattgtcacactgttcctgcttcctgacaggttcacttgaaccatctggagattggggaacaagggcaatgtgagtattcatgaaattcaaatcatgccaagtattccgggatgggaatggttgtctcagaggtgtgctctgt

SEQ ID NO: 58042 - DNA, 695 bp, Homo sapiens
ttggtaggatacattgtctgatgacaataccgagcatgtggcattttgttctgtgtctcacagtatcaccatgacactgactgaaaaataccctggtttctgcaaggtgtctgatagatcaggcaagattaaataaagataattacccctgagtttttctattttttacattccatttagagaggtttggttactgcccttggtgaatttggaagctcctatatatgatatccagatcttcctaccagacatgaatatgatctgactcctaacctctcattctgatatagccttctgtcagcctccttagccagtttgatatttttattgtttatttacttattttttacccttttttcaagaaatggggtctcacagtgttgcccaggctggacttgaactcccactcctgggctccagcagtcctcctgcctcacctttccaagtagctggggctataagtacacaccaccatgcccagcaatatttttatttctgtaatgtgtcatttagccagtgattgttgtattataatagaatcacagaaatggagggactcctagaggtaatcaaatctggtggtttttaagccttttattccctctaaagggatagtaaaaccattaaaaatataatttatcccaatatgtaagtcagagaaagctgaacttctggtttagagaggaacacagatg

SEQ ID NO: 58043 - DNA, 231 bp, Homo sapiens
ggaactataagatggtgatagcagtgaccaacacacagtatagctctctaaagggtagtagttagtccctctctcacttgacctacctgttatacctgcacacacacacacacatgcatgcatacacatacagacacactcaagcatgcacatacaattgcatacattctcacatctcaaacatgtaagagccaagcacaattggtacatttggtcgaaccacataggtga

SEQ ID NO: 58044 - DNA, 303 bp, Homo sapiens
aggaacaggagatcagcagggtaaagaactgtctgaaacgactctcctttcttcctgcctaccatgtatatattgattgtttcctaaatggaaatggagaaaatggattagggtctcttgactatgtatttagaatttattcaattcattcagtcagcaagtagtacttatcgataggtagctatgtgtctaggcatttagggaatacagccagatagaaaacagatagattctagtatagcattttacaataagtgaagtggataaaagaaaagttacagattacagcctttctttctctcc

SEQ ID NO: 58045 - DNA, 556 bp, Homo sapiens
aacagaagtgttgtgatctggcttacagtgagcagagatcgcgccactgcactccagcctgggccacagagcgagactccgtctcaaaacaaacaaacaaactacaagccagatcacaacacttctgttaaaaaaaaaaatcccagaatttctcatttcttccctagattctatgtgatctgccactctcaggactcagcatgttcctgctttgctgaccttgctgttcttcccacacaccaagctcattgccgctcatttacatttgctgtctcatctgcttggagcattgcctccagggtctttgcaggtttgtgtcttctcatcctttaggtccctgctgaaataccacttccctgattaccctatcagaaataccaacccttctcacattaaagtggttctgattctgctttgttttccacagcatttagcacaaccagaaatgatttatgttttgcttctgtttataagttctctgattataagttctgtgaggacagagactgtctttgtcttgtttactgctgtctcgagcatctaaaatagtgcctgg

SEQ ID NO: 58046 - DNA, 1212 bp, Homo sapiens
atttcagagcttacaggttaggagttcaggcaccatttcattgagtcctctgcttcacagtttctctgaaaccctggaaggctgaaatcaagttattggtcagggctgttcttatctgaaggcctgagtggggaaggatctgcttccaagctcacttaaattgttagcagaatttcttttctttcctttctttttttttgagacagagtctcgctgtattgccaggcctgagtacagtggctcaatctcagcttaccgcaacctccgcctcctggttcaagtgattctcctgcctcagcctcctcagtagctgagattacaggcgcacgccaccatgcccagctaatttttttatttttagtagagacagggtttcaccatgttggccaggagggtctctatctcttgacctcatgatccacctgcctcagcctcccacagtgctggcgtttgagccaccatacctggcctgttggcagaatttcaattccacaagggttgctggcttccggggttccactagctgactgttggctggaggttgccctcacttccttgccacacgagcctctataacatggcagctttcttaagcaaagtaaacaaggattagagtctgctagccagatggaagttacagtctcatgtagtctgatcacagaagtgacatttcatcacctttgccgtaatcttttggttggaagcaagtcactaggctagcccatattcaagggagggagttatacaaaggcatgtataccagaaggcagacatcattgaatcattgaacagatcctagaatctatctgccacagtgctcagttgagaagaagaaaggaaaattctaggtaaaaaaggcaatattactaagtggttaagtgtgatgatgtcaaagtcacagatctgcacttgactgtcaactctgacaagacagcctcccagctggcatccctgcttccccctctgtcccctctccaatccattctgcatgcagtcatcagcttgatcatttgaaaatgccaaatctccctcactcttgacatttcctaacctaaagagtgggagagtagtgattgaaaagagagaaactgccttctgttcagtaagatgtactccctgcactgaccaccaaggggtgtcattgctctttcctggttaagccagttaccacacttgggaagggctagtggcaatgtgaggtgatttggggca

SEQ ID NO: 58047 - DNA, 2014 bp, Homo sapiens
tggcaatgaggaggggtggagtgagatatgtcctggctagaaaatccttgtgtttaaaagctaggagatagttgaagacagggaggaaaaaacattccagacaaaaaataacatggaagggacattgaccagaattgacacgacatttggggaatcgcagccagttaaacaggagaatatggactggggaatatgagagaagaactaatggaaggatttggggaggctggtaatattggcagcagagtttgggtagagggaagacaggagattccatccctaatcaaggcaagggatgatgggagtctgaattaagcagtagtagaatgagagggcctgtatttcaccaattacaaggtgtacttccccccccccccacattttggtgtctgtcaaacttggacacttctaaaagtcaatggcatgtcacagtttaagtggcattttttctttcttagagctacataaaagaatcataacaagctgggcgcagtggctcacgcctgtaatcccagcactttgggcggctgaggcgggcggatcacgaggtcaggagattgagaccattctggctaacatagtgaaatcctgtctctactaaaaatacaaaaaattagccgggcgtggtggcgggcgcctgtaatcccagctactcgggaggctgaggcaggagaatgtcgtgaacctgggaggcgaagcttgcagtgagccgagattgcaccactgcactccaacttgggcaacagagcaagactccatctcaaaaaaaaaaaaaaagaatcataacatagcatcttacatttgatgaagcatggcacattgaaagtacaatcgattgccatcttgttaataaaatgtcagagggattagaggaaagactcttagatgatgcttgaatttctggcttgagtgtctgcattgaatagtggggatcccctcaacaaaattttcaggaggaggaggatatccctgttattttccagaataatcagtgatactctgtgatattgataatctaccttgttggcccttaccaagttactggggtgtgagtaacagctgactgtagctccctttctctaccctagtgctctggaaggaggaaaggagagctggcttgtatcttactttctcaagttatcagtccacaaacatgaagagtattagtgttacagatacaaagatgataactactgtcttatgagcctttattctgctaagtgtatccattatctcttttaatcttcacacaacccaccatcaatgaggtatatagtattcttatgttacacagcaggaacatctcagagattctgaaactggcccgtggttatacagatgggaagtggtagaggtcagattcagacacagtcctgtttgagtctgaccataaccttaatcctgtttgggccaattaagacagtcgtaaaagatctcagtatagagctataaagaagttaaatcacaaaagtgataaagtaagtttttttttgtttgtttgtttttttgagacagcctgggccacagagcgagactccgtctcaaaacaaacaaacaaactacaagccagatcacaacacttctgttaaaaaaaaaaatcccagaatttctcatttcttccctagattctatgtgatctgccactctcaggactcagcatgttcctgctttgctgaccttgctgttcttcccacacaccaagctcattgccgctcatttacatttgctgtctcatctgcttggagcattgcctccagggtctttgcaggtttgtgtcttctcatcctttaggtccctgctgaaataccacttccctgattaccctatcagaaataccaacccttctcacattaaagtggttctgattctgctttgttttccacagcatttagcacaaccagaaatgatttatgttttgcttctgtttataagttctctgattataagttctgtgaggacagagactgtctttgtcttgtttactgctgtctcgagcatctaaaatagtgcctgg

SEQ ID NO: 58048 - DNA, 1625 bp, Homo sapiens
atttcagagcttacaggttaggagttcaggcaccatttcattgagtcctctgcttcacagtttctctgaaaccctggaaggctgaaatcaagttattggtcagggctgttcttatctgaaggcctgagtggggaaggatctgcttccaagctcacttaaattgttagcagaatttcttttctttcctttctttttttttgagacagagtctcgctgtattgccaggcctgagtacagtggctcaatctcagcttaccgcaacctccgcctcgctgaggcaggagaatgtcgtgaacctgggaggcgaagcttgcagtgagccgagattgcaccactgcactccaacttgggcaacagagcaagactccatctcaaaaaaaaaaaaaaagaatcataacatagcatcttacatttgatgaagcatggcacattgaaagtacaatcgattgccatcttgttaataaaatgtcagagggattagaggaaagactcttagatgatgcttgaatttctggcttgagtgtctgcattgaatagtggggatcccctcaacaaaattttcaggaggaggaggatatccctgttattttccagaataatcagtgatactctgtgatattgataatctaccttgttggcccttaccaagttactggggtgtgagtaacagctgactgtagctccctttctctaccctagtgctctggaaggaggaaaggagagctggcttgtatcttactttctcaagttatcagtccacaaacatgaagagtattagtgttacagatacaaagatgataactactgtcttatgagcctttattctgctaagtgtatccattatctcttttaatcttcacacaacccaccatcaatgaggtatatagtattcttatgttacacagcaggaacatctcagagattctgaaactggcccgtggttatacagatgggaagtggtagaggtcagattcagacacagtcctgtttgagtctgaccataaccttaatcctgtttgggccaattaagacagtcgtaaaagatctcagtatagagctataaagaagttaaatcacaaaagtgataaagtaagtttttttttgtttgtttgtttttttgagacagcctgggccacagagcgagactccgtctcaaaacaaacaaacaaactacaagccagatcacaacacttctgttaaaaaaaaaaatcccagaatttctcatttcttccctagattctatgtgatctgccactctcaggactcagcatgttcctgctttgctgaccttgctgttcttcccacacaccaagctcattgccgctcatttacatttgctgtctcatctgcttggagcattgcctccagggtctttgcaggtttgtgtcttctcatcctttaggtccctgctgaaataccacttccctgattaccctatcagaaataccaacccttctcacattaaagtggttctgattctgctttgttttccacagcatttagcacaaccagaaatgatttatgttttgcttctgtttataagttctctgattataagttctgtgaggacagagactgtctttgtcttgtttactgctgtctcgagcatctaaaatagtgcctgg

SEQ ID NO: 58049 - DNA, 411 bp, Homo sapiens
atctcagagattctgaaactggcccgtggttatacagatgggaagtggtagaggtcagattcagacacagtcctgtttgagtctgaccataaccttaatcctgtttgggccaattaagacagtcgtaaaagatctcagtatagagctataaagaagttaaatcacaaaagtgataaagtaagtttttttttgtttgtttgtttttttgagacagcctcactgtgttactcaggctggagagcagtagctcagtcatagcccactgcagccttgaactcctgggctcaagcgatcctcctgccttagcctcccaagtagccaggactacagatatacaccaacatgtccagctaattaaacatttttttttttgtagagatgaagactcaccatgttgcccaggctagtccc

SEQ ID NO: 58050 - DNA, 1937 bp, Homo sapiens
  misc_feature (1)..(1): n is a, c, g, or t
  misc_feature (3)..(5): n is a, c, g, or t
nannngggcacgagagaggacagagagcaagtcactcccggctgcctttttcacctctgacagagcccagacaccatgaacgcaagtgaattccgaaggagagggaaggagatggtggattacgtggccaactacatggaaggcattgagggacgccaggtctaccctgacgtggagcccgggtacctgcggccgctgatccctgccgctgcccctcaggagccagacacgtttgaggacatcatcaacgacgttgagaagataatcatgcctggggtgacgcactggcacagcccctacttcttcgcctacttccccactgccagctcgtacccggccatgcttgcggacatgctgtgcggggccattggctgcatcggcttctcctgggcggcaagcccagcatgcacagagctggagactgtgatgatggactggctcgggaagatgctggaactaccaaaggcatttttgaatgagaaagctggagaagggggaggagtgatccagggaagtgccagtgaagccaccctggtggccctgctggccgctcggaccaaagtgatccatcggctgcaggcagcgtccccagagctcacacaggccgctatcatggagaagctggtggcttactcatccgatcaggcacactcctcagtggaaagagctgggttaattggtggagtgaaattaaaagccatcccctcagatggcaacttcgccatgcgtgcgtctgccctgcaggaagccctggagagagacaaagcggctggcctgattcctttctttatggttgccaccctggggaccacaacatgctgctcctttgacaatctcttagaagtcggtcctatctgcaacaaggaagacatatggctgcacgttgatgcagcctacgcaggcagtgcattcatctgccctgagttccggcaccttctgaatggagtggagtttgcagattcattcaactttaatccccacaaatggctattggtgaattttgactgttctgccatgtgggtgaaaaagagaacagacttaacgggagcctttagactggaccccacttacctgaagcacagccatcaggattcagggcttatcactgactaccggcattggcagataccactgggcagaagatttcgctctttgaaaatgtggtttgtatttaggatgtatggagtcaaaggactgcaggcttatatccgcaagcatgtccagctgtcccatgagtttgagtcactggtgcgccaggatccccgctttgaaatctgtgtggaagtcattctggggcttgtctgctttcggctaaagggttccaacaaagtgaatgaagctcttctgcaaagaataaacagtgccaaaaaaatccacttggttccatgtcacctcagggacaagtttgtcctgcgctttgccatctgttctcgcacggtggaatctgcccatgtgcagcgggcctgggaacacatcaaagagctggcggccgacgtgctgcgagcagagagggagtaggagtgaagccagctgcaggaatcaaaaattgaagagagatatatctgaaaactggaataagaagcaaataaatatcatcctgccttcatggaactcagctgtctgtggcttcccatgtctttctccaaagttatccagagggttgtgattttgtctgcttagtatctcatcaacaaagaaatattatttgctaattaaaaagttaatcttcatggccatagcttttattcattagctgtgatttttgttgattaaaacattatagattttcatgttcttgcagtcatcagaagtggtaggaaagcctcactgatatattttccagggcaatcaatgttcacgcaacttgaaattatatctgtggtcttcaaattgtcttttgtcatgtggctaaatgcctaataaacaattcaagtgaa

SEQ ID NO: 58051 - DNA, 2071 bp, Homo sapiens
gtttaactggcacatgtggctggaaatgcaagaagagggaaacgtgtggcttggagtttcaagaagagtgactgtctcagtgccgagtgcctcagcagcttctccacatgctcttcagtccccaaagttggagaatcccatcaaggagagtagccctgtaaggaattcgaatttccagcatttttcacctctgacagagcccagacaccatgaacgcaagtgaattccgaaggagagggaaggagatggtggattacgtggccaactacatggaaggcattgagggacgccaggtctaccctgacgtggagcccgggtacctgcggccgctgatccctgccgctgcccctcaggagccagacacgtttgaggacatcatcaacgacgttgagaagataatcatgcctggggtgacgcactggcacagcccctacttcttcgcctacttccccactgccagctcgtacccggccatgcttgcggacatgctgtgcggggccattggctgcatcggcttctcctgggcggcaagcccagcatgcacagagctggagactgtgatgatggactggctcgggaagatgctggaactaccaaaggcatttttgaatgagaaagctggagaagggggaggagtgatccagggaagtgccagtgaagccaccctggtggccctgctggccgctcggaccaaagtgatccatcggctgcaggcagcgtccccagagctcacacaggccgctatcatggagaagctggtggcttactcatccgatcaggcacactcctcagtggaaagagctgggttaattggtggagtgaaattaaaagccatcccctcagatggcaacttcgccatgcgtgcgtctgccctgcaggaagccctggagagagacaaagcggctggcctgattcctttctttatggttgccaccctggggaccacaacatgctgctcctttgacaatctcttagaagtcggtcctatctgcaacaaggaagacatatggctgcacgttgatgcagcctacgcaggcagtgcattcatctgccctgagttccggcaccttctgaatggagtggagtttgcagattcattcaactttaatccccacaaatggctattggtgaattttgactgttctgccatgtgggtgaaaaagagaacagacttaacgggagcctttagactggaccccacttacctgaagcacagccatcaggattcagggcttatcactgactaccggcattggcagataccactgggcagaagatttcgctctttgaaaatgtggtttgtatttaggatgtatggagtcaaaggactgcaggcttatatccgcaagcatgtccagctgtcccatgagtttgagtcactggtgcgccaggatccccgctttgaaatctgtgtggaagtcattctggggcttgtctgctttcggctaaagggttccaacaaagtgaatgaagctcttctgcaaagaataaacagtgccaaaaaaatccacttggttccatgtcacctcagggacaagtttgtcctgcgctttgccatctgttctcgcacggtggaatctgcccatgtgcagcgggcctgggaacacatcaaagagctggcggccgacgtgctgcgagcagagagggagtaggagtgaagccagctgcaggaatcaaaaattgaagagagatatatctgaaaactggaataagaagcaaataaatatcatcctgccttcatggaactcagctgtctgtggcttcccatgtctttctccaaagttatccagagggttgtgattttgtctgcttagtatctcatcaacaaagaaatattatttgctaattaaaaagttaatcttcatggccatagcttttattcattagctgtgatttttgttgattaaaacattatagattttcatgttcttgcagtcatcagaagtggtaggaaagcctcactgatatattttccagggcaatcaatgttcacgcaacttgaaattatatctgtggtcttcaaattgtcttttgtcatgtggctaaatgcctaataaacaattcaagtgaa

SEQ ID NO: 58052 - DNA, 2230 bp, Homo sapiens
gcaatccagtgtgtaggtccagggcgacaagcgctgctcccgtggctggggtaagtccctccagcattcagccttgctccctgtgcttatctggatgcggtgtaggatgaagatgaccctatagaactctaccctggaagtcctggcaaagtggatatgtgacattttttaaaccagggacatgttggtgctgcttaatatttaaatcataattttcagactcttaaaaattactaaataagtttgaagagacacagccatctgcctacagtgccacccctgagcttcacgccaccctggtctccaggaaaggggagagtctcaggaatattgaatgcagttttcacctctgacagagcccagacaccatgaacgcaagtgaattccgaaggagagggaaggagatggtggattacgtggccaactacatggaaggcattgagggacgccaggtctaccctgacgtggagcccgggtacctgcggccgctgatccctgccgctgcccctcaggagccagacacgtttgaggacatcatcaacgacgttgagaagataatcatgcctggggtgacgcactggcacagcccctacttcttcgcctacttccccactgccagctcgtacccggccatgcttgcggacatgctgtgcggggccattggctgcatcggcttctcctgggcggcaagcccagcatgcacagagctggagactgtgatgatggactggctcgggaagatgctggaactaccaaaggcatttttgaatgagaaagctggagaagggggaggagtgatccagggaagtgccagtgaagccaccctggtggccctgctggccgctcggaccaaagtgatccatcggctgcaggcagcgtccccagagctcacacaggccgctatcatggagaagctggtggcttactcatccgatcaggcacactcctcagtggaaagagctgggttaattggtggagtgaaattaaaagccatcccctcagatggcaacttcgccatgcgtgcgtctgccctgcaggaagccctggagagagacaaagcggctggcctgattcctttctttatggttgccaccctggggaccacaacatgctgctcctttgacaatctcttagaagtcggtcctatctgcaacaaggaagacatatggctgcacgttgatgcagcctacgcaggcagtgcattcatctgccctgagttccggcaccttctgaatggagtggagtttgcagattcattcaactttaatccccacaaatggctattggtgaattttgactgttctgccatgtgggtgaaaaagagaacagacttaacgggagcctttagactggaccccacttacctgaagcacagccatcaggattcagggcttatcactgactaccggcattggcagataccactgggcagaagatttcgctctttgaaaatgtggtttgtatttaggatgtatggagtcaaaggactgcaggcttatatccgcaagcatgtccagctgtcccatgagtttgagtcactggtgcgccaggatccccgctttgaaatctgtgtggaagtcattctggggcttgtctgctttcggctaaagggttccaacaaagtgaatgaagctcttctgcaaagaataaacagtgccaaaaaaatccacttggttccatgtcacctcagggacaagtttgtcctgcgctttgccatctgttctcgcacggtggaatctgcccatgtgcagcgggcctgggaacacatcaaagagctggcggccgacgtgctgcgagcagagagggagtaggagtgaagccagctgcaggaatcaaaaattgaagagagatatatctgaaaactggaataagaagcaaataaatatcatcctgccttcatggaactcagctgtctgtggcttcccatgtctttctccaaagttatccagagggttgtgattttgtctgcttagtatctcatcaacaaagaaatattatttgctaattaaaaagttaatcttcatggccatagcttttattcattagctgtgatttttgttgattaaaacattatagattttcatgttcttgcagtcatcagaagtggtaggaaagcctcactgatatattttccagggcaatcaatgttcacgcaacttgaaattatatctgtggtcttcaaattgtcttttgtcatgtggctaaatgcctaataaacaattcaagtgaa

SEQ ID NO: 58053 - DNA, 2272 bp, Homo sapiens
gtttaactggcacatgtggctggaaatgcaagaagagggaaacgtgtggcttggagtttcaagaagagtgactgtctcagtgccgagtgcctcagcagcttctccacatgctcttcagtccccaaagttggagaatcccatcaaggagagtagccctgtaaggaattcgaatttccagcatgtgccttcaggagccagactgcaggaattcaactgtggcctcatctgactacagcaggtgtggagtcttggttcagttgtgcagcctctctgcgcctcggtcttctcatctgttaaagggagtaatagtagtcctgacaaggttcttatgaagattaaatacgagaaccaggcaaagagcttaacgtggttcttggcacatttttcacctctgacagagcccagacaccatgaacgcaagtgaattccgaaggagagggaaggagatggtggattacgtggccaactacatggaaggcattgagggacgccaggtctaccctgacgtggagcccgggtacctgcggccgctgatccctgccgctgcccctcaggagccagacacgtttgaggacatcatcaacgacgttgagaagataatcatgcctggggtgacgcactggcacagcccctacttcttcgcctacttccccactgccagctcgtacccggccatgcttgcggacatgctgtgcggggccattggctgcatcggcttctcctgggcggcaagcccagcatgcacagagctggagactgtgatgatggactggctcgggaagatgctggaactaccaaaggcatttttgaatgagaaagctggagaagggggaggagtgatccagggaagtgccagtgaagccaccctggtggccctgctggccgctcggaccaaagtgatccatcggctgcaggcagcgtccccagagctcacacaggccgctatcatggagaagctggtggcttactcatccgatcaggcacactcctcagtggaaagagctgggttaattggtggagtgaaattaaaagccatcccctcagatggcaacttcgccatgcgtgcgtctgccctgcaggaagccctggagagagacaaagcggctggcctgattcctttctttatggttgccaccctggggaccacaacatgctgctcctttgacaatctcttagaagtcggtcctatctgcaacaaggaagacatatggctgcacgttgatgcagcctacgcaggcagtgcattcatctgccctgagttccggcaccttctgaatggagtggagtttgcagattcattcaactttaatccccacaaatggctattggtgaattttgactgttctgccatgtgggtgaaaaagagaacagacttaacgggagcctttagactggaccccacttacctgaagcacagccatcaggattcagggcttatcactgactaccggcattggcagataccactgggcagaagatttcgctctttgaaaatgtggtttgtatttaggatgtatggagtcaaaggactgcaggcttatatccgcaagcatgtccagctgtcccatgagtttgagtcactggtgcgccaggatccccgctttgaaatctgtgtggaagtcattctggggcttgtctgctttcggctaaagggttccaacaaagtgaatgaagctcttctgcaaagaataaacagtgccaaaaaaatccacttggttccatgtcacctcagggacaagtttgtcctgcgctttgccatctgttctcgcacggtggaatctgcccatgtgcagcgggcctgggaacacatcaaagagctggcggccgacgtgctgcgagcagagagggagtaggagtgaagccagctgcaggaatcaaaaattgaagagagatatatctgaaaactggaataagaagcaaataaatatcatcctgccttcatggaactcagctgtctgtggcttcccatgtctttctccaaagttatccagagggttgtgattttgtctgcttagtatctcatcaacaaagaaatattatttgctaattaaaaagttaatcttcatggccatagcttttattcattagctgtgatttttgttgattaaaacattatagattttcatgttcttgcagtcatcagaagtggtaggaaagcctcactgatatattttccagggcaatcaatgttcacgcaacttgaaattatatctgtggtcttcaaattgtcttttgtcatgtggctaaatgcctaataaacaattcaagtgaa

SEQ ID NO: 58054 - DNA, 1837 bp, Homo sapiens
gtttaactggcacatgtggctggaaatgcaagaagagggaaacgtgtggcttggagtttcaagaagagtgactgtctcagtgccgagtgcctcagcagcttctccacatgctcttcagtccccaaagttggagaatcccatcaaggagagtagccctgtaaggaattcgaatttccagcatttttcacctctgacagagcccagacaccatgaacgcaagtgaattccgaaggagagggaaggagatggtggattacgtggccaactacatggaaggcattgagggacgccaggtctaccctgacgtggagcccgggtacctgcggccgctgatccctgccgctgcccctcaggagccagacacgtttgaggacatcatcaacgacgttgagaagataatcatgcctgggggaagtgccagtgaagccaccctggtggccctgctggccgctcggaccaaagtgatccatcggctgcaggcagcgtccccagagctcacacaggccgctatcatggagaagctggtggcttactcatccgatcaggcacactcctcagtggaaagagctgggttaattggtggagtgaaattaaaagccatcccctcagatggcaacttcgccatgcgtgcgtctgccctgcaggaagccctggagagagacaaagcggctggcctgattcctttctttatggttgccaccctggggaccacaacatgctgctcctttgacaatctcttagaagtcggtcctatctgcaacaaggaagacatatggctgcacgttgatgcagcctacgcaggcagtgcattcatctgccctgagttccggcaccttctgaatggagtggagtttgcagattcattcaactttaatccccacaaatggctattggtgaattttgactgttctgccatgtgggtgaaaaagagaacagacttaacgggagcctttagactggaccccacttacctgaagcacagccatcaggattcagggcttatcactgactaccggcattggcagataccactgggcagaagatttcgctctttgaaaatgtggtttgtatttaggatgtatggagtcaaaggactgcaggcttatatccgcaagcatgtccagctgtcccatgagtttgagtcactggtgcgccaggatccccgctttgaaatctgtgtggaagtcattctggggcttgtctgctttcggctaaagggttccaacaaagtgaatgaagctcttctgcaaagaataaacagtgccaaaaaaatccacttggttccatgtcacctcagggacaagtttgtcctgcgctttgccatctgttctcgcacggtggaatctgcccatgtgcagcgggcctgggaacacatcaaagagctggcggccgacgtgctgcgagcagagagggagtaggagtgaagccagctgcaggaatcaaaaattgaagagagatatatctgaaaactggaataagaagcaaataaatatcatcctgccttcatggaactcagctgtctgtggcttcccatgtctttctccaaagttatccagagggttgtgattttgtctgcttagtatctcatcaacaaagaaatattatttgctaattaaaaagttaatcttcatggccatagcttttattcattagctgtgatttttgttgattaaaacattatagattttcatgttcttgcagtcatcagaagtggtaggaaagcctcactgatatattttccagggcaatcaatgttcacgcaacttgaaattatatctgtggtcttcaaattgtcttttgtcatgtggctaaatgcctaataaacaattcaagtgaa

SEQ ID NO: 58055 - DNA, 1823 bp, Homo sapiens
  misc_feature (1)..(1): n is a, c, g, or t
  misc_feature (3)..(5): n is a, c, g, or t
nannngggcacgagagaggacagagagcaagtcactcccggctgcctttttcacctctgacagagcccagacaccatgaacgcaagtgaattccgaaggagagggaaggagatggtggattacgtggccaactacatggaaggcattgagggacgccaggtctaccctgacgtggagcccgggtacctgcggccgctgatccctgccgctgcccctcaggagccagacacgtttgaggacatcatcaacgacgttgagaagataatcatgcctggggcggcaagcccagcatgcacagagctggagactgtgatgatggactggctcgggaagatgctggaactaccaaaggcatttttgaatgagaaagctggagaagggggaggagtgatccagggaagtgccagtgaagccaccctggtggccctgctggccgctcggaccaaagtgatccatcggctgcaggcagcgtccccagagctcacacaggccgctatcatggagaagctggtggcttactcatccgatcaggcacactcctcagtggaaagagctgggttaattggtggagtgaaattaaaagccatcccctcagatggcaacttcgccatgcgtgcgtctgccctgcaggaagccctggagagagacaaagcggctggcctgattcctttctttatggttgccaccctggggaccacaacatgctgctcctttgacaatctcttagaagtcggtcctatctgcaacaaggaagacatatggctgcacgttgatgcagcctacgcaggcagtgcattcatctgccctgagttccggcaccttctgaatggagtggagtttgcagattcattcaactttaatccccacaaatggctattggtgaattttgactgttctgccatgtgggtgaaaaagagaacagacttaacgggagcctttagactggaccccacttacctgaagcacagccatcaggattcagggcttatcactgactaccggcattggcagataccactgggcagaagatttcgctctttgaaaatgtggtttgtatttaggatgtatggagtcaaaggactgcaggcttatatccgcaagcatgtccagctgtcccatgagtttgagtcactggtgcgccaggatccccgctttgaaatctgtgtggaagtcattctggggcttgtctgctttcggctaaagggttccaacaaagtgaatgaagctcttctgcaaagaataaacagtgccaaaaaaatccacttggttccatgtcacctcagggacaagtttgtcctgcgctttgccatctgttctcgcacggtggaatctgcccatgtgcagcgggcctgggaacacatcaaagagctggcggccgacgtgctgcgagcagagagggagtaggagtgaagccagctgcaggaatcaaaaattgaagagagatatatctgaaaactggaataagaagcaaataaatatcatcctgccttcatggaactcagctgtctgtggcttcccatgtctttctccaaagttatccagagggttgtgattttgtctgcttagtatctcatcaacaaagaaatattatttgctaattaaaaagttaatcttcatggccatagcttttattcattagctgtgatttttgttgattaaaacattatagattttcatgttcttgcagtcatcagaagtggtaggaaagcctcactgatatattttccagggcaatcaatgttcacgcaacttgaaattatatctgtggtcttcaaattgtcttttgtcatgtggctaaatgcctaataaacaattcaagtgaa

SEQ ID NO: 58056 - DNA, 1906 bp, Homo sapiens
gtttaactggcacatgtggctggaaatgcaagaagagggaaacgtgtggcttggagtttcaagaagagtgactgtctcagtgccgagtgcctcagcagcttctccacatgctcttcagtccccaaagttggagaatcccatcaaggagagtagccctgtaaggaattcgaatttccagcatgagagggaaggagatggtggattacgtggccaactacatggaaggcattgagggacgccaggtctaccctgacgtggagcccgggtacctgcggccgctgatccctgccgctgcccctcaggagccagacacgtttgaggacatcatcaacgacgttgagaagataatcatgcctggggcggcaagcccagcatgcacagagctggagactgtgatgatggactggctcgggaagatgctggaactaccaaaggcatttttgaatgagaaagctggagaagggggaggagtgatccagggaagtgccagtgaagccaccctggtggccctgctggccgctcggaccaaagtgatccatcggctgcaggcagcgtccccagagctcacacaggccgctatcatggagaagctggtggcttactcatccgatcaggcacactcctcagtggaaagagctgggttaattggtggagtgaaattaaaagccatcccctcagatggcaacttcgccatgcgtgcgtctgccctgcaggaagccctggagagagacaaagcggctggcctgattcctttctttatggttgccaccctggggaccacaacatgctgctcctttgacaatctcttagaagtcggtcctatctgcaacaaggaagacatatggctgcacgttgatgcagcctacgcaggcagtgcattcatctgccctgagttccggcaccttctgaatggagtggagtttgcagattcattcaactttaatccccacaaatggctattggtgaattttgactgttctgccatgtgggtgaaaaagagaacagacttaacgggagcctttagactggaccccacttacctgaagcacagccatcaggattcagggcttatcactgactaccggcattggcagataccactgggcagaagatttcgctctttgaaaatgtggtttgtatttaggatgtatggagtcaaaggactgcaggcttatatccgcaagcatgtccagctgtcccatgagtttgagtcactggtgcgccaggatccccgctttgaaatctgtgtggaagtcattctggggcttgtctgctttcggctaaagggttccaacaaagtgaatgaagctcttctgcaaagaataaacagtgccaaaaaaatccacttggttccatgtcacctcagggacaagtttgtcctgcgctttgccatctgttctcgcacggtggaatctgcccatgtgcagcgggcctgggaacacatcaaagagctggcggccgacgtgctgcgagcagagagggagtaggagtgaagccagctgcaggaatcaaaaattgaagagagatatatctgaaaactggaataagaagcaaataaatatcatcctgccttcatggaactcagctgtctgtggcttcccatgtctttctccaaagttatccagagggttgtgattttgtctgcttagtatctcatcaacaaagaaatattatttgctaattaaaaagttaatcttcatggccatagcttttattcattagctgtgatttttgttgattaaaacattatagattttcatgttcttgcagtcatcagaagtggtaggaaagcctcactgatatattttccagggcaatcaatgttcacgcaacttgaaattatatctgtggtcttcaaattgtcttttgtcatgtggctaaatgcctaataaacaattcaagtgaa

SEQ ID NO: 58057 - DNA, 1006 bp, Homo sapiens
cctgagctgaggcaggtggggagaggggagaggtggtccagtctagggtacttggttatcagccctttcatttgttctctaaaaccagggtgaaaaagagaacagacttaacgggagcctttagactggaccccacttacctgaagcacagccatcaggattcagggcttatcactgactaccggcattggcagataccactgggcagaagatttcgctctttgaaaatgtggtttgtatttaggatgtatggagtcaaaggactgcaggcttatatccgcaagcatgtccagctgtcccatgagtttgagtcactggtgcgccaggatccccgctttgaaatctgtgtggaagtcattctggggcttgtctgctttcggctaaagggttccaacaaagtgaatgaagctcttctgcaaagaataaacagtgccaaaaaaatccacttggttccatgtcacctcagggacaagtttgtcctgcgctttgccatctgttctcgcacggtggaatctgcccatgtgcagcgggcctgggaacacatcaaagagctggcggccgacgtgctgcgagcagagagggagtaggagtgaagccagctgcaggaatcaaaaattgaagagagatatatctgaaaactggaataagaagcaaataaatatcatcctgccttcatggaactcagctgtctgtggcttcccatgtctttctccaaagttatccagagggttgtgattttgtctgcttagtatctcatcaacaaagaaatattatttgctaattaaaaagttaatcttcatggccatagcttttattcattagctgtgatttttgttgattaaaacattatagattttcatgttcttgcagtcatcagaagtggtaggaaagcctcactgatatattttccagggcaatcaatgttcacgcaacttgaaattatatctgtggtcttcaaattgtcttttgtcatgtggctaaatgcctaataaacaattcaagtgaa

SEQ ID NO: 58058 - DNA, 348 bp, Homo sapiens
tatttctaaatgttttctaatgtccattatcatttcttctttaacacatagtttataagatttttactttttagcgtgcagctattttgctatcatttggtcctgagatctaactcaatgaggctgtaatcagagaatgtggcccttatgatattggtccctgaaatgtgttggggctgtctttagcacctaccaggggtcaactttcataaatgaatcgtgtatttgaaaataattttttatattaattggggtgcaatattctatacatatcccattataggggaagttgttaattttgctgtgcaatttttctatatcccttactaatttttccccttctgcttg

SEQ ID NO: 58059 - DNA, 301 bp, Homo sapiens
tgctgttcttttttccctccaaaacaaattcatctgtcagaaaactgaagttatctttctaagtctggctcttcattcattatttggtaacatttttgtttgtttttaaatctttttttacattaatatagatggggttttgccatattggccaggctggtcttgaactcctagcctcaagtgatctgcctgcctcagcctcccaaagtgctgggattaccgatgtgaggcacccgggcccagccaatttggtaatattttagtgttgtagttatcttgacttgaaacccaagaggcatct

SEQ ID NO: 58060 - DNA, 450 bp, Homo sapiens
ggaaagtcccttccctcaaggcactggcacatcccagggaacatcgacatatacccaactaattataaaaataatagagaacaaggagagaaggatgttaacatgggcaaggcccagaggcataaggtgtgatgaggagcagtgagtacatctatgtggttggaatgtatggtgtgtgctggaaagcctgggagttatatttggtctattggaactggaagctgtatatcagctctatatcaaaactgggaattatatttggtctgcattattttcctgcagaagaagggattctggccctcagagagggtgaataccttgcccaacatgagacagtactcaaacccagctcgcccaaaagtaaaacccagctcggtagctcccaccacattcttccacctctccatgttacctgtactacctggatgtggcctgtccacatccaagctc

SEQ ID NO: 58061 - DNA, 375 bp, Homo sapiens
tttttttgagtcagagtctcactctgtcacccagactggagtgcagtggcacaacctcggctcattttaacctctgcctcccaggttcaagcgattctcgtgcctcagcttcccaagtagctgggactacaggcacacgcaaccatgcatggctaatttttgtttttttagtagaaacagggtttcaccatgttagccaggctggtctcgaactcctgacctcaagtgatctgcccgcttcagcctcccaaagttctgagataacaggtgtgagccttagcgcctagcctataaaccctcctttaagagagtacttcataaagggcaaaggaacttccaaatcaactacctgagtccattactttctgagctggg

SEQ ID NO: 58062 - DNA, 453 bp, Homo sapiens
agcccagccactgccccttggcacatcagcacaaaaggctgaaatcattgctcttacccgagcattaattttgggacaaaataaaaagcttaacatctatacagattctaaatatggcattccttgtggttcacgcttatgctgcaatctagaaagaaaggggactactagctagcaaaccctcccccataaagcatgggcctgaaattcttcagctattgtaaacaatacacctgccacaggccatagctataatccattgtagggggcatcaaagggacttaactcctatagcacaagggaacagaaaggttgatagagaagccaaagccacatccctcagggtgcaatcccaacagatcctagcactgattcctttctatgattcccagtggatcccaaatacacactacaggaagaacagttaataaaggagcaagtggggcaaaaaaa

SEQ ID NO: 58063 - DNA, 919 bp, Homo sapiens
cagctcctccctgagtcttcagctgcaacaatctaaaactagaacatgagctcctccctgagtctccagctgaaagaccctcaacgtgaacatcagctcctccccgagtcctcaacagcgcgaccctcaaactacaacatcagctcctccccgagtcttcagctgcatgaccctcaatctagaacatcagctcctctccgggtctgcagctgcaagaacctaaaactagaacatcagctcctccctgggtctgcagctggaagatccactaactagaacatcagctcctgtccgggtctccagctccatgaccctcattcaagattatcagctcctccaagtctccagtgaaagaccctcaacgcgaacaacatcagctccaccccgagtcctcaactgcacgaccctcaaactacaacatcagctcctccccgagtcttcagctgcatgaccctcaatctagaacatcagctcctctccggatctgcagctgcaagaccctcaaactagaacatcagctcctctccgggtctgcagctgcagggccctgaaggtagagcatcagctgctccccgagctagaacacctgtcccacctggatctccagctccacgaccctcacagaagaacagccacactggctccttcattgtcttcagctccacaacctaagacatcagtggcagcaccggctcctccctggacgtccagctcaacgactctcatagacttaaaaggcagcacctgctcctccccaaggctccaactccaccaccctcggatttgaacagcggtagcaccacctcctctccaggtcttcagccccacgtccctccctgaacaatcccttcttgtgaaattcagcagtcaagaaatctgcagcgaaagtaaatgaataaatgttttgttttcaagtcta

SEQ ID NO: 58064 - DNA, 504 bp, Homo sapiens
gggatcagagagagggaggaactaggaaggcacattcatttataaagaagctaatgaaacatggactacgaactagaaattccaagttggccagagatagggaatctacagtagctagacatttatggatgttcgttctgggtctgctcaacccaaaactacatactggtgggaatacaagagatgaatactcggttctggtctccttgcatttataccctggctttaaagctgagcttaaatgtcaacctccttcagagccatctaagactgtactgattctattttagaacaggccaaatttcaggggtgagggacttagggattctgaggatctctcccagtgcactgctctgaaaatatggtaggcctgggccagctgctgggacaggtcacaagccatcaccacaaacatttatccagagagttcatgtttagcacaatcctaaatgtttcagagaaaactaaaaatatgcagtctctctctgattcataggctcagta

SEQ ID NO: 58065 - DNA, 354 bp, Homo sapiens
tttattaagaaagtaaggggataaatgggtgactacttcataggcagagcagccctcatgggctgctggctggctttattcatgattatttcttgattatatgctaaatatggagtggattatttatgagttttctagggaactgggtgggaaattcctggaattgagagttcttccccatttctgaccatatagggtaacttccagacattgttgtggcattcttaaactgtcctggcgctggtgggagttccttttagcatgctaatgcgttataattagtgtataataagcagtgaggatgacagtaggttgttttcgttgtcatcttggttttggtggggtttggctggc

SEQ ID NO: 58066 - DNA, 268 bp, Homo sapiens
atgcctcagtttcctcatctgtaatacagggacagtaaaagtagccatctcatgggctgttgtgcagattaacatatcgggctaagttagtatttgtaaagctcttagtggtacatagggctatggaaaagcattgtctaaatcaatcggaggcttcgttgttgcaaagatataatatctccctaagcctatttataaatgtaatgcaatcacaacaaagaacttaagagttttgtacctggacaatttgaacctcaaattgatatgg

SEQ ID NO: 58067 - DNA, 446 bp, Homo sapiens
ctctgtggtctactcttttgtgcacacccacccacctcttccccagctgacactgctggaggaggagagggagagatgtcatctcctcctatggcaacctgtgggatagcaaccgcccttttcctgctgggtgtaatctgctgccatctcttgctgtctgcagcctgacagagaagggtgaaggtcaccaggttccactgataggggtctttgtctcaagcggcaaccctaggaccgagggtcccttgcaagattcagtcacatttcatgactgtctgcaacacaccccatgcctctgatggaaggaacacaatgccccatgctgcactcatttctgccagactacagtccctgatctcaatttccctctgcagtccccaactctggggtctgcagacacatttcagatccctcctttgtacctcccaggaggcagaagccagagg

SEQ ID NO: 58068 - DNA, 813 bp, Homo sapiens
caaaaaaaaaacaaaaaaaaaaaaacacaagttaaaacttcccatgtataaaaacacttacattttaaaacatcactgccaacgtgtgtgtgctcatgtgggagtacagatgtgtatatacagacatgtacatttttaaagacttggttgtctctgcagtgaagacaatatgttttattttttattccatatacttctctgtattttctatatttgcttcaataagctggtgtaacttttaatttttttaattaaaaaaaatttagcgtaaaattacacttaaacattagcagctgctgctgggaaaaaatggacaaattgcccaggcagccacattagaagaagaaagtcatttgaatacagttatatacttatttttattgagacacatcttgctgtgtcacccagggttttgctctgttgccacagcttactgcagccgtgacccaggctcaagtgatccctcccacctcaggcccctctccccgaccagtagccgagactacaggcaggcacagactggcaccaccacactcggctaattttttttttttgaggcagggtctcactatattgtccaggctggtcttgaactcctgagctcaagtgatcctctcaccttggcttcccaaagtgctgggattacagacaagtcatggcagctggctgagtacagttattcagcataagcataacaaaaacagaatggcagcccagttcctttgttaatgaaatagtaagggtgtaactagggcaagctggccctgtttatgtcacatgagtttgttttagaaagcattcttgagaacacaa

SEQ ID NO: 58069 - DNA, 384 bp, Homo sapiens
gtcatagtgaacaatgctgtgagaagcatcctagtcactaaacgattccttgggcgtagttttctgttgtcgatatgatcctatggcgagtctcacaggcttccttcatagttactaagagatcgttgctgatacgtacgaaagattaatgctgtgtttttatttggctgcttcgctgaacgtgtagtcgtttgagggatgtttcagttgattccacggactgactgggtttccaccagaatcagcagagtttccaattaactgcgatcatctgcccttgccatggatgccttgggccgtctgggtttccttccaagactaaagggtctgctcccctgctgctgggagtgctggctgcgagagcggtcagctggggtcccttct

SEQ ID NO: 58070 - DNA, 415 bp, Homo sapiens
tatgaaaatagttttcctgaaaaagacaagggaagcagcagcagcattctcctttccccacacccatatacacgcctgtgccctgtaactgaagtgtgagaggcacagtgtcataaatgggtagatagtaagtggggactaaaactgtcaagggtgatctaattggggtgggctcatagtagtacttctgtgtgaatgctttggtggacccttaaggtactacatggaccagcctgggcaacatgatgagaccctgtctctacagattaaaaaaaaaaatttttttttttttttaaattagctgagtatggtggtgtgtgcctgtagtcaggaggctgaggtgggaggatcacttgagcttgggaggtcgaagctgcagtgatcacaccacggcacttcagcctggatgacagag

SEQ ID NO: 58071 - DNA, 392 bp, Homo sapiens
gaataaatccaaattgtgaatgcttaaaatatactttacagaatattaaaatttaaaagcatcacaggaaaaatattaatactgttttcagaatttcagtatgtgaataatatttacattacagtttcatatgaaccttttacttctctatttagtatgccttcatgtcactgcagaggtatgaaaaggagagctctcctagttgtgaaaaaagaaacatgttttattgggagctaagtggaaggttgaacatgtgggaatatctgggcatgcactgaagacaccttttgcatctcccccatccacatagcaaagtgaatgtggtttgtgtccatttatgcaggatactctggaaaaccaaactgaagcaaggttaacatacatttttaaaa

SEQ ID NO: 58072 - DNA, 3215 bp, Homo sapiens
ccacgcgtcgcggagggagccgaagtgctagtgccgcggcggcggcggcggacggcccagccggagcgcgaggggctcgggggggcgcggcggttcgggtcgcagagccagggaccccaggacccgggaggcggcgcagccggggccgccggaggagcgcgggtgacctggcggcggcgagatgccgctcgcccagctcaaggagccctggccgctcatggagctagtgccgctggacccggagaatggacagacctcaggggaagaagctggacttcagccgtccaaggatgagggcgtcctcaaggagatctccatcacgcaccacgtcaaggctggctctgagaaggctgatccatcccatttcgagctcctcaaggttctgggccagggatcctttggcaaagtcttcctggtgcggaaagtcacccggcctgacagtgggcacctgtatgctatgaaggtgctgaagaaggcaacgctgaaagtacgtgaccgcgtccggaccaagatggagagagacatcctggctgatgtaaatcacccattcgtggtgaagctgcactatgccttccagaccgagggcaagctctatctcattctggacttcctgcgtggtggggacctcttcacccggctctcaaaagaggtgatgttcacggaggaggatgtgaagttttacctggccgagctggctctgggcctggatcacctgcacagcctgggtatcatttacagagacctcaagcctgagaacatccttctggatgaggagggccacatcaaactcactgactttggcctgagcaaagaggccattgaccacgagaagaaggcctattctttctgcgggacagtggagtacatggcccctgaggtcgtcaaccgccagggccactcccatagtgcggactggtggtcctatggggtgttgatgtttgagatgctgacgggctccctgcccttccaggggaaggaccggaaggagaccatgacactgattctgaaggcgaagctaggcatgccccagtttctgagcactgaagcccagagcctcttgcgggccctgttcaagcggaatcctgccaaccggctcggctccggccctgatggggcagaggaaatcaagcggcatgtcttctactccaccattgactggaataagctataccgtcgtgagatcaagccacccttcaagccagcagtggctcagcctgatgacaccttctactttgacaccgagttcacgtcccgcacacccaaggattccccaggcatcccccccagcgctggggcccatcagctgttccggggcttcagcttcgtggccaccggcctgatggaagacgacggcaagcctcgtgccccgcaggcacccctgcactcggtggtacagcaactccatgggaagaacctggtttttagtgacggctacgtggtaaaggagacaattggtgtgggctcctactctgagtgcaagcgctgtgtccacaaggccaccaacatggagtatgctgtcaaggtcattgataagagcaagcgggatccttcagaagagattgagattcttctgcggtatggccagcaccccaacatcatcactctgaaagatgtgtatgatgatggcaaacacgtgtacctggtgacagagctgatgcggggtggggagctgctggacaagatcctgcggcagaagttcttctcagagcgggaggccagctttgtcctgcacaccattggcaaaactgtggagtatctgcactcacagggggttgtgcacagggacctgaagcccagcaacatcctgtatgtggacgagtccgggaatcccgagtgcctgcgcatctgtgactttggttttgccaaacagctgcgggctgagaatgggctcctcatgacaccttgctacacagccaactttgtggcgcctgaggtgctgaagcgccagggctacgatgaaggctgcgacatctggagcctgggcattctgctgtacaccatgctggcaggatatactccatttgccaacggtcccagtgacacaccagaggaaatcctaacccggatcggcagtgggaagtttaccctcagtgggggaaattggaacacagtttcagagacagccaaggacctggtgtccaagatgctacacgtggatccccaccagcgcctcacagctaagcaggttctgcagcatccatgggtcacccagaaagacaagcttccccaaagccagctgtcccaccaggacctacagcttgtgaagggagccatggctgccacgtactccgcactcaacagctccaagcccaccccccagctgaagcccatcgagtcatccatcctggcccagcggcgagtgaggaagttgccatccaccaccctgtgaggcaccagggcattcgggccacagggcggtgctagcttgacagagtcagcatgcttcccagagggagcaggccggaaccacagggccagagggagctggaacccgaggggccggggaagctgccagcccagaacacccctaatgagggtgtgagaagtgccttctccttccccaggatggactcttctcggctcaggctctgctggtggaaagcgattcactgtataaacttttttttatgaaaaaaatggcatcaaccaccatggatttttacaagatccatttgcctttctgggagcagaaacagccattgcggccccaggaggggaactgagtcacgctggggctctctgagactctttagagcagctttgggatcccaccctggggacccccatgattggccacctgtagccatctgcacacacctccgagacagtccagtgtcacctctctcagagcatctggctgtttagcagaactcattctatccccaatcagctccttttccgttctgttctgctgggagttctagaaccacttcctgctacaggaggggtctcatgtcctgctggcttccagcttcaggcaccagcatccaccttggctctgccagtggatcccctgcggtcaggctgggcagccccagagagaggatgtggaaagcactttttggctgacttcatctggggttggcaacaggacagagttcacaggaggccagtgggcgggccatgagggacagggtcttttttcatttcttcctcagctggttactcagggttcatctgtccatggcctttctaataaactgttgagttgaagc

SEQ ID NO: 58073 - DNA, 3089 bp, Homo sapiens
ccacgcgtcgcggagggagccgaagtgctagtgccgcggcggcggcggcggacggcccagccggagcgcgaggggctcgggggggcgcggcggttcgggtcgcagagccagggaccccaggacccgggaggcggcgcagccggggccgccggaggagcgcgggtgacctggcggcggcgagatgccgctcgcccagctcaaggagccctggccgctcatggagctagtgccgctggacccggagaatggacagacctcaggggaagaagctggacttcagccgtccaaggatgagggcgtcctcaaggagatctccatcacgcaccacgtcaaggctggctctgagaaggctgatccatcccatttcgagctcctcaaggttctgggccagggatcctttggcaaagtcttcctggtgcggaaagtcacccggcctgacagtgggcacctgtatgctatgaaggtgctgaagaaggcaacgctgaaagtacgtgaccgcgtccggaccaagatggagagagacatcctggctgatgtaaatcacccattcgtggtgaagctgcactatgccttccagaccgagggcaagctctatctcattctggacttcctgcgtggtggggacctcttcacccggctctcaaaagaggtgatgttcacggaggaggatgtgaagttttacctggccgagctggctctgggcctggatcacctgcacagcctgggtatcatttacagagacctcaagcctgagaacatccttctggatgaggagggccacatcaaactcactgactttggcctgagcaaagaggccattgaccacgagaagaaggcctattctttctgcgggacagtggagtacatggcccctgaggtcgtcaaccgccagggccactcccatagtgcggactggtggtcctatggggtgttgatgtttgagatgctgacgggctccctgcccttccaggggaaggaccggaaggagaccatgacactgattctgaaggcgaagctaggcatgccccagtttctgagcactgaagcccagagcctcttgcgggccctgttcaagcggaatcctgccaaccggctcggctccggccctgatggggcagaggaaatcaagcggcatgtcttctactccaccattgactggaataagctataccgtcgtgagatcaagccacccttcaagccagcagtggctcagcctgatgacaccttctactttgacaccgagttcacgtcccgcacacccaaggattccccaggcatcccccccagcgctggggcccatcagctgttccggggcttcagcttcgtggccaccggcctgatggaagacgacggcaagcctcgtgccccgcaggcacccctgcactcggtggtacaggtcattgataagagcaagcgggatccttcagaagagattgagattcttctgcggtatggccagcaccccaacatcatcactctgaaagatgtgtatgatgatggcaaacacgtgtacctggtgacagagctgatgcggggtggggagctgctggacaagatcctgcggcagaagttcttctcagagcgggaggccagctttgtcctgcacaccattggcaaaactgtggagtatctgcactcacagggggttgtgcacagggacctgaagcccagcaacatcctgtatgtggacgagtccgggaatcccgagtgcctgcgcatctgtgactttggttttgccaaacagctgcgggctgagaatgggctcctcatgacaccttgctacacagccaactttgtggcgcctgaggtgctgaagcgccagggctacgatgaaggctgcgacatctggagcctgggcattctgctgtacaccatgctggcaggatatactccatttgccaacggtcccagtgacacaccagaggaaatcctaacccggatcggcagtgggaagtttaccctcagtgggggaaattggaacacagtttcagagacagccaaggacctggtgtccaagatgctacacgtggatccccaccagcgcctcacagctaagcaggttctgcagcatccatgggtcacccagaaagacaagcttccccaaagccagctgtcccaccaggacctacagcttgtgaagggagccatggctgccacgtactccgcactcaacagctccaagcccaccccccagctgaagcccatcgagtcatccatcctggcccagcggcgagtgaggaagttgccatccaccaccctgtgaggcaccagggcattcgggccacagggcggtgctagcttgacagagtcagcatgcttcccagagggagcaggccggaaccacagggccagagggagctggaacccgaggggccggggaagctgccagcccagaacacccctaatgagggtgtgagaagtgccttctccttccccaggatggactcttctcggctcaggctctgctggtggaaagcgattcactgtataaacttttttttatgaaaaaaatggcatcaaccaccatggatttttacaagatccatttgcctttctgggagcagaaacagccattgcggccccaggaggggaactgagtcacgctggggctctctgagactctttagagcagctttgggatcccaccctggggacccccatgattggccacctgtagccatctgcacacacctccgagacagtccagtgtcacctctctcagagcatctggctgtttagcagaactcattctatccccaatcagctccttttccgttctgttctgctgggagttctagaaccacttcctgctacaggaggggtctcatgtcctgctggcttccagcttcaggcaccagcatccaccttggctctgccagtggatcccctgcggtcaggctgggcagccccagagagaggatgtggaaagcactttttggctgacttcatctggggttggcaacaggacagagttcacaggaggccagtgggcgggccatgagggacagggtcttttttcatttcttcctcagctggttactcagggttcatctgtccatggcctttctaataaactgttgagttgaagc

SEQ ID NO: 58074 - DNA, 2325 bp, Homo sapiens
agagacgagagacattacactgattctgaaggcgaagctaggcatgccccagtttctgagcactgaagcccagagcctcttgcgggccctgttcaagcggaatcctgccaaccggctcggttcctcgtctcaatgggagatgatgatcccaagcttgcttcagggctctgttgatgaaatgaggttgtgtgaacatgccggcatgtagctccggccctgatggggcagaggaaatcaagcggcatgtcttctactccaccattgactggaataagctataccgtcgtgagatcaagccacccttcaagccagcagtggctcagcctgatgacaccttctactttgacaccgagttcacgtcccgcacacccaaggattccccaggcatcccccccagcgctggggcccatcagctgttccggggcttcagcttcgtggccaccggcctgatggaagacgacggcaagcctcgtgccccgcaggcacccctgcactcggtggtacagcaactccatgggaagaacctggtttttagtgacggctacgtggtaaaggagacaattggtgtgggctcctactctgagtgcaagcgctgtgtccacaaggccaccaacatggagtatgctgtcaaggtcattgataagagcaagcgggatccttcagaagagattgagattcttctgcggtatggccagcaccccaacatcatcactctgaaagatgtgtatgatgatggcaaacacgtgtacctggtgacagagctgatgcggggtggggagctgctggacaagatcctgcggcagaagttcttctcagagcgggaggccagctttgtcctgcacaccattggcaaaactgtggagtatctgcactcacagggggttgtgcacagggacctgaagcccagcaacatcctgtatgtggacgagtccgggaatcccgagtgcctgcgcatctgtgactttggttttgccaaacagctgcgggctgagaatgggctcctcatgacaccttgctacacagccaactttgtggcgcctgaggtgctgaagcgccagggctacgatgaaggctgcgacatctggagcctgggcattctgctgtacaccatgctggcaggatatactccatttgccaacggtcccagtgacacaccagaggaaatcctaacccggatcggcagtgggaagtttaccctcagtgggggaaattggaacacagtttcagagacagccaaggacctggtgtccaagatgctacacgtggatccccaccagcgcctcacagctaagcaggttctgcagcatccatgggtcacccagaaagacaagcttccccaaagccagctgtcccaccaggacctacagcttgtgaagggagccatggctgccacgtactccgcactcaacagctccaagcccaccccccagctgaagcccatcgagtcatccatcctggcccagcggcgagtgaggaagttgccatccaccaccctgtgaggcaccagggcattcgggccacagggcggtgctagcttgacagagtcagcatgcttcccagagggagcaggccggaaccacagggccagagggagctggaacccgaggggccggggaagctgccagcccagaacacccctaatgagggtgtgagaagtgccttctccttccccaggatggactcttctcggctcaggctctgctggtggaaagcgattcactgtataaacttttttttatgaaaaaaatggcatcaaccaccatggatttttacaagatccatttgcctttctgggagcagaaacagccattgcggccccaggaggggaactgagtcacgctggggctctctgagactctttagagcagctttgggatcccaccctggggacccccatgattggccacctgtagccatctgcacacacctccgagacagtccagtgtcacctctctcagagcatctggctgtttagcagaactcattctatccccaatcagctccttttccgttctgttctgctgggagttctagaaccacttcctgctacaggaggggtctcatgtcctgctggcttccagcttcaggcaccagcatccaccttggctctgccagtggatcccctgcggtcaggctgggcagccccagagagaggatgtggaaagcactttttggctgacttcatctggggttggcaacaggacagagttcacaggaggccagtgggcgggccatgagggacagggtcttttttcatttcttcctcagctggttactcagggttcatctgtccatggcctttctaataaactgttgagttgaagc

SEQ ID NO: 58075 - DNA, 1478 bp, Homo sapiens
ggttattcctatttctcagcagggaaactgaggctcagagagttgaaggaacttgcccagggcactcatttgatgagtgcagaaggcaagttttgaacctgaatctgtctgagcccaaacatgaggcttttcccaccttcccacatggctttttgaaggcaaaggagaaatggaagggtgttccaggacgaagggcctagagcagcaaaggcccagcgacaggaaccttggctgtgtgcggggagccctggagcagagtggagaatggatcccaggggctgccgcaagggttcaggcgggagctagcaggagatggttgccctcctgtgccccatcaggggcctgctcccctgcagccctcccacaacccccttgcccactgtgtccccaggacctggtgtccaagatgctacacgtggatccccaccagcgcctcacagctaagcaggttctgcagcatccatgggtcacccagaaagacaagcttccccaaagccagctgtcccaccaggacctacagcttgtgaagggagccatggctgccacgtactccgcactcaacagctccaagcccaccccccagctgaagcccatcgagtcatccatcctggcccagcggcgagtgaggaagttgccatccaccaccctgtgaggcaccagggcattcgggccacagggcggtgctagcttgacagagtcagcatgcttcccagagggagcaggccggaaccacagggccagagggagctggaacccgaggggccggggaagctgccagcccagaacacccctaatgagggtgtgagaagtgccttctccttccccaggatggactcttctcggctcaggctctgctggtggaaagcgattcactgtataaacttttttttatgaaaaaaatggcatcaaccaccatggatttttacaagatccatttgcctttctgggagcagaaacagccattgcggccccaggaggggaactgagtcacgctggggctctctgagactctttagagcagctttgggatcccaccctggggacccccatgattggccacctgtagccatctgcacacacctccgagacagtccagtgtcacctctctcagagcatctggctgtttagcagaactcattctatccccaatcagctccttttccgttctgttctgctgggagttctagaaccacttcctgctacaggaggggtctcatgtcctgctggcttccagcttcaggcaccagcatccaccttggctctgccagtggatcccctgcggtcaggctgggcagccccagagagaggatgtggaaagcactttttggctgacttcatctggggttggcaacaggacagagttcacaggaggccagtgggcgggccatgagggacagggtcttttttcatttcttcctcagctggttactcagggttcatctgtccatggcctttctaataaactgttgagttgaagc

SEQ ID NO: 58076 - DNA, 2522 bp, Homo sapiens
ccacgcgtcgcggagggagccgaagtgctagtgccgcggcggcggcggcggacggcccagccggagcgcgaggggctcgggggggcgcggcggttcgggtcgcagagccagggaccccaggacccgggaggcggcgcagccggggccgccggaggagcgcgggtgacctggcggcggcgagatgccgctcgcccagctcaaggagccctggccgctcatggagctagtgccgctggacccggagaatggacagacctcaggggaagaagctggacttcagccgtccaaggatgagggcgtcctcaaggagatctccatcacgcaccacgtcaaggctggctctgagaaggctgatccatcccatttcgagctcctcaaggttctgggccagggatcctttggcaaagtcttcctggtgcggaaagtcacccggcctgacagtgggcacctgtatgctatgaaggtgctgaagaaggcaacgctgaaagtacgtgaccgcgtccggaccaagatggagagagacatcctggctgatgtaaatcacccattcgtggtgaagctgcactatgccttccagaccgagggcaagctctatctcattctggacttcctgcgtggtggggacctcttcacccggctctcaaaagaggtgatgttcacggaggaggatgtgaagttttacctggccgagctggctctgggcctggatcacctgcacagcctgggtatcatttacagagacctcaagcctgagaacatccttctggatgaggagggccacatcaaactcactgactttggcctgagcaaagaggccattgaccacgagaagaaggcctattctttctgcgggacagtggagtacatggcccctgaggtcgtcaaccgccagggccactcccatagtgcggactggtggtcctatggggtgttgatgtttgagatgctgacgggctccctgcccttccaggggaaggaccggaaggagaccatgacactgattctgaaggcgaagctaggcatgccccagtttctgagcactgaagcccagagcctcttgcgggccctgttcaagcggaatcctgccaaccggctcggctccggccctgatggggcagaggaaatcaagcggcatgtcttctactccaccattgactggaataagctataccgtcgtgagatcaagccacccttcaagccagcagtggctcagcctgatgacaccttctactttgacaccgagttcacgtcccgcacacccaaggattccccaggcatcccccccagcgctggggcccatcagctgttccggggcttcagcttcgtggccaccggcctgatggaagacgacggcaagcctcgtgccccgcaggcacccctgcactcggtggtacagcaactccatgggaagaacctggtttttagtgacggctacgtggtaaaggagacaattggtgtgggctcctactctgagtgcaagcgctgtgtccacaaggccaccaacatggagtatgctgtcaaggtcattgataagagcaagcgggatccttcagaagagattgagattcttctgcggtatggccagcaccccaacatcatcactctgaaagatgtgtatgatgatggcaaacacgtgtacctggtgacagagctgatgcggggtggggagctgctggacaagatcctgcggcagaagttcttctcagagcgggaggccagctttgtcctgcacaccattggcaaaactgtggagtatctgcactcacagggggttgtgcacagggacctgaagcccagcaacatcctgtatgtggacgagtccgggaatcccgagtgcctgcgcatctgtgactttggttttgccaaacagctgcgggctgagaatgggctcctcatgacaccttgctacacagccaactttgtggcgcctgaggtgctgaagcgccagggctacgatgaaggctgcgacatctggagcctgggcattctgctgtacaccatgctggcaggatatactccatttgccaacggtcccagtgacacaccagaggaaatcctaacccggatcggcagtgggaagtttaccctcagtgggggaaattggaacacagtttcagagacagccaaggtgagtctgtacggcctgcgtgggcttatttggaggagggaggcagggtcccatcctagggcttttcagcagttcatgaacagcctcatttctccaagcggatgttccacaaatccctgttgctgtatttctccaagcggaagattcccaggcagaccaccaccacctccgcaccttgttggggtaacctggtgatcattcattggcccttctcattctggaccctgtggggcactgagggctgcatcatcacagtcccggctttgtggaaacgtagtgtagtgagggatacaggtttgcacacaaggggcagagatgcctggaggcacagataggcggatgctcttggccaggggtgtggaccgtggagacacagagcagagcaactggccat

SEQ ID NO: 58077 - DNA, 1396 bp, Homo sapiens
ccacgcgtcgcggagggagccgaagtgctagtgccgcggcggcggcggcggacggcccagccggagcgcgaggggctcgggggggcgcggcggttcgggtcgcagagccagggaccccaggacccgggaggcggcgcagccggggccgccggaggagcgcgggtgacctggcggcggcgagatgccgctcgcccagctcaaggagccctggccgctcatggagctagtgccgctggacccggagaatggacagacctcaggggaagaagctggacttcagccgtccaaggatgagggcgtcctcaaggagatctccatcacgcaccacgtcaaggctggctctgagaaggctgatccatcccatttcgagctcctcaaggttctgggccagggatcctttggcaaagtcttcctggtgcggaaagtcacccggcctgacagtgggcacctgtatgctatgaaggtgctgaagaaggcaacgctgaaagtacgtgaccgcgtccggaccaagatggagagagacatcctggctgatgtaaatcacccattcgtggtgaagctgcactatgccttccagaccgagggcaagctctatctcattctggacttcctgcgtggtggggacctcttcacccggctctcaaaagaggtgatgttcacggaggaggatgtgaagttttacctggccgagctggctctgggcctggatcacctgcacagcctgggtatcatttacagagacctcaagcctgagaagtgagtgaagcctccagccccaccccagcctccccaggggaggcctcttctaggacagggccatcctgaggtgggtgggcatggctttctccagaaacgtctccctctcttgggcaatctgagggatgggtgagtggggtgggtggtagtgccagctgcccagtcactaatgctaccattaccaagggccaggtactttgcatgcaggtaatgttgcccgtctttttttgctaatctagtgtgacatttgagatgccacctttagaggtctttccttgataaagccctatagaattttccctaatatctaactaccctcaaatgataactaaggagccaggggcaggtggtgagttggaataagatctggctttagtgttaggcagccctgtattcaaatcctgtctccacctactagctagacttactagctcaatgactgtagagctacttaactgccctgagccttagttttcccattagcaaaacggggccctaatagtacttgcctcacacagttgcttcaaggattagcaaaaaagataggcaacacccctgcgtggtactgctaccaccctgcaacacccgcccagtcatcagagagaattgggtggagcacctcctctgggctgaacccaac

SEQ ID NO: 58078 - DNA, 3113 bp, Homo sapiens
cagccccggactctgcctgctcctgccatggtgccgtggccctgctgggcggatggagcaggatcccaagccgccccgtctgcggctctgggccctgatcccctggcttcccaggaagcagcggcccaggatcagccagacctctctgcctgtccctggccctggctctggcccccagcgggactcggatgagggcgtcctcaaggagatctccatcacgcaccacgtcaaggctggctctgagaaggctgatccatcccatttcgagctcctcaaggttctgggccagggatcctttggcaaagtcttcctggtgcggaaagtcacccggcctgacagtgggcacctgtatgctatgaaggtgctgaagaaggcaacgctgaaagtacgtgaccgcgtccggaccaagatggagagagacatcctggctgatgtaaatcacccattcgtggtgaagctgcactatgccttccagaccgagggcaagctctatctcattctggacttcctgcgtggtggggacctcttcacccggctctcaaaagaggtgatgttcacggaggaggatgtgaagttttacctggccgagctggctctgggcctggatcacctgcacagcctgggtatcatttacagagacctcaagcctgagaacatccttctggatgaggagggccacatcaaactcactgactttggcctgagcaaagaggccattgaccacgagaagaaggcctattctttctgcgggacagtggagtacatggcccctgaggtcgtcaaccgccagggccactcccatagtgcggactggtggtcctatggggtgttgatgtttgagatgctgacgggctccctgcccttccaggggaaggaccggaaggagaccatgacactgattctgaaggcgaagctaggcatgccccagtttctgagcactgaagcccagagcctcttgcgggccctgttcaagcggaatcctgccaaccggctcggctccggccctgatggggcagaggaaatcaagcggcatgtcttctactccaccattgactggaataagctataccgtcgtgagatcaagccacccttcaagccagcagtggctcagcctgatgacaccttctactttgacaccgagttcacgtcccgcacacccaaggattccccaggcatcccccccagcgctggggcccatcagctgttccggggcttcagcttcgtggccaccggcctgatggaagacgacggcaagcctcgtgccccgcaggcacccctgcactcggtggtacagcaactccatgggaagaacctggtttttagtgacggctacgtggtaaaggagacaattggtgtgggctcctactctgagtgcaagcgctgtgtccacaaggccaccaacatggagtatgctgtcaaggtcattgataagagcaagcgggatccttcagaagagattgagattcttctgcggtatggccagcaccccaacatcatcactctgaaagatgtgtatgatgatggcaaacacgtgtacctggtgacagagctgatgcggggtggggagctgctggacaagatcctgcggcagaagttcttctcagagcgggaggccagctttgtcctgcacaccattggcaaaactgtggagtatctgcactcacagggggttgtgcacagggacctgaagcccagcaacatcctgtatgtggacgagtccgggaatcccgagtgcctgcgcatctgtgactttggttttgccaaacagctgcgggctgagaatgggctcctcatgacaccttgctacacagccaactttgtggcgcctgaggtgctgaagcgccagggctacgatgaaggctgcgacatctggagcctgggcattctgctgtacaccatgctggcaggatatactccatttgccaacggtcccagtgacacaccagaggaaatcctaacccggatcggcagtgggaagtttaccctcagtgggggaaattggaacacagtttcagagacagccaaggacctggtgtccaagatgctacacgtggatccccaccagcgcctcacagctaagcaggttctgcagcatccatgggtcacccagaaagacaagcttccccaaagccagctgtcccaccaggacctacagcttgtgaagggagccatggctgccacgtactccgcactcaacagctccaagcccaccccccagctgaagcccatcgagtcatccatcctggcccagcggcgagtgaggaagttgccatccaccaccctgtgaggcaccagggcattcgggccacagggcggtgctagcttgacagagtcagcatgcttcccagagggagcaggccggaaccacagggccagagggagctggaacccgaggggccggggaagctgccagcccagaacacccctaatgagggtgtgagaagtgccttctccttccccaggatggactcttctcggctcaggctctgctggtggaaagcgattcactgtataaacttttttttatgaaaaaaatggcatcaaccaccatggatttttacaagatccatttgcctttctgggagcagaaacagccattgcggccccaggaggggaactgagtcacgctggggctctctgagactctttagagcagctttgggatcccaccctggggacccccatgattggccacctgtagccatctgcacacacctccgagacagtccagtgtcacctctctcagagcatctggctgtttagcagaactcattctatccccaatcagctccttttccgttctgttctgctgggagttctagaaccacttcctgctacaggaggggtctcatgtcctgctggcttccagcttcaggcaccagcatccaccttggctctgccagtggatcccctgcggtcaggctgggcagccccagagagaggatgtggaaagcactttttggctgacttcatctggggttggcaacaggacagagttcacaggaggccagtgggcgggccatgagggacagggtcttttttcatttcttcctcagctggttactcagggttcatctgtccatggcctttctaataaactgttgagttgaagc

SEQ ID NO: 58079 - DNA, 3612 bp, Homo sapiens
ccacgcgtcgcggagggagccgaagtgctagtgccgcggcggcggcggcggacggcccagccggagcgcgaggggctcgggggggcgcggcggttcgggtcgcagagccagggaccccaggacccgggaggcggcgcagccggggccgccggaggagcgcgggtgacctggcggcggcgagatgccgctcgcccagctcaaggagccctggccgctcatggagctagtgccgctggacccggagaatggacagacctcaggggaagaagctggacttcagccgtccaaggatgagggcgtcctcaaggagatctccatcacgcaccacgtcaaggctggctctgagaaggctgatccatcccatttcgagctcctcaaggttctgggccagggatcctttggcaaagtcttcctggtgcggaaagtcacccggcctgacagtgggcacctgtatgctatgaaggtgctgaagaaggcaacgctgaaagtacgtgaccgcgtccggaccaagatggagagagacatcctggctgatgtaaatcacccattcgtggtgaagctgcactatgccttccagaccgagggcaagctctatctcattctggacttcctgcgtggtggggacctcttcacccggctctcaaaagaggtgatgttcacggaggaggatgtgaagttttacctggccgagctggctctgggcctggatcacctgcacagcctgggtatcatttacagagacctcaagcctgagaacatccttctggatgaggagggccacatcaaactcactgactttggcctgagcaaagaggccattgaccacgagaagaaggcctattctttctgcgggacagtggagtacatggcccctgaggtcgtcaaccgccagggccactcccatagtgcggactggtggtcctatggggtgttgatgtttgagatgctgacgggctccctgcccttccaggggaaggaccggaaggagaccatgacactgattctgaaggcgaagctaggcatgccccagtttctgagcactgaagcccagagcctcttgcgggccctgttcaagcggaatcctgccaaccggctcggctccggccctgatggggcagaggaaatcaagcggcatgtcttctactccaccattgactggaataagctataccgtcgtgagatcaagccacccttcaagccagcagtggctcagcctgatgacaccttctactttgacaccgagttcacgtcccgcacacccaaggattccccaggcatcccccccagcgctggggcccatcagctgttccggggcttcagcttcgtggccaccggcctgatggaagacgacggcaagcctcgtgccccgcaggcacccctgcactcggtggtacagcaactccatgggaagaacctggtttttagtgacggctacgtggtaaaggagacaattggtgtgggctcctactctgagtgcaagcgctgtgtccacaaggccaccaacatggagtatgctgtcaaggtcattgataagagcaagcgggatccttcagaagagattgagattcttctgcggtatggccagcaccccaacatcatcactctgaaagatgtgtatgatgatggcaaacacgtgtacctggtgacagagctgatgcggggtggggagctgctggacaagatcctgcggcagaagttcttctcagagcgggaggccagctttgtcctgcacaccattggcaaaactgtggagtatctgcactcacagggggttgtgcacagggacctgaagcccagcaacatcctgtatgtggacgagtccgggaatcccgagtgcctgcgcatctgtgactttggttttgccaaacagctgcgggctgagaatgggctcctcatgacaccttgctacacagccaactttgtggcgcctgaggtgctgaagcgccagggctacgatgaaggctgcgacatctggagcctgggcattctgctgtacaccatgctggcaggatatactccatttgccaacggtcccagtgacacaccagaggaaatcctaacccggatcggcagtgggaagtttaccctcagtgggggaaattggaacacagtttcagagacagccaaggacctggtgtccaagatgctacacgtggatccccaccagcgcctcacagctaagcaggttctgcagcatccatgggtcacccagaaagacaagcttccccaaagccagctgtcccaccaggacctacagcttgtgaagggagccatggctgccacgtactccgcactcaacagctccaagcccaccccccagctgaagcccatcgagtcatccatcctggcccagcggcgagtgaggaagttgccatccaccaccctgtgaggcaccagggcattcgggccacagggcggtgctagcttgacagagtcagcatgcttcccagagggagcaggccggaaccacagggccagagggagctggaacccgaggggccggggaagctgccagcccagaacacccctaatgagggtgtgagaagtgccttctccttccccaggatggactcttctcggctcaggctctgctggtggaaagcgattcactgtataaacttttttttatgaaaaaaatggcatcaaccaccatggatttttacaagatccatttgcctttctgggagcagaaacagccattgcggccccaggaggggaactgagtcacgctggggctctctgagactctttagagcagctttgggatcccaccctggggacccccatgattggccacctgtagccatctgcacacacctccgagacagtccagtgtcacctctctcagagcatctggctgtttagcagaactcattctatccccaatcagctccttttccgttctgttctgctgggagttctagaaccacttcctgctacaggaggggtctcatgtcctgctggcttccagcttcaggcaccagcatccaccttggctctgccagtggatcccctgcggtcaggctgggcagccccagagagaggatgtggaaagcactttttggctgacttcatctggggttggcaacaggacagagttcacaggaggccagtgggcgggccatgagggacagggtcttttttcatttcttcctcagctggttactcagggttcatctgtccatggcctttctaataaactgttgagttgaagcaaaaaaacacaacaacaaaacaaacaaaaacaaaaaaaaacaaaaggggcggggcccttaataaatttcccccgggggggccaaagaatctagcggagtggtccccacgtttgctttggtcaacaagtggggtcccccaatatggcagcagtgctatattgaaacgtaaagacgtgggcccgcttctttcaacacacgctccgtaactcgcgaaaaaagcgtcctctgatatgggcaatcttggggaaggcaacccattattccggggggtggagcctatagtggacacaacatcctacgacatttaaagcccacgagtaaattacaattccacggtttcacgggtaccaacatgaaaatcatgcgctgaaatggcatcggactatatcgaatttca

SEQ ID NO: 58080 - DNA, 2288 bp, Homo sapiens
ccacgcgtcgcggagggagccgaagtgctagtgccgcggcggcggcggcggacggcccagccggagcgcgaggggctcgggggggcgcggcggttcgggtcgcagagccagggaccccaggacccgggaggcggcgcagccggggccgccggaggagcgcgggtgacctggcggcggcgagatgccgctcgcccagctcaaggagccctggccgctcatggagctagtgccgctggacccggagaatggacagacctcaggggaagaagctggacttcagccgtccaaggatgagggcgtcctcaaggagatctccatcacgcaccacgtcaaggctggctctgagaaggctgatccatcccatttcgagctcctcaaggttctgggccagggatcctttggcaaagtcttcctggtgcggaaagtcacccggcctgacagtgggcacctgtatgctatgaaggtgctgaagaaggcaacgctgaaagtacgtgaccgcgtccggaccaagatggagagagacatcctggctgatgtaaatcacccattcgtggtgaagctgcactatgccttccagaccgagggcaagctctatctcattctggacttcctgcgtggtggggacctcttcacccggctctcaaaagaggtgatgttcacggaggaggatgtgaagttttacctggccgagctggctctgggcctggatcacctgcacagcctgggtatcatttacagagacctcaagcctgagaacatccttctggatgaggagggccacatcaaactcactgactttggcctgagcaaagaggccattgaccacgagaagaaggcctattctttctgcgggacagtggagtacatggcccctgaggtcgtcaaccgccagggccactcccatagtgcggactggtggtcctatggggtgttgatgtttgagatgctgacgggctccctgcccttccaggggaaggaccggaaggagaccatgacactgattctgaaggcgaagctaggcatgccccagtttctgagcactgaagcccagagcctcttgcgggccctgttcaagcggaatcctgccaaccggctcggctccggccctgatggggcagaggaaatcaagcggcatgtcttctactccaccattgactggaataagctataccgtcgtgagatcaagccacccttcaagccagcagtggctcagcctgatgacaccttctactttgacaccgagttcacgtcccgcacacccaaggattccccaggcatcccccccagcgctggggcccatcagctgttccggggcttcagcttcgtggccaccggcctgatggaagacgacggcaagcctcgtgccccgcaggcacccctgcactcggtggtacagcaactccatgggaagaacctggtttttagtgacggctacgtggtaaaggagacaattggtgtgggctcctactctgagtgcaagcgctgtgtccacaaggccaccaacatggagtatgctgtcaaggtcattgataagagcaagcgggatccttcagaagagattgagattcttctgcggtatggccagcaccccaacatcatcactctgaaagatgtgtatgatgatggcaaacacgtgtacctggtgacagagctgatgcggggtggggagctgctggacaagatcctgatggaagacgacggcaagcctcgtgccccgcaggcacccctgcactcggtggtacagcaactccatgggaagaacctggtttttagtgacggctacgtggtaaaggagacaattgctggggctctctgagactctttagagcagctttgggatcccaccctggggacccccatgattggccacctgtagccatctgcacacacctccgagacagtccagtgtcacctctctcagagcatctggctgtttagcagaactcattctatccccaatcagctccttttccgttctgttctgctgggagttctagaaccacttcctgctacaggaggggtctcatgtcctgctggcttccagcttcaggcaccagcatccaccttggctctgccagtggatcccctgcggtcaggctgggcagccccagagagaggatgtggaaagcactttttggctgacttcatctggggttggcaacaggacagagttcacaggaggccagtgggcgggccatgagggacagggtcttttttcatttcttcctcagctggttactcagggttcatctgtccatggcctttctaataaactgttgagttgaagc

SEQ ID NO: 58081 - DNA, 695 bp, Homo sapiens
cgagctcggtaccccgatgtctctgccgatgtcacagtcgacgtcccgggtcatcgatggctcaggctctgctggtggaaagcgattcactgtataaacttttttttatgaaaaaaatggcatcaaccaccatggatttttacaagatccatttgcctttctgggagcagaaacagccattgcggccccaggaggggaactgagtcacgctggggctctctgagactctttagagcagctttgggatcccaccctggggacccccatgattggccacctgtagccatctgcacacacctccgagacagtccagtgtcacctctctcagagcatctggctgtttagcagaactcattctatccccaatcagctccttttccgttctgttctgctgggagttctagaaccacttcctgctacaggaggggtctcatgtcctgctggcttccagcttcaggcaccagcatccaccttggctctgccagtggatcccctgcggtcaggctgggcagccccagagagaggatgtggaaagcactttttggctgacttcatctggggttggcaacaggacagagttcacaggaggccagtgggcgggccatgagggacagggtcttttttcatttcttcctcagctggttactcagggttcatctgtccatggcctttctaataaactgttgagttgaagc

SEQ ID NO: 58082 - DNA, 750 bp, Homo sapiens
atcttataagtgggatttatattcactatgtaattgaagttttttccaatgaagcaccgtatatagtttatctgggaaattggctgaagaataaaatgtgtgatgttattcagtgtacagtttctaggtcatcagaagataccactaccttcccactactggaaaagaaaaaagaaaagttttccacagtgcctgaactgttttgtatgcttatcttttaaaattgccagaaatctcacttactggagattcagcagtccctttctgaaaatacacatactttagtgcaaataaagccagtggatctctttcttcataagtccttaaacctagtcgaggtcatctgtttggcagagataggagtaagataatgtgaaataggaaccaacgagagagaacttgcttaggagttgaaaggggtatggaaagatgttagaggtaaaatttgtcgaatctagtgttttgactagggcaggccagaatattcagtatcagtatcaatatcagaagcttttgtagcctttgtttagaaacctagtcatttataacattttgtgggtgaatgacatcattaccaaacaaactttcagatgaaactttggaactcaagctgtaaattgtggatagctcatgtgcagtactacaaatcaaaacaaatactataaagtgtttggtagtccatttcctgaatgaaagtttgtccaaagtatatcaactttctgcagtcttacatgcagtagttattagttt

SEQ ID NO: 58083 - DNA, 183 bp, Homo sapiens
gaattccaattttttttgcattctcagcagcagttgtttttatctttttgtttatagccatcctagtgggtatgaggcagtatttctttccttcttcttcttcttttttttttttcgagaccgagtttcgttcttgtcgcccaggctggagtgcagtgatgcaatctcggctcactgcaacct

SEQ ID NO: 58084 - DNA, 816 bp, Homo sapiens
gaagacaccctgtgccatgtggaggggccctgccctctggggcaagaggtcagggaggagggcgctggctgggttcccaggcgcctgcccctgagaggcgcaaatggccctaatggggttattaggtggagcagatgcgtccggctcctgctgtggaggaaatgctcaaatgatcttgaagctaccaggctgggagaggcaggcaggggatggggcagacaggctgccaacctctgtgagataagccctggcctctccagaaccttttcagaacagctatgagccccaaccctggggctgagtgacccaagacagatcactcacactctctgggcctcagtttccccttacataaaaagcaatggttaggccaggtgcagatggctcacacctctaatcctagtgctttgggaggccgaggtgggaggattgcttgagaccaagagttcaagtccagcctgggcaacatagcaacaccccatctctacaaaacataaatacaaaaattaaggccgggcatggtggttaaggccaggcgtggtggctcacacttggaatcccagcattttgggaggcagaagcaggaggatcacctgaggtcaggagtttgagaccgacctggccaacatggtgaaaacccgtctctatacaaaatacaaaaattagccagccatggtggtgcatgcctgtaatccctgctgctgtggaggctgaggcgggagaatcacttgaacccaggtgaaggaggtttcagtgaggcccggatcgatgccactgcactccagcctgggtgacagagaacaagactgtctcaaa

SEQ ID NO: 58085 - DNA, 498 bp, Homo sapiens
agtgcagtggcacgatcatagctcactgcagccttgaacccctgggttcaagcaatcctcccacctcagcctcccaagtagctgggattataggtatgtgccaccacccagctaatttttttattttttgtagagatggggtctcgccatgttgcccaggctagtttggaactcctgagctcaagagatgctcccaccttggcctcccaaagtgctgaaattacaagcatgagccaccatgcctggcctcccttcctggccttctgcaggctggtcttaaactcctgacctcaagtgatcctcccgcttcggcctccccaggtgctgggattgcaggcatgagccaccgcacccagcggggacaggacaattttgccagctggagaaggggtggcccccaaatgtccccttcaccaccctcctgcctcttccttcagaacactttttccctgaagcccctcctgaatagctgggattacaggcacccgccaccatgcc

SEQ ID NO: 58086 - DNA, 584 bp, Homo sapiens
gaagacaccctgtgccatgtggaggggccctgccctctggggcaagaggtcagggaggagggcgctggctgggttcccaggcgcctgcccctgagaggcgcaaatggccctaatggggttattaggtggagcagatgcgtccggctcctgctgtggaggaaatgctcaaatgatcttgaagctaccaggctgggagaggcaggcaggggatggggcagacaggctgccaacctctgtgagataagccctggcctctccagaaccttttcagaacagctatgagccccaaccctggggctgagtgacccaagacagatcactcacactctctgggcctcagtttccccttacataaaaagcaatggttaggccaggtgcagatggctcacacctcccaaagtgctgaaattacaagcatgagccaccatgcctggcctcccttcctggccttctggtctccagactggagagagggccacaaagtcctgcccagacagagggctgctaaggctggggtggggctgggggtgtgcagaagggactctgcaggggctgacctctgagtctcaggggacagggcaaat

SEQ ID NO: 58087 - DNA, 1173 bp, Homo sapiens
gaagacaccctgtgccatgtggaggggccctgccctctggggcaagaggtcagggaggagggcgctggctgggttcccaggcgcctgcccctgagaggcgcaaatggccctaatggggttattaggtggagcagatgcgtccggctcctgctgtggaggaaatgctcaaatgatcttgaagctaccaggctgggagaggcaggcaggggatggggcagacaggctgccaacctctgtgagataagccctggcctctccagaaccttttcagaacagctatgagccccaaccctggggctgagtgacccaagacagatcactcacactctctgggcctcagtttccccttacataaaaagcaatggttaggccaggtgcagatggctcacacctctaatcctagtgctttgggaggccgaggtgggaggattgcttgagaccaagagttcaagtccagcctgggcaacatagcaacaccccatctctacaaaacataaatacaaaaattaaggccgggcatggtggttaaggccaggcgtggtggctcacacttggaatcccgcttcggcctccccaggtgctgggattgcaggcatgagccaccgcacccagcggggacaggacaattttgccagctggagaaggggtggcccccaaatgtccccttcaccaccctcctgcctcttccttcagaacactttttccctgaagccctcctgggtagccccctacccacatgcctcagcattgggaggtggggagtatgggggtcccccttctcctcagccccatttggagtaatgtcctgtgcagctgagctcacaactcctcctccacctgtccctccacccggtgtcactggcaattgctcacttcctgggcctgcacccactcagctcccctatccctggggcatcagcctcagccagctcccatgtggactaatgacccttgtccctcccctcagctgcctctcttttttctttttttttttgtttttgagacagagtctggctctgtctcagaataaaaaatgccacatcatatgatagtcacacagaaaaatgctaaggtgttatctgcccgcgttctgccttttttccacaccggcacggaggagccacgttgttcggtggtccttcggaacttgtgatttgcaggtgacatcctcgg

SEQ ID NO: 58088 - DNA, 838 bp, Homo sapiens
ggctggggtacaatggcacgatctcggctcactgcaatctccgcctcctgggttcaagtgattctcatctctcagcctcccgagtagctgggattacaggagtgcaccaccatgcccagctgatttttgtatttttagaagagattgggcggggtggggggtggggtgcgggtttcaccgtgtggcccaggctggtcttaaactcctgacctcaagtgatcctcccgcttcggcctccccaggtgctgggattgcaggcatgagccaccgcacccagcggggacaggacaattttgccagctggagaaggggtggcccccaaatgtccccttcaccaccctcctgcctcttccttcagaacactttttccctgaagccctcctgggtagccccctacccacatgcctcagcattgggaggtggggagtatgggggtcccccttctcctcagccccatttggagtaatgtcctgtgcagctgagctcacaactcctcctccacctgtccctccacccggtgtcactggcaattgctcacttcctgggcctgcacccactcagctcccctatccctggggcatcagcctcagccagctcccatgtggactaatgacccttgtccctcccctcagctgcctctcttttttctttttttttttgtttttgagacagagtctggctctgtctcagaataaaaaatgccacatcatatgatagtcacacagaaaaatgctaaggtgttatctgcccgcgttctgccttttttccacaccggcacggaggagccacgttgttcggtggtccttcggaacttgtgatttgcaggtgacatcctcgg

SEQ ID NO: 58089 - DNA, 995 bp, Homo sapiens
catgcctggctaatttttgtatttttagtagagacagggttctgccatgttggccaggctggtctcgaactcctaacctcaagtgatctgcccactttggcctcctaaagtgccgggattataggcgtgagccaccatgcccagcctgtgttttaaatattttacattagaaaatgtataaggcaaacaccatagattttcctaactagaattaatcgaggtaaaggaaagcactagtgtcatcttctcttcactatctctgataatagagcccaatattagtaagcacttcacagccaaacatgcctacaaagtgattattttgttgaatcaaaagcaaaagttttcattcacttcttgactgactatagaatctcaggcttccttaagtgagtgaccagagggatatattgttgatatagacagatgctgccaatgcacaaagatcatccatttaggtttttcagttgatgaagtgaggcatgcattgccagactttacttacatgaattaacagaatcaacaggtgatttggtatcagtactgctattggctggcgggtttcacctctggtttcagaaaagaaagagatgataccttttcaatgctgcatttcaagtcaaccatatgaaaagcaaagttttattccagtcacttttctttctctcacattgtggaagaaaagtgccagccactgctactctaaccactaaccatggtacagatgtttgaaaaatgtgaaacagagaaatgaaacaaaaaggaaaccctcaaaaattaagtttcgcataagtgaaaaatacagtatttatgtatcataactgcaaaaagatcaatggacttttttctcatgtattaaacaaaaataaacacaaacattgattttttgacttagtgttttgttgaaaccaacaattacaaggaccaactcaaacatggctaaaagtgggaataaaaataagatttcttttatcctgataaaagattttttatca

SEQ ID NO: 58090 - DNA, 378 bp, Homo sapiens
tcgattccattcgttgatgattccattcgattccattcaataattctattcgattccatttgatgatgattcaattctattacactggatgcttctattcgattccatttgatgaggactccattcgattccatttgatgatgattccattcgattgcattcaatgatgattccattcgagtgcattcaaagattacattcgatgccattcaatgatgattccattcgagtccattcgatgatcccattcgattccattcgatgatgattccattcgagtcccttcgatgatcccattcaattccattcgatgatgattccatttgagtccatttgatgattccattcgattccattcgatgatgcttccactcgagt

SEQ ID NO: 58091 - DNA, 288 bp, Homo sapiens
gtagagacagggtttcaccatgttgcccaggttggtctcaaactcctgggctcaagcaatctgcctgcctcagcctcccaaagtgctgggattataggcatgagcccccatgcctggcctataaaccattcttatctggtaatatacacagcctttaaaggtttctattgtattctcatactcctcatctgaagtacaaatatgtttcttaaaaacataaaatatatttcaattaatattccatattttaatatttttattttcttaaactgtttttctgccaagtcg

SEQ ID NO: 58092 - DNA, 325 bp, Homo sapiens
ttgcatacctgtgctgtgtcagcaccaggcagagtcatctcattccactggtctaatggatggcaattgaatttaattaacaaaactcctttggacttagtttcatactgtgctgaatgtaatggaatcctctctgccccccttatctctctctctttcactctctctcaactaaaaattgtccttaactaacatccactttaagaatattaaaggctatacattatacttaaaagatacaatacagtcatccccctttccatgacttaaattgtataacataaaataattaaaaagatactttgatagtgatacacagtataga

SEQ ID NO: 58093 - DNA, 326 bp, Homo sapiens
tcagcaggctgtttaaaaggggggatgaaatgttatagaatttgattgtggtaatggttgcataacctaatgaatagaccaaaaacatcgacttgtatacttcatgtggttgaactgcacagtatgtgaattagatctcaataagctggtttttaaaatggcaaaatggaatagaaggtggtctgggtggcactactattcccatgattccaaaagtgacacaacagaagtggctccaagattttagaagaaaaatcccctggggcacccaggcaagcaggggaatgagggcagctgtgaggttctgtagatgccaccagcacctc

SEQ ID NO: 58094 - DNA, 442 bp, Homo sapiens
ccttggccttcccggggggcgggaggccctcgggacaggacgcgctgtccccggagtccggagctcaggccagtggcagtcgacccagcccccgagactccctcacgccgctccaaaaccaaaacggagcccaacacgaagctgggtgaagccgtagcttgcaggagccagggagatgcgctctgcccgggacttcccgggtcctgttgagacggaaaggatcgcagggaagacaggataattggtctttaactctgaccgttaccttcgaaattgcaccttacaagcatgtcctctatttccgtggcttgatggggacactttctctgattaagatccggaataatcacccacccaatgggatctcttagagggaagcgctggttagaatcccctctttggtcggtacctgagactgcatagacctaaactgaaaggtgat

SEQ ID NO: 58095 - DNA, 1066 bp, Homo sapiens
gtttcaccgtgttagccaggatggtctccatctcctgacctcgtgatccgccctcctcagcctcccaacgtgctgggattacaggtgtgagccatcgcgcctggccaaaagggagttcttatattggcagtgtatcatgattaaagttatcctccctctttctctccctcccacatatatattttcgtgtcagtatatgtatatgtgatttgtgctatttgtgtgtgtgtaggtaaatgaaagtggcatcaagagaatctcacattaaaaaaaatttgagatagtacaattcttatgcatcatatgttgcataacgtttgactattaagaaatttgcatcacacgtctacttatttcattaaacatgttacagtcaattaattcacttacaccctccatttccttcttccccctctctcgttctcctgctgcagggtcattatacgttcctactcacaaaatgtccttgttttttcccttactcctgtcattgatcttctgaatctttccggcgaacttaacatggatgttttgatagaaagctctggcattaactctggagttgttttgcaaggaaggttgttcgctttttcaccattttttttttttcaggtccttgaagtgttttcacatagatatttcacaagagccatttcagaattgagaacatttggcgtgcactcttcctcttttggtcccacagtttttatgtgtcctacttgaaattatgtttgctcccgtttcaattgtaatattgcacttactcattagtttttagtttgaactctcctgcgaggtctaatgtagagtttggacaagaacacagattcataataaacctacccagtcaatttggtataaaggcttagaaggtggaactggccacattttgaattggaggtaaggatcaggaatgctaatggagagacataggattttcttatggaaacaagaaacaaataacctctgggcagtattagagcccagagagtgataagcctcttctaacttcaatattctatgtacaaattcacaagactttttttttctttcttttttttgagac

SEQ ID NO: 58096 - DNA, 149 bp, Homo sapiens
cacgccgccttccatctccacgccgccttccatctccacgccgccttccatctccacgccgccttccatcactggcatcacctgcctccctgcttgtttccttttcagatcaaatcctataattacagctgtatttaaacactgttaaa

SEQ ID NO: 58097 - DNA, 458 bp, Homo sapiens
agggaccagacagcttcccgactgcagtgtctttggatggggctggtggggaagcccacctgtgggagcaactccaagtctgtttcctcgatgggaacaataatgtcgacttgattgggttattacaaggattaatagtatgtttggaccacctagcacggggcctggcacacaatgcttgatgcatagcaggtgttcaaaaaatgctggtttcttcttctcttccattctttcctatcattcttcacctcatacttattgactgataagatttttaaaaactcttccttcatccatctttctgttacccaaaagagctaggagatgggggtgttttgcaggactagcctaagtttaaatgtgcacatggtacaatcagggtattaaagccatgtgagtcttcatgggtaggcacgtaacctctggagaaagcccacaagtgcagaaaggctccttcc

SEQ ID NO: 58098 - DNA, 1556 bp, Homo sapiens
agatttccctccttcgtcgctgttgctgccgccatacgcgctctccctgtttagttatggcagagaacgatgtggacaatgagctcttggactatgaagatgatgaggtggagacagcagctgggggagatggggctgaggcccctgccaagaaggatgtcaagggctcctatgtctccatccacagctctggctttcgtgacttcctgctcaagccagagttgctccgggccattgtcgactgtggctttgagcatccgtcagaagtccagcatgagtgcatccctcaggccattctgggaatggatgtcctgtgccaggccaagtcgggcatgggaaagacagcagtgtttgtcttggccacactgcaacagctggagccagttactgggcaggtgtctgtgctggtgatgtgtcacactcgggagttggcttttcagatcagcaaggaatatgagcgcttctctaaatacatgcccaatgtcaaggttgctgttttttttggtggtctgtctatcaagaaggatgaagaggtgctgaagaagaactgcccgcatatcgtcgtggggactccaggccgtatcctagccctggctcgaaataagagcctcaacctcaaacacattaaacactttattttggatgaatgtgataagatgcttgaacagctcgacatgcgtcgggatgtccaggaaatttttcgcatgaccccccacgagaagcaggtcatgatgttcagtgctaccttgagcaaagagatccgtccagtctgccgcaagttcatgcaagatccaatggagatcttcgtggatgatgagacgaagttgacgctgcatgggttgcagcagtactacgtgaaactgaaggacaacgagaagaaccggaagctctttgaccttctggatgtccttgagttcaaccaggtggtgatctttgtgaagtctgtgcagcggtgcattgccttggcccagctactagtggagcagaacttcccagccattgccatccaccgtgggatgccccaggaggagaggctttctcggtatcagcagtttaaagattttcaacgacgaattcttgtggctaccaacctatttggccgaggcatggacatcgagcgggtgaacattgcttttaattatgacatgcctgaggattctgacacctacctgcatcgggtggccagagcaggccggtttggcaccaagggcttggctatcacatttgtgtccgatgagaatgatgccaagatcctcaatgatgtgcaggatcgctttgaggtcaatattagtgagctgcctgatgagatagacatctcctcctacattgaacagacacggtagaagactcgcccattttggaatgtgaccgtctgtccttcaggagaggacaccagggtgggggtgaaggagacactactgcccccacccctgacagcccccaccccatggcttccatcttttgcatcaccaccactcctgaacccccatttctgatttgtcagaatttttttttaacaaaactaaaaatgaaacacatgtgtctgtggtatctat

SEQ ID NO: 58099 - DNA, 1685 bp, Homo sapiens
  misc_feature (74)..(74): n is a, c, g, or t
  misc_feature (135)..(135): n is a, c, g, or t
  misc_feature (177)..(177): n is a, c, g, or t
  misc_feature (180)..(180): n is a, c, g, or t
agatttccctccttcgtcgctgttgctgccgccatacgcgctctccctgtttagctcttctgttagaaatagtntcttgttttcctttgctgttcctcaatcccctactcttcaccccttgttttcacctatttngcgagaacccatccagatcccccttcccttcttcccctgccngcncagttatggcagagaacgatgtggacaatgagctcttggactatgaagatgatgaggtggagacagcagctgggggagatggggctgaggcccctgccaagaaggatgtcaagggctcctatgtctccatccacagctctggctttcgtgacttcctgctcaagccagagttgctccgggccattgtcgactgtggctttgagcatccgtcagaagtccagcatgagtgcatccctcaggccattctgggaatggatgtcctgtgccaggccaagtcgggcatgggaaagacagcagtgtttgtcttggccacactgcaacagctggagccagttactgggcaggtgtctgtgctggtgatgtgtcacactcgggagttggcttttcagatcagcaaggaatatgagcgcttctctaaatacatgcccaatgtcaaggttgctgttttttttggtggtctgtctatcaagaaggatgaagaggtgctgaagaagaactgcccgcatatcgtcgtggggactccaggccgtatcctagccctggctcgaaataagagcctcaacctcaaacacattaaacactttattttggatgaatgtgataagatgcttgaacagctcgacatgcgtcgggatgtccaggaaatttttcgcatgaccccccacgagaagcaggtcatgatgttcagtgctaccttgagcaaagagatccgtccagtctgccgcaagttcatgcaagatccaatggagatcttcgtggatgatgagacgaagttgacgctgcatgggttgcagcagtactacgtgaaactgaaggacaacgagaagaaccggaagctctttgaccttctggatgtccttgagttcaaccaggtggtgatctttgtgaagtctgtgcagcggtgcattgccttggcccagctactagtggagcagaacttcccagccattgccatccaccgtgggatgccccaggaggagaggctttctcggtatcagcagtttaaagattttcaacgacgaattcttgtggctaccaacctatttggccgaggcatggacatcgagcgggtgaacattgcttttaattatgacatgcctgaggattctgacacctacctgcatcgggtggccagagcaggccggtttggcaccaagggcttggctatcacatttgtgtccgatgagaatgatgccaagatcctcaatgatgtgcaggatcgctttgaggtcaatattagtgagctgcctgatgagatagacatctcctcctacattgaacagacacggtagaagactcgcccattttggaatgtgaccgtctgtccttcaggagaggacaccagggtgggggtgaaggagacactactgcccccacccctgacagcccccaccccatggcttccatcttttgcatcaccaccactcctgaacccccatttctgatttgtcagaatttttttttaacaaaactaaaaatgaaacacatgtgtctgtggtatctat

SEQ ID NO: 58100 - DNA, 1553 bp, Homo sapiens
  misc_feature (74)..(74): n is a, c, g, or t
  misc_feature (135)..(135): n is a, c, g, or t
  misc_feature (177)..(177): n is a, c, g, or t
  misc_feature (180)..(180): n is a, c, g, or t
agatttccctccttcgtcgctgttgctgccgccatacgcgctctccctgtttagctcttctgttagaaatagtntcttgttttcctttgctgttcctcaatcccctactcttcaccccttgttttcacctatttngcgagaacccatccagatcccccttcccttcttcccctgccngcnccagctctggctttcgtgacttcctgctcaagccagagttgctccgggccattgtcgactgtggctttgagcatccgtcagaagtccagcatgagtgcatccctcaggccattctgggaatggatgtcctgtgccaggccaagtcgggcatgggaaagacagcagtgtttgtcttggccacactgcaacagctggagccagttactgggcaggtgtctgtgctggtgatgtgtcacactcgggagttggcttttcagatcagcaaggaatatgagcgcttctctaaatacatgcccaatgtcaaggttgctgttttttttggtggtctgtctatcaagaaggatgaagaggtgctgaagaagaactgcccgcatatcgtcgtggggactccaggccgtatcctagccctggctcgaaataagagcctcaacctcaaacacattaaacactttattttggatgaatgtgataagatgcttgaacagctcgacatgcgtcgggatgtccaggaaatttttcgcatgaccccccacgagaagcaggtcatgatgttcagtgctaccttgagcaaagagatccgtccagtctgccgcaagttcatgcaagatccaatggagatcttcgtggatgatgagacgaagttgacgctgcatgggttgcagcagtactacgtgaaactgaaggacaacgagaagaaccggaagctctttgaccttctggatgtccttgagttcaaccaggtggtgatctttgtgaagtctgtgcagcggtgcattgccttggcccagctactagtggagcagaacttcccagccattgccatccaccgtgggatgccccaggaggagaggctttctcggtatcagcagtttaaagattttcaacgacgaattcttgtggctaccaacctatttggccgaggcatggacatcgagcgggtgaacattgcttttaattatgacatgcctgaggattctgacacctacctgcatcgggtggccagagcaggccggtttggcaccaagggcttggctatcacatttgtgtccgatgagaatgatgccaagatcctcaatgatgtgcaggatcgctttgaggtcaatattagtgagctgcctgatgagatagacatctcctcctacattgaacagacacggtagaagactcgcccattttggaatgtgaccgtctgtccttcaggagaggacaccagggtgggggtgaaggagacactactgcccccacccctgacagcccccaccccatggcttccatcttttgcatcaccaccactcctgaacccccatttctgatttgtcagaatttttttttaacaaaactaaaaatgaaacacatgtgtctgtggtatctat

SEQ ID NO: 58101 - DNA, 1335 bp, Homo sapiens
agatttccctccttcgtcgctgttgctgccgccatacgcgctctccctgtttagttatggcagagaacgatgtggacaatgagctcttggactatgaagatgatgaggtggagacagcagctgggggagatggggctgaggcccctgccaagaaggatgtcaagggctcctatgtctccatccacagctctggctttcgtgacttcctgctcaagccagagttgctccgggccattgtcgactgtggctttgagcatccgtcagaaggttgctgttttttttggtggtctgtctatcaagaaggatgaagaggtgctgaagaagaactgcccgcatatcgtcgtggggactccaggccgtatcctagccctggctcgaaataagagcctcaacctcaaacacattaaacactttattttggatgaatgtgataagatgcttgaacagctcgacatgcgtcgggatgtccaggaaatttttcgcatgaccccccacgagaagcaggtcatgatgttcagtgctaccttgagcaaagagatccgtccagtctgccgcaagttcatgcaagatccaatggagatcttcgtggatgatgagacgaagttgacgctgcatgggttgcagcagtactacgtgaaactgaaggacaacgagaagaaccggaagctctttgaccttctggatgtccttgagttcaaccaggtggtgatctttgtgaagtctgtgcagcggtgcattgccttggcccagctactagtggagcagaacttcccagccattgccatccaccgtgggatgccccaggaggagaggctttctcggtatcagcagtttaaagattttcaacgacgaattcttgtggctaccaacctatttggccgaggcatggacatcgagcgggtgaacattgcttttaattatgacatgcctgaggattctgacacctacctgcatcgggtggccagagcaggccggtttggcaccaagggcttggctatcacatttgtgtccgatgagaatgatgccaagatcctcaatgatgtgcaggatcgctttgaggtcaatattagtgagctgcctgatgagatagacatctcctcctacattgaacagacacggtagaagactcgcccattttggaatgtgaccgtctgtccttcaggagaggacaccagggtgggggtgaaggagacactactgcccccacccctgacagcccccaccccatggcttccatcttttgcatcaccaccactcctgaacccccatttctgatttgtcagaatttttttttaacaaaactaaaaatgaaacacatgtgtctgtggtatctat

SEQ ID NO: 58102 - DNA, 967 bp, Homo sapiens
  misc_feature (74)..(74): n is a, c, g, or t
  misc_feature (135)..(135): n is a, c, g, or t
  misc_feature (177)..(177): n is a, c, g, or t
  misc_feature (180)..(180): n is a, c, g, or t
agatttccctccttcgtcgctgttgctgccgccatacgcgctctccctgtttagctcttctgttagaaatagtntcttgttttcctttgctgttcctcaatcccctactcttcaccccttgttttcacctatttngcgagaacccatccagatcccccttcccttcttcccctgccngcncagttatggcagagaacgatgtggacaatgagctcttggactatgaagatgatgaggtggagacagcagctgggggagatggggctgaggcccctgccaagaaggatgtcaagggctcctatgtctccatccacagctctggctttcgtgacttcctgctcaagccagagttgctccgggccattgtcgactgtggctttgagcatccgtcagaagtccagcatgagtgcatccctcaggccattctgggaatggatgtcctgtgccaggccaagtcgggcatgggaaagacagcagtgtttgtcttggccacactgcaacagctggagccagttactgggcaggtgtctgtgctggtgatgtgtcacactcgggagttggcttttcagatcagcaaggaatatgagcgcttctctaaatacatgcccaatgtcaaggttgctgttttttttggtggtctgtctatcaagaaggatgaagaggtgctgaagaagaactgcccgcatatcgtcgtggggactccaggccgtatcctagccctggctcgaaataagagcctcaacctcaaacacattaaacactttattttggatgaatgtgataagatgcttgaacagctcgacatgcgtcgggatgtccaggaaatttttcgcatgaccccccacgagaagcaggtcatgatgttcagtgctaccttgagcaaagagatccgtccagtctgccgcaagttcatgcaagatgtaaatacccttctaccttctctccctccactccccgcccgctgcct

SEQ ID NO: 58103 - DNA, 766 bp, Homo sapiens
ttcccaaattgccttcttagaaggttgtatcacctctgacaaaaatctgaatattcttaatgtttgccaatttgacaggtaaaaaaggttcttatttttgtttcagtttcagtctactgattactagtgtcctaatcagcttgagtttctataacaaaataccacatacagactgggtggtttaaacaataagcacttactcgtcacagttctggaggctgggagtcggagaacaaggtgccgacaggtcgacagtgtttttcttaacgatatttataactgctctttacacaggctagtaacctttgatctatatgctgtcaatactttccccaagttcaatttactttcaattttgttgaaggtggattttgacatattgaactatattccactcaaaacagttttttcctttataatgttaaccttcctcaaactaagattacattttttaaagaaattatttcattttttcacatttaggtaattaatctgaactttatgtttgtttgcaatatgaggtagagatataatgttctcccaaagtcagagaaatgtatcatttccctcatttccctaatacatatatgttacacccatcataaattcatacagatacacacatacactcttctttctgttctatacctgttttaacatccaatcactattttaatgtcacatacattaagtctcaccatattagtgttgatttctttttcttttttctcttttttcttgagacagaattttgctcttgtcgccc

SEQ ID NO: 58104 - DNA, 295 bp, Homo sapiens
cagagctggtcagactgtgacaaatacagattaattctgaaatggaagccttgcattataactttttatagagaattgtacaagcattataaggataattaaatatattgccagtgttgctacatgatgctcttaaaagactaaagtgaatttattagtgagtacaagtatattgcaaactggtttataccttcaaaaagatatattccctgttcactttatttccaatagtgttaaaaaccactgagccaggcaaggaagaccatactgtcttcagcatatttaaagcagtttg

SEQ ID NO: 58105 - DNA, 1909 bp, Homo sapiens
tggttggtgcgcggctgaagcgggtggcgcgagcagcgtcgttggttggccggcggcgggccgggacgggcatggccctgctgctgtgcctggtgtgcctgacggcggcgctggcccacggctgtctgcactgccacagcaacttctccaagaagttctccttctaccgccaccatgtgaacttcaagtcctggtgggtgggcgacatccccgtgtcaggggcgctgctcaccgactggagcgacgacacgatgaaggagctgcacctggccatccccgccaagatcacccgggagaagctggaccaagtggcgacagcagtgtaccagatgatggatcagctgtaccaggggaagatgtacttccccgggtatttccccaacgagctgcgaaacatcttccgggagcaggtgcacctcatccagaacgccatcatcgaaagccgcatcgactgtcagcaccgctgtggcatcttccagtacgagaccatctcctgcaacaactgcacagactcgcacgtcgcctgctttggctataactgcgagtagggctcaggcatcacacccacccgtgccagggccctactgtccctggggtcccaggctctccttggagggggctccccgccttccacctggctgtcatcgggtagggcggggccgtgggttcaggggcgcaccacttccaagcctgtgtcccacaggtcctcggcgcagtggaagtcagctgtccagggcctcctgaactacataaataactggcacaagtaagtcccctcctcaaaccaacacaggcagtgtgtgtatgtgagcacctcgtgggtgagtatgtgtggggcacaggctggctccctcagctcccacgtcctagaggggctcccgaggaggtggaacctcaacccagctctgcgcaggaggcggctgcagtccttttctccctcaaaggtctccgaccctcagctggaggcgggcatctttcctaaagggtccccatagggtctggttccaccccatcccaggtctgtggtcagagcctgggagggttccctacgatggttaggggtgccccatggaggggctgactgccccacattgcctttcagacaggacacgagcatgaggtaaggccgccctgacctggacttcagggggagggggtaaagggagagaggaggggggctagggggtcctctagatcagtgggggcactgcaggtggggctctccctatacctgggacacctgctggatgtcacctctgcaaccacacccatgtggtggtttcatgaacagaccacgctcctctgccttctcctggcctgggacacacagagccaccccggccttgtgagtgacccagagaagggaggcctcgggagaaggggtgctcgtaagccaacaccagcgtgccgcggcctgcacacccttcggacatcccaggcacgagggtgtcgtggatgtggccacacataggaccacacgtcccagctgggaggagaggcctggggcccccagggagggaggcagggggtgggggacatggagagctgaggcagcctcgtctccccgcacctggtatcgccagccttaaggtgtctggagcccccacacttggccaacctgaccttggaagatgctgctgagtgtctcaagcagcactgacagcagctgggcctgccccagggcaacgtgggggcggagactcagctggacagcccctgcctgtcactctggagctgggctgctgctgcctcaggaccccctctccgaccccggacagagctgagctggccagggccaggagggcgggagggagggaatgggggtgggctgtgcgcagcatcagcgcctgggcaggtccgcagagctgcgggatgtgattaaagtccctgatgtttctctttgaaaaaa

SEQ ID NO: 58106 - DNA, 2005 bp, Homo sapiens
tggttggtgcgcggctgaagcgggtggcgcgagcagcgtcgttggttggccggcggcgggccgggacgggcatggccctgctgctgtgcctggtgtgcctgacggcggcgctggcccacggctgtctgcactgccacagcaacttctccaagaagttctccttctaccgccaccatgtgaacttcaagtcctggtgggtgggcgacatccccgtgtcaggggcgctgctcaccgactggagcgacgacacgatgaaggagctgcacctggccatccccgccaagatcacccgggagaagctggaccaagtggcgacagcagtgtaccagatgatggatcagctgtaccaggggaagatgtacttccccgggtatttccccaacgagctgcgaaacatcttccgggagcaggtgcacctcatccagaacgccatcatcgaaagccgcatcgactgtcagcaccgctgtggtaagcaaggctccgtccaggctgaggggcgtgccggtggcagctcggggccctggaggctgaggggagccctggcggctcttgtacgtgtttcaggcatcttccagtacgagaccatctcctgcaacaactgcacagactcgcacgtcgcctgctttggctataactgcgagtagggctcaggcatcacacccacccgtgccagggccctactgtccctggggtcccaggctctccttggagggggctccccgccttccacctggctgtcatcgggtagggcggggccgtgggttcaggggcgcaccacttccaagcctgtgtcccacaggtcctcggcgcagtggaagtcagctgtccagggcctcctgaactacataaataactggcacaagtaagtcccctcctcaaaccaacacaggcagtgtgtgtatgtgagcacctcgtgggtgagtatgtgtggggcacaggctggctccctcagctcccacgtcctagaggggctcccgaggaggtggaacctcaacccagctctgcgcaggaggcggctgcagtccttttctccctcaaaggtctccgaccctcagctggaggcgggcatctttcctaaagggtccccatagggtctggttccaccccatcccaggtctgtggtcagagcctgggagggttccctacgatggttaggggtgccccatggaggggctgactgccccacattgcctttcagacaggacacgagcatgaggtaaggccgccctgacctggacttcagggggagggggtaaagggagagaggaggggggctagggggtcctctagatcagtgggggcactgcaggtggggctctccctatacctgggacacctgctggatgtcacctctgcaaccacacccatgtggtggtttcatgaacagaccacgctcctctgccttctcctggcctgggacacacagagccaccccggccttgtgagtgacccagagaagggaggcctcgggagaaggggtgctcgtaagccaacaccagcgtgccgcggcctgcacacccttcggacatcccaggcacgagggtgtcgtggatgtggccacacataggaccacacgtcccagctgggaggagaggcctggggcccccagggagggaggcagggggtgggggacatggagagctgaggcagcctcgtctccccgcacctggtatcgccagccttaaggtgtctggagcccccacacttggccaacctgaccttggaagatgctgctgagtgtctcaagcagcactgacagcagctgggcctgccccagggcaacgtgggggcggagactcagctggacagcccctgcctgtcactctggagctgggctgctgctgcctcaggaccccctctccgaccccggacagagctgagctggccagggccaggagggcgggagggagggaatgggggtgggctgtgcgcagcatcagcgcctgggcaggtccgcagagctgcgggatgtgattaaagtccctgatgtttctctttgaaaaaa

SEQ ID NO: 58107 - DNA, 1781 bp, Homo sapiens
tggttggtgcgcggctgaagcgggtggcgcgagcagcgtcgttggttggccggcggcgggccgggacgggcatggccctgctgctgtgcctggtgtgcctgacggcggcgctggcccacggctgtctgcactgccacagcaacttctccaagaagttctccttctaccgccaccatgtgaacttcaagtcctggtgggtgggcgacatccccgtgtcaggggcgctgctcaccgactggagcgacgacacgatgaaggagctgcacctggccatccccgccaagatcacccgggagaagctggaccaagtggcgacagcagtgtaccagatgatggatcagctgtaccaggggaagatgtacttccccgggtatttccccaacgagctgcgaaacatcttccgggagcaggtgcacctcatccagaacgccatcatcgaaagccgcatcgactgtcagcaccgctgtggtaagcaaggctccgtccaggctgaggggcgtgccggtggcagctcggggccctggaggctgaggggagccctggcggctcttgtacgtgtttcaggcatcttccagtacgagaccatctcctgcaacaactgcacagactcgcacgtcgcctgctttggctataactgcgagtagggctcaggcatcacacccacccgtgccagggccctactgtccctggggtcccaggctctccttggagggggctccccgccttccacctggctgtcatcgggtagggcggggccgtgggttcaggggcgcaccacttccaagcctgtgtcccacaggtcctcggcgcagtggaagtcagctgtccagggcctcctgaactacataaataactggcacaagtaagtcccctcctcaaaccaacacaggcagtgtgtgtatgtgagcacctcgtgggtgagtatgtgtggggcacaggctggctccctcagctcccacgtcctagaggggctcccgaggaggtggaacctcaacccagctctgcgcaggaggcggctgcagtccttttctccctcaaaggtctccgaccctcagctggaggcgggcatctttcctaaagggtccccatagggtctggttccaccccatcccaggtctgtggtcagagcctgggagggttccctacgatggttaggggtgccccatggaggggctgactgccccacattgcctttcagacaggacacgagcatgaggtaaggccgccctgacctggacttcagggggagggggtaaagggagagaggaggggggctagggggtcctctagatcagtgggggcactgcaggtggggctctccctatacctgggacacctgctggatgtcacctctgcaaccacacccatgtggtggtttcatgaacagaccacgctcctctgccttctcctggcctgggacacacagagccaccccggccttcctggtatcgccagccttaaggtgtctggagcccccacacttggccaacctgaccttggaagatgctgctgagtgtctcaagcagcactgacagcagctgggcctgccccagggcaacgtgggggcggagactcagctggacagcccctgcctgtcactctggagctgggctgctgctgcctcaggaccccctctccgaccccggacagagctgagctggccagggccaggagggcgggagggagggaatgggggtgggctgtgcgcagcatcagcgcctgggcaggtccgcagagctgcgggatgtgattaaagtccctgatgtttctctttgaaaaaa

SEQ ID NO: 58108 - DNA, 1750 bp, Homo sapiens
tggttggtgcgcggctgaagcgggtggcgcgagcagcgtcgttggttggccggcggcgggccgggacgggcatggccctgctgctgtgcctggtgtgcctgacggcggcgctggcccacggctgtctgcactgccacagcaacttctccaagaagttctccttctaccgccaccatgtgaacttcaagtcctggtgggtgggcgacatccccgtgtcaggggcgctgctcaccgactggagcgacgacacgatgaaggagctgcacctggccatccccgccaagatcacccgggagaagctggaccaagtggcgacagcagtgtaccagatgatggatcagctgtaccaggggaagatgtacttccccgggtatttccccaacgagctgcgaaacatcttccgggagcaggtgcacctcatccagaacgccatcatcgaaagccgcatcgactgtcagcaccgctgtggcatcttccagtacgagaccatctcctgcaacaactgcacagactcgcacgtcgcctgctttggctataactgcgagtcctcggcgcagtggaagtcagctgtccagggcctcctgaactacataaataactggcacaagtaagtcccctcctcaaaccaacacaggcagtgtgtgtatgtgagcacctcgtgggtgagtatgtgtggggcacaggctggctccctcagctcccacgtcctagaggggctcccgaggaggtggaacctcaacccagctctgcgcaggaggcggctgcagtccttttctccctcaaaggtctccgaccctcagctggaggcgggcatctttcctaaagggtccccatagggtctggttccaccccatcccaggtctgtggtcagagcctgggagggttccctacgatggttaggggtgccccatggaggggctgactgccccacattgcctttcagacaggacacgagcatgaggtaaggccgccctgacctggacttcagggggagggggtaaagggagagaggaggggggctagggggtcctctagatcagtgggggcactgcaggtggggctctccctatacctgggacacctgctggatgtcacctctgcaaccacacccatgtggtggtttcatgaacagaccacgctcctctgccttctcctggcctgggacacacagagccaccccggccttgtgagtgacccagagaagggaggcctcgggagaaggggtgctcgtaagccaacaccagcgtgccgcggcctgcacacccttcggacatcccaggcacgagggtgtcgtggatgtggccacacataggaccacacgtcccagctgggaggagaggcctggggcccccagggagggaggcagggggtgggggacatggagagctgaggcagcctcgtctccccgcacctggtatcgccagccttaaggtgtctggagcccccacacttggccaacctgaccttggaagatgctgctgagtgtctcaagcagcactgacagcagctgggcctgccccagggcaacgtgggggcggagactcagctggacagcccctgcctgtcactctggagctgggctgctgctgcctcaggaccccctctccgaccccggacagagctgagctggccagggccaggagggcgggagggagggaatgggggtgggctgtgcgcagcatcagcgcctgggcaggtccgcagagctgcgggatgtgattaaagtccctgatgtttctctttgaaaaaa

SEQ ID NO: 58109 - DNA, 1765 bp, Homo sapiens
tggttggtgcgcggctgaagcgggtggcgcgagcagcgtcgttggttggccggcggcgggccgggacgggcatggccctgctgctgtgcctggtgtgcctgacggcggcgctggcccacggctgtctgcactgccacagcaacttctccaagaagttctccttctaccgccaccatgtgaacttcaagtcctggtgggtgggcgacatccccgtgtcaggggcgctgctcaccgactggagcgacgacacgatgaaggagctgcacctggccatccccgccaagatcacccgggagaagctggaccaagtggcgacagcagtgtaccagatgatggatcagctgtaccaggggaagatgtacttccccggtaaggggcgcgaaaccgaggcggggcccccccaccccgggacaccccgcccaccgcctgagcctgaccttctcctgcctcgacgactcagggtatttccccaacgagctgcgaaacatcttccgggagcaggtgcacctcatccagaacgccatcatcgaaagccgcatcgactgtcagcaccgctgtggtcctcggcgcagtggaagtcagctgtccagggcctcctgaactacataaataactggcacaagtaagtcccctcctcaaaccaacacaggcagtgtgtgtatgtgagcacctcgtgggtgagtatgtgtggggcacaggctggctccctcagctcccacgtcctagaggggctcccgaggaggtggaacctcaacccagctctgcgcaggaggcggctgcagtccttttctccctcaaaggtctccgaccctcagctggaggcgggcatctttcctaaagggtccccatagggtctggttccaccccatcccaggtctgtggtcagagcctgggagggttccctacgatggttaggggtgccccatggaggggctgactgccccacattgcctttcagacaggacacgagcatgaggtaaggccgccctgacctggacttcagggggagggggtaaagggagagaggaggggggctagggggtcctctagatcagtgggggcactgcaggtggggctctccctatacctgggacacctgctggatgtcacctctgcaaccacacccatgtggtggtttcatgaacagaccacgctcctctgccttctcctggcctgggacacacagagccaccccggccttgtgagtgacccagagaagggaggcctcgggagaaggggtgctcgtaagccaacaccagcgtgccgcggcctgcacacccttcggacatcccaggcacgagggtgtcgtggatgtggccacacataggaccacacgtcccagctgggaggagaggcctggggcccccagggagggaggcagggggtgggggacatggagagctgaggcagcctcgtctccccgcacctggtatcgccagccttaaggtgtctggagcccccacacttggccaacctgaccttggaagatgctgctgagtgtctcaagcagcactgacagcagctgggcctgccccagggcaacgtgggggcggagactcagctggacagcccctgcctgtcactctggagctgggctgctgctgcctcaggaccccctctccgaccccggacagagctgagctggccagggccaggagggcgggagggagggaatgggggtgggctgtgcgcagcatcagcgcctgggcaggtccgcagagctgcgggatgtgattaaagtccctgatgtttctctttgaaaaaa

SEQ ID NO: 58110 - DNA, 1021 bp, Homo sapiens
tggttggtgcgcggctgaagcgggtggcgcgagcagcgtcgttggttggccggcggcgggccgggacgggcatggccctgctgctgtgcctggtgtgcctgacggcggcgctggcccacggctgtctgcactgccacagcaacttctccaagaagttctccttctaccgccaccatgtgaacttcaagtcctggtgggtgggcgacatccccgtgtcaggggcgctgctcaccgactggagcgacgacacgatgaaggagctgcacctggccatccccgccaagatcacccgggagaagctggaccaagtggcgacagcagtgtaccagatgatggatcagctgtaccaggggaagatgtacttccccgggtatttccccaacgagctgcgaaacatcttccgggagcaggtgcacctcatccagaacgccatcatcgaaagccgcatcgactgtcagcaccgctgtggcatcttccagtacgagaccatctcctgcaacaactgcacagactcgcacgtcgcctgctttggctataactgcgagtcctcggcgcagtggaagtcagctgtccagggcctcctgaactacataaataactggcacaaacaggacacgagcatgagagaccacgctcctctgccttctcctggcctgggacacacagagccaccccggccttcctggtatcgccagccttaaggtgtctggagcccccacacttggccaacctgaccttggaagatgctgctgagtgtctcaagcagcactgacagcagctgggcctgccccagggcaacgtgggggcggagactcagctggacagcccctgcctgtcactctggagctgggctgctgctgcctcaggaccccctctccgaccccggacagagctgagctggccagggccaggagggcgggagggagggaatgggggtgggctgtgcgcagcatcagcgcctgggcaggtccgcagagctgcgggatgtgattaaagtccctgatgtttctctttgaaaaaa

SEQ ID NO: 58111 - DNA, 965 bp, Homo sapiens
tggttggtgcgcggctgaagcgggtggcgcgagcagcgtcgttggttggccggcggcgggccgggacgggcatggccctgctgctgtgcctggtgtgcctgacggcggcgctggcccacggctgtctgcactgccacagcaacttctccaagaagttctccttctaccgccaccatgtgaacttcaagtcctggtgggtgggcgacatccccgtgtcaggggcgctgctcaccgactggagcgacgacacgatgaaggagctgcacctggccatccccgccaagatcacccgggagaagctggaccaagtggcgacagcagtgtaccagatgatggatcagctgtaccaggggaagatgtacttccccgggtatttccccaacgagctgcgaaacatcttccgggagcaggtgcacctcatccagaacgccatcatcgaaagccgcatcgactgtcagcaccgctgtggcatcttccagtacgagaccatctcctgcaacaactgcacagactcgcacgtcgcctgctttggctataactgcgagtcctcggcgcagtggaagtcagctgtccagggcctcctgaactacataaataactggcacaaacaggacacgagcatgagcctggtatcgccagccttaaggtgtctggagcccccacacttggccaacctgaccttggaagatgctgctgagtgtctcaagcagcactgacagcagctgggcctgccccagggcaacgtgggggcggagactcagctggacagcccctgcctgtcactctggagctgggctgctgctgcctcaggaccccctctccgaccccggacagagctgagctggccagggccaggagggcgggagggagggaatgggggtgggctgtgcgcagcatcagcgcctgggcaggtccgcagagctgcgggatgtgattaaagtccctgatgtttctctttgaaaaaa

SEQ ID NO: 58112 - DNA, 932 bp, Homo sapiens
tggttggtgcgcggctgaagcgggtggcgcgagcagcgtcgttggttggccggcggcgggccgggacgggcatggccctgctgctgtgcctggtgtgcctgacggcggcgctggcccacggctgtctgcactgccacagcaacttctccaagaagttctccttctaccgccaccatgtgaacttcaagtcctggtgggtgggcgacatccccgtgtcaggggcgctgctcaccgactggagcgacgacacgatgaaggagctgcacctggccatccccgccaagatcacccgggagaagctggaccaagtggcgacagcagtgtaccagatgatggatcagctgtaccaggggaagatgtacttccccgggtatttccccaacgagctgcgaaacatcttccgggagcaggtgcacctcatccagaacgccatcatcgaaagccgcatcgactgtcagcaccgctgtggcatcttccagtacgagaccatctcctgcaacaactgcacagactcgcacgtcgcctgctttggctataactgcgagtcctcggcgcagtggaagtcagctgtccagggcctcctgaactacatcctggtatcgccagccttaaggtgtctggagcccccacacttggccaacctgaccttggaagatgctgctgagtgtctcaagcagcactgacagcagctgggcctgccccagggcaacgtgggggcggagactcagctggacagcccctgcctgtcactctggagctgggctgctgctgcctcaggaccccctctccgaccccggacagagctgagctggccagggccaggagggcgggagggagggaatgggggtgggctgtgcgcagcatcagcgcctgggcaggtccgcagagctgcgggatgtgattaaagtccctgatgtttctctttgaaaaaa

SEQ ID NO: 58113 - DNA, 1276 bp, Homo sapiens
tggttggtgcgcggctgaagcgggtggcgcgagcagcgtcgttggttggccggcggcgggccgggacgggcatggccctgctgctgtgcctggtgtgcctgacggcggcgctggcccacggctgtctgcactgccacagcaacttctccaagaagttctccttctaccgccaccatgtgaacttcaagtcctggtgggtgggcgacatccccgtgtcaggggcgctgctcaccgactggagcgacgacacgatgaaggagctgcacctggccatccccgccaagatcacccgggagaagctggaccaagtggcgacagcagtgtaccagatgatggatcagctgtaccaggggaagatgtacttccccgggtatttccccaacgagctgcgaaacatcttccgggagcaggtgcacctcatccagaacgccatcatcgaaagccgcatcgactgtcagcaccgctgtggtaagcaaggctccgtccaggctgaggggcgtgccggtggcagctcggggccctggaggctgaggggagccctggcggctcttgtacgtgtttcaggcatcttccagtacgagaccatctcctgcaacaactgcacagactcgcacgtcgcctgctttggctataactgcgagtagggctcaggcatcacacccacccgtgccagggccctactgtccctggggtcccaggctctccttggagggggctccccgccttccacctggctgtcatcgggtagggcggggccgtgggttcaggggcgcaccacttccaagcctgtgtcccacaggtcctcggcgcagtggaagtcagctgtccagggcctcctgaactacataaataactggcacaaacaggacacgagcatgagagaccacgctcctctgccttctcctggcctgggacacacagagccaccccggccttcctggtatcgccagccttaaggtgtctggagcccccacacttggccaacctgaccttggaagatgctgctgagtgtctcaagcagcactgacagcagctgggcctgccccagggcaacgtgggggcggagactcagctggacagcccctgcctgtcactctggagctgggctgctgctgcctcaggaccccctctccgaccccggacagagctgagctggccagggccaggagggcgggagggagggaatgggggtgggctgtgcgcagcatcagcgcctgggcaggtccgcagagctgcgggatgtgattaaagtccctgatgtttctctttgaaaaaa

SEQ ID NO: 58114 - DNA, 1841 bp, Homo sapiens
tggttggtgcgcggctgaagcgggtggcgcgagcagcgtcgttggttggccggcggcgggccgggacgggcatggccctgctgctgtgcctggtgtgcctgacggcggcgctggcccacggctgtctgcactgccacagcaacttctccaagaagttctccttctaccgccaccatgtgaacttcaagtcctggtgggtgggcgacatccccgtgtcaggggcgctgctcaccgactggagcgacgacacgatgaaggagctgcacctggccatccccgccaagatcacccgggagaagctggaccaagtggcgacagcagtgtaccagatgatggatcagctgtaccaggggaagatgtacttccccggtaaggggcgcgaaaccgaggcggggcccccccaccccgggacaccccgcccaccgcctgagcctgaccttctcctgcctcgacgactcagggtatttccccaacgagctgcgaaacatcttccgggagcaggtgcacctcatccagaacgccatcatcgaaagccgcatcgactgtcagcaccgctgtggcatcttccagtacgagaccatctcctgcaacaactgcacagactcgcacgtcgcctgctttggctataactgcgagtcctcggcgcagtggaagtcagctgtccagggcctcctgaactacataaataactggcacaagtaagtcccctcctcaaaccaacacaggcagtgtgtgtatgtgagcacctcgtgggtgagtatgtgtggggcacaggctggctccctcagctcccacgtcctagaggggctcccgaggaggtggaacctcaacccagctctgcgcaggaggcggctgcagtccttttctccctcaaaggtctccgaccctcagctggaggcgggcatctttcctaaagggtccccatagggtctggttccaccccatcccaggtctgtggtcagagcctgggagggttccctacgatggttaggggtgccccatggaggggctgactgccccacattgcctttcagacaggacacgagcatgaggtaaggccgccctgacctggacttcagggggagggggtaaagggagagaggaggggggctagggggtcctctagatcagtgggggcactgcaggtggggctctccctatacctgggacacctgctggatgtcacctctgcaaccacacccatgtggtggtttcatgaacagaccacgctcctctgccttctcctggcctgggacacacagagccaccccggccttgtgagtgacccagagaagggaggcctcgggagaaggggtgctcgtaagccaacaccagcgtgccgcggcctgcacacccttcggacatcccaggcacgagggtgtcgtggatgtggccacacataggaccacacgtcccagctgggaggagaggcctggggcccccagggagggaggcagggggtgggggacatggagagctgaggcagcctcgtctccccgcacctggtatcgccagccttaaggtgtctggagcccccacacttggccaacctgaccttggaagatgctgctgagtgtctcaagcagcactgacagcagctgggcctgccccagggcaacgtgggggcggagactcagctggacagcccctgcctgtcactctggagctgggctgctgctgcctcaggaccccctctccgaccccggacagagctgagctggccagggccaggagggcgggagggagggaatgggggtgggctgtgcgcagcatcagcgcctgggcaggtccgcagagctgcgggatgtgattaaagtccctgatgtttctctttgaaaaaa

SEQ ID NO: 58115 - DNA, 1114 bp, Homo sapiens
tggttggtgcgcggctgaagcgggtggcgcgagcagcgtcgttggttggccggcggcgggccgggacgggcatggccctgctgctgtgcctggtgtgcctgacggcggcgctggcccacggctgtctgcactgccacagcaacttctccaagaagttctccttctaccgccaccatgtgaacttcaagtcctggtgggtgggcgacatccccgtgtcaggggcgctgctcaccgactggagcgacgacacgatgaaggagctgcacctggccatccccgccaagatcacccgggagaagctggaccaagtggcgacagcagtgtaccagatgatggatcagctgtaccaggggaagatgtacttccccgggtatttccccaacgagctgcgaaacatcttccgggagcaggtgcacctcatccagaacgccatcatcgaaagccgcatcgactgtcagcaccgctgtggcatcttccagtacgagaccatctcctgcaacaactgcacagactcgcacgtcgcctgctttggctataactgcgagtcctcggcgcagtggaagtcagctgtccagggcctcctgaactacataaataactggcacaaacaggacacgagcatgagagaccacgctcctctgccttctcctggcctgggacacacagagccaccccggccttgtgagtgacccagagaagggaggcctcgggagaaggggtgctcgtaagccaacaccagcgtgccgcggcctgcacacccttcggacatcccagcctggtatcgccagccttaaggtgtctggagcccccacacttggccaacctgaccttggaagatgctgctgagtgtctcaagcagcactgacagcagctgggcctgccccagggcaacgtgggggcggagactcagctggacagcccctgcctgtcactctggagctgggctgctgctgcctcaggaccccctctccgaccccggacagagctgagctggccagggccaggagggcgggagggagggaatgggggtgggctgtgcgcagcatcagcgcctgggcaggtccgcagagctgcgggatgtgattaaagtccctgatgtttctctttgaaaaaa

SEQ ID NO: 58116 - DNA, 690 bp, Homo sapiens
cttgcctcctacatcctcctcaccttgcctaagtcaccacagatggcctcctcactactgtccctgctctgcctccgctccctcctggacagagggtctgcttcaaacccttgatgtcactcctggccggcattcacccaagtccccaccctcagtcacatccgaggtcggcatatttttctctaagggtctgataggaaatattttaggccccgtggccgtggggtgttcgttacactccctgctttgctgcagtgtgaaaggagctggaggcaacacatgaaccacataggggctgcgttccagtagaactggggacactaaaatttgaatttcacataattttcacatgccatgaaacatttttttttcagtcattaaaaataaaaaccaggtgggtgcggtggctcacacctgtaaacccagtgcttagggaggccagggtaggatcacttgaggccaggagtttgagaccagcctgggcaacgtaggcaagaccactgccccaccaccccatctgttttaaaaattagctgggtgtggtgcgtgcctttggtcccagctacttgggaggctgaggcaggaggatcgcctgagcctaggaagctgaggctacagtgagccaagattgcaccactgcactccagtctgtgctacagagcaacaaacaccgtgtctcaaaacaaacaa

SEQ ID NO: 58117 - DNA, 190 bp, Homo sapiens
ggaacacggtgaaaaattcatatctcaaaagcacagagctgagactttgggcctaaatactgtaccactggttccctaaaccaaggaagaaaagtgtcggtaaaggcccggttaagacaagatggcaaggaaaagcaccttaaacaatggtaagatttatgttagatcagtggtaagagtttctagtgac

SEQ ID NO: 58118 - DNA, 341 bp, Homo sapiens
tgggaagatcaggtcttacttgtttttctgtcccctccagcgctagatcaacacagtgttaaattagttgaatttcagtggaggagataagacagaaatgaaatctgtgaagattcagactttcccaagttaaaaccagtcttgagttacagatcaagatgatgccagaaataacatcacactgaaacatcagtcaaatgtagtcatcatggcaaaggccaaatgtccctttctttttttgcctccgcctgcctgggaatttagcatcccctaaagccactcatctgggacaggattttagggtgtgtacatgtttttcatctccacaggaccagctgtgt

SEQ ID NO: 58119 - DNA, 435 bp, Homo sapiens
aacaagagtggaggaaattttcagactggtcccttctctggctgtaacaccctggccaagtgtctcaacctccctaagcctagcgccctcacctgttcaacagcaataatcaggcctgtcttgcctacctcactagattattgcaagcagtgaagggacgtgaacaggctctggcaaccagaaagcacagtcataattccaaataacatgatgaaaagaaaatgtggctgatattgttaatttcccaaggaaatctgtgtagtcctctgactcattttgcaaagactggagaggaaatggagaaggaagcacaccagagccaacactttgaaaggaggttgttcattccatcactttcgaaatggagattctgtcctcctggctgtgtggcacatgattgctgtccaataaacaggaattgatgaatggctgagt

SEQ ID NO: 58120 - DNA, 555 bp, Homo sapiens
atatccaaatagaggaatatagaaaaatttaattgattccaaaagtagaggagacagaatcacttatccttgttacactgcttttcttcatctcttgccctttcctttcacatacattttttccctcttctcattattacctgtctttcaaacactgtattctgcctttgcaacactgagatccaaatacccacaagtggttaacttgtgtcatcacaagatctataaggtgaactgtaataaatgcaagtatactgaggcaggagaatcgcttgagcctgggaggcagaggttgcagtgagctgagatcaagccactgcactccagcttgggtaacagagcgagactctgtccctaaatcaataaatcaataaatgcaagtgtagttcacgtcaaggttagttctctgaactttctcattcctatggatgcaaacactgtatctaatttaaatggaaactctttcaatctataaattgccttcttctttacaatatagccttagatgtacttttttaaattcaacacagacttgaagaaaatgggctaaatgca

SEQ ID NO: 58121 - DNA, 400 bp, Homo sapiens
  misc_feature (52)..(52): n is a, c, g, or t
ttactaatctaggcacagccggaattggttactggactaggcacagccgganttagttactaatctaggcacagccggaattggttactaatctaggcacagccggaattagttactagtctaggtacagccggattagttactaatctaggtacagccgggttggttactaatctaggtacagccgggttagttactaatctaggtacagctggattagtaactaatgtaggtacagctggattagtaactggttgattgaccacactattaggtacaaacaaatggctcaatatcataatataggggattcctgtggcatattgcaaggatattttcggccttatcttggtcacaagtttttttcaataactgggatgaaaacatattcattagattt

SEQ ID NO: 58122 - DNA, 766 bp, Homo sapiens
ccaaagtgctaggattacaggtgtgaaccagtactttatttctgacaccagatatgtaggagttttcccccacacatcaaccagttctccaactgggtatccggtaactcactttaattctgacaccgtctgcctggagactaccacaagactgccttcactcagacactaatctcaattcacaggttgtgaccagtgcttctaatctactggctataagtcagggttcccatgaccactctttttgctttgataattagctaggacggctcacagggaaacactttacttatgtttaacagtttattataaagaatattataaatgatacagatgaacagccagatgaagtaatgcattgggcaaggtatgcggtgggagaggtgcagagcttctgtgccctctctgggtgcaccaactccccagcatccccctgtgttcaactaccctgaagctaatcacatctagtggttcaggagtgtctaggctgggtgcagtggctcacacctataatcccagcactttgggggaccaaggtaggaggatcacttgatcccaggagtttgagacaaacctgggctaacacagtgagatcccgttcaaaaaatcttataaaaattagctgggcatggcggcgcacacctgtagtcccaactacttgggaggctgaggtgagagggtcacttgagcccagaggttgaggctgcagtgagctatgatcatgccactgcatcacagcctgagtaaaaaagcaagagcctgtctc

SEQ ID NO: 58123 - DNA, 663 bp, Homo sapiens
gaaacgtccgcgcggtgcgggtggtcctgggagcccataacctctcgcggcgggagcccacccggcaggtgttcgccgtgcagcgcatcttcgaaaacggctacgaccccgtaaacttgctcaacgacatcgtgattctccagctcaacgggtcggccaccatcaacgccaacgtgcaggtggcccagctgccggctcagggacgccgcctgggcaacggggtgcagtgcctggccatgggctggggccttctgggcaggaaccgtgggatcgccagcgtcctgcaggagctcaacgtgacggtggtgacgtccctctgccgtcgcagcaacgtctgcactctcgtgaggggccggcaggccggcgtctgtttcggggactccggcagccccttggtctgcaacgggctaatccacggaattgcctccttcgtccggggaggctgcgcctcagggctctaccccgatgcctttgccccggtggcacagtttgtaaactggatcgactctatcatccaacgctccgaggacaacccctgtccccacccccgggacccggacccggccagcaggacccactgagaagggctgcccgggtcacctcagctgcccacacccacactctccagcatctggcacaataaacattctctgttttgtagaa

SEQ ID NO: 58124 - DNA, 297 bp, Homo sapiens
tcttcctttagttcagaggctcatgctgtcctgaggtaaagcttgaagaccttgcactctttcctcctaccaggcatttggtgttttctgatcccgtgtggtcccaaagacccgagggtcaccatgatggaagtctccctgcagggactgggcctgctgggcttcccttagttccctttccagtgcagctgtcttggacttttccaaattcagctgctgctagagctcttctgctttccccagggagggccagggccaatttctgaccagagctgctgcagaaggtctctctcctgg

SEQ ID NO: 58125 - DNA, 315 bp, Homo sapiens
aatcctgggggtgatttagaacttagaggcattctcaaaatggaccaagctaaatggtagcctttattttctgtaatgattcaccatgggaaaattagtaattctttaaacttcttacttaatcttatatgtattccaaattttctaaaaagaaattaacctagaggttttacagaactccattttttttttattttccagaaaggaaaaatttatctgtgctgttattttgttaaaaatcctattccagctactactatggaaaaaggaaaagaagaaaggaggaaaggaagggagagaggaaaggaagggacg

SEQ ID NO: 58126 - DNA, 458 bp, Homo sapiens
ttccatgtgcagaacaagcccccgtattcctccccggaattgtgtagatttctccctccccaacccaagtaaggaaaacaaacctgtataagtgccatgaaatccagaattgggtattttgcccttgattaagtgacccccatcacctaattggggaagttattgagatgtattttaaaacaaaaccctggatataagagatgaagtaaatcactggtgaagcactgcctcctttccagatagaaattttatctgcaaagtcagaagtcactgaatattttctgcctcgcctcttctctcactgactaggctctttctggtcctctgccctgatgctagatggagttagagaccctggggcagacccatgaacaaacatctgtttcttctgccactgacttgtatctttttcttatagtcaattattctaattttattgtaaatatagcttagttaaa

SEQ ID NO: 58127 - DNA, 284 bp, Homo sapiens
aagaaaagagtccttaaaatcaataacaataccaacaaagccaacctttacacagattgaaaaaaaatggccagcagtaaccaaacaaggaaatatatcacatacctagaaaactagcagccaataaaggataattctagcataggagattctgtctccactctttagaaaacagcactgaccagagaaggagattttatgaaccctaagaactcttgctaccaccttgattttatgggggagacagagtgagcaggtgagtcagcaattgcagagaaagatca

SEQ ID NO: 58128 - DNA, 298 bp, Homo sapiens
cctcaggccttgttgtagtggtgggaaggacagatcaatccccacgcccctggtaacatgcatgagtattgacagtggcagacaaggcagggctgtcattaagctctccaatggtgtatgcaggtgctggctgtagtgagagaggaggattgacccccatactcctggatggcatggtggagcactggcagtggtgacattgggtggggcagacctatcctcaagtccccagatggcaaacatgggcactggtgggggcaggcagggcagcctgatcccaagactcccagatggcatg

SEQ ID NO: 58129 - DNA, 353 bp, Homo sapiens
ggaccatgactttataagtccaccaatgatataactgtaaagtaactctctcagaacgtggactacgctattgaatcagaacaccaatttcactcgttatacaaacccacaaagcttcaactagcagaagttttgcatttttatccactttgagacaaaagaagtaatccatagaaaaggaaaactgttgctttaaatgaaagctctgacacaaatatgcaaacacaacaaactgctttccactgcgcacacactgagtttatccaggagctgggtgactcgcctgtcctctaccacccacacccactcggacatgggaacatgggtgcaagacatgaggagcaagagccgca

SEQ ID NO: 58130 - DNA, 1620 bp, Homo sapiens
gtcttgtctaccacagaggagtatgtccacacttaataatgaaaactttcttcctttcctgcccaaaaatttcttcagtctgttattatttttaagtgccccttgctgcaaatttcaaacagagcaagaaatcttcctcagagtaggtggtatgaaattaaactagtacaatatatatgaattcatgtcatttacccctgagtatggtagaattgttaaagcattcttaaattccaattatatgaagcctatcattactaggaaaagtatattctttgggataagaattaatttcttcacactattagagcatgttgtgagtagtaaggaactacttagatgcaatttatttacagaattgtcccttgacctcttgaaatggctagatctttcactactgtgtaggtagtctctacttactggtaggatagattacattgctttactggacaaagcagaatgaacttatataactaaaatatgtcctatattggctgggtgcggtggcttacacctgtaataccagcactttgggaggccaaggtgggtggatcagttgaggtcaggagttcgagaccagcctggccaacatggtgaaaccctgtctctactgaaaatacaaaaaaaaaaaagtatctgggcatggtggcttgtgcctgtaatcccagctacttgggaggctgaggcagggaaatcgcttaaacccgggaggtggaggttgcagtgggcccagatcgtgccactccactccagcctgggagacagagcaagactccatctcaaaataataataatagtaataatgaataaaataaaataaaatatgtcctccaggaaaagcaatgacagagtaatcaccaaattaataggaacatctttctagagaaagtacatgcccagttagttcaaacccaggtttcaaagaagtagcactgggctctactgtaaaggcaggcagtgaccaagaggtggtggggagagaggtagagtaccctcaaatcattcccattttcacttccaatttccctttgtaatcattaagcttaagctatgtatggaaatgcaaagcaccattagcatttctagaaagcagctggaaccttacccaccaatgcttttttgaagacagtatcatcccaaatttaaaaatcctattgtatatgttgtaaaatttctggcaaagaaatggaggatcctgtggcagctattcccacctaaagccaaccctataaggatgggtcattttttagccatgctaggatttactgcacacacaaaaaatgtcatttagcttgtcacattgctagcacagctgcacatatgagcaaagcactgttggtctgtgtttctcagtgggggtactcttggcatttggagctggataggtctttgctgtacagaatcatcccatgcattgccagatgtttaatatcccaggcccctgctgactaaatgtcagtagcattctcagtcattgtaaacaccaagaataaaaagcattcccccaggttcaaatgccctccctgggaggttggtatcacctcccctgaatgccactgtctactgcattttgaggacacagggagaaaaagtgcctatcctcaaacattgtctctgctg

SEQ ID NO: 58131 - DNA, 445 bp, Homo sapiens
  misc_feature (64)..(64): n is a, c, g, or t
  misc_feature (174)..(174): n is a, c, g, or t
gctactcaaaagcaggcagcagttagcagcctctctgctgcttgctgacacagttcagaaaggntaggcattctgtcgttggcaggagacagagcttgaggactttgtcaaagcccagcgtcctccagttccatacgtgtatatatgtacatgtgtgtatataaaggtatattngtgtgtgtgcactggaaaagcacctgccacttccaaaagtcagccgtattgtattcacagtcacagagccgattttataatacatttattcagtaaatatttacttagcacctattgtatgtacttgtataatgagaaagaaaacaaatttttacaagatttttactgaggaaattcaaaactttaaggacactggtatttgaaattcatgtaatttttacatgtcataaaatagttttttgtttcctcctaaccatttagaaatggtaaa

SEQ ID NO: 58132 - DNA, 536 bp, Homo sapiens
aattttacccagtaaccacgagcagtaagtttaattgggaagttttgttgaaacataactctaaaattgtggaaaaatgtcaacactttaaaattagtgcctaataattttaattctcttggtactcactgcagtatcattaatcatgatggagtcattcgatcctaatatggatgtaatatccaattctgcagagattcagctgtaatttagcaacaattaactgtccacttattataaagtgatgccaaaaaccctaatgcaattattttaaggcgttggtcacattaacaatagcattcaagtttgcagatgttgcagaaactttagattgatgtgtctgattaaaaacacattacgttggaaattttcttactttaggtatttatgctggtatttcagaaggcactttcggtttcatctttggaatagctctcatttacttttgtgcctttcttaaaattttatttctgcatatttgctttgaggaaaacaaattgatgtgttttctaaacatatgcaacttttgaggagat

SEQ ID NO: 58133 - DNA, 268 bp, Homo sapiens
gtgggggaaaggtccttctccctcctctgaagctgcctctcactgtgtaatctcaggccagtcactgtctctttctgggcctcagtttccccatctgcaaaatgaaggggtcagactaggagacctttaatatctctcccagctctgagattcgttctaggcttccattctgactgctaggcagtggaggtcagtcccccttattggggacaatacggcagggatgaggttcaaagtcctgcccagagaccattcccacatgaagcca

SEQ ID NO: 58134 - DNA, 850 bp, Homo sapiens
gtgacggagggctggagctccagggtgctcacaggggaaagagcaagccagggatataaggaaaatgtttgggaaaacaaagcctgtctttttctctgagttcttctctattgctcccctggaccgagctctcctaaggcctttgtcataatcacccatttcaataaaaatatcttatatttaaaaagaatatgtaagggaaagaatattgtattggatactaggagaccagctaggttctcatctctttcatgtcgcaaacctgctatgttatcagacatttcaacctctctggactacaggagaaaaaaaaaagaagggagggatacagaaggaattcatatagtgagaagaccatgctctctccaagccagctttccagaattcccttcaatgtgccttgggagtctcacctccttccttgccatagtcccaccaggcctccacggtgccgaggtagaagcaggtcctcaggtccctttaactgaattgagtcatggctcaccaccactaccaccagcaaacgccctctcttcttgctgccgcagcacctagggatttcctattccttctcctcaccagctaatcacaatctacctatagcctcagtagggggtctctatgcctgatgcctccattcacacctctggagctcctctcctgccctcttctgctgtggtacattggcctctcctgctcctgtccatcttcacaactgtcatttgcccatccctaaatccatcatccttgcccaaaagattcccactgcccagggaaggagtcaggaagaacaggaagaactgtaagaagatacatagagcatgtttggaggcctaaagaaataaactta

SEQ ID NO: 58135 - DNA, 389 bp, Homo sapiens
caggttcaagcgatcctcctgcctcagcctaccaagtagctggcattacagatgcacaccaccatgcccggctaatttttgcatttttaatggagacaaagtttcaccatgtttgccagggtcgtctcgaactcctgaactcaagtaatctgcccatcatggcctcccaaagtgctgggatcacagacgtgagccctcgcacctgagattgttcttattactctcatgttacaaatgaggaaacaactagtgaaattagtgaaattgttctctttttcttttctttttttttttgggagacagagtctcgctttatcatcctggctggaatgtgcattggcccgatctcagctcactgcaacctccactttctgggttcaagtgatcct

SEQ ID NO: 58136 - DNA, 226 bp, Homo sapiens
ctaaaggttaaatgactctgaggcaaggtggaagaactggcttgtctggatgttatttaataggcactactgcggtgtcctcagatggtactgagggggccttctggtccttcaaaggaaaataacacaggcatgagttcatttgggagtgtgaactttcagaacacctaataagagagtggtgtcagaagaaccacatgtcaacacaccggctctctcttcacag

SEQ ID NO: 58137 - DNA, 7111 bp, Homo sapiens
aacccagtagccaagaggcacttcgtccagtcagccaaggaagtcgccaacagcactgccaacctggtgaagaccatcaaggccctggatggggatttctctgaagacaaccgcaataagtgtcgcatcgccaccgcacccttgattgaagctgtggagaacctgacagcgttcgcctcaaaccctgagtttgtcagcattcctgcccagatcagctccgagggttcccaggcacaggaaccaatcctggtctcagccaagaccatgctggagagttcatcgtacctcattcgcactgcacgctctctggccatcaaccccaaagacccacccacctggtctgtactggctggacattcccatacagtgtccgactccatcaagagtctcatcacttctatcagggacaaggcccctggacagagggagtgtgattactccatcgatggcatcaaccggtgcatccgggacatcgagcaggcctcgctggccgccgtcagccagagcctggccacgagggacgacatctctgtggaggccctgcaggagcagctgacttcggtggtccaggaaatcggacaccttatcgatcccatcgccacagcggctcggggagaagcagctcagctgggacataaggtgacacaactggcaagctattttgagcccttgatcttagccgcagttggtgtggcctccaagattcttgatcatcagcagcagatgacggtgctggaccagaccaagactctcgcagagtctgccttgcagatgttgtatgcagccaaagaaggtggcggaaaccccaaggcacaacacacccatgacgccatcacagaggccgcccagttgatgaaggaagccgtggatgacatcatggtgacgctgaacgaagctgccagtgaagtggggctggttgggggcatggtggacgccattgcagaagccatgagcaagctggatgaaggcactcctccagaaccaaagggaacatttgtcgactatcagacgactgtggttaaatactccaaagccattgcggtgacagctcaggaaatgatgactaagtcggttactaacccggaggagttgggaggactggcttcacaaatgaccagtgactatgggcacctggctttccagggccagatggcagcagccacggcggaaccagaggagatcggattccagattcgcactcgtgtgcaggacctgggccacggctgtatcttcctggtgcagaaggcaggggccctccaggtctgccccacagacagctacaccaagagggagctgatcgaatgcgcccgtgccgtcacggaaaaggtctccttggtgctctcggctctccaggccgggaacaaaggaacccaggcatgcattacagccgccaccgctgtgtctgggatcattgccgacctggacaccaccattatgtttgcaacagcggggacgctgaatgcagagaacagtgagaccttcgcagaccacagggagaacattctcaagacggccaaggccttggtagaagacacgaaactacttgtgtcaggagctgcgtccactcctgacaagctggcccaggcggcccagtcctcagcagccaccatcacccagctcgcagaagtggtcaagctgggggcagccagcctgggctccgacgaccccgagacccaggtggttttgatcaatgccatcaaagatgtggccaaggccctttctgatctcatcagtgctaccaagggagctgccagcaagccagtggacgacccttccatgtaccagctcaagggggctgccaaggtgatggtgaccaatgtcacctcgctcctcaagactgtaaaggcagtggaggatgaggccacccggggcaccagggcgcttgaggccacaattgaatgcataaagcaggagcttacggtgttccagtcaaaagacgtacctgaaaagacatcatcacctgaagaatccataaggatgacgaaaggcatcaccatggcaacagccaaagccgtggcagctgggaactcatgtagacaggaggacgtgattgctactgccaacctgagccggaaagccgtgtcagatatgttgacggcttgcaagcaagcatccttccaccccgatgtcagtgacgaggtgagaaccagagccttgcgtttcgggacggagtgcacccttggctacttggacctcctggagcacgtcttggtgattcttcagaaaccaaccccagaattcaagcagcagctggccgctttctccaagcgagtcgccggcgctgtgacagagctcatccaggcggcggaagccatgaaaggaacagagtgggtggatccagaagacccaactgtcattgcagaaacagagttactgggggctgcagcatccatcgaagctgctgctaagaagttagagcaactgaagccaagagcaaaaccaaaacaagcggatgagaccctggactttgaggaacagatcttggaagctgctaaatccattgctgctgccacaagcgccctggtcaaatcggcctcagcagcccagagggagctggtggcccaaggaaaggtgggctccatccctgccaatgctgcagacgacggacagtggtcacaggggctgatttctgctgcccggatggtggcggctgcgaccagcagtctctgtgaggcggccaatgcctccgttcagggacacgccagcgaggagaagctcatctcatctgccaagcaggtcgccgcttccacggctcagctgctggtggcctgcaaggtgaaggccgaccaggattcagaggccatgaggcggctacaggcggcaggaaatgctgtgaaaagagcctcagacaatcttgtccgtgcagcccagaaggcagcttttggcaaagctgatgacgacgatgttgtagtgaaaaccaagtttgtggggggcattgctcagatcatcgccgcccaggaagaaatgctaaagaaagagcgagaactggaagaagcaaggaaaaaactggcccaaatccgccagcagcagtataagtttttacccaccgagctgagggaagatgagggctaaaggtgcgagcccagatggcgagccccaggggatggccctggctgaactggacagacagtgttcctgagaggctgggcacttagctggaaaccgcccacctccctcccgggtgagcctggagccctgcgtgcttgttctcacatctctgtcccgtcggcactggctgcatgatcgtgatgtcacacggtacaatgtcctacccacaactcctctgccgcctcccctcatgcctcaccgtgtctcaggagagaggggtgcacgtttcatggactgttaccaacaaagaaaagtcagtattatgttgttctcagacactttggcttttgttggtccttctcttaggcctgctcctggacctctttatgatattgtgatagggaaaaaaatcattgacgtcatagaatattcttcttcctctcaggagaagacggaagctggagttggacatggttcataaaagccagaaacacaaacccgtgtggactccgggagggtgactcaggtcctccttccatgtcttgagcactggctcacccagggggtgaaaaattcccgcccctgtttgcacgctttcttgcctccgtgtgtaagctccttgtacaacccagacccatcttgtattttgtggcccagaaaactgaacgattattttgttcctccgtagtccaaagggcagagttgcggaaggccgtcggggcttggtgagcaggggctgtaatacagtctgtgggctccttaccctgcagaggctgtttcagctcacacagagtcatccacacaaacccacggctcccagttgacagtcagtggaatgctcgtctccttagcgtccagggtggggattctgctggaataaagagcttcctcagtgactcatctttaggtcccacgctggtttctgtgccttcagaatggtcacaagcccggattggaaaggatctgcttacaaacctgtcccctgtcctccaacccaaaacgcctttttttctgtcttaatatccagaaaatctaaatgcatcctaaaatcaatgtgaacctttaacaagatagttttacttattatcacataagacataagatgttttcattttctggatgtcacacttccagaatttcatatttttcccctcttttctttccccttttcagagccctcccataggaagggaagggcttgaatttacccttaatctgcacctttagccaaggcagtgcatggaagatgaatggctcgtgggacagaatctaatgccagggagcaggagtgtttgaaagaattcatagtggggaaggtaaaagttaatggaagtacatgattttcaaaactggtaacagttaaaggcactcaccctccgcctctctctctctctctctctctggtgtgctatcatgtcttggactccatccacactatagtttcaaagttccactgacgggggaaagttggtgctttggtcctccgaagatgtcacctttcgaccttgcccgatcttgtttcaccagactctagcccatgtcatggttttaaaatacataaacttctgacagcttcccatatttataagttacttataagtgctgcacgtattagaatttttttttttcagaccagtaaagttagagaaaagacgctgtaaaggaaaagcaagtgagagtatgtgtaggacactgacagtgtgtgggcaccagttctgaagaggaggggagctgctggagccctagcctgttggggaaaagctggcacactcttggctcgccctctttgagtggagctgatccaacacctcatgcctgccttggccggacactgagaggaggggcacacgtgcttccagagacactcaggagtcagaccccaatgctcagagtcacaatgtgttcatggcctcctgtaacaggactctggggatcccctctgtggcccagcccaccccaccctctgctcttctatgctgtgcccagggcagctgccctcttctgcctgtgccccatcccatcctgaaaacccaggaccaaggcaggggcaggcagccagttcttccaccttgcctcagagtcatttaaaacctttactgcatttgataccagaaaagcctccagagacaaaccaaatgcaaaggcctttcctttataactctaaagaacaggcatcgaaagtttatttttgtaggagctatataaatactcacctttctggagtcgtccagtgctgggagctttggggagtttggttctcagttatcacctggtatggtcccagtttctcatctgtcctttcctcatccaccctgcacatgtgtatgtgaacggcttcgtggccggtgtggtggtttctcatttcataagatagttgaagggccatgccttgtctggatgttatttaataggcactactgcggtgtcctcagatggtactgagggggccttctggtccttcaaaggaaaataacacaggcatgagttcatttgggagtgtgaactttcagaacacctaataagagagtggtgtcagagtaaaaacggccccaggtctggagcatagaagtgtatctctgtgaagagagagccggtgtgttgacatgtggttcttctcacacccctctactcctcgagggctttgaatccttgggctgatttttgtgccagaaattgctgttcccgatggccaaaaggggaacctgaactggatttcagaactgcccagtgatttgaaaatttagattttacttgggcctttcaggagtctttagatagggatgctgaggtcatatttagttcaatgaacagcccttgtttaagttttgccagtgtccagccagctgtggccctggccatctgtgcaggcaggttcctcaattcctggttggccctgcagtcggtcaacacagtccctccaggtcggctgcagaggcagctgcccagcctgcagtctatgcacgggccttaagaaatgagctgcctgtagcctcacggcatatgcttttatcagggaaaacccttcgagcttcttctgattctcacctgcttgctttctggctgtcttagtcagtgtgtttacaggcaactaaagcctgttcctaatttatcaaaaaattataaccaaaattcaccatagcctaagagagtaaaccccacctccaaagtgatgccaaggccaaaacctcatcaaggaaccagacacaggtcaaaagtggtgagcaagccatggtctctgctcctggggaactcacacgctgacccccgaggagccttggtttcctccctggcagatagtccccagaatcttctctcccagctttgaggttctgggctctggaaaggcctctgggatgctggccttaagatctcagcacagactatcagcatgttccattctcagattcctggaggaaaggtaccctctgttgaccaaggggctggctgcttctgagacttaccaacccaagaaatttggagacattcccctcaggctaaaaggcagcggtccccagagttcagaaagcaaaagatcttgacaactgtgccagtagtggctctggtcctatctctccacagtgctggcctctgctggggaaggcatctttcccaaaggtatccccaagtaccatgttgaaaatgtcctcagtctgttgctccatctttctgagcctctgcttggtatgtcatgtttatggtcactacggatgagtgtgtgcagagtttgggttgattcttttaaatgctacaaacaagagctatttcttttcaataaaaaaggtttggattcggcctcttcctctgagcccacctcccagccctccagggagcatcagtgtacctgagtcactttgtctgcatctcttcatcccacaaaacacgaggctgggtctcattcagcggcctctcaccaaccttcaagatccagaagaaaacaggaacgttcagctctgccctgtgtcgtatctaatcacatacattaatttatctaaccacataagttatttttttttatttgccagaaataaacctttaaaataacacatgaggggtctatcaaaaa

SEQ ID NO: 58138 - DNA, 4706 bp, Homo sapiens
gcctcgtgccgaatcggcacgaggcggcacgaggccaaaacaagcggatgagaccctggactttgaggaacagatcttggaagctgctaaatccattgctgctgccacaagcgccctggtcaaatcggcctcagcagcccagagggagctggtggcccaaggaaaggtgggctccatccctgccaatgctgcagacgacggacagtggtcacaggggctgatttctgctgcccggatggtggcggctgcgaccagcagtctctgtgaggcggccaatgcctccgttcagggacacgccagcgaggagaagctcatctcatctgccaagcaggtcgccgcttccacggctcagctgctggtggcctgcaaggtgaaggccgaccaggattcagaggccatgaggcggctacaggcggcaggaaatgctgtgaaaagagcctcagacaatcttgtccgtgcagcccagaaggcagcttttggcaaagctgatgacgacgatgttgtagtgaaaaccaagtttgtggggggcattgctcagatcatcgccgcccaggaagaaatgctaaagaaagagcgagaactggaagaagcaaggaaaaaactggcccaaatccgccagcagcagtataagtttttacccaccgagctgagggaagatgagggctaaaggtgcgagcccagatggcgagccccaggggatggccctggctgaactggacagacagtgttcctgagaggctgggcacttagctggaaaccgcccacctccctcccgggtgagcctggagccctgcgtgcttgttctcacatctctgtcccgtcggcactggctgcatgatcgtgatgtcacacggtacaatgtcctacccacaactcctctgccgcctcccctcatgcctcaccgtgtctcaggagagaggggtgcacgtttcatggactgttaccaacaaagaaaagtcagtattatgttgttctcagacactttggcttttgttggtccttctcttaggcctgctcctggacctctttatgatattgtgatagggaaaaaaatcattgacgtcatagaatattcttcttcctctcaggagaagacggaagctggagttggacatggttcataaaagccagaaacacaaacccgtgtggactccgggagggtgactcaggtcctccttccatgtcttgagcactggctcacccagggggtgaaaaattcccgcccctgtttgcacgctttcttgcctccgtgtgtaagctccttgtacaacccagacccatcttgtattttgtggcccagaaaactgaacgattattttgttcctccgtagtccaaagggcagagttgcggaaggccgtcggggcttggtgagcaggggctgtaatacagtctgtgggctccttaccctgcagaggctgtttcagctcacacagagtcatccacacaaacccacggctcccagttgacagtcagtggaatgctcgtctccttagcgtccagggtggggattctgctggaataaagagcttcctcagtgactcatctttaggtcccacgctggtttctgtgccttcagaatggtcacaagcccggattggaaaggatctgcttacaaacctgtcccctgtcctccaacccaaaacgcctttttttctgtcttaatatccagaaaatctaaatgcatcctaaaatcaatgtgaacctttaacaagatagttttacttattatcacataagacataagatgttttcattttctggatgtcacacttccagaatttcatatttttcccctcttttctttccccttttcagagccctcccataggaagggaagggcttgaatttacccttaatctgcacctttagccaaggcagtgcatggaagatgaatggctcgtgggacagaatctaatgccagggagcaggagtgtttgaaagaattcatagtggggaaggtaaaagttaatggaagtacatgattttcaaaactggtaacagttaaaggcactcaccctccgcctctctctctctctctctctctggtgtgctatcatgtcttggactccatccacactatagtttcaaagttccactgacgggggaaagttggtgctttggtcctccgaagatgtcacctttcgaccttgcccgatcttgtttcaccagactctagcccatgtcatggttttaaaatacataaacttctgacagcttcccatatttataagttacttataagtgctgcacgtattagaatttttttttttcagaccagtaaagttagagaaaagacgctgtaaaggaaaagcaagtgagagtatgtgtaggacactgacagtgtgtgggcaccagttctgaagaggaggggagctgctggagccctagcctgttggggaaaagctggcacactcttggctcgccctctttgagtggagctgatccaacacctcatgcctgccttggccggacactgagaggaggggcacacgtgcttccagagacactcaggagtcagaccccaatgctcagagtcacaatgtgttcatggcctcctgtaacaggactctggggatcccctctgtggcccagcccaccccaccctctgctcttctatgctgtgcccagggcagctgccctcttctgcctgtgccccatcccatcctgaaaacccaggaccaaggcaggggcaggcagccagttcttccaccttgcctcagagtcatttaaaacctttactgcatttgataccagaaaagcctccagagacaaaccaaatgcaaaggcctttcctttataactctaaagaacaggcatcgaaagtttatttttgtaggagctatataaatactcacctttctggagtcgtccagtgctgggagctttggggagtttggttctcagttatcacctggtatggtcccagtttctcatctgtcctttcctcatccaccctgcacatgtgtatgtgaacggcttcgtggccggtgtggtggtttctcatttcataagatagttgaagggccatgccttgtctggatgttatttaataggcactactgcggtgtcctcagatggtactgagggggccttctggtccttcaaaggaaaataacacaggcatgagttcatttgggagtgtgaactttcagaacacctaataagagagtggtgtcagagtaaaaacggccccaggtctggagcatagaagtgtatctctgtgaagagagagccggtgtgttgacatgtggttcttctcacacccctctactcctcgagggctttgaatccttgggctgatttttgtgccagaaattgctgttcccgatggccaaaaggggaacctgaactggatttcagaactgcccagtgatttgaaaatttagattttacttgggcctttcaggagtctttagatagggatgctgaggtcatatttagttcaatgaacagcccttgtttaagttttgccagtgtccagccagctgtggccctggccatctgtgcaggcaggttcctcaattcctggttggccctgcagtcggtcaacacagtccctccaggtcggctgcagaggcagctgcccagcctgcagtctatgcacgggccttaagaaatgagctgcctgtagcctcacggcatatgcttttatcagggaaaacccttcgagcttcttctgattctcacctgcttgctttctggctgtcttagtcagtgtgtttacaggcaactaaagcctgttcctaatttatcaaaaaattataaccaaaattcaccatagcctaagagagtaaaccccacctccaaagtgatgccaaggccaaaacctcatcaaggaaccagacacaggtcaaaagtggtgagcaagccatggtctctgctcctggggaactcacacgctgacccccgaggagccttggtttcctccctggcagatagtccccagaatcttctctcccagctttgaggttctgggctctggaaaggcctctgggatgctggccttaagatctcagcacagactatcagcatgttccattctcagattcctggaggaaaggtaccctctgttgaccaaggggctggctgcttctgagacttaccaacccaagaaatttggagacattcccctcaggctaaaaggcagcggtccccagagttcagaaagcaaaagatcttgacaactgtgccagtagtggctctggtcctatctctccacagtgctggcctctgctggggaaggcatctttcccaaaggtatccccaagtaccatgttgaaaatgtcctcagtctgttgctccatctttctgagcctctgcttggtatgtcatgtttatggtcactacggatgagtgtgtgcagagtttgggttgattcttttaaatgctacaaacaagagctatttcttttcaataaaaaaggtttggattcggcctcttcctctgagcccacctcccagccctccagggagcatcagtgtacctgagtcactttgtctgcatctcttcatcccacaaaacacgaggctgggtctcattcagcggcctctcaccaaccttcaagatccagaagaaaacaggaacgttcagctctgccctgtgtcgtatctaatcacatacattaatttatctaaccacataagttatttttttttatttgccagaaataaacctttaaaataacacatgaggggtctatcaaaaa

SEQ ID NO: 58139 - DNA, 5171 bp, Homo sapiens
gtgtaccacagacacccgatccagctctctttaatcgaatttgacttggctgccctggatggggatttctctgaagacaaccgcaataagtgtcgcatcgccaccgcacccttgattgaagctgtggagaacctgacagcgttcgcctcaaaccctgagtttgtcagcattcctgcccagatcagctccgagggttcccaggcacaggaaccaatcctggtctcagccaagaccatgctggagagttcatcgtacctcattcgcactgcacgctctctggccatcaaccccaaagacccacccacctggtctgtactggctggacattcccatacagtgtccgactccatcaagagtctcatcacttctatcagggacaaggcccctggacagagggagtgtgattactccatcgatggcatcaaccggtgcatccgggacatcgagcaggcctcgctggccgccgtcagccagagcctggccacgagggacgacatctctgtggaggccctgcaggagcagctgacttcggtggtccaggaaatcggacaccttatcgatcccatcgccacagcggctcggggagaagcagctcagctgggacataaggtgacacaactggcaagctattttgagcccttgatcttagccgcagttggtgtggcctccaagattcttgatcatcagcagcagatgacggtgctggaccagaccaagactctcgcagagtctgccttgcagatgttgtatgcagccaaagaaggtggcggaaaccccaaggcacaacacacccatgacgccatcacagaggccgcccagttgatgaaggaagccgtggatgacatcatggtgacgctgaacgaagctgccagtgaagtggggctggttgggggcatggtggacgccattgcagaagccatgagcaagctggatgaaggcactcctccagaaccaaagggaacatttgtcgactatcagacgactgtggttaaatactccaaagccattgcggtgacagctcaggaaatgatgactaagtcggttactaacccggaggagttgggaggactggcttcacaaatgaccagtgactatgggcacctggctttccagggccagatggcagcagccacggcggaaccagaggagatcggattccagattcgcactcgtgtgcaggacctgggccacggctgtatcttcctggtgcagaaggcaggggccctccaggtctgccccacagacagctacaccaagagggagctgatcgaatgcgcccgtgccgtcacggaaaaggtctccttggtgctctcggctctccaggccgggaacaaaggaacccaggcatgcattacagccgccaccgctgtgtctgggatcattgccgacctggacaccaccattatgtttgcaacagcggggacgctgaatgcagagaacagtgagaccttcgcagaccacagggagaacattctcaagacggccaaggccttggtagaagacacgaaactacttgtgtcaggagctgcgtccactcctgacaagctggcccaggcggcccagtcctcagcagccaccatcacccagctcgcagaagtggtcaagctgggggcagccagcctgggctccgacgaccccgagacccaggtggttttgatcaatgccatcaaagatgtggccaaggccctttctgatctcatcagtgctaccaagggagctgccagcaagccagtggacgacccttccatgtaccagctcaagggggctgccaaggtgatggtgaccaatgtcacctcgctcctcaagactgtaaaggcagtggaggatgaggccacccggggcaccagggcgcttgaggccacaattgaatgcataaagcaggagcttacggtgttccagtcaaaagacgtacctgaaaagacatcatcacctgaagaatccataaggatgacgaaaggcatcaccatggcaacagccaaagccgtggcagctgggaactcatgtagacaggaggacgtgattgctactgccaacctgagccggaaagccgtgtcagatatgttgacggcttgcaagcaagcatccttccaccccgatgtcagtgacgaggtgagaaccagagccttgcgtttcgggacggagtgcacccttggctacttggacctcctggagcacgtcttggtgattcttcagaaaccaaccccagaattcaagcagcagctggccgctttctccaagcgagtcgccggcgctgtgacagagctcatccaggcggcggaagccatgaaaggaacagagtgggtggatccagaagacccaactgtcattgcagaaacagagttactgggggctgcagcatccatcgaagctgctgctaagaagttagagcaactgaagccaagagcaaaaccaaaacaagcggatgagaccctggactttgaggaacagatcttggaagctgctaaatccattgctgctgccacaagcgccctggtcaaatcggcctcagcagcccagagggagctggtggcccaaggaaaggtgggctccatccctgccaatgctgcagacgacggacagtggtcacaggggctgatttctgctgcccggatggtggcggctgcgaccagcagtctctgtgaggcggccaatgcctccgttcagggacacgccagcgaggagaagctcatctcatctgccaagcaggtcgccgcttccacggctcagctgctggtggcctgcaaggtgaaggccgaccaggattcagaggccatgaggcggctacaggcggcaggaaatgctgtgaaaagagcctcagacaatcttgtccgtgcagcccagaaggcagcttttggcaaagctgatgacgacgatgttgtagtgaaaaccaagtttgtggggggcattgctcagatcatcgccgcccaggaagaaatgctaaagaaagagcgagaactggaagaagcaaggaaaaaactggcccaaatccgccagcagcagtataagtttttacccaccgagctgagggaagatgagggctaaaggtgcgagcccagatggcgagccccaggggatggccctggctgaactggacagacagtgttcctgagaggctgggcacttagctggaaaccgcccacctccctcccgggtgagcctggagccctgcgtgcttgttctcacatctctgtcccgtcggcactggctgcatgatcgtgatgtcacacggtacaatgtcctacccacaactcctctgccgcctcccctcatgcctcaccgtgtctcaggagagaggggtgcacgtttcatggactgttaccaacaaagaaaagtcagtattatgttgttctcagacactttggcttttgttggtccttctcttaggcctgctcctggacctctttatgatattgtgatagggaaaaaaatcattgacgtcatagaatattcttcttcctctcaggagaagacggaagctggagttggacatggttcataaaagccagaaacacaaacccgtgtggactccgggagggtgactcaggtcctccttccatgtcttgagcactggctcacccagggggtgaaaaattcccgcccctgtttgcacgctttcttgcctccgtgtgtaagctccttgtacaacccagacccatcttgtattttgtggcccagaaaactgaacgattattttgttcctccgtagtccaaagggcagagttgcggaaggccgtcggggcttggtgagcaggggctgtaatacagtctgtgggctccttaccctgcagaggctgtttcagctcacacagagtcatccacacaaacccacggctcccagttgacagtcagtggaatgctcgtctccttagcgtccagggtggggattctgctggaataaagagcttcctcagtgactcatctttaggtcccacgctggtttctgtgccttcagaatggtcacaagcccggattggaaaggatctgcttacaaacctgtcccctgtcctccaacccaaaacgcctttttttctgtcttaatatccagaaaatctaaatgcatcctaaaatcaatgtgaacctttaacaagatagttttacttattatcacataagacataagatgttttcattttctggatgtcacacttccagaatttcatatttttcccctcttttctttccccttttcagagccctcccataggaagggaagggcttgaatttacccttaatctgcacctttagccaaggcagtgcatggaagatgaatggctcgtgggacagaatctaatgccagggagcaggagtgtttgaaagaattcatagtggggaaggtaaaagttaatggaagtacatgattttcaaaactggtaacagttaaaggcactcaccctccgcctctctctctctctctctctctggtgtgctatcatgtcttggactccatccacactatagtttcaaagttccactgacgggggaaagttggtgctttggtcctccgaagatgtcacctttcgaccttgcccgatcttgtttcaccagactctagcccatgtcatggttttaaaatacataaacttctgacagcttcccatatttataagttacttataagtgctgcacgtattagaatttttttttttcagaccagtaaagttagagaaaagacgctgtaaaggaaaagcaagtgagagtatgtgtaggacactgacagtgtgtgggcaccagttctgaagaggaggggagctgctggagccctagcctgttggggaaaagctggcacactcttggctcgccctctttgagtggagctgatccaacacctcatgcctgccttggccggacactgagaggaggggcacacgtgcttccagagacactcaggagtcagaccccaatgctcagagtcacaatgtgttcatggcctcctgtaacaggactctggggatcccctctgtggcccagcccaccccaccctctgctcttctatgctgtgcccagggcagctgccctcttctgcctgtgccccatcccatcctgaaaacccaggaccaaggcaggggcaggcagccagttcttccaccttgcctcagagtcatttaaaacctttactgcatttgatacccctgcactccagcctgggcaacaaagcaagaccctgtctcttg

SEQ ID NO: 58140 - DNA, 3919 bp, Homo sapiens
gtgtaccacagacacccgatccagctctctttaatcgaatttgacttggctgccctggatggggatttctctgaagacaaccgcaataagtgtcgcatcgccaccgcacccttgattgaagctgtggagaacctgacagcgttcgcctcaaaccctgagtttgtcagcattcctgcccagatcagctccgagggttcccaggcacaggaaccaatcctggtctcagccaagaccatgctggagagttcatcgtacctcattcgcactgcacgctctctggccatcaaccccaaagacccacccacctggtctgtactggctggacattcccatacagtgtccgactccatcaagagtctcatcacttctatcagggacaaggcccctggacagagggagtgtgattactccatcgatggcatcaaccggtgcatccgggacatcgagcaggcctcgctggccgccgtcagccagagcctggccacgagggacgacatctctgtggaggccctgcaggagcagctgacttcggtggtccaggaaatcggacaccttatcgatcccatcgccacagcggctcggggagaagcagctcagctgggacataaggtgacacaactggcaagctattttgagcccttgatcttagccgcagttggtgtggcctccaagattcttgatcatcagcagcagatgacggtgctggaccagaccaagactctcgcagagtctgccttgcagatgttgtatgcagccaaagaaggtggcggaaaccccaaggcacaacacacccatgacgccatcacagaggccgcccagttgatgaaggaagccgtggatgacatcatggtgacgctgaacgaagctgccagtgaagtggggctggttgggggcatggtggacgccattgcagaagccatgagcaagctggatgaaggcactcctccagaaccaaagggaacatttgtcgactatcagacgactgtggttaaatactccaaagccattgcggtgacagctcaggaaatgatgactaagtcggttactaacccggaggagttgggaggactggcttcacaaatgaccagtgactatgggcacctggctttccagggccagatggcagcagccacggcggaaccagaggagatcggattccagattcgcactcgtgtgcaggacctgggccacggctgtatcttcctggtgcagaaggcaggggccctccaggtctgccccacagacagctacaccaagagggagctgatcgaatgcgcccgtgccgtcacggaaaaggtctccttggtgctctcggctctccaggccgggaacaaaggaacccaggcatgcattacagccgccaccgctgtgtctgggatcattgccgacctggacaccaccattatgtttgcaacagcggggacgctgaatgcagagaacagtgagaccttcgcagaccacagggagaacattctcaagacggccaaggccttggtagaagacacgaaactacttgtgtcaggagctgcgtccactcctgacaagctggcccaggcggcccagtcctcagcagccaccatcacccagctcgcagaagtggtcaagctgggggcagccagcctgggctccgacgaccccgagacccaggtggttttgatcaatgccatcaaagatgtggccaaggccctttctgatctcatcagtgctaccaagggagctgccagcaagccagtggacgacccttccatgtaccagctcaagggggctgccaaggtgatggtgaccaatgtcacctcgctcctcaagactgtaaaggcagtggaggatgaggccacccggggcaccagggcgcttgaggccacaattgaatgcataaagcaggagcttacggtgttccagtcaaaagacgtacctgaaaagacatcatcacctgaagaatccataaggatgacgaaaggcatcaccatggcaacagccaaagccgtggcagctgggaactcatgtagacaggaggacgtgattgctactgccaacctgagccggaaagccgtgtcagatatgttgacggcttgcaagcaagcatccttccaccccgatgtcagtgacgaggtgagaaccagagccttgcgtttcgggacggagtgcacccttggctacttggacctcctggagcacgtcttggtgattcttcagaaaccaaccccagaattcaagcagcagctggccgctttctccaagcgagtcgccggcgctgtgacagagctcatccaggcggcggaagccatgaaaggaacagagtgggtggatccagaagacccaactgtcattgcagaaacagagttactgggggctgcagcatccatcgaagctgctgctaagaagttagagcaactgaagccaagagcaaaaccaaaacaagcggatgagaccctggactttgaggaacagatcttggaagctgctaaatccattgctgctgccacaagcgccctggtcaaatcggcctcagcagcccagagggagctggtggcccaaggaaaggtgggctccatccctgccaatgctgcagacgacggacagtggtcacaggggctgatttctgctgcccggatggtggcggctgcgaccagcagtctctgtgaggcggccaatgcctccgttcagggacacgccagcgaggagaagctcatctcatctgccaagcaggtcgccgcttccacggctcagctgctggtggcctgcaaggtgaaggccgaccaggattcagaggccatgaggcggctacaggcggcaggaaatgctgtgaaaagagcctcagacaatcttgtccgtgcagcccagaaggcagcttttggcaaagctgatgacgacgatgttgtagtgaaaaccaagtttgtggggggcattgctcagatcatcgccgcccaggaagaaatgctaaagaaagagcgagaactggaagaagcaaggaaaaaactggcccaaatccgccagcagcagtataagtttttacccaccgagctgagggaagatgagggctaaaggtgcgagcccagatggcgagccccaggggatggccctggctgaactggacagacagtgttcctgagaggctgggcacttagctggaaaccgcccacctccctcccgggtgagcctggagccctgcgtgcttgttctcacatctctgtcccgtcggcactggctgcatgatcgtgatgtcacacggtacaatgtcctacccacaactcctctgccgcctcccctcatgcctcaccgtgtctcaggagagaggggtgcacgtttcatggactgttaccaacaaagaaaagtcagtattatgttgttctcagacactttggcttttgttggtccttctcttaggcctgctcctggacctctttatgatattgtgatagggaaaaaaatcattgacgtcatagaatattcttcttcctctcaggagaagacggaagctggagttggacatggttcataaaagccagaaacacaaacccgtgtggactccgggagggtgactcaggtcctccttccatgtcttgagcactggctcacccagggggtgaaaaattcccgcccctgtttgcacgctttcttgcctccgtgtgtaagctccttgtacaacccagacccatcttgtattttgtggcccagaaaactgaacgattattttgttcctccgtagtccaaagggcagagttgcggaaggccgtcggggcttggtgagcaggggctgtaatacagtctgtgggctccttaccctgcagaggctgtttcagctcacacagagtcatccacacaaacccacggctcccagttgacagtcagtggaatgctcgtctccttagcgtccagggtggggattctgctggaataaagagcttcctcagtgactcat

SEQ ID NO: 58141 - DNA, 2909 bp, Homo sapiens
gtgtaccacagacacccgatccagctctctttaatcgaatttgacttggctgccctggatggggatttctctgaagacaaccgcaataagtgtcgcatcgccaccgcacccttgattgaagctgtggagaacctgacagcgttcgcctcaaaccctgagtttgtcagcattcctgcccagatcagctccgagggttcccaggcacaggaaccaatcctggtctcagccaagaccatgctggagagttcatcgtacctcattcgcactgcacgctctctggccatcaaccccaaagacccacccacctggtctgtactggctggacattcccatacagtgtccgactccatcaagagtctcatcacttctatcagggacaaggcccctggacagagggagtgtgattactccatcgatggcatcaaccggtgcatccgggacatcgagcaggcctcgctggccgccgtcagccagagcctggccacgagggacgacatctctgtggaggccctgcaggagcagctgacttcggtggtccaggaaatcggacaccttatcgatcccatcgccacagcggctcggggagaagcagctcagctgggacataaggtgacacaactggcaagctattttgagcccttgatcttagccgcagttggtgtggcctccaagattcttgatcatcagcagcagatgacggtgctggaccagaccaagactctcgcagagtctgccttgcagatgttgtatgcagccaaagaaggtggcggaaaccccaaggcacaacacacccatgacgccatcacagaggccgcccagttgatgaaggaagccgtggatgacatcatggtgacgctgaacgaagctgccagtgaagtggggctggttgggggcatggtggacgccattgcagaagccatgagcaagctggatgaaggcactcctccagaaccaaagggaacatttgtcgactatcagacgactgtggttaaatactccaaagccattgcggtgacagctcaggaaatgatgactaagtcggttactaacccggaggagttgggaggactggcttcacaaatgaccagtgactatgggcacctggctttccagggccagatggcagcagccacggcggaaccagaggaggtctgccaccttaagacccctattttaagatgcacacacacactggtgcccactcctgggtatttcttcatagcttagctccactctggaagaccccagcccagtaaccagagcccagtttatttccccaccactgcacagcacaggtccagaccaggtagccccaggctgtactcaagtctcactgccccttatggggcagactggccaagaactggggcatgggctttcagacagaaggactttgtatacagtgttctatcaggtcccctgtccctagccctgtcacctgtctcttttagcatgcccaagcttgggactgccatcttatcacgttcctactccagttagcacatcccccgcaattatttttgttttccataggttcacagaagtgttgaaagattcaagtatgaaaattagctatccctctccctcgaaagagctactttcatgaaacaaagtcttgcctgaatattctgggtggctaagaattagcccagacatacctcctgtggactccttttattacttccctgcctttcctagaccagctttccttagtggccagtgtagacttggctttagaatgcctgtacccgtaagagtctaacggtagccaaagttgggccccaaaggccactttctaagagctgccatctctcatacttctaatggggtggtccattgggaaggacacaggtcatgtgtggctccaaggagctttgtagcatctatatcagtgtgaacacatagaaggagtccagggcttgggggaaccacatggcttcttagataaaggaagcccaatttaaaatgaagattaatggagtggattacagggacacttaaaagataaaagtaattatattctgtgaaattcagcaagctgtttattgagcgcaaaccatgttcgagacgttcctaaatgaactgagttgtcaaggcagaaggttgtaattggtcttctcttctccttatagtgacagtcactgtccccaagttactcagtgctgctatttctcctgggagtcagatctaagtatgtttttacagagactccgagagatattccagaaatgaagtcccaaaacaaatcactttctaatgtgtgtggtaacaatgcatgtaaataggagtaccatatatgtatgtacttgcatacataaatatctagcatgggattacttaagtctctaacagtgcctgcattttgagatattagaataattgactaggctgtagcatgaataattctatttgcaatgagtgtgaagtcactaccaagaaaagagagttatcagatacccacattaagattctgttgattctttacacaggcctatcattttttttttaaatagactccctgttttagtaagatcatctagatttataattcatttgactaacctataattttgaactccataaacaaatgtaagggaacttctgttacagtaaggaaaagtttgcttggacaaaaggaaaagtgggctgggcgtgatggctcacgcctataagcactttgggaggccgaggtggacagatcacttgaggttaggagttcaagacccagcctggccaacatggcgtacccccttgtctacaaaaatactgggcgtgatggtgtgcgcctgtaatcccagctacttagaaggttgagccaggagaattgcttgaacccgggaggtggaggttgcagtgagccaagactatgcactgccctttagcctaggcaacagaatgagactccatct

SEQ ID NO: 58142 - DNA, 7081 bp, Homo sapiens
gtgtaccacagacacccgatccagctctctttaatcgaatttgacttggctgccctggatggggatttctctgaagacaaccgcaataagtgtcgcatcgccaccgcacccttgattgaagctgtggagaacctgacagcgttcgcctcaaaccctgagtttgtcagcattcctgcccagatcagctccgagggttcccaggcacaggaaccaatcctggtctcagccaagaccatgctggagagttcatcgtacctcattcgcactgcacgctctctggccatcaaccccaaagacccacccacctggtctgtactggctggacattcccatacagtgtccgactccatcaagagtctcatcacttctatcagggacaaggcccctggacagagggagtgtgattactccatcgatggcatcaaccggtgcatccgggacatcgagcaggcctcgctggccgccgtcagccagagcctggccacgagggacgacatctctgtggaggccctgcaggagcagctgacttcggtggtccaggaaatcggacaccttatcgatcccatcgccacagcggctcggggagaagcagctcagctgggacataaggtgacacaactggcaagctattttgagcccttgatcttagccgcagttggtgtggcctccaagattcttgatcatcagcagcagatgacggtgctggaccagaccaagactctcgcagagtctgccttgcagatgttgtatgcagccaaagaaggtggcggaaaccccaaggcacaacacacccatgacgccatcacagaggccgcccagttgatgaaggaagccgtggatgacatcatggtgacgctgaacgaagctgccagtgaagtggggctggttgggggcatggtggacgccattgcagaagccatgagcaagctggatgaaggcactcctccagaaccaaagggaacatttgtcgactatcagacgactgtggttaaatactccaaagccattgcggtgacagctcaggaaatgatgactaagtcggttactaacccggaggagttgggaggactggcttcacaaatgaccagtgactatgggcacctggctttccagggccagatggcagcagccacggcggaaccagaggagatcggattccagattcgcactcgtgtgcaggacctgggccacggctgtatcttcctggtgcagaaggcaggggccctccaggtctgccccacagacagctacaccaagagggagctgatcgaatgcgcccgtgccgtcacggaaaaggtctccttggtgctctcggctctccaggccgggaacaaaggaacccaggcatgcattacagccgccaccgctgtgtctgggatcattgccgacctggacaccaccattatgtttgcaacagcggggacgctgaatgcagagaacagtgagaccttcgcagaccacagggagaacattctcaagacggccaaggccttggtagaagacacgaaactacttgtgtcaggagctgcgtccactcctgacaagctggcccaggcggcccagtcctcagcagccaccatcacccagctcgcagaagtggtcaagctgggggcagccagcctgggctccgacgaccccgagacccaggtggttttgatcaatgccatcaaagatgtggccaaggccctttctgatctcatcagtgctaccaagggagctgccagcaagccagtggacgacccttccatgtaccagctcaagggggctgccaaggtgatggtgaccaatgtcacctcgctcctcaagactgtaaaggcagtggaggatgaggccacccggggcaccagggcgcttgaggccacaattgaatgcataaagcaggagcttacggtgttccagtcaaaagacgtacctgaaaagacatcatcacctgaagaatccataaggatgacgaaaggcatcaccatggcaacagccaaagccgtggcagctgggaactcatgtagacaggaggacgtgattgctactgccaacctgagccggaaagccgtgtcagatatgttgacggcttgcaagcaagcatccttccaccccgatgtcagtgacgaggtgagaaccagagccttgcgtttcgggacggagtgcacccttggctacttggacctcctggagcacgtcttggtgattcttcagaaaccaaccccagaattcaagcagcagctggccgctttctccaagcgagtcgccggcgctgtgacagagctcatccaggcggcggaagccatgaaaggaacagagtgggtggatccagaagacccaactgtcattgcagaaacagagttactgggggctgcagcatccatcgaagctgctgctaagaagttagagcaactgaagccaagagcaaaaccaaaacaagcggatgagaccctggactttgaggaacagatcttggaagctgctaaatccattgctgctgccacaagcgccctggtcaaatcggcctcagcagcccagagggagctggtggcccaaggaaaggtgggctccatccctgccaatgctgcagacgacggacagtggtcacaggggctgatttctgctgcccggatggtggcggctgcgaccagcagtctctgtgaggcggccaatgcctccgttcagggacacgccagcgaggagaagctcatctcatctgccaagcaggtcgccgcttccacggctcagctgctggtggcctgcaaggtgaaggccgaccaggattcagaggccatgaggcggctacaggcggcaggaaatgctgtgaaaagagcctcagacaatcttgtccgtgcagcccagaaggcagcttttggcaaagctgatgacgacgatgttgtagtgaaaaccaagtttgtggggggcattgctcagatcatcgccgcccaggaagaaatgctaaagaaagagcgagaactggaagaagcaaggaaaaaactggcccaaatccgccagcagcagtataagtttttacccaccgagctgagggaagatgagggctaaaggtgcgagcccagatggcgagccccaggggatggccctggctgaactggacagacagtgttcctgagaggctgggcacttagctggaaaccgcccacctccctcccgggtgagcctggagccctgcgtgcttgttctcacatctctgtcccgtcggcactggctgcatgatcgtgatgtcacacggtacaatgtcctacccacaactcctctgccgcctcccctcatgcctcaccgtgtctcaggagagaggggtgcacgtttcatggactgttaccaacaaagaaaagtcagtattatgttgttctcagacactttggcttttgttggtccttctcttaggcctgctcctggacctctttatgatattgtgatagggaaaaaaatcattgacgtcatagaatattcttcttcctctcaggagaagacggaagctggagttggacatggttcataaaagccagaaacacaaacccgtgtggactccgggagggtgactcaggtcctccttccatgtcttgagcactggctcacccagggggtgaaaaattcccgcccctgtttgcacgctttcttgcctccgtgtgtaagctccttgtacaacccagacccatcttgtattttgtggcccagaaaactgaacgattattttgttcctccgtagtccaaagggcagagttgcggaaggccgtcggggcttggtgagcaggggctgtaatacagtctgtgggctccttaccctgcagaggctgtttcagctcacacagagtcatccacacaaacccacggctcccagttgacagtcagtggaatgctcgtctccttagcgtccagggtggggattctgctggaataaagagcttcctcagtgactcatctttaggtcccacgctggtttctgtgccttcagaatggtcacaagcccggattggaaaggatctgcttacaaacctgtcccctgtcctccaacccaaaacgcctttttttctgtcttaatatccagaaaatctaaatgcatcctaaaatcaatgtgaacctttaacaagatagttttacttattatcacataagacataagatgttttcattttctggatgtcacacttccagaatttcatatttttcccctcttttctttccccttttcagagccctcccataggaagggaagggcttgaatttacccttaatctgcacctttagccaaggcagtgcatggaagatgaatggctcgtgggacagaatctaatgccagggagcaggagtgtttgaaagaattcatagtggggaaggtaaaagttaatggaagtacatgattttcaaaactggtaacagttaaaggcactcaccctccgcctctctctctctctctctctctggtgtgctatcatgtcttggactccatccacactatagtttcaaagttccactgacgggggaaagttggtgctttggtcctccgaagatgtcacctttcgaccttgcccgatcttgtttcaccagactctagcccatgtcatggttttaaaatacataaacttctgacagcttcccatatttataagttacttataagtgctgcacgtattagaatttttttttttcagaccagtaaagttagagaaaagacgctgtaaaggaaaagcaagtgagagtatgtgtaggacactgacagtgtgtgggcaccagttctgaagaggaggggagctgctggagccctagcctgttggggaaaagctggcacactcttggctcgccctctttgagtggagctgatccaacacctcatgcctgccttggccggacactgagaggaggggcacacgtgcttccagagacactcaggagtcagaccccaatgctcagagtcacaatgtgttcatggcctcctgtaacaggactctggggatcccctctgtggcccagcccaccccaccctctgctcttctatgctgtgcccagggcagctgccctcttctgcctgtgccccatcccatcctgaaaacccaggaccaaggcaggggcaggcagccagttcttccaccttgcctcagagtcatttaaaacctttactgcatttgataccagaaaagcctccagagacaaaccaaatgcaaaggcctttcctttataactctaaagaacaggcatcgaaagtttatttttgtaggagctatataaatactcacctttctggagtcgtccagtgctgggagctttggggagtttggttctcagttatcacctggtatggtcccagtttctcatctgtcctttcctcatccaccctgcacatgtgtatgtgaacggcttcgtggccggtgtggtggtttctcatttcataagatagttgaagggccatgccttgtctggatgttatttaataggcactactgcggtgtcctcagatggtactgagggggccttctggtccttcaaaggaaaataacacaggcatgagttcatttgggagtgtgaactttcagaacacctaataagagagtggtgtcagagtaaaaacggccccaggtctggagcatagaagtgtatctctgtgaagagagagccggtgtgttgacatgtggttcttctcacacccctctactcctcgagggctttgaatccttgggctgatttttgtgccagaaattgctgttcccgatggccaaaaggggaacctgaactggatttcagaactgcccagtgatttgaaaatttagattttacttgggcctttcaggagtctttagatagggatgctgaggtcatatttagttcaatgaacagcccttgtttaagttttgccagtgtccagccagctgtggccctggccatctgtgcaggcaggttcctcaattcctggttggccctgcagtcggtcaacacagtccctccaggtcggctgcagaggcagctgcccagcctgcagtctatgcacgggccttaagaaatgagctgcctgtagcctcacggcatatgcttttatcagggaaaacccttcgagcttcttctgattctcacctgcttgctttctggctgtcttagtcagtgtgtttacaggcaactaaagcctgttcctaatttatcaaaaaattataaccaaaattcaccatagcctaagagagtaaaccccacctccaaagtgatgccaaggccaaaacctcatcaaggaaccagacacaggtcaaaagtggtgagcaagccatggtctctgctcctggggaactcacacgctgacccccgaggagccttggtttcctccctggcagatagtccccagaatcttctctcccagctttgaggttctgggctctggaaaggcctctgggatgctggccttaagatctcagcacagactatcagcatgttccattctcagattcctggaggaaaggtaccctctgttgaccaaggggctggctgcttctgagacttaccaacccaagaaatttggagacattcccctcaggctaaaaggcagcggtccccagagttcagaaagcaaaagatcttgacaactgtgccagtagtggctctggtcctatctctccacagtgctggcctctgctggggaaggcatctttcccaaaggtatccccaagtaccatgttgaaaatgtcctcagtctgttgctccatctttctgagcctctgcttggtatgtcatgtttatggtcactacggatgagtgtgtgcagagtttgggttgattcttttaaatgctacaaacaagagctatttcttttcaataaaaaaggtttggattcggcctcttcctctgagcccacctcccagccctccagggagcatcagtgtacctgagtcactttgtctgcatctcttcatcccacaaaacacgaggctgggtctcattcagcggcctctcaccaaccttcaagatccagaagaaaacaggaacgttcagctctgccctgtgtcgtatctaatcacatacattaatttatctaaccacataagttatttttttttatttgccagaaataaacctttaaaataacacatgaggggtctatcaaaaa

SEQ ID NO: 58143 - DNA, 4507 bp, Homo sapiens
ctcagcctctcctgttccttctggcttccgccgcctggcatgagctctgtcacagtcgccggcgacgtcgctctggagaaagcggccagctgctggttgaattctggggttggtttctgcagaatcaccaagacgtgctccaggaggtccaagctgctggtggcctgcaaggtgaaggccgaccaggattcagaggccatgaggcggctacaggcggcaggaaatgctgtgaaaagagcctcagacaatcttgtccgtgcagcccagaaggcagcttttggcaaagctgatgacgacgatgttgtagtgaaaaccaagtttgtggggggcattgctcagatcatcgccgcccaggaagaaatgctaaagaaagagcgagaactggaagaagcaaggaaaaaactggcccaaatccgccagcagcagtataagtttttacccaccgagctgagggaagatgagggctaaaggtgcgagcccagatggcgagccccaggggatggccctggctgaactggacagacagtgttcctgagaggctgggcacttagctggaaaccgcccacctccctcccgggtgagcctggagccctgcgtgcttgttctcacatctctgtcccgtcggcactggctgcatgatcgtgatgtcacacggtacaatgtcctacccacaactcctctgccgcctcccctcatgcctcaccgtgtctcaggagagaggggtgcacgtttcatggactgttaccaacaaagaaaagtcagtattatgttgttctcagacactttggcttttgttggtccttctcttaggcctgctcctggacctctttatgatattgtgatagggaaaaaaatcattgacgtcatagaatattcttcttcctctcaggagaagacggaagctggagttggacatggttcataaaagccagaaacacaaacccgtgtggactccgggagggtgactcaggtcctccttccatgtcttgagcactggctcacccagggggtgaaaaattcccgcccctgtttgcacgctttcttgcctccgtgtgtaagctccttgtacaacccagacccatcttgtattttgtggcccagaaaactgaacgattattttgttcctccgtagtccaaagggcagagttgcggaaggccgtcggggcttggtgagcaggggctgtaatacagtctgtgggctccttaccctgcagaggctgtttcagctcacacagagtcatccacacaaacccacggctcccagttgacagtcagtggaatgctcgtctccttagcgtccagggtggggattctgctggaataaagagcttcctcagtgactcatctttaggtcccacgctggtttctgtgccttcagaatggtcacaagcccggattggaaaggatctgcttacaaacctgtcccctgtcctccaacccaaaacgcctttttttctgtcttaatatccagaaaatctaaatgcatcctaaaatcaatgtgaacctttaacaagatagttttacttattatcacataagacataagatgttttcattttctggatgtcacacttccagaatttcatatttttcccctcttttctttccccttttcagagccctcccataggaagggaagggcttgaatttacccttaatctgcacctttagccaaggcagtgcatggaagatgaatggctcgtgggacagaatctaatgccagggagcaggagtgtttgaaagaattcatagtggggaaggtaaaagttaatggaagtacatgattttcaaaactggtaacagttaaaggcactcaccctccgcctctctctctctctctctctctggtgtgctatcatgtcttggactccatccacactatagtttcaaagttccactgacgggggaaagttggtgctttggtcctccgaagatgtcacctttcgaccttgcccgatcttgtttcaccagactctagcccatgtcatggttttaaaatacataaacttctgacagcttcccatatttataagttacttataagtgctgcacgtattagaatttttttttttcagaccagtaaagttagagaaaagacgctgtaaaggaaaagcaagtgagagtatgtgtaggacactgacagtgtgtgggcaccagttctgaagaggaggggagctgctggagccctagcctgttggggaaaagctggcacactcttggctcgccctctttgagtggagctgatccaacacctcatgcctgccttggccggacactgagaggaggggcacacgtgcttccagagacactcaggagtcagaccccaatgctcagagtcacaatgtgttcatggcctcctgtaacaggactctggggatcccctctgtggcccagcccaccccaccctctgctcttctatgctgtgcccagggcagctgccctcttctgcctgtgccccatcccatcctgaaaacccaggaccaaggcaggggcaggcagccagttcttccaccttgcctcagagtcatttaaaacctttactgcatttgataccagaaaagcctccagagacaaaccaaatgcaaaggcctttcctttataactctaaagaacaggcatcgaaagtttatttttgtaggagctatataaatactcacctttctggagtcgtccagtgctgggagctttggggagtttggttctcagttatcacctggtatggtcccagtttctcatctgtcctttcctcatccaccctgcacatgtgtatgtgaacggcttcgtggccggtgtggtggtttctcatttcataagatagttgaagggccatgccttgtctggatgttatttaataggcactactgcggtgtcctcagatggtactgagggggccttctggtccttcaaaggaaaataacacaggcatgagttcatttgggagtgtgaactttcagaacacctaataagagagtggtgtcagagtaaaaacggccccaggtctggagcatagaagtgtatctctgtgaagagagagccggtgtgttgacatgtggttcttctcacacccctctactcctcgagggctttgaatccttgggctgatttttgtgccagaaattgctgttcccgatggccaaaaggggaacctgaactggatttcagaactgcccagtgatttgaaaatttagattttacttgggcctttcaggagtctttagatagggatgctgaggtcatatttagttcaatgaacagcccttgtttaagttttgccagtgtccagccagctgtggccctggccatctgtgcaggcaggttcctcaattcctggttggccctgcagtcggtcaacacagtccctccaggtcggctgcagaggcagctgcccagcctgcagtctatgcacgggccttaagaaatgagctgcctgtagcctcacggcatatgcttttatcagggaaaacccttcgagcttcttctgattctcacctgcttgctttctggctgtcttagtcagtgtgtttacaggcaactaaagcctgttcctaatttatcaaaaaattataaccaaaattcaccatagcctaagagagtaaaccccacctccaaagtgatgccaaggccaaaacctcatcaaggaaccagacacaggtcaaaagtggtgagcaagccatggtctctgctcctggggaactcacacgctgacccccgaggagccttggtttcctccctggcagatagtccccagaatcttctctcccagctttgaggttctgggctctggaaaggcctctgggatgctggccttaagatctcagcacagactatcagcatgttccattctcagattcctggaggaaaggtaccctctgttgaccaaggggctggctgcttctgagacttaccaacccaagaaatttggagacattcccctcaggctaaaaggcagcggtccccagagttcagaaagcaaaagatcttgacaactgtgccagtagtggctctggtcctatctctccacagtgctggcctctgctggggaaggcatctttcccaaaggtatccccaagtaccatgttgaaaatgtcctcagtctgttgctccatctttctgagcctctgcttggtatgtcatgtttatggtcactacggatgagtgtgtgcagagtttgggttgattcttttaaatgctacaaacaagagctatttcttttcaataaaaaaggtttggattcggcctcttcctctgagcccacctcccagccctccagggagcatcagtgtacctgagtcactttgtctgcatctcttcatcccacaaaacacgaggctgggtctcattcagcggcctctcaccaaccttcaagatccagaagaaaacaggaacgttcagctctgccctgtgtcgtatctaatcacatacattaatttatctaaccacataagttatttttttttatttgccagaaataaacctttaaaataacacatgaggggtctatcaaaaa

SEQ ID NO: 58144 - DNA, 5070 bp, Homo sapiens
gtgtaccacagacacccgatccagctctctttaatcgaatttgacttggctgccctggatggggatttctctgaagacaaccgcaataagtgtcgcatcgccaccgcacccttgattgaagctgtggagaacctgacagcgttcgcctcaaaccctgagtttgtcagcattcctgcccagatcagctccgagggttcccaggcacaggaaccaatcctggtctcagccaagaccatgctggagagttcatcgtacctcattcgcactgcacgctctctggccatcaaccccaaagacccacccacctggtctgtactggctggacattcccatacagtgtccgactccatcaagagtctcatcacttctatcagggacaaggcccctggacagagggagtgtgattactccatcgatggcatcaaccggtgcatccgggacatcgagcaggcctcgctggccgccgtcagccagagcctggccacgagggacgacatctctgtggaggccctgcaggagcagctgacttcggtggtccaggaaatcggacaccttatcgatcccatcgccacagcggctcggggagaagcagctcagctgggacataaggtgacacaactggcaagctattttgagcccttgatcttagccgcagttggtgtggcctccaagattcttgatcatcagcagcagatgacggtgctggaccagaccaagactctcgcagagtctgccttgcagatgttgtatgcagccaaagaaggtggcggaaaccccaaggcacaacacacccatgacgccatcacagaggccgcccagttgatgaaggaagccgtggatgacatcatggtgacgctgaacgaagctgccagtgaagtggggctggttgggggcatggtggacgccattgcagaagccatgagcaagctggatgaaggcactcctccagaaccaaagggaacatttgtcgactatcagacgactgtggttaaatactccaaagccattgcggtgacagctcaggaaatgatgactaagtcggttactaacccggaggagttgggaggactggcttcacaaatgaccagtgactatgggcacctggctttccagggccagatggcagcagccacggcggaaccagaggagatcggattccagattcgcactcgtgtgcaggacctgggccacggctgtatcttcctggtgcagaaggcaggggccctccaggtctgccccacagacagctacaccaagagggagctgatcgaatgcgcccgtgccgtcacggaaaaggtctccttggtgctctcggctctccaggccgggaacaaaggaacccaggcatgcattacagccgccaccgctgtgtctgggatcattgccgacctggacaccaccattatgtttgcaacagcggggacgctgaatgcagagaacagtgagaccttcgcagaccacagggagaacattctcaagacggccaaggccttggtagaagacacgaaactacttgtgtcaggagctgcgtccactcctgacaagctggcccaggcggcccagtcctcagcagccaccatcacccagctcgcagaagtggtcaagctgggggcagccagcctgggctccgacgaccccgagacccaggtggttttgatcaatgccatcaaagatgtggccaaggccctttctgatctcatcagtgctaccaagggagctgccagcaagccagtggacgacccttccatgtaccagctcaagggggctgccaaggtgatggtgaccaatgtcacctcgctcctcaagactgtaaaggcagtggaggatgaggccacccggggcaccagggcgcttgaggccacaattgaatgcataaagcaggagcttacggtgttccagtcaaaagacgtacctgaaaagacatcatcacctgaagaatccataaggatgacgaaaggcatcaccatggcaacagccaaagccgtggcagctgggaactcatgtagacaggaggacgtgattgctactgccaacctgagccggaaagccgtgtcagatatgttgacggcttgcaagcaagcatccttccaccccgatgtcagtgacgaggtgagaaccagagccttgcgtttcgggacggagtgcacccttggctacttggacctcctggagcacgtcttggtgattcttcagaaaccaaccccagaattcaagcagcagctggccgctttctccaagcgagtcgccggcgctgtgacagagctcatccaggcggcggaagccatgaaaggaacagagtgggtggatccagaagacccaactgtcattgcagaaacagagttactgggggctgcagcatccatcgaagctgctgctaagaagttagagcaactgaagccaagagcaaaaccaaaacaagcggatgagaccctggactttgaggaacagatcttggaagctgctaaatccattgctgctgccacaagcgccctggtcaaatcggcctcagcagcccagagggagctggtggcccaaggaaaggtgggctccatccctgccaatgctgcagacgacggacagtggtcacaggggctgatttctgctgcccggatggtggcggctgcgaccagcagtctctgtgaggcggccaatgcctccgttcagggacacgccagcgaggagaagctcatctcatctgccaagcaggtcgccgcttccacggctcagctgctggtggcctgcaaggtgaaggccgaccaggattcagaggccatgaggcggctacaggcggcaggaaatgctgtgaaaagagcctcagacaatcttgtccgtgcagcccagaaggcagcttttggcaaagctgatgacgacgatgttgtagtgaaaaccaagtttgtggggggcattgctcagatcatcgccgcccaggaagaaatgctaaagaaagagcgagaactggaagaagcaaggaaaaaactggcccaaatccgccagcagcagtataagtttttacccaccgagctgagggaagatgagggctaaaggtgcgagcccagatggcgagccccaggggatggccctggctgaactggacagacagtgttcctgagaggctgggcacttagctggaaaccgcccacctccctcccgggtgagcctggagccctgcgtgcttgttctcacatctctgtcccgtcggcactggctgcatgatcgtgatgtcacacggtacaatgtcctacccacaactcctctgccgcctcccctcatgcctcaccgtgtctcaggagagaggggtgcacgtttcatggactgttaccaacaaagaaaagtcagtattatgttgttctcagacactttggcttttgttggtccttctcttaggcctgctcctggacctctttatgatattgtgatagggaaaaaaatcattgacgtcatagaatattcttcttcctctcaggagaagacggaagctggagttggacatggttcataaaagccagaaacacaaacccgtgtggactccgggagggtgactcaggtcctccttccatgtcttgagcactggctcacccagggggtgaaaaattcccgcccctgtttgcacgctttcttgcctccgtgtgtaagctccttgtacaacccagacccatcttgtattttgtggcccagaaaactgaacgattattttgttcctccgtagtccaaagggcagagttgcggaaggccgtcggggcttggtgagcaggggctgtaatacagtctgtgggctccttaccctgcagaggctgtttcagctcacacagagtcatccacacaaacccacggctcccagttgacagtcagtggaatgctcgtctccttagcgtccagggtggggattctgctggaataaagagcttcctcagtgactcatctttaggtcccacgctggtttctgtgccttcagaatggtcacaagcccggattggaaaggatctgcttacaaacctgtcccctgtcctccaacccaaaacgcctttttttctgtcttaatatccagaaaatctaaatgcatcctaaaatcaatgtgaacctttaacaagatagttttacttattatcacataagacataagatgttttcattttctggatgtcacacttccagaatttcatatttttcccctcttttctttccccttttcagagccctcccataggaagggaagggcttgaatttacccttaatctgcacctttagccaaggcagtgcatggaagatgaatggctcgtgggacagaatctaatgccagggagcaggagtgtttgaaagaattcatagtggggaaggtaaaagttaatggaagtacatgattttcaaaactggtaacagttaaaggcactcaccctccgcctctctctctctctctctctctggtgtgctatcatgtcttggactccatccacactatagtttcaaagttccactgacgggggaaagttggtgctttggtcctccgaagatgtcacctttcgaccttgcccgatcttgtttcaccagactctagcccatgtcatggttttaaaatacataaacttctgacagcttcccatatttataagttacttataagtgctgcacgtattagaatttttttttttcagaccagtaaagttagagaaaagacgctgtaaaggaaaagcaagtgagagtatgtgtaggacactgacagtgtgtgggcaccagttctgaagaggaggggagctgctggagccctagcctgttggggaaaagctggcacactcttggctcgccctcttcctctgagcccacctcccagccctccagggagcatcagtgtacctgagtcactttgtctgcatctcttcatcccacaaaacacgaggctgggtctcattcagcggcctctcaccaaccttcaagatccagaagaaaacaggaacgttcagctctgccctgtgtcgtatctaatcacatacattaatttatctaaccacataagttatttttttttatttgccagaaataaacctttaaaataacacatgaggggtctatcaaaaa

SEQ ID NO: 58145 - DNA, 3361 bp, Homo sapiens
gtgtaccacagacacccgatccagctctctttaatcgaatttgacttggctgccctggatggggatttctctgaagacaaccgcaataagtgtcgcatcgccaccgcacccttgattgaagctgtggagaacctgacagcgttcgcctcaaaccctgagtttgtcagcattcctgcccagatcagctccgagggttcccaggcacaggaaccaatcctggtctcagccaagaccatgctggagagttcatcgtacctcattcgcactgcacgctctctggccatcaaccccaaagacccacccacctggtctgtactggctggacattcccatacagtgtccgactccatcaagagtctcatcacttctatcagggacaaggcccctggacagagggagtgtgattactccatcgatggcatcaaccggtgcatccgggacatcgagcaggcctcgctggccgccgtcagccagagcctggccacgagggacgacatctctgtggaggccctgcaggagcagctgacttcggtggtccaggaaatcggacaccttatcgatcccatcgccacagcggctcggggagaagcagctcagctgggacataaggtgacacaactggcaagctattttgagcccttgatcttagccgcagttggtgtggcctccaagattcttgatcatcagcagcagatgacggtgctggaccagaccaagactctcgcagagtctgccttgcagatgttgtatgcagccaaagaaggtggcggaaaccccaaggcacaacacacccatgacgccatcacagaggccgcccagttgatgaaggaagccgtggatgacatcatggtgacgctgaacgaagctgccagtgaagtggggctggttgggggcatggtggacgccattgcagaagccatgagcaagctggatgaaggcactcctccagaaccaaagggaacatttgtcgactatcagacgactgtggttaaatactccaaagccattgcggtgacagctcaggaaatgatgactaagtcggttactaacccggaggagttgggaggactggcttcacaaatgaccagtgactatgggcacctggctttccagggccagatggcagcagccacggcggaaccagaggagatcggattccagattcgcactcgtgtgcaggacctgggccacggctgtatcttcctggtgcagaaggcaggggccctccaggtctgccccacagacagctacaccaagagggagctgatcgaatgcgcccgtgccgtcacggaaaaggtctccttggtgctctcggctctccaggccgggaacaaaggaacccaggcatgcattacagccgccaccgctgtgtctgggatcattgccgacctggacaccaccattatgtttgcaacagcggggacgctgaatgcagagaacagtgagaccttcgcagaccacagggagaacattctcaagacggccaaggccttggtagaagacacgaaactacttgtgtcaggagctgcgtccactcctgacaagctggcccaggcggcccagtcctcagcagccaccatcacccagctcgcagaagtggtcaagctgggggcagccagcctgggctccgacgaccccgagacccaggtggttttgatcaatgccatcaaagatgtggccaaggccctttctgatctcatcagtgctaccaagggagctgccagcaagccagtggacgacccttccatgtaccagctcaagggggctgccaaggtgatggtgaccaatgtcacctcgctcctcaagactgtaaaggcagtggaggatgaggccacccggggcaccagggcgcttgaggccacaattgaatgcataaagcaggagcttacggtgttccagtcaaaagacgtacctgaaaagacatcatcacctgaagaatccataaggatgacgaaaggcatcaccatggcaacagccaaagccgtggcagctgggaactcatgtagacaggaggacgtgattgctactgccaacctgagccggaaagccgtgtcagatatgttgacggcttgcaagcaagcatccttccaccccgatgtcagtgacgaggtgagaaccagagccttgcgtttcgggacggagtgcacccttggctacttggacctcctggagcacgtcttggtgattcttcagaaaccaaccccagaattcaagcagcagctggccgctttctccaagcgagtcgccggcgctgtgacagagctcatccaggcggcggaagccatgaaaggaacagagtgggtggatccagaagacccaactgtcattgcagaaacagagttactgggggctgcagcatccatcgaagctgctgctaagaagttagagcaactgaagccaagagcaaaaccaaaacaagcggatgagaccctggactttgaggaacagatcttggaagctgctaaatccattgctgctgccacaagcgccctggtcaaatcggcctcagcagcccagagggagctggtggcccaaggaaaggtgggctccatccctgccaatgctgcagacgacggacagtggtcacaggggctgatttctgctgcccggatggtggcggctgcgaccagcagtctctgtgaggcggccaatgcctccgttcagggacacgccagcgaggagaagctcatctcatctgccaagcaggtcgccgcttccacggctcagctgctggtggcctgcaaggtgaaggccgaccaggattcagaggccatgaggcggctacaggcggcaggaaatgctgtgaaaagagcctcagacaatcttgtccgtgcagcccagaaggcagcttttggcaaagctgatgacgacgatgttgtagtgaaaaccaagtttgtggggggcattgctcagatcatcgccgcccaggaagaaatgctaaagaaagagcgagaactggaagaagcaaggaaaaaactggcccaaatccgccagcagcagtataagtttttacctcacccagggggtgaaaaattcccgcccctgtttgcacgctttcttgcctccgtgtgtaagctccttgtacaacccagacccatcttgtattttgtggcccagaaaactgaacgattattttgttcctccgtagtccaaagggcagagttgcggaaggccgtcggggcttggtgagcaggggctgtaatacagtctgtgggctccttaccctgcagaggctgtttcagctcacacagagtcatccacacaaacccacggctcccagttgacagtcagtggaatgctcgtctccttagcgtccagggtggggattctgctggaataaagagcttcctcagtgactcat

SEQ ID NO: 58146 - DNA, 560 bp, Homo sapiens
tgcgctgggagcctcgcgccctttgacagcagttagttgctgactcggatgcagagagtcggtaacaccttctccaacgagagccgggtggcatcccggtgtcccagcgtgggccttgctgaacggaaccgggtggccacaatgccggtgcggctgctcagggacagtccagcggctcaggaggacaatgaccatgccagagacggtttccaaatgaagctggatgcccacggcttcgccccggaggaactggtggtgcaggtggatggccaatggctgatggtgaccggacagcagcaactggacgtcagggacccggaaagggtcagttaccgcatgtcacagaaggtgcaccggaaaatgctcccgtccaacctgagtcctaccgccatgacctgctgcctgaccccctccgggcagctgtgggtcagaggccagtgtgtggcgctggccctccctgaagcccaaacaggaccgtccccgagactcgggagcctcggctctaaggcttccaacctgacccggtaaacaaacgacgcgatgtgcagcaaaattggtgt

SEQ ID NO: 58147 - DNA, 2846 bp, Homo sapiens
ggaatcaggaactggccggggtccgcaccgggcctgagtcggtccgaggccgtcccaggagcagctgcccgtgcggaacagcactatgggcttctcttccgagctgtgcagcccccagggccacggggtcctgcagcaaatgcaggaggccgagcttcgtctactggagggcatgagaaagtggatggcccagcgggtcaagagtgacagggagtatgcaggactgcttcaccacatgtccctgcaggacagtgggggccagagccgggccatcagccctgacagccccatcagtcagtcctgggctgagatcaccagccaaactgagggcctgagccgcttgctgcggcagcacgcagaggatctgaactcagggcccctgagcaagctgagcctgctcatccgggaacggcagcagcttcgcaagacctacagcgagcagtggcagcagctgcagcaggagctcaccaagacccacagccaggacattgagaagctgaagagccagtaccgagctctggcacgggacagtgcccaagccaagcgcaagtaccaggaggccagcaaagacaaggaccgtgacaaggccaaggacaagtatgtgcgcagcctgtggaagctctttgctcaccacaaccgctatgtgctgggcgtgcgggctgcgcagctacaccaccagcaccaccaccagctcctgctgcccggcctgctgcggtcactgcaggacctgcacgaggagatggcttgcatcctgaaggagatcctgcaggaatacctggagattagcagcctggtgcaggatgaggtggtggccattcaccgggagatggctgcagctgctgcccgcatccagcctgaggctgagtaccaaggcttcctgcgacagtatgggtccgcacctgacgtcccaccctgtgtcacgttcgatgagtcactgcttgaggagggtgaaccgctggagcctggggagctccagctgaacgagctgactgtggagagcgtgcagcacacgctgacctcagtgacagatgagctggctgtggccaccgagatggtgttcaggcggcaggagatggttacgcagctgcaacaggagctccggaatgaagaggagaacacccacccccgggagcgggtgcagctgctgggcaagaggcaagtgctgcaagaagcactgcaggggctgcaggtagcgctgtgcagccaggccaagctgcaggcccagcaggagttgctgcagaccaagctggagcacctgggccccggcgagcccccgcctgtgctgctcctgcaggatgaccgccactccacgtcgtcctcggagcaggagcgagaggggggaaggacacccacgctggagatccttaagagccacatctcaggaatcttccgccccaagttctcgctccctccaccgctgcagctcattccggaggtgcagaagcccctgcatgagcagctgtggtaccacggggccatcccgagggcagaggtggctgagctgctggtgcactctggggacttcctggtgcgggagagccagggcaagcaggagtacgtgctgtcggtgctgtgggatggtctgccccggcacttcatcatccagtccttggataacctgtaccgactggaaggggaaggctttcctagcattcctttgctcatcgaccacctactgagcacccagcagcccctcaccaagaagagtggtgttgtcctgcacagggctgtgcccaaggacaagtgggtgctgaaccatgaggacctggtgttgggtgagcagattggacgggggaactttggcgaagtgttcagcggacgcctgcgagccgacaacaccctggtggcggtgaagtcttgtcgagagacgctcccacctgacctcaaggccaagtttctacaggaagcgaggatcctgaagcagtacagccaccccaacatcgtgcgtctcattggtgtctgcacccagaagcagcccatctacatcgtcatggagcttgtgcaggggggcgacttcctgaccttcctccgcacggagggggcccgcctgcgggtgaagactctgctgcagatggtgggggatgcagctgctggcatggagtacctggagagcaagtgctgcatccaccgggacctggctgctcggaactgcctggtgacagagaagaatgtcctgaagatcagtgactttgggatgtcccgagaggaagccgatggggtctatgcagcctcagggggcctcagacaagtccccgtgaagtggaccgcacctgaggcccttaactacggccgctactcctccgaaagcgacgtgtggagctttggcatcttgctctgggagaccttcagcctgggggcctccccctatcccaacctcagcaatcagcagacacgggagtttgtggagaaggggggccgtctgccctgcccagagctgtgtcctgatgccgtgttcaggctcatggagcagtgctgggcctatgagcctgggcagcggcccagcttcagcaccatctaccaggagctgcagagcatccgaaagcggcatcggtgaggctgggacccccttctcaagctggtggcctctgcaggcctaggtgcagctcctcagcggctccagctcatatgctgacagctcttcacagtcctggactcctgccaccagcatccacactgccggcaggatgcagcgccgtgtcctctctgtgtccctgctgctgccagggcttcctcttccgggcagaaacaataaaaccacttgtgcccactgaacactcctggcatgtgcactcctctggaaggcaggtctcagaaggcacaagtgccggtatggtggccttggggaa

SEQ ID NO: 58148 - DNA, 2771 bp, Homo sapiens
ggaatcaggaactggccggggtccgcaccgggcctgagtcggtccgaggccgtcccaggagcagctgcccgtgcggaacagcactatgggcttctcttccgagctgtgcagcccccagggccacggggtcctgcagcaaatgcaggaggccgagcttcgtctactggagggcatgagaaagtggatggcccagcgggtcaagagtgacagggagtatgcaggactgcttcaccacatgtccctgcaggacagtgggggccagagccgggccatcagccctgacagccccatcagtcagtcctgggctgagatcaccagccaaactgagggcctgagccgcttgctgcggcagcacgcagaggatctgaactcagggcccctgagcaagctgagcctgctcatccgggaacggcagcagcttcgcaagacctacagcgagcagtggcagcagctgcagcaggagctcaccaagacccacagccaggacattgagaagctgaagagccagtaccgagctctggcacgggacagtgcccaagccaagcgcaagtaccaggaggccagcaaagacaaggaccgtgacaaggccaaggacaagtatgtgcgcagcctgtggaagctctttgctcaccacaaccgctatgtgctgggcgtgcgggctgcgcagctacaccaccagcaccaccaccagctcctgctgcccggcctgctgcggtcactgcaggacctgcacgaggagatggcttgcatcctgaaggagatcctgcaggaatacctggagattagcagcctggtgcaggatgaggtggtggccattcaccgggagatggctgcagctgctgcccgcatccagcctgaggctgagtaccaaggcttcctgcgacagtatgggtccgcacctgacgtcccaccctgtgtcacgttcgatgagtcactgcttgaggagggtgaaccgctggagcctggggagctccagctgaacgagctgactgtggagagcgtgcagcacacgctgacctcagtgacagatgagctggctgtggccaccgagatggtgttcaggcggcaggagatggttacgcagctgcaacaggagctccggaatgaagaggagaacacccacccccgggagcgggtgcagctgctgggcaagaggcaagtgctgcaagaagcactgcaggggctgcaggtagcgctgtgcagccaggccaagctgcaggcccagcaggagttgctgcagaccaagctggagcacctgggccccggcgagcccccgcctgtgctgctcctgcaggatgaccgccactccacgtcgtcctcggagcaggagcgagaggggggaaggacacccacgctggagatccttaagagccacatctcaggaatcttccgccccaagttctcgctccctccaccgctgcagctcattccggaggtgcagaagcccctgcatgagcagctgtggtaccacggggccatcccgagggcagaggtggctgagctgctggtgcactctggggacttcctggtgcgggagagccagggcaagcaggagtacgtgctgtcggtgctgtgggatggtctgccccggcacttcatcatccagtccttggataacctgtaccgactggaaggggaaggctttcctagcattcctttgctcatcgaccacctactgagcacccagcagcccctcaccaagaagagtggtgttgtcctgcacagggctgtgcccaaggacaagtgggtgctgaaccatgaggacctggtgttgggtgagcagattggacgggggaactttggcgaagtgttcagcggacgcctgcgagccgacaacaccctggtggcggtgaagtcttgtcgagagacgctcccacctgacctcaaggccaagtttctacaggaagcgaggatcctgaagcagtacagccaccccaacatcgtgcgtctcattggtgtctgcacccagaagcagcccatctacatcgtcatggagcttgtgcaggggggcgacttcctgaccttcctccgcacggagggggcccgcctgcgggtgaagactctgctgcagatggtgggggatgcagctgctggcatggagtacctggagagcaagtgctgcatccaccgggacctggctgctcggaactgcctggtgacagagaagaatgtcctgaagatcagtgactttgggatgtcccgagaggaagccgatggggtctatgcagcctcagggggcctcagacaagtccccgtgaagtggaccgcacctgaggcccttaactacggccgctactcctccgaaagcgacgtgtggagctttggcatcttgctctgggagaccttcagcctgggggcctccccctatcccaacctcagcaatcagcagacacgggagtttgtggagaaggggggccgtctgccctgcccagagctgtgtcctgatgccgtgttcaggctcatggagcagtgctgggcctatgagcctgggcagcggcccagcttcagcaccatctaccaggagctgcagagcatccgaaagcggcatcggtgaggctgggacccccttctcaagctggtggcctctgcaggcctaggtgcagctcctcagcggctccagctcatatgctgacagctcttcacagtcctggactcctgccaccagcatccacactgccggcaggatgcagcgccgtgtcctctctgtgtccctgctgctgccagggcttcctcttccgggcagaaacaataaaaccacttgtgcccactga

SEQ ID NO: 58149 - DNA, 268 bp, Homo sapiens
tggaggtctctctgcccctggtcctgggcaggccctttctcccctgctgctctccctttccccctcccagggctcacgccccctcagaatggaggctgctgaccccgggtcccctgccctgcagaacctgtaccgactggaaggggaaggctttcctagcattcctttgctcatcgaccacctactgagcacccagcagcccctcaccaagaagagtggtgttgtcctgcacagggctgtgcccaaggtgagcctgcacccagcctgg

SEQ ID NO: 58150 - DNA, 412 bp, Homo sapiens
atcggaggcaactttccctgcctgccccatgtgctctctaggttccccagcgagggtcaaactcccagagagcctgggtgaggggtccgaacacgggggcccctcacccaggggtaggaagcagaatgggtaggaagcggagaagagaactgcgggactgggaaggccgtggtaggagcccaagaccgtttcaggggaactttggcgaagtgttcagcggacgcctgcgagccgacaacaccctggtggcggtgaagtcttgtcgagagacgctcccacctgacctcaaggccaagtttctacaggaagcgaggtgggtgataaactaatgatcaccacgggtcccgcatacacagaggttacactgcatggcacagtgtgaagtgcttgaccaccgtggtggtgtttagtc

SEQ ID NO: 58151 - DNA, 196 bp, Homo sapiens
atgagcccctgccctgtctcacccagggacctggctgctcggaactgcctggtgacagagaagaatgtcctgaagatcagtgactttgggatgtcccgagaggaagccgatggggtctatgcagcctcagggggcctcaggtgcggtccacttcacggggacttgtctgaggccccctgatgctggggtaccgaga

SEQ ID NO: 58152 - DNA, 2556 bp, Homo sapiens
gcacgaggggtgtccaggagcagctgcccgtgcggaacagcactatgggcttctcttccgagctgtgcagcccccagggccacggggtcctgcagcaaatgcaggaggccgagcttcgtctactggagggcatgagaaagtggatggcccagcgggtcaagagtgacagggagtatgcaggactgcttcaccacatgtccctgcaggacagtgggggccagagccgggccatcagccctgacagccccatcagtcagacccacagccaggacattgagaagctgaagagccagtaccgagctctggcacgggacagtgcccaagccaagcgcaagtaccaggaggccagcaaagacaaggaccgtgacaaggccaaggacaagtatgtgcgcagcctgtggaagctctttgctcaccacaaccgctatgtgctgggcgtgcgggctgcgcagctacaccaccagcaccaccaccagctcctgctgcccggcctgctgcggtcactgcaggacctgcacgaggagatggcttgcatcctgaaggagatcctgcaggaatacctggagattagcagcctggtgcaggatgaggtggtggccattcaccgggagatggctgcagctgctgcccgcatccagcctgaggctgagtaccaaggcttcctgcgacagtatgggtccgcacctgacgtcccaccctgtgtcacgttcgatgagtcactgcttgaggagggtgaaccgctggagcctggggagctccagctgaacgagctgactgtggagagcgtgcagcacacgctgacctcagtgacagatgagctggctgtggccaccgagatggtgttcaggcggcaggagatggttacgcagctgcaacaggagctccggaatgaagaggagaacacccacccccgggagcgggtgcagctgctgggcaagaggcaagtgctgcaagaagcactgcaggggctgcaggtagcgctgtgcagccaggccaagctgcaggcccagcaggagttgctgcagaccaagctggagcacctgggccccggcgagcccccgcctgtgctgctcctgcaggatgaccgccactccacgtcgtcctcggagcaggagcgagaggggggaaggacacccacgctggagatccttaagagccacatctcaggaatcttccgccccaagttctcgctccctccaccgctgcagctcattccggaggtgcagaagcccctgcatgagcagctgtggtaccacggggccatcccgagggcagaggtggctgagctgctggtgcactctggggacttcctggtgcgggagagccagggcaagcaggagtacgtgctgtcggtgctgtgggatggtctgccccggcacttcatcatccagtccttggataacctgtaccgactggaaggggaaggctttcctagcattcctttgctcatcgaccacctactgagcacccagcagcccctcaccaagaagagtggtgttgtcctgcacagggctgtgcccaaggacaagtgggtgctgaaccatgaggacctggtgttgggtgagcagattggacgggggaactttggcgaagtgttcagcggacgcctgcgagccgacaacaccctggtggcggtgaagtcttgtcgagagacgctcccacctgacctcaaggccaagtttctacaggaagcgaggatcctgaagcagtacagccaccccaacatcgtgcgtctcattggtgtctgcacccagaagcagcccatctacatcgtcatggagcttgtgcaggggggcgacttcctgaccttcctccgcacggagggggcccgcctgcgggtgaagactctgctgcagatggtgggggatgcagctgctggcatggagtacctggagagcaagtgctgcatccaccgggacctggctgctcggaactgcctggtgacagagaagaatgtcctgaagatcagtgactttgggatgtcccgagaggaagccgatggggtctatgcagcctcagggggcctcagacaagtccccgtgaagtggaccgcacctgaggcccttaactacggccgctactcctccgaaagcgacgtgtggagctttggcatcttgctctgggagaccttcagcctgggggcctccccctatcccaacctcagcaatcagcagacacgggagtttgtggagaaggggggccgtctgccctgcccagagctgtgtcctgatgccgtgttcaggctcatggagcagtgctgggcctatgagcctgggcagcggcccagcttcagcaccatctaccaggagctgcagagcatccgaaagcggcatcggtgaggctgggacccccttctcaagctggtggcctctgcaggcctaggtgcagctcctcagcggctccagctcatatgctgacagctcttcacagtcctggactcctgccaccagcatccacactgccggcaggatgcagcgccgtgtcctctctgtgtccctgctgctgccagggcttcctcttccgggcagaaacaataaaaccacttgtgcccactga

SEQ ID NO: 58153 - DNA, 296 bp, Homo sapiens
acacagttctccatttgaggcctccgcctcctgtcactgtgcacccagctgcctcctgggtactcgaccccggctggctgtggagcactcccaggctagtgggggaggcacaaggagaggcagctacgtccttactgaagcctactggtgagactgaggatgtgggtgccacctgtcccacatatcaggctcacctgcatttacctgcatttgaattttgcactaggacaagtcactcctctctgagcctgtttcttcttctataaaatgggttgtcttgaggattaggtgagagt

SEQ ID NO: 58154 - DNA, 299 bp, Homo sapiens
cacttatgatttttgatagttattgtaaactctcttttatccagaattataaaagttaagaagttcaaatgactactgatatttaatgtcatttggtgagaaagtcacttgacagaaaggtgtgaagaagttattccaaaaggaggtttccatggtatatcaattgttgttagatgctttctaatactacatttattaatttctaacactacatttagtttagtgcagttaaaattcacattcaaagtcttcctaaagtgcctcctgaattatcagataaaatttactacattcagtaa

SEQ ID NO: 58155 - DNA, 565 bp, Homo sapiens
ccaattatctgtttttaatactacttaaaaattccaaaaaaaattccatacttacttcagaagctacctttaagagtaaaaacttacttaaaaaaattttttttattttagatttagggggtatatgtgcatgtctggtatatatgtatattgtgtattggtggggactgggcttctagtatacccattacccaaacagtgaacgttgtacccggtaggttgttcttcaccccttgttcttttcccacctttcccccttttggagtccccagtgtctattatttccatctttatgtccgtgtgtacctactgtttggctcccacttatgagtgagaatgtgcagtgtttgattttctgtttctgagttagttcattaaggataattggcctccagctccaatcatgttgctgcaaaggacatgacttgattctttttatgcctgcatagtattccatggtgcatatgtaccacattttctttatctaatcaactgttgatggacagttaggttagttccatgactttgctattatataataaatggtgctgtgatgaaaaaaaaa

SEQ ID NO: 58156 - DNA, 580 bp, Homo sapiens
tgaggcagcagagttcacctcagcctcctgagtagctgggattactgtcatgcgccactacacctggctaatttttgtattttcagtagagaccaggtttcaccatgttgcccaggctggtctcgaactcctgatctcaggtgatctgcctaccttggcttcccaaagtgctaggattacagacctgaactaccacacgcggcccctccctccactttggactgcacatgcctcctttattcacttaagagaaaggtgaggaacaaagaaaggctaaaagacacgtcacattattaataatcttggctagttgtaacaaagtaaaataaaatgtctcaataaatttttaaatctttgttgcttggcttgtctcattttagcattgagaatcaagcttaaatatccaagtaatcagttataagaatacacaggaaataatataacacttttattcccagaataaaaatagaatgctttcagtcccgggagctccttttctgtttttcattaaatttttttgatgttgctgacacatcccatttaaacgtaatttttatttccttagatatttttgaataaa

SEQ ID NO: 58157 - DNA, 504 bp, Homo sapiens
ctgcttataatctgcccatggtaagcctgtgatctcattagtgagttgatagacatttacaaacagtcaaattgcctatcatctcatgcattgtggacattctgtcagatccttagctcaaattaggcttcatattcatttagatatattgtgattctgccttggaaaatctttcaacaggcagacttagatttgatttatttcagtaaaacatcttctactttgtggcttgtttcatttctattccactataatgatatttccctgaataacatagcaagtgatttagtggttttgtaaacctgcactatgtaataatgcatgatttggggtacaatatgctggattttatcacttggcaaaatgagagaaatgagacagaagtcaagaatttccatgcatttctttcaaaatttaaatgatgagttttccaattaaattttcttgtgatatagtctcacgttaatgctgaaatgttaaaaaaagaagactctttaacactga

SEQ ID NO: 58158 - DNA, 312 bp, Homo sapiens
gtctttcctagtttggagatgaagtgggggtgtgggctcccctgttttcccaaagcctctttggagaggaaggtgctctaaggctatgtgtggtatgtagtcgggtttctggggaagagaaggctttgaggctagagtgtctgtcccatcccccatcatttctaactagccccccagctctaggagttatctttctccgaaggccccaaatgattattcagtctgggaggggaagaaggtgaatgaaatataagaacttggggagggaaaggatgtctcttactggctacacccacaaacgtgcatatttgt

SEQ ID NO: 58159 - DNA, 385 bp, Homo sapiens
caatgattcccaaacttgaccatgtcctagacctcatccccagagtttctgatccaggatgtctggggtgaggcccaagaatttgcattttcagcaagtacgcaggtgatgctggtgctgccagtcccaggaccacagtaggaaccactgctttagtgtgtggacaggatgctaggtgaaatgttccttttggaggcagggaggacattcaggaaacagatgaggacaaagaaggagagaaacagaagtttgtgcccacttcctcttgctcccagcttgtggcaacccttgtgttttcccactttccctgcaccaacaaaacctgacaaaatctgcttagagaagagtctcctggcatcagaattgtactttacttaaaggcaaa

SEQ ID NO: 58160 - DNA, 323 bp, Homo sapiens
tccccatatcctcaacaacacttgttattttccattttttaataatagtcatcatagtaagtgtgaagtgatagcttggagttttaatttgtatgtctccattgactaatgatgttgacatcttttcaagtgcttattggccatttgtttatcttctttggagaaatgtttattcaagccttttgtccattgtaagatggacaaaaatggttgtctttttgttgtttgtttacaaccattttgttttaaaatgttttgtctttttgttgttgaattgtagaagttttttatatactttgggtattaaaccttaacatatatac

SEQ ID NO: 58161 - DNA, 1070 bp, Homo sapiens
ttatttactctgaaacatttaatgctaactcatttatattttgtgaaacgatgagtgtatggctggagttcgggtggtagggtggagaggcttgcattcctgtgccatttccccattcccaccagtgcccaactggacagtgattagtatcccctctccagactcaacgtcttcaacattttcgtttttctttctcacagttgagaaaatctaagaggctctcgacaacatggcatgcatctgtgaaaatcccactgcccttatattagtcttcattgaccatataaaaaatctttgactcaaatatatgaaaagcagtcagcatttccctttggccactggaaagcttgaggctgaataatatcagttctgcaaagtgctggcaatgcatcctaatgaattttccatgatgcatgtagtgccttgtacacaatgatcaagaaatgcttcattgaatcagaaattaatctattttataaagtgcttacattgaatctctttccatacagcctcatttcttgccccccttgagccttttgttcctgttagaatgaactgtgcaattcctaaagtccctgtgctctttcatacctctgtgttttagctcgatgtgtctctgtctgaagcagcttggaatccccttcttaatttttaagacttaaggtcacttctatgatgaccctattcctcatttcttaggtggaaagacccctctctcctttgaagccctaacagtgctctgaatagaatcaatgccttttttgtttccacatatatcatcctccactgctactgtgaactctgtaaagtcagaacatgtgtgactgacctttacatctgcagtgccaggtgtgtagttggtatctagtgagtggttttagtgaatgaatatactgcagtcatactgagataactggagggatcaataggacttactgccatacatttaaatccgatctcattctctttttgccagttaacaggttacttcaatctgttttataaataatctgtgtatcaagagtaaataagtacagtttcgttttctctgtttctagaaggcatttcag
